United States Patent Application Publication US 2025/0051457 A1 - sequence listing, part 2

SEQ ID NO: 17421 - DNA, 27 bp, synthetic construct
  misc_feature 1..27: note = Description of Artificial Sequence: Synthetic oligonucleotide
  source 1..27: mol_type = other DNA
ctacaacataatagttacccattcact

SEQ ID NO: 17422 - protein, 9 aa, synthetic construct
  REGION 1..9: note = Description of Artificial Sequence: Synthetic peptide
LQHNSYPFT

SEQ ID NO: 17423 - DNA, 27 bp, synthetic construct
  misc_feature 1..27: note = Description of Artificial Sequence: Synthetic oligonucleotide
  source 1..27: mol_type = other DNA
caacagtatcatagtttccctctcact

SEQ ID NO: 17424 - protein, 9 aa, synthetic construct
  REGION 1..9: note = Description of Artificial Sequence: Synthetic peptide
QQYHSFPLT

SEQ ID NO: 17425 - DNA, 27 bp, synthetic construct
  misc_feature 1..27: note = Description of Artificial Sequence: Synthetic oligonucleotide
  source 1..27: mol_type = other DNA
ctacagcataatagttaccctctcact

SEQ ID NO: 17426 - protein, 9 aa, synthetic construct
  REGION 1..9: note = Description of Artificial Sequence: Synthetic peptide
LQHNSYPLT

SEQ ID NO: 17427 - DNA, 27 bp, synthetic construct
  misc_feature 1..27: note = Description of Artificial Sequence: Synthetic oligonucleotide
  source 1..27: mol_type = other DNA
atacaaagtatacaacttccgatcacc

SEQ ID NO: 17428 - protein, 9 aa, synthetic construct
  REGION 1..9: note = Description of Artificial Sequence: Synthetic peptide
IQSIQLPIT

SEQ ID NO: 17429 - DNA, 27 bp, synthetic construct
  misc_feature 1..27: note = Description of Artificial Sequence: Synthetic oligonucleotide
  source 1..27: mol_type = other DNA
caacagtgtgataatctcccgctcact

SEQ ID NO: 17430 - protein, 9 aa, synthetic construct
  REGION 1..9: note = Description of Artificial Sequence: Synthetic peptide
QQCDNLPLT

SEQ ID NO: 17431 - DNA, 27 bp, synthetic construct
  misc_feature 1..27: note = Description of Artificial Sequence: Synthetic oligonucleotide
  source 1..27: mol_type = other DNA
caacagagttacagtccccctctcact

SEQ ID NO: 17432 - protein, 9 aa, synthetic construct
  REGION 1..9: note = Description of Artificial Sequence: Synthetic peptide
QQSYSPPLT

SEQ ID NO: 17433 - DNA, 27 bp, synthetic construct
  misc_feature 1..27: note = Description of Artificial Sequence: Synthetic oligonucleotide
  source 1..27: mol_type = other DNA
caacagactaacagtttcccattcact

SEQ ID NO: 17434 - protein, 9 aa, synthetic construct
  REGION 1..9: note = Description of Artificial Sequence: Synthetic peptide
QQTNSFPFT

SEQ ID NO: 17435 - DNA, 27 bp, synthetic construct
  misc_feature 1..27: note = Description of Artificial Sequence: Synthetic oligonucleotide
  source 1..27: mol_type = other DNA
ctacagcataatcgttacccattcact

SEQ ID NO: 17436 - protein, 9 aa, synthetic construct
  REGION 1..9: note = Description of Artificial Sequence: Synthetic peptide
LQHNRYPFT

SEQ ID NO: 17437 - DNA, 24 bp, synthetic construct
  misc_feature 1..24: note = Description of Artificial Sequence: Synthetic oligonucleotide
  source 1..24: mol_type = other DNA
caacagtatgataatctgatcacc

SEQ ID NO: 17438 - protein, 8 aa, synthetic construct
  REGION 1..8: note = Description of Artificial Sequence: Synthetic peptide
QQYDNLIT

SEQ ID NO: 17439 - DNA, 27 bp, synthetic construct
  misc_feature 1..27: note = Description of Artificial Sequence: Synthetic oligonucleotide
  source 1..27: mol_type = other DNA
caacagtataatagttatcctctcact

SEQ ID NO: 17440 - protein, 9 aa, synthetic construct
  REGION 1..9: note = Description of Artificial Sequence: Synthetic peptide
QQYNSYPLT

SEQ ID NO: 17441 - DNA, 27 bp, synthetic construct
  misc_feature 1..27: note = Description of Artificial Sequence: Synthetic oligonucleotide
  source 1..27: mol_type = other DNA
cagcaatattatagtactcctccgacg

SEQ ID NO: 17442 - protein, 9 aa, synthetic construct
  REGION 1..9: note = Description of Artificial Sequence: Synthetic peptide
QQYYSTPPT

SEQ ID NO: 17443 - DNA, 27 bp, synthetic construct
  misc_feature 1..27: note = Description of Artificial Sequence: Synthetic oligonucleotide
  source 1..27: mol_type = other DNA
ctacaggataatagtcacccgttcact

SEQ ID NO: 17444 - protein, 9 aa, synthetic construct
  REGION 1..9: note = Description of Artificial Sequence: Synthetic peptide
LQDNSHPFT

SEQ ID NO: 17445 - DNA, 27 bp, synthetic construct
  misc_feature 1..27: note = Description of Artificial Sequence: Synthetic oligonucleotide
  source 1..27: mol_type = other DNA
caacagagttacagtaccccattcact

SEQ ID NO: 17446 - protein, 9 aa, synthetic construct
  REGION 1..9: note = Description of Artificial Sequence: Synthetic peptide
QQSYSTPFT

SEQ ID NO: 17447 - DNA, 27 bp, synthetic construct
  misc_feature 1..27: note = Description of Artificial Sequence: Synthetic oligonucleotide
  source 1..27: mol_type = other DNA
ctacagtataatagttacccattcact

SEQ ID NO: 17448 - protein, 9 aa, synthetic construct
  REGION 1..9: note = Description of Artificial Sequence: Synthetic peptide
LQYNSYPFT

SEQ ID NO: 17449 - DNA, 27 bp, synthetic construct
  misc_feature 1..27: note = Description of Artificial Sequence: Synthetic oligonucleotide
  source 1..27: mol_type = other DNA
caacaggctaacagtttcccattcact

SEQ ID NO: 17450 - protein, 9 aa, synthetic construct
  REGION 1..9: note = Description of Artificial Sequence: Synthetic peptide
QQANSFPFT

SEQ ID NO: 17451 - DNA, 27 bp, synthetic construct
  misc_feature 1..27: note = Description of Artificial Sequence: Synthetic oligonucleotide
  source 1..27: mol_type = other DNA
caacagacttacagtccccctctcact

SEQ ID NO: 17452 - protein, 9 aa, synthetic construct
  REGION 1..9: note = Description of Artificial Sequence: Synthetic peptide
QQTYSPPLT

SEQ ID NO: 17453 - DNA, 27 bp, synthetic construct
  misc_feature 1..27: note = Description of Artificial Sequence: Synthetic oligonucleotide
  source 1..27: mol_type = other DNA
caacaggctaacagtttcccattcact

SEQ ID NO: 17454 - protein, 9 aa, synthetic construct
  REGION 1..9: note = Description of Artificial Sequence: Synthetic peptide
QQANSFPFT

SEQ ID NO: 17455 - DNA, 27 bp, synthetic construct
  misc_feature 1..27: note = Description of Artificial Sequence: Synthetic oligonucleotide
  source 1..27: mol_type = other DNA
caacaggctaacagtttcccattcact

SEQ ID NO: 17456 - protein, 9 aa, synthetic construct
  REGION 1..9: note = Description of Artificial Sequence: Synthetic peptide
QQANSFPFT

SEQ ID NO: 17457 - DNA, 27 bp, synthetic construct
  misc_feature 1..27: note = Description of Artificial Sequence: Synthetic oligonucleotide
  source 1..27: mol_type = other DNA
ctacagcataatagttatccgtggacg

SEQ ID NO: 17458 - protein, 9 aa, synthetic construct
  REGION 1..9: note = Description of Artificial Sequence: Synthetic peptide
LQHNSYPWT

SEQ ID NO: 17459 - DNA, 27 bp, synthetic construct
  misc_feature 1..27: note = Description of Artificial Sequence: Synthetic oligonucleotide
  source 1..27: mol_type = other DNA
ctacagcataatcgttaccctttcact

SEQ ID NO: 17460 - protein, 9 aa, synthetic construct
  REGION 1..9: note = Description of Artificial Sequence: Synthetic peptide
LQHNRYPFT

SEQ ID NO: 17461 - DNA, 27 bp, synthetic construct
  misc_feature 1..27: note = Description of Artificial Sequence: Synthetic oligonucleotide
  source 1..27: mol_type = other DNA
atgcaaagtacacagcttccgctcacc

SEQ ID NO: 17462 - protein, 9 aa, synthetic construct
  REGION 1..9: note = Description of Artificial Sequence: Synthetic peptide
MQSTQLPLT

SEQ ID NO: 17463 - DNA, 27 bp, synthetic construct
  misc_feature 1..27: note = Description of Artificial Sequence: Synthetic oligonucleotide
  source 1..27: mol_type = other DNA
ctacagcataatagttacccgtggacg

SEQ ID NO: 17464 - protein, 9 aa, synthetic construct
  REGION 1..9: note = Description of Artificial Sequence: Synthetic peptide
LQHNSYPWT

SEQ ID NO: 17465 - DNA, 27 bp, synthetic construct
  misc_feature 1..27: note = Description of Artificial Sequence: Synthetic oligonucleotide
  source 1..27: mol_type = other DNA
atgcaaagtatacagcttccgctcact

SEQ ID NO: 17466 - protein, 9 aa, synthetic construct
  REGION 1..9: note = Description of Artificial Sequence: Synthetic peptide
MQSIQLPLT

SEQ ID NO: 17467 - DNA, 27 bp, synthetic construct
  misc_feature 1..27: note = Description of Artificial Sequence: Synthetic oligonucleotide
  source 1..27: mol_type = other DNA
ctacagcataatagttaccctttcact

SEQ ID NO: 17468 - protein, 9 aa, synthetic construct
  REGION 1..9: note = Description of Artificial Sequence: Synthetic peptide
LQHNSYPFT

SEQ ID NO: 17469 - DNA, 27 bp, synthetic construct
  misc_feature 1..27: note = Description of Artificial Sequence: Synthetic oligonucleotide
  source 1..27: mol_type = other DNA
ctacagcataatagttacccgtggacg

SEQ ID NO: 17470 - protein, 9 aa, synthetic construct
  REGION 1..9: note = Description of Artificial Sequence: Synthetic peptide
LQHNSYPWT

SEQ ID NO: 17471 - DNA, 27 bp, synthetic construct
  misc_feature 1..27: note = Description of Artificial Sequence: Synthetic oligonucleotide
  source 1..27: mol_type = other DNA
cagcaatattatagtactccgtgcagt

SEQ ID NO: 17472 - protein, 9 aa, synthetic construct
  REGION 1..9: note = Description of Artificial Sequence: Synthetic peptide
QQYYSTPCS

SEQ ID NO: 17473 - DNA, 27 bp, synthetic construct
  misc_feature 1..27: note = Description of Artificial Sequence: Synthetic oligonucleotide
  source 1..27: mol_type = other DNA
caacaatataaaagtcacccattcact

SEQ ID NO: 17474 - protein, 9 aa, synthetic construct
  REGION 1..9: note = Description of Artificial Sequence: Synthetic peptide
QQYKSHPFT

SEQ ID NO: 17475 - DNA, 27 bp, synthetic construct
  misc_feature 1..27: note = Description of Artificial Sequence: Synthetic oligonucleotide
  source 1..27: mol_type = other DNA
ctacagtttcatagttacccattcact

SEQ ID NO: 17476 - protein, 9 aa, synthetic construct
  REGION 1..9: note = Description of Artificial Sequence: Synthetic peptide
LQFHSYPFT

SEQ ID NO: 17477 - DNA, 27 bp, synthetic construct
  misc_feature 1..27: note = Description of Artificial Sequence: Synthetic oligonucleotide
  source 1..27: mol_type = other DNA
ctacagcatagtagttacccgctcact

SEQ ID NO: 17478 - protein, 9 aa, synthetic construct
  REGION 1..9: note = Description of Artificial Sequence: Synthetic peptide
LQHSSYPLT

SEQ ID NO: 17479 - DNA, 27 bp, synthetic construct
  misc_feature 1..27: note = Description of Artificial Sequence: Synthetic oligonucleotide
  source 1..27: mol_type = other DNA
cagcagtataataactggccattcact

SEQ ID NO: 17480 - protein, 9 aa, synthetic construct
  REGION 1..9: note = Description of Artificial Sequence: Synthetic peptide
QQYNNWPFT

SEQ ID NO: 17481 - DNA, 27 bp, synthetic construct
  misc_feature 1..27: note = Description of Artificial Sequence: Synthetic oligonucleotide
  source 1..27: mol_type = other DNA
caacaggctaacagtttcccgtggacg

SEQ ID NO: 17482 - protein, 9 aa, synthetic construct
  REGION 1..9: note = Description of Artificial Sequence: Synthetic peptide
QQANSFPWT

SEQ ID NO: 17483 - DNA, 27 bp, synthetic construct
  misc_feature 1..27: note = Description of Artificial Sequence: Synthetic oligonucleotide
  source 1..27: mol_type = other DNA
atgcaaagtataaagtatccgctcact

SEQ ID NO: 17484 - protein, 9 aa, synthetic construct
  REGION 1..9: note = Description of Artificial Sequence: Synthetic peptide
MQSIKYPLT

SEQ ID NO: 17485 - DNA, 27 bp, synthetic construct
  misc_feature 1..27: note = Description of Artificial Sequence: Synthetic oligonucleotide
  source 1..27: mol_type = other DNA
caacagagttacaatatttcattcact

SEQ ID NO: 17486 - protein, 9 aa, synthetic construct
  REGION 1..9: note = Description of Artificial Sequence: Synthetic peptide
QQSYNISFT

SEQ ID NO: 17487 - DNA, 27 bp, synthetic construct
  misc_feature 1..27: note = Description of Artificial Sequence: Synthetic oligonucleotide
  source 1..27: mol_type = other DNA
caacagagttacaatatttcattcact

SEQ ID NO: 17488 - protein, 9 aa, synthetic construct
  REGION 1..9: note = Description of Artificial Sequence: Synthetic peptide
QQSYNISFT

SEQ ID NO: 17489 - DNA, 27 bp, synthetic construct
  misc_feature 1..27: note = Description of Artificial Sequence: Synthetic oligonucleotide
  source 1..27: mol_type = other DNA
ctacagcataatagttacccgtggacg

SEQ ID NO: 17490 - protein, 9 aa, synthetic construct
  REGION 1..9: note = Description of Artificial Sequence: Synthetic peptide
LQHNSYPWT

SEQ ID NO: 17491 - DNA, 27 bp, synthetic construct
  misc_feature 1..27: note = Description of Artificial Sequence: Synthetic oligonucleotide
  source 1..27: mol_type = other DNA
ctacagcattatagttaccctcgcagt

SEQ ID NO: 17492 - protein, 9 aa, synthetic construct
  REGION 1..9: note = Description of Artificial Sequence: Synthetic peptide
LQHYSYPRS

SEQ ID NO: 17493 - DNA, 27 bp, synthetic construct
  misc_feature 1..27: note = Description of Artificial Sequence: Synthetic oligonucleotide
  source 1..27: mol_type = other DNA
atgcaaagtatacagcttccgctcact

SEQ ID NO: 17494 - protein, 9 aa, synthetic construct
  REGION 1..9: note = Description of Artificial Sequence: Synthetic peptide
MQSIQLPLT

SEQ ID NO: 17495 - DNA, 27 bp, synthetic construct
  misc_feature 1..27: note = Description of Artificial Sequence: Synthetic oligonucleotide
  source 1..27: mol_type = other DNA
cagcaatattatagtattccgtgcagt

SEQ ID NO: 17496 - protein, 9 aa, synthetic construct
  REGION 1..9: note = Description of Artificial Sequence: Synthetic peptide
QQYYSIPCS

SEQ ID NO: 17497 - DNA, 27 bp, synthetic construct
  misc_feature 1..27: note = Description of Artificial Sequence: Synthetic oligonucleotide
  source 1..27: mol_type = other DNA
cagcaatattatagtactcctccgacg

SEQ ID NO: 17498 - protein, 9 aa, synthetic construct
  REGION 1..9: note = Description of Artificial Sequence: Synthetic peptide
QQYYSTPPT

SEQ ID NO: 17499 - DNA, 27 bp, synthetic construct
  misc_feature 1..27: note = Description of Artificial Sequence: Synthetic oligonucleotide
  source 1..27: mol_type = other DNA
caacagagttacagtatcccgtggacg

SEQ ID NO: 17500 - protein, 9 aa, synthetic construct
  REGION 1..9: note = Description of Artificial Sequence: Synthetic peptide
QQSYSIPWT

SEQ ID NO: 17501 - DNA, 30 bp, synthetic construct
  misc_feature 1..30: note = Description of Artificial Sequence: Synthetic oligonucleotide
  source 1..30: mol_type = other DNA
ctacaacataatagtttccctccgtggacg

SEQ ID NO: 17502 - protein, 10 aa, synthetic construct
  REGION 1..10: note = Description of Artificial Sequence: Synthetic peptide
LQHNSFPPWT

SEQ ID NO: 17503 - DNA, 27 bp, synthetic construct
  misc_feature 1..27: note = Description of Artificial Sequence: Synthetic oligonucleotide
  source 1..27: mol_type = other DNA
ctgcaagctctacaaactcctctcacc

SEQ ID NO: 17504 - protein, 9 aa, synthetic construct
  REGION 1..9: note = Description of Artificial Sequence: Synthetic peptide
LQALQTPLT

SEQ ID NO: 17505 - DNA, 27 bp, synthetic construct
  misc_feature 1..27: note = Description of Artificial Sequence: Synthetic oligonucleotide
  source 1..27: mol_type = other DNA
caacagagttacagtaccccattcact

SEQ ID NO: 17506 - protein, 9 aa, synthetic construct
  REGION 1..9: note = Description of Artificial Sequence: Synthetic peptide
QQSYSTPFT

SEQ ID NO: 17507 - DNA, 27 bp, synthetic construct
  misc_feature 1..27: note = Description of Artificial Sequence: Synthetic oligonucleotide
  source 1..27: mol_type = other DNA
caacagacttacagtcccccgctcact

SEQ ID NO: 17508 - protein, 9 aa, synthetic construct
  REGION 1..9: note = Description of Artificial Sequence: Synthetic peptide
QQTYSPPLT

SEQ ID NO: 17509 - DNA, 27 bp, synthetic construct
  misc_feature 1..27: note = Description of Artificial Sequence: Synthetic oligonucleotide
  source 1..27: mol_type = other DNA
ctacagcatagtaattaccctctcact

SEQ ID NO: 17510 - protein, 9 aa, synthetic construct
  REGION 1..9: note = Description of Artificial Sequence: Synthetic peptide
LQHSNYPLT

SEQ ID NO: 17511 - DNA, 27 bp, synthetic construct
  misc_feature 1..27: note = Description of Artificial Sequence: Synthetic oligonucleotide
  source 1..27: mol_type = other DNA
ctacagtataatagttacccattcact

SEQ ID NO: 17512 - protein, 9 aa, synthetic construct
  REGION 1..9: note = Description of Artificial Sequence: Synthetic peptide
LQYNSYPFT

SEQ ID NO: 17513 - DNA, 27 bp, synthetic construct
  misc_feature 1..27: note = Description of Artificial Sequence: Synthetic oligonucleotide
  source 1..27: mol_type = other DNA
ctacagcataatagttatccgctcact

SEQ ID NO: 17514 - protein, 9 aa, synthetic construct
  REGION 1..9: note = Description of Artificial Sequence: Synthetic peptide
LQHNSYPLT

SEQ ID NO: 17515 - DNA, 27 bp, synthetic construct
  misc_feature 1..27: note = Description of Artificial Sequence: Synthetic oligonucleotide
  source 1..27: mol_type = other DNA
cagcagtataatgactggccgtgtagt

SEQ ID NO: 17516 - protein, 9 aa, synthetic construct
  REGION 1..9: note = Description of Artificial Sequence: Synthetic peptide
QQYNDWPCS

SEQ ID NO: 17517 - DNA, 30 bp, synthetic construct
  misc_feature 1..30: note = Description of Artificial Sequence: Synthetic oligonucleotide
  source 1..30: mol_type = other DNA
ctacagtataatagttaccctccgtggacg

SEQ ID NO: 17518 - protein, 10 aa, synthetic construct
  REGION 1..10: note = Description of Artificial Sequence: Synthetic peptide
LQYNSYPPWT

SEQ ID NO: 17519 - DNA, 27 bp, synthetic construct
  misc_feature 1..27: note = Description of Artificial Sequence: Synthetic oligonucleotide
  source 1..27: mol_type = other DNA
caacagactaacagtttccctctcact

SEQ ID NO: 17520 - protein, 9 aa, synthetic construct
  REGION 1..9: note = Description of Artificial Sequence: Synthetic peptide
QQTNSFPLT

SEQ ID NO: 17521 - DNA, 27 bp, synthetic construct
  misc_feature 1..27: note = Description of Artificial Sequence: Synthetic oligonucleotide
  source 1..27: mol_type = other DNA
catcagtataatagtttcccatttaag

SEQ ID NO: 17522 - protein, 9 aa, synthetic construct
  REGION 1..9: note = Description of Artificial Sequence: Synthetic peptide
HQYNSFPFK

SEQ ID NO: 17523 - DNA, 27 bp, synthetic construct
  misc_feature 1..27: note = Description of Artificial Sequence: Synthetic oligonucleotide
  source 1..27: mol_type = other DNA
ctacaggataatagttacccattcact

SEQ ID NO: 17524 - protein, 9 aa, synthetic construct
  REGION 1..9: note = Description of Artificial Sequence: Synthetic peptide
LQDNSYPFT

SEQ ID NO: 17525 - DNA, 27 bp, synthetic construct
  misc_feature 1..27: note = Description of Artificial Sequence: Synthetic oligonucleotide
  source 1..27: mol_type = other DNA
ctacagcataatagttacccattcact

SEQ ID NO: 17526 - protein, 9 aa, synthetic construct
  REGION 1..9: note = Description of Artificial Sequence: Synthetic peptide
LQHNSYPFT

SEQ ID NO: 17527 - DNA, 27 bp, synthetic construct
  misc_feature 1..27: note = Description of Artificial Sequence: Synthetic oligonucleotide
  source 1..27: mol_type = other DNA
caacagagttacaatatttcattcact

SEQ ID NO: 17528 - protein, 9 aa, synthetic construct
  REGION 1..9: note = Description of Artificial Sequence: Synthetic peptide
QQSYNISFT

SEQ ID NO: 17529 - DNA, 27 bp, synthetic construct
  misc_feature 1..27: note = Description of Artificial Sequence: Synthetic oligonucleotide
  source 1..27: mol_type = other DNA
cagcagtataatgactggccgtgcagt

SEQ ID NO: 17530 - protein, 9 aa, synthetic construct
  REGION 1..9: note = Description of Artificial Sequence: Synthetic peptide
QQYNDWPCS

SEQ ID NO: 17531 - DNA, 27 bp, synthetic construct
  misc_feature 1..27: note = Description of Artificial Sequence: Synthetic oligonucleotide
  source 1..27: mol_type = other DNA
ctacagcataatagttacccattcact

SEQ ID NO: 17532 - protein, 9 aa, synthetic construct
  REGION 1..9: note = Description of Artificial Sequence: Synthetic peptide
LQHNSYPFT

SEQ ID NO: 17533 - DNA, 27 bp, synthetic construct
  misc_feature 1..27: note = Description of Artificial Sequence: Synthetic oligonucleotide
  source 1..27: mol_type = other DNA
caacagggtaacagtttcccattcact

SEQ ID NO: 17534 - protein, 9 aa, synthetic construct
  REGION 1..9: note = Description of Artificial Sequence: Synthetic peptide
QQGNSFPFT

SEQ ID NO: 17535 - DNA, 27 bp, synthetic construct
  misc_feature 1..27: note = Description of Artificial Sequence: Synthetic oligonucleotide
  source 1..27: mol_type = other DNA
ctacagtatggtagtttcccattcact

SEQ ID NO: 17536 - protein, 9 aa, synthetic construct
  REGION 1..9: note = Description of Artificial Sequence: Synthetic peptide
LQYGSFPFT

SEQ ID NO: 17537 - DNA, 27 bp, synthetic construct
  misc_feature 1..27: note = Description of Artificial Sequence: Synthetic oligonucleotide
  source 1..27: mol_type = other DNA
caacaggctaacagtttcccattcact

SEQ ID NO: 17538 - protein, 9 aa, synthetic construct
  REGION 1..9: note = Description of Artificial Sequence: Synthetic peptide
QQANSFPFT

SEQ ID NO: 17539 - DNA, 27 bp, synthetic construct
  misc_feature 1..27: note = Description of Artificial Sequence: Synthetic oligonucleotide
  source 1..27: mol_type = other DNA
cagcagtatagtaactggccattcact

SEQ ID NO: 17540 - protein, 9 aa, synthetic construct
  REGION 1..9: note = Description of Artificial Sequence: Synthetic peptide
QQYSNWPFT

SEQ ID NO: 17541 - DNA, 30 bp, synthetic construct; identical to SEQ ID NO: 17501
  misc_feature 1..30: note = Description of Artificial Sequence: Synthetic oligonucleotide
  source 1..30: mol_type = other DNA

SEQ ID NO: 17542 - protein, 10 aa, synthetic construct
  REGION 1..10: note = Description of Artificial Sequence: Synthetic peptide
LQHNSFPPWT

SEQ ID NO: 17543 - DNA, 27 bp, synthetic construct
  misc_feature 1..27: note = Description of Artificial Sequence: Synthetic oligonucleotide
  source 1..27: mol_type = other DNA
caacaggctaacagtttcccgtggacg

SEQ ID NO: 17544 - protein, 9 aa, synthetic construct
  REGION 1..9: note = Description of Artificial Sequence: Synthetic peptide
QQANSFPWT

SEQ ID NO: 17545 - DNA, 27 bp, synthetic construct
  misc_feature 1..27: note = Description of Artificial Sequence: Synthetic oligonucleotide
  source 1..27: mol_type = other DNA
cagcaatattatagtactccgtggacg

SEQ ID NO: 17546 - protein, 9 aa, synthetic construct
  REGION 1..9: note = Description of Artificial Sequence: Synthetic peptide
QQYYSTPWT

SEQ ID NO: 17547 - DNA, 27 bp, synthetic construct
  misc_feature 1..27: note = Description of Artificial Sequence: Synthetic oligonucleotide
  source 1..27: mol_type = other DNA
cagcaatattatagtaatccgtgtagt

SEQ ID NO: 17548 - protein, 9 aa, synthetic construct
  REGION 1..9: note = Description of Artificial Sequence: Synthetic peptide
QQYYSNPCS

SEQ ID NO: 17549 - DNA, 27 bp, synthetic construct
  misc_feature 1..27: note = Description of Artificial Sequence: Synthetic oligonucleotide
  source 1..27: mol_type = other DNA
cagcagtatgataactggccattcact

SEQ ID NO: 17550 - protein, 9 aa, synthetic construct
  REGION 1..9: note = Description of Artificial Sequence: Synthetic peptide
QQYDNWPFT

SEQ ID NO: 17551 - DNA, 27 bp, synthetic construct
  misc_feature 1..27: note = Description of Artificial Sequence: Synthetic oligonucleotide
  source 1..27: mol_type = other DNA
cagcagtttaataactggccattcact

SEQ ID NO: 17552 - protein, 9 aa, synthetic construct
  REGION 1..9: note = Description of Artificial Sequence: Synthetic peptide
QQFNNWPFT

SEQ ID NO: 17553 - DNA, 27 bp, synthetic construct
  misc_feature 1..27: note = Description of Artificial Sequence: Synthetic oligonucleotide
  source 1..27: mol_type = other DNA
ctacagcataatagttacccattcact

SEQ ID NO: 17554 - protein, 9 aa, synthetic construct
  REGION 1..9: note = Description of Artificial Sequence: Synthetic peptide
LQHNSYPFT

SEQ ID NO: 17555 - DNA, 27 bp, synthetic construct
  misc_feature 1..27: note = Description of Artificial Sequence: Synthetic oligonucleotide
  source 1..27: mol_type = other DNA
cagcaatattatagtactcctccgacg

SEQ ID NO: 17556 - protein, 9 aa, synthetic construct
  REGION 1..9: note = Description of Artificial Sequence: Synthetic peptide
QQYYSTPPT

SEQ ID NO: 17557 - DNA, 27 bp, synthetic construct
  misc_feature 1..27: note = Description of Artificial Sequence: Synthetic oligonucleotide
  source 1..27: mol_type = other DNA
cagcagtataataactggccattcact

SEQ ID NO: 17558 - protein, 9 aa, synthetic construct
  REGION 1..9: note = Description of Artificial Sequence: Synthetic peptide
QQYNNWPFT

SEQ ID NO: 17559 - DNA, 27 bp, synthetic construct
  misc_feature 1..27: note = Description of Artificial Sequence: Synthetic oligonucleotide
  source 1..27: mol_type = other DNA
ctccagcataataatttcccattcact

SEQ ID NO: 17560 - protein, 9 aa, synthetic construct
  REGION 1..9: note = Description of Artificial Sequence: Synthetic peptide
LQHNNFPFT

SEQ ID NO: 17561 - DNA, 27 bp, synthetic construct
  misc_feature 1..27: note = Description of Artificial Sequence: Synthetic oligonucleotide
  source 1..27: mol_type = other DNA
cagcagtataataactggccattcact

SEQ ID NO: 17562 - protein, 9 aa, synthetic construct
  REGION 1..9: note = Description of Artificial Sequence: Synthetic peptide
QQYNNWPFT

SEQ ID NO: 17563 - DNA, 27 bp, synthetic construct
  misc_feature 1..27: note = Description of Artificial Sequence: Synthetic oligonucleotide
  source 1..27: mol_type = other DNA
atgcaaagtatacagcttccgctcact

SEQ ID NO: 17564 - protein, 9 aa, synthetic construct
  REGION 1..9: note = Description of Artificial Sequence: Synthetic peptide
MQSIQLPLT

SEQ ID NO: 17565 - DNA, 27 bp, synthetic construct
  misc_feature 1..27: note = Description of Artificial Sequence: Synthetic oligonucleotide
  source 1..27: mol_type = other DNA
cagcaatattttagtattccgtgcagt

SEQ ID NO: 17566 - protein, 9 aa, synthetic construct
  REGION 1..9: note = Description of Artificial Sequence: Synthetic peptide
QQYFSIPCS

SEQ ID NO: 17567 - DNA, 27 bp, synthetic construct
  misc_feature 1..27: note = Description of Artificial Sequence: Synthetic oligonucleotide
  source 1..27: mol_type = other DNA
cagcaatatggtacctcaccgtggacg

SEQ ID NO: 17568 - protein, 9 aa, synthetic construct
  REGION 1..9: note = Description of Artificial Sequence: Synthetic peptide
QQYGTSPWT

SEQ ID NO: 17569 - DNA, 30 bp, synthetic construct
  misc_feature 1..30: note = Description of Artificial Sequence: Synthetic oligonucleotide
  source 1..30: mol_type = other DNA
caacagagttacagtacccctatgttcagt

SEQ ID NO: 17570 - protein, 10 aa, synthetic construct
  REGION 1..10: note = Description of Artificial Sequence: Synthetic peptide
QQSYSTPMFS

SEQ ID NO: 17571 - DNA, 27 bp, synthetic construct
  misc_feature 1..27: note = Description of Artificial Sequence: Synthetic oligonucleotide
  source 1..27: mol_type = other DNA
caccagtatggtaactcaccattcact

SEQ ID NO: 17572 - protein, 9 aa, synthetic construct
  REGION 1..9: note = Description of Artificial Sequence: Synthetic peptide
HQYGNSPFT

SEQ ID NO: 17573 - DNA, 27 bp, synthetic construct
  misc_feature 1..27: note = Description of Artificial Sequence: Synthetic oligonucleotide
  source 1..27: mol_type = other DNA
ctacagcataatagttacccgctcact

SEQ ID NO: 17574 - protein, 9 aa, synthetic construct
  REGION 1..9: note = Description of Artificial Sequence: Synthetic peptide
LQHNSYPLT

SEQ ID NO: 17575 - DNA, 27 bp, synthetic construct
  misc_feature 1..27: note = Description of Artificial Sequence: Synthetic oligonucleotide
  source 1..27: mol_type = other DNA
ctacagcataatagttacccgtggacg

SEQ ID NO: 17576 - protein, 9 aa, synthetic construct
  REGION 1..9: note = Description of Artificial Sequence: Synthetic peptide
LQHNSYPWT

SEQ ID NO: 17577 - DNA, 27 bp, synthetic construct
  misc_feature 1..27: note = Description of Artificial Sequence: Synthetic oligonucleotide
  source 1..27: mol_type = other DNA
caacagagtttcagtaattcgatcacc

SEQ ID NO: 17578 - protein, 9 aa, synthetic construct
  REGION 1..9: note = Description of Artificial Sequence: Synthetic peptide
QQSFSNSIT

SEQ ID NO: 17579 - DNA, 27 bp, synthetic construct
  misc_feature 1..27: note = Description of Artificial Sequence: Synthetic oligonucleotide
  source 1..27: mol_type = other DNA
ctacagcataatagttacccgtggacg

SEQ ID NO: 17580 - protein, 9 aa, synthetic construct
  REGION 1..9: note = Description of Artificial Sequence: Synthetic peptide
LQHNSYPWT

SEQ ID NO: 17581 - DNA, 27 bp, synthetic construct
  misc_feature 1..27: note = Description of Artificial Sequence: Synthetic oligonucleotide
  source 1..27: mol_type = other DNA
cagcaatattttagtactcctccgacg

SEQ ID NO: 17582 - protein, 9 aa, synthetic construct
  REGION 1..9: note = Description of Artificial Sequence: Synthetic peptide
QQYFSTPPT

SEQ ID NO: 17583 - DNA, 27 bp, synthetic construct
  misc_feature 1..27: note = Description of Artificial Sequence: Synthetic oligonucleotide
  source 1..27: mol_type = other DNA
caacagagttacagtaccccattcact

SEQ ID NO: 17584 - protein, 9 aa, synthetic construct
  REGION 1..9: note = Description of Artificial Sequence: Synthetic peptide
QQSYSTPFT

SEQ ID NO: 17585 - DNA, 27 bp, synthetic construct
  misc_feature 1..27: note = Description of Artificial Sequence: Synthetic oligonucleotide
  source 1..27: mol_type = other DNA
caacagagttacggtatccccatcacc

SEQ ID NO: 17586 - protein, 9 aa, synthetic construct
  REGION 1..9: note = Description of Artificial Sequence: Synthetic peptide
QQSYGIPIT

SEQ ID NO: 17587 - DNA, 27 bp, synthetic construct
  misc_feature 1..27: note = Description of Artificial Sequence: Synthetic oligonucleotide
  source 1..27: mol_type = other DNA
caacaatatcatagttacccattcact

SEQ ID NO: 17588 - protein, 9 aa, synthetic construct
  REGION 1..9: note = Description of Artificial Sequence: Synthetic peptide
QQYHSYPFT

SEQ ID NO: 17589 - DNA, 27 bp, synthetic construct
  misc_feature 1..27: note = Description of Artificial Sequence: Synthetic oligonucleotide
  source 1..27: mol_type = other DNA
caacagattaacagtttccctctcact

SEQ ID NO: 17590 - protein, 9 aa, synthetic construct
  REGION 1..9: note = Description of Artificial Sequence: Synthetic peptide
QQINSFPLT

SEQ ID NO: 17591 - DNA, 27 bp, synthetic construct
  misc_feature 1..27: note = Description of Artificial Sequence: Synthetic oligonucleotide
  source 1..27: mol_type = other DNA
caacagacttacagtcccccgctcact

SEQ ID NO: 17592 - protein, 9 aa, synthetic construct
  REGION 1..9: note = Description of Artificial Sequence: Synthetic peptide
QQTYSPPLT

SEQ ID NO: 17593 - DNA, 27 bp, synthetic construct
  misc_feature 1..27: note = Description of Artificial Sequence: Synthetic oligonucleotide
  source 1..27: mol_type = other DNA
ctacagcataatagttacccgctcact

SEQ ID NO: 17594 - protein, 9 aa, synthetic construct
  REGION 1..9: note = Description of Artificial Sequence: Synthetic peptide
LQHNSYPLT

SEQ ID NO: 17595 - DNA, 27 bp, synthetic construct
  misc_feature 1..27: note = Description of Artificial Sequence: Synthetic oligonucleotide
  source 1..27: mol_type = other DNA
ctacagcattatagttaccctcggacg

SEQ ID NO: 17596 - protein, 9 aa, synthetic construct
  REGION 1..9: note = Description of Artificial Sequence: Synthetic peptide
LQHYSYPRT

SEQ ID NO: 17597 - DNA, 27 bp, synthetic construct
  misc_feature 1..27: note = Description of Artificial Sequence: Synthetic oligonucleotide
  source 1..27: mol_type = other DNA
caacagagttacaatatttcgttcact

SEQ ID NO: 17598 - protein, 9 aa, synthetic construct
  REGION 1..9: note = Description of Artificial Sequence: Synthetic peptide
QQSYNISFT

SEQ ID NO: 17599 - DNA, 27 bp, synthetic construct
  misc_feature 1..27: note = Description of Artificial Sequence: Synthetic oligonucleotide
  source 1..27: mol_type = other DNA
ctacaccattatagttaccctcggacg

SEQ ID NO: 17600 - protein, 9 aa, synthetic construct
  REGION 1..9: note = Description of Artificial Sequence: Synthetic peptide
LHHYSYPRT

SEQ ID NO: 17601 - DNA, 27 bp, synthetic construct
  misc_feature 1..27: note = Description of Artificial Sequence: Synthetic oligonucleotide
  source 1..27: mol_type = other DNA
atgcaaagtatacaggttccgtggacg

SEQ ID NO: 17602 - protein, 9 aa, synthetic construct
  REGION 1..9: note = Description of Artificial Sequence: Synthetic peptide
MQSIQVPWT

SEQ ID NO: 17603 - DNA, 27 bp, synthetic construct
  misc_feature 1..27: note = Description of Artificial Sequence: Synthetic oligonucleotide
  source 1..27: mol_type = other DNA
caacagattaacagtttccctctcact

SEQ ID NO: 17604 - protein, 9 aa, synthetic construct
  REGION 1..9: note = Description of Artificial Sequence: Synthetic peptide
QQINSFPLT

SEQ ID NO: 17605 - DNA, 27 bp, synthetic construct
  misc_feature 1..27: note = Description of Artificial Sequence: Synthetic oligonucleotide
  source 1..27: mol_type = other DNA
ctacagcataatggttacccattcact

SEQ ID NO: 17606 - protein, 9 aa, synthetic construct
  REGION 1..9: note = Description of Artificial Sequence: Synthetic peptide
LQHNGYPFT

SEQ ID NO: 17607 - DNA, 27 bp, synthetic construct
  misc_feature 1..27: note = Description of Artificial Sequence: Synthetic oligonucleotide
  source 1..27: mol_type = other DNA
caacagagtgataatctcccgtgcagt

SEQ ID NO: 17608 - protein, 9 aa, synthetic construct
  REGION 1..9: note = Description of Artificial Sequence: Synthetic peptide
QQSDNLPCS

SEQ ID NO: 17609 - DNA, 27 bp, synthetic construct
  misc_feature 1..27: note = Description of Artificial Sequence: Synthetic oligonucleotide
  source 1..27: mol_type = other DNA
caacaggctaacagttttccattcact

SEQ ID NO: 17610 - protein, 9 aa, synthetic construct
  REGION 1..9: note = Description of Artificial Sequence: Synthetic peptide
QQANSFPFT

SEQ ID NO: 17611 - DNA, 27 bp, synthetic construct
  misc_feature 1..27: note = Description of Artificial Sequence: Synthetic oligonucleotide
  source 1..27: mol_type = other DNA
caacggccttacaatgccccgctcact

SEQ ID NO: 17612 - protein, 9 aa, synthetic construct
  REGION 1..9: note = Description of Artificial Sequence: Synthetic peptide
QRPYNAPLT

SEQ ID NO: 17613 - DNA, 27 bp, synthetic construct
  misc_feature 1..27: note = Description of Artificial Sequence: Synthetic oligonucleotide
  source 1..27: mol_type = other DNA
caacaggttaacagtttccctctcact

SEQ ID NO: 17614 - protein, 9 aa, synthetic construct
  REGION 1..9: note = Description of Artificial Sequence: Synthetic peptide
QQVNSFPLT

SEQ ID NO: 17615 - DNA, 27 bp, synthetic construct
  misc_feature 1..27: note = Description of Artificial Sequence: Synthetic oligonucleotide
  source 1..27: mol_type = other DNA
ccactgtataaaagttatccactcact

SEQ ID NO: 17616 - protein, 9 aa, synthetic construct
  REGION 1..9: note = Description of Artificial Sequence: Synthetic peptide
PLYKSYPLT

SEQ ID NO: 17617 - DNA, 27 bp, synthetic construct
  misc_feature 1..27: note = Description of Artificial Sequence: Synthetic oligonucleotide
  source 1..27: mol_type = other DNA
cagcagtataatgactggccgtgcagt

SEQ ID NO: 17618 - protein, 9 aa, synthetic construct
  REGION 1..9: note = Description of Artificial Sequence: Synthetic peptide
QQYNDWPCS

SEQ ID NO: 17619 - DNA, 27 bp, synthetic construct
  misc_feature 1..27: note = Description of Artificial Sequence: Synthetic oligonucleotide
  source 1..27: mol_type = other DNA
caacagtataatagtttccctctcact

SEQ ID NO: 17620 - protein, 9 aa, synthetic construct
  REGION 1..9: note = Description of Artificial Sequence: Synthetic peptide
QQYNSFPLT

SEQ ID NO: 17621 - DNA, 27 bp, synthetic construct
  misc_feature 1..27: note = Description of Artificial Sequence: Synthetic oligonucleotide
  source 1..27: mol_type = other DNA
caacagactaacagtttccctctcact

SEQ ID NO: 17622 - protein, 9 aa, synthetic construct
  REGION 1..9: note = Description of Artificial Sequence: Synthetic peptide
QQTNSFPLT

SEQ ID NO: 17623 - DNA, 27 bp, synthetic construct
  misc_feature 1..27: note = Description of Artificial Sequence: Synthetic oligonucleotide
  source 1..27: mol_type = other DNA
caacagattaatagtttccctctcact

SEQ ID NO: 17624 - protein, 9 aa, synthetic construct
  REGION 1..9: note = Description of Artificial Sequence: Synthetic peptide
QQINSFPLT

SEQ ID NO: 17625 - DNA, 27 bp, synthetic construct
  misc_feature 1..27: note = Description of Artificial Sequence: Synthetic oligonucleotide
  source 1..27: mol_type = other DNA
caacagcataataattccccgctcact

SEQ ID NO: 17626 - protein, 9 aa, synthetic construct
  REGION 1..9: note = Description of Artificial Sequence: Synthetic peptide
QQHNNSPLT

SEQ ID NO: 17627 - DNA, 27 bp, synthetic construct
  misc_feature 1..27: note = Description of Artificial Sequence: Synthetic oligonucleotide
  source 1..27: mol_type = other DNA
caacagacttacagtgtccctttcact

SEQ ID NO: 17628 - protein, 9 aa, synthetic construct
  REGION 1..9: note = Description of Artificial Sequence: Synthetic peptide
QQTYSVPFT

SEQ ID NO: 17629 - DNA, 27 bp, synthetic construct
  misc_feature 1..27: note = Description of Artificial Sequence: Synthetic oligonucleotide
  source 1..27: mol_type = other DNA
ctacagtataatagttacccattcact

SEQ ID NO: 17630 - protein, 9 aa, synthetic construct
  REGION 1..9: note = Description of Artificial Sequence: Synthetic peptide
LQYNSYPFT

SEQ ID NO: 17631 - DNA, 30 bp, synthetic construct; identical to SEQ ID NO: 17517
  misc_feature 1..30: note = Description of Artificial Sequence: Synthetic oligonucleotide
  source 1..30: mol_type = other DNA

SEQ ID NO: 17632 - protein, 10 aa, synthetic construct
  REGION 1..10: note = Description of Artificial Sequence: Synthetic peptide
LQYNSYPPWT

SEQ ID NO: 17633 - DNA, 27 bp, synthetic construct
  misc_feature 1..27: note = Description of Artificial Sequence: Synthetic oligonucleotide
  source 1..27: mol_type = other DNA
atagtgcataatagttaccctcggacg

SEQ ID NO: 17634 - protein, 9 aa, synthetic construct
  REGION 1..9: note = Description of Artificial Sequence: Synthetic peptide
IVHNSYPRT

SEQ ID NO: 17635 - DNA, 27 bp, synthetic construct
  misc_feature 1..27: note = Description of Artificial Sequence: Synthetic oligonucleotide
  source 1..27: mol_type = other DNA
caacaggctaacagtttcccattcact

SEQ ID NO: 17636 - protein, 9 aa, synthetic construct
  REGION 1..9: note = Description of Artificial Sequence: Synthetic peptide
QQANSFPFT

SEQ ID NO: 17637 - DNA, 27 bp, synthetic construct
  misc_feature 1..27: note = Description of Artificial Sequence: Synthetic oligonucleotide
  source 1..27: mol_type = other DNA
cagcagtataatgactggccgtgtagt

SEQ ID NO: 17638 - protein, 9 aa, synthetic construct
  REGION 1..9: note = Description of Artificial Sequence: Synthetic peptide
QQYNDWPCS

SEQ ID NO: 17639 - DNA, 27 bp, synthetic construct
  misc_feature 1..27: note = Description of Artificial Sequence: Synthetic oligonucleotide
  source 1..27: mol_type = other DNA
caacagattaacagtttccctctcact

SEQ ID NO: 17640 - protein, 9 aa, synthetic construct
  REGION 1..9: note = Description of Artificial Sequence: Synthetic peptide
QQINSFPLT

SEQ ID NO: 17641 - DNA, 27 bp, synthetic construct
  misc_feature 1..27: note = Description of Artificial Sequence: Synthetic oligonucleotide
  source 1..27: mol_type = other DNA
ctacaccataatagttatccattcaaa

SEQ ID NO: 17642 - protein, 9 aa, synthetic construct
  REGION 1..9: note = Description of Artificial Sequence: Synthetic peptide
LHHNSYPFK

SEQ ID NO: 17643 - DNA, 27 bp, synthetic construct
  misc_feature 1..27: note = Description of Artificial Sequence: Synthetic oligonucleotide
  source 1..27: mol_type = other DNA
caacagtatgatagttacccattcact

SEQ ID NO: 17644 - protein, 9 aa, synthetic construct
  REGION 1..9: note = Description of Artificial Sequence: Synthetic peptide
QQYDSYPFT

SEQ ID NO: 17645 - DNA, 27 bp, synthetic construct
  misc_feature 1..27: note = Description of Artificial Sequence: Synthetic oligonucleotide
  source 1..27: mol_type = other DNA
ctacagtataatagttacccattcact

SEQ ID NO: 17646 - protein, 9 aa, synthetic construct
  REGION 1..9: note = Description of Artificial Sequence: Synthetic peptide
LQYNSYPFT

SEQ ID NO: 17647 - DNA, 27 bp, synthetic construct
  misc_feature 1..27: note = Description of Artificial Sequence: Synthetic oligonucleotide
  source 1..27: mol_type = other DNA
ctacagcataatagttatccgttcact

SEQ ID NO: 17648 - protein, 9 aa, synthetic construct
  REGION 1..9: note = Description of Artificial Sequence: Synthetic peptide
LQHNSYPFT

SEQ ID NO: 17649 - DNA, 27 bp, synthetic construct
  misc_feature 1..27: note = Description of Artificial Sequence: Synthetic oligonucleotide
  source 1..27: mol_type = other DNA
ctacagcatagtacttacccgctcact

SEQ ID NO: 17650 - protein, 9 aa, synthetic construct
  REGION 1..9: note = Description of Artificial Sequence: Synthetic peptide
LQHSTYPLT

SEQ ID NO: 17651 - DNA, 27 bp, synthetic construct
  misc_feature 1..27: note = Description of Artificial Sequence: Synthetic oligonucleotide
  source 1..27: mol_type = other DNA
caacagagttacagtaccccattcact

SEQ ID NO: 17652 - protein, 9 aa, synthetic construct
  REGION 1..9: note = Description of Artificial Sequence: Synthetic peptide
QQSYSTPFT

SEQ ID NO: 17653 - DNA, 27 bp, synthetic construct
  misc_feature 1..27: note = Description of Artificial Sequence: Synthetic oligonucleotide
  source 1..27: mol_type = other DNA
caacaggctaacagtttcccattcact

SEQ ID NO: 17654 - protein, 9 aa, synthetic construct
  REGION 1..9: note = Description of Artificial Sequence: Synthetic peptide
QQANSFPFT

SEQ ID NO: 17655 - DNA, 27 bp, synthetic construct
  misc_feature 1..27: note = Description of Artificial Sequence: Synthetic oligonucleotide
  source 1..27: mol_type = other DNA
cagcagtataatgactggccgtgtagt

SEQ ID NO: 17656 - protein, 9 aa, synthetic construct
  REGION 1..9: note = Description of Artificial Sequence: Synthetic peptide
QQYNDWPCS

SEQ ID NO: 17657 - DNA, 27 bp, synthetic construct
  misc_feature 1..27: note = Description of Artificial Sequence: Synthetic oligonucleotide
  source 1..27: mol_type = other DNA
caacagactaacagtttccctctcact

SEQ ID NO: 17658 - protein, 9 aa, synthetic construct
  REGION 1..9: note = Description of Artificial Sequence: Synthetic peptide
QQTNSFPLT

SEQ ID NO: 17659 - DNA, 27 bp, synthetic construct
  misc_feature 1..27: note = Description of Artificial Sequence: Synthetic oligonucleotide
  source 1..27: mol_type = other DNA
caacagagttacagtatcccgctcact

SEQ ID NO: 17660 - protein, 9 aa, synthetic construct
  REGION 1..9: note = Description of Artificial Sequence: Synthetic peptide
QQSYSIPLT

SEQ ID NO: 17661 - DNA, 27 bp, synthetic construct
  misc_feature 1..27: note = Description of Artificial Sequence: Synthetic oligonucleotide
  source 1..27: mol_type = other DNA
cagcaatattataatattcctccgacg

SEQ ID NO: 17662 - protein, 9 aa, synthetic construct
  REGION 1..9: note = Description of Artificial Sequence: Synthetic peptide
QQYYNIPPT

SEQ ID NO: 17663 - DNA, 27 bp, synthetic construct
  misc_feature 1..27: note = Description of Artificial Sequence: Synthetic oligonucleotide
  source 1..27: mol_type = other DNA
ctacagcataatcgttacccgctcact

SEQ ID NO: 17664 - protein, 9 aa, synthetic construct
  REGION 1..9: note = Description of Artificial Sequence: Synthetic peptide
LQHNRYPLT

SEQ ID NO: 17665 - DNA, 27 bp, synthetic construct
  misc_feature 1..27: note = Description of Artificial Sequence: Synthetic oligonucleotide
  source 1..27: mol_type = other DNA
caacagactaacagtttccctctcact

SEQ ID NO: 17666 - protein, 9 aa, synthetic construct
  REGION 1..9: note = Description of Artificial Sequence: Synthetic peptide
QQTNSFPLT

SEQ ID NO: 17667 - DNA, 27 bp, synthetic construct
  misc_feature 1..27: note = Description of Artificial Sequence: Synthetic oligonucleotide
  source 1..27: mol_type = other DNA
caacagattaacagtttccctctcact

SEQ ID NO: 17668 - protein, 9 aa, synthetic construct
  REGION 1..9: note = Description of Artificial Sequence: Synthetic peptide
QQINSFPLT

SEQ ID NO: 17669 - DNA, 27 bp, synthetic construct
  misc_feature 1..27: note = Description of Artificial Sequence: Synthetic oligonucleotide
  source 1..27: mol_type = other DNA
ctacagcataatagttacccgctcact

SEQ ID NO: 17670 - protein, 9 aa, synthetic construct
  REGION 1..9: note = Description of Artificial Sequence: Synthetic peptide
LQHNSYPLT

SEQ ID NO: 17671 - DNA, 27 bp, synthetic construct
  misc_feature 1..27: note = Description of Artificial Sequence: Synthetic oligonucleotide
  source 1..27: mol_type = other DNA
atacaccataatagttacccgtggacg

SEQ ID NO: 17672 - protein, 9 aa, synthetic construct
  REGION 1..9: note = Description of Artificial Sequence: Synthetic peptide
IHHNSYPWT

SEQ ID NO: 17673 - DNA, 27 bp, synthetic construct
  misc_feature 1..27: note = Description of Artificial Sequence: Synthetic oligonucleotide
  source 1..27: mol_type = other DNA
caacaatattatattactccgtgcagt

SEQ ID NO: 17674 - protein, 9 aa, synthetic construct
  REGION 1..9: note = Description of Artificial Sequence: Synthetic peptide
QQYYITPCS

SEQ ID NO: 17675 - DNA, 27 bp, synthetic construct
  misc_feature 1..27: note = Description of Artificial Sequence: Synthetic oligonucleotide
  source 1..27: mol_type = other DNA
ctacagcataatagttacccattcact

SEQ ID NO: 17676 - protein, 9 aa, synthetic construct
  REGION 1..9: note = Description of Artificial Sequence: Synthetic peptide
LQHNSYPFT

SEQ ID NO: 17677 - DNA, 27 bp, synthetic construct
  misc_feature 1..27: note = Description of Artificial Sequence: Synthetic oligonucleotide
  source 1..27: mol_type = other DNA
ctacagtataatagttacccattcact

SEQ ID NO: 17678 - protein, 9 aa, synthetic construct
  REGION 1..9: note = Description of Artificial Sequence: Synthetic peptide
LQYNSYPFT

SEQ ID NO: 17679 - DNA, 27 bp, synthetic construct
  misc_feature 1..27: note = Description of Artificial Sequence: Synthetic oligonucleotide
  source 1..27: mol_type = other DNA
caacagactaatagtttccctctcact

SEQ ID NO: 17680 - protein, 9 aa, synthetic construct
  REGION 1..9: note = Description of Artificial Sequence: Synthetic peptide
QQTNSFPLT

SEQ ID NO: 17681 - DNA, 27 bp, synthetic construct
  misc_feature 1..27: note = Description of Artificial Sequence: Synthetic oligonucleotide
  source 1..27: mol_type = other DNA
ctacagcataatacttacccattcact

SEQ ID NO: 17682 - protein, 9 aa, synthetic construct
  REGION 1..9: note = Description of Artificial Sequence: Synthetic peptide
LQHNTYPFT

SEQ ID NO: 17683 - DNA, 24 bp, synthetic construct
  misc_feature 1..24: note = Description of Artificial Sequence: Synthetic oligonucleotide
  source 1..24: mol_type = other DNA
caacagacttacagtacccccacc

SEQ ID NO: 17684 - protein, 8 aa, synthetic construct
  REGION 1..8: note = Description of Artificial Sequence: Synthetic peptide
QQTYSTPT

SEQ ID NO: 17685 - DNA, 27 bp, synthetic construct
  misc_feature 1..27: note = Description of Artificial Sequence: Synthetic oligonucleotide
  source 1..27: mol_type = other DNA
caacagaattacaatgccccgctcact

SEQ ID NO: 17686 - protein, 9 aa, synthetic construct
  REGION 1..9: note = Description of Artificial Sequence: Synthetic peptide
QQNYNAPLT

SEQ ID NO: 17687 - DNA, 27 bp, synthetic construct
  misc_feature 1..27: note = Description of Artificial Sequence: Synthetic oligonucleotide
  source 1..27: mol_type = other DNA
caacaggttaacagtttccctctcact

SEQ ID NO: 17688 - protein, 9 aa, synthetic construct
  REGION 1..9: note = Description of Artificial Sequence: Synthetic peptide
QQVNSFPLT

SEQ ID NO: 17689 - DNA, 27 bp, synthetic construct
  misc_feature 1..27: note = Description of Artificial Sequence: Synthetic oligonucleotide
  source 1..27: mol_type = other DNA
caacaggttaacagtttccctctcact

SEQ ID NO: 17690 - protein, 9 aa, synthetic construct
  REGION 1..9: note = Description of Artificial Sequence: Synthetic peptide
QQVNSFPLT

SEQ ID NO: 17691 - DNA, 27 bp, synthetic construct
  misc_feature 1..27: note = Description of Artificial Sequence: Synthetic oligonucleotide
  source 1..27: mol_type = other DNA
ctacagcataatagttacccattcact

SEQ ID NO: 17692 - protein, 9 aa, synthetic construct
  REGION 1..9: note = Description of Artificial Sequence: Synthetic peptide
LQHNSYPFT

SEQ ID NO: 17693 - DNA, 30 bp, synthetic construct
  misc_feature 1..30: note = Description of Artificial Sequence: Synthetic oligonucleotide
  source 1..30: mol_type = other DNA
atacagcataatagttaccctccgatcacc

SEQ ID NO: 17694 - protein, 10 aa, synthetic construct
  REGION 1..10: note = Description of Artificial Sequence: Synthetic peptide
IQHNSYPPIT

SEQ ID NO: 17695 - DNA, 27 bp, synthetic construct
  misc_feature 1..27: note = Description of Artificial Sequence: Synthetic oligonucleotide
  source 1..27: mol_type = other DNA
ctacagcattatagttaccctcggacg

SEQ ID NO: 17696 - protein, 9 aa, synthetic construct
  REGION 1..9: note = Description of Artificial Sequence: Synthetic peptide
LQHYSYPRT

SEQ ID NO: 17697 - DNA, 27 bp, synthetic construct
  misc_feature 1..27: note = Description of Artificial Sequence: Synthetic oligonucleotide
  source 1..27: mol_type = other DNA
cagcagtatgaacgctcaccgtggacg

SEQ ID NO: 17698 - protein, 9 aa, synthetic construct
  REGION 1..9: note = Description of Artificial Sequence: Synthetic peptide
QQYERSPWT

SEQ ID NO: 17699 - DNA, 27 bp, synthetic construct
  misc_feature 1..27: note = Description of Artificial Sequence: Synthetic oligonucleotide
  source 1..27: mol_type = other DNA
cagcagtatgaaagttcaccgtggacg

SEQ ID NO: 17700 - protein, 9 aa, synthetic construct
  REGION 1..9: note = Description of Artificial Sequence: Synthetic peptide
QQYESSPWT

SEQ ID NO: 17701 - DNA, 27 bp, synthetic construct
  misc_feature 1..27: note = Description of Artificial Sequence: Synthetic oligonucleotide
  source 1..27: mol_type = other DNA
cagcaatattatagtagtcctccgacg

SEQ ID NO: 17702 - protein, 9 aa, synthetic construct
  REGION 1..9: note = Description of Artificial Sequence: Synthetic peptide
QQYYSSPPT

SEQ ID NO: 17703 - DNA, 27 bp, synthetic construct
  misc_feature 1..27: note = Description of Artificial Sequence: Synthetic oligonucleotide
  source 1..27: mol_type = other DNA
cagcaatattttagtactccgtggacg

SEQ ID NO: 17704 - protein, 9 aa, synthetic construct
  REGION 1..9: note = Description of Artificial Sequence: Synthetic peptide
QQYFSTPWT

SEQ ID NO: 17705 - DNA, 27 bp, synthetic construct
  misc_feature 1..27: note = Description of Artificial Sequence: Synthetic oligonucleotide
  source 1..27: mol_type = other DNA
cagcagtatggttgctcaccgctcact

SEQ ID NO: 17706 - protein, 9 aa, synthetic construct
  REGION 1..9: note = Description of Artificial Sequence: Synthetic peptide
QQYGCSPLT

SEQ ID NO: 17707 - DNA, 27 bp, synthetic construct
  misc_feature 1..27: note = Description of Artificial Sequence: Synthetic oligonucleotide
  source 1..27: mol_type = other DNA
cagcaatattatagtattcctccgacg

SEQ ID NO: 17708 - protein, 9 aa, synthetic construct
  REGION 1..9: note = Description of Artificial Sequence: Synthetic peptide
QQYYSIPPT

SEQ ID NO: 17709 - DNA, 27 bp, synthetic construct
  misc_feature 1..27: note = Description of Artificial Sequence: Synthetic oligonucleotide
  source 1..27: mol_type = other DNA
cagcaatattatagtactccgtgcagt

SEQ ID NO: 17710 - protein, 9 aa, synthetic construct
  REGION 1..9: note = Description of Artificial Sequence: Synthetic peptide
QQYYSTPCS

SEQ ID NO: 17711 - DNA, 27 bp, synthetic construct
  misc_feature 1..27: note = Description of Artificial Sequence: Synthetic oligonucleotide
  source 1..27: mol_type = other DNA
cagcaatataatgactggccgtgcagt

SEQ ID NO: 17712 - protein, 9 aa, synthetic construct
  REGION 1..9: note = Description of Artificial Sequence: Synthetic peptide
QQYNDWPCS

SEQ ID NO: 17713 - DNA, 27 bp, synthetic construct
  misc_feature 1..27: note = Description of Artificial Sequence: Synthetic oligonucleotide
  source 1..27: mol_type = other DNA
cagcaatattatagttctcctccgacg

SEQ ID NO: 17714 - protein, 9 aa, synthetic construct
  REGION 1..9: note = Description of Artificial Sequence: Synthetic peptide
QQYYSSPPT

SEQ ID NO: 17715 - DNA, 27 bp, synthetic construct
  misc_feature 1..27: note = Description of Artificial Sequence: Synthetic oligonucleotide
  source 1..27: mol_type = other DNA
ctacagcatagtaattacccgctcact

SEQ ID NO: 17716 - protein, 9 aa, synthetic construct
  REGION 1..9: note = Description of Artificial Sequence: Synthetic peptide
LQHSNYPLT

SEQ ID NO: 17717 - DNA, 27 bp, synthetic construct
  misc_feature 1..27: note = Description of Artificial Sequence: Synthetic oligonucleotide
  source 1..27: mol_type = other DNA
cagcaatatcatagttctcctctgacg

SEQ ID NO: 17718 - protein, 9 aa, synthetic construct
  REGION 1..9: note = Description of Artificial Sequence: Synthetic peptide
QQYHSSPLT

SEQ ID NO: 17719 - DNA, 27 bp, synthetic construct
  misc_feature 1..27: note = Description of Artificial Sequence: Synthetic oligonucleotide
  source 1..27: mol_type = other DNA
cagcagtatgaaagctcaccgtggacc

SEQ ID NO: 17720 - protein, 9 aa, synthetic construct
  REGION 1..9: note = Description of Artificial Sequence: Synthetic peptide
QQYESSPWT

SEQ ID NO: 17721 - DNA, 27 bp, synthetic construct
  misc_feature 1..27: note = Description of Artificial Sequence: Synthetic oligonucleotide
  source 1..27: mol_type = other DNA
cagcactctgataactcaccgtggacg

SEQ ID NO: 17722 - protein, 9 aa, synthetic construct
  REGION 1..9: note = Description of Artificial Sequence: Synthetic peptide
QHSDNSPWT

SEQ ID NO: 17723 - DNA, 27 bp, synthetic construct
  misc_feature 1..27: note = Description of Artificial Sequence: Synthetic oligonucleotide
  source 1..27: mol_type = other DNA
cagcactctgataactcaccgtggacg

SEQ ID NO: 17724 - protein, 9 aa, synthetic construct
  REGION 1..9: note = Description of Artificial Sequence: Synthetic peptide
QHSDNSPWT

SEQ ID NO: 17725 - DNA, 27 bp, synthetic construct
  misc_feature 1..27: note = Description of Artificial Sequence: Synthetic oligonucleotide
  source 1..27: mol_type = other DNA
cttcagcatagtaattacccgctcact

SEQ ID NO: 17726 - protein, 9 aa, synthetic construct
  REGION 1..9: note = Description of Artificial Sequence: Synthetic peptide
LQHSNYPLT

SEQ ID NO: 17727 - DNA, 27 bp, synthetic construct
  misc_feature 1..27: note = Description of Artificial Sequence: Synthetic oligonucleotide
  source 1..27: mol_type = other DNA
cagcagtatgaaagctcaccgtggacg

SEQ ID NO: 17728 - protein, 9 aa, synthetic construct
  REGION 1..9: note = Description of Artificial Sequence: Synthetic peptide
QQYESSPWT

SEQ ID NO: 17729 - DNA, 27 bp, synthetic construct
  misc_feature 1..27: note = Description of Artificial Sequence: Synthetic oligonucleotide
  source 1..27: mol_type = other DNA
cagcaatattatagtagtcctccgacg

SEQ ID NO: 17730 - protein, 9 aa, synthetic construct
  REGION 1..9: note = Description of Artificial Sequence: Synthetic peptide
QQYYSSPPT

SEQ ID NO: 17731 - DNA, 27 bp, synthetic construct
  misc_feature 1..27: note = Description of Artificial Sequence: Synthetic oligonucleotide
  source 1..27: mol_type = other DNA
cagcaatattatagcactcctcctact

SEQ ID NO: 17732 - protein, 9 aa, synthetic construct
  REGION 1..9: note = Description of Artificial Sequence: Synthetic peptide
QQYYSTPPT

SEQ ID NO: 17733 - DNA, 27 bp, synthetic construct
  misc_feature 1..27: note = Description of Artificial Sequence: Synthetic oligonucleotide
  source 1..27: mol_type = other DNA
cagcagtatggtaactcaccgctcact

SEQ ID NO: 17734 - protein, 9 aa, synthetic construct
  REGION 1..9: note = Description of Artificial Sequence: Synthetic peptide
QQYGNSPLT

SEQ ID NO: 17735 - DNA, 27 bp, synthetic construct
  misc_feature 1..27: note = Description of Artificial Sequence: Synthetic oligonucleotide
  source 1..27: mol_type = other DNA
cagcagtatggttgctcaccgctcact

SEQ ID NO: 17736 - protein, 9 aa, synthetic construct
  REGION 1..9: note = Description of Artificial Sequence: Synthetic peptide
QQYGCSPLT

SEQ ID NO: 17737 - DNA, 27 bp, synthetic construct
  misc_feature 1..27: note = Description of Artificial Sequence: Synthetic oligonucleotide
  source 1..27: mol_type = other DNA
cagcagtatgaaagttcaccgtggacg

SEQ ID NO: 17738 - protein, 9 aa, synthetic construct
  REGION 1..9: note = Description of Artificial Sequence: Synthetic peptide
QQYESSPWT

SEQ ID NO: 17739 - DNA, 27 bp, synthetic construct
  misc_feature 1..27: note = Description of Artificial Sequence: Synthetic oligonucleotide
  source 1..27: mol_type = other DNA
cagcagtatgaacgctcaccgtggacg

SEQ ID NO: 17740 - protein, 9 aa, synthetic construct
  REGION 1..9: note = Description of Artificial Sequence: Synthetic peptide
QQYERSPWT

SEQ ID NO: 17741 - DNA, 27 bp, synthetic construct
  misc_feature 1..27: note = Description of Artificial Sequence: Synthetic oligonucleotide
  source 1..27: mol_type = other DNA
cagcattatgatagctcaccgtggacg

SEQ ID NO: 17742 - protein, 9 aa, synthetic construct
  REGION 1..9: note = Description of Artificial Sequence: Synthetic peptide
QHYDSSPWT

SEQ ID NO: 17743 - DNA, 27 bp, synthetic construct
  misc_feature 1..27: note = Description of Artificial Sequence: Synthetic oligonucleotide
  source 1..27: mol_type = other DNA
cagcaatattttagtagtcctctgacg

SEQ ID NO: 17744 - protein, 9 aa, synthetic construct
  REGION 1..9: note = Description of Artificial Sequence: Synthetic peptide
QQYFSSPLT

SEQ ID NO: 17745 - DNA, 27 bp, synthetic construct
  misc_feature 1..27: note = Description of Artificial Sequence: Synthetic oligonucleotide
  source 1..27: mol_type = other DNA
cagcagtatggttgctcaccgctcact

SEQ ID NO: 17746 - protein, 9 aa, synthetic construct
  REGION 1..9: note = Description of Artificial Sequence: Synthetic peptide
QQYGCSPLT

SEQ ID NO: 17747 - DNA, 24 bp, synthetic construct
  misc_feature 1..24: note = Description of Artificial Sequence: Synthetic oligonucleotide
  source 1..24: mol_type = other DNA
cagcagtatggtaggtcacggacg

SEQ ID NO: 17748 - protein, 8 aa, synthetic construct
  REGION 1..8: note = Description of Artificial Sequence: Synthetic peptide
QQYGRSRT

SEQ ID NO: 17749 - DNA, 27 bp, synthetic construct
  misc_feature 1..27: note = Description of Artificial Sequence: Synthetic oligonucleotide
  source 1..27: mol_type = other DNA
cagcagtatgaaagctcaccgtggacc

SEQ ID NO: 17750 - protein, 9 aa, synthetic construct
  REGION 1..9: note = Description of Artificial Sequence: Synthetic peptide
QQYESSPWT

SEQ ID NO: 17751 - DNA, 27 bp, synthetic construct
  misc_feature 1..27: note = Description of Artificial Sequence: Synthetic oligonucleotide
  source 1..27: mol_type = other DNA
caacagtacagtaattacccgctcact

SEQ ID NO: 17752 - protein, 9 aa, synthetic construct
  REGION 1..9: note = Description of Artificial Sequence: Synthetic peptide
QQYSNYPLT

SEQ ID NO: 17753 - DNA, 27 bp, synthetic construct
  misc_feature 1..27: note = Description of Artificial Sequence: Synthetic oligonucleotide
  source 1..27: mol_type = other DNA
cagcagtataatgactggccgtgcagt

SEQ ID NO: 17754 - protein, 9 aa, synthetic construct
  REGION 1..9: note = Description of Artificial Sequence: Synthetic peptide
QQYNDWPCS

SEQ ID NO: 17755 - DNA, 27 bp, synthetic construct
  misc_feature 1..27: note = Description of Artificial Sequence: Synthetic oligonucleotide
  source 1..27: mol_type = other DNA
atgcaacctctacaaactccgttcact

SEQ ID NO: 17756 - protein, 9 aa, synthetic construct
  REGION 1..9: note = Description of Artificial Sequence: Synthetic peptide
MQPLQTPFT

SEQ ID NO: 17757 - DNA, 27 bp, synthetic construct
  misc_feature 1..27: note = Description of Artificial Sequence: Synthetic oligonucleotide
  source 1..27: mol_type = other DNA
cagcagtatgaaagctcgccgtggacg

SEQ ID NO: 17758 - protein, 9 aa, synthetic construct
  REGION 1..9: note = Description of Artificial Sequence: Synthetic peptide
QQYESSPWT

SEQ ID NO: 17759 - DNA, 27 bp, synthetic construct
  misc_feature 1..27: note = Description of Artificial Sequence: Synthetic oligonucleotide
  source 1..27: mol_type = other DNA
cagcaatattatagtactcctccgacg

SEQ ID NO: 17760 - protein, 9 aa, synthetic construct
  REGION 1..9: note = Description of Artificial Sequence: Synthetic peptide
QQYYSTPPT

SEQ ID NO: 17761 - DNA, 27 bp, synthetic construct
  misc_feature 1..27: note = Description of Artificial Sequence: Synthetic oligonucleotide
  source 1..27: mol_type = other DNA
cagcaatattatattactcctccgacg

SEQ ID NO: 17762 - protein, 9 aa, synthetic construct
  REGION 1..9: note = Description of Artificial Sequence: Synthetic peptide
QQYYITPPT

SEQ ID NO: 17763 - DNA, 27 bp, synthetic construct
  misc_feature 1..27: note = Description of Artificial Sequence: Synthetic oligonucleotide
  source 1..27: mol_type = other DNA
cagcactatgataactcaccgtggacg

SEQ ID NO: 17764 - protein, 9 aa, synthetic construct
  REGION 1..9: note = Description of Artificial Sequence: Synthetic peptide
QHYDNSPWT

SEQ ID NO: 17765 - DNA, 27 bp, synthetic construct
  misc_feature 1..27: note = Description of Artificial Sequence: Synthetic oligonucleotide
  source 1..27: mol_type = other DNA
cagcactatgataactcaccgtggacg

SEQ ID NO: 17766 - protein, 9 aa, synthetic construct
  REGION 1..9: note = Description of Artificial Sequence: Synthetic peptide
QHYDNSPWT

SEQ ID NO: 17767 - DNA, 27 bp, synthetic construct
  misc_feature 1..27: note = Description of Artificial Sequence: Synthetic oligonucleotide
  source 1..27: mol_type = other DNA
atgcaagctctacaccctcctctcact

SEQ ID NO: 17768 - protein, 9 aa, synthetic construct
  REGION 1..9: note = Description of Artificial Sequence: Synthetic peptide
MQALHPPLT

SEQ ID NO: 17769 - DNA, 27 bp, synthetic construct
  misc_feature 1..27: note = Description of Artificial Sequence: Synthetic oligonucleotide
  source 1..27: mol_type = other DNA
cagcagtatgaagactcaccgtggacg

SEQ ID NO: 17770 - protein, 9 aa, synthetic construct
  REGION 1..9: note = Description of Artificial Sequence: Synthetic peptide
QQYEDSPWT

SEQ ID NO: 17771 - DNA, 27 bp, synthetic construct
  misc_feature 1..27: note = Description of Artificial Sequence: Synthetic oligonucleotide
  source 1..27: mol_type = other DNA
cagcagtataatgactggccgtgcagt

SEQ ID NO: 17772 - protein, 9 aa, synthetic construct
  REGION 1..9: note = Description of Artificial Sequence: Synthetic peptide
QQYNDWPCS

SEQ ID NO: 17773 - DNA, 27 bp, synthetic construct
  misc_feature 1..27: note = Description of Artificial Sequence: Synthetic oligonucleotide
  source 1..27: mol_type = other DNA
cagcagtatgaaagctcaccgtggacg

SEQ ID NO: 17774 - protein, 9 aa, synthetic construct
  REGION 1..9: note = Description of Artificial Sequence: Synthetic peptide
QQYESSPWT

SEQ ID NO: 17775 - DNA, 27 bp, synthetic construct
  misc_feature 1..27: note = Description of Artificial Sequence: Synthetic oligonucleotide
  source 1..27: mol_type = other DNA
caacagtacagtaattacccgctcact

SEQ ID NO: 17776 - protein, 9 aa, synthetic construct
  REGION 1..9: note = Description of Artificial Sequence: Synthetic peptide
QQYSNYPLT

SEQ ID NO: 17777 - DNA, 27 bp, synthetic construct
  misc_feature 1..27: note = Description of Artificial Sequence: Synthetic oligonucleotide
  source 1..27: mol_type = other DNA
cagcaatattttagtagtcctccgacg

SEQ ID NO: 17778 - protein, 9 aa, synthetic construct
  REGION 1..9: note = Description of Artificial Sequence: Synthetic peptide
QQYFSSPPT

SEQ ID NO: 17779 - DNA, 27 bp, synthetic construct
  misc_feature 1..27: note = Description of Artificial Sequence: Synthetic oligonucleotide
  source 1..27: mol_type = other DNA
cagcactatgataactcaccgtggacg

SEQ ID NO: 17780 - protein, 9 aa, synthetic construct
  REGION 1..9: note = Description of Artificial Sequence: Synthetic peptide
QHYDNSPWT

SEQ ID NO: 17781 - DNA, 27 bp, synthetic construct
  misc_feature 1..27: note = Description of Artificial Sequence: Synthetic oligonucleotide
  source 1..27: mol_type = other DNA
cagcactatgataactcaccgtggacg

SEQ ID NO: 17782 - protein, 9 aa, synthetic construct
  REGION 1..9: note = Description of Artificial Sequence: Synthetic peptide
QHYDNSPWT

SEQ ID NO: 17783 - DNA, 27 bp, synthetic construct
  misc_feature 1..27: note = Description of Artificial Sequence: Synthetic oligonucleotide
  source 1..27: mol_type = other DNA
cagcagtatggtaactcaccgctcact

SEQ ID NO: 17784 - protein, 9 aa, synthetic construct
  REGION 1..9: note = Description of Artificial Sequence: Synthetic peptide
QQYGNSPLT

SEQ ID NO: 17785 - DNA, 27 bp, synthetic construct
  misc_feature 1..27: note = Description of Artificial Sequence: Synthetic oligonucleotide
  source 1..27: mol_type = other DNA
cagcattatgatagctcaccgtggacg

SEQ ID NO: 17786 - protein, 9 aa, synthetic construct
  REGION 1..9: note = Description of Artificial Sequence: Synthetic peptide
QHYDSSPWT

SEQ ID NO: 17787 - DNA, 27 bp, synthetic construct
  misc_feature 1..27: note = Description of Artificial Sequence: Synthetic oligonucleotide
  source 1..27: mol_type = other DNA
cagcagtatggttgctcaccgctcact

SEQ ID NO: 17788 - protein, 9 aa, synthetic construct
  REGION 1..9: note = Description of Artificial Sequence: Synthetic peptide
QQYGCSPLT

SEQ ID NO: 17789 - DNA, 27 bp, synthetic construct
  misc_feature 1..27: note = Description of Artificial Sequence: Synthetic oligonucleotide
  source 1..27: mol_type = other DNA
cagcattatgatagctcaccgtggacg

SEQ ID NO: 17790 - protein, 9 aa, synthetic construct
  REGION 1..9: note = Description of Artificial Sequence: Synthetic peptide
QHYDSSPWT

SEQ ID NO: 17791 - DNA, 27 bp, synthetic construct
  misc_feature 1..27: note = Description of Artificial Sequence: Synthetic oligonucleotide
  source 1..27: mol_type = other DNA
cagcactattataatactccgtggaag

SEQ ID NO: 17792 - protein, 9 aa, synthetic construct
  REGION 1..9: note = Description of Artificial Sequence: Synthetic peptide
QHYYNTPWK

SEQ ID NO: 17793 - DNA, 27 bp, synthetic construct
  misc_feature 1..27: note = Description of Artificial Sequence: Synthetic oligonucleotide
  source 1..27: mol_type = other DNA
cagcagtatggttgctcaccgctcact

SEQ ID NO: 17794 - protein, 9 aa, synthetic construct
  REGION 1..9: note = Description of Artificial Sequence: Synthetic peptide
QQYGCSPLT

SEQ ID NO: 17795 - DNA, 27 bp, synthetic construct
  misc_feature 1..27: note = Description of Artificial Sequence: Synthetic oligonucleotide
  source 1..27: mol_type = other DNA
cagcagtatgaaagctcaccgtggacg

SEQ ID NO: 17796 - protein, 9 aa, synthetic construct
  REGION 1..9: note = Description of Artificial Sequence: Synthetic peptide
QQYESSPWT

SEQ ID NO: 17797 - DNA, 27 bp, synthetic construct
  misc_feature 1..27: note = Description of Artificial Sequence: Synthetic oligonucleotide
  source 1..27: mol_type = other DNA
cagcaatattatactactccgtgcagt

SEQ ID NO: 17798 - protein, 9 aa, synthetic construct
  REGION 1..9: note = Description of Artificial Sequence: Synthetic peptide
QQYYTTPCS

SEQ ID NO: 17799 - DNA, 27 bp, synthetic construct
  misc_feature 1..27: note = Description of Artificial Sequence: Synthetic oligonucleotide
  source 1..27: mol_type = other DNA
caacagtacagtaattacccgctcact

SEQ ID NO: 17800 - protein, 9 aa, synthetic construct
  REGION 1..9: note = Description of Artificial Sequence: Synthetic peptide
QQYSNYPLT

SEQ ID NO: 17801 - DNA, 27 bp, synthetic construct
  misc_feature 1..27: note = Description of Artificial Sequence: Synthetic oligonucleotide
  source 1..27: mol_type = other DNA
cagcaatattataggactccgtggacg

SEQ ID NO: 17802 - protein, 9 aa, synthetic construct
  REGION 1..9: note = Description of Artificial Sequence: Synthetic peptide
QQYYRTPWT

SEQ ID NO: 17803 - DNA, 27 bp, synthetic construct
  misc_feature 1..27: note = Description of Artificial Sequence: Synthetic oligonucleotide
  source 1..27: mol_type = other DNA
cagcactattataatactccgtggaag

SEQ ID NO: 17804 - protein, 9 aa, synthetic construct
  REGION 1..9: note = Description of Artificial Sequence: Synthetic peptide
QHYYNTPWK

SEQ ID NO: 17805 - DNA, 30 bp, synthetic construct
  misc_feature 1..30: note = Description of Artificial Sequence: Synthetic oligonucleotide
  source 1..30: mol_type = other DNA
cagcagtataataactggcctccgctcact

SEQ ID NO: 17806 - protein, 10 aa, synthetic construct
  REGION 1..10: note = Description of Artificial Sequence: Synthetic peptide
QQYNNWPPLT

SEQ ID NO: 17807 - DNA, 27 bp, synthetic construct
  misc_feature 1..27: note = Description of Artificial Sequence: Synthetic oligonucleotide
  source 1..27: mol_type = other DNA
cagcagtataatgactggccgtgcagt

SEQ ID NO: 17808 - protein, 9 aa, synthetic construct
  REGION 1..9: note = Description of Artificial Sequence: Synthetic peptide
QQYNDWPCS

SEQ ID NO: 17809 - DNA, 24 bp, synthetic construct
  misc_feature 1..24: note = Description of Artificial Sequence: Synthetic oligonucleotide
  source 1..24: mol_type = other DNA
caacagtatggtaactcaaggacg

SEQ ID NO: 17810 - protein, 8 aa, synthetic construct
  REGION 1..8: note = Description of Artificial Sequence: Synthetic peptide
QQYGNSRT

SEQ ID NO: 17811 - DNA, 27 bp, synthetic construct
  misc_feature 1..27: note = Description of Artificial Sequence: Synthetic oligonucleotide
  source 1..27: mol_type = other DNA
cagcaatattatagtactccgtgcagt

SEQ ID NO: 17812 - protein, 9 aa, synthetic construct
  REGION 1..9: note = Description of Artificial Sequence: Synthetic peptide
QQYYSTPCS

SEQ ID NO: 17813 - DNA, 27 bp, synthetic construct
  misc_feature 1..27: note = Description of Artificial Sequence: Synthetic oligonucleotide
  source 1..27: mol_type = other DNA
cagcagtatgaacgctcaccgtggacg

SEQ ID NO: 17814 - protein, 9 aa, synthetic construct
  REGION 1..9: note = Description of Artificial Sequence: Synthetic peptide
QQYERSPWT

SEQ ID NO: 17815 - DNA, 27 bp, synthetic construct
  misc_feature 1..27: note = Description of Artificial Sequence: Synthetic oligonucleotide
  source 1..27: mol_type = other DNA
cagcaatattttagtagtcctccgacg

SEQ ID NO: 17816 - protein, 9 aa, synthetic construct
  REGION 1..9: note = Description of Artificial Sequence: Synthetic peptide
QQYFSSPPT

SEQ ID NO: 17817 - DNA, 27 bp, synthetic construct
  misc_feature 1..27: note = Description of Artificial Sequence: Synthetic oligonucleotide
  source 1..27: mol_type = other DNA
cagcaatattatagtagtcctccgacg

SEQ ID NO: 17818 - protein, 9 aa, synthetic construct
  REGION 1..9: note = Description of Artificial Sequence: Synthetic peptide
QQYYSSPPT

SEQ ID NO: 17819 - DNA, 27 bp, synthetic construct
  misc_feature 1..27: note = Description of Artificial Sequence: Synthetic oligonucleotide
  source 1..27: mol_type = other DNA
cagcaatattatagttctcctccgacg

SEQ ID NO: 17820 - protein, 9 aa, synthetic construct
  REGION 1..9: note = Description of Artificial Sequence: Synthetic peptide
QQYYSSPPT

SEQ ID NO: 17821 - DNA, 27 bp, synthetic construct
  misc_feature 1..27: note = Description of Artificial Sequence: Synthetic oligonucleotide
  source 1..27: mol_type = other DNA
cagcaatattttagtagtcctccgacg

SEQ ID NO: 17822 - protein, 9 aa, synthetic construct
  REGION 1..9: note = Description of Artificial Sequence: Synthetic peptide
QQYFSSPPT

SEQ ID NO: 17823 - DNA, 27 bp, synthetic construct
  misc_feature 1..27: note = Description of Artificial Sequence: Synthetic oligonucleotide
  source 1..27: mol_type = other DNA
cagcactatgataactcaccgtggacg

SEQ ID NO: 17824 - protein, 9 aa, synthetic construct
  REGION 1..9: note = Description of Artificial Sequence: Synthetic peptide
QHYDNSPWT

SEQ ID NO: 17825 - DNA, 27 bp, synthetic construct
  misc_feature 1..27: note = Description of Artificial Sequence: Synthetic oligonucleotide
  source 1..27: mol_type = other DNA
cagcactatgataactcaccgtggacg

SEQ ID NO: 17826 - protein, 9 aa, synthetic construct
  REGION 1..9: note = Description of Artificial Sequence: Synthetic peptide
QHYDNSPWT

SEQ ID NO: 17827 - DNA, 27 bp, synthetic construct
  misc_feature 1..27: note = Description of Artificial Sequence: Synthetic oligonucleotide
  source 1..27: mol_type = other DNA
cagcaatattatagtattcctccgacg

SEQ ID NO: 17828 - protein, 9 aa, synthetic construct
  REGION 1..9: note = Description of Artificial Sequence: Synthetic peptide
QQYYSIPPT

SEQ ID NO: 17829 - DNA, 27 bp, synthetic construct
  misc_feature 1..27: note = Description of Artificial Sequence: Synthetic oligonucleotide
  source 1..27: mol_type = other DNA
caacagtacagtaattacccactcact

SEQ ID NO: 17830 - protein, 9 aa, synthetic construct
  REGION 1..9: note = Description of Artificial Sequence: Synthetic peptide
QQYSNYPLT

SEQ ID NO: 17831 - DNA, 24 bp, synthetic construct
  misc_feature 1..24: note = Description of Artificial Sequence: Synthetic oligonucleotide
  source 1..24: mol_type = other DNA
cagcagtatggtagctcacggacg

SEQ ID NO: 17832 - protein, 8 aa, synthetic construct
  REGION 1..8: note = Description of Artificial Sequence: Synthetic peptide
QQYGSSRT

SEQ ID NO: 17833 - DNA, 27 bp, synthetic construct
  misc_feature 1..27: note = Description of Artificial Sequence: Synthetic oligonucleotide
  source 1..27: mol_type = other DNA
cagcagtataatgactggccgtgcagt

SEQ ID NO: 17834 - protein, 9 aa, synthetic construct
  REGION 1..9: note = Description of Artificial Sequence: Synthetic peptide
QQYNDWPCS

SEQ ID NO: 17835 - DNA, 27 bp, synthetic construct
  misc_feature 1..27: note = Description of Artificial Sequence: Synthetic oligonucleotide
  source 1..27: mol_type = other DNA
cagcaatattatagtattcctccgacg

SEQ ID NO: 17836 - protein, 9 aa, synthetic construct
  REGION 1..9: note = Description of Artificial Sequence: Synthetic peptide
QQYYSIPPT

SEQ ID NO: 17837 - DNA, 27 bp, synthetic construct
  misc_feature 1..27: note = Description of Artificial Sequence: Synthetic oligonucleotide
  source 1..27: mol_type = other DNA
cagcaatattatagtactccgtgcagt

SEQ ID NO: 17838 - protein, 9 aa, synthetic construct
  REGION 1..9: note = Description of Artificial Sequence: Synthetic peptide
QQYYSTPCS

SEQ ID NO: 17839 - DNA, 27 bp, synthetic construct
  misc_feature 1..27: note = Description of Artificial Sequence: Synthetic oligonucleotide
  source 1..27: mol_type = other DNA
cagcaatattatattactcctccgacg

SEQ ID NO: 17840 - protein, 9 aa, synthetic construct
  REGION 1..9: note = Description of Artificial Sequence: Synthetic peptide
QQYYITPPT

SEQ ID NO: 17841 - DNA, 27 bp, synthetic construct
  misc_feature 1..27: note = Description of Artificial Sequence: Synthetic oligonucleotide
  source 1..27: mol_type = other DNA
cagcactatgataactcaccgtggacg

SEQ ID NO: 17842 - protein, 9 aa, synthetic construct
  REGION 1..9: note = Description of Artificial Sequence: Synthetic peptide
QHYDNSPWT

SEQ ID NO: 17843 - DNA, 27 bp, synthetic construct
  misc_feature 1..27: note = Description of Artificial Sequence: Synthetic oligonucleotide
  source 1..27: mol_type = other DNA
cagcaatatcatagttctcctctgacg

SEQ ID NO: 17844 - protein, 9 aa, synthetic construct
  REGION 1..9: note = Description of Artificial Sequence: Synthetic peptide
QQYHSSPLT

SEQ ID NO: 17845 - DNA, 27 bp, synthetic construct
  misc_feature 1..27: note = Description of Artificial Sequence: Synthetic oligonucleotide
  source 1..27: mol_type = other DNA
cagcagtatgaaagctcaccgtggacg

SEQ ID NO: 17846 - protein, 9 aa, synthetic construct
  REGION 1..9: note = Description of Artificial Sequence: Synthetic peptide
QQYESSPWT

SEQ ID NO: 17847 - DNA, 27 bp, synthetic construct
  misc_feature 1..27: note = Description of Artificial Sequence: Synthetic oligonucleotide
  source 1..27: mol_type = other DNA
cagcactctgataactcaccgtggacg

SEQ ID NO: 17848 - protein, 9 aa, synthetic construct
  REGION 1..9: note = Description of Artificial Sequence: Synthetic peptide
QHSDNSPWT

SEQ ID NO: 17849 - DNA, 27 bp, synthetic construct
  misc_feature 1..27: note = Description of Artificial Sequence: Synthetic oligonucleotide
  source 1..27: mol_type = other DNA
cagcaatattatagtactccgtggacg

SEQ ID NO: 17850 - protein, 9 aa, synthetic construct
  REGION 1..9: note = Description of Artificial Sequence: Synthetic peptide
QQYYSTPWT

SEQ ID NO: 17851 - DNA, 27 bp, synthetic construct
  misc_feature 1..27: note = Description of Artificial Sequence: Synthetic oligonucleotide
  source 1..27: mol_type = other DNA
cagcactctgataactcaccgtggacg

SEQ ID NO: 17852 - protein, 9 aa, synthetic construct
  REGION 1..9: note = Description of Artificial Sequence: Synthetic peptide
QHSDNSPWT

SEQ ID NO: 17853 - DNA, 27 bp, synthetic construct
  misc_feature 1..27: note = Description of Artificial Sequence: Synthetic oligonucleotide
  source 1..27: mol_type = other DNA
cagcactctgataactcaccgtggacg

SEQ ID NO: 17854 - protein, 9 aa, synthetic construct
  REGION 1..9: note = Description of Artificial Sequence: Synthetic peptide
QHSDNSPWT

SEQ ID NO: 17855 - DNA, 27 bp, synthetic construct
  misc_feature 1..27: note = Description of Artificial Sequence: Synthetic oligonucleotide
  source 1..27: mol_type = other DNA
cagcactctgataactcaccgtggacg

SEQ ID NO: 17856 - protein, 9 aa, synthetic construct
  REGION 1..9: note = Description of Artificial Sequence: Synthetic peptide
QHSDNSPWT

SEQ ID NO: 17857 - DNA, 27 bp, synthetic construct
  misc_feature 1..27: note = Description of Artificial Sequence: Synthetic oligonucleotide
  source 1..27: mol_type = other DNA
cagcagtatggttgctcaccgctcact

SEQ ID NO: 17858 - protein, 9 aa, synthetic construct
  REGION 1..9: note = Description of Artificial Sequence: Synthetic peptide
QQYGCSPLT

SEQ ID NO: 17859 - DNA, 27 bp, synthetic construct
  misc_feature 1..27: note = Description of Artificial Sequence: Synthetic oligonucleotide
  source 1..27: mol_type = other DNA
cagcactacaatgaaactccagggaag

SEQ ID NO: 17860 - protein, 9 aa, synthetic construct
  REGION 1..9: note = Description of Artificial Sequence: Synthetic peptide
QHYNETPGK

SEQ ID NO: 17861 - DNA, 27 bp, synthetic construct
  misc_feature 1..27: note = Description of Artificial Sequence: Synthetic oligonucleotide
  source 1..27: mol_type = other DNA
cagcattctgataactcaccgtggacg

SEQ ID NO: 17862 - protein, 9 aa, synthetic construct
  REGION 1..9: note = Description of Artificial Sequence: Synthetic peptide
QHSDNSPWT

SEQ ID NO: 17863 - DNA, 27 bp, synthetic construct
  misc_feature 1..27: note = Description of Artificial Sequence: Synthetic oligonucleotide
  source 1..27: mol_type = other DNA
cagcaatattatagtactcctccgacg

SEQ ID NO: 17864 - protein, 9 aa, synthetic construct
  REGION 1..9: note = Description of Artificial Sequence: Synthetic peptide
QQYYSTPPT

SEQ ID NO: 17865 - DNA, 27 bp, synthetic construct
  misc_feature 1..27: note = Description of Artificial Sequence: Synthetic oligonucleotide
  source 1..27: mol_type = other DNA
cagcagtatgaaagctcaccgtggacc

SEQ ID NO: 17866 - protein, 9 aa, synthetic construct
  REGION 1..9: note = Description of Artificial Sequence: Synthetic peptide
QQYESSPWT

SEQ ID NO: 17867 - DNA, 27 bp, synthetic construct
  misc_feature 1..27: note = Description of Artificial Sequence: Synthetic oligonucleotide
  source 1..27: mol_type = other DNA
cagcagtatgaaagctcaccgtggacg

SEQ ID NO: 17868 - protein, 9 aa, synthetic construct
  REGION 1..9: note = Description of Artificial Sequence: Synthetic peptide
QQYESSPWT

SEQ ID NO: 17869 - DNA, 27 bp, synthetic construct
  misc_feature 1..27: note = Description of Artificial Sequence: Synthetic oligonucleotide
  source 1..27: mol_type = other DNA
cagcagtatgagagctcaccgtggacg

SEQ ID NO: 17870 - protein, 9 aa, synthetic construct
  REGION 1..9: note = Description of Artificial Sequence: Synthetic peptide
QQYESSPWT

SEQ ID NO: 17871 - DNA, 27 bp, synthetic construct
  misc_feature 1..27: note = Description of Artificial Sequence: Synthetic oligonucleotide
  source 1..27: mol_type = other DNA
cagcaatattatagttctcctcctact

SEQ ID NO: 17872 - protein, 9 aa, synthetic construct
  REGION 1..9: note = Description of Artificial Sequence: Synthetic peptide
QQYYSSPPT

SEQ ID NO: 17873 - DNA, 27 bp, synthetic construct
  misc_feature 1..27: note = Description of Artificial Sequence: Synthetic oligonucleotide
  source 1..27: mol_type = other DNA
cagcaatattataatactccgtggacg

SEQ ID NO: 17874 - protein, 9 aa, synthetic construct
  REGION 1..9: note = Description of Artificial Sequence: Synthetic peptide
QQYYNTPWT

SEQ ID NO: 17875 - DNA, 27 bp, synthetic construct
  misc_feature 1..27: note = Description of Artificial Sequence: Synthetic oligonucleotide
  source 1..27: mol_type = other DNA
cagcagtatgaaagctcaccgtggacg

SEQ ID NO: 17876 - protein, 9 aa, synthetic construct
  REGION 1..9: note = Description of Artificial Sequence: Synthetic peptide
QQYESSPWT

SEQ ID NO: 17877 - DNA, 27 bp, synthetic construct
  misc_feature 1..27: note = Description of Artificial Sequence: Synthetic oligonucleotide
  source 1..27: mol_type = other DNA
caacagtacagtaattacccgctcact

SEQ ID NO: 17878 - protein, 9 aa, synthetic construct
  REGION 1..9: note = Description of Artificial Sequence: Synthetic peptide
QQYSNYPLT

SEQ ID NO: 17879 - DNA, 27 bp, synthetic construct
  misc_feature 1..27: note = Description of Artificial Sequence: Synthetic oligonucleotide
  source 1..27: mol_type = other DNA
caacagtacagtaattacccgctcact

SEQ ID NO: 17880 - protein, 9 aa, synthetic construct
  REGION 1..9: note = Description of Artificial Sequence: Synthetic peptide
QQYSNYPLT

SEQ ID NO: 17881 - DNA, 27 bp, synthetic construct
  misc_feature 1..27: note = Description of Artificial Sequence: Synthetic oligonucleotide
  source 1..27: mol_type = other DNA
cagcactctgataactcaccgtggacg

SEQ ID NO: 17882 - protein, 9 aa, synthetic construct
  REGION 1..9: note = Description of Artificial Sequence: Synthetic peptide
QHSDNSPWT

SEQ ID NO: 17883 - DNA, 27 bp, synthetic construct
  misc_feature 1..27: note = Description of Artificial Sequence: Synthetic oligonucleotide
  source 1..27: mol_type = other DNA
cagcagtatggtaactcaccgctcact

SEQ ID NO: 17884 - protein, 9 aa, synthetic construct
  REGION 1..9: note = Description of Artificial Sequence: Synthetic peptide
QQYGNSPLT

SEQ ID NO: 17885 - DNA, 27 bp, synthetic construct
  misc_feature 1..27: note = Description of Artificial Sequence: Synthetic oligonucleotide
  source 1..27: mol_type = other DNA
cagcactctgataactcaccgtggacg

SEQ ID NO: 17886 - protein, 9 aa, synthetic construct
  REGION 1..9: note = Description of Artificial Sequence: Synthetic peptide
QHSDNSPWT

SEQ ID NO: 17887 - DNA, 27 bp, synthetic construct
  misc_feature 1..27: note = Description of Artificial Sequence: Synthetic oligonucleotide
  source 1..27: mol_type = other DNA
cagcattctgataactcaccgtggacg

SEQ ID NO: 17888 - protein, 9 aa, synthetic construct
  REGION 1..9: note = Description of Artificial Sequence: Synthetic peptide
QHSDNSPWT

SEQ ID NO: 17889 - DNA, 27 bp, synthetic construct
  misc_feature 1..27: note = Description of Artificial Sequence: Synthetic oligonucleotide
  source 1..27: mol_type = other DNA
cagcaatattatagttctcctctgacg

SEQ ID NO: 17890 - protein, 9 aa, synthetic construct
  REGION 1..9: note = Description of Artificial Sequence: Synthetic peptide
QQYYSSPLT

SEQ ID NO: 17891 - DNA, 27 bp, synthetic construct
  misc_feature 1..27: note = Description of Artificial Sequence: Synthetic oligonucleotide
  source 1..27: mol_type = other DNA
cagcactacaatgatactccagggaag

SEQ ID NO: 17892 - protein, 9 aa, synthetic construct
  REGION 1..9: note = Description of Artificial Sequence: Synthetic peptide
QHYNDTPGK

SEQ ID NO: 17893 - DNA, 27 bp, synthetic construct
  misc_feature 1..27: note = Description of Artificial Sequence: Synthetic oligonucleotide
  source 1..27: mol_type = other DNA
cagcagtatgaaagctcaccgtggacg

SEQ ID NO: 17894 - protein, 9 aa, synthetic construct
  REGION 1..9: note = Description of Artificial Sequence: Synthetic peptide
QQYESSPWT

SEQ ID NO: 17895 - DNA, 27 bp, synthetic construct
  misc_feature 1..27: note = Description of Artificial Sequence: Synthetic oligonucleotide
  source 1..27: mol_type = other DNA
cagcattctgataactcaccgtggacg

SEQ ID NO: 17896 - protein, 9 aa, synthetic construct
  REGION 1..9: note = Description of Artificial Sequence: Synthetic peptide
QHSDNSPWT

SEQ ID NO: 17897 - DNA, 27 bp, synthetic construct
  misc_feature 1..27: note = Description of Artificial Sequence: Synthetic oligonucleotide
  source 1..27: mol_type = other DNA
cagcagtatggtaactcaccgctcact

SEQ ID NO: 17898 - protein, 9 aa, synthetic construct
  REGION 1..9: note = Description of Artificial Sequence: Synthetic peptide
QQYGNSPLT

SEQ ID NO: 17899 - DNA, 27 bp, synthetic construct
  misc_feature 1..27: note = Description of Artificial Sequence: Synthetic oligonucleotide
  source 1..27: mol_type = other DNA
cagcagtatggttgctcaccgctcact

SEQ ID NO: 17900 - protein, 9 aa, synthetic construct
  REGION 1..9: note = Description of Artificial Sequence: Synthetic peptide
QQYGCSPLT

SEQ ID NO: 17901 - DNA, 27 bp, synthetic construct
  misc_feature 1..27: note = Description of Artificial Sequence: Synthetic oligonucleotide
  source 1..27: mol_type = other DNA
cagcagtatggttgctcaccgctcact

SEQ ID NO: 17902 - protein, 9 aa, synthetic construct
  REGION 1..9: note = Description of Artificial Sequence: Synthetic peptide
QQYGCSPLT

SEQ ID NO: 17903 - DNA, 27 bp, synthetic construct
  misc_feature 1..27: note = Description of Artificial Sequence: Synthetic oligonucleotide
  source 1..27: mol_type = other DNA
cagcactctgataactcaccgtggacg

SEQ ID NO: 17904 - protein, 9 aa, synthetic construct
  REGION 1..9: note = Description of Artificial Sequence: Synthetic peptide
QHSDNSPWT

SEQ ID NO: 17905 - DNA, 27 bp, synthetic construct
  misc_feature 1..27: note = Description of Artificial Sequence: Synthetic oligonucleotide
  source 1..27: mol_type = other DNA
cagcagtatggtaactcaccgctcact

SEQ ID NO: 17906 - protein, 9 aa, synthetic construct
  REGION 1..9: note = Description of Artificial Sequence: Synthetic peptide
QQYGNSPLT

SEQ ID NO: 17907 - DNA, 27 bp, synthetic construct
  misc_feature 1..27: note = Description of Artificial Sequence: Synthetic oligonucleotide
  source 1..27: mol_type = other DNA
ctacagcataatgattacccattcact

SEQ ID NO: 17908 - protein, 9 aa, synthetic construct
  REGION 1..9: note = Description of Artificial Sequence: Synthetic peptide
LQHNDYPFT

SEQ ID NO: 17909 - DNA, 27 bp, synthetic construct
  misc_feature 1..27: note = Description of Artificial Sequence: Synthetic oligonucleotide
  source 1..27: mol_type = other DNA
cagcactctgataactcaccgtggacg

SEQ ID NO: 17910 - protein, 9 aa, synthetic construct
  REGION 1..9: note = Description of Artificial Sequence: Synthetic peptide
QHSDNSPWT

SEQ ID NO: 17911 - DNA, 27 bp, synthetic construct
  misc_feature 1..27: note = Description of Artificial Sequence: Synthetic oligonucleotide
  source 1..27: mol_type = other DNA
cagcagtatggttgctcaccgctcact

SEQ ID NO: 17912 - protein, 9 aa, synthetic construct
  REGION 1..9: note = Description of Artificial Sequence: Synthetic peptide
QQYGCSPLT

SEQ ID NO: 17913 - DNA, 27 bp, synthetic construct
  misc_feature 1..27: note = Description of Artificial Sequence: Synthetic oligonucleotide
  source 1..27: mol_type = other DNA
cagcactataatgatactccatggaag

SEQ ID NO: 17914 - protein, 9 aa, synthetic construct
  REGION 1..9: note = Description of Artificial Sequence: Synthetic peptide
QHYNDTPWK

SEQ ID NO: 17915 - DNA, 27 bp, synthetic construct
  misc_feature 1..27: note = Description of Artificial Sequence: Synthetic oligonucleotide
  source 1..27: mol_type = other DNA
cagcactattataatactccgtggacg

SEQ ID NO: 17916 - protein, 9 aa, synthetic construct
  REGION 1..9: note = Description of Artificial Sequence: Synthetic peptide
QHYYNTPWT

SEQ ID NO: 17917 - DNA, 27 bp, synthetic construct
  misc_feature 1..27: note = Description of Artificial Sequence: Synthetic oligonucleotide
  source 1..27: mol_type = other DNA
cagcagtatggttgctcaccgctcact

SEQ ID NO: 17918 - protein, 9 aa, synthetic construct
  REGION 1..9: note = Description of Artificial Sequence: Synthetic peptide
QQYGCSPLT

SEQ ID NO: 17919 - DNA, 27 bp, synthetic construct
  misc_feature 1..27: note = Description of Artificial Sequence: Synthetic oligonucleotide
  source 1..27: mol_type = other DNA
cagcagtatgaaagctcaccgtggacg

SEQ ID NO: 17920 - protein, 9 aa, synthetic construct
  REGION 1..9: note = Description of Artificial Sequence: Synthetic peptide
QQYESSPWT

SEQ ID NO: 17921 - DNA, 27 bp, synthetic construct
  misc_feature 1..27: note = Description of Artificial Sequence: Synthetic oligonucleotide
  source 1..27: mol_type = other DNA
cagcactctgataactcaccgtggacg

SEQ ID NO: 17922 - protein, 9 aa, synthetic construct
  REGION 1..9: note = Description of Artificial Sequence: Synthetic peptide
QHSDNSPWT

SEQ ID NO: 17923 - DNA, 27 bp, synthetic construct
  misc_feature 1..27: note = Description of Artificial Sequence: Synthetic oligonucleotide
  source 1..27: mol_type = other DNA
cagcaatattttagtagtcctctgacg

SEQ ID NO: 17924 - protein, 9 aa, synthetic construct
  REGION 1..9: note = Description of Artificial Sequence: Synthetic peptide
QQYFSSPLT

SEQ ID NO: 17925 - DNA, 27 bp, synthetic construct
  misc_feature 1..27: note = Description of Artificial Sequence: Synthetic oligonucleotide
  source 1..27: mol_type = other DNA
cagcagtatgaaagttcaccgtggacg

SEQ ID NO: 17926 - protein, 9 aa, synthetic construct
  REGION 1..9: note = Description of Artificial Sequence: Synthetic peptide
QQYESSPWT

SEQ ID NO: 17927 - DNA, 27 bp, synthetic construct
  misc_feature 1..27: note = Description of Artificial Sequence: Synthetic oligonucleotide
  source 1..27: mol_type = other DNA
cagcaatattatagtactcctcctact

SEQ ID NO: 17928 - protein, 9 aa, synthetic construct
  REGION 1..9: note = Description of Artificial Sequence: Synthetic peptide
QQYYSTPPT

SEQ ID NO: 17929 - DNA, 27 bp, synthetic construct
  misc_feature 1..27: note = Description of Artificial Sequence: Synthetic oligonucleotide
  source 1..27: mol_type = other DNA
cagcaatattttagtagtcctccgacg

SEQ ID NO: 17930 - protein, 9 aa, synthetic construct
  REGION 1..9: note = Description of Artificial Sequence: Synthetic peptide
QQYFSSPPT

SEQ ID NO: 17931 - DNA, 27 bp, synthetic construct
  misc_feature 1..27: note = Description of Artificial Sequence: Synthetic oligonucleotide
  source 1..27: mol_type = other DNA
caacagtacagtaattacccgctcact

SEQ ID NO: 17932 - protein, 9 aa, synthetic construct
  REGION 1..9: note = Description of Artificial Sequence: Synthetic peptide
QQYSNYPLT

SEQ ID NO: 17933 - DNA, 27 bp, synthetic construct
  misc_feature 1..27: note = Description of Artificial Sequence: Synthetic oligonucleotide
  source 1..27: mol_type = other DNA
cagcagtatgagagctcaccgtggacg

SEQ ID NO: 17934 - protein, 9 aa, synthetic construct
  REGION 1..9: note = Description of Artificial Sequence: Synthetic peptide
QQYESSPWT

SEQ ID NO: 17935 - DNA, 27 bp, synthetic construct
  misc_feature 1..27: note = Description of Artificial Sequence: Synthetic oligonucleotide
  source 1..27: mol_type = other DNA
caggagtataatgactggccgtgcagt

SEQ ID NO: 17936 - protein, 9 aa, synthetic construct
  REGION 1..9: note = Description of Artificial Sequence: Synthetic peptide
QEYNDWPCS

SEQ ID NO: 17937 - DNA, 27 bp, synthetic construct
  misc_feature 1..27: note = Description of Artificial Sequence: Synthetic oligonucleotide
  source 1..27: mol_type = other DNA
cagcaatattataggactccgtggacg

SEQ ID NO: 17938 - protein, 9 aa, synthetic construct
  REGION 1..9: note = Description of Artificial Sequence: Synthetic peptide
QQYYRTPWT

SEQ ID NO: 17939 - DNA, 27 bp, synthetic construct
  misc_feature 1..27: note = Description of Artificial Sequence: Synthetic oligonucleotide
  source 1..27: mol_type = other DNA
cagcactatgataactcaccgtggacg

SEQ ID NO: 17940 - protein, 9 aa, synthetic construct
  REGION 1..9: note = Description of Artificial Sequence: Synthetic peptide
QHYDNSPWT

SEQ ID NO: 17941 - DNA, 27 bp, synthetic construct
  misc_feature 1..27: note = Description of Artificial Sequence: Synthetic oligonucleotide
  source 1..27: mol_type = other DNA
cagcactatgataactcaccgtggacg

SEQ ID NO: 17942 - protein, 9 aa, synthetic construct
  REGION 1..9: note = Description of Artificial Sequence: Synthetic peptide
QHYDNSPWT

SEQ ID NO: 17943 - DNA, 27 bp, synthetic construct
  misc_feature 1..27: note = Description of Artificial Sequence: Synthetic oligonucleotide
  source 1..27: mol_type = other DNA
cagcagtatggttgctcaccgctcact

SEQ ID NO: 17944 - protein, 9 aa, synthetic construct
  REGION 1..9: note = Description of Artificial Sequence: Synthetic peptide
QQYGCSPLT

SEQ ID NO: 17945 - DNA, 27 bp, synthetic construct
  misc_feature 1..27: note = Description of Artificial Sequence: Synthetic oligonucleotide
  source 1..27: mol_type = other DNA
cagcattatgatagctcaccgtggacg

SEQ ID NO: 17946 - protein, 9 aa, synthetic construct
  REGION 1..9: note = Description of Artificial Sequence: Synthetic peptide
QHYDSSPWT

SEQ ID NO: 17947 - DNA, 27 bp, synthetic construct
  misc_feature 1..27: note = Description of Artificial Sequence: Synthetic oligonucleotide
  source 1..27: mol_type = other DNA
cagcagtatgaaagttcaccgtggacg

SEQ ID NO: 17948 - protein, 9 aa, synthetic construct
  REGION 1..9: note = Description of Artificial Sequence: Synthetic peptide
QQYESSPWT

SEQ ID NO: 17949 - DNA, 27 bp, synthetic construct
  misc_feature 1..27: note = Description of Artificial Sequence: Synthetic oligonucleotide
  source 1..27: mol_type = other DNA
cagcagtatgaaagctcaccgtggacc

SEQ ID NO: 17950 - protein, 9 aa, synthetic construct
  REGION 1..9: note = Description of Artificial Sequence: Synthetic peptide
QQYESSPWT

SEQ ID NO: 17951 - DNA, 27 bp, synthetic construct
  misc_feature 1..27: note = Description of Artificial Sequence: Synthetic oligonucleotide
  source 1..27: mol_type = other DNA
cagcagtatgaaagctcgccgtggacg

SEQ ID NO: 17952 - protein, 9 aa, synthetic construct
  REGION 1..9: note = Description of Artificial Sequence: Synthetic peptide
QQYESSPWT

SEQ ID NO: 17953 - DNA, 27 bp, synthetic construct
  misc_feature 1..27: note = Description of Artificial Sequence: Synthetic oligonucleotide
  source 1..27: mol_type = other DNA
cagcaatattatagtactcctccgacg

SEQ ID NO: 17954 - protein, 9 aa, synthetic construct
  REGION 1..9: note = Description of Artificial Sequence: Synthetic peptide
QQYYSTPPT

SEQ ID NO: 17955 - DNA, 27 bp, synthetic construct
  misc_feature 1..27: note = Description of Artificial Sequence: Synthetic oligonucleotide
  source 1..27: mol_type = other DNA
cagcagtatgagagttcaccgtggacg

SEQ ID NO: 17956 - protein, 9 aa, synthetic construct
  REGION 1..9: note = Description of Artificial Sequence: Synthetic peptide
QQYESSPWT

SEQ ID NO: 17957 - DNA, 27 bp, synthetic construct
  misc_feature 1..27: note = Description of Artificial Sequence: Synthetic oligonucleotide
  source 1..27: mol_type = other DNA
cagcaatattatagtactccgtgcagt

SEQ ID NO: 17958 - protein, 9 aa, synthetic construct
  REGION 1..9: note = Description of Artificial Sequence: Synthetic peptide
QQYYSTPCS

SEQ ID NO: 17959 - DNA, 27 bp, synthetic construct
  misc_feature 1..27: note = Description of Artificial Sequence: Synthetic oligonucleotide
  source 1..27: mol_type = other DNA
cagcagtatggttgctcaccgctcact

SEQ ID NO: 17960 - protein, 9 aa, synthetic construct
  REGION 1..9: note = Description of Artificial Sequence: Synthetic peptide
QQYGCSPLT

SEQ ID NO: 17961 - DNA, 27 bp, synthetic construct
  misc_feature 1..27: note = Description of Artificial Sequence: Synthetic oligonucleotide
  source 1..27: mol_type = other DNA
cagcactatgataactcaccgtggacg

SEQ ID NO: 17962 - protein, 9 aa, synthetic construct
  REGION 1..9: note = Description of Artificial Sequence: Synthetic peptide
QHYDNSPWT

SEQ ID NO: 17963 - DNA, 27 bp, synthetic construct
  misc_feature 1..27: note = Description of Artificial Sequence: Synthetic oligonucleotide
  source 1..27: mol_type = other DNA
cagcactctgataactcaccgtggacg

SEQ ID NO: 17964 - protein, 9 aa, synthetic construct
  REGION 1..9: note = Description of Artificial Sequence: Synthetic peptide
QHSDNSPWT

SEQ ID NO: 17965 - DNA, 27 bp, synthetic construct
  misc_feature 1..27: note = Description of Artificial Sequence: Synthetic oligonucleotide
  source 1..27: mol_type = other DNA
cagcaatatcatagtagtccactgacg

SEQ ID NO: 17966 - protein, 9 aa, synthetic construct
  REGION 1..9: note = Description of Artificial Sequence: Synthetic peptide
QQYHSSPLT

SEQ ID NO: 17967 - DNA, 27 bp, synthetic construct
  misc_feature 1..27: note = Description of Artificial Sequence: Synthetic oligonucleotide
  source 1..27: mol_type = other DNA
cagcactctgataactcaccgtggacg

SEQ ID NO: 17968 - protein, 9 aa, synthetic construct
  REGION 1..9: note = Description of Artificial Sequence: Synthetic peptide
QHSDNSPWT

SEQ ID NO: 17969 - DNA, 27 bp, synthetic construct
  misc_feature 1..27: note = Description of Artificial Sequence: Synthetic oligonucleotide
  source 1..27: mol_type = other DNA
cagcagtatgaaagctcaccgtggacg

SEQ ID NO: 17970 - protein, 9 aa, synthetic construct
  REGION 1..9: note = Description of Artificial Sequence: Synthetic peptide
QQYESSPWT

SEQ ID NO: 17971 - DNA, 27 bp, synthetic construct
  misc_feature 1..27: note = Description of Artificial Sequence: Synthetic oligonucleotide
  source 1..27: mol_type = other DNA
cagcattctgataactcaccgtggacg

SEQ ID NO: 17972 - protein, 9 aa, synthetic construct
  REGION 1..9: note = Description of Artificial Sequence: Synthetic peptide
QHSDNSPWT

SEQ ID NO: 17973 - DNA, 27 bp, synthetic construct
  misc_feature 1..27: note = Description of Artificial Sequence: Synthetic oligonucleotide
  source 1..27: mol_type = other DNA
ctactctatcttacttacccgctcacc

SEQ ID NO: 17974 - protein, 9 aa, synthetic construct
  REGION 1..9: note = Description of Artificial Sequence: Synthetic peptide
LLYLTYPLT

SEQ ID NO: 17975 - DNA, 27 bp, synthetic construct
  misc_feature 1..27: note = Description of Artificial Sequence: Synthetic oligonucleotide
  source 1..27: mol_type = other DNA
cagcattctgataactcaccgtggacg

SEQ ID NO: 17976 - protein, 9 aa, synthetic construct
  REGION 1..9: note = Description of Artificial Sequence: Synthetic peptide
QHSDNSPWT

SEQ ID NO: 17977 - DNA, 27 bp, synthetic construct
  misc_feature 1..27: note = Description of Artificial Sequence: Synthetic oligonucleotide
  source 1..27: mol_type = other DNA
cagcagtatggtaactcaccgctcact

SEQ ID NO: 17978 - protein, 9 aa, synthetic construct
  REGION 1..9: note = Description of Artificial Sequence: Synthetic peptide
QQYGNSPLT

SEQ ID NO: 17979 - DNA, 27 bp, synthetic construct
  misc_feature 1..27: note = Description of Artificial Sequence: Synthetic oligonucleotide
  source 1..27: mol_type = other DNA
cagcaatattatagtagtccgtgcagt

SEQ ID NO: 17980 - protein, 9 aa, synthetic construct
  REGION 1..9: note = Description of Artificial Sequence: Synthetic peptide
QQYYSSPCS

SEQ ID NO: 17981 - DNA, 27 bp, synthetic construct
  misc_feature 1..27: note = Description of Artificial Sequence: Synthetic oligonucleotide
  source 1..27: mol_type = other DNA
cagcactctgataactcaccgtggacg

SEQ ID NO: 17982 - protein, 9 aa, synthetic construct
  REGION 1..9: note = Description of Artificial Sequence: Synthetic peptide
QHSDNSPWT

SEQ ID NO: 17983 - DNA, 27 bp, synthetic construct
  misc_feature 1..27: note = Description of Artificial Sequence: Synthetic oligonucleotide
  source 1..27: mol_type = other DNA
cagcaatattatagttctcctccgacg

SEQ ID NO: 17984 - protein, 9 aa, synthetic construct
  REGION 1..9: note = Description of Artificial Sequence: Synthetic peptide
QQYYSSPPT

SEQ ID NO: 17985 - DNA, 27 bp, synthetic construct
  misc_feature 1..27: note = Description of Artificial Sequence: Synthetic oligonucleotide
  source 1..27: mol_type = other DNA
cagcattctgataactcaccgtggacg

SEQ ID NO: 17986 - protein, 9 aa, synthetic construct
  REGION 1..9: note = Description of Artificial Sequence: Synthetic peptide
QHSDNSPWT

SEQ ID NO: 17987 - DNA, 27 bp, synthetic construct
  misc_feature 1..27: note = Description of Artificial Sequence: Synthetic oligonucleotide
  source 1..27: mol_type = other DNA
cagcaatattataatactccgtggacg

SEQ ID NO: 17988 - protein, 9 aa, synthetic construct
  REGION 1..9: note = Description of Artificial Sequence: Synthetic peptide
QQYYNTPWT

SEQ ID NO: 17989 - DNA, 27 bp, synthetic construct
  misc_feature 1..27: note = Description of Artificial Sequence: Synthetic oligonucleotide
  source 1..27: mol_type = other DNA
cagcaatattatagtactcctccgacg

SEQ ID NO: 17990 - protein, 9 aa, synthetic construct
  REGION 1..9: note = Description of Artificial Sequence: Synthetic peptide
QQYYSTPPT

SEQ ID NO: 17991 - DNA, 27 bp, synthetic construct
  misc_feature 1..27: note = Description of Artificial Sequence: Synthetic oligonucleotide
  source 1..27: mol_type = other DNA
ctacagcataatgattacccattcact

SEQ ID NO: 17992 - protein, 9 aa, synthetic construct
  REGION 1..9: note = Description of Artificial Sequence: Synthetic peptide
LQHNDYPFT

SEQ ID NO: 17993 - DNA, 27 bp, synthetic construct
  misc_feature 1..27: note = Description of Artificial Sequence: Synthetic oligonucleotide
  source 1..27: mol_type = other DNA
cagcactctgataactcaccgtggacg

SEQ ID NO: 17994 - protein, 9 aa, synthetic construct
  REGION 1..9: note = Description of Artificial Sequence: Synthetic peptide
QHSDNSPWT

SEQ ID NO: 17995 - DNA, 27 bp, synthetic construct
  misc_feature 1..27: note = Description of Artificial Sequence: Synthetic oligonucleotide
  source 1..27: mol_type = other DNA
cagcactctgataactcaccgtggacg

SEQ ID NO: 17996 - protein, 9 aa, synthetic construct
  REGION 1..9: note = Description of Artificial Sequence: Synthetic peptide
QHSDNSPWT

SEQ ID NO: 17997 - DNA, 27 bp, synthetic construct
  misc_feature 1..27: note = Description of Artificial Sequence: Synthetic oligonucleotide
  source 1..27: mol_type = other DNA
cagcactctgataactcaccgtggacg

SEQ ID NO: 17998 - protein, 9 aa, synthetic construct
  REGION 1..9: note = Description of Artificial Sequence: Synthetic peptide
QHSDNSPWT

SEQ ID NO: 17999 - DNA, 27 bp, synthetic construct
  misc_feature 1..27: note = Description of Artificial Sequence: Synthetic oligonucleotide
  source 1..27: mol_type = other DNA
cagcaatattatagagctcctccgacg

SEQ ID NO: 18000 - protein, 9 aa, synthetic construct
  REGION 1..9: note = Description of Artificial Sequence: Synthetic peptide
QQYYRAPPT

SEQ ID NO: 18001 - DNA, 27 bp, synthetic construct
  misc_feature 1..27: note = Description of Artificial Sequence: Synthetic oligonucleotide
  source 1..27: mol_type = other DNA
cagcactctgataactcaccgtggacg

SEQ ID NO: 18002 - protein, 9 aa, synthetic construct
  REGION 1..9: note = Description of Artificial Sequence: Synthetic peptide
QHSDNSPWT

SEQ ID NO: 18003 - DNA, 27 bp, synthetic construct
  misc_feature 1..27: note = Description of Artificial Sequence: Synthetic oligonucleotide
  source 1..27: mol_type = other DNA
atgcaagctctacatattcctctcact

SEQ ID NO: 18004 - protein, 9 aa, synthetic construct
  REGION 1..9: note = Description of Artificial Sequence: Synthetic peptide
MQALHIPLT

SEQ ID NO: 18005 - DNA, 27 bp, synthetic construct
  misc_feature 1..27: note = Description of Artificial Sequence: Synthetic oligonucleotide
  source 1..27: mol_type = other DNA
cagcactatgataactcaccgtggacg

SEQ ID NO: 18006 - protein, 9 aa, synthetic construct
  REGION 1..9: note = Description of Artificial Sequence: Synthetic peptide
QHYDNSPWT

SEQ ID NO: 18007 - DNA, 27 bp, synthetic construct
  misc_feature 1..27: note = Description of Artificial Sequence: Synthetic oligonucleotide
  source 1..27: mol_type = other DNA
cagcagtatgaaagctcagtgtggacg

SEQ ID NO: 18008 - protein, 9 aa, synthetic construct
  REGION 1..9: note = Description of Artificial Sequence: Synthetic peptide
QQYESSVWT

SEQ ID NO: 18009 - DNA, 27 bp, synthetic construct
  misc_feature 1..27: note = Description of Artificial Sequence: Synthetic oligonucleotide
  source 1..27: mol_type = other DNA
cagcattctgataactctccgtggacg

SEQ ID NO: 18010 - protein, 9 aa, synthetic construct
  REGION 1..9: note = Description of Artificial Sequence: Synthetic peptide
QHSDNSPWT

SEQ ID NO: 18011 - DNA, 27 bp, synthetic construct
  misc_feature 1..27: note = Description of Artificial Sequence: Synthetic oligonucleotide
  source 1..27: mol_type = other DNA
cagcagtatgaaatctcaccgtggacg

SEQ ID NO: 18012 - protein, 9 aa, synthetic construct
  REGION 1..9: note = Description of Artificial Sequence: Synthetic peptide
QQYEISPWT

SEQ ID NO: 18013 - DNA, 27 bp, synthetic construct
  misc_feature 1..27: note = Description of Artificial Sequence: Synthetic oligonucleotide
  source 1..27: mol_type = other DNA
cagcactctgataactcaccgtggacg

SEQ ID NO: 18014 - protein, 9 aa, synthetic construct
  REGION 1..9: note = Description of Artificial Sequence: Synthetic peptide
QHSDNSPWT

SEQ ID NO: 18015 - DNA, 27 bp, synthetic construct
  misc_feature 1..27: note = Description of Artificial Sequence: Synthetic oligonucleotide
  source 1..27: mol_type = other DNA
cagcactatgataactcaccgtggacg

SEQ ID NO: 18016 - protein, 9 aa, synthetic construct
  REGION 1..9: note = Description of Artificial Sequence: Synthetic peptide
QHYDNSPWT

SEQ ID NO: 18017 - DNA, 27 bp, synthetic construct
  misc_feature 1..27: note = Description of Artificial Sequence: Synthetic oligonucleotide
  source 1..27: mol_type = other DNA
cagcactatgataactcaccgtggacg

SEQ ID NO: 18018 - protein, 9 aa, synthetic construct
  REGION 1..9: note = Description of Artificial Sequence: Synthetic peptide
QHYDNSPWT

SEQ ID NO: 18019 - DNA, 27 bp, synthetic construct
  misc_feature 1..27: note = Description of Artificial Sequence: Synthetic oligonucleotide
  source 1..27: mol_type = other DNA
ctacagcataatagttacccgatcacc

SEQ ID NO: 18020 - protein, 9 aa, synthetic construct
  REGION 1..9: note = Description of Artificial Sequence: Synthetic peptide
LQHNSYPIT

SEQ ID NO: 18021 - DNA, 27 bp, synthetic construct
  misc_feature 1..27: note = Description of Artificial Sequence: Synthetic oligonucleotide
  source 1..27: mol_type = other DNA
cagcaatatcttagtagtcctctgacg

SEQ ID NO: 18022 - protein, 9 aa, synthetic construct
  REGION 1..9: note = Description of Artificial Sequence: Synthetic peptide
QQYLSSPLT

SEQ ID NO: 18023 - DNA, 27 bp, synthetic construct
  misc_feature 1..27: note = Description of Artificial Sequence: Synthetic oligonucleotide
  source 1..27: mol_type = other DNA
caacaatattatagtagtcctccgacg

SEQ ID NO: 18024 - protein, 9 aa, synthetic construct
  REGION 1..9: note = Description of Artificial Sequence: Synthetic peptide
QQYYSSPPT

SEQ ID NO: 18025 - DNA, 27 bp, synthetic construct
  misc_feature 1..27: note = Description of Artificial Sequence: Synthetic oligonucleotide
  source 1..27: mol_type = other DNA
cagcactatgataactcaccgtggacg

SEQ ID NO: 18026 - protein, 9 aa, synthetic construct
  REGION 1..9: note = Description of Artificial Sequence: Synthetic peptide
QHYDNSPWT

SEQ ID NO: 18027 - DNA, 27 bp, synthetic construct
  misc_feature 1..27: note = Description of Artificial Sequence: Synthetic oligonucleotide
  source 1..27: mol_type = other DNA
atgcaagctctacaccctcctctcact

SEQ ID NO: 18028 - protein, 9 aa, synthetic construct
  REGION 1..9: note = Description of Artificial Sequence: Synthetic peptide
MQALHPPLT

SEQ ID NO: 18029 - DNA, 27 bp, synthetic construct
  misc_feature 1..27: note = Description of Artificial Sequence: Synthetic oligonucleotide
  source 1..27: mol_type = other DNA
cagcactattataatactccgtggaag

SEQ ID NO: 18030 - protein, 9 aa, synthetic construct
  REGION 1..9: note = Description of Artificial Sequence: Synthetic peptide
QHYYNTPWK

SEQ ID NO: 18031 - DNA, 27 bp, synthetic construct
  misc_feature 1..27: note = Description of Artificial Sequence: Synthetic oligonucleotide
  source 1..27: mol_type = other DNA
cagcactatgataactcaccgtggacg

SEQ ID NO: 18032 - protein, 9 aa, synthetic construct
  REGION 1..9: note = Description of Artificial Sequence: Synthetic peptide
QHYDNSPWT

SEQ ID NO: 18033 - DNA, 27 bp, synthetic construct
  misc_feature 1..27: note = Description of Artificial Sequence: Synthetic oligonucleotide
  source 1..27: mol_type = other DNA
cagcactatgataactcaccgtggacg

SEQ ID NO: 18034 - protein, 9 aa, synthetic construct
  REGION 1..9: note = Description of Artificial Sequence: Synthetic peptide
QHYDNSPWT

SEQ ID NO: 18035 - DNA, 27 bp, synthetic construct
  misc_feature 1..27: note = Description of Artificial Sequence: Synthetic oligonucleotide
  source 1..27: mol_type = other DNA
cagcattctgataactcaccgtggacg

SEQ ID NO: 18036 - protein, 9 aa, synthetic construct
  REGION 1..9: note = Description of Artificial Sequence: Synthetic peptide
QHSDNSPWT

SEQ ID NO: 18037 - DNA, 27 bp, synthetic construct
  misc_feature 1..27: note = Description of Artificial Sequence: Synthetic oligonucleotide
  source 1..27: mol_type = other DNA
cagcactatgataactcaccgtggacg

SEQ ID NO: 18038 - protein, 9 aa, synthetic construct
  REGION 1..9: note = Description of Artificial Sequence: Synthetic peptide
QHYDNSPWT

SEQ ID NO: 18039 - DNA, 27 bp, synthetic construct
  misc_feature 1..27: note = Description of Artificial Sequence: Synthetic oligonucleotide
  source 1..27: mol_type = other DNA
cagcaatattatactactccgtggacg

SEQ ID NO: 18040 - protein, 9 aa, synthetic construct
  REGION 1..9: note = Description of Artificial Sequence: Synthetic peptide
QQYYTTPWT

SEQ ID NO: 18041 - DNA, 27 bp, synthetic construct
  misc_feature 1..27: note = Description of Artificial Sequence: Synthetic oligonucleotide
  source 1..27: mol_type = other DNA
cagcactctgataactcaccgtggacg

SEQ ID NO: 18042 - protein, 9 aa, synthetic construct
  REGION 1..9: note = Description of Artificial Sequence: Synthetic peptide
QHSDNSPWT

SEQ ID NO: 18043 - DNA, 27 bp, synthetic construct
  misc_feature 1..27: note = Description of Artificial Sequence: Synthetic oligonucleotide
  source 1..27: mol_type = other DNA
cagcagtatgaaagttcaccgtggacg

SEQ ID NO: 18044 - protein, 9 aa, synthetic construct
  REGION 1..9: note = Description of Artificial Sequence: Synthetic peptide
QQYESSPWT

SEQ ID NO: 18045 - DNA, 27 bp, synthetic construct
  misc_feature 1..27: note = Description of Artificial Sequence: Synthetic oligonucleotide
  source 1..27: mol_type = other DNA
atgcaagctctacatattcctctcact

SEQ ID NO: 18046 - protein, 9 aa, synthetic construct
  REGION 1..9: note = Description of Artificial Sequence: Synthetic peptide
MQALHIPLT

SEQ ID NO: 18047 - DNA, 27 bp, synthetic construct
  misc_feature 1..27: note = Description of Artificial Sequence: Synthetic oligonucleotide
  source 1..27: mol_type = other DNA
caggagtataatgactggccgtgcagt

SEQ ID NO: 18048 - protein, 9 aa, synthetic construct
  REGION 1..9: note = Description of Artificial Sequence: Synthetic peptide
QEYNDWPCS

SEQ ID NO: 18049 - DNA, 27 bp, synthetic construct
  misc_feature 1..27: note = Description of Artificial Sequence: Synthetic oligonucleotide
  source 1..27: mol_type = other DNA
cagcattatgataactctccgtggacg

SEQ ID NO: 18050 - protein, 9 aa, synthetic construct
  REGION 1..9: note = Description of Artificial Sequence: Synthetic peptide
QHYDNSPWT

SEQ ID NO: 18051 - DNA, 27 bp, synthetic construct
  misc_feature 1..27: note = Description of Artificial Sequence: Synthetic oligonucleotide
  source 1..27: mol_type = other DNA
cagcaatattttagtgttcctccgacg

SEQ ID NO: 18052 - protein, 9 aa, synthetic construct
  REGION 1..9: note = Description of Artificial Sequence: Synthetic peptide
QQYFSVPPT

SEQ ID NO: 18053 - DNA, 27 bp, synthetic construct
  misc_feature 1..27: note = Description of Artificial Sequence: Synthetic oligonucleotide
  source 1..27: mol_type = other DNA
cagcactatgataactcaccgtggacg

SEQ ID NO: 18054 - protein, 9 aa, synthetic construct
  REGION 1..9: note = Description of Artificial Sequence: Synthetic peptide
QHYDNSPWT

SEQ ID NO: 18055 - DNA, 27 bp, synthetic construct
  misc_feature 1..27: note = Description of Artificial Sequence: Synthetic oligonucleotide
  source 1..27: mol_type = other DNA
cagcaatattatagtactcctccgacg

SEQ ID NO: 18056 - protein, 9 aa, synthetic construct
  REGION 1..9: note = Description of Artificial Sequence: Synthetic peptide
QQYYSTPPT

SEQ ID NO: 18057 - DNA, 27 bp, synthetic construct
  misc_feature 1..27: note = Description of Artificial Sequence: Synthetic oligonucleotide
  source 1..27: mol_type = other DNA
cagcactatgataactcaccgtggacg

SEQ ID NO: 18058 - protein, 9 aa, synthetic construct
  REGION 1..9: note = Description of Artificial Sequence: Synthetic peptide
QHYDNSPWT

SEQ ID NO: 18059 - DNA, 27 bp, synthetic construct
  misc_feature 1..27: note = Description of Artificial Sequence: Synthetic oligonucleotide
  source 1..27: mol_type = other DNA
cagcactctgataactcaccgtggacg

SEQ ID NO: 18060 - protein, 9 aa, synthetic construct
  REGION 1..9: note = Description of Artificial Sequence: Synthetic peptide
QHSDNSPWT

SEQ ID NO: 18061 - DNA, 27 bp, synthetic construct
  misc_feature 1..27: note = Description of Artificial Sequence: Synthetic oligonucleotide
  source 1..27: mol_type = other DNA
cagcagtatgaaagctcaccgtggacg

SEQ ID NO: 18062 - protein, 9 aa, synthetic construct
  REGION 1..9: note = Description of Artificial Sequence: Synthetic peptide
QQYESSPWT

SEQ ID NO: 18063 - DNA, 27 bp, synthetic construct
  misc_feature 1..27: note = Description of Artificial Sequence: Synthetic oligonucleotide
  source 1..27: mol_type = other DNA
cagcattatgatagctcaccgtggacg

SEQ ID NO: 18064 - protein, 9 aa, synthetic construct
  REGION 1..9: note = Description of Artificial Sequence: Synthetic peptide
QHYDSSPWT

SEQ ID NO: 18065 - DNA, 27 bp, synthetic construct
  misc_feature 1..27: note = Description of Artificial Sequence: Synthetic oligonucleotide
  source 1..27: mol_type = other DNA
ctccagcattatagttaccctcggacg

SEQ ID NO: 18066 - protein, 9 aa, synthetic construct
  REGION 1..9: note = Description of Artificial Sequence: Synthetic peptide
LQHYSYPRT

SEQ ID NO: 18067 - DNA, 27 bp, synthetic construct
  misc_feature 1..27: note = Description of Artificial Sequence: Synthetic oligonucleotide
  source 1..27: mol_type = other DNA
cagcaatattttagtagtcctccgacg

SEQ ID NO: 18068 - protein, 9 aa, synthetic construct
  REGION 1..9: note = Description of Artificial Sequence: Synthetic peptide
QQYFSSPPT

SEQ ID NO: 18069 - DNA, 27 bp, synthetic construct
  misc_feature 1..27: note = Description of Artificial Sequence: Synthetic oligonucleotide
  source 1..27: mol_type = other DNA
cagcaatattatagttctcctccgacg

SEQ ID NO: 18070 - protein, 9 aa, synthetic construct
  REGION 1..9: note = Description of Artificial Sequence: Synthetic peptide
QQYYSSPPT

SEQ ID NO: 18071 - DNA, 27 bp, synthetic construct
  misc_feature 1..27: note = Description of Artificial Sequence: Synthetic oligonucleotide
  source 1..27: mol_type = other DNA
cagcaatatcatagttctcctctgacg

SEQ ID NO: 18072 - protein, 9 aa, synthetic construct
  REGION 1..9: note = Description of Artificial Sequence: Synthetic peptide
QQYHSSPLT

SEQ ID NO: 18073 - DNA, 27 bp, synthetic construct
  misc_feature 1..27: note = Description of Artificial Sequence: Synthetic oligonucleotide
  source 1..27: mol_type = other DNA
cagcaatattatagtactcctccgacg

SEQ ID NO: 18074 - protein, 9 aa, synthetic construct
  REGION 1..9: note = Description of Artificial Sequence: Synthetic peptide
QQYYSTPPT

SEQ ID NO: 18075 - DNA, 27 bp, synthetic construct
  misc_feature 1..27: note = Description of Artificial Sequence: Synthetic oligonucleotide
  source 1..27: mol_type = other DNA
cagcattatgataactcaccgtggacg

SEQ ID NO: 18076 - protein, 9 aa, synthetic construct
  REGION 1..9: note = Description of Artificial Sequence: Synthetic peptide
QHYDNSPWT

SEQ ID NO: 18077 - DNA, 27 bp, synthetic construct
  misc_feature 1..27: note = Description of Artificial Sequence: Synthetic oligonucleotide
  source 1..27: mol_type = other DNA
cagcactatgataactcaccgtggacg

SEQ ID NO: 18078 - protein, 9 aa, synthetic construct
  REGION 1..9: note = Description of Artificial Sequence: Synthetic peptide
QHYDNSPWT

SEQ ID NO: 18079 - DNA, 27 bp, synthetic construct
  misc_feature 1..27: note = Description of Artificial Sequence: Synthetic oligonucleotide
  source 1..27: mol_type = other DNA
cagcagtataatgactggccgtgcagt

SEQ ID NO: 18080 - protein, 9 aa, synthetic construct
  REGION 1..9: note = Description of Artificial Sequence: Synthetic peptide
QQYNDWPCS

SEQ ID NO: 18081 - DNA, 27 bp, synthetic construct
  misc_feature 1..27: note = Description of Artificial Sequence: Synthetic oligonucleotide
  source 1..27: mol_type = other DNA
cagcaatatcatagttctcctctgacg

SEQ ID NO: 18082 - protein, 9 aa, synthetic construct
  REGION 1..9: note = Description of Artificial Sequence: Synthetic peptide
QQYHSSPLT

SEQ ID NO: 18083 - DNA, 27 bp, synthetic construct
  misc_feature 1..27: note = Description of Artificial Sequence: Synthetic oligonucleotide
  source 1..27: mol_type = other DNA
cagcactatgataactcaccgtggacg

SEQ ID NO: 18084 - protein, 9 aa, synthetic construct
  REGION 1..9: note = Description of Artificial Sequence: Synthetic peptide
QHYDNSPWT

SEQ ID NO: 18085 - DNA, 27 bp, synthetic construct
  misc_feature 1..27: note = Description of Artificial Sequence: Synthetic oligonucleotide
  source 1..27: mol_type = other DNA
cagcactatgataactcaccgtggacg

SEQ ID NO: 18086 - protein, 9 aa, synthetic construct
  REGION 1..9: note = Description of Artificial Sequence: Synthetic peptide
QHYDNSPWT

SEQ ID NO: 18087 - DNA, 27 bp, synthetic construct
  misc_feature 1..27: note = Description of Artificial Sequence: Synthetic oligonucleotide
  source 1..27: mol_type = other DNA
cagcactatgataactctccgtggacg

SEQ ID NO: 18088 - protein, 9 aa, synthetic construct
  REGION 1..9: note = Description of Artificial Sequence: Synthetic peptide
QHYDNSPWT

SEQ ID NO: 18089 - DNA, 27 bp, synthetic construct
  misc_feature 1..27: note = Description of Artificial Sequence: Synthetic oligonucleotide
  source 1..27: mol_type = other DNA
cagcaatattatagtactccgtgcagt

SEQ ID NO: 18090 - protein, 9 aa, synthetic construct
  REGION 1..9: note = Description of Artificial Sequence: Synthetic peptide
QQYYSTPCS

SEQ ID NO: 18091 - DNA, 27 bp, synthetic construct
  misc_feature 1..27: note = Description of Artificial Sequence: Synthetic oligonucleotide
  source 1..27: mol_type = other DNA
cagcagtatggtaactcaccgctcact

SEQ ID NO: 18092 - protein, 9 aa, synthetic construct
  REGION 1..9: note = Description of Artificial Sequence: Synthetic peptide
QQYGNSPLT

SEQ ID NO: 18093 - DNA, 27 bp, synthetic construct
  misc_feature 1..27: note = Description of Artificial Sequence: Synthetic oligonucleotide
  source 1..27: mol_type = other DNA
cagcaatattataggactccgtggacg

SEQ ID NO: 18094 - protein, 9 aa, synthetic construct
  REGION 1..9: note = Description of Artificial Sequence: Synthetic peptide
QQYYRTPWT

SEQ ID NO: 18095 - DNA, 27 bp, synthetic construct
  misc_feature 1..27: note = Description of Artificial Sequence: Synthetic oligonucleotide
  source 1..27: mol_type = other DNA
ctacagcatagtaattacccgctcact

SEQ ID NO: 18096 - protein, 9 aa, synthetic construct
  REGION 1..9: note = Description of Artificial Sequence: Synthetic peptide
LQHSNYPLT

SEQ ID NO: 18097 - DNA, 27 bp, synthetic construct
  misc_feature 1..27: note = Description of Artificial Sequence: Synthetic oligonucleotide
  source 1..27: mol_type = other DNA
ctacagcataatgattacccattcact

SEQ ID NO: 18098 - protein, 9 aa, synthetic construct
  REGION 1..9: note = Description of Artificial Sequence: Synthetic peptide
LQHNDYPFT

SEQ ID NO: 18099 - DNA, 27 bp, synthetic construct
  misc_feature 1..27: note = Description of Artificial Sequence: Synthetic oligonucleotide
  source 1..27: mol_type = other DNA
cagcaatattatagtagtccaccgacg

SEQ ID NO: 18100 - protein, 9 aa, synthetic construct
  REGION 1..9: note = Description of Artificial Sequence: Synthetic peptide
QQYYSSPPT

SEQ ID NO: 18101 - DNA, 27 bp, synthetic construct
  misc_feature 1..27: note = Description of Artificial Sequence: Synthetic oligonucleotide
  source 1..27: mol_type = other DNA
cagcaatattatagtactccgtgcagt

SEQ ID NO: 18102 - protein, 9 aa, synthetic construct
  REGION 1..9: note = Description of Artificial Sequence: Synthetic peptide
QQYYSTPCS

SEQ ID NO: 18103 - DNA, 27 bp, synthetic construct
  misc_feature 1..27: note = Description of Artificial Sequence: Synthetic oligonucleotide
  source 1..27: mol_type = other DNA
caccagtataatgattacccattcact

SEQ ID NO: 18104 - protein, 9 aa, synthetic construct
  REGION 1..9: note = Description of Artificial Sequence: Synthetic peptide
HQYNDYPFT

SEQ ID NO: 18105 - DNA, 27 bp, synthetic construct
  misc_feature 1..27: note = Description of Artificial Sequence: Synthetic oligonucleotide
  source 1..27: mol_type = other DNA
cagcaatattttagtgttcctccgacg

SEQ ID NO: 18106 - protein, 9 aa, synthetic construct
  REGION 1..9: note = Description of Artificial Sequence: Synthetic peptide
QQYFSVPPT

SEQ ID NO: 18107 - DNA, 27 bp, synthetic construct
  misc_feature 1..27: note = Description of Artificial Sequence: Synthetic oligonucleotide
  source 1..27: mol_type = other DNA
cagcattctgataactcaccgtggacg

SEQ ID NO: 18108 - protein, 9 aa, synthetic construct
  REGION 1..9: note = Description of Artificial Sequence: Synthetic peptide
QHSDNSPWT

SEQ ID NO: 18109 - DNA, 27 bp, synthetic construct
  misc_feature 1..27: note = Description of Artificial Sequence: Synthetic oligonucleotide
  source 1..27: mol_type = other DNA
cagcactacaatgatactccatggaag

SEQ ID NO: 18110 - protein, 9 aa, synthetic construct
  REGION 1..9: note = Description of Artificial Sequence: Synthetic peptide
QHYNDTPWK

SEQ ID NO: 18111 - DNA, 27 bp, synthetic construct
  misc_feature 1..27: note = Description of Artificial Sequence: Synthetic oligonucleotide
  source 1..27: mol_type = other DNA
cagcactctgataactcaccgtggacg

SEQ ID NO: 18112 - protein, 9 aa, synthetic construct
  REGION 1..9: note = Description of Artificial Sequence: Synthetic peptide
QHSDNSPWT

SEQ ID NO: 18113 - DNA, 27 bp, synthetic construct
  misc_feature 1..27: note = Description of Artificial Sequence: Synthetic oligonucleotide
  source 1..27: mol_type = other DNA
caacaggctaacagtttcccattcact

SEQ ID NO: 18114 - protein, 9 aa, synthetic construct
  REGION 1..9: note = Description of Artificial Sequence: Synthetic peptide
QQANSFPFT

SEQ ID NO: 18115 - DNA, 27 bp, synthetic construct
  misc_feature 1..27: note = Description of Artificial Sequence: Synthetic oligonucleotide
  source 1..27: mol_type = other DNA
cttcagcatagtacttacccgctcact

SEQ ID NO: 18116 - protein, 9 aa, synthetic construct
  REGION 1..9: note = Description of Artificial Sequence: Synthetic peptide
LQHSTYPLT

SEQ ID NO: 18117 - DNA, 24 bp, synthetic construct
  misc_feature 1..24: note = Description of Artificial Sequence: Synthetic oligonucleotide
  source 1..24: mol_type = other DNA
caacagagttacagtacccccact

SEQ ID NO: 18118 - protein, 8 aa, synthetic construct
  REGION 1..8: note = Description of Artificial Sequence: Synthetic peptide
QQSYSTPT

SEQ ID NO: 18119 - DNA, 27 bp, synthetic construct
  misc_feature 1..27: note = Description of Artificial Sequence: Synthetic oligonucleotide
  source 1..27: mol_type = other DNA
atgcaaagtatacagcttccgtggacg

SEQ ID NO: 18120 - protein, 9 aa, synthetic construct
  REGION 1..9: note = Description of Artificial Sequence: Synthetic peptide
MQSIQLPWT

SEQ ID NO: 18121 - DNA, 27 bp, synthetic construct
  misc_feature 1..27: note = Description of Artificial Sequence: Synthetic oligonucleotide
  source 1..27: mol_type = other DNA
cagcaatattatagtactccgtgcagt

SEQ ID NO: 18122 - protein, 9 aa, synthetic construct
  REGION 1..9: note = Description of Artificial Sequence: Synthetic peptide
QQYYSTPCS

SEQ ID NO: 18123 - DNA, 27 bp, synthetic construct
  misc_feature 1..27: note = Description of Artificial Sequence: Synthetic oligonucleotide
  source 1..27: mol_type = other DNA
caacaatatggtaggtcaccattcaat

SEQ ID NO: 18124 - protein, 9 aa, synthetic construct
  REGION 1..9: note = Description of Artificial Sequence: Synthetic peptide
QQYGRSPFN

SEQ ID NO: 18125 - DNA, 27 bp, synthetic construct
  misc_feature 1..27: note = Description of Artificial Sequence: Synthetic oligonucleotide
  source 1..27: mol_type = other DNA
caacagactgacagtttcccattcact

SEQ ID NO: 18126 - protein, 9 aa, synthetic construct
  REGION 1..9: note = Description of Artificial Sequence: Synthetic peptide
QQTDSFPFT

SEQ ID NO: 18127 - DNA, 27 bp, synthetic construct
  misc_feature 1..27: note = Description of Artificial Sequence: Synthetic oligonucleotide
  source 1..27: mol_type = other DNA
cagcaatattatagtactccgtgcagt

SEQ ID NO: 18128 - protein, 9 aa, synthetic construct
  REGION 1..9: note = Description of Artificial Sequence: Synthetic peptide
QQYYSTPCS

SEQ ID NO: 18129 - DNA, 24 bp, synthetic construct
  misc_feature 1..24: note = Description of Artificial Sequence: Synthetic oligonucleotide
  source 1..24: mol_type = other DNA
caacagagttacagtacccccact

SEQ ID NO: 18130 - protein, 8 aa, synthetic construct
  REGION 1..8: note = Description of Artificial Sequence: Synthetic peptide
QQSYSTPT

SEQ ID NO: 18131 - DNA, 27 bp, synthetic construct
  misc_feature 1..27: note = Description of Artificial Sequence: Synthetic oligonucleotide
  source 1..27: mol_type = other DNA
cagcaatattatactactccgtgcagt

SEQ ID NO: 18132 - protein, 9 aa, synthetic construct
  REGION 1..9: note = Description of Artificial Sequence: Synthetic peptide
QQYYTTPCS

SEQ ID NO: 18133 - DNA, 27 bp, synthetic construct
  misc_feature 1..27: note = Description of Artificial Sequence: Synthetic oligonucleotide
  source 1..27: mol_type = other DNA
ctacagcataatagttacccgctcact

SEQ ID NO: 18134 - protein, 9 aa, synthetic construct
  REGION 1..9: note = Description of Artificial Sequence: Synthetic peptide
LQHNSYPLT

SEQ ID NO: 18135 - DNA, 27 bp, synthetic construct
  misc_feature 1..27: note = Description of Artificial Sequence: Synthetic oligonucleotide
  source 1..27: mol_type = other DNA
ctccaacatgatagttacccgctcact

SEQ ID NO: 18136 - protein, 9 aa, synthetic construct
  REGION 1..9: note = Description of Artificial Sequence: Synthetic peptide
LQHDSYPLT

SEQ ID NO: 18137 - DNA, 27 bp, synthetic construct
  misc_feature 1..27: note = Description of Artificial Sequence: Synthetic oligonucleotide
  source 1..27: mol_type = other DNA
atgcaaagtacacagtttcctcccact

SEQ ID NO: 18138 - protein, 9 aa, synthetic construct
  REGION 1..9: note = Description of Artificial Sequence: Synthetic peptide
MQSTQFPPT

SEQ ID NO: 18139 - DNA, 24 bp, synthetic construct
  misc_feature 1..24: note = Description of Artificial Sequence: Synthetic oligonucleotide
  source 1..24: mol_type = other DNA
cagcagtatggtagcttattcact

SEQ ID NO: 18140 - protein, 8 aa, synthetic construct
  REGION 1..8: note = Description of Artificial Sequence: Synthetic peptide
QQYGSLFT

SEQ ID NO: 18141 - DNA, 27 bp, synthetic construct
  misc_feature 1..27: note = Description of Artificial Sequence: Synthetic oligonucleotide
  source 1..27: mol_type = other DNA
caacaatatggtaggtcaccattcaat

SEQ ID NO: 18142 - protein, 9 aa, synthetic construct
  REGION 1..9: note = Description of Artificial Sequence: Synthetic peptide
QQYGRSPFN

SEQ ID NO: 18143 - DNA, 27 bp, synthetic construct
  misc_feature 1..27: note = Description of Artificial Sequence: Synthetic oligonucleotide
  source 1..27: mol_type = other DNA
cagcaatattatagtactccatccact

SEQ ID NO: 18144 - protein, 9 aa, synthetic construct
  REGION 1..9: note = Description of Artificial Sequence: Synthetic peptide
QQYYSTPST

SEQ ID NO: 18145 - DNA, 27 bp, synthetic construct
  misc_feature 1..27: note = Description of Artificial Sequence: Synthetic oligonucleotide
  source 1..27: mol_type = other DNA
caccaatattatagtactccgtgcagt

SEQ ID NO: 18146 - protein, 9 aa, synthetic construct
  REGION 1..9: note = Description of Artificial Sequence: Synthetic peptide
HQYYSTPCS

SEQ ID NO: 18147 - DNA, 27 bp, synthetic construct
  misc_feature 1..27: note = Description of Artificial Sequence: Synthetic oligonucleotide
  source 1..27: mol_type = other DNA
ctacagcattatagttatcctcggacg

SEQ ID NO: 18148 - protein, 9 aa, synthetic construct
  REGION 1..9: note = Description of Artificial Sequence: Synthetic peptide
LQHYSYPRT

SEQ ID NO: 18149 - DNA, 27 bp, synthetic construct
  misc_feature 1..27: note = Description of Artificial Sequence: Synthetic oligonucleotide
  source 1..27: mol_type = other DNA
cagcaatattatactactcctcccact

SEQ ID NO: 18150 - protein, 9 aa, synthetic construct
  REGION 1..9: note = Description of Artificial Sequence: Synthetic peptide
QQYYTTPPT

SEQ ID NO: 18151 - DNA, 24 bp, synthetic construct
  misc_feature 1..24: note = Description of Artificial Sequence: Synthetic oligonucleotide
  source 1..24: mol_type = other DNA
atgcaaagtatacagctaatcacc

SEQ ID NO: 18152 - protein, 8 aa, synthetic construct
  REGION 1..8: note = Description of Artificial Sequence: Synthetic peptide
MQSIQLIT

SEQ ID NO: 18153 - DNA, 27 bp, synthetic construct
  misc_feature 1..27: note = Description of Artificial Sequence: Synthetic oligonucleotide
  source 1..27: mol_type = other DNA
cagcagtatgatagctcaccgtggacg

SEQ ID NO: 18154 - protein, 9 aa, synthetic construct
  REGION 1..9: note = Description of Artificial Sequence: Synthetic peptide
QQYDSSPWT

SEQ ID NO: 18155 - DNA, 27 bp, synthetic construct
  misc_feature 1..27: note = Description of Artificial Sequence: Synthetic oligonucleotide
  source 1..27: mol_type = other DNA
caacagtataatagttaccctctcact

SEQ ID NO: 18156 - protein, 9 aa, synthetic construct
  REGION 1..9: note = Description of Artificial Sequence: Synthetic peptide
QQYNSYPLT

SEQ ID NO: 18157 - DNA, 27 bp, synthetic construct
  misc_feature 1..27: note = Description of Artificial Sequence: Synthetic oligonucleotide
  source 1..27: mol_type = other DNA
caacagactgacagtttcccattcact

SEQ ID NO: 18158 - protein, 9 aa, synthetic construct
  REGION 1..9: note = Description of Artificial Sequence: Synthetic peptide
QQTDSFPFT

SEQ ID NO: 18159 - DNA, 27 bp, synthetic construct
  misc_feature 1..27: note = Description of Artificial Sequence: Synthetic oligonucleotide
  source 1..27: mol_type = other DNA
caacagactgacagtttcccattcact

SEQ ID NO: 18160 - protein, 9 aa, synthetic construct
  REGION 1..9: note = Description of Artificial Sequence: Synthetic peptide
QQTDSFPFT

SEQ ID NO: 18161 - DNA, 27 bp, synthetic construct
  misc_feature 1..27: note = Description of Artificial Sequence: Synthetic oligonucleotide
  source 1..27: mol_type = other DNA
atgcaaagtatacagattccgtggacg

SEQ ID NO: 18162 - protein, 9 aa, synthetic construct
  REGION 1..9: note = Description of Artificial Sequence: Synthetic peptide
MQSIQIPWT

SEQ ID NO: 18163 - DNA, 27 bp, synthetic construct
  misc_feature 1..27: note = Description of Artificial Sequence: Synthetic oligonucleotide
  source 1..27: mol_type = other DNA
caacagactgacagtttcccattcact

SEQ ID NO: 18164 - protein, 9 aa, synthetic construct
  REGION 1..9: note = Description of Artificial Sequence: Synthetic peptide
QQTDSFPFT

SEQ ID NO: 18165 - DNA, 27 bp, synthetic construct
  misc_feature 1..27: note = Description of Artificial Sequence: Synthetic oligonucleotide
  source 1..27: mol_type = other DNA
cagcaatattatagtactccattcact

SEQ ID NO: 18166 - protein, 9 aa, synthetic construct
  REGION 1..9: note = Description of Artificial Sequence: Synthetic peptide
QQYYSTPFT

SEQ ID NO: 18167 - DNA, 24 bp, synthetic construct
  misc_feature 1..24: note = Description of Artificial Sequence: Synthetic oligonucleotide
  source 1..24: mol_type = other DNA
caacagagttacagtacccccact

SEQ ID NO: 18168 - protein, 8 aa, synthetic construct
  REGION 1..8: note = Description of Artificial Sequence: Synthetic peptide
QQSYSTPT

SEQ ID NO: 18169 - DNA, 27 bp, synthetic construct
  misc_feature 1..27: note = Description of Artificial Sequence: Synthetic oligonucleotide
  source 1..27: mol_type = other DNA
atgcaaagtatacagcttccgctcact

SEQ ID NO: 18170 - protein, 9 aa, synthetic construct
  REGION 1..9: note = Description of Artificial Sequence: Synthetic peptide
MQSIQLPLT

SEQ ID NO: 18171 - DNA, 27 bp, synthetic construct
  misc_feature 1..27: note = Description of Artificial Sequence: Synthetic oligonucleotide
  source 1..27: mol_type = other DNA
caacagtataatagtttcccattcact

SEQ ID NO: 18172 - protein, 9 aa, synthetic construct
  REGION 1..9: note = Description of Artificial Sequence: Synthetic peptide
QQYNSFPFT

SEQ ID NO: 18173 - DNA, 27 bp, synthetic construct
  misc_feature 1..27: note = Description of Artificial Sequence: Synthetic oligonucleotide
  source 1..27: mol_type = other DNA
cagcaatattatagtattcctccgacg

SEQ ID NO: 18174 - protein, 9 aa, synthetic construct
  REGION 1..9: note = Description of Artificial Sequence: Synthetic peptide
QQYYSIPPT

SEQ ID NO: 18175 - DNA, 24 bp, synthetic construct
  misc_feature 1..24: note = Description of Artificial Sequence: Synthetic oligonucleotide
  source 1..24: mol_type = other DNA
caacagagttacagtacccccact

SEQ ID NO: 18176 - protein, 8 aa, synthetic construct
  REGION 1..8: note = Description of Artificial Sequence: Synthetic peptide
QQSYSTPT

SEQ ID NO: 18177 - DNA, 27 bp, synthetic construct
  misc_feature 1..27: note = Description of Artificial Sequence: Synthetic oligonucleotide
  source 1..27: mol_type = other DNA
atgcaaagtatacagcttccgtggacg

SEQ ID NO: 18178 - protein, 9 aa, synthetic construct
  REGION 1..9: note = Description of Artificial Sequence: Synthetic peptide
MQSIQLPWT

SEQ ID NO: 18179 - DNA, 27 bp, synthetic construct
  misc_feature 1..27: note = Description of Artificial Sequence: Synthetic oligonucleotide
  source 1..27: mol_type = other DNA
atgcagagtatacagcttccgctcact

SEQ ID NO: 18180 - protein, 9 aa, synthetic construct
  REGION 1..9: note = Description of Artificial Sequence: Synthetic peptide
MQSIQLPLT

SEQ ID NO: 18181 - DNA, 27 bp, synthetic construct
  misc_feature 1..27: note = Description of Artificial Sequence: Synthetic oligonucleotide
  source 1..27: mol_type = other DNA
ctacagcatcgtaattacccgctcact

SEQ ID NO: 18182 - protein, 9 aa, synthetic construct
  REGION 1..9: note = Description of Artificial Sequence: Synthetic peptide
LQHRNYPLT

SEQ ID NO: 18183 - DNA, 27 bp, synthetic construct
  misc_feature 1..27: note = Description of Artificial Sequence: Synthetic oligonucleotide
  source 1..27: mol_type = other DNA
ctacagcataatagttaccctctcatt

SEQ ID NO: 18184 - protein, 9 aa, synthetic construct
  REGION 1..9: note = Description of Artificial Sequence: Synthetic peptide
LQHNSYPLI

SEQ ID NO: 18185 - DNA, 27 bp, synthetic construct
  misc_feature 1..27: note = Description of Artificial Sequence: Synthetic oligonucleotide
  source 1..27: mol_type = other DNA
atgcaaagtatacagattccgtggacg

SEQ ID NO: 18186 - protein, 9 aa, synthetic construct
  REGION 1..9: note = Description of Artificial Sequence: Synthetic peptide
MQSIQIPWT

SEQ ID NO: 18187 - DNA, 27 bp, synthetic construct
  misc_feature 1..27: note = Description of Artificial Sequence: Synthetic oligonucleotide
  source 1..27: mol_type = other DNA
ctacagcataatagttacccgctcact

SEQ ID NO: 18188 - protein, 9 aa, synthetic construct
  REGION 1..9: note = Description of Artificial Sequence: Synthetic peptide
LQHNSYPLT

SEQ ID NO: 18189 - DNA, 27 bp, synthetic construct
  misc_feature 1..27: note = Description of Artificial Sequence: Synthetic oligonucleotide
  source 1..27: mol_type = other DNA
cagcaatattatagtactccgtgcagt

SEQ ID NO: 18190 - protein, 9 aa, synthetic construct
  REGION 1..9: note = Description of Artificial Sequence: Synthetic peptide
QQYYSTPCS

SEQ ID NO: 18191 - DNA, 24 bp, synthetic construct
  misc_feature 1..24: note = Description of Artificial Sequence: Synthetic oligonucleotide
  source 1..24: mol_type = other DNA
caacagagttacagtatccccact

SEQ ID NO: 18192 - protein, 8 aa, synthetic construct
  REGION 1..8: note = Description of Artificial Sequence: Synthetic peptide
QQSYSIPT

SEQ ID NO: 18193 - DNA, 27 bp, synthetic construct
  misc_feature 1..27: note = Description of Artificial Sequence: Synthetic oligonucleotide
  source 1..27: mol_type = other DNA
cagcaatattatagtactcctccgacg

SEQ ID NO: 18194 - protein, 9 aa, synthetic construct
  REGION 1..9: note = Description of Artificial Sequence: Synthetic peptide
QQYYSTPPT

SEQ ID NO: 18195 - DNA, 27 bp, synthetic construct
  misc_feature 1..27: note = Description of Artificial Sequence: Synthetic oligonucleotide
  source 1..27: mol_type = other DNA
caccaatattatagttatcctccgacg

SEQ ID NO: 18196 - protein, 9 aa, synthetic construct
  REGION 1..9: note = Description of Artificial Sequence: Synthetic peptide
HQYYSYPPT

SEQ ID NO: 18197 - DNA, 27 bp, synthetic construct
  misc_feature 1..27: note = Description of Artificial Sequence: Synthetic oligonucleotide
  source 1..27: mol_type = other DNA
ctacagcataatagttaccctctcact

SEQ ID NO: 18198 - protein, 9 aa, synthetic construct
  REGION 1..9: note = Description of Artificial Sequence: Synthetic peptide
LQHNSYPLT

SEQ ID NO: 18199 - DNA, 27 bp, synthetic construct
  misc_feature 1..27: note = Description of Artificial Sequence: Synthetic oligonucleotide
  source 1..27: mol_type = other DNA
caacagggtaacagtttcccattcact

SEQ ID NO: 18200 - protein, 9 aa, synthetic construct
  REGION 1..9: note = Description of Artificial Sequence: Synthetic peptide
QQGNSFPFT

SEQ ID NO: 18201 - DNA, 27 bp, synthetic construct
  misc_feature 1..27: note = Description of Artificial Sequence: Synthetic oligonucleotide
  source 1..27: mol_type = other DNA
caacagactgacagtttcccattcact

SEQ ID NO: 18202 - protein, 9 aa, synthetic construct
  REGION 1..9: note = Description of Artificial Sequence: Synthetic peptide
QQTDSFPFT

SEQ ID NO: 18203 - DNA, 27 bp, synthetic construct
  misc_feature 1..27: note = Description of Artificial Sequence: Synthetic oligonucleotide
  source 1..27: mol_type = other DNA
caacaatatggtcggtcaccattcaat

SEQ ID NO: 18204 - protein, 9 aa, synthetic construct
  REGION 1..9: note = Description of Artificial Sequence: Synthetic peptide
QQYGRSPFN

SEQ ID NO: 18205 - DNA, 27 bp, synthetic construct
  misc_feature 1..27: note = Description of Artificial Sequence: Synthetic oligonucleotide
  source 1..27: mol_type = other DNA
caacagactgacagtttcccattcact

SEQ ID NO: 18206 - protein, 9 aa, synthetic construct
  REGION 1..9: note = Description of Artificial Sequence: Synthetic peptide
QQTDSFPFT

SEQ ID NO: 18207 - DNA, 27 bp, synthetic construct
  misc_feature 1..27: note = Description of Artificial Sequence: Synthetic oligonucleotide
  source 1..27: mol_type = other DNA
ctacagcattatagttatcctcggacg

SEQ ID NO: 18208 - protein, 9 aa, synthetic construct
  REGION 1..9: note = Description of Artificial Sequence: Synthetic peptide
LQHYSYPRT

SEQ ID NO: 18209 - DNA, 27 bp, synthetic construct
  misc_feature 1..27: note = Description of Artificial Sequence: Synthetic oligonucleotide
  source 1..27: mol_type = other DNA
caacagactgacagtttcccattcact

SEQ ID NO: 18210 - protein, 9 aa, synthetic construct
  REGION 1..9: note = Description of Artificial Sequence: Synthetic peptide
QQTDSFPFT

SEQ ID NO: 18211 - DNA, 27 bp, synthetic construct
  misc_feature 1..27: note = Description of Artificial Sequence: Synthetic oligonucleotide
  source 1..27: mol_type = other DNA
ctacagcataatagttacccgctcact

SEQ ID NO: 18212 - protein, 9 aa, synthetic construct
  REGION 1..9: note = Description of Artificial Sequence: Synthetic peptide
LQHNSYPLT

SEQ ID NO: 18213 - DNA, 27 bp, synthetic construct
  misc_feature 1..27: note = Description of Artificial Sequence: Synthetic oligonucleotide
  source 1..27: mol_type = other DNA
cagcaatattttagtactccgtacaat

SEQ ID NO: 18214 - protein, 9 aa, synthetic construct
  REGION 1..9: note = Description of Artificial Sequence: Synthetic peptide
QQYFSTPYN

SEQ ID NO: 18215 - DNA, 27 bp, synthetic construct
  misc_feature 1..27: note = Description of Artificial Sequence: Synthetic oligonucleotide
  source 1..27: mol_type = other DNA
ctacaacattatagtttcccgtacagt

SEQ ID NO: 18216 - protein, 9 aa, synthetic construct
  REGION 1..9: note = Description of Artificial Sequence: Synthetic peptide
LQHYSFPYS

SEQ ID NO: 18217 - DNA, 27 bp, synthetic construct
  misc_feature 1..27: note = Description of Artificial Sequence: Synthetic oligonucleotide
  source 1..27: mol_type = other DNA
caacagactgacagtttcccattcact

SEQ ID NO: 18218 - protein, 9 aa, synthetic construct
  REGION 1..9: note = Description of Artificial Sequence: Synthetic peptide
QQTDSFPFT

SEQ ID NO: 18219 - DNA, 27 bp, synthetic construct
  misc_feature 1..27: note = Description of Artificial Sequence: Synthetic oligonucleotide
  source 1..27: mol_type = other DNA
cagcaatattatagtactccattcact

SEQ ID NO: 18220 - protein, 9 aa, synthetic construct
  REGION 1..9: note = Description of Artificial Sequence: Synthetic peptide
QQYYSTPFT

SEQ ID NO: 18221 - DNA, 27 bp, synthetic construct
  misc_feature 1..27: note = Description of Artificial Sequence: Synthetic oligonucleotide
  source 1..27: mol_type = other DNA
ctacagcataatagttacccgctcact

SEQ ID NO: 18222 - protein, 9 aa, synthetic construct
  REGION 1..9: note = Description of Artificial Sequence: Synthetic peptide
LQHNSYPLT

SEQ ID NO: 18223 - DNA, 27 bp, synthetic construct
  misc_feature 1..27: note = Description of Artificial Sequence: Synthetic oligonucleotide
  source 1..27: mol_type = other DNA
caacagtataataattacccgctcact

SEQ ID NO: 18224 - protein, 9 aa, synthetic construct
  REGION 1..9: note = Description of Artificial Sequence: Synthetic peptide
QQYNNYPLT

SEQ ID NO: 18225 - DNA, 27 bp, synthetic construct
  misc_feature 1..27: note = Description of Artificial Sequence: Synthetic oligonucleotide
  source 1..27: mol_type = other DNA
atgcaaagtatacagcttccgtggacg

SEQ ID NO: 18226 - protein, 9 aa, synthetic construct
  REGION 1..9: note = Description of Artificial Sequence: Synthetic peptide
MQSIQLPWT

SEQ ID NO: 18227 - DNA, 24 bp, synthetic construct
  misc_feature 1..24: note = Description of Artificial Sequence: Synthetic oligonucleotide
  source 1..24: mol_type = other DNA
caacagagttacagtatttacact

SEQ ID NO: 18228 - protein, 8 aa, synthetic construct
  REGION 1..8: note = Description of Artificial Sequence: Synthetic peptide
QQSYSIYT

SEQ ID NO: 18229 - DNA, 27 bp, synthetic construct
  misc_feature 1..27: note = Description of Artificial Sequence: Synthetic oligonucleotide
  source 1..27: mol_type = other DNA
atgcaaggtatacagcttccgctcact

SEQ ID NO: 18230 - protein, 9 aa, synthetic construct
  REGION 1..9: note = Description of Artificial Sequence: Synthetic peptide
MQGIQLPLT

SEQ ID NO: 18231 - DNA, 24 bp, synthetic construct
  misc_feature 1..24: note = Description of Artificial Sequence: Synthetic oligonucleotide
  source 1..24: mol_type = other DNA
caacagagtttcagtacccccact

SEQ ID NO: 18232 - protein, 8 aa, synthetic construct
  REGION 1..8: note = Description of Artificial Sequence: Synthetic peptide
QQSFSTPT

SEQ ID NO: 18233 - DNA, 30 bp, synthetic construct
  misc_feature 1..30: note = Description of Artificial Sequence: Synthetic oligonucleotide
  source 1..30: mol_type = other DNA
cagcagtataatgactggcctccgtggacg

SEQ ID NO: 18234 - protein, 10 aa, synthetic construct
  REGION 1..10: note = Description of Artificial Sequence: Synthetic peptide
QQYNDWPPWT

SEQ ID NO: 18235 - DNA, 27 bp, synthetic construct
  misc_feature 1..27: note = Description of Artificial Sequence: Synthetic oligonucleotide
  source 1..27: mol_type = other DNA
atgcaaagtatacaggttccgtggacg

SEQ ID NO: 18236 - protein, 9 aa, synthetic construct
  REGION 1..9: note = Description of Artificial Sequence: Synthetic peptide
MQSIQVPWT

SEQ ID NO: 18237 - DNA, 24 bp, synthetic construct
  misc_feature 1..24: note = Description of Artificial Sequence: Synthetic oligonucleotide
  source 1..24: mol_type = other DNA
caacagagttacagtacccccact

SEQ ID NO: 18238 - protein, 8 aa, synthetic construct
  REGION 1..8: note = Description of Artificial Sequence: Synthetic peptide
QQSYSTPT

SEQ ID NO: 18239 - DNA, 27 bp, synthetic construct
  misc_feature 1..27: note = Description of Artificial Sequence: Synthetic oligonucleotide
  source 1..27: mol_type = other DNA
catcagtataaacattacccgatcacc

SEQ ID NO: 18240 - protein, 9 aa, synthetic construct
  REGION 1..9: note = Description of Artificial Sequence: Synthetic peptide
HQYKHYPIT

SEQ ID NO: 18241 - DNA, 27 bp, synthetic construct
  misc_feature 1..27: note = Description of Artificial Sequence: Synthetic oligonucleotide
  source 1..27: mol_type = other DNA
atgcaaagtatacagattccgtggacg

SEQ ID NO: 18242 - protein, 9 aa, synthetic construct
  REGION 1..9: note = Description of Artificial Sequence: Synthetic peptide
MQSIQIPWT

SEQ ID NO: 18243 - DNA, 24 bp, synthetic construct
  misc_feature 1..24: note = Description of Artificial Sequence: Synthetic oligonucleotide
  source 1..24: mol_type = other DNA
caacagagttacagtacccccact

SEQ ID NO: 18244 - protein, 8 aa, synthetic construct
  REGION 1..8: note = Description of Artificial Sequence: Synthetic peptide
QQSYSTPT

SEQ ID NO: 18245 - DNA, 27 bp, synthetic construct
  misc_feature 1..27: note = Description of Artificial Sequence: Synthetic oligonucleotide
  source 1..27: mol_type = other DNA
cagcaatattacagtactccattcact

SEQ ID NO: 18246 - protein, 9 aa, synthetic construct
  REGION 1..9: note = Description of Artificial Sequence: Synthetic peptide
QQYYSTPFT

SEQ ID NO: 18247 - DNA, 27 bp, synthetic construct
  misc_feature 1..27: note = Description of Artificial Sequence: Synthetic oligonucleotide
  source 1..27: mol_type = other DNA
cagcaatattatagtactccgtgcagt

SEQ ID NO: 18248 - protein, 9 aa, synthetic construct
  REGION 1..9: note = Description of Artificial Sequence: Synthetic peptide
QQYYSTPCS

SEQ ID NO: 18249 - DNA, 27 bp, synthetic construct
  misc_feature 1..27: note = Description of Artificial Sequence: Synthetic oligonucleotide
  source 1..27: mol_type = other DNA
cagcaatattttaatactcctcccact

SEQ ID NO: 18250 - protein, 9 aa, synthetic construct
  REGION 1..9: note = Description of Artificial Sequence: Synthetic peptide
QQYFNTPPT

SEQ ID NO: 18251 - DNA, 24 bp, synthetic construct
  misc_feature 1..24: note = Description of Artificial Sequence: Synthetic oligonucleotide
  source 1..24: mol_type = other DNA
caacagagttacagtacccccact

SEQ ID NO: 18252 - protein, 8 aa, synthetic construct
  REGION 1..8: note = Description of Artificial Sequence: Synthetic peptide
QQSYSTPT

SEQ ID NO: 18253 - DNA, 27 bp, synthetic construct
  misc_feature 1..27: note = Description of Artificial Sequence: Synthetic oligonucleotide
  source 1..27: mol_type = other DNA
atgcaaagtatacaggttccgtggacg

SEQ ID NO: 18254 - protein, 9 aa, synthetic construct
  REGION 1..9: note = Description of Artificial Sequence: Synthetic peptide
MQSIQVPWT

SEQ ID NO: 18255 - DNA, 27 bp, synthetic construct
  misc_feature 1..27: note = Description of Artificial Sequence: Synthetic oligonucleotide
  source 1..27: mol_type = other DNA
caacaatatggtaggtcaccattcaat

SEQ ID NO: 18256 - protein, 9 aa, synthetic construct
  REGION 1..9: note = Description of Artificial Sequence: Synthetic peptide
QQYGRSPFN

SEQ ID NO: 18257 - DNA, 27 bp, synthetic construct
  misc_feature 1..27: note = Description of Artificial Sequence: Synthetic oligonucleotide
  source 1..27: mol_type = other DNA
ctacagcattataatttcccgtacagt

SEQ ID NO: 18258 - protein, 9 aa, synthetic construct
  REGION 1..9: note = Description of Artificial Sequence: Synthetic peptide
LQHYNFPYS

SEQ ID NO: 18259 - DNA, 27 bp, synthetic construct
  misc_feature 1..27: note = Description of Artificial Sequence: Synthetic oligonucleotide
  source 1..27: mol_type = other DNA
caacagactgacagtttcccattcact

SEQ ID NO: 18260 - protein, 9 aa, synthetic construct
  REGION 1..9: note = Description of Artificial Sequence: Synthetic peptide
QQTDSFPFT

SEQ ID NO: 18261 - DNA, 27 bp, synthetic construct
  misc_feature 1..27: note = Description of Artificial Sequence: Synthetic oligonucleotide
  source 1..27: mol_type = other DNA
ctacagcatagtaattacccgctcact

SEQ ID NO: 18262 - protein, 9 aa, synthetic construct
  REGION 1..9: note = Description of Artificial Sequence: Synthetic peptide
LQHSNYPLT

SEQ ID NO: 18263 - DNA, 24 bp, synthetic construct
  misc_feature 1..24: note = Description of Artificial Sequence: Synthetic oligonucleotide
  source 1..24: mol_type = other DNA
cagcaatattatcgtagtcctagt

SEQ ID NO: 18264 - protein, 8 aa, synthetic construct
  REGION 1..8: note = Description of Artificial Sequence: Synthetic peptide
QQYYRSPS

SEQ ID NO: 18265 - DNA, 27 bp, synthetic construct
  misc_feature 1..27: note = Description of Artificial Sequence: Synthetic oligonucleotide
  source 1..27: mol_type = other DNA
caacagactgacagtttcccattcact

SEQ ID NO: 18266 - protein, 9 aa, synthetic construct
  REGION 1..9: note = Description of Artificial Sequence: Synthetic peptide
QQTDSFPFT

SEQ ID NO: 18267 - DNA, 24 bp, synthetic construct
  misc_feature 1..24: note = Description of Artificial Sequence: Synthetic oligonucleotide
  source 1..24: mol_type = other DNA
caacagagttacagtacccccact

SEQ ID NO: 18268 - protein, 8 aa, synthetic construct
  REGION 1..8: note = Description of Artificial Sequence: Synthetic peptide
QQSYSTPT

SEQ ID NO: 18269 - DNA, 27 bp, synthetic construct
  misc_feature 1..27: note = Description of Artificial Sequence: Synthetic oligonucleotide
  source 1..27: mol_type = other DNA
atgcaaagtatacagattccgtggacg

SEQ ID NO: 18270 - protein, 9 aa, synthetic construct
  REGION 1..9: note = Description of Artificial Sequence: Synthetic peptide
MQSIQIPWT

SEQ ID NO: 18271 - DNA, 27 bp, synthetic construct
  misc_feature 1..27: note = Description of Artificial Sequence: Synthetic oligonucleotide
  source 1..27: mol_type = other DNA
caacaatattatagtggtccgtgcagt

SEQ ID NO: 18272 - protein, 9 aa, synthetic construct
  REGION 1..9: note = Description of Artificial Sequence: Synthetic peptide
QQYYSGPCS

SEQ ID NO: 18273 - DNA, 27 bp, synthetic construct
  misc_feature 1..27: note = Description of Artificial Sequence: Synthetic oligonucleotide
  source 1..27: mol_type = other DNA
caacagtatcatagttacccattcact

SEQ ID NO: 18274 - protein, 9 aa, synthetic construct
  REGION 1..9: note = Description of Artificial Sequence: Synthetic peptide
QQYHSYPFT

SEQ ID NO: 18275 - DNA, 27 bp, synthetic construct
  misc_feature 1..27: note = Description of Artificial Sequence: Synthetic oligonucleotide
  source 1..27: mol_type = other DNA
atgcaaagtatacaggttccgtggacg

SEQ ID NO: 18276 - protein, 9 aa, synthetic construct
  REGION 1..9: note = Description of Artificial Sequence: Synthetic peptide
MQSIQVPWT

SEQ ID NO: 18277 - DNA, 27 bp, synthetic construct
  misc_feature 1..27: note = Description of Artificial Sequence: Synthetic oligonucleotide
  source 1..27: mol_type = other DNA
caacaatatggtaggtcaccattcaat

SEQ ID NO: 18278 - protein, 9 aa, synthetic construct
  REGION 1..9: note = Description of Artificial Sequence: Synthetic peptide
QQYGRSPFN

SEQ ID NO: 18279 - DNA, 24 bp, synthetic construct
  misc_feature 1..24: note = Description of Artificial Sequence: Synthetic oligonucleotide
  source 1..24: mol_type = other DNA
cagcaatataatcgtagtcttagt

SEQ ID NO: 18280 - protein, 8 aa, synthetic construct
  REGION 1..8: note = Description of Artificial Sequence: Synthetic peptide
QQYNRSLS

SEQ ID NO: 18281 - DNA, 27 bp, synthetic construct
  misc_feature 1..27: note = Description of Artificial Sequence: Synthetic oligonucleotide
  source 1..27: mol_type = other DNA
atgcaaaatataaagtatccgctcact

SEQ ID NO: 18282 - protein, 9 aa, synthetic construct
  REGION 1..9: note = Description of Artificial Sequence: Synthetic peptide
MQNIKYPLT

SEQ ID NO: 18283 - DNA, 27 bp, synthetic construct
  misc_feature 1..27: note = Description of Artificial Sequence: Synthetic oligonucleotide
  source 1..27: mol_type = other DNA
cagcaatattatagtactccgtgcagt

SEQ ID NO: 18284 - protein, 9 aa, synthetic construct
  REGION 1..9: note = Description of Artificial Sequence: Synthetic peptide
QQYYSTPCS

SEQ ID NO: 18285 - DNA, 27 bp, synthetic construct
  misc_feature 1..27: note = Description of Artificial Sequence: Synthetic oligonucleotide
  source 1..27: mol_type = other DNA
cagcattattatagtactccgtgcagt

SEQ ID NO: 18286 - protein, 9 aa, synthetic construct
  REGION 1..9: note = Description of Artificial Sequence: Synthetic peptide
QHYYSTPCS

SEQ ID NO: 18287 - DNA, 27 bp, synthetic construct
  misc_feature 1..27: note = Description of Artificial Sequence: Synthetic oligonucleotide
  source 1..27: mol_type = other DNA
caacagggtaacagtttcccgctcact

SEQ ID NO: 18288 - protein, 9 aa, synthetic construct
  REGION 1..9: note = Description of Artificial Sequence: Synthetic peptide
QQGNSFPLT

SEQ ID NO: 18289 - DNA, 27 bp, synthetic construct
  misc_feature 1..27: note = Description of Artificial Sequence: Synthetic oligonucleotide
  source 1..27: mol_type = other DNA
cagcaatattttagttctcctcggacg

SEQ ID NO: 18290 - protein, 9 aa, synthetic construct
  REGION 1..9: note = Description of Artificial Sequence: Synthetic peptide
QQYFSSPRT

SEQ ID NO: 18291 - DNA, 27 bp, synthetic construct
  misc_feature 1..27: note = Description of Artificial Sequence: Synthetic oligonucleotide
  source 1..27: mol_type = other DNA
caccagactgacagtttcccattcact

SEQ ID NO: 18292 - protein, 9 aa, synthetic construct
  REGION 1..9: note = Description of Artificial Sequence: Synthetic peptide
HQTDSFPFT

SEQ ID NO: 18293 - DNA, 27 bp, synthetic construct
  misc_feature 1..27: note = Description of Artificial Sequence: Synthetic oligonucleotide
  source 1..27: mol_type = other DNA
caccagactgacagtttcccattcact

SEQ ID NO: 18294 - protein, 9 aa, synthetic construct
  REGION 1..9: note = Description of Artificial Sequence: Synthetic peptide
HQTDSFPFT

SEQ ID NO: 18295 - DNA, 24 bp, synthetic construct
  misc_feature 1..24: note = Description of Artificial Sequence: Synthetic oligonucleotide
  source 1..24: mol_type = other DNA
caacagagttacagtacccccact

SEQ ID NO: 18296 - protein, 8 aa, synthetic construct
  REGION 1..8: note = Description of Artificial Sequence: Synthetic peptide
QQSYSTPT

SEQ ID NO: 18297 - DNA, 27 bp, synthetic construct
  misc_feature 1..27: note = Description of Artificial Sequence: Synthetic oligonucleotide
  source 1..27: mol_type = other DNA
atgcaaagtatacaggttccgtggacg

SEQ ID NO: 18298 - protein, 9 aa, synthetic construct
  REGION 1..9: note = Description of Artificial Sequence: Synthetic peptide
MQSIQVPWT

SEQ ID NO: 18299 - DNA, 27 bp, synthetic construct
  misc_feature 1..27: note = Description of Artificial Sequence: Synthetic oligonucleotide
  source 1..27: mol_type = other DNA
cagcaatattatagtactccgtgcagt

SEQ ID NO: 18300 - protein, 9 aa, synthetic construct
  REGION 1..9: note = Description of Artificial Sequence: Synthetic peptide
QQYYSTPCS

SEQ ID NO: 18301 - DNA, 27 bp, synthetic construct
  misc_feature 1..27: note = Description of Artificial Sequence: Synthetic oligonucleotide
  source 1..27: mol_type = other DNA
caacaatattatagtactccgtgcagt

SEQ ID NO: 18302 - protein, 9 aa, synthetic construct
  REGION 1..9: note = Description of Artificial Sequence: Synthetic peptide
QQYYSTPCS

SEQ ID NO: 18303 - DNA, 30 bp, synthetic construct
  misc_feature 1..30: note = Description of Artificial Sequence: Synthetic oligonucleotide
  source 1..30: mol_type = other DNA
cagcagtatgatgactggcctccgtggacg

SEQ ID NO: 18304 - protein, 10 aa, synthetic construct
  REGION 1..10: note = Description of Artificial Sequence: Synthetic peptide
QQYDDWPPWT

SEQ ID NO: 18305 - DNA, 27 bp, synthetic construct
  misc_feature 1..27: note = Description of Artificial Sequence: Synthetic oligonucleotide
  source 1..27: mol_type = other DNA
ctacagcatagtaattacccgctcact

SEQ ID NO: 18306 - protein, 9 aa, synthetic construct
  REGION 1..9: note = Description of Artificial Sequence: Synthetic peptide
LQHSNYPLT

SEQ ID NO: 18307 - DNA, 27 bp, synthetic construct
  misc_feature 1..27: note = Description of Artificial Sequence: Synthetic oligonucleotide
  source 1..27: mol_type = other DNA
caccaatattatagtactccgtgcagt

SEQ ID NO: 18308 - protein, 9 aa, synthetic construct
  REGION 1..9: note = Description of Artificial Sequence: Synthetic peptide
HQYYSTPCS

SEQ ID NO: 18309 - DNA, 24 bp, synthetic construct
  misc_feature 1..24: note = Description of Artificial Sequence: Synthetic oligonucleotide
  source 1..24: mol_type = other DNA
caacagagttacagtgcccccact

SEQ ID NO: 18310 - protein, 8 aa, synthetic construct
  REGION 1..8: note = Description of Artificial Sequence: Synthetic peptide
QQSYSAPT

SEQ ID NO: 18311 - DNA, 27 bp, synthetic construct
  misc_feature 1..27: note = Description of Artificial Sequence: Synthetic oligonucleotide
  source 1..27: mol_type = other DNA
caacagtataatagttttccattcact

SEQ ID NO: 18312 - protein, 9 aa, synthetic construct
  REGION 1..9: note = Description of Artificial Sequence: Synthetic peptide
QQYNSFPFT

SEQ ID NO: 18313 - DNA, 27 bp, synthetic construct
  misc_feature 1..27: note = Description of Artificial Sequence: Synthetic oligonucleotide
  source 1..27: mol_type = other DNA
caacaatatcatagttacccattcact

SEQ ID NO: 18314 - protein, 9 aa, synthetic construct
  REGION 1..9: note = Description of Artificial Sequence: Synthetic peptide
QQYHSYPFT

SEQ ID NO: 18315 - DNA, 27 bp, synthetic construct
  misc_feature 1..27: note = Description of Artificial Sequence: Synthetic oligonucleotide
  source 1..27: mol_type = other DNA
ctacagcataatagttacccattcact

SEQ ID NO: 18316 - protein, 9 aa, synthetic construct
  REGION 1..9: note = Description of Artificial Sequence: Synthetic peptide
LQHNSYPFT

SEQ ID NO: 18317 - DNA, 30 bp, synthetic construct; identical to SEQ ID NO: 16393
  misc_feature 1..30: note = Description of Artificial Sequence: Synthetic oligonucleotide
  source 1..30: mol_type = other DNA

SEQ ID NO: 18318 - protein, 10 aa, synthetic construct
  REGION 1..10: note = Description of Artificial Sequence: Synthetic peptide
QQSYNTPTWT

SEQ ID NO: 18319 - DNA, 27 bp, synthetic construct
  misc_feature 1..27: note = Description of Artificial Sequence: Synthetic oligonucleotide
  source 1..27: mol_type = other DNA
caacagtatcatagttatccattcact

SEQ ID NO: 18320 - protein, 9 aa, synthetic construct
  REGION 1..9: note = Description of Artificial Sequence: Synthetic peptide
QQYHSYPFT

SEQ ID NO: 18321 - DNA, 27 bp, synthetic construct
  misc_feature 1..27: note = Description of Artificial Sequence: Synthetic oligonucleotide
  source 1..27: mol_type = other DNA
ctacaggataatagttacccattcact

SEQ ID NO: 18322 - protein, 9 aa, synthetic construct
  REGION 1..9: note = Description of Artificial Sequence: Synthetic peptide
LQDNSYPFT

SEQ ID NO: 18323 - DNA, 27 bp, synthetic construct
  misc_feature 1..27: note = Description of Artificial Sequence: Synthetic oligonucleotide
  source 1..27: mol_type = other DNA
caacagtataatagttatccattcact

SEQ ID NO: 18324 - protein, 9 aa, synthetic construct
  REGION 1..9: note = Description of Artificial Sequence: Synthetic peptide
QQYNSYPFT

SEQ ID NO: 18325 - DNA, 27 bp, synthetic construct
  misc_feature 1..27: note = Description of Artificial Sequence: Synthetic oligonucleotide
  source 1..27: mol_type = other DNA
caagagagttatagtatccgcttcgcc

SEQ ID NO: 18326 - protein, 9 aa, synthetic construct
  REGION 1..9: note = Description of Artificial Sequence: Synthetic peptide
QESYSIRFA

SEQ ID NO: 18327 - DNA, 27 bp, synthetic construct
  misc_feature 1..27: note = Description of Artificial Sequence: Synthetic oligonucleotide
  source 1..27: mol_type = other DNA
atacaggataatagtcacccattcact

SEQ ID NO: 18328 - protein, 9 aa, synthetic construct
  REGION 1..9: note = Description of Artificial Sequence: Synthetic peptide
IQDNSHPFT

SEQ ID NO: 18329 - DNA, 27 bp, synthetic construct
  misc_feature 1..27: note = Description of Artificial Sequence: Synthetic oligonucleotide
  source 1..27: mol_type = other DNA
caacagtatcatagttacccgatcacc

SEQ ID NO: 18330 - protein, 9 aa, synthetic construct
  REGION 1..9: note = Description of Artificial Sequence: Synthetic peptide
QQYHSYPIT

SEQ ID NO: 18331 - DNA, 27 bp, synthetic construct
  misc_feature 1..27: note = Description of Artificial Sequence: Synthetic oligonucleotide
  source 1..27: mol_type = other DNA
atgcaaagtatacaggttccgtggacg

SEQ ID NO: 18332 - protein, 9 aa, synthetic construct
  REGION 1..9: note = Description of Artificial Sequence: Synthetic peptide
MQSIQVPWT

SEQ ID NO: 18333 - DNA, 27 bp, synthetic construct
  misc_feature 1..27: note = Description of Artificial Sequence: Synthetic oligonucleotide
  source 1..27: mol_type = other DNA
ctacagcataatagttacccattcact

SEQ ID NO: 18334 - protein, 9 aa, synthetic construct
  REGION 1..9: note = Description of Artificial Sequence: Synthetic peptide
LQHNSYPFT

SEQ ID NO: 18335 - DNA, 27 bp, synthetic construct
  misc_feature 1..27: note = Description of Artificial Sequence: Synthetic oligonucleotide
  source 1..27: mol_type = other DNA
caacagtatcatagttacccattcact

SEQ ID NO: 18336 - protein, 9 aa, synthetic construct
  REGION 1..9: note = Description of Artificial Sequence: Synthetic peptide
QQYHSYPFT

SEQ ID NO: 18337 - DNA, 27 bp, synthetic construct
  misc_feature 1..27: note = Description of Artificial Sequence: Synthetic oligonucleotide
  source 1..27: mol_type = other DNA
ctacagcattatagttacccattcact

SEQ ID NO: 18338 - protein, 9 aa, synthetic construct
  REGION 1..9: note = Description of Artificial Sequence: Synthetic peptide
LQHYSYPFT

SEQ ID NO: 18339 - DNA, 27 bp, synthetic construct
  misc_feature 1..27: note = Description of Artificial Sequence: Synthetic oligonucleotide
  source 1..27: mol_type = other DNA
ctacagcataatagttacccgtggacg

SEQ ID NO: 18340 - protein, 9 aa, synthetic construct
  REGION 1..9: note = Description of Artificial Sequence: Synthetic peptide
LQHNSYPWT

SEQ ID NO: 18341 - DNA, 27 bp, synthetic construct
  misc_feature 1..27: note = Description of Artificial Sequence: Synthetic oligonucleotide
  source 1..27: mol_type = other DNA
ctacagcattatagttaccctcggacg

SEQ ID NO: 18342 - protein, 9 aa, synthetic construct
  REGION 1..9: note = Description of Artificial Sequence: Synthetic peptide
LQHYSYPRT

SEQ ID NO: 18343 - DNA, 27 bp, synthetic construct
  misc_feature 1..27: note = Description of Artificial Sequence: Synthetic oligonucleotide
  source 1..27: mol_type = other DNA
caacagagttacaatatttcattcact

SEQ ID NO: 18344 - protein, 9 aa, synthetic construct
  REGION 1..9: note = Description of Artificial Sequence: Synthetic peptide
QQSYNISFT

SEQ ID NO: 18345 - DNA, 27 bp, synthetic construct
  misc_feature 1..27: note = Description of Artificial Sequence: Synthetic oligonucleotide
  source 1..27: mol_type = other DNA
ctacaggataatagtcacccattcact

SEQ ID NO: 18346 - protein, 9 aa, synthetic construct
  REGION 1..9: note = Description of Artificial Sequence: Synthetic peptide
LQDNSHPFT

SEQ ID NO: 18347 - DNA, 27 bp, synthetic construct
  misc_feature 1..27: note = Description of Artificial Sequence: Synthetic oligonucleotide
  source 1..27: mol_type = other DNA
gtacagcataatagttaccctctcact

SEQ ID NO: 18348 - protein, 9 aa, synthetic construct
  REGION 1..9: note = Description of Artificial Sequence: Synthetic peptide
VQHNSYPLT

SEQ ID NO: 18349 - DNA, 27 bp, synthetic construct
  misc_feature 1..27: note = Description of Artificial Sequence: Synthetic oligonucleotide
  source 1..27: mol_type = other DNA
ctacagcataatagttacccattcact

SEQ ID NO: 18350 - protein, 9 aa, synthetic construct
  REGION 1..9: note = Description of Artificial Sequence: Synthetic peptide
LQHNSYPFT

SEQ ID NO: 18351 - DNA, 27 bp, synthetic construct
  misc_feature 1..27: note = Description of Artificial Sequence: Synthetic oligonucleotide
  source 1..27: mol_type = other DNA
ctacagcataatagttacccattcact

SEQ ID NO: 18352 - protein, 9 aa, synthetic construct
  REGION 1..9: note = Description of Artificial Sequence: Synthetic peptide
LQHNSYPFT

SEQ ID NO: 18353 - DNA, 27 bp, synthetic construct
  misc_feature 1..27: note = Description of Artificial Sequence: Synthetic oligonucleotide
  source 1..27: mol_type = other DNA
cagcaatattatagtactcctccgacg

SEQ ID NO: 18354 - protein, 9 aa, synthetic construct
  REGION 1..9: note = Description of Artificial Sequence: Synthetic peptide
QQYYSTPPT

SEQ ID NO: 18355 - DNA, 27 bp, synthetic construct
  misc_feature 1..27: note = Description of Artificial Sequence: Synthetic oligonucleotide
  source 1..27: mol_type = other DNA
caacagtatcatagttacccattcact

SEQ ID NO: 18356 - protein, 9 aa, synthetic construct
  REGION 1..9: note = Description of Artificial Sequence: Synthetic peptide
QQYHSYPFT

SEQ ID NO: 18357 - DNA, 27 bp, synthetic construct
  misc_feature 1..27: note = Description of Artificial Sequence: Synthetic oligonucleotide
  source 1..27: mol_type = other DNA
ctacagcatcatagtttcccgatcacc

SEQ ID NO: 18358 - protein, 9 aa, synthetic construct
  REGION 1..9: note = Description of Artificial Sequence: Synthetic peptide
LQHHSFPIT

SEQ ID NO: 18359 - DNA, 27 bp, synthetic construct
  misc_feature 1..27: note = Description of Artificial Sequence: Synthetic oligonucleotide
  source 1..27: mol_type = other DNA
caacagagttacagtctcccggtcact

SEQ ID NO: 18360 - protein, 9 aa, synthetic construct
  REGION 1..9: note = Description of Artificial Sequence: Synthetic peptide
QQSYSLPVT

SEQ ID NO: 18361 - DNA, 27 bp, synthetic construct
  misc_feature 1..27: note = Description of Artificial Sequence: Synthetic oligonucleotide
  source 1..27: mol_type = other DNA
caacaatatgataatctcccgatcacc

SEQ ID NO: 18362 - protein, 9 aa, synthetic construct
  REGION 1..9: note = Description of Artificial Sequence: Synthetic peptide
QQYDNLPIT

SEQ ID NO: 18363 - DNA, 27 bp, synthetic construct
  misc_feature 1..27: note = Description of Artificial Sequence: Synthetic oligonucleotide
  source 1..27: mol_type = other DNA
ctacagcataatagttatccattcact

SEQ ID NO: 18364 - protein, 9 aa, synthetic construct
  REGION 1..9: note = Description of Artificial Sequence: Synthetic peptide
LQHNSYPFT

SEQ ID NO: 18365 - DNA, 27 bp, synthetic construct
  misc_feature 1..27: note = Description of Artificial Sequence: Synthetic oligonucleotide
  source 1..27: mol_type = other DNA
ctacagcatcatagttatcctcggacg

SEQ ID NO: 18366 - protein, 9 aa, synthetic construct
  REGION 1..9: note = Description of Artificial Sequence: Synthetic peptide
LQHHSYPRT

SEQ ID NO: 18367 - DNA, 27 bp, synthetic construct
  misc_feature 1..27: note = Description of Artificial Sequence: Synthetic oligonucleotide
  source 1..27: mol_type = other DNA
ctacagcattatagttaccctcggacg

SEQ ID NO: 18368 - protein, 9 aa, synthetic construct
  REGION 1..9: note = Description of Artificial Sequence: Synthetic peptide
LQHYSYPRT

SEQ ID NO: 18369 - DNA, 27 bp, synthetic construct
  misc_feature 1..27: note = Description of Artificial Sequence: Synthetic oligonucleotide
  source 1..27: mol_type = other DNA
caacagtataatagttacccattcact

SEQ ID NO: 18370 - protein, 9 aa, synthetic construct
  REGION 1..9: note = Description of Artificial Sequence: Synthetic peptide
QQYNSYPFT

SEQ ID NO: 18371 - DNA, 27 bp, synthetic construct
  misc_feature 1..27: note = Description of Artificial Sequence: Synthetic oligonucleotide
  source 1..27: mol_type = other DNA
atgcaaagtatacagattccgtggacg

SEQ ID NO: 18372 - protein, 9 aa, synthetic construct
  REGION 1..9: note = Description of Artificial Sequence: Synthetic peptide
MQSIQIPWT

SEQ ID NO: 18373 - DNA, 27 bp, synthetic construct
  misc_feature 1..27: note = Description of Artificial Sequence: Synthetic oligonucleotide
  source 1..27: mol_type = other DNA
caacaatatcatagttacccattcact

SEQ ID NO: 18374 - protein, 9 aa, synthetic construct
  REGION 1..9: note = Description of Artificial Sequence: Synthetic peptide
QQYHSYPFT

SEQ ID NO: 18375 - DNA, 27 bp, synthetic construct
  misc_feature 1..27: note = Description of Artificial Sequence: Synthetic oligonucleotide
  source 1..27: mol_type = other DNA
ctacagcataatagtttcccgtggacg

SEQ ID NO: 18376 - protein, 9 aa, synthetic construct
  REGION 1..9: note = Description of Artificial Sequence: Synthetic peptide
LQHNSFPWT

SEQ ID NO: 18377 - DNA, 27 bp, synthetic construct
  misc_feature 1..27: note = Description of Artificial Sequence: Synthetic oligonucleotide
  source 1..27: mol_type = other DNA
ctacagcataatagttacccgtggacg

SEQ ID NO: 18378 - protein, 9 aa, synthetic construct
  REGION 1..9: note = Description of Artificial Sequence: Synthetic peptide
LQHNSYPWT

SEQ ID NO: 18379 - DNA, 27 bp, synthetic construct
  misc_feature 1..27: note = Description of Artificial Sequence: Synthetic oligonucleotide
  source 1..27: mol_type = other DNA
caacaatatcatagttacccattcact

SEQ ID NO: 18380 - protein, 9 aa, synthetic construct
  REGION 1..9: note = Description of Artificial Sequence: Synthetic peptide
QQYHSYPFT

SEQ ID NO: 18381 - DNA, 27 bp, synthetic construct
  misc_feature 1..27: note = Description of Artificial Sequence: Synthetic oligonucleotide
  source 1..27: mol_type = other DNA
ctacagcatagtaattacccgctcact

SEQ ID NO: 18382 - protein, 9 aa, synthetic construct
  REGION 1..9: note = Description of Artificial Sequence: Synthetic peptide
LQHSNYPLT

SEQ ID NO: 18383 - DNA, 27 bp, synthetic construct
  misc_feature 1..27: note = Description of Artificial Sequence: Synthetic oligonucleotide
  source 1..27: mol_type = other DNA
cagcaatattataatagtccgtgcagt

SEQ ID NO: 18384 - protein, 9 aa, synthetic construct
  REGION 1..9: note = Description of Artificial Sequence: Synthetic peptide
QQYYNSPCS

SEQ ID NO: 18385 - DNA, 27 bp, synthetic construct
  misc_feature 1..27: note = Description of Artificial Sequence: Synthetic oligonucleotide
  source 1..27: mol_type = other DNA
ctacagcattatagttatcctcggacg

SEQ ID NO: 18386 - protein, 9 aa, synthetic construct
  REGION 1..9: note = Description of Artificial Sequence: Synthetic peptide
LQHYSYPRT

SEQ ID NO: 18387 - DNA, 27 bp, synthetic construct
  misc_feature 1..27: note = Description of Artificial Sequence: Synthetic oligonucleotide
  source 1..27: mol_type = other DNA
atacaggataatagtcacccattcact

SEQ ID NO: 18388 - protein, 9 aa, synthetic construct
  REGION 1..9: note = Description of Artificial Sequence: Synthetic peptide
IQDNSHPFT

SEQ ID NO: 18389 - DNA, 27 bp, synthetic construct
  misc_feature 1..27: note = Description of Artificial Sequence: Synthetic oligonucleotide
  source 1..27: mol_type = other DNA
caacagtataatagttaccctctcact

SEQ ID NO: 18390 - protein, 9 aa, synthetic construct
  REGION 1..9: note = Description of Artificial Sequence: Synthetic peptide
QQYNSYPLT

SEQ ID NO: 18391 - DNA, 27 bp, synthetic construct
  misc_feature 1..27: note = Description of Artificial Sequence: Synthetic oligonucleotide
  source 1..27: mol_type = other DNA
ctacagcatagtagttacccgctcact

SEQ ID NO: 18392 - protein, 9 aa, synthetic construct
  REGION 1..9: note = Description of Artificial Sequence: Synthetic peptide
LQHSSYPLT

SEQ ID NO: 18393 - DNA, 27 bp, synthetic construct
  misc_feature 1..27: note = Description of Artificial Sequence: Synthetic oligonucleotide
  source 1..27: mol_type = other DNA
atgcaaagtatacagcttccgtggacg

SEQ ID NO: 18394 - protein, 9 aa, synthetic construct
  REGION 1..9: note = Description of Artificial Sequence: Synthetic peptide
MQSIQLPWT

SEQ ID NO: 18395 - DNA, 24 bp, synthetic construct
  misc_feature 1..24: note = Description of Artificial Sequence: Synthetic oligonucleotide
  source 1..24: mol_type = other DNA
cagcagtataataactggtggacg

SEQ ID NO: 18396 - protein, 8 aa, synthetic construct
  REGION 1..8: note = Description of Artificial Sequence: Synthetic peptide
QQYNNWWT

SEQ ID NO: 18397 - DNA, 27 bp, synthetic construct
  misc_feature 1..27: note = Description of Artificial Sequence: Synthetic oligonucleotide
  source 1..27: mol_type = other DNA
caacagtatgatattctcccgatcacc

SEQ ID NO: 18398 - protein, 9 aa, synthetic construct
  REGION 1..9: note = Description of Artificial Sequence: Synthetic peptide
QQYDILPIT

SEQ ID NO: 18399 - DNA, 27 bp, synthetic construct
  misc_feature 1..27: note = Description of Artificial Sequence: Synthetic oligonucleotide
  source 1..27: mol_type = other DNA
ctactatatattcgttacccattcact

SEQ ID NO: 18400 - protein, 9 aa, synthetic construct
  REGION 1..9: note = Description of Artificial Sequence: Synthetic peptide
LLYIRYPFT

SEQ ID NO: 18401 - DNA, 27 bp, synthetic construct
  misc_feature 1..27: note = Description of Artificial Sequence: Synthetic oligonucleotide
  source 1..27: mol_type = other DNA
caacagtatgaaaatctcccgctcacc

SEQ ID NO: 18402 - protein, 9 aa, synthetic construct
  REGION 1..9: note = Description of Artificial Sequence: Synthetic peptide
QQYENLPLT

SEQ ID NO: 18403 - DNA, 27 bp, synthetic construct
  misc_feature 1..27: note = Description of Artificial Sequence: Synthetic oligonucleotide
  source 1..27: mol_type = other DNA
ctacaatataatcgttacccattcact

SEQ ID NO: 18404 - protein, 9 aa, synthetic construct
  REGION 1..9: note = Description of Artificial Sequence: Synthetic peptide
LQYNRYPFT

SEQ ID NO: 18405 - DNA, 27 bp, synthetic construct
  misc_feature 1..27: note = Description of Artificial Sequence: Synthetic oligonucleotide
  source 1..27: mol_type = other DNA
ctacagcatcatagttatcctcggacg

SEQ ID NO: 18406 - protein, 9 aa, synthetic construct
  REGION 1..9: note = Description of Artificial Sequence: Synthetic peptide
LQHHSYPRT

SEQ ID NO: 18407 - DNA, 27 bp, synthetic construct
  misc_feature 1..27: note = Description of Artificial Sequence: Synthetic oligonucleotide
  source 1..27: mol_type = other DNA
atacaggataatagtcacccattcact

SEQ ID NO: 18408 - protein, 9 aa, synthetic construct
  REGION 1..9: note = Description of Artificial Sequence: Synthetic peptide
IQDNSHPFT

SEQ ID NO: 18409 - DNA, 27 bp, synthetic construct
  misc_feature 1..27: note = Description of Artificial Sequence: Synthetic oligonucleotide
  source 1..27: mol_type = other DNA
ctacaggataatagtcacccattcact

SEQ ID NO: 18410 - protein, 9 aa, synthetic construct
  REGION 1..9: note = Description of Artificial Sequence: Synthetic peptide
LQDNSHPFT

SEQ ID NO: 18411 - DNA, 27 bp, synthetic construct
  misc_feature 1..27: note = Description of Artificial Sequence: Synthetic oligonucleotide
  source 1..27: mol_type = other DNA
cagcaatattatagtactcctcccact

SEQ ID NO: 18412 - protein, 9 aa, synthetic construct
  REGION 1..9: note = Description of Artificial Sequence: Synthetic peptide
QQYYSTPPT

SEQ ID NO: 18413 - DNA, 27 bp, synthetic construct
  misc_feature 1..27: note = Description of Artificial Sequence: Synthetic oligonucleotide
  source 1..27: mol_type = other DNA
cagcaatattatagtactcctccgacg

SEQ ID NO: 18414 - protein, 9 aa, synthetic construct
  REGION 1..9: note = Description of Artificial Sequence: Synthetic peptide
QQYYSTPPT

SEQ ID NO: 18415 - DNA, 27 bp, synthetic construct
  misc_feature 1..27: note = Description of Artificial Sequence: Synthetic oligonucleotide
  source 1..27: mol_type = other DNA
aagcaaagtatacagcttccgtggacg

SEQ ID NO: 18416 - protein, 9 aa, synthetic construct
  REGION 1..9: note = Description of Artificial Sequence: Synthetic peptide
KQSIQLPWT

SEQ ID NO: 18417 - DNA, 27 bp, synthetic construct
  misc_feature 1..27: note = Description of Artificial Sequence: Synthetic oligonucleotide
  source 1..27: mol_type = other DNA
caacagtataatagttacccattcact

SEQ ID NO: 18418 - protein, 9 aa, synthetic construct
  REGION 1..9: note = Description of Artificial Sequence: Synthetic peptide
QQYNSYPFT

SEQ ID NO: 18419 - DNA, 27 bp, synthetic construct
  misc_feature 1..27: note = Description of Artificial Sequence: Synthetic oligonucleotide
  source 1..27: mol_type = other DNA
ctacagcataatagtcacccattcact

SEQ ID NO: 18420 - protein, 9 aa, synthetic construct
  REGION 1..9: note = Description of Artificial Sequence: Synthetic peptide
LQHNSHPFT

SEQ ID NO: 18421 - DNA, 27 bp, synthetic construct
  misc_feature 1..27: note = Description of Artificial Sequence: Synthetic oligonucleotide
  source 1..27: mol_type = other DNA
caacagtatcatagttacccgctcact

SEQ ID NO: 18422 - protein, 9 aa, synthetic construct
  REGION 1..9: note = Description of Artificial Sequence: Synthetic peptide
QQYHSYPLT

SEQ ID NO: 18423 - DNA, 27 bp, synthetic construct
  misc_feature 1..27: note = Description of Artificial Sequence: Synthetic oligonucleotide
  source 1..27: mol_type = other DNA
ctacaggataatagttacccattcact

SEQ ID NO: 18424 - protein, 9 aa, synthetic construct
  REGION 1..9: note = Description of Artificial Sequence: Synthetic peptide
LQDNSYPFT

SEQ ID NO: 18425 - DNA, 27 bp, synthetic construct
  misc_feature 1..27: note = Description of Artificial Sequence: Synthetic oligonucleotide
  source 1..27: mol_type = other DNA
ctacaggattatagttacccattcact

SEQ ID NO: 18426 - protein, 9 aa, synthetic construct
  REGION 1..9: note = Description of Artificial Sequence: Synthetic peptide
LQDYSYPFT

SEQ ID NO: 18427 - DNA, 27 bp, synthetic construct
  misc_feature 1..27: note = Description of Artificial Sequence: Synthetic oligonucleotide
  source 1..27: mol_type = other DNA
cagcaatcttatagtattcctcccact

SEQ ID NO: 18428 - protein, 9 aa, synthetic construct
  REGION 1..9: note = Description of Artificial Sequence: Synthetic peptide
QQSYSIPPT

SEQ ID NO: 18429 - DNA, 27 bp, synthetic construct
  misc_feature 1..27: note = Description of Artificial Sequence: Synthetic oligonucleotide
  source 1..27: mol_type = other DNA
caacagtataatagtttcccgctcact

SEQ ID NO: 18430 - protein, 9 aa, synthetic construct
  REGION 1..9: note = Description of Artificial Sequence: Synthetic peptide
QQYNSFPLT

SEQ ID NO: 18431 - DNA, 27 bp, synthetic construct
  misc_feature 1..27: note = Description of Artificial Sequence: Synthetic oligonucleotide
  source 1..27: mol_type = other DNA
atgcaaagcatacagcttccgtggacg

SEQ ID NO: 18432 - protein, 9 aa, synthetic construct
  REGION 1..9: note = Description of Artificial Sequence: Synthetic peptide
MQSIQLPWT

SEQ ID NO: 18433 - DNA, 27 bp, synthetic construct
  misc_feature 1..27: note = Description of Artificial Sequence: Synthetic oligonucleotide
  source 1..27: mol_type = other DNA
atgcaaagcatacagcttccgtggacg

SEQ ID NO: 18434 - protein, 9 aa, synthetic construct
  REGION 1..9: note = Description of Artificial Sequence: Synthetic peptide
MQSIQLPWT

SEQ ID NO: 18435 - DNA, 27 bp, synthetic construct
  misc_feature 1..27: note = Description of Artificial Sequence: Synthetic oligonucleotide
  source 1..27: mol_type = other DNA
caacagtataatagttatccattcact

SEQ ID NO: 18436 - protein, 9 aa, synthetic construct
  REGION 1..9: note = Description of Artificial Sequence: Synthetic peptide
QQYNSYPFT

SEQ ID NO: 18437 - DNA, 27 bp, synthetic construct
  misc_feature 1..27: note = Description of Artificial Sequence: Synthetic oligonucleotide
  source 1..27: mol_type = other DNA
ctacagcattatagttacccgctcact

SEQ ID NO: 18438 - protein, 9 aa, synthetic construct
  REGION 1..9: note = Description of Artificial Sequence: Synthetic peptide
LQHYSYPLT

SEQ ID NO: 18439 - DNA, 24 bp, synthetic construct
  misc_feature 1..24: note = Description of Artificial Sequence: Synthetic oligonucleotide
  source 1..24: mol_type = other DNA
cagcaatattatcgtgctcccacc

SEQ ID NO: 18440 - protein, 8 aa, synthetic construct
  REGION 1..8: note = Description of Artificial Sequence: Synthetic peptide
QQYYRAPT

SEQ ID NO: 18441 - DNA, 27 bp, synthetic construct
  misc_feature 1..27: note = Description of Artificial Sequence: Synthetic oligonucleotide
  source 1..27: mol_type = other DNA
atgcaagttctacaaactccgtggacg

SEQ ID NO: 18442 - protein, 9 aa, synthetic construct
  REGION 1..9: note = Description of Artificial Sequence: Synthetic peptide
MQVLQTPWT

SEQ ID NO: 18443 - DNA, 27 bp, synthetic construct
  misc_feature 1..27: note = Description of Artificial Sequence: Synthetic oligonucleotide
  source 1..27: mol_type = other DNA
ctacagcattatagttacccgctcact

SEQ ID NO: 18444 - protein, 9 aa, synthetic construct
  REGION 1..9: note = Description of Artificial Sequence: Synthetic peptide
LQHYSYPLT

SEQ ID NO: 18445 - DNA, 24 bp, synthetic construct
  misc_feature 1..24: note = Description of Artificial Sequence: Synthetic oligonucleotide
  source 1..24: mol_type = other DNA
cagcaatattatcgtgctcccacc

SEQ ID NO: 18446 - protein, 8 aa, synthetic construct
  REGION 1..8: note = Description of Artificial Sequence: Synthetic peptide
QQYYRAPT

SEQ ID NO: 18447 - DNA, 27 bp, synthetic construct
  misc_feature 1..27: note = Description of Artificial Sequence: Synthetic oligonucleotide
  source 1..27: mol_type = other DNA
atgcaagttctacaaactccgtggacg

SEQ ID NO: 18448 - protein, 9 aa, synthetic construct
  REGION 1..9: note = Description of Artificial Sequence: Synthetic peptide
MQVLQTPWT

SEQ ID NO: 18449 - DNA, 27 bp, synthetic construct
  misc_feature 1..27: note = Description of Artificial Sequence: Synthetic oligonucleotide
  source 1..27: mol_type = other DNA
ctacagcatcatagttgcccgtggacg

SEQ ID NO: 18450 - protein, 9 aa, synthetic construct
  REGION 1..9: note = Description of Artificial Sequence: Synthetic peptide
LQHHSCPWT

SEQ ID NO: 18451 - DNA, 27 bp, synthetic construct
  misc_feature 1..27: note = Description of Artificial Sequence: Synthetic oligonucleotide
  source 1..27: mol_type = other DNA
caacaatctgatagttaccctctcact

SEQ ID NO: 18452 - protein, 9 aa, synthetic construct
  REGION 1..9: note = Description of Artificial Sequence: Synthetic peptide
QQSDSYPLT

SEQ ID NO: 18453 - DNA, 27 bp, synthetic construct
  misc_feature 1..27: note = Description of Artificial Sequence: Synthetic oligonucleotide
  source 1..27: mol_type = other DNA
caacagtatcatagttacccattcact

SEQ ID NO: 18454 - protein, 9 aa, synthetic construct
  REGION 1..9: note = Description of Artificial Sequence: Synthetic peptide
QQYHSYPFT

SEQ ID NO: 18455 - DNA, 27 bp, synthetic construct
  misc_feature 1..27: note = Description of Artificial Sequence: Synthetic oligonucleotide
  source 1..27: mol_type = other DNA
cttcagcattatagttaccctcggacg

SEQ ID NO: 18456 - protein, 9 aa, synthetic construct
  REGION 1..9: note = Description of Artificial Sequence: Synthetic peptide
LQHYSYPRT

SEQ ID NO: 18457 - DNA, 27 bp, synthetic construct
  misc_feature 1..27: note = Description of Artificial Sequence: Synthetic oligonucleotide
  source 1..27: mol_type = other DNA
atgcaaagtattcagcttccgtggacg

SEQ ID NO: 18458 - protein, 9 aa, synthetic construct
  REGION 1..9: note = Description of Artificial Sequence: Synthetic peptide
MQSIQLPWT

SEQ ID NO: 18459 - DNA, 27 bp, synthetic construct
  misc_feature 1..27: note = Description of Artificial Sequence: Synthetic oligonucleotide
  source 1..27: mol_type = other DNA
caacagtatcatagttacccattcact

SEQ ID NO: 18460 - protein, 9 aa, synthetic construct
  REGION 1..9: note = Description of Artificial Sequence: Synthetic peptide
QQYHSYPFT

SEQ ID NO: 18461 - DNA, 27 bp, synthetic construct
  misc_feature 1..27: note = Description of Artificial Sequence: Synthetic oligonucleotide
  source 1..27: mol_type = other DNA
ctacagcatagtagtaacccgtggacg

SEQ ID NO: 18462 - protein, 9 aa, synthetic construct
  REGION 1..9: note = Description of Artificial Sequence: Synthetic peptide
LQHSSNPWT

SEQ ID NO: 18463 - DNA, 27 bp, synthetic construct
  misc_feature 1..27: note = Description of Artificial Sequence: Synthetic oligonucleotide
  source 1..27: mol_type = other DNA
ctacagcattatagttaccctcggacg

SEQ ID NO: 18464 - protein, 9 aa, synthetic construct
  REGION 1..9: note = Description of Artificial Sequence: Synthetic peptide
LQHYSYPRT

SEQ ID NO: 18465 - DNA, 27 bp, synthetic construct
  misc_feature 1..27: note = Description of Artificial Sequence: Synthetic oligonucleotide
  source 1..27: mol_type = other DNA
ctacagcattatagttacccgctcact

SEQ ID NO: 18466 - protein, 9 aa, synthetic construct
  REGION 1..9: note = Description of Artificial Sequence: Synthetic peptide
LQHYSYPLT

SEQ ID NO: 18467 - DNA, 27 bp, synthetic construct
  misc_feature 1..27: note = Description of Artificial Sequence: Synthetic oligonucleotide
  source 1..27: mol_type = other DNA
ctacagcattatagtttcccgctcact

SEQ ID NO: 18468 - protein, 9 aa, synthetic construct
  REGION 1..9: note = Description of Artificial Sequence: Synthetic peptide
LQHYSFPLT

SEQ ID NO: 18469 - DNA, 27 bp, synthetic construct
  misc_feature 1..27: note = Description of Artificial Sequence: Synthetic oligonucleotide
  source 1..27: mol_type = other DNA
ctacagcattatagttacccgctcact

SEQ ID NO: 18470 - protein, 9 aa, synthetic construct
  REGION 1..9: note = Description of Artificial Sequence: Synthetic peptide
LQHYSYPLT

SEQ ID NO: 18471 - DNA, 27 bp, synthetic construct
  misc_feature 1..27: note = Description of Artificial Sequence: Synthetic oligonucleotide
  source 1..27: mol_type = other DNA
caacaatctgatagttaccctctcact

SEQ ID NO: 18472 - protein, 9 aa, synthetic construct
  REGION 1..9: note = Description of Artificial Sequence: Synthetic peptide
QQSDSYPLT

SEQ ID NO: 18473 - DNA, 27 bp, synthetic construct
  misc_feature 1..27: note = Description of Artificial Sequence: Synthetic oligonucleotide
  source 1..27: mol_type = other DNA
cagcaatattatagtactccgtggacg

SEQ ID NO: 18474 - protein, 9 aa, synthetic construct
  REGION 1..9: note = Description of Artificial Sequence: Synthetic peptide
QQYYSTPWT

SEQ ID NO: 18475 - DNA, 27 bp, synthetic construct
  misc_feature 1..27: note = Description of Artificial Sequence: Synthetic oligonucleotide
  source 1..27: mol_type = other DNA
ctacagcattatagtttcccgctcact

SEQ ID NO: 18476 - protein, 9 aa, synthetic construct
  REGION 1..9: note = Description of Artificial Sequence: Synthetic peptide
LQHYSFPLT

SEQ ID NO: 18477 - DNA, 27 bp, synthetic construct
  misc_feature 1..27: note = Description of Artificial Sequence: Synthetic oligonucleotide
  source 1..27: mol_type = other DNA
ctacagcattatagttacccgctcact

SEQ ID NO: 18478 - protein, 9 aa, synthetic construct
  REGION 1..9: note = Description of Artificial Sequence: Synthetic peptide
LQHYSYPLT

SEQ ID NO: 18479 - DNA, 27 bp, synthetic construct
  misc_feature 1..27: note = Description of Artificial Sequence: Synthetic oligonucleotide
  source 1..27: mol_type = other DNA
ctacagcattatagttacccgctcact

SEQ ID NO: 18480 - protein, 9 aa, synthetic construct
  REGION 1..9: note = Description of Artificial Sequence: Synthetic peptide
LQHYSYPLT

SEQ ID NO: 18481 - DNA, 27 bp, synthetic construct
  misc_feature 1..27: note = Description of Artificial Sequence: Synthetic oligonucleotide
  source 1..27: mol_type = other DNA
caacaggctaacagtttcccgtggacg

SEQ ID NO: 18482 - protein, 9 aa, synthetic construct
  REGION 1..9: note = Description of Artificial Sequence: Synthetic peptide
QQANSFPWT

SEQ ID NO: 18483 - DNA, 27 bp, synthetic construct
  misc_feature 1..27: note = Description of Artificial Sequence: Synthetic oligonucleotide
  source 1..27: mol_type = other DNA
atgcaaactctacaaactccgctcact

SEQ ID NO: 18484 - protein, 9 aa, synthetic construct
  REGION 1..9: note = Description of Artificial Sequence: Synthetic peptide
MQTLQTPLT

SEQ ID NO: 18485 - DNA, 27 bp, synthetic construct
  misc_feature 1..27: note = Description of Artificial Sequence: Synthetic oligonucleotide
  source 1..27: mol_type = other DNA
caacagactaacagtttcccgtggacg

SEQ ID NO: 18486 - protein, 9 aa, synthetic construct
  REGION 1..9: note = Description of Artificial Sequence: Synthetic peptide
QQTNSFPWT

SEQ ID NO: 18487 - DNA, 27 bp, synthetic construct
  misc_feature 1..27: note = Description of Artificial Sequence: Synthetic oligonucleotide
  source 1..27: mol_type = other DNA
ctacagactaacagtttcccgtggacg

SEQ ID NO: 18488 - protein, 9 aa, synthetic construct
  REGION 1..9: note = Description of Artificial Sequence: Synthetic peptide
LQTNSFPWT

SEQ ID NO: 18489 - DNA, 27 bp, synthetic construct
  misc_feature 1..27: note = Description of Artificial Sequence: Synthetic oligonucleotide
  source 1..27: mol_type = other DNA
ctacaggatcatagttacccattcact

SEQ ID NO: 18490 - protein, 9 aa, synthetic construct
  REGION 1..9: note = Description of Artificial Sequence: Synthetic peptide
LQDHSYPFT

SEQ ID NO: 18491 - DNA, 27 bp, synthetic construct
  misc_feature 1..27: note = Description of Artificial Sequence: Synthetic oligonucleotide
  source 1..27: mol_type = other DNA
ctacagcattatagttacccgctcact

SEQ ID NO: 18492 - protein, 9 aa, synthetic construct
  REGION 1..9: note = Description of Artificial Sequence: Synthetic peptide
LQHYSYPLT

SEQ ID NO: 18493 - DNA, 27 bp, synthetic construct
  misc_feature 1..27: note = Description of Artificial Sequence: Synthetic oligonucleotide
  source 1..27: mol_type = other DNA
atgcaaagtatacagtttccgtggacg

SEQ ID NO: 18494 - protein, 9 aa, synthetic construct
  REGION 1..9: note = Description of Artificial Sequence: Synthetic peptide
MQSIQFPWT

SEQ ID NO: 18495 - DNA, 27 bp, synthetic construct
  misc_feature 1..27: note = Description of Artificial Sequence: Synthetic oligonucleotide
  source 1..27: mol_type = other DNA
ctacaccattatagtttcccgctcact

SEQ ID NO: 18496 - protein, 9 aa, synthetic construct
  REGION 1..9: note = Description of Artificial Sequence: Synthetic peptide
LHHYSFPLT

SEQ ID NO: 18497 - DNA, 27 bp, synthetic construct
  misc_feature 1..27: note = Description of Artificial Sequence: Synthetic oligonucleotide
  source 1..27: mol_type = other DNA
cagcaatattttactactccgtgcagt

SEQ ID NO: 18498 - protein, 9 aa, synthetic construct
  REGION 1..9: note = Description of Artificial Sequence: Synthetic peptide
QQYFTTPCS

SEQ ID NO: 18499 - DNA, 30 bp, synthetic construct
  misc_feature 1..30: note = Description of Artificial Sequence: Synthetic oligonucleotide
  source 1..30: mol_type = other DNA
caacagagttacagaacccctcagtggacg

SEQ ID NO: 18500 - protein, 10 aa, synthetic construct
  REGION 1..10: note = Description of Artificial Sequence: Synthetic peptide
QQSYRTPQWT

SEQ ID NO: 18501 - DNA, 27 bp, synthetic construct
  misc_feature 1..27: note = Description of Artificial Sequence: Synthetic oligonucleotide
  source 1..27: mol_type = other DNA
atgcaaagtatacaggttccgtggacg

SEQ ID NO: 18502 - protein, 9 aa, synthetic construct
  REGION 1..9: note = Description of Artificial Sequence: Synthetic peptide
MQSIQVPWT

SEQ ID NO: 18503 - DNA, 24 bp, synthetic construct
  misc_feature 1..24: note = Description of Artificial Sequence: Synthetic oligonucleotide
  source 1..24: mol_type = other DNA
atgcaaagtatacagcttctcact

SEQ ID NO: 18504 - protein, 8 aa, synthetic construct
  REGION 1..8: note = Description of Artificial Sequence: Synthetic peptide
MQSIQLLT

SEQ ID NO: 18505 - DNA, 27 bp, synthetic construct
  misc_feature 1..27: note = Description of Artificial Sequence: Synthetic oligonucleotide
  source 1..27: mol_type = other DNA
ctacagcattatagtttcccgaacact

SEQ ID NO: 18506 - protein, 9 aa, synthetic construct
  REGION 1..9: note = Description of Artificial Sequence: Synthetic peptide
LQHYSFPNT

SEQ ID NO: 18507 - DNA, 27 bp, synthetic construct
  misc_feature 1..27: note = Description of Artificial Sequence: Synthetic oligonucleotide
  source 1..27: mol_type = other DNA
cagcaatattatcgtactccgtggacg

SEQ ID NO: 18508 - protein, 9 aa, synthetic construct
  REGION 1..9: note = Description of Artificial Sequence: Synthetic peptide
QQYYRTPWT

SEQ ID NO: 18509 - DNA, 27 bp, synthetic construct
  misc_feature 1..27: note = Description of Artificial Sequence: Synthetic oligonucleotide
  source 1..27: mol_type = other DNA
caacagactaacagtttcccgtggacg

SEQ ID NO: 18510 - protein, 9 aa, synthetic construct
  REGION 1..9: note = Description of Artificial Sequence: Synthetic peptide
QQTNSFPWT

SEQ ID NO: 18511 - DNA, 27 bp, synthetic construct
  misc_feature 1..27: note = Description of Artificial Sequence: Synthetic oligonucleotide
  source 1..27: mol_type = other DNA
cttcagcatcatagttaccctcggacg

SEQ ID NO: 18512 - protein, 9 aa, synthetic construct
  REGION 1..9: note = Description of Artificial Sequence: Synthetic peptide
LQHHSYPRT

SEQ ID NO: 18513 - DNA, 27 bp, synthetic construct
  misc_feature 1..27: note = Description of Artificial Sequence: Synthetic oligonucleotide
  source 1..27: mol_type = other DNA
ctacagcattatagttacccgctcact

SEQ ID NO: 18514 - protein, 9 aa, synthetic construct
  REGION 1..9: note = Description of Artificial Sequence: Synthetic peptide
LQHYSYPLT

SEQ ID NO: 18515 - DNA, 27 bp, synthetic construct
  misc_feature 1..27: note = Description of Artificial Sequence: Synthetic oligonucleotide
  source 1..27: mol_type = other DNA
caacaatctgatagttaccctctcact

SEQ ID NO: 18516 - protein, 9 aa, synthetic construct
  REGION 1..9: note = Description of Artificial Sequence: Synthetic peptide
QQSDSYPLT

SEQ ID NO: 18517 - DNA, 27 bp, synthetic construct
  misc_feature 1..27: note = Description of Artificial Sequence: Synthetic oligonucleotide
  source 1..27: mol_type = other DNA
caacagtattatagttacccattcact

SEQ ID NO: 18518 - protein, 9 aa, synthetic construct
  REGION 1..9: note = Description of Artificial Sequence: Synthetic peptide
QQYYSYPFT

SEQ ID NO: 18519 - DNA, 27 bp, synthetic construct
  misc_feature 1..27: note = Description of Artificial Sequence: Synthetic oligonucleotide
  source 1..27: mol_type = other DNA
caacagactaacagtttcccgtggacg

SEQ ID NO: 18520 - protein, 9 aa, synthetic construct
  REGION 1..9: note = Description of Artificial Sequence: Synthetic peptide
QQTNSFPWT

SEQ ID NO: 18521 - DNA, 27 bp, synthetic construct
  misc_feature 1..27: note = Description of Artificial Sequence: Synthetic oligonucleotide
  source 1..27: mol_type = other DNA
cagcaatattatagtactcctccgacg

SEQ ID NO: 18522 - protein, 9 aa, synthetic construct
  REGION 1..9: note = Description of Artificial Sequence: Synthetic peptide
QQYYSTPPT

SEQ ID NO: 18523 - DNA, 30 bp, synthetic construct; identical to SEQ ID NO: 18499
  misc_feature 1..30: note = Description of Artificial Sequence: Synthetic oligonucleotide
  source 1..30: mol_type = other DNA

SEQ ID NO: 18524 - protein, 10 aa, synthetic construct
  REGION 1..10: note = Description of Artificial Sequence: Synthetic peptide
QQSYRTPQWT

SEQ ID NO: 18525 - DNA, 27 bp, synthetic construct
  misc_feature 1..27: note = Description of Artificial Sequence: Synthetic oligonucleotide
  source 1..27: mol_type = other DNA
atgcaaagtatacagattccgtggacg

SEQ ID NO: 18526 - protein, 9 aa, synthetic construct
  REGION 1..9: note = Description of Artificial Sequence: Synthetic peptide
MQSIQIPWT

SEQ ID NO: 18527 - DNA, 27 bp, synthetic construct
  misc_feature 1..27: note = Description of Artificial Sequence: Synthetic oligonucleotide
  source 1..27: mol_type = other DNA
atgcaagttctacaaactccgtggacg

SEQ ID NO: 18528 - protein, 9 aa, synthetic construct
  REGION 1..9: note = Description of Artificial Sequence: Synthetic peptide
MQVLQTPWT

SEQ ID NO: 18529 - DNA, 27 bp, synthetic construct
  misc_feature 1..27: note = Description of Artificial Sequence: Synthetic oligonucleotide
  source 1..27: mol_type = other DNA
ctacagcattatagttacccgctcact

SEQ ID NO: 18530 - protein, 9 aa, synthetic construct
  REGION 1..9: note = Description of Artificial Sequence: Synthetic peptide
LQHYSYPLT

SEQ ID NO: 18531 - DNA, 27 bp, synthetic construct
  misc_feature 1..27: note = Description of Artificial Sequence: Synthetic oligonucleotide
  source 1..27: mol_type = other DNA
ctacagcataatagttaccctcgcagt

SEQ ID NO: 18532 - protein, 9 aa, synthetic construct
  REGION 1..9: note = Description of Artificial Sequence: Synthetic peptide
LQHNSYPRS

SEQ ID NO: 18533 - DNA, 27 bp, synthetic construct
  misc_feature 1..27: note = Description of Artificial Sequence: Synthetic oligonucleotide
  source 1..27: mol_type = other DNA
caacagtataatagttacccattcact

SEQ ID NO: 18534 - protein, 9 aa, synthetic construct
  REGION 1..9: note = Description of Artificial Sequence: Synthetic peptide
QQYNSYPFT

SEQ ID NO: 18535 - DNA, 27 bp, synthetic construct
  misc_feature 1..27: note = Description of Artificial Sequence: Synthetic oligonucleotide
  source 1..27: mol_type = other DNA
ctacagcattatagtttccctcgcagt

SEQ ID NO: 18536 - protein, 9 aa, synthetic construct
  REGION 1..9: note = Description of Artificial Sequence: Synthetic peptide
LQHYSFPRS

SEQ ID NO: 18537 - DNA, 27 bp, synthetic construct
  misc_feature 1..27: note = Description of Artificial Sequence: Synthetic oligonucleotide
  source 1..27: mol_type = other DNA
ctacagcttaatagttacccattcact

SEQ ID NO: 18538 - protein, 9 aa, synthetic construct
  REGION 1..9: note = Description of Artificial Sequence: Synthetic peptide
LQLNSYPFT

SEQ ID NO: 18539 - DNA, 27 bp, synthetic construct
  misc_feature 1..27: note = Description of Artificial Sequence: Synthetic oligonucleotide
  source 1..27: mol_type = other DNA
atgcaaagtatacagattccgtggacg

SEQ ID NO: 18540 - protein, 9 aa, synthetic construct
  REGION 1..9: note = Description of Artificial Sequence: Synthetic peptide
MQSIQIPWT

SEQ ID NO: 18541 - DNA, 27 bp, synthetic construct
  misc_feature 1..27: note = Description of Artificial Sequence: Synthetic oligonucleotide
  source 1..27: mol_type = other DNA
cagcaatattatagtagtcctccgacg

SEQ ID NO: 18542 - protein, 9 aa, synthetic construct
  REGION 1..9: note = Description of Artificial Sequence: Synthetic peptide
QQYYSSPPT

SEQ ID NO: 18543 - DNA, 27 bp, synthetic construct
  misc_feature 1..27: note = Description of Artificial Sequence: Synthetic oligonucleotide
  source 1..27: mol_type = other DNA
caacaggctaacagtttaccgtggacg

SEQ ID NO: 18544 - protein, 9 aa, synthetic construct
  REGION 1..9: note = Description of Artificial Sequence: Synthetic peptide
QQANSLPWT

SEQ ID NO: 18545 - DNA, 27 bp, synthetic construct
  misc_feature 1..27: note = Description of Artificial Sequence: Synthetic oligonucleotide
  source 1..27: mol_type = other DNA
caacaggctaacagtttaccgtggacg

SEQ ID NO: 18546 - protein, 9 aa, synthetic construct
  REGION 1..9: note = Description of Artificial Sequence: Synthetic peptide
QQANSLPWT

SEQ ID NO: 18547 - DNA, 27 bp, synthetic construct
  misc_feature 1..27: note = Description of Artificial Sequence: Synthetic oligonucleotide
  source 1..27: mol_type = other DNA
ctacaccattatagtttcccgctcact

SEQ ID NO: 18548 - protein, 9 aa, synthetic construct
  REGION 1..9: note = Description of Artificial Sequence: Synthetic peptide
LHHYSFPLT

SEQ ID NO: 18549 - DNA, 27 bp, synthetic construct
  misc_feature 1..27: note = Description of Artificial Sequence: Synthetic oligonucleotide
  source 1..27: mol_type = other DNA
atgcaaagtatacaggttccgtggacg

SEQ ID NO: 18550 - protein, 9 aa, synthetic construct
  REGION 1..9: note = Description of Artificial Sequence: Synthetic peptide
MQSIQVPWT

SEQ ID NO: 18551 - DNA, 27 bp, synthetic construct
  misc_feature 1..27: note = Description of Artificial Sequence: Synthetic oligonucleotide
  source 1..27: mol_type = other DNA
caacaggctaacagtttaccgtggacg

SEQ ID NO: 18552 - protein, 9 aa, synthetic construct
  REGION 1..9: note = Description of Artificial Sequence: Synthetic peptide
QQANSLPWT

SEQ ID NO: 18553 - DNA, 24 bp, synthetic construct
  misc_feature 1..24: note = Description of Artificial Sequence: Synthetic oligonucleotide
  source 1..24: mol_type = other DNA
atgcaaagtatacaggttctcact

SEQ ID NO: 18554 - protein, 8 aa, synthetic construct
  REGION 1..8: note = Description of Artificial Sequence: Synthetic peptide
MQSIQVLT

SEQ ID NO: 18555 - DNA, 27 bp, synthetic construct
  misc_feature 1..27: note = Description of Artificial Sequence: Synthetic oligonucleotide
  source 1..27: mol_type = other DNA
caacaggctaacagtatcccattcact

SEQ ID NO: 18556 - protein, 9 aa, synthetic construct
  REGION 1..9: note = Description of Artificial Sequence: Synthetic peptide
QQANSIPFT

SEQ ID NO: 18557 - DNA, 27 bp, synthetic construct
  misc_feature 1..27: note = Description of Artificial Sequence: Synthetic oligonucleotide
  source 1..27: mol_type = other DNA
atgcaaagtatacaggttccgtggacg

SEQ ID NO: 18558 - protein, 9 aa, synthetic construct
  REGION 1..9: note = Description of Artificial Sequence: Synthetic peptide
MQSIQVPWT

SEQ ID NO: 18559 - DNA, 27 bp, synthetic construct
  misc_feature 1..27: note = Description of Artificial Sequence: Synthetic oligonucleotide
  source 1..27: mol_type = other DNA
ctacagcataatagttacccattcact

SEQ ID NO: 18560 - protein, 9 aa, synthetic construct
  REGION 1..9: note = Description of Artificial Sequence: Synthetic peptide
LQHNSYPFT

SEQ ID NO: 18561 - DNA, 27 bp, synthetic construct
  misc_feature 1..27: note = Description of Artificial Sequence: Synthetic oligonucleotide
  source 1..27: mol_type = other DNA
cagcagagttacagtaccccattcact

SEQ ID NO: 18562 - protein, 9 aa, synthetic construct
  REGION 1..9: note = Description of Artificial Sequence: Synthetic peptide
QQSYSTPFT

SEQ ID NO: 18563 - DNA, 27 bp, synthetic construct
  misc_feature 1..27: note = Description of Artificial Sequence: Synthetic oligonucleotide
  source 1..27: mol_type = other DNA
atgcaaagtatacaggttccctggacg

SEQ ID NO: 18564 - protein, 9 aa, synthetic construct
  REGION 1..9: note = Description of Artificial Sequence: Synthetic peptide
MQSIQVPWT

SEQ ID NO: 18565 - DNA, 27 bp, synthetic construct
  misc_feature 1..27: note = Description of Artificial Sequence: Synthetic oligonucleotide
  source 1..27: mol_type = other DNA
caacagtataatggttacccattcact

SEQ ID NO: 18566 - protein, 9 aa, synthetic construct
  REGION 1..9: note = Description of Artificial Sequence: Synthetic peptide
QQYNGYPFT

SEQ ID NO: 18567 - DNA, 30 bp, synthetic construct
  misc_feature 1..30: note = Description of Artificial Sequence: Synthetic oligonucleotide
  source 1..30: mol_type = other DNA
caacagagttacagttctcctccgtggacg

SEQ ID NO: 18568 - protein, 10 aa, synthetic construct
  REGION 1..10: note = Description of Artificial Sequence: Synthetic peptide
QQSYSSPPWT

SEQ ID NO: 18569 - DNA, 27 bp, synthetic construct
  misc_feature 1..27: note = Description of Artificial Sequence: Synthetic oligonucleotide
  source 1..27: mol_type = other DNA
catcagtattttattactccgtggacg

SEQ ID NO: 18570 - protein, 9 aa, synthetic construct
  REGION 1..9: note = Description of Artificial Sequence: Synthetic peptide
HQYFITPWT

SEQ ID NO: 18571 - DNA, 27 bp, synthetic construct
  misc_feature 1..27: note = Description of Artificial Sequence: Synthetic oligonucleotide
  source 1..27: mol_type = other DNA
ctacagcataatagttacccattcact

SEQ ID NO: 18572 - protein, 9 aa, synthetic construct
  REGION 1..9: note = Description of Artificial Sequence: Synthetic peptide
LQHNSYPFT

SEQ ID NO: 18573 - DNA, 27 bp, synthetic construct
  misc_feature 1..27: note = Description of Artificial Sequence: Synthetic oligonucleotide
  source 1..27: mol_type = other DNA
atgcaaagtatacagattccctggacg

SEQ ID NO: 18574 - protein, 9 aa, synthetic construct
  REGION 1..9: note = Description of Artificial Sequence: Synthetic peptide
MQSIQIPWT

SEQ ID NO: 18575 - DNA, 27 bp, synthetic construct
  misc_feature 1..27: note = Description of Artificial Sequence: Synthetic oligonucleotide
  source 1..27: mol_type = other DNA
caacaggttaacagtttcccattcact

SEQ ID NO: 18576 - protein, 9 aa, synthetic construct
  REGION 1..9: note = Description of Artificial Sequence: Synthetic peptide
QQVNSFPFT

SEQ ID NO: 18577 - DNA, 27 bp, synthetic construct
  misc_feature 1..27: note = Description of Artificial Sequence: Synthetic oligonucleotide
  source 1..27: mol_type = other DNA
caacagtatgataatctccctctcact

SEQ ID NO: 18578 - protein, 9 aa, synthetic construct
  REGION 1..9: note = Description of Artificial Sequence: Synthetic peptide
QQYDNLPLT

SEQ ID NO: 18579 - DNA, 30 bp, synthetic construct
  misc_feature 1..30: note = Description of Artificial Sequence: Synthetic oligonucleotide
  source 1..30: mol_type = other DNA
caacagagttacagttcccctccgtggacg

SEQ ID NO: 18580 - protein, 10 aa, synthetic construct
  REGION 1..10: note = Description of Artificial Sequence: Synthetic peptide
QQSYSSPPWT

SEQ ID NO: 18581 - DNA, 30 bp, synthetic construct
  misc_feature 1..30: note = Description of Artificial Sequence: Synthetic oligonucleotide
  source 1..30: mol_type = other DNA
cagcagtatggtagctcacctccgtggacg

SEQ ID NO: 18582 - protein, 10 aa, synthetic construct
  REGION 1..10: note = Description of Artificial Sequence: Synthetic peptide
QQYGSSPPWT

SEQ ID NO: 18583 - DNA, 27 bp, synthetic construct
  misc_feature 1..27: note = Description of Artificial Sequence: Synthetic oligonucleotide
  source 1..27: mol_type = other DNA
cagcagagtagtagtttaccgtggacg

SEQ ID NO: 18584 - protein, 9 aa, synthetic construct
  REGION 1..9: note = Description of Artificial Sequence: Synthetic peptide
QQSSSLPWT

SEQ ID NO: 18585 - DNA, 27 bp, synthetic construct
  misc_feature 1..27: note = Description of Artificial Sequence: Synthetic oligonucleotide
  source 1..27: mol_type = other DNA
caacagtatatgacttacccgctcact

SEQ ID NO: 18586 - protein, 9 aa, synthetic construct
  REGION 1..9: note = Description of Artificial Sequence: Synthetic peptide
QQYMTYPLT

SEQ ID NO: 18587 - DNA, 27 bp, synthetic construct
  misc_feature 1..27: note = Description of Artificial Sequence: Synthetic oligonucleotide
  source 1..27: mol_type = other DNA
cagcagtataataactggccgctcact

SEQ ID NO: 18588 - protein, 9 aa, synthetic construct
  REGION 1..9: note = Description of Artificial Sequence: Synthetic peptide
QQYNNWPLT

SEQ ID NO: 18589 - DNA, 27 bp, synthetic construct
  misc_feature 1..27: note = Description of Artificial Sequence: Synthetic oligonucleotide
  source 1..27: mol_type = other DNA
catcagagtagtagtttccctcggacg

SEQ ID NO: 18590 - protein, 9 aa, synthetic construct
  REGION 1..9: note = Description of Artificial Sequence: Synthetic peptide
HQSSSFPRT

SEQ ID NO: 18591 - DNA, 27 bp, synthetic construct
  misc_feature 1..27: note = Description of Artificial Sequence: Synthetic oligonucleotide
  source 1..27: mol_type = other DNA
caacagtatatgacttacccgctcact

SEQ ID NO: 18592 - protein, 9 aa, synthetic construct
  REGION 1..9: note = Description of Artificial Sequence: Synthetic peptide
QQYMTYPLT

SEQ ID NO: 18593 - DNA, 27 bp, synthetic construct
  misc_feature 1..27: note = Description of Artificial Sequence: Synthetic oligonucleotide
  source 1..27: mol_type = other DNA
atgcaaagtatacagtttccctggacg

SEQ ID NO: 18594 - protein, 9 aa, synthetic construct
  REGION 1..9: note = Description of Artificial Sequence: Synthetic peptide
MQSIQFPWT

SEQ ID NO: 18595 - DNA, 27 bp, synthetic construct
  misc_feature 1..27: note = Description of Artificial Sequence: Synthetic oligonucleotide
  source 1..27: mol_type = other DNA
catcagactagaagtttacctctcact

SEQ ID NO: 18596 - protein, 9 aa, synthetic construct
  REGION 1..9: note = Description of Artificial Sequence: Synthetic peptide
HQTRSLPLT

SEQ ID NO: 18597 - DNA, 27 bp, synthetic construct
  misc_feature 1..27: note = Description of Artificial Sequence: Synthetic oligonucleotide
  source 1..27: mol_type = other DNA
ctacagcataatagttacccgtggacg

SEQ ID NO: 18598 - protein, 9 aa, synthetic construct
  REGION 1..9: note = Description of Artificial Sequence: Synthetic peptide
LQHNSYPWT

SEQ ID NO: 18599 - DNA, 27 bp, synthetic construct
  misc_feature 1..27: note = Description of Artificial Sequence: Synthetic oligonucleotide
  source 1..27: mol_type = other DNA
caaaagtataacagtgccccattcact

SEQ ID NO: 18600 - protein, 9 aa, synthetic construct
  REGION 1..9: note = Description of Artificial Sequence: Synthetic peptide
QKYNSAPFT

SEQ ID NO: 18601 - DNA, 27 bp, synthetic construct
  misc_feature 1..27: note = Description of Artificial Sequence: Synthetic oligonucleotide
  source 1..27: mol_type = other DNA
caacgatatgatacttacccattcact

SEQ ID NO: 18602 - protein, 9 aa, synthetic construct
  REGION 1..9: note = Description of Artificial Sequence: Synthetic peptide
QRYDTYPFT

SEQ ID NO: 18603 - DNA, 27 bp, synthetic construct
  misc_feature 1..27: note = Description of Artificial Sequence: Synthetic oligonucleotide
  source 1..27: mol_type = other DNA
caacagtatatgacttacccgctcact

SEQ ID NO: 18604 - protein, 9 aa, synthetic construct
  REGION 1..9: note = Description of Artificial Sequence: Synthetic peptide
QQYMTYPLT

SEQ ID NO: 18605 - DNA, 27 bp, synthetic construct
  misc_feature 1..27: note = Description of Artificial Sequence: Synthetic oligonucleotide
  source 1..27: mol_type = other DNA
atgcaaagtttccagcttccctggacg

SEQ ID NO: 18606 - protein, 9 aa, synthetic construct
  REGION 1..9: note = Description of Artificial Sequence: Synthetic peptide
MQSFQLPWT

SEQ ID NO: 18607 - DNA, 27 bp, synthetic construct
  misc_feature 1..27: note = Description of Artificial Sequence: Synthetic oligonucleotide
  source 1..27: mol_type = other DNA
caacaatattatagtactcctccgacg

SEQ ID NO: 18608 - protein, 9 aa, synthetic construct
  REGION 1..9: note = Description of Artificial Sequence: Synthetic peptide
QQYYSTPPT

SEQ ID NO: 18609 - DNA, 27 bp, synthetic construct
  misc_feature 1..27: note = Description of Artificial Sequence: Synthetic oligonucleotide
  source 1..27: mol_type = other DNA
cagcagtatggtaggtcaccgtggacg

SEQ ID NO: 18610 - protein, 9 aa, synthetic construct
  REGION 1..9: note = Description of Artificial Sequence: Synthetic peptide
QQYGRSPWT

SEQ ID NO: 18611 - DNA, 27 bp, synthetic construct
  misc_feature 1..27: note = Description of Artificial Sequence: Synthetic oligonucleotide
  source 1..27: mol_type = other DNA
caacattatcttacttaccctctcact

SEQ ID NO: 18612 - protein, 9 aa, synthetic construct
  REGION 1..9: note = Description of Artificial Sequence: Synthetic peptide
QHYLTYPLT

SEQ ID NO: 18613 - DNA, 27 bp, synthetic construct
  misc_feature 1..27: note = Description of Artificial Sequence: Synthetic oligonucleotide
  source 1..27: mol_type = other DNA
cagcaatatggtaactcaccgtgggcg

SEQ ID NO: 18614 - protein, 9 aa, synthetic construct
  REGION 1..9: note = Description of Artificial Sequence: Synthetic peptide
QQYGNSPWA

SEQ ID NO: 18615 - DNA, 27 bp, synthetic construct
  misc_feature 1..27: note = Description of Artificial Sequence: Synthetic oligonucleotide
  source 1..27: mol_type = other DNA
cagcagtatggtaactcaccgtgggcg

SEQ ID NO: 18616 - protein, 9 aa, synthetic construct
  REGION 1..9: note = Description of Artificial Sequence: Synthetic peptide
QQYGNSPWA

SEQ ID NO: 18617 - DNA, 27 bp, synthetic construct
  misc_feature 1..27: note = Description of Artificial Sequence: Synthetic oligonucleotide
  source 1..27: mol_type = other DNA
cagcagtatggtagctcaccgtggacg

SEQ ID NO: 18618 - protein, 9 aa, synthetic construct
  REGION 1..9: note = Description of Artificial Sequence: Synthetic peptide
QQYGSSPWT

SEQ ID NO: 18619 - DNA, 27 bp, synthetic construct
  misc_feature 1..27: note = Description of Artificial Sequence: Synthetic oligonucleotide
  source 1..27: mol_type = other DNA
atgcaaagtatacaacttccctggacg

SEQ ID NO: 18620 - protein, 9 aa, synthetic construct
  REGION 1..9: note = Description of Artificial Sequence: Synthetic peptide
MQSIQLPWT

SEQ ID NO: 18621 - DNA, 27 bp, synthetic construct
  misc_feature 1..27: note = Description of Artificial Sequence: Synthetic oligonucleotide
  source 1..27: mol_type = other DNA
cagcaatattatagtagtcctcccact

SEQ ID NO: 18622 - protein, 9 aa, synthetic construct
  REGION 1..9: note = Description of Artificial Sequence: Synthetic peptide
QQYYSSPPT

SEQ ID NO: 18623 - DNA, 27 bp, synthetic construct
  misc_feature 1..27: note = Description of Artificial Sequence: Synthetic oligonucleotide
  source 1..27: mol_type = other DNA
ctacagcataatagttacccgtggacg

SEQ ID NO: 18624 - protein, 9 aa, synthetic construct
  REGION 1..9: note = Description of Artificial Sequence: Synthetic peptide
LQHNSYPWT

SEQ ID NO: 18625 - DNA, 27 bp, synthetic construct
  misc_feature 1..27: note = Description of Artificial Sequence: Synthetic oligonucleotide
  source 1..27: mol_type = other DNA
caacagtatatgacttacccgctcact

SEQ ID NO: 18626 - protein, 9 aa, synthetic construct
  REGION 1..9: note = Description of Artificial Sequence: Synthetic peptide
QQYMTYPLT

SEQ ID NO: 18627 - DNA, 27 bp, synthetic construct
  misc_feature 1..27: note = Description of Artificial Sequence: Synthetic oligonucleotide
  source 1..27: mol_type = other DNA
caacagtatagtaattacccagtcact

SEQ ID NO: 18628 - protein, 9 aa, synthetic construct
  REGION 1..9: note = Description of Artificial Sequence: Synthetic peptide
QQYSNYPVT

SEQ ID NO: 18629 - DNA, 27 bp, synthetic construct
  misc_feature 1..27: note = Description of Artificial Sequence: Synthetic oligonucleotide
  source 1..27: mol_type = other DNA
catcagactggtaggttacctctcact

SEQ ID NO: 18630 - protein, 9 aa, synthetic construct
  REGION 1..9: note = Description of Artificial Sequence: Synthetic peptide
HQTGRLPLT

SEQ ID NO: 18631 - DNA, 30 bp, synthetic construct
  misc_feature 1..30: note = Description of Artificial Sequence: Synthetic oligonucleotide
  source 1..30: mol_type = other DNA
cagcagtatggtggttcacctccgtggacg

SEQ ID NO: 18632 - protein, 10 aa, synthetic construct
  REGION 1..10: note = Description of Artificial Sequence: Synthetic peptide
QQYGGSPPWT

SEQ ID NO: 18633 - DNA, 27 bp, synthetic construct
  misc_feature 1..27: note = Description of Artificial Sequence: Synthetic oligonucleotide
  source 1..27: mol_type = other DNA
catcagagtagtagtttccctcggacg

SEQ ID NO: 18634 - protein, 9 aa, synthetic construct
  REGION 1..9: note = Description of Artificial Sequence: Synthetic peptide
HQSSSFPRT

SEQ ID NO: 18635 - DNA, 27 bp, synthetic construct
  misc_feature 1..27: note = Description of Artificial Sequence: Synthetic oligonucleotide
  source 1..27: mol_type = other DNA
caacagtatcttaattacccagtcact

SEQ ID NO: 18636 - protein, 9 aa, synthetic construct
  REGION 1..9: note = Description of Artificial Sequence: Synthetic peptide
QQYLNYPVT

SEQ ID NO: 18637 - DNA, 27 bp, synthetic construct
  misc_feature 1..27: note = Description of Artificial Sequence: Synthetic oligonucleotide
  source 1..27: mol_type = other DNA
atgcaaagtatacattttccctggacg

SEQ ID NO: 18638 - protein, 9 aa, synthetic construct
  REGION 1..9: note = Description of Artificial Sequence: Synthetic peptide
MQSIHFPWT

SEQ ID NO: 18639 - DNA, 27 bp, synthetic construct
  misc_feature 1..27: note = Description of Artificial Sequence: Synthetic oligonucleotide
  source 1..27: mol_type = other DNA
caacaatatagtacttacccgctcact

SEQ ID NO: 18640 - protein, 9 aa, synthetic construct
  REGION 1..9: note = Description of Artificial Sequence: Synthetic peptide
QQYSTYPLT

SEQ ID NO: 18641 - DNA, 27 bp, synthetic construct
  misc_feature 1..27: note = Description of Artificial Sequence: Synthetic oligonucleotide
  source 1..27: mol_type = other DNA
caacaggctaacagtttcccgtggacg

SEQ ID NO: 18642 - protein, 9 aa, synthetic construct
  REGION 1..9: note = Description of Artificial Sequence: Synthetic peptide
QQANSFPWT

SEQ ID NO: 18643 - DNA, 27 bp, synthetic construct
  misc_feature 1..27: note = Description of Artificial Sequence: Synthetic oligonucleotide
  source 1..27: mol_type = other DNA
caacagtataatggttacccattcact

SEQ ID NO: 18644 - protein, 9 aa, synthetic construct
  REGION 1..9: note = Description of Artificial Sequence: Synthetic peptide
QQYNGYPFT

SEQ ID NO: 18645 - DNA, 27 bp, synthetic construct
  misc_feature 1..27: note = Description of Artificial Sequence: Synthetic oligonucleotide
  source 1..27: mol_type = other DNA
ctacagcataatagttacccattcact

SEQ ID NO: 18646 - protein, 9 aa, synthetic construct
  REGION 1..9: note = Description of Artificial Sequence: Synthetic peptide
LQHNSYPFT

SEQ ID NO: 18647 - DNA, 27 bp, synthetic construct
  misc_feature 1..27: note = Description of Artificial Sequence: Synthetic oligonucleotide
  source 1..27: mol_type = other DNA
ctacagcataatagttacccattcact

SEQ ID NO: 18648 - protein, 9 aa, synthetic construct
  REGION 1..9: note = Description of Artificial Sequence: Synthetic peptide
LQHNSYPFT

SEQ ID NO: 18649 - DNA, 27 bp, synthetic construct
  misc_feature 1..27: note = Description of Artificial Sequence: Synthetic oligonucleotide
  source 1..27: mol_type = other DNA
cgacaatatcatagttacccattcact

SEQ ID NO: 18650 - protein, 9 aa, synthetic construct
  REGION 1..9: note = Description of Artificial Sequence: Synthetic peptide
RQYHSYPFT

SEQ ID NO: 18651 - DNA, 27 bp, synthetic construct
  misc_feature 1..27: note = Description of Artificial Sequence: Synthetic oligonucleotide
  source 1..27: mol_type = other DNA
caacagtataatggttacccattcact

SEQ ID NO: 18652 - protein, 9 aa, synthetic construct
  REGION 1..9: note = Description of Artificial Sequence: Synthetic peptide
QQYNGYPFT

SEQ ID NO: 18653 - DNA, 27 bp, synthetic construct
  misc_feature 1..27: note = Description of Artificial Sequence: Synthetic oligonucleotide
  source 1..27: mol_type = other DNA
atgcaaagtatacaggttccctggacg

SEQ ID NO: 18654 - protein, 9 aa, synthetic construct
  REGION 1..9: note = Description of Artificial Sequence: Synthetic peptide
MQSIQVPWT

SEQ ID NO: 18655 - DNA, 27 bp, synthetic construct
  misc_feature 1..27: note = Description of Artificial Sequence: Synthetic oligonucleotide
  source 1..27: mol_type = other DNA
caacaggttaacagtttcccattcact

SEQ ID NO: 18656 - protein, 9 aa, synthetic construct
  REGION 1..9: note = Description of Artificial Sequence: Synthetic peptide
QQVNSFPFT

SEQ ID NO: 18657 - DNA, 27 bp, synthetic construct
  misc_feature 1..27: note = Description of Artificial Sequence: Synthetic oligonucleotide
  source 1..27: mol_type = other DNA
caacagtataatagttatccattcact

SEQ ID NO: 18658 - protein, 9 aa, synthetic construct
  REGION 1..9: note = Description of Artificial Sequence: Synthetic peptide
QQYNSYPFT

SEQ ID NO: 18659 - DNA, 27 bp, synthetic construct
  misc_feature 1..27: note = Description of Artificial Sequence: Synthetic oligonucleotide
  source 1..27: mol_type = other DNA
cagcaggctaacagtttcccgtggacg

SEQ ID NO: 18660 - protein, 9 aa, synthetic construct
  REGION 1..9: note = Description of Artificial Sequence: Synthetic peptide
QQANSFPWT

SEQ ID NO: 18661 - DNA, 27 bp, synthetic construct
  misc_feature 1..27: note = Description of Artificial Sequence: Synthetic oligonucleotide
  source 1..27: mol_type = other DNA
caacagtataatagttacccattcact

SEQ ID NO: 18662 - protein, 9 aa, synthetic construct
  REGION 1..9: note = Description of Artificial Sequence: Synthetic peptide
QQYNSYPFT

SEQ ID NO: 18663 - DNA, 27 bp, synthetic construct
  misc_feature 1..27: note = Description of Artificial Sequence: Synthetic oligonucleotide
  source 1..27: mol_type = other DNA
atgcaaagtatacagattccttggacg

SEQ ID NO: 18664 - protein, 9 aa, synthetic construct
  REGION 1..9: note = Description of Artificial Sequence: Synthetic peptide
MQSIQIPWT

SEQ ID NO: 18665 - DNA, 27 bp, synthetic construct
  misc_feature 1..27: note = Description of Artificial Sequence: Synthetic oligonucleotide
  source 1..27: mol_type = other DNA
atgcaaagtatacagattccgtggacg

SEQ ID NO: 18666 - protein, 9 aa, synthetic construct
  REGION 1..9: note = Description of Artificial Sequence: Synthetic peptide
MQSIQIPWT

SEQ ID NO: 18667 - DNA, 27 bp, synthetic construct
  misc_feature 1..27: note = Description of Artificial Sequence: Synthetic oligonucleotide
  source 1..27: mol_type = other DNA
cagcaatattgtagtcttccattcact

SEQ ID NO: 18668 - protein, 9 aa, synthetic construct
  REGION 1..9: note = Description of Artificial Sequence: Synthetic peptide
QQYCSLPFT

SEQ ID NO: 18669 - DNA, 27 bp, synthetic construct
  misc_feature 1..27: note = Description of Artificial Sequence: Synthetic oligonucleotide
  source 1..27: mol_type = other DNA
cagcagtatggtaactcaccgtggacg

SEQ ID NO: 18670 - protein, 9 aa, synthetic construct
  REGION 1..9: note = Description of Artificial Sequence: Synthetic peptide
QQYGNSPWT

SEQ ID NO: 18671 - DNA, 27 bp, synthetic construct
  misc_feature 1..27: note = Description of Artificial Sequence: Synthetic oligonucleotide
  source 1..27: mol_type = other DNA
ctacagcataatagttacccgtggacg

SEQ ID NO: 18672 - protein, 9 aa, synthetic construct
  REGION 1..9: note = Description of Artificial Sequence: Synthetic peptide
LQHNSYPWT

SEQ ID NO: 18673 - DNA, 27 bp, synthetic construct
  misc_feature 1..27: note = Description of Artificial Sequence: Synthetic oligonucleotide
  source 1..27: mol_type = other DNA
caacaggctaacagtctcccgtggacg

SEQ ID NO: 18674 - protein, 9 aa, synthetic construct
  REGION 1..9: note = Description of Artificial Sequence: Synthetic peptide
QQANSLPWT

SEQ ID NO: 18675 - DNA, 27 bp, synthetic construct
  misc_feature 1..27: note = Description of Artificial Sequence: Synthetic oligonucleotide
  source 1..27: mol_type = other DNA
cagcagtatggtaactcaccgtgggcg

SEQ ID NO: 18676 - protein, 9 aa, synthetic construct
  REGION 1..9: note = Description of Artificial Sequence: Synthetic peptide
QQYGNSPWA

SEQ ID NO: 18677 - DNA, 27 bp, synthetic construct
  misc_feature 1..27: note = Description of Artificial Sequence: Synthetic oligonucleotide
  source 1..27: mol_type = other DNA
cagcagtatggtaactcaccgtggacg

SEQ ID NO: 18678 - protein, 9 aa, synthetic construct
  REGION 1..9: note = Description of Artificial Sequence: Synthetic peptide
QQYGNSPWT

SEQ ID NO: 18679 - DNA, 27 bp, synthetic construct
  misc_feature 1..27: note = Description of Artificial Sequence: Synthetic oligonucleotide
  source 1..27: mol_type = other DNA
cagcaatattatagtattcctcccact

SEQ ID NO: 18680 - protein, 9 aa, synthetic construct
  REGION 1..9: note = Description of Artificial Sequence: Synthetic peptide
QQYYSIPPT

SEQ ID NO: 18681 - DNA, 27 bp, synthetic construct
  misc_feature 1..27: note = Description of Artificial Sequence: Synthetic oligonucleotide
  source 1..27: mol_type = other DNA
cagcagagtagtagtttaccgtggacg

SEQ ID NO: 18682 - protein, 9 aa, synthetic construct
  REGION 1..9: note = Description of Artificial Sequence: Synthetic peptide
QQSSSLPWT

SEQ ID NO: 18683 - DNA, 27 bp, synthetic construct
  misc_feature 1..27: note = Description of Artificial Sequence: Synthetic oligonucleotide
  source 1..27: mol_type = other DNA
ctacagcataataattacccgtggacg

SEQ ID NO: 18684 - protein, 9 aa, synthetic construct
  REGION 1..9: note = Description of Artificial Sequence: Synthetic peptide
LQHNNYPWT

SEQ ID NO: 18685 - DNA, 27 bp, synthetic construct
  misc_feature 1..27: note = Description of Artificial Sequence: Synthetic oligonucleotide
  source 1..27: mol_type = other DNA
ctacagcattatagtttcccattcact

SEQ ID NO: 18686 - protein, 9 aa, synthetic construct
  REGION 1..9: note = Description of Artificial Sequence: Synthetic peptide
LQHYSFPFT

SEQ ID NO: 18687 - DNA, 27 bp, synthetic construct
  misc_feature 1..27: note = Description of Artificial Sequence: Synthetic oligonucleotide
  source 1..27: mol_type = other DNA
cagcaatattgtagtcttccattcact

SEQ ID NO: 18688 - protein, 9 aa, synthetic construct
  REGION 1..9: note = Description of Artificial Sequence: Synthetic peptide
QQYCSLPFT

SEQ ID NO: 18689 - DNA, 27 bp, synthetic construct
  misc_feature 1..27: note = Description of Artificial Sequence: Synthetic oligonucleotide
  source 1..27: mol_type = other DNA
caacaatattatcgtactccgtggacg

SEQ ID NO: 18690 - protein, 9 aa, synthetic construct
  REGION 1..9: note = Description of Artificial Sequence: Synthetic peptide
QQYYRTPWT

SEQ ID NO: 18691 - DNA, 27 bp, synthetic construct
  misc_feature 1..27: note = Description of Artificial Sequence: Synthetic oligonucleotide
  source 1..27: mol_type = other DNA
atgcaaagtatacagcttccctggacg

SEQ ID NO: 18692 - protein, 9 aa, synthetic construct
  REGION 1..9: note = Description of Artificial Sequence: Synthetic peptide
MQSIQLPWT

SEQ ID NO: 18693 - DNA, 27 bp, synthetic construct
  misc_feature 1..27: note = Description of Artificial Sequence: Synthetic oligonucleotide
  source 1..27: mol_type = other DNA
catcagagtagtagtttccctcggacg

SEQ ID NO: 18694 - protein, 9 aa, synthetic construct
  REGION 1..9: note = Description of Artificial Sequence: Synthetic peptide
HQSSSFPRT

SEQ ID NO: 18695 - DNA, 27 bp, synthetic construct
  misc_feature 1..27: note = Description of Artificial Sequence: Synthetic oligonucleotide
  source 1..27: mol_type = other DNA
caacagtatatgacttacccactcact

SEQ ID NO: 18696 - protein, 9 aa, synthetic construct
  REGION 1..9: note = Description of Artificial Sequence: Synthetic peptide
QQYMTYPLT

SEQ ID NO: 18697 - DNA, 27 bp, synthetic construct
  misc_feature 1..27: note = Description of Artificial Sequence: Synthetic oligonucleotide
  source 1..27: mol_type = other DNA
catcagagtagtagtttccctcggacg

SEQ ID NO: 18698 - protein, 9 aa, synthetic construct
  REGION 1..9: note = Description of Artificial Sequence: Synthetic peptide
HQSSSFPRT

SEQ ID NO: 18699 - DNA, 27 bp, synthetic construct
  misc_feature 1..27: note = Description of Artificial Sequence: Synthetic oligonucleotide
  source 1..27: mol_type = other DNA
caacgatatgatacttacccattcact

SEQ ID NO: 18700 - protein, 9 aa, synthetic construct
  REGION 1..9: note = Description of Artificial Sequence: Synthetic peptide
QRYDTYPFT

SEQ ID NO: 18701 - DNA, 27 bp, synthetic construct
  misc_feature 1..27: note = Description of Artificial Sequence: Synthetic oligonucleotide
  source 1..27: mol_type = other DNA
cagcagtatggtagctcaccgtggacg

SEQ ID NO: 18702 - protein, 9 aa, synthetic construct
  REGION 1..9: note = Description of Artificial Sequence: Synthetic peptide
QQYGSSPWT

SEQ ID NO: 18703 - DNA, 27 bp, synthetic construct
  misc_feature 1..27: note = Description of Artificial Sequence: Synthetic oligonucleotide
  source 1..27: mol_type = other DNA
cagcagtataataactggccgctcact

SEQ ID NO: 18704 - protein, 9 aa, synthetic construct
  REGION 1..9: note = Description of Artificial Sequence: Synthetic peptide
QQYNNWPLT

SEQ ID NO: 18705 - DNA, 27 bp, synthetic construct
  misc_feature 1..27: note = Description of Artificial Sequence: Synthetic oligonucleotide
  source 1..27: mol_type = other DNA
catcagactagaagtttacctctcact

SEQ ID NO: 18706 - protein, 9 aa, synthetic construct
  REGION 1..9: note = Description of Artificial Sequence: Synthetic peptide
HQTRSLPLT

SEQ ID NO: 18707 - DNA, 27 bp, synthetic construct
  misc_feature 1..27: note = Description of Artificial Sequence: Synthetic oligonucleotide
  source 1..27: mol_type = other DNA
caacagtatagtacttacccgctcact

SEQ ID NO: 18708 - protein, 9 aa, synthetic construct
  REGION 1..9: note = Description of Artificial Sequence: Synthetic peptide
QQYSTYPLT

SEQ ID NO: 18709 - DNA, 27 bp, synthetic construct
  misc_feature 1..27: note = Description of Artificial Sequence: Synthetic oligonucleotide
  source 1..27: mol_type = other DNA
caacagtatagtacttacccgctcact

SEQ ID NO: 18710 - protein, 9 aa, synthetic construct
  REGION 1..9: note = Description of Artificial Sequence: Synthetic peptide
QQYSTYPLT

SEQ ID NO: 18711 - DNA, 27 bp, synthetic construct
  misc_feature 1..27: note = Description of Artificial Sequence: Synthetic oligonucleotide
  source 1..27: mol_type = other DNA
cagcaatattctagtcttccattcact

SEQ ID NO: 18712 - protein, 9 aa, synthetic construct
  REGION 1..9: note = Description of Artificial Sequence: Synthetic peptide
QQYSSLPFT

SEQ ID NO: 18713 - DNA, 27 bp, synthetic construct
  misc_feature 1..27: note = Description of Artificial Sequence: Synthetic oligonucleotide
  source 1..27: mol_type = other DNA
caacagtatatcacttacccgctcact

SEQ ID NO: 18714 - protein, 9 aa, synthetic construct
  REGION 1..9: note = Description of Artificial Sequence: Synthetic peptide
QQYITYPLT

SEQ ID NO: 18715 - DNA, 27 bp, synthetic construct
  misc_feature 1..27: note = Description of Artificial Sequence: Synthetic oligonucleotide
  source 1..27: mol_type = other DNA
caacagtataatagttacccattcact

SEQ ID NO: 18716 - protein, 9 aa, synthetic construct
  REGION 1..9: note = Description of Artificial Sequence: Synthetic peptide
QQYNSYPFT

SEQ ID NO: 18717 - DNA, 27 bp, synthetic construct
  misc_feature 1..27: note = Description of Artificial Sequence: Synthetic oligonucleotide
  source 1..27: mol_type = other DNA
caacattatgttacttacccgaacact

SEQ ID NO: 18718 - protein, 9 aa, synthetic construct
  REGION 1..9: note = Description of Artificial Sequence: Synthetic peptide
QHYVTYPNT

SEQ ID NO: 18719 - DNA, 27 bp, synthetic construct
  misc_feature 1..27: note = Description of Artificial Sequence: Synthetic oligonucleotide
  source 1..27: mol_type = other DNA
caacagtctaacagtttcccattcact

SEQ ID NO: 18720 - protein, 9 aa, synthetic construct
  REGION 1..9: note = Description of Artificial Sequence: Synthetic peptide
QQSNSFPFT

SEQ ID NO: 18721 - DNA, 27 bp, synthetic construct
  misc_feature 1..27: note = Description of Artificial Sequence: Synthetic oligonucleotide
  source 1..27: mol_type = other DNA
cagcagtatggtaactcaccgtgggcg

SEQ ID NO: 18722 - protein, 9 aa, synthetic construct
  REGION 1..9: note = Description of Artificial Sequence: Synthetic peptide
QQYGNSPWA

SEQ ID NO: 18723 - DNA, 27 bp, synthetic construct
  misc_feature 1..27: note = Description of Artificial Sequence: Synthetic oligonucleotide
  source 1..27: mol_type = other DNA
ctacattatcttacttaccctctcact

SEQ ID NO: 18724 - protein, 9 aa, synthetic construct
  REGION 1..9: note = Description of Artificial Sequence: Synthetic peptide
LHYLTYPLT

SEQ ID NO: 18725 - DNA, 27 bp, synthetic construct
  misc_feature 1..27: note = Description of Artificial Sequence: Synthetic oligonucleotide
  source 1..27: mol_type = other DNA
cagcaatatggtatctcaccgtggacg

SEQ ID NO: 18726 - protein, 9 aa, synthetic construct
  REGION 1..9: note = Description of Artificial Sequence: Synthetic peptide
QQYGISPWT

SEQ ID NO: 18727 - DNA, 27 bp, synthetic construct
  misc_feature 1..27: note = Description of Artificial Sequence: Synthetic oligonucleotide
  source 1..27: mol_type = other DNA
caacggtatgatacttacccattcact

SEQ ID NO: 18728 - protein, 9 aa, synthetic construct
  REGION 1..9: note = Description of Artificial Sequence: Synthetic peptide
QRYDTYPFT

SEQ ID NO: 18729 - DNA, 27 bp, synthetic construct
  misc_feature 1..27: note = Description of Artificial Sequence: Synthetic oligonucleotide
  source 1..27: mol_type = other DNA
ctacattatctcaattacccgctcact

SEQ ID NO: 18730 - protein, 9 aa, synthetic construct
  REGION 1..9: note = Description of Artificial Sequence: Synthetic peptide
LHYLNYPLT

SEQ ID NO: 18731 - DNA, 27 bp, synthetic construct
  misc_feature 1..27: note = Description of Artificial Sequence: Synthetic oligonucleotide
  source 1..27: mol_type = other DNA
catcagagtagtcgtttaccgctcact

SEQ ID NO: 18732 - protein, 9 aa, synthetic construct
  REGION 1..9: note = Description of Artificial Sequence: Synthetic peptide
HQSSRLPLT

SEQ ID NO: 18733 - DNA, 27 bp, synthetic construct
  misc_feature 1..27: note = Description of Artificial Sequence: Synthetic oligonucleotide
  source 1..27: mol_type = other DNA
ctacagcattatagtttcccattcact

SEQ ID NO: 18734 - protein, 9 aa, synthetic construct
  REGION 1..9: note = Description of Artificial Sequence: Synthetic peptide
LQHYSFPFT

SEQ ID NO: 18735 - DNA, 27 bp, synthetic construct
  misc_feature 1..27: note = Description of Artificial Sequence: Synthetic oligonucleotide
  source 1..27: mol_type = other DNA
caacagtatatgacttacccgctcact

SEQ ID NO: 18736 - protein, 9 aa, synthetic construct
  REGION 1..9: note = Description of Artificial Sequence: Synthetic peptide
QQYMTYPLT

SEQ ID NO: 18737 - DNA, 27 bp, synthetic construct
  misc_feature 1..27: note = Description of Artificial Sequence: Synthetic oligonucleotide
  source 1..27: mol_type = other DNA
ctacagcatactagttacccgtggacg

SEQ ID NO: 18738 - protein, 9 aa, synthetic construct
  REGION 1..9: note = Description of Artificial Sequence: Synthetic peptide
LQHTSYPWT

SEQ ID NO: 18739 - DNA, 27 bp, synthetic construct
  misc_feature 1..27: note = Description of Artificial Sequence: Synthetic oligonucleotide
  source 1..27: mol_type = other DNA
caacattatcttacttaccctctcact

SEQ ID NO: 18740 - protein, 9 aa, synthetic construct
  REGION 1..9: note = Description of Artificial Sequence: Synthetic peptide
QHYLTYPLT

SEQ ID NO: 18741 - DNA, 27 bp, synthetic construct
  misc_feature 1..27: note = Description of Artificial Sequence: Synthetic oligonucleotide
  source 1..27: mol_type = other DNA
cagcagtatgagagttcaccgtggacg

SEQ ID NO: 18742 - protein, 9 aa, synthetic construct
  REGION 1..9: note = Description of Artificial Sequence: Synthetic peptide
QQYESSPWT

SEQ ID NO: 18743 - DNA, 27 bp, synthetic construct
  misc_feature 1..27: note = Description of Artificial Sequence: Synthetic oligonucleotide
  source 1..27: mol_type = other DNA
caacagtatatcacttacccgctcact

SEQ ID NO: 18744 - protein, 9 aa, synthetic construct
  REGION 1..9: note = Description of Artificial Sequence: Synthetic peptide
QQYITYPLT

SEQ ID NO: 18745 - DNA, 27 bp, synthetic construct
  misc_feature 1..27: note = Description of Artificial Sequence: Synthetic oligonucleotide
  source 1..27: mol_type = other DNA
atgcaaagtatacagcttccctggacg

SEQ ID NO: 18746 - protein, 9 aa, synthetic construct
  REGION 1..9: note = Description of Artificial Sequence: Synthetic peptide
MQSIQLPWT

SEQ ID NO: 18747 - DNA, 27 bp, synthetic construct
  misc_feature 1..27: note = Description of Artificial Sequence: Synthetic oligonucleotide
  source 1..27: mol_type = other DNA
caacgatatgatacttacccattcact

SEQ ID NO: 18748 - protein, 9 aa, synthetic construct
  REGION 1..9: note = Description of Artificial Sequence: Synthetic peptide
QRYDTYPFT

SEQ ID NO: 18749 - DNA, 30 bp, synthetic construct; identical to SEQ ID NO: 18579
  misc_feature 1..30: note = Description of Artificial Sequence: Synthetic oligonucleotide
  source 1..30: mol_type = other DNA

SEQ ID NO: 18750 - protein, 10 aa, synthetic construct
  REGION 1..10: note = Description of Artificial Sequence: Synthetic peptide
QQSYSSPPWT

SEQ ID NO: 18751 - DNA, 27 bp, synthetic construct
  misc_feature 1..27: note = Description of Artificial Sequence: Synthetic oligonucleotide
  source 1..27: mol_type = other DNA
caacagtatagtacttacccgctcact

SEQ ID NO: 18752 - protein, 9 aa, synthetic construct
  REGION 1..9: note = Description of Artificial Sequence: Synthetic peptide
QQYSTYPLT

SEQ ID NO: 18753 - DNA, 27 bp, synthetic construct
  misc_feature 1..27: note = Description of Artificial Sequence: Synthetic oligonucleotide
  source 1..27: mol_type = other DNA
cagcagtatggtaactcaccgtggacg

SEQ ID NO: 18754 - protein, 9 aa, synthetic construct
  REGION 1..9: note = Description of Artificial Sequence: Synthetic peptide
QQYGNSPWT

SEQ ID NO: 18755 - DNA, 27 bp, synthetic construct
  misc_feature 1..27: note = Description of Artificial Sequence: Synthetic oligonucleotide
  source 1..27: mol_type = other DNA
cagcagtatggtaactcaccgtggacg

SEQ ID NO: 18756 - protein, 9 aa, synthetic construct
  REGION 1..9: note = Description of Artificial Sequence: Synthetic peptide
QQYGNSPWT

SEQ ID NO: 18757 - DNA, 27 bp, synthetic construct
  misc_feature 1..27: note = Description of Artificial Sequence: Synthetic oligonucleotide
  source 1..27: mol_type = other DNA
cagcagtatggtaactcaccgtggacg

SEQ ID NO: 18758 - protein, 9 aa, synthetic construct
  REGION 1..9: note = Description of Artificial Sequence: Synthetic peptide
QQYGNSPWT

SEQ ID NO: 18759 - DNA, 27 bp, synthetic construct
  misc_feature 1..27: note = Description of Artificial Sequence: Synthetic oligonucleotide
  source 1..27: mol_type = other DNA
caacaggctaacagtttcccgtggacg

SEQ ID NO: 18760 - protein, 9 aa, synthetic construct
  REGION 1..9: note = Description of Artificial Sequence: Synthetic peptide
QQANSFPWT

SEQ ID NO: 18761 - DNA, 27 bp, synthetic construct
  misc_feature 1..27: note = Description of Artificial Sequence: Synthetic oligonucleotide
  source 1..27: mol_type = other DNA
cagcagtatggtaactcaccgtgggcg

SEQ ID NO: 18762 - protein, 9 aa, synthetic construct
  REGION 1..9: note = Description of Artificial Sequence: Synthetic peptide
QQYGNSPWA

SEQ ID NO: 18763 - DNA, 27 bp, synthetic construct
  misc_feature 1..27: note = Description of Artificial Sequence: Synthetic oligonucleotide
  source 1..27: mol_type = other DNA
cagcagtatggaagctcaccgtggacg

SEQ ID NO: 18764 - protein, 9 aa, synthetic construct
  REGION 1..9: note = Description of Artificial Sequence: Synthetic peptide
QQYGSSPWT

SEQ ID NO: 18765 - DNA, 27 bp, synthetic construct
  misc_feature 1..27: note = Description of Artificial Sequence: Synthetic oligonucleotide
  source 1..27: mol_type = other DNA
caaaagtataacagtgccccattcact

SEQ ID NO: 18766 - protein, 9 aa, synthetic construct
  REGION 1..9: note = Description of Artificial Sequence: Synthetic peptide
QKYNSAPFT

SEQ ID NO: 18767 - DNA, 27 bp, synthetic construct
  misc_feature 1..27: note = Description of Artificial Sequence: Synthetic oligonucleotide
  source 1..27: mol_type = other DNA
cagcaatattatattactccgtggacg

SEQ ID NO: 18768 - protein, 9 aa, synthetic construct
  REGION 1..9: note = Description of Artificial Sequence: Synthetic peptide
QQYYITPWT

SEQ ID NO: 18769 - DNA, 27 bp, synthetic construct
  misc_feature 1..27: note = Description of Artificial Sequence: Synthetic oligonucleotide
  source 1..27: mol_type = other DNA
ctacagcataatgatttcccgttcact

SEQ ID NO: 18770 - protein, 9 aa, synthetic construct
  REGION 1..9: note = Description of Artificial Sequence: Synthetic peptide
LQHNDFPFT

SEQ ID NO: 18771 - DNA, 27 bp, synthetic construct
  misc_feature 1..27: note = Description of Artificial Sequence: Synthetic oligonucleotide
  source 1..27: mol_type = other DNA
catcagagtagtcgtttaccattcact

SEQ ID NO: 18772 - protein, 9 aa, synthetic construct
  REGION 1..9: note = Description of Artificial Sequence: Synthetic peptide
HQSSRLPFT

SEQ ID NO: 18773 - DNA, 27 bp, synthetic construct
  misc_feature 1..27: note = Description of Artificial Sequence: Synthetic oligonucleotide
  source 1..27: mol_type = other DNA
cagcagtatgagagttcaccgtggacg

SEQ ID NO: 18774 - protein, 9 aa, synthetic construct
  REGION 1..9: note = Description of Artificial Sequence: Synthetic peptide
QQYESSPWT

SEQ ID NO: 18775 - DNA, 27 bp, synthetic construct
  misc_feature 1..27: note = Description of Artificial Sequence: Synthetic oligonucleotide
  source 1..27: mol_type = other DNA
cagcagtatggtagctcaccgtggacg

SEQ ID NO: 18776 - protein, 9 aa, synthetic construct
  REGION 1..9: note = Description of Artificial Sequence: Synthetic peptide
QQYGSSPWT

SEQ ID NO: 18777 - DNA, 27 bp, synthetic construct
  misc_feature 1..27: note = Description of Artificial Sequence: Synthetic oligonucleotide
  source 1..27: mol_type = other DNA
caacagtatagtacttacccgctcact

SEQ ID NO: 18778 - protein, 9 aa, synthetic construct
  REGION 1..9: note = Description of Artificial Sequence: Synthetic peptide
QQYSTYPLT

SEQ ID NO: 18779 - DNA, 27 bp, synthetic construct
  misc_feature 1..27: note = Description of Artificial Sequence: Synthetic oligonucleotide
  source 1..27: mol_type = other DNA
ctacagcataaaaggtacccgctcact

SEQ ID NO: 18780 - protein, 9 aa, synthetic construct
  REGION 1..9: note = Description of Artificial Sequence: Synthetic peptide
LQHKRYPLT

SEQ ID NO: 18781 - DNA, 27 bp, synthetic construct
  misc_feature 1..27: note = Description of Artificial Sequence: Synthetic oligonucleotide
  source 1..27: mol_type = other DNA
cagcaatatggtaactcaccgtgggcg

SEQ ID NO: 18782 - protein, 9 aa, synthetic construct
  REGION 1..9: note = Description of Artificial Sequence: Synthetic peptide
QQYGNSPWA

SEQ ID NO: 18783 - DNA, 27 bp, synthetic construct
  misc_feature 1..27: note = Description of Artificial Sequence: Synthetic oligonucleotide
  source 1..27: mol_type = other DNA
cagcagtatggtaactcaccgtggacg

SEQ ID NO: 18784 - protein, 9 aa, synthetic construct
  REGION 1..9: note = Description of Artificial Sequence: Synthetic peptide
QQYGNSPWT

SEQ ID NO: 18785 - DNA, 27 bp, synthetic construct
  misc_feature 1..27: note = Description of Artificial Sequence: Synthetic oligonucleotide
  source 1..27: mol_type = other DNA
caacagtataatagttacccattcact

SEQ ID NO: 18786 - protein, 9 aa, synthetic construct
  REGION 1..9: note = Description of Artificial Sequence: Synthetic peptide
QQYNSYPFT

SEQ ID NO: 18787 - DNA, 27 bp, synthetic construct
  misc_feature 1..27: note = Description of Artificial Sequence: Synthetic oligonucleotide
  source 1..27: mol_type = other DNA
cagcagtatggtaactcaccgtggacg

SEQ ID NO: 18788 - protein, 9 aa, synthetic construct
  REGION 1..9: note = Description of Artificial Sequence: Synthetic peptide
QQYGNSPWT

SEQ ID NO: 18789 - DNA, 27 bp, synthetic construct
  misc_feature 1..27: note = Description of Artificial Sequence: Synthetic oligonucleotide
  source 1..27: mol_type = other DNA
catcagagtagtcgtttaccgctcact

SEQ ID NO: 18790 - protein, 9 aa, synthetic construct
  REGION 1..9: note = Description of Artificial Sequence: Synthetic peptide
HQSSRLPLT

SEQ ID NO: 18791 - DNA, 27 bp, synthetic construct
  misc_feature 1..27: note = Description of Artificial Sequence: Synthetic oligonucleotide
  source 1..27: mol_type = other DNA
caacattatcttacttaccctctcact

SEQ ID NO: 18792 - protein, 9 aa, synthetic construct
  REGION 1..9: note = Description of Artificial Sequence: Synthetic peptide
QHYLTYPLT

SEQ ID NO: 18793 - DNA, 30 bp, synthetic construct; identical to SEQ ID NO: 18581
  misc_feature 1..30: note = Description of Artificial Sequence: Synthetic oligonucleotide
  source 1..30: mol_type = other DNA

SEQ ID NO: 18794 - protein, 10 aa, synthetic construct
  REGION 1..10: note = Description of Artificial Sequence: Synthetic peptide
QQYGSSPPWT

SEQ ID NO: 18795 - DNA, 27 bp, synthetic construct
  misc_feature 1..27: note = Description of Artificial Sequence: Synthetic oligonucleotide
  source 1..27: mol_type = other DNA
cagcagtatggtaactcaccgtgggcg

SEQ ID NO: 18796 - protein, 9 aa, synthetic construct
  REGION 1..9: note = Description of Artificial Sequence: Synthetic peptide
QQYGNSPWA

SEQ ID NO: 18797 - DNA, 27 bp, synthetic construct
  misc_feature 1..27: note = Description of Artificial Sequence: Synthetic oligonucleotide
  source 1..27: mol_type = other DNA
cagcagtataataactggccgtgcagt

SEQ ID NO: 18798 - protein, 9 aa, synthetic construct
  REGION 1..9: note = Description of Artificial Sequence: Synthetic peptide
QQYNNWPCS

SEQ ID NO: 18799 - DNA, 27 bp, synthetic construct
  misc_feature 1..27: note = Description of Artificial Sequence: Synthetic oligonucleotide
  source 1..27: mol_type = other DNA
ctacattatcttacttaccctctcact

SEQ ID NO: 18800 - protein, 9 aa, synthetic construct
  REGION 1..9: note = Description of Artificial Sequence: Synthetic peptide
LHYLTYPLT

SEQ ID NO: 18801 - DNA, 27 bp, synthetic construct
  misc_feature 1..27: note = Description of Artificial Sequence: Synthetic oligonucleotide
  source 1..27: mol_type = other DNA
cagcagagtagtagtttaccgtggacg

SEQ ID NO: 18802 - protein, 9 aa, synthetic construct
  REGION 1..9: note = Description of Artificial Sequence: Synthetic peptide
QQSSSLPWT

SEQ ID NO: 18803 - DNA, 27 bp, synthetic construct
  misc_feature 1..27: note = Description of Artificial Sequence: Synthetic oligonucleotide
  source 1..27: mol_type = other DNA
cagcacaatgattactcaatgttcact

SEQ ID NO: 18804 - protein, 9 aa, synthetic construct
  REGION 1..9: note = Description of Artificial Sequence: Synthetic peptide
QHNDYSMFT

SEQ ID NO: 18805 - DNA, 27 bp, synthetic construct
  misc_feature 1..27: note = Description of Artificial Sequence: Synthetic oligonucleotide
  source 1..27: mol_type = other DNA
atgcaaagtatacagcttccctggacg

SEQ ID NO: 18806 - protein, 9 aa, synthetic construct
  REGION 1..9: note = Description of Artificial Sequence: Synthetic peptide
MQSIQLPWT

SEQ ID NO: 18807 - DNA, 27 bp, synthetic construct
  misc_feature 1..27: note = Description of Artificial Sequence: Synthetic oligonucleotide
  source 1..27: mol_type = other DNA
cagcagtatggtagttcaccgtggacg

SEQ ID NO: 18808 - protein, 9 aa, synthetic construct
  REGION 1..9: note = Description of Artificial Sequence: Synthetic peptide
QQYGSSPWT

SEQ ID NO: 18809 - DNA, 27 bp, synthetic construct
  misc_feature 1..27: note = Description of Artificial Sequence: Synthetic oligonucleotide
  source 1..27: mol_type = other DNA
cagcagtatggtagctcaccgtggacg

SEQ ID NO: 18810 - protein, 9 aa, synthetic construct
  REGION 1..9: note = Description of Artificial Sequence: Synthetic peptide
QQYGSSPWT

SEQ ID NO: 18811 - DNA, 27 bp, synthetic construct
  misc_feature 1..27: note = Description of Artificial Sequence: Synthetic oligonucleotide
  source 1..27: mol_type = other DNA
caacattatcttaattaccctctcacc

SEQ ID NO: 18812 - protein, 9 aa, synthetic construct
  REGION 1..9: note = Description of Artificial Sequence: Synthetic peptide
QHYLNYPLT

SEQ ID NO: 18813 - DNA, 27 bp, synthetic construct
  misc_feature 1..27: note = Description of Artificial Sequence: Synthetic oligonucleotide
  source 1..27: mol_type = other DNA
caacaggctaacagtttcccgtggacg

SEQ ID NO: 18814 - protein, 9 aa, synthetic construct
  REGION 1..9: note = Description of Artificial Sequence: Synthetic peptide
QQANSFPWT

SEQ ID NO: 18815 - DNA, 27 bp, synthetic construct
  misc_feature 1..27: note = Description of Artificial Sequence: Synthetic oligonucleotide
  source 1..27: mol_type = other DNA
cagcagtatgaaagctcaccgtggacg

SEQ ID NO: 18816 - protein, 9 aa, synthetic construct
  REGION 1..9: note = Description of Artificial Sequence: Synthetic peptide
QQYESSPWT

SEQ ID NO: 18817 - DNA, 27 bp, synthetic construct
  misc_feature 1..27: note = Description of Artificial Sequence: Synthetic oligonucleotide
  source 1..27: mol_type = other DNA
ctacagcattatagtttcccattcact

SEQ ID NO: 18818 - protein, 9 aa, synthetic construct
  REGION 1..9: note = Description of Artificial Sequence: Synthetic peptide
LQHYSFPFT

SEQ ID NO: 18819 - DNA, 27 bp, synthetic construct
  misc_feature 1..27: note = Description of Artificial Sequence: Synthetic oligonucleotide
  source 1..27: mol_type = other DNA
caacattatcttacttaccctctcact

SEQ ID NO: 18820 - protein, 9 aa, synthetic construct
  REGION 1..9: note = Description of Artificial Sequence: Synthetic peptide
QHYLTYPLT

SEQ ID NO: 18821 - DNA, 27 bp, synthetic construct
  misc_feature 1..27: note = Description of Artificial Sequence: Synthetic oligonucleotide
  source 1..27: mol_type = other DNA
caacgatatgatacttacccattcact

SEQ ID NO: 18822 - protein, 9 aa, synthetic construct
  REGION 1..9: note = Description of Artificial Sequence: Synthetic peptide
QRYDTYPFT

SEQ ID NO: 18823 - DNA, 27 bp, synthetic construct
  misc_feature 1..27: note = Description of Artificial Sequence: Synthetic oligonucleotide
  source 1..27: mol_type = other DNA
cagcagtatgaaagctcaccgtggacg

SEQ ID NO: 18824 - protein, 9 aa, synthetic construct
  REGION 1..9: note = Description of Artificial Sequence: Synthetic peptide
QQYESSPWT

SEQ ID NO: 18825 - DNA, 27 bp, synthetic construct
  misc_feature 1..27: note = Description of Artificial Sequence: Synthetic oligonucleotide
  source 1..27: mol_type = other DNA
caacgggctaacagtttcccgtgcagt

SEQ ID NO: 18826 - protein, 9 aa, synthetic construct
  REGION 1..9: note = Description of Artificial Sequence: Synthetic peptide
QRANSFPCS

SEQ ID NO: 18827 - DNA, 27 bp, synthetic construct
  misc_feature 1..27: note = Description of Artificial Sequence: Synthetic oligonucleotide
  source 1..27: mol_type = other DNA
catcagagtagaactttaccgctcact

SEQ ID NO: 18828 - protein, 9 aa, synthetic construct
  REGION 1..9: note = Description of Artificial Sequence: Synthetic peptide
HQSRTLPLT

SEQ ID NO: 18829 - DNA, 27 bp, synthetic construct
  misc_feature 1..27: note = Description of Artificial Sequence: Synthetic oligonucleotide
  source 1..27: mol_type = other DNA
caacagtatatgacttacccgctcact

SEQ ID NO: 18830 - protein, 9 aa, synthetic construct
  REGION 1..9: note = Description of Artificial Sequence: Synthetic peptide
QQYMTYPLT

SEQ ID NO: 18831 - DNA, 27 bp, synthetic construct
  misc_feature 1..27: note = Description of Artificial Sequence: Synthetic oligonucleotide
  source 1..27: mol_type = other DNA
cagcagtatggtaactcaccgtgggcg

SEQ ID NO: 18832 - protein, 9 aa, synthetic construct
  REGION 1..9: note = Description of Artificial Sequence: Synthetic peptide
QQYGNSPWA

SEQ ID NO: 18833 - DNA, 27 bp, synthetic construct
  misc_feature 1..27: note = Description of Artificial Sequence: Synthetic oligonucleotide
  source 1..27: mol_type = other DNA
caacattatcttacttaccctctcact

SEQ ID NO: 18834 - protein, 9 aa, synthetic construct
  REGION 1..9: note = Description of Artificial Sequence: Synthetic peptide
QHYLTYPLT

SEQ ID NO: 18835 - DNA, 27 bp, synthetic construct
  misc_feature 1..27: note = Description of Artificial Sequence: Synthetic oligonucleotide
  source 1..27: mol_type = other DNA
ctacagcattatcgttacccattcact

SEQ ID NO: 18836 - protein, 9 aa, synthetic construct
  REGION 1..9: note = Description of Artificial Sequence: Synthetic peptide
LQHYRYPFT

SEQ ID NO: 18837 - DNA, 27 bp, synthetic construct
  misc_feature 1..27: note = Description of Artificial Sequence: Synthetic oligonucleotide
  source 1..27: mol_type = other DNA
catcagagtggtcgtttaccgctcact

SEQ ID NO: 18838 - protein, 9 aa, synthetic construct
  REGION 1..9: note = Description of Artificial Sequence: Synthetic peptide
HQSGRLPLT

SEQ ID NO: 18839 - DNA, 27 bp, synthetic construct
  misc_feature 1..27: note = Description of Artificial Sequence: Synthetic oligonucleotide
  source 1..27: mol_type = other DNA
catcagagtagtcgtttaccattcact

SEQ ID NO: 18840 - protein, 9 aa, synthetic construct
  REGION 1..9: note = Description of Artificial Sequence: Synthetic peptide
HQSSRLPFT

SEQ ID NO: 18841 - DNA, 27 bp, synthetic construct
  misc_feature 1..27: note = Description of Artificial Sequence: Synthetic oligonucleotide
  source 1..27: mol_type = other DNA
cagcaatattgtagttttccattcact

SEQ ID NO: 18842 - protein, 9 aa, synthetic construct
  REGION 1..9: note = Description of Artificial Sequence: Synthetic peptide
QQYCSFPFT

SEQ ID NO: 18843 - DNA, 27 bp, synthetic construct
  misc_feature 1..27: note = Description of Artificial Sequence: Synthetic oligonucleotide
  source 1..27: mol_type = other DNA
caacaggctaacagtttcccgtggacg

SEQ ID NO: 18844 - protein, 9 aa, synthetic construct
  REGION 1..9: note = Description of Artificial Sequence: Synthetic peptide
QQANSFPWT

SEQ ID NO: 18845 - DNA, 27 bp, synthetic construct
  misc_feature 1..27: note = Description of Artificial Sequence: Synthetic oligonucleotide
  source 1..27: mol_type = other DNA
cagcaatattctagtcttccattcact

SEQ ID NO: 18846 - protein, 9 aa, synthetic construct
  REGION 1..9: note = Description of Artificial Sequence: Synthetic peptide
QQYSSLPFT

SEQ ID NO: 18847 - DNA, 27 bp, synthetic construct
  misc_feature 1..27: note = Description of Artificial Sequence: Synthetic oligonucleotide
  source 1..27: mol_type = other DNA
cagcaatattgtagttttccattcact

SEQ ID NO: 18848 - protein, 9 aa, synthetic construct
  REGION 1..9: note = Description of Artificial Sequence: Synthetic peptide
QQYCSFPFT

SEQ ID NO: 18849 - DNA, 27 bp, synthetic construct
  misc_feature 1..27: note = Description of Artificial Sequence: Synthetic oligonucleotide
  source 1..27: mol_type = other DNA
caacagactaacagtgtcccattcact

SEQ ID NO: 18850 - protein, 9 aa, synthetic construct
  REGION 1..9: note = Description of Artificial Sequence: Synthetic peptide
QQTNSVPFT

SEQ ID NO: 18851 - DNA, 27 bp, synthetic construct
  misc_feature 1..27: note = Description of Artificial Sequence: Synthetic oligonucleotide
  source 1..27: mol_type = other DNA
caacagagctacggttcccctctcact

SEQ ID NO: 18852 - protein, 9 aa, synthetic construct
  REGION 1..9: note = Description of Artificial Sequence: Synthetic peptide
QQSYGSPLT

SEQ ID NO: 18853 - DNA, 27 bp, synthetic construct
  misc_feature 1..27: note = Description of Artificial Sequence: Synthetic oligonucleotide
  source 1..27: mol_type = other DNA
caacattatctcacttaccctctcact

SEQ ID NO: 18854 - protein, 9 aa, synthetic construct
  REGION 1..9: note = Description of Artificial Sequence: Synthetic peptide
QHYLTYPLT

SEQ ID NO: 18855 - DNA, 27 bp, synthetic construct
  misc_feature 1..27: note = Description of Artificial Sequence: Synthetic oligonucleotide
  source 1..27: mol_type = other DNA
cagcaatattataatactcctccgaca

SEQ ID NO: 18856 - protein, 9 aa, synthetic construct
  REGION 1..9: note = Description of Artificial Sequence: Synthetic peptide
QQYYNTPPT

SEQ ID NO: 18857 - DNA, 27 bp, synthetic construct
  misc_feature 1..27: note = Description of Artificial Sequence: Synthetic oligonucleotide
  source 1..27: mol_type = other DNA
caacagggtgacagtttccctccgacg

SEQ ID NO: 18858 - protein, 9 aa, synthetic construct
  REGION 1..9: note = Description of Artificial Sequence: Synthetic peptide
QQGDSFPPT

SEQ ID NO: 18859 - DNA, 27 bp, synthetic construct
  misc_feature 1..27: note = Description of Artificial Sequence: Synthetic oligonucleotide
  source 1..27: mol_type = other DNA
caacgggataacagtttaccgtgcagt

SEQ ID NO: 18860 - protein, 9 aa, synthetic construct
  REGION 1..9: note = Description of Artificial Sequence: Synthetic peptide
QRDNSLPCS

SEQ ID NO: 18861 - DNA, 27 bp, synthetic construct
  misc_feature 1..27: note = Description of Artificial Sequence: Synthetic oligonucleotide
  source 1..27: mol_type = other DNA
ctacaatataatagttaccctctcact

SEQ ID NO: 18862 - protein, 9 aa, synthetic construct
  REGION 1..9: note = Description of Artificial Sequence: Synthetic peptide
LQYNSYPLT

SEQ ID NO: 18863 - DNA, 30 bp, synthetic construct; identical to SEQ ID NO: 18581
  misc_feature 1..30: note = Description of Artificial Sequence: Synthetic oligonucleotide
  source 1..30: mol_type = other DNA

SEQ ID NO: 18864 - protein, 10 aa, synthetic construct
  REGION 1..10: note = Description of Artificial Sequence: Synthetic peptide
QQYGSSPPWT

SEQ ID NO: 18865 - DNA, 27 bp, synthetic construct
  misc_feature 1..27: note = Description of Artificial Sequence: Synthetic oligonucleotide
  source 1..27: mol_type = other DNA
ctacagcataatgatttcccgttcact

SEQ ID NO: 18866 - protein, 9 aa, synthetic construct
  REGION 1..9: note = Description of Artificial Sequence: Synthetic peptide
LQHNDFPFT

SEQ ID NO: 18867 - DNA, 27 bp, synthetic construct
  misc_feature 1..27: note = Description of Artificial Sequence: Synthetic oligonucleotide
  source 1..27: mol_type = other DNA
cagcagtatggtaactcaccgtggacg

SEQ ID NO: 18868 - protein, 9 aa, synthetic construct
  REGION 1..9: note = Description of Artificial Sequence: Synthetic peptide
QQYGNSPWT

SEQ ID NO: 18869 - DNA, 27 bp, synthetic construct
  misc_feature 1..27: note = Description of Artificial Sequence: Synthetic oligonucleotide
  source 1..27: mol_type = other DNA
caacaatatatcacttacccgctcact

SEQ ID NO: 18870 - protein, 9 aa, synthetic construct
  REGION 1..9: note = Description of Artificial Sequence: Synthetic peptide
QQYITYPLT

SEQ ID NO: 18871 - DNA, 27 bp, synthetic construct
  misc_feature 1..27: note = Description of Artificial Sequence: Synthetic oligonucleotide
  source 1..27: mol_type = other DNA
caacagtatagtaattacccggtcact

SEQ ID NO: 18872 - protein, 9 aa, synthetic construct
  REGION 1..9: note = Description of Artificial Sequence: Synthetic peptide
QQYSNYPVT

SEQ ID NO: 18873 - DNA, 27 bp, synthetic construct
  misc_feature 1..27: note = Description of Artificial Sequence: Synthetic oligonucleotide
  source 1..27: mol_type = other DNA
cagcagtatggaaactcaccgtgggcg

SEQ ID NO: 18874 - protein, 9 aa, synthetic construct
  REGION 1..9: note = Description of Artificial Sequence: Synthetic peptide
QQYGNSPWA

SEQ ID NO: 18875 - DNA, 27 bp, synthetic construct
  misc_feature 1..27: note = Description of Artificial Sequence: Synthetic oligonucleotide
  source 1..27: mol_type = other DNA
caacaatattatagtactcctccgacg

SEQ ID NO: 18876 - protein, 9 aa, synthetic construct
  REGION 1..9: note = Description of Artificial Sequence: Synthetic peptide
QQYYSTPPT

SEQ ID NO: 18877 - DNA, 27 bp, synthetic construct
  misc_feature 1..27: note = Description of Artificial Sequence: Synthetic oligonucleotide
  source 1..27: mol_type = other DNA
caacaatatagtacttacccgctcact

SEQ ID NO: 18878 - protein, 9 aa, synthetic construct
  REGION 1..9: note = Description of Artificial Sequence: Synthetic peptide
QQYSTYPLT

SEQ ID NO: 18879 - DNA, 27 bp, synthetic construct
  misc_feature 1..27: note = Description of Artificial Sequence: Synthetic oligonucleotide
  source 1..27: mol_type = other DNA
caacaatattatagtactcctccgacg

SEQ ID NO: 18880 - protein, 9 aa, synthetic construct
  REGION 1..9: note = Description of Artificial Sequence: Synthetic peptide
QQYYSTPPT

SEQ ID NO: 18881 - DNA, 27 bp, synthetic construct
  misc_feature 1..27: note = Description of Artificial Sequence: Synthetic oligonucleotide
  source 1..27: mol_type = other DNA
cagcagtcttatactattccattcact

SEQ ID NO: 18882 - protein, 9 aa, synthetic construct
  REGION 1..9: note = Description of Artificial Sequence: Synthetic peptide
QQSYTIPFT

SEQ ID NO: 18883 - DNA, 27 bp, synthetic construct
  misc_feature 1..27: note = Description of Artificial Sequence: Synthetic oligonucleotide
  source 1..27: mol_type = other DNA
atgcaaagtatacagcttccctggacg

SEQ ID NO: 18884 - protein, 9 aa, synthetic construct
  REGION 1..9: note = Description of Artificial Sequence: Synthetic peptide
MQSIQLPWT

SEQ ID NO: 18885 - DNA, 27 bp, synthetic construct
  misc_feature 1..27: note = Description of Artificial Sequence: Synthetic oligonucleotide
  source 1..27: mol_type = other DNA
caacaggctaacagtttcccgtggacg

SEQ ID NO: 18886 - protein, 9 aa, synthetic construct
  REGION 1..9: note = Description of Artificial Sequence: Synthetic peptide
QQANSFPWT

SEQ ID NO: 18887 - DNA, 27 bp, synthetic construct
  misc_feature 1..27: note = Description of Artificial Sequence: Synthetic oligonucleotide
  source 1..27: mol_type = other DNA
ctacagcattataggtacccattcact

SEQ ID NO: 18888 - protein, 9 aa, synthetic construct
  REGION 1..9: note = Description of Artificial Sequence: Synthetic peptide
LQHYRYPFT

SEQ ID NO: 18889 - DNA, 27 bp, synthetic construct
  misc_feature 1..27: note = Description of Artificial Sequence: Synthetic oligonucleotide
  source 1..27: mol_type = other DNA
caacgatatgacacttacccattcact

SEQ ID NO: 18890 - protein, 9 aa, synthetic construct
  REGION 1..9: note = Description of Artificial Sequence: Synthetic peptide
QRYDTYPFT

SEQ ID NO: 18891 - DNA, 27 bp, synthetic construct
  misc_feature 1..27: note = Description of Artificial Sequence: Synthetic oligonucleotide
  source 1..27: mol_type = other DNA
caacaatatatgacttacccgctcact

SEQ ID NO: 18892 - protein, 9 aa, synthetic construct
  REGION 1..9: note = Description of Artificial Sequence: Synthetic peptide
QQYMTYPLT

SEQ ID NO: 18893 - DNA, 27 bp, synthetic construct
  misc_feature 1..27: note = Description of Artificial Sequence: Synthetic oligonucleotide
  source 1..27: mol_type = other DNA
cagcagtatggtagctcaccgtggacg

SEQ ID NO: 18894 - protein, 9 aa, synthetic construct
  REGION 1..9: note = Description of Artificial Sequence: Synthetic peptide
QQYGSSPWT

SEQ ID NO: 18895 - DNA, 27 bp, synthetic construct
  misc_feature 1..27: note = Description of Artificial Sequence: Synthetic oligonucleotide
  source 1..27: mol_type = other DNA
cagcagtatggtaattcaccgtggacg

SEQ ID NO: 18896 - protein, 9 aa, synthetic construct
  REGION 1..9: note = Description of Artificial Sequence: Synthetic peptide
QQYGNSPWT

SEQ ID NO: 18897 - DNA, 27 bp, synthetic construct
  misc_feature 1..27: note = Description of Artificial Sequence: Synthetic oligonucleotide
  source 1..27: mol_type = other DNA
cagcagtatggtaactcaccgtggacg

SEQ ID NO: 18898 - protein, 9 aa, synthetic construct
  REGION 1..9: note = Description of Artificial Sequence: Synthetic peptide
QQYGNSPWT

SEQ ID NO: 18899 - DNA, 27 bp, synthetic construct
  misc_feature 1..27: note = Description of Artificial Sequence: Synthetic oligonucleotide
  source 1..27: mol_type = other DNA
caacaatatagtacttacccgctcact

SEQ ID NO: 18900 - protein, 9 aa, synthetic construct
  REGION 1..9: note = Description of Artificial Sequence: Synthetic peptide
QQYSTYPLT

SEQ ID NO: 18901 - DNA, 27 bp, synthetic construct
  misc_feature 1..27: note = Description of Artificial Sequence: Synthetic oligonucleotide
  source 1..27: mol_type = other DNA
ctacaacattatcgttaccctttcact

SEQ ID NO: 18902 - protein, 9 aa, synthetic construct
  REGION 1..9: note = Description of Artificial Sequence: Synthetic peptide
LQHYRYPFT

SEQ ID NO: 18903 - DNA, 27 bp, synthetic construct
  misc_feature 1..27: note = Description of Artificial Sequence: Synthetic oligonucleotide
  source 1..27: mol_type = other DNA
atgcaaagtatacagcttccctggacg

SEQ ID NO: 18904 - protein, 9 aa, synthetic construct
  REGION 1..9: note = Description of Artificial Sequence: Synthetic peptide
MQSIQLPWT

SEQ ID NO: 18905 - DNA, 27 bp, synthetic construct
  misc_feature 1..27: note = Description of Artificial Sequence: Synthetic oligonucleotide
  source 1..27: mol_type = other DNA
cagcagtatggtaactcaccgtgggcg

SEQ ID NO: 18906 - protein, 9 aa, synthetic construct
  REGION 1..9: note = Description of Artificial Sequence: Synthetic peptide
QQYGNSPWA

SEQ ID NO: 18907 - DNA, 27 bp, synthetic construct
  misc_feature 1..27: note = Description of Artificial Sequence: Synthetic oligonucleotide
  source 1..27: mol_type = other DNA
cagcagtatggtaactcaccgtgggcg

SEQ ID NO: 18908 - protein, 9 aa, synthetic construct
  REGION 1..9: note = Description of Artificial Sequence: Synthetic peptide
QQYGNSPWA

SEQ ID NO: 18909 - DNA, 27 bp, synthetic construct
  misc_feature 1..27: note = Description of Artificial Sequence: Synthetic oligonucleotide
  source 1..27: mol_type = other DNA
ctacagcataaaaggtacccgctcact

SEQ ID NO: 18910 - protein, 9 aa, synthetic construct
  REGION 1..9: note = Description of Artificial Sequence: Synthetic peptide
LQHKRYPLT

SEQ ID NO: 18911 - DNA, 27 bp, synthetic construct
  misc_feature 1..27: note = Description of Artificial Sequence: Synthetic oligonucleotide
  source 1..27: mol_type = other DNA
caacagtatcttacttacccgctcact

SEQ ID NO: 18912 - protein, 9 aa, synthetic construct
  REGION 1..9: note = Description of Artificial Sequence: Synthetic peptide
QQYLTYPLT

SEQ ID NO: 18913 - DNA, 27 bp, synthetic construct
  misc_feature 1..27: note = Description of Artificial Sequence: Synthetic oligonucleotide
  source 1..27: mol_type = other DNA
cagcagtataataactggccgctcact

SEQ ID NO: 18914 - protein, 9 aa, synthetic construct
  REGION 1..9: note = Description of Artificial Sequence: Synthetic peptide
QQYNNWPLT

SEQ ID NO: 18915 - DNA, 27 bp, synthetic construct
  misc_feature 1..27: note = Description of Artificial Sequence: Synthetic oligonucleotide
  source 1..27: mol_type = other DNA
ctacaacattatcgttaccctttcact

SEQ ID NO: 18916 - protein, 9 aa, synthetic construct
  REGION 1..9: note = Description of Artificial Sequence: Synthetic peptide
LQHYRYPFT

SEQ ID NO: 18917 - DNA, 27 bp, synthetic construct
  misc_feature 1..27: note = Description of Artificial Sequence: Synthetic oligonucleotide
  source 1..27: mol_type = other DNA
cagcagtatggtaactcaccgtggacg

SEQ ID NO: 18918 - protein, 9 aa, synthetic construct
  REGION 1..9: note = Description of Artificial Sequence: Synthetic peptide
QQYGNSPWT

SEQ ID NO: 18919 - DNA, 27 bp, synthetic construct
  misc_feature 1..27: note = Description of Artificial Sequence: Synthetic oligonucleotide
  source 1..27: mol_type = other DNA
cagcagtatggtaactcaccgtggacg

SEQ ID NO: 18920 - protein, 9 aa, synthetic construct
  REGION 1..9: note = Description of Artificial Sequence: Synthetic peptide
QQYGNSPWT

SEQ ID NO: 18921 - DNA, 30 bp, synthetic construct; identical to SEQ ID NO: 18579
  misc_feature 1..30: note = Description of Artificial Sequence: Synthetic oligonucleotide
  source 1..30: mol_type = other DNA

SEQ ID NO: 18922 - protein, 10 aa, synthetic construct
  REGION 1..10: note = Description of Artificial Sequence: Synthetic peptide
QQSYSSPPWT

SEQ ID NO: 18923 - DNA, 27 bp, synthetic construct
  misc_feature 1..27: note = Description of Artificial Sequence: Synthetic oligonucleotide
  source 1..27: mol_type = other DNA
ctacagcattatcgttacccattcact

SEQ ID NO: 18924 - protein, 9 aa, synthetic construct
  REGION 1..9: note = Description of Artificial Sequence: Synthetic peptide
LQHYRYPFT

SEQ ID NO: 18925 - DNA, 27 bp, synthetic construct
  misc_feature 1..27: note = Description of Artificial Sequence: Synthetic oligonucleotide
  source 1..27: mol_type = other DNA
catcagagtggtagtttacctcagacg

SEQ ID NO: 18926 - protein, 9 aa, synthetic construct
  REGION 1..9: note = Description of Artificial Sequence: Synthetic peptide
HQSGSLPQT

SEQ ID NO: 18927 - DNA, 27 bp, synthetic construct
  misc_feature 1..27: note = Description of Artificial Sequence: Synthetic oligonucleotide
  source 1..27: mol_type = other DNA
cagcaatattataatactcctccgaca

SEQ ID NO: 18928 - protein, 9 aa, synthetic construct
  REGION 1..9: note = Description of Artificial Sequence: Synthetic peptide
QQYYNTPPT

SEQ ID NO: 18929 - DNA, 27 bp, synthetic construct
  misc_feature 1..27: note = Description of Artificial Sequence: Synthetic oligonucleotide
  source 1..27: mol_type = other DNA
cagcagagtagtagtttaccgtggacg

SEQ ID NO: 18930 - protein, 9 aa, synthetic construct
  REGION 1..9: note = Description of Artificial Sequence: Synthetic peptide
QQSSSLPWT

SEQ ID NO: 18931 - DNA, 27 bp, synthetic construct
  misc_feature 1..27: note = Description of Artificial Sequence: Synthetic oligonucleotide
  source 1..27: mol_type = other DNA
ctacagcataatagttacccgtggacg

SEQ ID NO: 18932 - protein, 9 aa, synthetic construct
  REGION 1..9: note = Description of Artificial Sequence: Synthetic peptide
LQHNSYPWT

SEQ ID NO: 18933 - DNA, 27 bp, synthetic construct
  misc_feature 1..27: note = Description of Artificial Sequence: Synthetic oligonucleotide
  source 1..27: mol_type = other DNA
cagcagtatggtaactcaccgtgggcg

SEQ ID NO: 18934 - protein, 9 aa, synthetic construct
  REGION 1..9: note = Description of Artificial Sequence: Synthetic peptide
QQYGNSPWA

SEQ ID NO: 18935 - DNA, 27 bp, synthetic construct
  misc_feature 1..27: note = Description of Artificial Sequence: Synthetic oligonucleotide
  source 1..27: mol_type = other DNA
ctacagcataagagttacccgctcact

SEQ ID NO: 18936 - protein, 9 aa, synthetic construct
  REGION 1..9: note = Description of Artificial Sequence: Synthetic peptide
LQHKSYPLT

SEQ ID NO: 18937 - DNA, 27 bp, synthetic construct
  misc_feature 1..27: note = Description of Artificial Sequence: Synthetic oligonucleotide
  source 1..27: mol_type = other DNA
ctacagcataaaagttaccctctcact

SEQ ID NO: 18938 - protein, 9 aa, synthetic construct
  REGION 1..9: note = Description of Artificial Sequence: Synthetic peptide
LQHKSYPLT

SEQ ID NO: 18939 - DNA, 27 bp, synthetic construct
  misc_feature 1..27: note = Description of Artificial Sequence: Synthetic oligonucleotide
  source 1..27: mol_type = other DNA
caccagtatgagacctcaccgtggacg

SEQ ID NO: 18940 - protein, 9 aa, synthetic construct
  REGION 1..9: note = Description of Artificial Sequence: Synthetic peptide
HQYETSPWT

SEQ ID NO: 18941 - DNA, 33 bp, synthetic construct
  misc_feature 1..33: note = Description of Artificial Sequence: Synthetic oligonucleotide
  source 1..33: mol_type = other DNA
acagcatgggatgacagcctgaatggttgggtg

SEQ ID NO: 18942 - protein, 11 aa, synthetic construct
  REGION 1..11: note = Description of Artificial Sequence: Synthetic peptide
TAWDDSLNGWV

SEQ ID NO: 18943 - DNA, 27 bp, synthetic construct
  misc_feature 1..27: note = Description of Artificial Sequence: Synthetic oligonucleotide
  source 1..27: mol_type = other DNA
cagcagttttataactggctgtgcagt

SEQ ID NO: 18944 - protein, 9 aa, synthetic construct
  REGION 1..9: note = Description of Artificial Sequence: Synthetic peptide
QQFYNWLCS

SEQ ID NO: 18945 - DNA, 27 bp, synthetic construct
  misc_feature 1..27: note = Description of Artificial Sequence: Synthetic oligonucleotide
  source 1..27: mol_type = other DNA
cagcagtatgaaaactcaccgtggacg

SEQ ID NO: 18946 - protein, 9 aa, synthetic construct
  REGION 1..9: note = Description of Artificial Sequence: Synthetic peptide
QQYENSPWT

SEQ ID NO: 18947 - DNA, 27 bp, synthetic construct
  misc_feature 1..27: note = Description of Artificial Sequence: Synthetic oligonucleotide
  source 1..27: mol_type = other DNA
catcagagtcgaagtttaccgctcact

SEQ ID NO: 18948 - protein, 9 aa, synthetic construct
  REGION 1..9: note = Description of Artificial Sequence: Synthetic peptide
HQSRSLPLT

SEQ ID NO: 18949 - DNA, 27 bp, synthetic construct
  misc_feature 1..27: note = Description of Artificial Sequence: Synthetic oligonucleotide
  source 1..27: mol_type = other DNA
ctacagcataatagttacccgctcact

SEQ ID NO: 18950 - protein, 9 aa, synthetic construct
  REGION 1..9: note = Description of Artificial Sequence: Synthetic peptide
LQHNSYPLT

SEQ ID NO: 18951 - DNA, 27 bp, synthetic construct
  misc_feature 1..27: note = Description of Artificial Sequence: Synthetic oligonucleotide
  source 1..27: mol_type = other DNA
caacagagttacagtttcccgctcact

SEQ ID NO: 18952 - protein, 9 aa, synthetic construct
  REGION 1..9: note = Description of Artificial Sequence: Synthetic peptide
QQSYSFPLT

SEQ ID NO: 18953 - DNA, 24 bp, synthetic construct
  misc_feature 1..24: note = Description of Artificial Sequence: Synthetic oligonucleotide
  source 1..24: mol_type = other DNA
atgcaagctctacaaactcccact

SEQ ID NO: 18954 - protein, 8 aa, synthetic construct
  REGION 1..8: note = Description of Artificial Sequence: Synthetic peptide
MQALQTPT

SEQ ID NO: 18955 - DNA, 27 bp, synthetic construct
  misc_feature 1..27: note = Description of Artificial Sequence: Synthetic oligonucleotide
  source 1..27: mol_type = other DNA
ctacagcatcatgactacccattcact

SEQ ID NO: 18956 - protein, 9 aa, synthetic construct
  REGION 1..9: note = Description of Artificial Sequence: Synthetic peptide
LQHHDYPFT

SEQ ID NO: 18957 - DNA, 27 bp, synthetic construct
  misc_feature 1..27: note = Description of Artificial Sequence: Synthetic oligonucleotide
  source 1..27: mol_type = other DNA
cagcagttttataactggctgtgcagt

SEQ ID NO: 18958 - protein, 9 aa, synthetic construct
  REGION 1..9: note = Description of Artificial Sequence: Synthetic peptide
QQFYNWLCS

SEQ ID NO: 18959 - DNA, 27 bp, synthetic construct
  misc_feature 1..27: note = Description of Artificial Sequence: Synthetic oligonucleotide
  source 1..27: mol_type = other DNA
cagcagtattataactggctgtgcagt

SEQ ID NO: 18960 - protein, 9 aa, synthetic construct
  REGION 1..9: note = Description of Artificial Sequence: Synthetic peptide
QQYYNWLCS

SEQ ID NO: 18961 - DNA, 24 bp, synthetic construct
  misc_feature 1..24: note = Description of Artificial Sequence: Synthetic oligonucleotide
  source 1..24: mol_type = other DNA
atgcaagctctacaaactcccact

SEQ ID NO: 18962 - protein, 8 aa, synthetic construct
  REGION 1..8: note = Description of Artificial Sequence: Synthetic peptide
MQALQTPT

SEQ ID NO: 18963 - DNA, 27 bp, synthetic construct
  misc_feature 1..27: note = Description of Artificial Sequence: Synthetic oligonucleotide
  source 1..27: mol_type = other DNA
caacaatatgagacctcaccgtggacg

SEQ ID NO: 18964 - protein, 9 aa, synthetic construct
  REGION 1..9: note = Description of Artificial Sequence: Synthetic peptide
QQYETSPWT

SEQ ID NO: 18965 - DNA, 30 bp, synthetic construct
  misc_feature 1..30: note = Description of Artificial Sequence: Synthetic oligonucleotide
  source 1..30: mol_type = other DNA
cagcagtatgataactggcctccgtgcagt

SEQ ID NO: 18966 - protein, 10 aa, synthetic construct
  REGION 1..10: note = Description of Artificial Sequence: Synthetic peptide
QQYDNWPPCS

SEQ ID NO: 18967 - DNA, 27 bp, synthetic construct
  misc_feature 1..27: note = Description of Artificial Sequence: Synthetic oligonucleotide
  source 1..27: mol_type = other DNA
caacggtatcatacttacccgctcact

SEQ ID NO: 18968 - protein, 9 aa, synthetic construct
  REGION 1..9: note = Description of Artificial Sequence: Synthetic peptide
QRYHTYPLT

SEQ ID NO: 18969 - DNA, 27 bp, synthetic construct
  misc_feature 1..27: note = Description of Artificial Sequence: Synthetic oligonucleotide
  source 1..27: mol_type = other DNA
caacagagttacagtttcccgctcact

SEQ ID NO: 18970 - protein, 9 aa, synthetic construct
  REGION 1..9: note = Description of Artificial Sequence: Synthetic peptide
QQSYSFPLT

SEQ ID NO: 18971 - DNA, 27 bp, synthetic construct
  misc_feature 1..27: note = Description of Artificial Sequence: Synthetic oligonucleotide
  source 1..27: mol_type = other DNA
ctacagcattatagtttccctcggacg

SEQ ID NO: 18972 - protein, 9 aa, synthetic construct
  REGION 1..9: note = Description of Artificial Sequence: Synthetic peptide
LQHYSFPRT

SEQ ID NO: 18973 - DNA, 27 bp, synthetic construct
  misc_feature 1..27: note = Description of Artificial Sequence: Synthetic oligonucleotide
  source 1..27: mol_type = other DNA
ctacagcataatagttacccattcact

SEQ ID NO: 18974 - protein, 9 aa, synthetic construct
  REGION 1..9: note = Description of Artificial Sequence: Synthetic peptide
LQHNSYPFT

SEQ ID NO: 18975 - DNA, 27 bp, synthetic construct
  misc_feature 1..27: note = Description of Artificial Sequence: Synthetic oligonucleotide
  source 1..27: mol_type = other DNA
caacaatattttagtcttccattcact

SEQ ID NO: 18976 - protein, 9 aa, synthetic construct
  REGION 1..9: note = Description of Artificial Sequence: Synthetic peptide
QQYFSLPFT

SEQ ID NO: 18977 - DNA, 27 bp, synthetic construct
  misc_feature 1..27: note = Description of Artificial Sequence: Synthetic oligonucleotide
  source 1..27: mol_type = other DNA
cagcaatattatagtactcctccgacg

SEQ ID NO: 18978 - protein, 9 aa, synthetic construct
  REGION 1..9: note = Description of Artificial Sequence: Synthetic peptide
QQYYSTPPT

SEQ ID NO: 18979 - DNA, 27 bp, synthetic construct
  misc_feature 1..27: note = Description of Artificial Sequence: Synthetic oligonucleotide
  source 1..27: mol_type = other DNA
ctacagcattatagttaccctcggacg

SEQ ID NO: 18980 - protein, 9 aa, synthetic construct
  REGION 1..9: note = Description of Artificial Sequence: Synthetic peptide
LQHYSYPRT

SEQ ID NO: 18981 - DNA, 27 bp, synthetic construct
  misc_feature 1..27: note = Description of Artificial Sequence: Synthetic oligonucleotide
  source 1..27: mol_type = other DNA
caacagagttacagtttcccgctcact

SEQ ID NO: 18982 - protein, 9 aa, synthetic construct
  REGION 1..9: note = Description of Artificial Sequence: Synthetic peptide
QQSYSFPLT

SEQ ID NO: 18983 - DNA, 27 bp, synthetic construct
  misc_feature 1..27: note = Description of Artificial Sequence: Synthetic oligonucleotide
  source 1..27: mol_type = other DNA
cagcagttttataactggctgtgcagt

SEQ ID NO: 18984 - protein, 9 aa, synthetic construct
  REGION 1..9: note = Description of Artificial Sequence: Synthetic peptide
QQFYNWLCS

SEQ ID NO: 18985 - DNA, 27 bp, synthetic construct
  misc_feature 1..27: note = Description of Artificial Sequence: Synthetic oligonucleotide
  source 1..27: mol_type = other DNA
caacagagttacagttccccgctcact

SEQ ID NO: 18986 - protein, 9 aa, synthetic construct
  REGION 1..9: note = Description of Artificial Sequence: Synthetic peptide
QQSYSSPLT

SEQ ID NO: 18987 - DNA, 27 bp, synthetic construct
  misc_feature 1..27: note = Description of Artificial Sequence: Synthetic oligonucleotide
  source 1..27: mol_type = other DNA
caacactatcttagttaccctctcact

SEQ ID NO: 18988 - protein, 9 aa, synthetic construct
  REGION 1..9: note = Description of Artificial Sequence: Synthetic peptide
QHYLSYPLT

SEQ ID NO: 18989 - DNA, 27 bp, synthetic construct
  misc_feature 1..27: note = Description of Artificial Sequence: Synthetic oligonucleotide
  source 1..27: mol_type = other DNA
caacagtatagtaattacccggtcact

SEQ ID NO: 18990 - protein, 9 aa, synthetic construct
  REGION 1..9: note = Description of Artificial Sequence: Synthetic peptide
QQYSNYPVT

SEQ ID NO: 18991 - DNA, 27 bp, synthetic construct
  misc_feature 1..27: note = Description of Artificial Sequence: Synthetic oligonucleotide
  source 1..27: mol_type = other DNA
ctacaacataatagttaccctctcact

SEQ ID NO: 18992 - protein, 9 aa, synthetic construct
  REGION 1..9: note = Description of Artificial Sequence: Synthetic peptide
LQHNSYPLT

SEQ ID NO: 18993 - DNA, 27 bp, synthetic construct
  misc_feature 1..27: note = Description of Artificial Sequence: Synthetic oligonucleotide
  source 1..27: mol_type = other DNA
cagcagtatggtagctcaccgtgcagt

SEQ ID NO: 18994 - protein, 9 aa, synthetic construct
  REGION 1..9: note = Description of Artificial Sequence: Synthetic peptide
QQYGSSPCS

SEQ ID NO: 18995 - DNA, 27 bp, synthetic construct
  misc_feature 1..27: note = Description of Artificial Sequence: Synthetic oligonucleotide
  source 1..27: mol_type = other DNA
caacaatatagtaattacccactcact

SEQ ID NO: 18996 - protein, 9 aa, synthetic construct
  REGION 1..9: note = Description of Artificial Sequence: Synthetic peptide
QQYSNYPLT

SEQ ID NO: 18997 - DNA, 27 bp, synthetic construct
  misc_feature 1..27: note = Description of Artificial Sequence: Synthetic oligonucleotide
  source 1..27: mol_type = other DNA
cagcagttttataactggctgtgcagt

SEQ ID NO: 18998 - protein, 9 aa, synthetic construct
  REGION 1..9: note = Description of Artificial Sequence: Synthetic peptide
QQFYNWLCS

SEQ ID NO: 18999 - DNA, 27 bp, synthetic construct
  misc_feature 1..27: note = Description of Artificial Sequence: Synthetic oligonucleotide
  source 1..27: mol_type = other DNA
caacaatatagtaattaccctctcact

SEQ ID NO: 19000 - protein, 9 aa, synthetic construct
  REGION 1..9: note = Description of Artificial Sequence: Synthetic peptide
QQYSNYPLT

SEQ ID NO: 19001 - DNA, 27 bp, synthetic construct
  misc_feature 1..27: note = Description of Artificial Sequence: Synthetic oligonucleotide
  source 1..27: mol_type = other DNA
cagcagtatgaaagttcaccgtggacg

SEQ ID NO: 19002 - protein, 9 aa, synthetic construct
  REGION 1..9: note = Description of Artificial Sequence: Synthetic peptide
QQYESSPWT

SEQ ID NO: 19003 - DNA, 24 bp, synthetic construct
  misc_feature 1..24: note = Description of Artificial Sequence: Synthetic oligonucleotide
  source 1..24: mol_type = other DNA
atgcaagctctacaaactcccact

SEQ ID NO: 19004 - protein, 8 aa, synthetic construct
  REGION 1..8: note = Description of Artificial Sequence: Synthetic peptide
MQALQTPT

SEQ ID NO: 19005 - DNA, 27 bp, synthetic construct
  misc_feature 1..27: note = Description of Artificial Sequence: Synthetic oligonucleotide
  source 1..27: mol_type = other DNA
caagagtataatgactggccgtgcagt

SEQ ID NO: 19006 - protein, 9 aa, synthetic construct
  REGION 1..9: note = Description of Artificial Sequence: Synthetic peptide
QEYNDWPCS

SEQ ID NO: 19007 - DNA, 27 bp, synthetic construct
  misc_feature 1..27: note = Description of Artificial Sequence: Synthetic oligonucleotide
  source 1..27: mol_type = other DNA
ctacagcataatagttacccgctcact

SEQ ID NO: 19008 - protein, 9 aa, synthetic construct
  REGION 1..9: note = Description of Artificial Sequence: Synthetic peptide
LQHNSYPLT

SEQ ID NO: 19009 - DNA, 27 bp, synthetic construct
  misc_feature 1..27: note = Description of Artificial Sequence: Synthetic oligonucleotide
  source 1..27: mol_type = other DNA
cagcagtatgaaaactcaccgtggacg

SEQ ID NO: 19010 - protein, 9 aa, synthetic construct
  REGION 1..9: note = Description of Artificial Sequence: Synthetic peptide
QQYENSPWT

SEQ ID NO: 19011 - DNA, 27 bp, synthetic construct
  misc_feature 1..27: note = Description of Artificial Sequence: Synthetic oligonucleotide
  source 1..27: mol_type = other DNA
caacagagttacagtttcccgctcact

SEQ ID NO: 19012 - protein, 9 aa, synthetic construct
  REGION 1..9: note = Description of Artificial Sequence: Synthetic peptide
QQSYSFPLT

SEQ ID NO: 19013 - DNA, 27 bp, synthetic construct
  misc_feature 1..27: note = Description of Artificial Sequence: Synthetic oligonucleotide
  source 1..27: mol_type = other DNA
catcagagtagaagtttaccgctcact

SEQ ID NO: 19014 - protein, 9 aa, synthetic construct
  REGION 1..9: note = Description of Artificial Sequence: Synthetic peptide
HQSRSLPLT

SEQ ID NO: 19015 - DNA, 27 bp, synthetic construct
  misc_feature 1..27: note = Description of Artificial Sequence: Synthetic oligonucleotide
  source 1..27: mol_type = other DNA
caacagagttacagtttcccgctcact

SEQ ID NO: 19016 - protein, 9 aa, synthetic construct
  REGION 1..9: note = Description of Artificial Sequence: Synthetic peptide
QQSYSFPLT

SEQ ID NO: 19017 - DNA, 27 bp, synthetic construct
  misc_feature 1..27: note = Description of Artificial Sequence: Synthetic oligonucleotide
  source 1..27: mol_type = other DNA
caacagtacagtaattaccctctcact

SEQ ID NO: 19018 - protein, 9 aa, synthetic construct
  REGION 1..9: note = Description of Artificial Sequence: Synthetic peptide
QQYSNYPLT

SEQ ID NO: 19019 - DNA, 27 bp, synthetic construct
  misc_feature 1..27: note = Description of Artificial Sequence: Synthetic oligonucleotide
  source 1..27: mol_type = other DNA
ctacagcataatagttaccctctcacc

SEQ ID NO: 19020 - protein, 9 aa, synthetic construct
  REGION 1..9: note = Description of Artificial Sequence: Synthetic peptide
LQHNSYPLT

SEQ ID NO: 19021 - DNA, 27 bp, synthetic construct
  misc_feature 1..27: note = Description of Artificial Sequence: Synthetic oligonucleotide
  source 1..27: mol_type = other DNA
ctacagcattatagttaccctcggacg

SEQ ID NO: 19022 - protein, 9 aa, synthetic construct
  REGION 1..9: note = Description of Artificial Sequence: Synthetic peptide
LQHYSYPRT

SEQ ID NO: 19023 - DNA, 24 bp, synthetic construct
  misc_feature 1..24: note = Description of Artificial Sequence: Synthetic oligonucleotide
  source 1..24: mol_type = other DNA
atgcaagctctacaaactcccact

SEQ ID NO: 19024 - protein, 8 aa, synthetic construct
  REGION 1..8: note = Description of Artificial Sequence: Synthetic peptide
MQALQTPT

SEQ ID NO: 19025 - DNA, 27 bp, synthetic construct
  misc_feature 1..27: note = Description of Artificial Sequence: Synthetic oligonucleotide
  source 1..27: mol_type = other DNA
cagcactacgaaaactcaccgtggacg

SEQ ID NO: 19026 - protein, 9 aa, synthetic construct
  REGION 1..9: note = Description of Artificial Sequence: Synthetic peptide
QHYENSPWT

SEQ ID NO: 19027 - DNA, 27 bp, synthetic construct
  misc_feature 1..27: note = Description of Artificial Sequence: Synthetic oligonucleotide
  source 1..27: mol_type = other DNA
caacagagttacagtttcccgctcact

SEQ ID NO: 19028 - protein, 9 aa, synthetic construct
  REGION 1..9: note = Description of Artificial Sequence: Synthetic peptide
QQSYSFPLT

SEQ ID NO: 19029 - DNA, 27 bp, synthetic construct
  misc_feature 1..27: note = Description of Artificial Sequence: Synthetic oligonucleotide
  source 1..27: mol_type = other DNA
cagcactatcatagctcaccgtggacg

SEQ ID NO: 19030 - protein, 9 aa, synthetic construct
  REGION 1..9: note = Description of Artificial Sequence: Synthetic peptide
QHYHSSPWT

SEQ ID NO: 19031 - DNA, 27 bp, synthetic construct
  misc_feature 1..27: note = Description of Artificial Sequence: Synthetic oligonucleotide
  source 1..27: mol_type = other DNA
caacagagttacagtttcccgctcact

SEQ ID NO: 19032 - protein, 9 aa, synthetic construct
  REGION 1..9: note = Description of Artificial Sequence: Synthetic peptide
QQSYSFPLT

SEQ ID NO: 19033 - DNA, 27 bp, synthetic construct
  misc_feature 1..27: note = Description of Artificial Sequence: Synthetic oligonucleotide
  source 1..27: mol_type = other DNA
ctacagcataatagttacccattcact

SEQ ID NO: 19034 - protein, 9 aa, synthetic construct
  REGION 1..9: note = Description of Artificial Sequence: Synthetic peptide
LQHNSYPFT

SEQ ID NO: 19035 - DNA, 27 bp, synthetic construct
  misc_feature 1..27: note = Description of Artificial Sequence: Synthetic oligonucleotide
  source 1..27: mol_type = other DNA
ctacaccattatagttaccctcggacg

SEQ ID NO: 19036 - protein, 9 aa, synthetic construct
  REGION 1..9: note = Description of Artificial Sequence: Synthetic peptide
LHHYSYPRT

SEQ ID NO: 19037 - DNA, 27 bp, synthetic construct
  misc_feature 1..27: note = Description of Artificial Sequence: Synthetic oligonucleotide
  source 1..27: mol_type = other DNA
ctacagtataatagttaccctcccacc

SEQ ID NO: 19038 - protein, 9 aa, synthetic construct
  REGION 1..9: note = Description of Artificial Sequence: Synthetic peptide
LQYNSYPPT

SEQ ID NO: 19039 - DNA, 27 bp, synthetic construct
  misc_feature 1..27: note = Description of Artificial Sequence: Synthetic oligonucleotide
  source 1..27: mol_type = other DNA
cagcagtattataactggctgtgcagt

SEQ ID NO: 19040 - protein, 9 aa, synthetic construct
  REGION 1..9: note = Description of Artificial Sequence: Synthetic peptide
QQYYNWLCS

SEQ ID NO: 19041 - DNA, 27 bp, synthetic construct
  misc_feature 1..27: note = Description of Artificial Sequence: Synthetic oligonucleotide
  source 1..27: mol_type = other DNA
caacagagttacagtttcccgctcact

SEQ ID NO: 19042 - protein, 9 aa, synthetic construct
  REGION 1..9: note = Description of Artificial Sequence: Synthetic peptide
QQSYSFPLT

SEQ ID NO: 19043 - DNA, 27 bp, synthetic construct
  misc_feature 1..27: note = Description of Artificial Sequence: Synthetic oligonucleotide
  source 1..27: mol_type = other DNA
caacaggctaaaagtttcccattcact

SEQ ID NO: 19044 - protein, 9 aa, synthetic construct
  REGION 1..9: note = Description of Artificial Sequence: Synthetic peptide
QQAKSFPFT

SEQ ID NO: 19045 - DNA, 30 bp, synthetic construct
  misc_feature 1..30: note = Description of Artificial Sequence: Synthetic oligonucleotide
  source 1..30: mol_type = other DNA
atgcaagctctacaaactcccatgtgcagt

SEQ ID NO: 19046 - protein, 10 aa, synthetic construct
  REGION 1..10: note = Description of Artificial Sequence: Synthetic peptide
MQALQTPMCS

SEQ ID NO: 19047 - DNA, 27 bp, synthetic construct
  misc_feature 1..27: note = Description of Artificial Sequence: Synthetic oligonucleotide
  source 1..27: mol_type = other DNA
caacactatatgacttacccgctcact

SEQ ID NO: 19048 - protein, 9 aa, synthetic construct
  REGION 1..9: note = Description of Artificial Sequence: Synthetic peptide
QHYMTYPLT

SEQ ID NO: 19049 - DNA, 27 bp, synthetic construct
  misc_feature 1..27: note = Description of Artificial Sequence: Synthetic oligonucleotide
  source 1..27: mol_type = other DNA
caacagtatagtaattatccgctcact

SEQ ID NO: 19050 - protein, 9 aa, synthetic construct
  REGION 1..9: note = Description of Artificial Sequence: Synthetic peptide
QQYSNYPLT

SEQ ID NO: 19051 - DNA, 27 bp, synthetic construct
  misc_feature 1..27: note = Description of Artificial Sequence: Synthetic oligonucleotide
  source 1..27: mol_type = other DNA
cagcagtatgttagctcaccgctcact

SEQ ID NO: 19052 - protein, 9 aa, synthetic construct
  REGION 1..9: note = Description of Artificial Sequence: Synthetic peptide
QQYVSSPLT

SEQ ID NO: 19053 - DNA, 27 bp, synthetic construct
  misc_feature 1..27: note = Description of Artificial Sequence: Synthetic oligonucleotide
  source 1..27: mol_type = other DNA
caaaagtatgatacttacccattcact

SEQ ID NO: 19054 - protein, 9 aa, synthetic construct
  REGION 1..9: note = Description of Artificial Sequence: Synthetic peptide
QKYDTYPFT

SEQ ID NO: 19055 - DNA, 27 bp, synthetic construct
  misc_feature 1..27: note = Description of Artificial Sequence: Synthetic oligonucleotide
  source 1..27: mol_type = other DNA
ctacggtatgatacttaccctctcatt

SEQ ID NO: 19056 - protein, 9 aa, synthetic construct
  REGION 1..9: note = Description of Artificial Sequence: Synthetic peptide
LRYDTYPLI

SEQ ID NO: 19057 - DNA, 30 bp, synthetic construct
  misc_feature 1..30: note = Description of Artificial Sequence: Synthetic oligonucleotide
  source 1..30: mol_type = other DNA
atgcaagctctactaactcccgtgtgcagt

SEQ ID NO: 19058 - protein, 10 aa, synthetic construct
  REGION 1..10: note = Description of Artificial Sequence: Synthetic peptide
MQALLTPVCS

SEQ ID NO: 19059 - DNA, 27 bp, synthetic construct
  misc_feature 1..27: note = Description of Artificial Sequence: Synthetic oligonucleotide
  source 1..27: mol_type = other DNA
caacagtatgttacctaccctctcact

SEQ ID NO: 19060 - protein, 9 aa, synthetic construct
  REGION 1..9: note = Description of Artificial Sequence: Synthetic peptide
QQYVTYPLT

SEQ ID NO: 19061 - DNA, 27 bp, synthetic construct
  misc_feature 1..27: note = Description of Artificial Sequence: Synthetic oligonucleotide
  source 1..27: mol_type = other DNA
cagcagtatagtaattaccctctcact

SEQ ID NO: 19062 - protein, 9 aa, synthetic construct
  REGION 1..9: note = Description of Artificial Sequence: Synthetic peptide
QQYSNYPLT

SEQ ID NO: 19063 - DNA, 27 bp, synthetic construct
  misc_feature 1..27: note = Description of Artificial Sequence: Synthetic oligonucleotide
  source 1..27: mol_type = other DNA
ctacggtatgatacttaccctctcact

SEQ ID NO: 19064 - protein, 9 aa, synthetic construct
  REGION 1..9: note = Description of Artificial Sequence: Synthetic peptide
LRYDTYPLT

SEQ ID NO: 19065 - DNA, 27 bp, synthetic construct
  misc_feature 1..27: note = Description of Artificial Sequence: Synthetic oligonucleotide
  source 1..27: mol_type = other DNA
cagcagtataatgactggccgtgcagt

SEQ ID NO: 19066 - protein, 9 aa, synthetic construct
  REGION 1..9: note = Description of Artificial Sequence: Synthetic peptide
QQYNDWPCS

SEQ ID NO: 19067 - DNA, 27 bp, synthetic construct
  misc_feature 1..27: note = Description of Artificial Sequence: Synthetic oligonucleotide
  source 1..27: mol_type = other DNA
caacactatagtaattacccgctcact

SEQ ID NO: 19068 - protein, 9 aa, synthetic construct
  REGION 1..9: note = Description of Artificial Sequence: Synthetic peptide
QHYSNYPLT

SEQ ID NO: 19069 - DNA, 27 bp, synthetic construct
  misc_feature 1..27: note = Description of Artificial Sequence: Synthetic oligonucleotide
  source 1..27: mol_type = other DNA
ctactgcattatagttaccctcggacg

SEQ ID NO: 19070 - protein, 9 aa, synthetic construct
  REGION 1..9: note = Description of Artificial Sequence: Synthetic peptide
LLHYSYPRT

SEQ ID NO: 19071 - DNA, 27 bp, synthetic construct
  misc_feature 1..27: note = Description of Artificial Sequence: Synthetic oligonucleotide
  source 1..27: mol_type = other DNA
caacactatagtaattatccgctcact

SEQ ID NO: 19072 - protein, 9 aa, synthetic construct
  REGION 1..9: note = Description of Artificial Sequence: Synthetic peptide
QHYSNYPLT

SEQ ID NO: 19073 - DNA, 27 bp, synthetic construct
  misc_feature 1..27: note = Description of Artificial Sequence: Synthetic oligonucleotide
  source 1..27: mol_type = other DNA
caccagtatagtaattaccctctcact

SEQ ID NO: 19074 - protein, 9 aa, synthetic construct
  REGION 1..9: note = Description of Artificial Sequence: Synthetic peptide
HQYSNYPLT

SEQ ID NO: 19075 - DNA, 27 bp, synthetic construct
  misc_feature 1..27: note = Description of Artificial Sequence: Synthetic oligonucleotide
  source 1..27: mol_type = other DNA
caaaagtatgatacttacccattcact

SEQ ID NO: 19076 - protein, 9 aa, synthetic construct
  REGION 1..9: note = Description of Artificial Sequence: Synthetic peptide
QKYDTYPFT

SEQ ID NO: 19077 - DNA, 27 bp, synthetic construct
  misc_feature 1..27: note = Description of Artificial Sequence: Synthetic oligonucleotide
  source 1..27: mol_type = other DNA
caacagtatagtaattaccctctcact

SEQ ID NO: 19078 - protein, 9 aa, synthetic construct
  REGION 1..9: note = Description of Artificial Sequence: Synthetic peptide
QQYSNYPLT

SEQ ID NO: 19079 - DNA, 27 bp, synthetic construct
  misc_feature 1..27: note = Description of Artificial Sequence: Synthetic oligonucleotide
  source 1..27: mol_type = other DNA
caacactatagtaattatccgctcact

SEQ ID NO: 19080 - protein, 9 aa, synthetic construct
  REGION 1..9: note = Description of Artificial Sequence: Synthetic peptide
QHYSNYPLT

SEQ ID NO: 19081 - DNA, 27 bp, synthetic construct
  misc_feature 1..27: note = Description of Artificial Sequence: Synthetic oligonucleotide
  source 1..27: mol_type = other DNA
caacagtatagtaattaccctctcact

SEQ ID NO: 19082 - protein, 9 aa, synthetic construct
  REGION 1..9: note = Description of Artificial Sequence: Synthetic peptide
QQYSNYPLT

SEQ ID NO: 19083 - DNA, 27 bp, synthetic construct
  misc_feature 1..27: note = Description of Artificial Sequence: Synthetic oligonucleotide
  source 1..27: mol_type = other DNA
cagcaatattataacattcctccgacg

SEQ ID NO: 19084 - protein, 9 aa, synthetic construct
  REGION 1..9: note = Description of Artificial Sequence: Synthetic peptide
QQYYNIPPT

SEQ ID NO: 19085 - DNA, 27 bp, synthetic construct
  misc_feature 1..27: note = Description of Artificial Sequence: Synthetic oligonucleotide
  source 1..27: mol_type = other DNA
caccaatattatagtattccgtggacc

SEQ ID NO: 19086 - protein, 9 aa, synthetic construct
  REGION 1..9: note = Description of Artificial Sequence: Synthetic peptide
HQYYSIPWT

SEQ ID NO: 19087 - DNA, 27 bp, synthetic construct
  misc_feature 1..27: note = Description of Artificial Sequence: Synthetic oligonucleotide
  source 1..27: mol_type = other DNA
caacaatatatgacttacccaatcact

SEQ ID NO: 19088 - protein, 9 aa, synthetic construct
  REGION 1..9: note = Description of Artificial Sequence: Synthetic peptide
QQYMTYPIT

SEQ ID NO: 19089 - DNA, 27 bp, synthetic construct
  misc_feature 1..27: note = Description of Artificial Sequence: Synthetic oligonucleotide
  source 1..27: mol_type = other DNA
caacagtatcttacttacccattcact

SEQ ID NO: 19090 - protein, 9 aa, synthetic construct
  REGION 1..9: note = Description of Artificial Sequence: Synthetic peptide
QQYLTYPFT

SEQ ID NO: 19091 - DNA, 27 bp, synthetic construct
  misc_feature 1..27: note = Description of Artificial Sequence: Synthetic oligonucleotide
  source 1..27: mol_type = other DNA
catcagagtcgtagtttaccattcact

SEQ ID NO: 19092 - protein, 9 aa, synthetic construct
  REGION 1..9: note = Description of Artificial Sequence: Synthetic peptide
HQSRSLPFT

SEQ ID NO: 19093 - DNA, 27 bp, synthetic construct
  misc_feature 1..27: note = Description of Artificial Sequence: Synthetic oligonucleotide
  source 1..27: mol_type = other DNA
caacagtatagtaattaccctctcact

SEQ ID NO: 19094 - protein, 9 aa, synthetic construct
  REGION 1..9: note = Description of Artificial Sequence: Synthetic peptide
QQYSNYPLT

SEQ ID NO: 19095 - DNA, 27 bp, synthetic construct
  misc_feature 1..27: note = Description of Artificial Sequence: Synthetic oligonucleotide
  source 1..27: mol_type = other DNA
ctacagcattatagttaccctcggacg

SEQ ID NO: 19096 - protein, 9 aa, synthetic construct
  REGION 1..9: note = Description of Artificial Sequence: Synthetic peptide
LQHYSYPRT

SEQ ID NO: 19097 - DNA, 27 bp, synthetic construct
  misc_feature 1..27: note = Description of Artificial Sequence: Synthetic oligonucleotide
  source 1..27: mol_type = other DNA
ctactgcataatagttaccctcggacg

SEQ ID NO: 19098 - protein, 9 aa, synthetic construct
  REGION 1..9: note = Description of Artificial Sequence: Synthetic peptide
LLHNSYPRT

SEQ ID NO: 19099 - DNA, 27 bp, synthetic construct
  misc_feature 1..27: note = Description of Artificial Sequence: Synthetic oligonucleotide
  source 1..27: mol_type = other DNA
gtaatgcattatagttaccctcggacg

SEQ ID NO: 19100 - protein, 9 aa, synthetic construct
  REGION 1..9: note = Description of Artificial Sequence: Synthetic peptide
VMHYSYPRT

SEQ ID NO: 19101 - DNA, 27 bp, synthetic construct
  misc_feature 1..27: note = Description of Artificial Sequence: Synthetic oligonucleotide
  source 1..27: mol_type = other DNA
gtaatgcataatagttaccctcggacg

SEQ ID NO: 19102 - protein, 9 aa, synthetic construct
  REGION 1..9: note = Description of Artificial Sequence: Synthetic peptide
VMHNSYPRT

SEQ ID NO: 19103 - DNA, 27 bp, synthetic construct
  misc_feature 1..27: note = Description of Artificial Sequence: Synthetic oligonucleotide
  source 1..27: mol_type = other DNA
cagcagtatattaattaccctctcact

SEQ ID NO: 19104 - protein, 9 aa, synthetic construct
  REGION 1..9: note = Description of Artificial Sequence: Synthetic peptide
QQYINYPLT

SEQ ID NO: 19105 - DNA, 27 bp, synthetic construct
  misc_feature 1..27: note = Description of Artificial Sequence: Synthetic oligonucleotide
  source 1..27: mol_type = other DNA
caacagtatgttacttaccctctcact

SEQ ID NO: 19106 - protein, 9 aa, synthetic construct
  REGION 1..9: note = Description of Artificial Sequence: Synthetic peptide
QQYVTYPLT

SEQ ID NO: 19107 - DNA, 27 bp, synthetic construct
  misc_feature 1..27: note = Description of Artificial Sequence: Synthetic oligonucleotide
  source 1..27: mol_type = other DNA
catcagagtcgcagtttaccattcact

SEQ ID NO: 19108 - protein, 9 aa, synthetic construct
  REGION 1..9: note = Description of Artificial Sequence: Synthetic peptide
HQSRSLPFT

SEQ ID NO: 19109 - DNA, 27 bp, synthetic construct
  misc_feature 1..27: note = Description of Artificial Sequence: Synthetic oligonucleotide
  source 1..27: mol_type = other DNA
cagcagtatgttagttcattgctcact

SEQ ID NO: 19110 - protein, 9 aa, synthetic construct
  REGION 1..9: note = Description of Artificial Sequence: Synthetic peptide
QQYVSSLLT

SEQ ID NO: 19111 - DNA, 27 bp, synthetic construct
  misc_feature 1..27: note = Description of Artificial Sequence: Synthetic oligonucleotide
  source 1..27: mol_type = other DNA
gtaatgcattatagttaccctcggacg

SEQ ID NO: 19112 - protein, 9 aa, synthetic construct
  REGION 1..9: note = Description of Artificial Sequence: Synthetic peptide
VMHYSYPRT

SEQ ID NO: 19113 - DNA, 27 bp, synthetic construct
  misc_feature 1..27: note = Description of Artificial Sequence: Synthetic oligonucleotide
  source 1..27: mol_type = other DNA
caacagtatgttacttacccgctcact

SEQ ID NO: 19114 - protein, 9 aa, synthetic construct
  REGION 1..9: note = Description of Artificial Sequence: Synthetic peptide
QQYVTYPLT

SEQ ID NO: 19115 - DNA, 27 bp, synthetic construct
  misc_feature 1..27: note = Description of Artificial Sequence: Synthetic oligonucleotide
  source 1..27: mol_type = other DNA
cagcagtatgttagctcaccgctcact

SEQ ID NO: 19116 - protein, 9 aa, synthetic construct
  REGION 1..9: note = Description of Artificial Sequence: Synthetic peptide
QQYVSSPLT

SEQ ID NO: 19117 - DNA, 27 bp, synthetic construct
  misc_feature 1..27: note = Description of Artificial Sequence: Synthetic oligonucleotide
  source 1..27: mol_type = other DNA
cagcagtataatgactggccgtgcagt

SEQ ID NO: 19118 - protein, 9 aa, synthetic construct
  REGION 1..9: note = Description of Artificial Sequence: Synthetic peptide
QQYNDWPCS

SEQ ID NO: 19119 - DNA, 27 bp, synthetic construct
  misc_feature 1..27: note = Description of Artificial Sequence: Synthetic oligonucleotide
  source 1..27: mol_type = other DNA
caacagtatgataggtcaccattcact

SEQ ID NO: 19120 - protein, 9 aa, synthetic construct
  REGION 1..9: note = Description of Artificial Sequence: Synthetic peptide
QQYDRSPFT

SEQ ID NO: 19121 - DNA, 27 bp, synthetic construct
  misc_feature 1..27: note = Description of Artificial Sequence: Synthetic oligonucleotide
  source 1..27: mol_type = other DNA
ctaatgcattatagttaccctcggacg

SEQ ID NO: 19122 - protein, 9 aa, synthetic construct
  REGION 1..9: note = Description of Artificial Sequence: Synthetic peptide
LMHYSYPRT

SEQ ID NO: 19123 - DNA, 27 bp, synthetic construct
  misc_feature 1..27: note = Description of Artificial Sequence: Synthetic oligonucleotide
  source 1..27: mol_type = other DNA
gtaatgcataatagttaccctcggacg

SEQ ID NO: 19124 - protein, 9 aa, synthetic construct
  REGION 1..9: note = Description of Artificial Sequence: Synthetic peptide
VMHNSYPRT

SEQ ID NO: 19125 - DNA, 27 bp, synthetic construct
  misc_feature 1..27: note = Description of Artificial Sequence: Synthetic oligonucleotide
  source 1..27: mol_type = other DNA
catcagagtagaagtttaccgtggacg

SEQ ID NO: 19126 - protein, 9 aa, synthetic construct
  REGION 1..9: note = Description of Artificial Sequence: Synthetic peptide
HQSRSLPWT

SEQ ID NO: 19127 - DNA, 27 bp, synthetic construct
  misc_feature 1..27: note = Description of Artificial Sequence: Synthetic oligonucleotide
  source 1..27: mol_type = other DNA
gtaatgcataatagttaccctcggacg

SEQ ID NO: 19128 - protein, 9 aa, synthetic construct
  REGION 1..9: note = Description of Artificial Sequence: Synthetic peptide
VMHNSYPRT

SEQ ID NO: 19129 - DNA, 27 bp, synthetic construct
  misc_feature 1..27: note = Description of Artificial Sequence: Synthetic oligonucleotide
  source 1..27: mol_type = other DNA
caacagtatgttaattaccctctcact

SEQ ID NO: 19130 - protein, 9 aa, synthetic construct
  REGION 1..9: note = Description of Artificial Sequence: Synthetic peptide
QQYVNYPLT

SEQ ID NO: 19131 - DNA, 27 bp, synthetic construct
  misc_feature 1..27: note = Description of Artificial Sequence: Synthetic oligonucleotide
  source 1..27: mol_type = other DNA
caacacaccagtaaatctccagtgcag

SEQ ID NO: 19132 - protein, 9 aa, synthetic construct
  REGION 1..9: note = Description of Artificial Sequence: Synthetic peptide
QHTSKSPVQ

SEQ ID NO: 19133 - DNA, 27 bp, synthetic construct
  misc_feature 1..27: note = Description of Artificial Sequence: Synthetic oligonucleotide
  source 1..27: mol_type = other DNA
gtaatgcataatagttaccctcggacg

SEQ ID NO: 19134 - protein, 9 aa, synthetic construct
  REGION 1..9: note = Description of Artificial Sequence: Synthetic peptide
VMHNSYPRT

SEQ ID NO: 19135 - DNA, 27 bp, synthetic construct
  misc_feature 1..27: note = Description of Artificial Sequence: Synthetic oligonucleotide
  source 1..27: mol_type = other DNA
ctaatgcattatagttaccctcggacg

SEQ ID NO: 19136 - protein, 9 aa, synthetic construct
  REGION 1..9: note = Description of Artificial Sequence: Synthetic peptide
LMHYSYPRT

SEQ ID NO: 19137 - DNA, 27 bp, synthetic construct
  misc_feature 1..27: note = Description of Artificial Sequence: Synthetic oligonucleotide
  source 1..27: mol_type = other DNA
gtaatgcattatagttaccctcggacg

SEQ ID NO: 19138 - protein, 9 aa, synthetic construct
  REGION 1..9: note = Description of Artificial Sequence: Synthetic peptide
VMHYSYPRT

SEQ ID NO: 19139 - DNA, 27 bp, synthetic construct
  misc_feature 1..27: note = Description of Artificial Sequence: Synthetic oligonucleotide
  source 1..27: mol_type = other DNA
caacactatagtaattacccgctcact

SEQ ID NO: 19140 - protein, 9 aa, synthetic construct
  REGION 1..9: note = Description of Artificial Sequence: Synthetic peptide
QHYSNYPLT

SEQ ID NO: 19141 - DNA, 27 bp, synthetic construct
  misc_feature 1..27: note = Description of Artificial Sequence: Synthetic oligonucleotide
  source 1..27: mol_type = other DNA
cagcagtatggtagctcaccgtggacg

SEQ ID NO: 19142 - protein, 9 aa, synthetic construct
  REGION 1..9: note = Description of Artificial Sequence: Synthetic peptide
QQYGSSPWT

SEQ ID NO: 19143 - DNA, 27 bp, synthetic construct
  misc_feature 1..27: note = Description of Artificial Sequence: Synthetic oligonucleotide
  source 1..27: mol_type = other DNA
gtaatgcataatagttaccctcggacg

SEQ ID NO: 19144 - protein, 9 aa, synthetic construct
  REGION 1..9: note = Description of Artificial Sequence: Synthetic peptide
VMHNSYPRT

SEQ ID NO: 19145 - DNA, 27 bp, synthetic construct
  misc_feature 1..27: note = Description of Artificial Sequence: Synthetic oligonucleotide
  source 1..27: mol_type = other DNA
caacaggctaacagtttcccattcact

SEQ ID NO: 19146 - protein, 9 aa, synthetic construct
  REGION 1..9: note = Description of Artificial Sequence: Synthetic peptide
QQANSFPFT

SEQ ID NO: 19147 - DNA, 27 bp, synthetic construct
  misc_feature 1..27: note = Description of Artificial Sequence: Synthetic oligonucleotide
  source 1..27: mol_type = other DNA
caacagtatatgacttacccgctcact

SEQ ID NO: 19148 - protein, 9 aa, synthetic construct
  REGION 1..9: note = Description of Artificial Sequence: Synthetic peptide
QQYMTYPLT

SEQ ID NO: 19149 - DNA, 27 bp, synthetic construct
  misc_feature 1..27: note = Description of Artificial Sequence: Synthetic oligonucleotide
  source 1..27: mol_type = other DNA
caacaggctaacagtttcccattcact

SEQ ID NO: 19150 - protein, 9 aa, synthetic construct
  REGION 1..9: note = Description of Artificial Sequence: Synthetic peptide
QQANSFPFT

SEQ ID NO: 19151 - DNA, 27 bp, synthetic construct
  misc_feature 1..27: note = Description of Artificial Sequence: Synthetic oligonucleotide
  source 1..27: mol_type = other DNA
caacaggctaacagtttcccattcact

SEQ ID NO: 19152 - protein, 9 aa, synthetic construct
  REGION 1..9: note = Description of Artificial Sequence: Synthetic peptide
QQANSFPFT

SEQ ID NO: 19153 - DNA, 27 bp, synthetic construct
  misc_feature 1..27: note = Description of Artificial Sequence: Synthetic oligonucleotide
  source 1..27: mol_type = other DNA
cagcaatattcttctattccgtggacg

SEQ ID NO: 19154 - protein, 9 aa, synthetic construct
  REGION 1..9: note = Description of Artificial Sequence: Synthetic peptide
QQYSSIPWT

SEQ ID NO: 19155 - DNA, 27 bp, synthetic construct
  misc_feature 1..27: note = Description of Artificial Sequence: Synthetic oligonucleotide
  source 1..27: mol_type = other DNA
ctatattatcttaattatccgctcact

SEQ ID NO: 19156 - protein, 9 aa, synthetic construct
  REGION 1..9: note = Description of Artificial Sequence: Synthetic peptide
LYYLNYPLT

SEQ ID NO: 19157 - DNA, 27 bp, synthetic construct
  misc_feature 1..27: note = Description of Artificial Sequence: Synthetic oligonucleotide
  source 1..27: mol_type = other DNA
cagcagtattactttaccccattcact

SEQ ID NO: 19158 - protein, 9 aa, synthetic construct
  REGION 1..9: note = Description of Artificial Sequence: Synthetic peptide
QQYYFTPFT

SEQ ID NO: 19159 - DNA, 27 bp, synthetic construct
  misc_feature 1..27: note = Description of Artificial Sequence: Synthetic oligonucleotide
  source 1..27: mol_type = other DNA
cagcagtatgaagactcaccgtggacg

SEQ ID NO: 19160 - protein, 9 aa, synthetic construct
  REGION 1..9: note = Description of Artificial Sequence: Synthetic peptide
QQYEDSPWT

SEQ ID NO: 19161 - DNA, 27 bp, synthetic construct
  misc_feature 1..27: note = Description of Artificial Sequence: Synthetic oligonucleotide
  source 1..27: mol_type = other DNA
caacaggctaacagtttcccattcact

SEQ ID NO: 19162 - protein, 9 aa, synthetic construct
  REGION 1..9: note = Description of Artificial Sequence: Synthetic peptide
QQANSFPFT

SEQ ID NO: 19163 - DNA, 27 bp, synthetic construct
  misc_feature 1..27: note = Description of Artificial Sequence: Synthetic oligonucleotide
  source 1..27: mol_type = other DNA
cagcagtattactttaccccattcact

SEQ ID NO: 19164 - protein, 9 aa, synthetic construct
  REGION 1..9: note = Description of Artificial Sequence: Synthetic peptide
QQYYFTPFT

SEQ ID NO: 19165 - DNA, 27 bp, synthetic construct
  misc_feature 1..27: note = Description of Artificial Sequence: Synthetic oligonucleotide
  source 1..27: mol_type = other DNA
ctacattatcttaattacccgctcact

SEQ ID NO: 19166 - protein, 9 aa, synthetic construct
  REGION 1..9: note = Description of Artificial Sequence: Synthetic peptide
LHYLNYPLT

SEQ ID NO: 19167 - DNA, 27 bp, synthetic construct
  misc_feature 1..27: note = Description of Artificial Sequence: Synthetic oligonucleotide
  source 1..27: mol_type = other DNA
caacaggataacagtttcccattcact

SEQ ID NO: 19168 - protein, 9 aa, synthetic construct
  REGION 1..9: note = Description of Artificial Sequence: Synthetic peptide
QQDNSFPFT

SEQ ID NO: 19169 - DNA, 27 bp, synthetic construct
  misc_feature 1..27: note = Description of Artificial Sequence: Synthetic oligonucleotide
  source 1..27: mol_type = other DNA
ctgcaatattttagtactccgtggacg

SEQ ID NO: 19170 - protein, 9 aa, synthetic construct
  REGION 1..9: note = Description of Artificial Sequence: Synthetic peptide
LQYFSTPWT

SEQ ID NO: 19171 - DNA, 27 bp, synthetic construct
  misc_feature 1..27: note = Description of Artificial Sequence: Synthetic oligonucleotide
  source 1..27: mol_type = other DNA
ctacattatcttaattacccactcact

SEQ ID NO: 19172 - protein, 9 aa, synthetic construct
  REGION 1..9: note = Description of Artificial Sequence: Synthetic peptide
LHYLNYPLT

SEQ ID NO: 19173 - DNA, 27 bp, synthetic construct
  misc_feature 1..27: note = Description of Artificial Sequence: Synthetic oligonucleotide
  source 1..27: mol_type = other DNA
ctacagcataatagttacccgctcact

SEQ ID NO: 19174 - protein, 9 aa, synthetic construct
  REGION 1..9: note = Description of Artificial Sequence: Synthetic peptide
LQHNSYPLT

SEQ ID NO: 19175 - DNA, 27 bp, synthetic construct
  misc_feature 1..27: note = Description of Artificial Sequence: Synthetic oligonucleotide
  source 1..27: mol_type = other DNA
ctacagcataatagttatcctcctact

SEQ ID NO: 19176 - protein, 9 aa, synthetic construct
  REGION 1..9: note = Description of Artificial Sequence: Synthetic peptide
LQHNSYPPT

SEQ ID NO: 19177 - DNA, 27 bp, synthetic construct
  misc_feature 1..27: note = Description of Artificial Sequence: Synthetic oligonucleotide
  source 1..27: mol_type = other DNA
ctacagcattatagttaccctcggacg

SEQ ID NO: 19178 - protein, 9 aa, synthetic construct
  REGION 1..9: note = Description of Artificial Sequence: Synthetic peptide
LQHYSYPRT

SEQ ID NO: 19179 - DNA, 27 bp, synthetic construct
  misc_feature 1..27: note = Description of Artificial Sequence: Synthetic oligonucleotide
  source 1..27: mol_type = other DNA
atgcaaagtacacagcttcctcggacg

SEQ ID NO: 19180 - protein, 9 aa, synthetic construct
  REGION 1..9: note = Description of Artificial Sequence: Synthetic peptide
MQSTQLPRT

SEQ ID NO: 19181 - DNA, 27 bp, synthetic construct
  misc_feature 1..27: note = Description of Artificial Sequence: Synthetic oligonucleotide
  source 1..27: mol_type = other DNA
ctacagcataatagttacccgctcact

SEQ ID NO: 19182 - protein, 9 aa, synthetic construct
  REGION 1..9: note = Description of Artificial Sequence: Synthetic peptide
LQHNSYPLT

SEQ ID NO: 19183 - DNA, 27 bp, synthetic construct
  misc_feature 1..27: note = Description of Artificial Sequence: Synthetic oligonucleotide
  source 1..27: mol_type = other DNA
cttcagcattataattaccctcgggcg

SEQ ID NO: 19184 - protein, 9 aa, synthetic construct
  REGION 1..9: note = Description of Artificial Sequence: Synthetic peptide
LQHYNYPRA

SEQ ID NO: 19185 - DNA, 27 bp, synthetic construct
  misc_feature 1..27: note = Description of Artificial Sequence: Synthetic oligonucleotide
  source 1..27: mol_type = other DNA
cagcaatattatagtactcctccgacg

SEQ ID NO: 19186 - protein, 9 aa, synthetic construct
  REGION 1..9: note = Description of Artificial Sequence: Synthetic peptide
QQYYSTPPT

SEQ ID NO: 19187 - DNA, 27 bp, synthetic construct
  misc_feature 1..27: note = Description of Artificial Sequence: Synthetic oligonucleotide
  source 1..27: mol_type = other DNA
caacaggctaacagtttcccgtggacg

SEQ ID NO: 19188 - protein, 9 aa, synthetic construct
  REGION 1..9: note = Description of Artificial Sequence: Synthetic peptide
QQANSFPWT

SEQ ID NO: 19189 - DNA, 27 bp, synthetic construct
  misc_feature 1..27: note = Description of Artificial Sequence: Synthetic oligonucleotide
  source 1..27: mol_type = other DNA
atgcaaagtacacagcttcctcggacg

SEQ ID NO: 19190 - protein, 9 aa, synthetic construct
  REGION 1..9: note = Description of Artificial Sequence: Synthetic peptide
MQSTQLPRT

SEQ ID NO: 19191 - DNA, 27 bp, synthetic construct
  misc_feature 1..27: note = Description of Artificial Sequence: Synthetic oligonucleotide
  source 1..27: mol_type = other DNA
cagcaatattttagtactcctccgacg

SEQ ID NO: 19192 - protein, 9 aa, synthetic construct
  REGION 1..9: note = Description of Artificial Sequence: Synthetic peptide
QQYFSTPPT

SEQ ID NO: 19193 - DNA, 27 bp, synthetic construct
  misc_feature 1..27: note = Description of Artificial Sequence: Synthetic oligonucleotide
  source 1..27: mol_type = other DNA
caacaatattatattaatccgtgcagt

SEQ ID NO: 19194 - protein, 9 aa, synthetic construct
  REGION 1..9: note = Description of Artificial Sequence: Synthetic peptide
QQYYINPCS

SEQ ID NO: 19195 - DNA, 27 bp, synthetic construct
  misc_feature 1..27: note = Description of Artificial Sequence: Synthetic oligonucleotide
  source 1..27: mol_type = other DNA
ctacaacataatagttacccgctcact

SEQ ID NO: 19196 - protein, 9 aa, synthetic construct
  REGION 1..9: note = Description of Artificial Sequence: Synthetic peptide
LQHNSYPLT

SEQ ID NO: 19197 - DNA, 27 bp, synthetic construct
  misc_feature 1..27: note = Description of Artificial Sequence: Synthetic oligonucleotide
  source 1..27: mol_type = other DNA
atgcaaagtacacagcttcctcggacg

SEQ ID NO: 19198 - protein, 9 aa, synthetic construct
  REGION 1..9: note = Description of Artificial Sequence: Synthetic peptide
MQSTQLPRT

SEQ ID NO: 19199 - DNA, 27 bp, synthetic construct
  misc_feature 1..27: note = Description of Artificial Sequence: Synthetic oligonucleotide
  source 1..27: mol_type = other DNA
cagcaatattatactactccgtgcagt

SEQ ID NO: 19200 - protein, 9 aa, synthetic construct
  REGION 1..9: note = Description of Artificial Sequence: Synthetic peptide
QQYYTTPCS

SEQ ID NO: 19201 - DNA, 27 bp, synthetic construct
  misc_feature 1..27: note = Description of Artificial Sequence: Synthetic oligonucleotide
  source 1..27: mol_type = other DNA
atgcaaagtacacagcttcctcggacg

SEQ ID NO: 19202 - protein, 9 aa, synthetic construct
  REGION 1..9: note = Description of Artificial Sequence: Synthetic peptide
MQSTQLPRT

SEQ ID NO: 19203 - DNA, 27 bp, synthetic construct
  misc_feature 1..27: note = Description of Artificial Sequence: Synthetic oligonucleotide
  source 1..27: mol_type = other DNA
ctgcagcattatagttaccctcggacg

SEQ ID NO: 19204 - protein, 9 aa, synthetic construct
  REGION 1..9: note = Description of Artificial Sequence: Synthetic peptide
LQHYSYPRT

SEQ ID NO: 19205 - DNA, 30 bp, synthetic construct
  misc_feature 1..30: note = Description of Artificial Sequence: Synthetic oligonucleotide
  source 1..30: mol_type = other DNA
caggagtatggtagctcactcatgtgcagt

SEQ ID NO: 19206 - protein, 10 aa, synthetic construct
  REGION 1..10: note = Description of Artificial Sequence: Synthetic peptide
QEYGSSLMCS

SEQ ID NO: 19207 - DNA, 27 bp, synthetic construct
  misc_feature 1..27: note = Description of Artificial Sequence: Synthetic oligonucleotide
  source 1..27: mol_type = other DNA
caccaatatcataattctcctcccact

SEQ ID NO: 19208 - protein, 9 aa, synthetic construct
  REGION 1..9: note = Description of Artificial Sequence: Synthetic peptide
HQYHNSPPT

SEQ ID NO: 19209 - DNA, 27 bp, synthetic construct
  misc_feature 1..27: note = Description of Artificial Sequence: Synthetic oligonucleotide
  source 1..27: mol_type = other DNA
atgcaaagtacacagcttcctcggacg

SEQ ID NO: 19210 - protein, 9 aa, synthetic construct
  REGION 1..9: note = Description of Artificial Sequence: Synthetic peptide
MQSTQLPRT

SEQ ID NO: 19211 - DNA, 27 bp, synthetic construct
  misc_feature 1..27: note = Description of Artificial Sequence: Synthetic oligonucleotide
  source 1..27: mol_type = other DNA
cagcaatattatagttctcctccgacg

SEQ ID NO: 19212 - protein, 9 aa, synthetic construct
  REGION 1..9: note = Description of Artificial Sequence: Synthetic peptide
QQYYSSPPT

SEQ ID NO: 19213 - DNA, 27 bp, synthetic construct
  misc_feature 1..27: note = Description of Artificial Sequence: Synthetic oligonucleotide
  source 1..27: mol_type = other DNA
ctacagcataatagttatccattcact

SEQ ID NO: 19214 - protein, 9 aa, synthetic construct
  REGION 1..9: note = Description of Artificial Sequence: Synthetic peptide
LQHNSYPFT

SEQ ID NO: 19215 - DNA, 27 bp, synthetic construct
  misc_feature 1..27: note = Description of Artificial Sequence: Synthetic oligonucleotide
  source 1..27: mol_type = other DNA
cttcagcataatacttacccattcact

SEQ ID NO: 19216 - protein, 9 aa, synthetic construct
  REGION 1..9: note = Description of Artificial Sequence: Synthetic peptide
LQHNTYPFT

SEQ ID NO: 19217 - DNA, 27 bp, synthetic construct
  misc_feature 1..27: note = Description of Artificial Sequence: Synthetic oligonucleotide
  source 1..27: mol_type = other DNA
cagcagtatggtacctcacctcggacg

SEQ ID NO: 19218 - protein, 9 aa, synthetic construct
  REGION 1..9: note = Description of Artificial Sequence: Synthetic peptide
QQYGTSPRT

SEQ ID NO: 19219 - DNA, 27 bp, synthetic construct
  misc_feature 1..27: note = Description of Artificial Sequence: Synthetic oligonucleotide
  source 1..27: mol_type = other DNA
ctacaacataatagttacccattcact

SEQ ID NO: 19220 - protein, 9 aa, synthetic construct
  REGION 1..9: note = Description of Artificial Sequence: Synthetic peptide
LQHNSYPFT

SEQ ID NO: 19221 - DNA, 27 bp, synthetic construct
  misc_feature 1..27: note = Description of Artificial Sequence: Synthetic oligonucleotide
  source 1..27: mol_type = other DNA
caacactccaagagtattcctggtaag

SEQ ID NO: 19222 - protein, 9 aa, synthetic construct
  REGION 1..9: note = Description of Artificial Sequence: Synthetic peptide
QHSKSIPGK

SEQ ID NO: 19223 - DNA, 27 bp, synthetic construct
  misc_feature 1..27: note = Description of Artificial Sequence: Synthetic oligonucleotide
  source 1..27: mol_type = other DNA
cagcaatattatactactcctccgacg

SEQ ID NO: 19224 - protein, 9 aa, synthetic construct
  REGION 1..9: note = Description of Artificial Sequence: Synthetic peptide
QQYYTTPPT

SEQ ID NO: 19225 - DNA, 27 bp, synthetic construct
  misc_feature 1..27: note = Description of Artificial Sequence: Synthetic oligonucleotide
  source 1..27: mol_type = other DNA
cagcaatattatattactccgtgcagt

SEQ ID NO: 19226 - protein, 9 aa, synthetic construct
  REGION 1..9: note = Description of Artificial Sequence: Synthetic peptide
QQYYITPCS

SEQ ID NO: 19227 - DNA, 27 bp, synthetic construct
  misc_feature 1..27: note = Description of Artificial Sequence: Synthetic oligonucleotide
  source 1..27: mol_type = other DNA
cagcaatattatattactccgtgcagt

SEQ ID NO: 19228 - protein, 9 aa, synthetic construct
  REGION 1..9: note = Description of Artificial Sequence: Synthetic peptide
QQYYITPCS

SEQ ID NO: 19229 - DNA, 27 bp, synthetic construct
  misc_feature 1..27: note = Description of Artificial Sequence: Synthetic oligonucleotide
  source 1..27: mol_type = other DNA
atgcaaagtatacagattccgtggacg

SEQ ID NO: 19230 - protein, 9 aa, synthetic construct
  REGION 1..9: note = Description of Artificial Sequence: Synthetic peptide
MQSIQIPWT

SEQ ID NO: 19231 - DNA, 27 bp, synthetic construct
  misc_feature 1..27: note = Description of Artificial Sequence: Synthetic oligonucleotide
  source 1..27: mol_type = other DNA
atgcaaagtatacagattccgtggacg

SEQ ID NO: 19232 - protein, 9 aa, synthetic construct
  REGION 1..9: note = Description of Artificial Sequence: Synthetic peptide
MQSIQIPWT

SEQ ID NO: 19233 - DNA, 27 bp, synthetic construct
  misc_feature 1..27: note = Description of Artificial Sequence: Synthetic oligonucleotide
  source 1..27: mol_type = other DNA
ctacagcattataattaccctcgggcg

SEQ ID NO: 19234 - protein, 9 aa, synthetic construct
  REGION 1..9: note = Description of Artificial Sequence: Synthetic peptide
LQHYNYPRA

SEQ ID NO: 19235 - DNA, 27 bp, synthetic construct
  misc_feature 1..27: note = Description of Artificial Sequence: Synthetic oligonucleotide
  source 1..27: mol_type = other DNA
cagcaatattatagttctccgtgcagt

SEQ ID NO: 19236 - protein, 9 aa, synthetic construct
  REGION 1..9: note = Description of Artificial Sequence: Synthetic peptide
QQYYSSPCS

SEQ ID NO: 19237 - DNA, 27 bp, synthetic construct
  misc_feature 1..27: note = Description of Artificial Sequence: Synthetic oligonucleotide
  source 1..27: mol_type = other DNA
cagcaatattatactactcctccgacg

SEQ ID NO: 19238 - protein, 9 aa, synthetic construct
  REGION 1..9: note = Description of Artificial Sequence: Synthetic peptide
QQYYTTPPT

SEQ ID NO: 19239 - DNA, 27 bp, synthetic construct
  misc_feature 1..27: note = Description of Artificial Sequence: Synthetic oligonucleotide
  source 1..27: mol_type = other DNA
atgcaaagtatacaggttccgtggacg

SEQ ID NO: 19240 - protein, 9 aa, synthetic construct
  REGION 1..9: note = Description of Artificial Sequence: Synthetic peptide
MQSIQVPWT

SEQ ID NO: 19241 - DNA, 27 bp, synthetic construct
  misc_feature 1..27: note = Description of Artificial Sequence: Synthetic oligonucleotide
  source 1..27: mol_type = other DNA
ctacatcattatagttaccctcggacg

SEQ ID NO: 19242 - protein, 9 aa, synthetic construct
  REGION 1..9: note = Description of Artificial Sequence: Synthetic peptide
LHHYSYPRT

SEQ ID NO: 19243 - DNA, 27 bp, synthetic construct
  misc_feature 1..27: note = Description of Artificial Sequence: Synthetic oligonucleotide
  source 1..27: mol_type = other DNA
atgcaaagtacacagcttcctcggacg

SEQ ID NO: 19244 - protein, 9 aa, synthetic construct
  REGION 1..9: note = Description of Artificial Sequence: Synthetic peptide
MQSTQLPRT

SEQ ID NO: 19245 - DNA, 27 bp, synthetic construct
  misc_feature 1..27: note = Description of Artificial Sequence: Synthetic oligonucleotide
  source 1..27: mol_type = other DNA
ctacagcataatagttacccattcact

SEQ ID NO: 19246 - protein, 9 aa, synthetic construct
  REGION 1..9: note = Description of Artificial Sequence: Synthetic peptide
LQHNSYPFT

SEQ ID NO: 19247 - DNA, 27 bp, synthetic construct
  misc_feature 1..27: note = Description of Artificial Sequence: Synthetic oligonucleotide
  source 1..27: mol_type = other DNA
atgcaaagtacacagcttcctcggacg

SEQ ID NO: 19248 - protein, 9 aa, synthetic construct
  REGION 1..9: note = Description of Artificial Sequence: Synthetic peptide
MQSTQLPRT

SEQ ID NO: 19249 - DNA, 27 bp, synthetic construct
  misc_feature 1..27: note = Description of Artificial Sequence: Synthetic oligonucleotide
  source 1..27: mol_type = other DNA
atgcaaagtacacagcttcctcggacg

SEQ ID NO: 19250 - protein, 9 aa, synthetic construct
  REGION 1..9: note = Description of Artificial Sequence: Synthetic peptide
MQSTQLPRT

SEQ ID NO: 19251 - DNA, 27 bp, synthetic construct
  misc_feature 1..27: note = Description of Artificial Sequence: Synthetic oligonucleotide
  source 1..27: mol_type = other DNA
atgcaaagtacacagcttcctcggacg

SEQ ID NO: 19252 - protein, 9 aa, synthetic construct
  REGION 1..9: note = Description of Artificial Sequence: Synthetic peptide
MQSTQLPRT

SEQ ID NO: 19253 - DNA, 27 bp, synthetic construct
  misc_feature 1..27: note = Description of Artificial Sequence: Synthetic oligonucleotide
  source 1..27: mol_type = other DNA
cagcaatattataaaactccgtggacg

SEQ ID NO: 19254 - protein, 9 aa, synthetic construct
  REGION 1..9: note = Description of Artificial Sequence: Synthetic peptide
QQYYKTPWT

SEQ ID NO: 19255 - DNA, 27 bp, synthetic construct
  misc_feature 1..27: note = Description of Artificial Sequence: Synthetic oligonucleotide
  source 1..27: mol_type = other DNA
atgcaaagtacacagcttcctcggacg

SEQ ID NO: 19256 - protein, 9 aa, synthetic construct
  REGION 1..9: note = Description of Artificial Sequence: Synthetic peptide
MQSTQLPRT

SEQ ID NO: 19257 - DNA, 27 bp, synthetic construct
  misc_feature 1..27: note = Description of Artificial Sequence: Synthetic oligonucleotide
  source 1..27: mol_type = other DNA
ctacagcattatagttaccctcggacg

SEQ ID NO: 19258 - protein, 9 aa, synthetic construct
  REGION 1..9: note = Description of Artificial Sequence: Synthetic peptide
LQHYSYPRT

SEQ ID NO: 19259 - DNA, 27 bp, synthetic construct
  misc_feature 1..27: note = Description of Artificial Sequence: Synthetic oligonucleotide
  source 1..27: mol_type = other DNA
cagcaatattatagtagtcctccgacg

SEQ ID NO: 19260 - protein, 9 aa, synthetic construct
  REGION 1..9: note = Description of Artificial Sequence: Synthetic peptide
QQYYSSPPT

SEQ ID NO: 19261 - DNA, 27 bp, synthetic construct
  misc_feature 1..27: note = Description of Artificial Sequence: Synthetic oligonucleotide
  source 1..27: mol_type = other DNA
atgcaaagtacacagcttcctcggacg

SEQ ID NO: 19262 - protein, 9 aa, synthetic construct
  REGION 1..9: note = Description of Artificial Sequence: Synthetic peptide
MQSTQLPRT

SEQ ID NO: 19263 - DNA, 27 bp, synthetic construct
  misc_feature 1..27: note = Description of Artificial Sequence: Synthetic oligonucleotide
  source 1..27: mol_type = other DNA
atgcaaagtacacagcttcctcggacg

SEQ ID NO: 19264 - protein, 9 aa, synthetic construct
  REGION 1..9: note = Description of Artificial Sequence: Synthetic peptide
MQSTQLPRT

SEQ ID NO: 19265 - DNA, 27 bp, synthetic construct
  misc_feature 1..27: note = Description of Artificial Sequence: Synthetic oligonucleotide
  source 1..27: mol_type = other DNA
atgcaaagtacacagcttcctcggacg

SEQ ID NO: 19266 - protein, 9 aa, synthetic construct
  REGION 1..9: note = Description of Artificial Sequence: Synthetic peptide
MQSTQLPRT

SEQ ID NO: 19267 - DNA, 27 bp, synthetic construct
  misc_feature 1..27: note = Description of Artificial Sequence: Synthetic oligonucleotide
  source 1..27: mol_type = other DNA
ctacaccataatagttacccattcact

SEQ ID NO: 19268 - protein, 9 aa, synthetic construct
  REGION 1..9: note = Description of Artificial Sequence: Synthetic peptide
LHHNSYPFT

SEQ ID NO: 19269 - DNA, 27 bp, synthetic construct
  misc_feature 1..27: note = Description of Artificial Sequence: Synthetic oligonucleotide
  source 1..27: mol_type = other DNA
caacaggctaacagtttcccgtggacg

SEQ ID NO: 19270 - protein, 9 aa, synthetic construct
  REGION 1..9: note = Description of Artificial Sequence: Synthetic peptide
QQANSFPWT

SEQ ID NO: 19271 - DNA, 27 bp, synthetic construct
  misc_feature 1..27: note = Description of Artificial Sequence: Synthetic oligonucleotide
  source 1..27: mol_type = other DNA
ctacagcataatagttacccattcact

SEQ ID NO: 19272 - protein, 9 aa, synthetic construct
  REGION 1..9: note = Description of Artificial Sequence: Synthetic peptide
LQHNSYPFT

SEQ ID NO: 19273 - DNA, 27 bp, synthetic construct
  misc_feature 1..27: note = Description of Artificial Sequence: Synthetic oligonucleotide
  source 1..27: mol_type = other DNA
cagcaatattatattactccgtgcagt

SEQ ID NO: 19274 - protein, 9 aa, synthetic construct
  REGION 1..9: note = Description of Artificial Sequence: Synthetic peptide
QQYYITPCS

SEQ ID NO: 19275 - DNA, 27 bp, synthetic construct
  misc_feature 1..27: note = Description of Artificial Sequence: Synthetic oligonucleotide
  source 1..27: mol_type = other DNA
cagcaatattatagttctcctccgacg

SEQ ID NO: 19276 - protein, 9 aa, synthetic construct
  REGION 1..9: note = Description of Artificial Sequence: Synthetic peptide
QQYYSSPPT

SEQ ID NO: 19277 - DNA, 27 bp, synthetic construct
  misc_feature 1..27: note = Description of Artificial Sequence: Synthetic oligonucleotide
  source 1..27: mol_type = other DNA
atgcaaagtacacagcttcctcggacg

SEQ ID NO: 19278 - protein, 9 aa, synthetic construct
  REGION 1..9: note = Description of Artificial Sequence: Synthetic peptide
MQSTQLPRT

SEQ ID NO: 19279 - DNA, 27 bp, synthetic construct
  misc_feature 1..27: note = Description of Artificial Sequence: Synthetic oligonucleotide
  source 1..27: mol_type = other DNA
cagcaatattatagtgctccgtacagt

SEQ ID NO: 19280 - protein, 9 aa, synthetic construct
  REGION 1..9: note = Description of Artificial Sequence: Synthetic peptide
QQYYSAPYS

SEQ ID NO: 19281 - DNA, 27 bp, synthetic construct
  misc_feature 1..27: note = Description of Artificial Sequence: Synthetic oligonucleotide
  source 1..27: mol_type = other DNA
cagcaatattataatactccgtgcagt

SEQ ID NO: 19282 - protein, 9 aa, synthetic construct
  REGION 1..9: note = Description of Artificial Sequence: Synthetic peptide
QQYYNTPCS

SEQ ID NO: 19283 - DNA, 27 bp, synthetic construct
  misc_feature 1..27: note = Description of Artificial Sequence: Synthetic oligonucleotide
  source 1..27: mol_type = other DNA
atgcaagctctacaaactcctctcacc

SEQ ID NO: 19284 - protein, 9 aa, synthetic construct
  REGION 1..9: note = Description of Artificial Sequence: Synthetic peptide
MQALQTPLT

SEQ ID NO: 19285 - DNA, 27 bp, synthetic construct
  misc_feature 1..27: note = Description of Artificial Sequence: Synthetic oligonucleotide
  source 1..27: mol_type = other DNA
ctacagcataatagttacccattcact

SEQ ID NO: 19286 - protein, 9 aa, synthetic construct
  REGION 1..9: note = Description of Artificial Sequence: Synthetic peptide
LQHNSYPFT

SEQ ID NO: 19287 - DNA, 27 bp, synthetic construct
  misc_feature 1..27: note = Description of Artificial Sequence: Synthetic oligonucleotide
  source 1..27: mol_type = other DNA
caggcgtgggacagcagcactgtggta

SEQ ID NO: 19288 - protein, 9 aa, synthetic construct
  REGION 1..9: note = Description of Artificial Sequence: Synthetic peptide
QAWDSSTVV

SEQ ID NO: 19289 - DNA, 27 bp, synthetic construct
  misc_feature 1..27: note = Description of Artificial Sequence: Synthetic oligonucleotide
  source 1..27: mol_type = other DNA
caggcgtgggacagcagcactgtggta

SEQ ID NO: 19290 - protein, 9 aa, synthetic construct
  REGION 1..9: note = Description of Artificial Sequence: Synthetic peptide
QAWDSSTVV

SEQ ID NO: 19291 - DNA, 27 bp, synthetic construct
  misc_feature 1..27: note = Description of Artificial Sequence: Synthetic oligonucleotide
  source 1..27: mol_type = other DNA
caggcgtgggacagcagcactgtggta

SEQ ID NO: 19292 - protein, 9 aa, synthetic construct
  REGION 1..9: note = Description of Artificial Sequence: Synthetic peptide
QAWDSSTVV

SEQ ID NO: 19293 - DNA, 33 bp, synthetic construct
  misc_feature 1..33: note = Description of Artificial Sequence: Synthetic oligonucleotide
  source 1..33: mol_type = other DNA
gcagcatgggatgacagccttaatggcgtggta

SEQ ID NO: 19294 - protein, 11 aa, synthetic construct
  REGION 1..11: note = Description of Artificial Sequence: Synthetic peptide
AAWDDSLNGVV

SEQ ID NO: 19295 - DNA, 27 bp, synthetic construct
  misc_feature 1..27: note = Description of Artificial Sequence: Synthetic oligonucleotide
  source 1..27: mol_type = other DNA
caggcgtgggacaggaacaccgctgtc

SEQ ID NO: 19296 - protein, 9 aa, synthetic construct
  REGION 1..9: note = Description of Artificial Sequence: Synthetic peptide
QAWDRNTAV

SEQ ID NO: 19297 - DNA, 27 bp, synthetic construct
  misc_feature 1..27: note = Description of Artificial Sequence: Synthetic oligonucleotide
  source 1..27: mol_type = other DNA
caggcgtgggacagcagcactgtggta

SEQ ID NO: 19298 - protein, 9 aa, synthetic construct
  REGION 1..9: note = Description of Artificial Sequence: Synthetic peptide
QAWDSSTVV

SEQ ID NO: 19299 - DNA, 30 bp, synthetic construct
  misc_feature 1..30: note = Description of Artificial Sequence: Synthetic oligonucleotide
  source 1..30: mol_type = other DNA
caggcgtggggcagtaacactgctgtggta

SEQ ID NO: 19300 - protein, 10 aa, synthetic construct
  REGION 1..10: note = Description of Artificial Sequence: Synthetic peptide
QAWGSNTAVV

SEQ ID NO: 19301 - DNA, 30 bp, synthetic construct
  misc_feature 1..30: note = Description of Artificial Sequence: Synthetic oligonucleotide
  source 1..30: mol_type = other DNA
ctggcgtgggacagcagcacttttgtggta

SEQ ID NO: 19302 - protein, 10 aa, synthetic construct
  REGION 1..10: note = Description of Artificial Sequence: Synthetic peptide
LAWDSSTFVV

SEQ ID NO: 19303 - DNA, 30 bp, synthetic construct; identical to SEQ ID NO: 16113
  misc_feature 1..30: note = Description of Artificial Sequence: Synthetic oligonucleotide
  source 1..30: mol_type = other DNA

SEQ ID NO: 19304 - protein, 10 aa, synthetic construct
  REGION 1..10: note = Description of Artificial Sequence: Synthetic peptide
QAWDRNTYVV

SEQ ID NO: 19305 - DNA, 27 bp, synthetic construct
  misc_feature 1..27: note = Description of Artificial Sequence: Synthetic oligonucleotide
  source 1..27: mol_type = other DNA
caggcgtggcacagcagcactgtggta

SEQ ID NO: 19306 - protein, 9 aa, synthetic construct
  REGION 1..9: note = Description of Artificial Sequence: Synthetic peptide
QAWHSSTVV

SEQ ID NO: 19307 - DNA, 27 bp, synthetic construct
  misc_feature 1..27: note = Description of Artificial Sequence: Synthetic oligonucleotide
  source 1..27: mol_type = other DNA
caggcgtggcacagcagtactgtggta

SEQ ID NO: 19308 - protein, 9 aa, synthetic construct
  REGION 1..9: note = Description of Artificial Sequence: Synthetic peptide
QAWHSSTVV

SEQ ID NO: 19309 - DNA, 27 bp, synthetic construct
  misc_feature 1..27: note = Description of Artificial Sequence: Synthetic oligonucleotide
  source 1..27: mol_type = other DNA
caggcgtgggacagcagcactgtggta

SEQ ID NO: 19310 - protein, 9 aa, synthetic construct
  REGION 1..9: note = Description of Artificial Sequence: Synthetic peptide
QAWDSSTVV

SEQ ID NO: 19311 - DNA, 27 bp, synthetic construct
  misc_feature 1..27: note = Description of Artificial Sequence: Synthetic oligonucleotide
  source 1..27: mol_type = other DNA
caggcgtgggacagcagcactgtggta

SEQ ID NO: 19312 - protein, 9 aa, synthetic construct
  REGION 1..9: note = Description of Artificial Sequence: Synthetic peptide
QAWDSSTVV

SEQ ID NO: 19313 - DNA, 33 bp, synthetic construct
  misc_feature 1..33: note = Description of Artificial Sequence: Synthetic oligonucleotide
  source 1..33: mol_type = other DNA
gaagcatgggatgacagcctgaatggtccggta

SEQ ID NO: 19314 - protein, 11 aa, synthetic construct
  REGION 1..11: note = Description of Artificial Sequence: Synthetic peptide
EAWDDSLNGPV

SEQ ID NO: 19315 - DNA, 33 bp, synthetic construct
  misc_feature 1..33: note = Description of Artificial Sequence: Synthetic oligonucleotide
  source 1..33: mol_type = other DNA
gcagcatgggatgacagcctgaacggcgtggta

SEQ ID NO: 19316 - protein, 11 aa, synthetic construct
  REGION 1..11: note = Description of Artificial Sequence: Synthetic peptide
AAWDDSLNGVV

SEQ ID NO: 19317 - DNA, 33 bp, synthetic construct
  misc_feature 1..33: note = Description of Artificial Sequence: Synthetic oligonucleotide
  source 1..33: mol_type = other DNA
gcagcatgggatgacagcctgaatggcgtggta

SEQ ID NO: 19318 - protein, 11 aa, synthetic construct
  REGION 1..11: note = Description of Artificial Sequence: Synthetic peptide
AAWDDSLNGVV

SEQ ID NO: 19319 - DNA, 27 bp, synthetic construct
  misc_feature 1..27: note = Description of Artificial Sequence: Synthetic oligonucleotide
  source 1..27: mol_type = other DNA
caggcgtgggacagcagcactgtggta

SEQ ID NO: 19320 - protein, 9 aa, synthetic construct
  REGION 1..9: note = Description of Artificial Sequence: Synthetic peptide
QAWDSSTVV

SEQ ID NO: 19321 - DNA, 30 bp, synthetic construct; identical to SEQ ID NO: 19301
  misc_feature 1..30: note = Description of Artificial Sequence: Synthetic oligonucleotide
  source 1..30: mol_type = other DNA

SEQ ID NO: 19322 - protein, 10 aa, synthetic construct
  REGION 1..10: note = Description of Artificial Sequence: Synthetic peptide
LAWDSSTFVV

SEQ ID NO: 19323 - DNA, 27 bp, synthetic construct
  misc_feature 1..27: note = Description of Artificial Sequence: Synthetic oligonucleotide
  source 1..27: mol_type = other DNA
caggcgtggcacagcagcactgtggta

SEQ ID NO: 19324 - protein, 9 aa, synthetic construct
  REGION 1..9: note = Description of Artificial Sequence: Synthetic peptide
QAWHSSTVV

SEQ ID NO: 19325 - DNA, 27 bp, synthetic construct
  misc_feature 1..27: note = Description of Artificial Sequence: Synthetic oligonucleotide
  source 1..27: mol_type = other DNA
caggcgtgggacagcagcactgtggta

SEQ ID NO: 19326 - protein, 9 aa, synthetic construct
  REGION 1..9: note = Description of Artificial Sequence: Synthetic peptide
QAWDSSTVV

SEQ ID NO: 19327 - DNA, 33 bp, synthetic construct; identical to SEQ ID NO: 19317
  misc_feature 1..33: note = Description of Artificial Sequence: Synthetic oligonucleotide
  source 1..33: mol_type = other DNA

SEQ ID NO: 19328 - protein, 11 aa, synthetic construct
  REGION 1..11: note = Description of Artificial Sequence: Synthetic peptide
AAWDDSLNGVV

SEQ ID NO: 19329 - DNA, 27 bp, synthetic construct
  misc_feature 1..27: note = Description of Artificial Sequence: Synthetic oligonucleotide
  source 1..27: mol_type = other DNA
caggcgtgggacagcagcactgtggta

SEQ ID NO: 19330 - protein, 9 aa, synthetic construct
  REGION 1..9: note = Description of Artificial Sequence: Synthetic peptide
QAWDSSTVV

SEQ ID NO: 19331 - DNA, 27 bp, synthetic construct
  misc_feature 1..27: note = Description of Artificial Sequence: Synthetic oligonucleotide
  source 1..27: mol_type = other DNA
caggcgtgggacagcagcactgtggta

SEQ ID NO: 19332 - protein, 9 aa, synthetic construct
  REGION 1..9: note = Description of Artificial Sequence: Synthetic peptide
QAWDSSTVV

SEQ ID NO: 19333 - DNA, 27 bp, synthetic construct
  misc_feature 1..27: note = Description of Artificial Sequence: Synthetic oligonucleotide
  source 1..27: mol_type = other DNA
atgatttggcacagcagcgcttgggtg

SEQ ID NO: 19334 - protein, 9 aa, synthetic construct
  REGION 1..9: note = Description of Artificial Sequence: Synthetic peptide
MIWHSSAWV

SEQ ID NO: 19335 - DNA, 27 bp, synthetic construct
  misc_feature 1..27: note = Description of Artificial Sequence: Synthetic oligonucleotide
  source 1..27: mol_type = other DNA
caggcgtgggacagcagcactgtggta

SEQ ID NO: 19336 - protein, 9 aa, synthetic construct
  REGION 1..9: note = Description of Artificial Sequence: Synthetic peptide
QAWDSSTVV

SEQ ID NO: 19337 - DNA, 30 bp, synthetic construct
  misc_feature 1..30: note = Description of Artificial Sequence: Synthetic oligonucleotide
  source 1..30: mol_type = other DNA
ctggcgtgggacagcagcacttttgtggtc

SEQ ID NO: 19338 - protein, 10 aa, synthetic construct
  REGION 1..10: note = Description of Artificial Sequence: Synthetic peptide
LAWDSSTFVV

SEQ ID NO: 19339 - DNA, 27 bp, synthetic construct
  misc_feature 1..27: note = Description of Artificial Sequence: Synthetic oligonucleotide
  source 1..27: mol_type = other DNA
caggcgtggcacagcagcactgtggta

SEQ ID NO: 19340 - protein, 9 aa, synthetic construct
  REGION 1..9: note = Description of Artificial Sequence: Synthetic peptide
QAWHSSTVV

SEQ ID NO: 19341 - DNA, 27 bp, synthetic construct
  misc_feature 1..27: note = Description of Artificial Sequence: Synthetic oligonucleotide
  source 1..27: mol_type = other DNA
caggcgtgggacagcagcactgtggta

SEQ ID NO: 19342 - protein, 9 aa, synthetic construct
  REGION 1..9: note = Description of Artificial Sequence: Synthetic peptide
QAWDSSTVV

SEQ ID NO: 19343 - DNA, 33 bp, synthetic construct; identical to SEQ ID NO: 19317
  misc_feature 1..33: note = Description of Artificial Sequence: Synthetic oligonucleotide
  source 1..33: mol_type = other DNA

SEQ ID NO: 19344 - protein, 11 aa, synthetic construct
  REGION 1..11: note = Description of Artificial Sequence: Synthetic peptide
AAWDDSLNGVV

SEQ ID NO: 19345 - DNA, 27 bp, synthetic construct
  misc_feature 1..27: note = Description of Artificial Sequence: Synthetic oligonucleotide
  source 1..27: mol_type = other DNA
caggcgtgggacagcagcactgtggta

SEQ ID NO: 19346 - protein, 9 aa, synthetic construct
  REGION 1..9: note = Description of Artificial Sequence: Synthetic peptide
QAWDSSTVV

SEQ ID NO: 19347 - DNA, 27 bp, synthetic construct
  misc_feature 1..27: note = Description of Artificial Sequence: Synthetic oligonucleotide
  source 1..27: mol_type = other DNA
caggcgtggcacagcagcactgtggta

SEQ ID NO: 19348 - protein, 9 aa, synthetic construct
  REGION 1..9: note = Description of Artificial Sequence: Synthetic peptide
QAWHSSTVV

SEQ ID NO: 19349 - DNA, 27 bp, synthetic construct
  misc_feature 1..27: note = Description of Artificial Sequence: Synthetic oligonucleotide
  source 1..27: mol_type = other DNA
caggcgtgggacagcagcactgtggta

SEQ ID NO: 19350 - protein, 9 aa, synthetic construct
  REGION 1..9: note = Description of Artificial Sequence: Synthetic peptide
QAWDSSTVV

SEQ ID NO: 19351 - DNA, 27 bp, synthetic construct
  misc_feature 1..27: note = Description of Artificial Sequence: Synthetic oligonucleotide
  source 1..27: mol_type = other DNA
caggcgtgggacagcagcacttatgtc

SEQ ID NO: 19352 - protein, 9 aa, synthetic construct
  REGION 1..9: note = Description of Artificial Sequence: Synthetic peptide
QAWDSSTYV

SEQ ID NO: 19353 - DNA, 27 bp, synthetic construct
  misc_feature 1..27: note = Description of Artificial Sequence: Synthetic oligonucleotide
  source 1..27: mol_type = other DNA
caggcgtgggacagcagcactgtggta

SEQ ID NO: 19354 - protein, 9 aa, synthetic construct
  REGION 1..9: note = Description of Artificial Sequence: Synthetic peptide
QAWDSSTVV

SEQ ID NO: 19355 - DNA, 27 bp, synthetic construct
  misc_feature 1..27: note = Description of Artificial Sequence: Synthetic oligonucleotide
  source 1..27: mol_type = other DNA
caggcgtgggacagcagcactgtggta

SEQ ID NO: 19356 - protein, 9 aa, synthetic construct
  REGION 1..9: note = Description of Artificial Sequence: Synthetic peptide
QAWDSSTVV

SEQ ID NO: 19357 - DNA, 27 bp, synthetic construct
  misc_feature 1..27: note = Description of Artificial Sequence: Synthetic oligonucleotide
  source 1..27: mol_type = other DNA
caggcgtgggacagcagcacttatgtc

SEQ ID NO: 19358 - protein, 9 aa, synthetic construct
  REGION 1..9: note = Description of Artificial Sequence: Synthetic peptide
QAWDSSTYV

SEQ ID NO: 19359 - DNA, 27 bp, synthetic construct
  misc_feature 1..27: note = Description of Artificial Sequence: Synthetic oligonucleotide
  source 1..27: mol_type = other DNA
caggcgtgggacaacagcactgtggta

SEQ ID NO: 19360 - protein, 9 aa, synthetic construct
  REGION 1..9: note = Description of Artificial Sequence: Synthetic peptide
QAWDNSTVV

SEQ ID NO: 19361 - DNA, 27 bp, synthetic construct
  misc_feature 1..27: note = Description of Artificial Sequence: Synthetic oligonucleotide
  source 1..27: mol_type = other DNA
caggcgtgggacagcagcactgtggta

SEQ ID NO: 19362 - protein, 9 aa, synthetic construct
  REGION 1..9: note = Description of Artificial Sequence: Synthetic peptide
QAWDSSTVV

SEQ ID NO: 19363 - DNA, 27 bp, synthetic construct
  misc_feature 1..27: note = Description of Artificial Sequence: Synthetic oligonucleotide
  source 1..27: mol_type = other DNA
caggcgtgggacagcagcacttatgtc

SEQ ID NO: 19364 - protein, 9 aa, synthetic construct
  REGION 1..9: note = Description of Artificial Sequence: Synthetic peptide
QAWDSSTYV

SEQ ID NO: 19365 - DNA, 27 bp, synthetic construct
  misc_feature 1..27: note = Description of Artificial Sequence: Synthetic oligonucleotide
  source 1..27: mol_type = other DNA
caggcgtgggacagcagcacttatgtc

SEQ ID NO: 19366 - protein, 9 aa, synthetic construct
  REGION 1..9: note = Description of Artificial Sequence: Synthetic peptide
QAWDSSTYV

SEQ ID NO: 19367 - DNA, 30 bp, synthetic construct
  misc_feature 1..30: note = Description of Artificial Sequence: Synthetic oligonucleotide
  source 1..30: mol_type = other DNA
caggcgtgggacagcagcacttatgtgata

SEQ ID NO: 19368 - protein, 10 aa, synthetic construct
  REGION 1..10: note = Description of Artificial Sequence: Synthetic peptide
QAWDSSTYVI

SEQ ID NO: 19369 - DNA, 27 bp, synthetic construct
  misc_feature 1..27: note = Description of Artificial Sequence: Synthetic oligonucleotide
  source 1..27: mol_type = other DNA
caggcgtggcacagcagtactgtggta

SEQ ID NO: 19370 - protein, 9 aa, synthetic construct
  REGION 1..9: note = Description of Artificial Sequence: Synthetic peptide
QAWHSSTVV

SEQ ID NO: 19371 - DNA, 27 bp, synthetic construct
  misc_feature 1..27: note = Description of Artificial Sequence: Synthetic oligonucleotide
  source 1..27: mol_type = other DNA
caggcgtggcacagcagcactgtggta

SEQ ID NO: 19372 - protein, 9 aa, synthetic construct
  REGION 1..9: note = Description of Artificial Sequence: Synthetic peptide
QAWHSSTVV

SEQ ID NO: 19373 - DNA, 27 bp, synthetic construct
  misc_feature 1..27: note = Description of Artificial Sequence: Synthetic oligonucleotide
  source 1..27: mol_type = other DNA
caggcgtgggacagcagcactgtggta

SEQ ID NO: 19374 - protein, 9 aa, synthetic construct
  REGION 1..9: note = Description of Artificial Sequence: Synthetic peptide
QAWDSSTVV

SEQ ID NO: 19375 - DNA, 27 bp, synthetic construct
  misc_feature 1..27: note = Description of Artificial Sequence: Synthetic oligonucleotide
  source 1..27: mol_type = other DNA
caggcgtgggacaacagtactttagta

SEQ ID NO: 19376 - protein, 9 aa, synthetic construct
  REGION 1..9: note = Description of Artificial Sequence: Synthetic peptide
QAWDNSTLV

SEQ ID NO: 19377 - DNA, 27 bp, synthetic construct
  misc_feature 1..27: note = Description of Artificial Sequence: Synthetic oligonucleotide
  source 1..27: mol_type = other DNA
caggcgtgggacaacagcactgtggta

SEQ ID NO: 19378 - protein, 9 aa, synthetic construct
  REGION 1..9: note = Description of Artificial Sequence: Synthetic peptide
QAWDNSTVV

SEQ ID NO: 19379 - DNA, 27 bp, synthetic construct
  misc_feature 1..27: note = Description of Artificial Sequence: Synthetic oligonucleotide
  source 1..27: mol_type = other DNA
caggcgtggcacagcagtattgtggta

SEQ ID NO: 19380 - protein, 9 aa, synthetic construct
  REGION 1..9: note = Description of Artificial Sequence: Synthetic peptide
QAWHSSIVV

SEQ ID NO: 19381 - DNA, 33 bp, synthetic construct
  misc_feature 1..33: note = Description of Artificial Sequence: Synthetic oligonucleotide
  source 1..33: mol_type = other DNA
gcagcatgggatgacagcctgaagggtccggta

SEQ ID NO: 19382 - protein, 11 aa, synthetic construct
  REGION 1..11: note = Description of Artificial Sequence: Synthetic peptide
AAWDDSLKGPV

SEQ ID NO: 19383 - DNA, 36 bp, synthetic construct
  misc_feature 1..36: note = Description of Artificial Sequence: Synthetic oligonucleotide
  source 1..36: mol_type = other DNA
cagtcctatgacagcagcctgagtggtcctgtgata

SEQ ID NO: 19384 - protein, 12 aa, synthetic construct
  REGION 1..12: note = Description of Artificial Sequence: Synthetic peptide
QSYDSSLSGPVI

SEQ ID NO: 19385 - DNA, 27 bp, synthetic construct
  misc_feature 1..27: note = Description of Artificial Sequence: Synthetic oligonucleotide
  source 1..27: mol_type = other DNA
caggcgtgggacaatagtatttatgtc

SEQ ID NO: 19386 - protein, 9 aa, synthetic construct
  REGION 1..9: note = Description of Artificial Sequence: Synthetic peptide
QAWDNSIYV

SEQ ID NO: 19387 - DNA, 27 bp, synthetic construct
  misc_feature 1..27: note = Description of Artificial Sequence: Synthetic oligonucleotide
  source 1..27: mol_type = other DNA
caggcgtgggacagcagcactgtggtg

SEQ ID NO: 19388 - protein, 9 aa, synthetic construct
  REGION 1..9: note = Description of Artificial Sequence: Synthetic peptide
QAWDSSTVV

SEQ ID NO: 19389 - DNA, 27 bp, synthetic construct
  misc_feature 1..27: note = Description of Artificial Sequence: Synthetic oligonucleotide
  source 1..27: mol_type = other DNA
caggcgtgggacagcagcactgtggta

SEQ ID NO: 19390 - protein, 9 aa, synthetic construct
  REGION 1..9: note = Description of Artificial Sequence: Synthetic peptide
QAWDSSTVV

SEQ ID NO: 19391 - DNA, 30 bp, synthetic construct; identical to SEQ ID NO: 19301
  misc_feature 1..30: note = Description of Artificial Sequence: Synthetic oligonucleotide
  source 1..30: mol_type = other DNA

SEQ ID NO: 19392 - protein, 10 aa, synthetic construct
  REGION 1..10: note = Description of Artificial Sequence: Synthetic peptide
LAWDSSTFVV

SEQ ID NO: 19393 - DNA, 33 bp, synthetic construct; identical to SEQ ID NO: 19317
  misc_feature 1..33: note = Description of Artificial Sequence: Synthetic oligonucleotide
  source 1..33: mol_type = other DNA

SEQ ID NO: 19394 - protein, 11 aa, synthetic construct
  REGION 1..11: note = Description of Artificial Sequence: Synthetic peptide
AAWDDSLNGVV

SEQ ID NO: 19395 - DNA, 30 bp, synthetic construct
  misc_feature 1..30: note = Description of Artificial Sequence: Synthetic oligonucleotide
  source 1..30: mol_type = other DNA
caggcgtgggacaacagcagctttgtgcta

SEQ ID NO: 19396 - protein, 10 aa, synthetic construct
  REGION 1..10: note = Description of Artificial Sequence: Synthetic peptide
QAWDNSSFVL

SEQ ID NO: 19397 - DNA, 30 bp, synthetic construct
  misc_feature 1..30: note = Description of Artificial Sequence: Synthetic oligonucleotide
  source 1..30: mol_type = other DNA
caggcgtggggcaacagcagctttgtggta

SEQ ID NO: 19398 - protein, 10 aa, synthetic construct
  REGION 1..10: note = Description of Artificial Sequence: Synthetic peptide
QAWGNSSFVV

SEQ ID NO: 19399 - DNA, 30 bp, synthetic construct; identical to SEQ ID NO: 19397
  misc_feature 1..30: note = Description of Artificial Sequence: Synthetic oligonucleotide
  source 1..30: mol_type = other DNA

SEQ ID NO: 19400 - protein, 10 aa, synthetic construct
  REGION 1..10: note = Description of Artificial Sequence: Synthetic peptide
QAWGNSSFVV

SEQ ID NO: 19401 - DNA, 30 bp, synthetic construct; identical to SEQ ID NO: 19397
  misc_feature 1..30: note = Description of Artificial Sequence: Synthetic oligonucleotide
  source 1..30: mol_type = other DNA

SEQ ID NO: 19402 - protein, 10 aa, synthetic construct
  REGION 1..10: note = Description of Artificial Sequence: Synthetic peptide
QAWGNSSFVV

SEQ ID NO: 19403 - DNA, 30 bp, synthetic construct
  misc_feature 1..30: note = Description of Artificial Sequence: Synthetic oligonucleotide
  source 1..30: mol_type = other DNA
caggcgtgggtcaacaacactgcagtggtt

SEQ ID NO: 19404 - protein, 10 aa, synthetic construct
  REGION 1..10: note = Description of Artificial Sequence: Synthetic peptide
QAWVNNTAVV

SEQ ID NO: 19405 - DNA, 30 bp, synthetic construct
  misc_feature 1..30: note = Description of Artificial Sequence: Synthetic oligonucleotide
  source 1..30: mol_type = other DNA
cagacgtgggacaacagtagttttgcgctt

SEQ ID NO: 19406 - protein, 10 aa, synthetic construct
  REGION 1..10: note = Description of Artificial Sequence: Synthetic peptide
QTWDNSSFAL

SEQ ID NO: 19407 - DNA, 27 bp, synthetic construct
  misc_feature 1..27: note = Description of Artificial Sequence: Synthetic oligonucleotide
  source 1..27: mol_type = other DNA
caggcgtgggacagcaccactctggtt

SEQ ID NO: 19408 - protein, 9 aa, synthetic construct
  REGION 1..9: note = Description of Artificial Sequence: Synthetic peptide
QAWDSTTLV

SEQ ID NO: 19409 - DNA, 27 bp, synthetic construct
  misc_feature 1..27: note = Description of Artificial Sequence: Synthetic oligonucleotide
  source 1..27: mol_type = other DNA
caggcgtgggacagcaccactctggtt

SEQ ID NO: 19410 - protein, 9 aa, synthetic construct
  REGION 1..9: note = Description of Artificial Sequence: Synthetic peptide
QAWDSTTLV

SEQ ID NO: 19411 - DNA, 27 bp, synthetic construct
  misc_feature 1..27: note = Description of Artificial Sequence: Synthetic oligonucleotide
  source 1..27: mol_type = other DNA
caggcgtgggacaacagcactgcggta

SEQ ID NO: 19412 - protein, 9 aa, synthetic construct
  REGION 1..9: note = Description of Artificial Sequence: Synthetic peptide
QAWDNSTAV

SEQ ID NO: 19413 - DNA, 27 bp, synthetic construct
  misc_feature 1..27: note = Description of Artificial Sequence: Synthetic oligonucleotide
  source 1..27: mol_type = other DNA
caggcgtgggacaccaacactgtgata

SEQ ID NO: 19414 - protein, 9 aa, synthetic construct
  REGION 1..9: note = Description of Artificial Sequence: Synthetic peptide
QAWDTNTVI

SEQ ID NO: 19415 - DNA, 27 bp, synthetic construct
  misc_feature 1..27: note = Description of Artificial Sequence: Synthetic oligonucleotide
  source 1..27: mol_type = other DNA
caggcgtgggacaccaacactgtgctt

SEQ ID NO: 19416 - protein, 9 aa, synthetic construct
  REGION 1..9: note = Description of Artificial Sequence: Synthetic peptide
QAWDTNTVL

SEQ ID NO: 19417 - DNA, 27 bp, synthetic construct
  misc_feature 1..27: note = Description of Artificial Sequence: Synthetic oligonucleotide
  source 1..27: mol_type = other DNA
caggcgtgggacaagaacactgtggta

SEQ ID NO: 19418 - protein, 9 aa, synthetic construct
  REGION 1..9: note = Description of Artificial Sequence: Synthetic peptide
QAWDKNTVV

SEQ ID NO: 19419 - DNA, 27 bp, synthetic construct
  misc_feature 1..27: note = Description of Artificial Sequence: Synthetic oligonucleotide
  source 1..27: mol_type = other DNA
caggcgtgggacaacagcactgcggta

SEQ ID NO: 19420 - protein, 9 aa, synthetic construct
  REGION 1..9: note = Description of Artificial Sequence: Synthetic peptide
QAWDNSTAV

SEQ ID NO: 19421 - DNA, 27 bp, synthetic construct
  misc_feature 1..27: note = Description of Artificial Sequence: Synthetic oligonucleotide
  source 1..27: mol_type = other DNA
cagtcttattatagcggcaattgggtg

SEQ ID NO: 19422 - protein, 9 aa, synthetic construct
  REGION 1..9: note = Description of Artificial Sequence: Synthetic peptide
QSYYSGNWV

SEQ ID NO: 19423 - DNA, 27 bp, synthetic construct
  misc_feature 1..27: note = Description of Artificial Sequence: Synthetic oligonucleotide
  source 1..27: mol_type = other DNA
caggcgtgggacagcaacactgcggta

SEQ ID NO: 19424 - protein, 9 aa, synthetic construct
  REGION 1..9: note = Description of Artificial Sequence: Synthetic peptide
QAWDSNTAV

SEQ ID NO: 19425 - DNA, 27 bp, synthetic construct
  misc_feature 1..27: note = Description of Artificial Sequence: Synthetic oligonucleotide
  source 1..27: mol_type = other DNA
caggcgtgggacaacagcactatggta

SEQ ID NO: 19426 - protein, 9 aa, synthetic construct
  REGION 1..9: note = Description of Artificial Sequence: Synthetic peptide
QAWDNSTMV

SEQ ID NO: 19427 - DNA, 27 bp, synthetic construct
  misc_feature 1..27: note = Description of Artificial Sequence: Synthetic oligonucleotide
  source 1..27: mol_type = other DNA
caggcgtgggacaagaacactgtggta

SEQ ID NO: 19428 - protein, 9 aa, synthetic construct
  REGION 1..9: note = Description of Artificial Sequence: Synthetic peptide
QAWDKNTVV

SEQ ID NO: 19429 - DNA, 33 bp, synthetic construct
  misc_feature 1..33: note = Description of Artificial Sequence: Synthetic oligonucleotide
  source 1..33: mol_type = other DNA
aactcccgggacagcagtggcagccatgtggta

SEQ ID NO: 19430 - protein, 11 aa, synthetic construct
  REGION 1..11: note = Description of Artificial Sequence: Synthetic peptide
NSRDSSGSHVV

SEQ ID NO: 19431 - DNA, 30 bp, synthetic construct
  misc_feature 1..30: note = Description of Artificial Sequence: Synthetic oligonucleotide
  source 1..30: mol_type = other DNA
caggcgtgggacatcagcacttatgtggta

SEQ ID NO: 19432 - protein, 10 aa, synthetic construct
  REGION 1..10: note = Description of Artificial Sequence: Synthetic peptide
QAWDISTYVV

SEQ ID NO: 19433 - DNA, 33 bp, synthetic construct
  misc_feature 1..33: note = Description of Artificial Sequence: Synthetic oligonucleotide
  source 1..33: mol_type = other DNA
aactcccgggacagcagtggcaaccatgtggta

SEQ ID NO: 19434 - protein, 11 aa, synthetic construct
  REGION 1..11: note = Description of Artificial Sequence: Synthetic peptide
NSRDSSGNHVV

SEQ ID NO: 19435 - DNA, 33 bp, synthetic construct; identical to SEQ ID NO: 19433
  misc_feature 1..33: note = Description of Artificial Sequence: Synthetic oligonucleotide
  source 1..33: mol_type = other DNA

SEQ ID NO: 19436 - protein, 11 aa, synthetic construct
  REGION 1..11: note = Description of Artificial Sequence: Synthetic peptide
NSRDSSGNHVV

SEQ ID NO: 19437 - DNA, 27 bp, synthetic construct
  misc_feature 1..27: note = Description of Artificial Sequence: Synthetic oligonucleotide
  source 1..27: mol_type = other DNA
caggcgtgggacagcttcactgtggta

SEQ ID NO: 19438 - protein, 9 aa, synthetic construct
  REGION 1..9: note = Description of Artificial Sequence: Synthetic peptide
QAWDSFTVV

SEQ ID NO: 19439 - DNA, 33 bp, synthetic construct
  misc_feature 1..33: note = Description of Artificial Sequence: Synthetic oligonucleotide
  source 1..33: mol_type = other DNA
tgctcatatgcaggtagtagcacctatgtggta

SEQ ID NO: 19440 - protein, 11 aa, synthetic construct
  REGION 1..11: note = Description of Artificial Sequence: Synthetic peptide
CSYAGSSTYVV

SEQ ID NO: 19441 - DNA, 27 bp, synthetic construct
  misc_feature 1..27: note = Description of Artificial Sequence: Synthetic oligonucleotide
  source 1..27: mol_type = other DNA
caggcgtgggacaacagcactatggta

SEQ ID NO: 19442 - protein, 9 aa, synthetic construct
  REGION 1..9: note = Description of Artificial Sequence: Synthetic peptide
QAWDNSTMV

SEQ ID NO: 19443 - DNA, 33 bp, synthetic construct
  misc_feature 1..33: note = Description of Artificial Sequence: Synthetic oligonucleotide
  source 1..33: mol_type = other DNA
tgctcatatgcaggtagtagcacctttgtagta

SEQ ID NO: 19444 - protein, 11 aa, synthetic construct
  REGION 1..11: note = Description of Artificial Sequence: Synthetic peptide
CSYAGSSTFVV

SEQ ID NO: 19445 - DNA, 33 bp, synthetic construct
  misc_feature 1..33: note = Description of Artificial Sequence: Synthetic oligonucleotide
  source 1..33: mol_type = other DNA
aactcccgggacagcagtggtaaccattgggtg

SEQ ID NO: 19446 - protein, 11 aa, synthetic construct
  REGION 1..11: note = Description of Artificial Sequence: Synthetic peptide
NSRDSSGNHWV

SEQ ID NO: 19447 - DNA, 30 bp, synthetic construct
  misc_feature 1..30: note = Description of Artificial Sequence: Synthetic oligonucleotide
  source 1..30: mol_type = other DNA
caggcgtgggacagcaacactgcagtggta

SEQ ID NO: 19448 - protein, 10 aa, synthetic construct
  REGION 1..10: note = Description of Artificial Sequence: Synthetic peptide
QAWDSNTAVV

SEQ ID NO: 19449 - DNA, 30 bp, synthetic construct
  misc_feature 1..30: note = Description of Artificial Sequence: Synthetic oligonucleotide
  source 1..30: mol_type = other DNA
cagtcctatgatagaagcctgaatgtggtc

SEQ ID NO: 19450 - protein, 10 aa, synthetic construct
  REGION 1..10: note = Description of Artificial Sequence: Synthetic peptide
QSYDRSLNVV

SEQ ID NO: 19451 - DNA, 27 bp, synthetic construct
  misc_feature 1..27: note = Description of Artificial Sequence: Synthetic oligonucleotide
  source 1..27: mol_type = other DNA
caggcgtgggacagtaggaaagtggta

SEQ ID NO: 19452 - protein, 9 aa, synthetic construct
  REGION 1..9: note = Description of Artificial Sequence: Synthetic peptide
QAWDSRKVV

SEQ ID NO: 19453 - DNA, 27 bp, synthetic construct
  misc_feature 1..27: note = Description of Artificial Sequence: Synthetic oligonucleotide
  source 1..27: mol_type = other DNA
caggcgtgggacagcagcactgcggta

SEQ ID NO: 19454 - protein, 9 aa, synthetic construct
  REGION 1..9: note = Description of Artificial Sequence: Synthetic peptide
QAWDSSTAV

SEQ ID NO: 19455 - DNA, 27 bp, synthetic construct
  misc_feature 1..27: note = Description of Artificial Sequence: Synthetic oligonucleotide
  source 1..27: mol_type = other DNA
caggcgtgggacatcaccactgcggta

SEQ ID NO: 19456 - protein, 9 aa, synthetic construct
  REGION 1..9: note = Description of Artificial Sequence: Synthetic peptide
QAWDITTAV

SEQ ID NO: 19457 - DNA, 27 bp, synthetic construct
  misc_feature 1..27: note = Description of Artificial Sequence: Synthetic oligonucleotide
  source 1..27: mol_type = other DNA
caggcgtgggacagcaggaaagtggta

SEQ ID NO: 19458 - protein, 9 aa, synthetic construct
  REGION 1..9: note = Description of Artificial Sequence: Synthetic peptide
QAWDSRKVV

SEQ ID NO: 19459 - DNA, 33 bp, synthetic construct; identical to SEQ ID NO: 18941
  misc_feature 1..33: note = Description of Artificial Sequence: Synthetic oligonucleotide
  source 1..33: mol_type = other DNA

SEQ ID NO: 19460 - protein, 11 aa, synthetic construct
  REGION 1..11: note = Description of Artificial Sequence: Synthetic peptide
TAWDDSLNGWV

SEQ ID NO: 19461 - DNA, 33 bp, synthetic construct
  misc_feature 1..33: note = Description of Artificial Sequence: Synthetic oligonucleotide
  source 1..33: mol_type = other DNA
cagtcctatgacagcagcctgagtggttatgtc

SEQ ID NO: 19462 - protein, 11 aa, synthetic construct
  REGION 1..11: note = Description of Artificial Sequence: Synthetic peptide
QSYDSSLSGYV

SEQ ID NO: 19463 - DNA, 33 bp, synthetic construct
  misc_feature 1..33: note = Description of Artificial Sequence: Synthetic oligonucleotide
  source 1..33: mol_type = other DNA
gcagcatgggatgacagcctgaatggttgggtg

SEQ ID NO: 19464 - protein, 11 aa, synthetic construct
  REGION 1..11: note = Description of Artificial Sequence: Synthetic peptide
AAWDDSLNGWV

SEQ ID NO: 19465 - DNA, 27 bp, synthetic construct
  misc_feature 1..27: note = Description of Artificial Sequence: Synthetic oligonucleotide
  source 1..27: mol_type = other DNA
caggcgtgggacaacagcactgtggta

SEQ ID NO: 19466 - protein, 9 aa, synthetic construct
  REGION 1..9: note = Description of Artificial Sequence: Synthetic peptide
QAWDNSTVV

SEQ ID NO: 19467 - DNA, 30 bp, synthetic construct
  misc_feature 1..30: note = Description of Artificial Sequence: Synthetic oligonucleotide
  source 1..30: mol_type = other DNA
aactcatatacaagcaacatcacttgggtg

SEQ ID NO: 19468 - protein, 10 aa, synthetic construct
  REGION 1..10: note = Description of Artificial Sequence: Synthetic peptide
NSYTSNITWV

SEQ ID NO: 19469 - DNA, 27 bp, synthetic construct
  misc_feature 1..27: note = Description of Artificial Sequence: Synthetic oligonucleotide
  source 1..27: mol_type = other DNA
cagacgtgggacagcagcactgcggtt

SEQ ID NO: 19470 - protein, 9 aa, synthetic construct
  REGION 1..9: note = Description of Artificial Sequence: Synthetic peptide
QTWDSSTAV

SEQ ID NO: 19471 - DNA, 33 bp, synthetic construct; identical to SEQ ID NO: 19463
  misc_feature 1..33: note = Description of Artificial Sequence: Synthetic oligonucleotide
  source 1..33: mol_type = other DNA

SEQ ID NO: 19472 - protein, 11 aa, synthetic construct
  REGION 1..11: note = Description of Artificial Sequence: Synthetic peptide
AAWDDSLNGWV

SEQ ID NO: 19473 - DNA, 33 bp, synthetic construct
  misc_feature 1..33: note = Description of Artificial Sequence: Synthetic oligonucleotide
  source 1..33: mol_type = other DNA
gcagtatgggatgacagcctgattggttgggtg

SEQ ID NO: 19474 - protein, 11 aa, synthetic construct
  REGION 1..11: note = Description of Artificial Sequence: Synthetic peptide
AVWDDSLIGWV

SEQ ID NO: 19475 - DNA, 33 bp, synthetic construct; identical to SEQ ID NO: 19463
  misc_feature 1..33: note = Description of Artificial Sequence: Synthetic oligonucleotide
  source 1..33: mol_type = other DNA

SEQ ID NO: 19476 - protein, 11 aa, synthetic construct
  REGION 1..11: note = Description of Artificial Sequence: Synthetic peptide
AAWDDSLNGWV

SEQ ID NO: 19477 - DNA, 27 bp, synthetic construct
  misc_feature 1..27: note = Description of Artificial Sequence: Synthetic oligonucleotide
  source 1..27: mol_type = other DNA
caggcgtgggacagcagcactgtggta

SEQ ID NO: 19478 - protein, 9 aa, synthetic construct
  REGION 1..9: note = Description of Artificial Sequence: Synthetic peptide
QAWDSSTVV

SEQ ID NO: 19479 - DNA, 27 bp, synthetic construct
  misc_feature 1..27: note = Description of Artificial Sequence: Synthetic oligonucleotide
  source 1..27: mol_type = other DNA
caggcgtgggacagcagcactgtggta

SEQ ID NO: 19480 - protein, 9 aa, synthetic construct
  REGION 1..9: note = Description of Artificial Sequence: Synthetic peptide
QAWDSSTVV

SEQ ID NO: 19481 - DNA, 27 bp, synthetic construct
  misc_feature 1..27: note = Description of Artificial Sequence: Synthetic oligonucleotide
  source 1..27: mol_type = other DNA
caggcgtgggacagcagcactgtggta

SEQ ID NO: 19482 - protein, 9 aa, synthetic construct
  REGION 1..9: note = Description of Artificial Sequence: Synthetic peptide
QAWDSSTVV

SEQ ID NO: 19483 - DNA, 24 bp, synthetic construct
  misc_feature 1..24: note = Description of Artificial Sequence: Synthetic oligonucleotide
  source 1..24: mol_type = other DNA
caggcgtgggacagcagcactgca

SEQ ID NO: 19484 - protein, 8 aa, synthetic construct
  REGION 1..8: note = Description of Artificial Sequence: Synthetic peptide
QAWDSSTA

SEQ ID NO: 19485 - DNA, 33 bp, synthetic construct
  misc_feature 1..33: note = Description of Artificial Sequence: Synthetic oligonucleotide
  source 1..33: mol_type = other DNA
ggaacatgggatatcagtctgagtgttggggta

SEQ ID NO: 19486 - protein, 11 aa, synthetic construct
  REGION 1..11: note = Description of Artificial Sequence: Synthetic peptide
GTWDISLSVGV

SEQ ID NO: 19487 - DNA, 27 bp, synthetic construct
  misc_feature 1..27: note = Description of Artificial Sequence: Synthetic oligonucleotide
  source 1..27: mol_type = other DNA
caggcgtggaacaactacactgtggta

SEQ ID NO: 19488 - protein, 9 aa, synthetic construct
  REGION 1..9: note = Description of Artificial Sequence: Synthetic peptide
QAWNNYTVV

SEQ ID NO: 19489 - DNA, 27 bp, synthetic construct
  misc_feature 1..27: note = Description of Artificial Sequence: Synthetic oligonucleotide
  source 1..27: mol_type = other DNA
caggcgtgggacagcagcactgtggta

SEQ ID NO: 19490 - protein, 9 aa, synthetic construct
  REGION 1..9: note = Description of Artificial Sequence: Synthetic peptide
QAWDSSTVV

SEQ ID NO: 19491 - DNA, 27 bp, synthetic construct
  misc_feature 1..27: note = Description of Artificial Sequence: Synthetic oligonucleotide
  source 1..27: mol_type = other DNA
caggcgtgggacagcagcactgtggta

SEQ ID NO: 19492 - protein, 9 aa, synthetic construct
  REGION 1..9: note = Description of Artificial Sequence: Synthetic peptide
QAWDSSTVV

SEQ ID NO: 19493 - DNA, 27 bp, synthetic construct
  misc_feature 1..27: note = Description of Artificial Sequence: Synthetic oligonucleotide
  source 1..27: mol_type = other DNA
caggcgtggaacaacaacactgtaatg

SEQ ID NO: 19494 - protein, 9 aa, synthetic construct
  REGION 1..9: note = Description of Artificial Sequence: Synthetic peptide
QAWNNNTVM

SEQ ID NO: 19495 - DNA, 27 bp, synthetic construct
  misc_feature 1..27: note = Description of Artificial Sequence: Synthetic oligonucleotide
  source 1..27: mol_type = other DNA
caggcgtgggacaacaacactgtggtc

SEQ ID NO: 19496 - protein, 9 aa, synthetic construct
  REGION 1..9: note = Description of Artificial Sequence: Synthetic peptide
QAWDNNTVV

SEQ ID NO: 19497 - DNA, 30 bp, synthetic construct; identical to SEQ ID NO: 16215
  misc_feature 1..30: note = Description of Artificial Sequence: Synthetic oligonucleotide
  source 1..30: mol_type = other DNA

SEQ ID NO: 19498 - protein, 10 aa, synthetic construct
  REGION 1..10: note = Description of Artificial Sequence: Synthetic peptide
QAWDSSTYVV

SEQ ID NO: 19499 - DNA, 27 bp, synthetic construct
  misc_feature 1..27: note = Description of Artificial Sequence: Synthetic oligonucleotide
  source 1..27: mol_type = other DNA
caggcgtgggacagcagcactgtggta

SEQ ID NO: 19500 - protein, 9 aa, synthetic construct
  REGION 1..9: note = Description of Artificial Sequence: Synthetic peptide
QAWDSSTVV

SEQ ID NO: 19501 - DNA, 27 bp, synthetic construct
  misc_feature 1..27: note = Description of Artificial Sequence: Synthetic oligonucleotide
  source 1..27: mol_type = other DNA
caggcgtgggacaacaacactgtggtc

SEQ ID NO: 19502 - protein, 9 aa, synthetic construct
  REGION 1..9: note = Description of Artificial Sequence: Synthetic peptide
QAWDNNTVV

SEQ ID NO: 19503 - DNA, 24 bp, synthetic construct
  misc_feature 1..24: note = Description of Artificial Sequence: Synthetic oligonucleotide
  source 1..24: mol_type = other DNA
caggcgtgggacagcagcactgct

SEQ ID NO: 19504 - protein, 8 aa, synthetic construct
  REGION 1..8: note = Description of Artificial Sequence: Synthetic peptide
QAWDSSTA

SEQ ID NO: 19505 - DNA, 27 bp, synthetic construct
  misc_feature 1..27: note = Description of Artificial Sequence: Synthetic oligonucleotide
  source 1..27: mol_type = other DNA
caggcgtgggacagcagcactgtggtt

SEQ ID NO: 19506 - protein, 9 aa, synthetic construct
  REGION 1..9: note = Description of Artificial Sequence: Synthetic peptide
QAWDSSTVV

SEQ ID NO: 19507 - DNA, 27 bp, synthetic construct
  misc_feature 1..27: note = Description of Artificial Sequence: Synthetic oligonucleotide
  source 1..27: mol_type = other DNA
caggcgtgggacagcagcactgcggta

SEQ ID NO: 19508 - protein, 9 aa, synthetic construct
  REGION 1..9: note = Description of Artificial Sequence: Synthetic peptide
QAWDSSTAV

SEQ ID NO: 19509 - DNA, 27 bp, synthetic construct
  misc_feature 1..27: note = Description of Artificial Sequence: Synthetic oligonucleotide
  source 1..27: mol_type = other DNA
caggcgtgggacagcagcactgcggta

SEQ ID NO: 19510 - protein, 9 aa, synthetic construct
  REGION 1..9: note = Description of Artificial Sequence: Synthetic peptide
QAWDSSTAV

SEQ ID NO: 19511 - DNA, 27 bp, synthetic construct
  misc_feature 1..27: note = Description of Artificial Sequence: Synthetic oligonucleotide
  source 1..27: mol_type = other DNA
caggcgtgggacagcagcactgcggta

SEQ ID NO: 19512 - protein, 9 aa, synthetic construct
  REGION 1..9: note = Description of Artificial Sequence: Synthetic peptide
QAWDSSTAV

SEQ ID NO: 19513 - DNA, 27 bp, synthetic construct
  misc_feature 1..27: note = Description of Artificial Sequence: Synthetic oligonucleotide
  source 1..27: mol_type = other DNA
caggcgtgggacagcagcactgcggta

SEQ ID NO: 19514 - protein, 9 aa, synthetic construct
  REGION 1..9: note = Description of Artificial Sequence: Synthetic peptide
QAWDSSTAV

SEQ ID NO: 19515 - DNA, 27 bp, synthetic construct
  misc_feature 1..27: note = Description of Artificial Sequence: Synthetic oligonucleotide
  source 1..27: mol_type = other DNA
caggcgtgggacagcagcactgcggta

SEQ ID NO: 19516 - protein, 9 aa, synthetic construct
  REGION 1..9: note = Description of Artificial Sequence: Synthetic peptide
QAWDSSTAV

SEQ ID NO: 19517 - DNA, 27 bp, synthetic construct
  misc_feature 1..27: note = Description of Artificial Sequence: Synthetic oligonucleotide
  source 1..27: mol_type = other DNA
cagtcttatgatggcatcaatgtggta

SEQ ID NO: 19518 - protein, 9 aa, synthetic construct
  REGION 1..9: note = Description of Artificial Sequence: Synthetic peptide
QSYDGINVV

SEQ ID NO: 19519 - DNA, 27 bp, synthetic construct
  misc_feature 1..27: note = Description of Artificial Sequence: Synthetic oligonucleotide
  source 1..27: mol_type = other DNA
cagtcttatgatagcatcaatgtggta

SEQ ID NO: 19520 - protein, 9 aa, synthetic construct
  REGION 1..9: note = Description of Artificial Sequence: Synthetic peptide
QSYDSINVV

SEQ ID NO: 19521 - DNA, 27 bp, synthetic construct
  misc_feature 1..27: note = Description of Artificial Sequence: Synthetic oligonucleotide
  source 1..27: mol_type = other DNA
caggcgtgggacaacagcactgtggta

SEQ ID NO: 19522 - protein, 9 aa, synthetic construct
  REGION 1..9: note = Description of Artificial Sequence: Synthetic peptide
QAWDNSTVV

SEQ ID NO: 19523 - DNA, 27 bp, synthetic construct
  misc_feature 1..27: note = Description of Artificial Sequence: Synthetic oligonucleotide
  source 1..27: mol_type = other DNA
caggcgtgggacatcaacactgcggta

SEQ ID NO: 19524 - protein, 9 aa, synthetic construct
  REGION 1..9: note = Description of Artificial Sequence: Synthetic peptide
QAWDINTAV

SEQ ID NO: 19525 - DNA, 27 bp, synthetic construct
  misc_feature 1..27: note = Description of Artificial Sequence: Synthetic oligonucleotide
  source 1..27: mol_type = other DNA
caggcgtgggacaacagcactgtggta

SEQ ID NO: 19526 - protein, 9 aa, synthetic construct
  REGION 1..9: note = Description of Artificial Sequence: Synthetic peptide
QAWDNSTVV

SEQ ID NO: 19527 - DNA, 27 bp, synthetic construct
  misc_feature 1..27: note = Description of Artificial Sequence: Synthetic oligonucleotide
  source 1..27: mol_type = other DNA
caggcgtgggacaacagcactgtggta

SEQ ID NO: 19528 - protein, 9 aa, synthetic construct
  REGION 1..9: note = Description of Artificial Sequence: Synthetic peptide
QAWDNSTVV

SEQ ID NO: 19529 - DNA, 27 bp, synthetic construct
  misc_feature 1..27: note = Description of Artificial Sequence: Synthetic oligonucleotide
  source 1..27: mol_type = other DNA
caggcgtgggacaacagcactgtggta

SEQ ID NO: 19530 - protein, 9 aa, synthetic construct
  REGION 1..9: note = Description of Artificial Sequence: Synthetic peptide
QAWDNSTVV

SEQ ID NO: 19531 - DNA, 27 bp, synthetic construct
  misc_feature 1..27: note = Description of Artificial Sequence: Synthetic oligonucleotide
  source 1..27: mol_type = other DNA
caggcgtgggacaacagcactgtggta

SEQ ID NO: 19532 - protein, 9 aa, synthetic construct
  REGION 1..9: note = Description of Artificial Sequence: Synthetic peptide
QAWDNSTVV

SEQ ID NO: 19533 - DNA, 27 bp, synthetic construct
  misc_feature 1..27: note = Description of Artificial Sequence: Synthetic oligonucleotide
  source 1..27: mol_type = other DNA
caggcgtgggtcaacagcactgtggta

SEQ ID NO: 19534 - protein, 9 aa, synthetic construct
  REGION 1..9: note = Description of Artificial Sequence: Synthetic peptide
QAWVNSTVV

SEQ ID NO: 19535 - DNA, 27 bp, synthetic construct
  misc_feature 1..27: note = Description of Artificial Sequence: Synthetic oligonucleotide
  source 1..27: mol_type = other DNA
caggcgtgggacaacagcactgtggta

SEQ ID NO: 19536 - protein, 9 aa, synthetic construct
  REGION 1..9: note = Description of Artificial Sequence: Synthetic peptide
QAWDNSTVV

SEQ ID NO: 19537 - DNA, 27 bp, synthetic construct
  misc_feature 1..27: note = Description of Artificial Sequence: Synthetic oligonucleotide
  source 1..27: mol_type = other DNA
caggcgtgggacagcagcactgcggta

SEQ ID NO: 19538 - protein, 9 aa, synthetic construct
  REGION 1..9: note = Description of Artificial Sequence: Synthetic peptide
QAWDSSTAV

SEQ ID NO: 19539 - DNA, 30 bp, synthetic construct
  misc_feature 1..30: note = Description of Artificial Sequence: Synthetic oligonucleotide
  source 1..30: mol_type = other DNA
gttctatatatgggtagtgccatttgggtg

SEQ ID NO: 19540 - protein, 10 aa, synthetic construct
  REGION 1..10: note = Description of Artificial Sequence: Synthetic peptide
VLYMGSAIWV

SEQ ID NO: 19541 - DNA, 27 bp, synthetic construct
  misc_feature 1..27: note = Description of Artificial Sequence: Synthetic oligonucleotide
  source 1..27: mol_type = other DNA
caggcgtgggacagcagcactgcggta

SEQ ID NO: 19542 - protein, 9 aa, synthetic construct
  REGION 1..9: note = Description of Artificial Sequence: Synthetic peptide
QAWDSSTAV

SEQ ID NO: 19543 - DNA, 24 bp, synthetic construct
  misc_feature 1..24: note = Description of Artificial Sequence: Synthetic oligonucleotide
  source 1..24: mol_type = other DNA
caggcgtgggacagcagcactgta

SEQ ID NO: 19544 - protein, 8 aa, synthetic construct
  REGION 1..8: note = Description of Artificial Sequence: Synthetic peptide
QAWDSSTV

SEQ ID NO: 19545 - DNA, 27 bp, synthetic construct
  misc_feature 1..27: note = Description of Artificial Sequence: Synthetic oligonucleotide
  source 1..27: mol_type = other DNA
caggcgtgggacagcagtcctgtgata

SEQ ID NO: 19546 - protein, 9 aa, synthetic construct
  REGION 1..9: note = Description of Artificial Sequence: Synthetic peptide
QAWDSSPVI

SEQ ID NO: 19547 - DNA, 27 bp, synthetic construct
  misc_feature 1..27: note = Description of Artificial Sequence: Synthetic oligonucleotide
  source 1..27: mol_type = other DNA
caggcgtgggacagcagtactgcggta

SEQ ID NO: 19548 - protein, 9 aa, synthetic construct
  REGION 1..9: note = Description of Artificial Sequence: Synthetic peptide
QAWDSSTAV

SEQ ID NO: 19549 - DNA, 30 bp, synthetic construct
  misc_feature 1..30: note = Description of Artificial Sequence: Synthetic oligonucleotide
  source 1..30: mol_type = other DNA
ctgctctactatggtggtgctcaactggta

SEQ ID NO: 19550 - protein, 10 aa, synthetic construct
  REGION 1..10: note = Description of Artificial Sequence: Synthetic peptide
LLYYGGAQLV

SEQ ID NO: 19551 - DNA, 27 bp, synthetic construct
  misc_feature 1..27: note = Description of Artificial Sequence: Synthetic oligonucleotide
  source 1..27: mol_type = other DNA
caggcgtgggacagcagccctgtgata

SEQ ID NO: 19552 - protein, 9 aa, synthetic construct
  REGION 1..9: note = Description of Artificial Sequence: Synthetic peptide
QAWDSSPVI

SEQ ID NO: 19553 - DNA, 27 bp, synthetic construct
  misc_feature 1..27: note = Description of Artificial Sequence: Synthetic oligonucleotide
  source 1..27: mol_type = other DNA
caggcgtgggacagcaccactgtggta

SEQ ID NO: 19554 - protein, 9 aa, synthetic construct
  REGION 1..9: note = Description of Artificial Sequence: Synthetic peptide
QAWDSTTVV

SEQ ID NO: 19555 - DNA, 30 bp, synthetic construct
  misc_feature 1..30: note = Description of Artificial Sequence: Synthetic oligonucleotide
  source 1..30: mol_type = other DNA
ctcctctactatggtggtgctcagctgatg

SEQ ID NO: 19556 - protein, 10 aa, synthetic construct
  REGION 1..10: note = Description of Artificial Sequence: Synthetic peptide
LLYYGGAQLM

SEQ ID NO: 19557 - DNA, 27 bp, synthetic construct
  misc_feature 1..27: note = Description of Artificial Sequence: Synthetic oligonucleotide
  source 1..27: mol_type = other DNA
caggcgtgggacagcagccctgtgata

SEQ ID NO: 19558 - protein, 9 aa, synthetic construct
  REGION 1..9: note = Description of Artificial Sequence: Synthetic peptide
QAWDSSPVI

SEQ ID NO: 19559 - DNA, 27 bp, synthetic construct
  misc_feature 1..27: note = Description of Artificial Sequence: Synthetic oligonucleotide
  source 1..27: mol_type = other DNA
caggcgtgggacagcagccctgtgata

SEQ ID NO: 19560 - protein, 9 aa, synthetic construct
  REGION 1..9: note = Description of Artificial Sequence: Synthetic peptide
QAWDSSPVI

SEQ ID NO: 19561 - DNA, 24 bp, synthetic construct
  misc_feature 1..24: note = Description of Artificial Sequence: Synthetic oligonucleotide
  source 1..24: mol_type = other DNA
caggcgtgggacagcagcactgta

SEQ ID NO: 19562 - protein, 8 aa, synthetic construct
  REGION 1..8: note = Description of Artificial Sequence: Synthetic peptide
QAWDSSTV

SEQ ID NO: 19563 - DNA, 27 bp, synthetic construct
  misc_feature 1..27: note = Description of Artificial Sequence: Synthetic oligonucleotide
  source 1..27: mol_type = other DNA
caggcgtgggacagcacccctgtgata

SEQ ID NO: 19564 - protein, 9 aa, synthetic construct
  REGION 1..9: note = Description of Artificial Sequence: Synthetic peptide
QAWDSTPVI

SEQ ID NO: 19565 - DNA, 27 bp, synthetic construct
  misc_feature 1..27: note = Description of Artificial Sequence: Synthetic oligonucleotide
  source 1..27: mol_type = other DNA
caggcgtgggacagcagcactgtggta

SEQ ID NO: 19566 - protein, 9 aa, synthetic construct
  REGION 1..9: note = Description of Artificial Sequence: Synthetic peptide
QAWDSSTVV

SEQ ID NO: 19567 - DNA, 27 bp, synthetic construct
  misc_feature 1..27: note = Description of Artificial Sequence: Synthetic oligonucleotide
  source 1..27: mol_type = other DNA
caggcgtggcacagcagcactgtggta

SEQ ID NO: 19568 - protein, 9 aa, synthetic construct
  REGION 1..9: note = Description of Artificial Sequence: Synthetic peptide
QAWHSSTVV

SEQ ID NO: 19569 - DNA, 27 bp, synthetic construct
  misc_feature 1..27: note = Description of Artificial Sequence: Synthetic oligonucleotide
  source 1..27: mol_type = other DNA
caggcgtgggacatcagaactgtggta

SEQ ID NO: 19570 - protein, 9 aa, synthetic construct
  REGION 1..9: note = Description of Artificial Sequence: Synthetic peptide
QAWDIRTVV

SEQ ID NO: 19571 - DNA, 27 bp, synthetic construct
  misc_feature 1..27: note = Description of Artificial Sequence: Synthetic oligonucleotide
  source 1..27: mol_type = other DNA
caggcgtgggacagtagaactgcggta

SEQ ID NO: 19572 - protein, 9 aa, synthetic construct
  REGION 1..9: note = Description of Artificial Sequence: Synthetic peptide
QAWDSRTAV

SEQ ID NO: 19573 - DNA, 30 bp, synthetic construct
  misc_feature 1..30: note = Description of Artificial Sequence: Synthetic oligonucleotide
  source 1..30: mol_type = other DNA
caggcgtgggacaacagcactgctgtggta

SEQ ID NO: 19574 - protein, 10 aa, synthetic construct
  REGION 1..10: note = Description of Artificial Sequence: Synthetic peptide
QAWDNSTAVV

SEQ ID NO: 19575 - DNA, 30 bp, synthetic construct
  misc_feature 1..30: note = Description of Artificial Sequence: Synthetic oligonucleotide
  source 1..30: mol_type = other DNA
gtgctttatatgggtagtggcatttgggtg

SEQ ID NO: 19576 - protein, 10 aa, synthetic construct
  REGION 1..10: note = Description of Artificial Sequence: Synthetic peptide
VLYMGSGIWV

SEQ ID NO: 19577 - DNA, 27 bp, synthetic construct
  misc_feature 1..27: note = Description of Artificial Sequence: Synthetic oligonucleotide
  source 1..27: mol_type = other DNA
caggcgtgggacagccgcactgtggta

SEQ ID NO: 19578 - protein, 9 aa, synthetic construct
  REGION 1..9: note = Description of Artificial Sequence: Synthetic peptide
QAWDSRTVV

SEQ ID NO: 19579 - DNA, 27 bp, synthetic construct
  misc_feature 1..27: note = Description of Artificial Sequence: Synthetic oligonucleotide
  source 1..27: mol_type = other DNA
caggcgtgggacagcaggaaagtggta

SEQ ID NO: 19580 - protein, 9 aa, synthetic construct
  REGION 1..9: note = Description of Artificial Sequence: Synthetic peptide
QAWDSRKVV

SEQ ID NO: 19581 - DNA, 24 bp, synthetic construct
  misc_feature 1..24: note = Description of Artificial Sequence: Synthetic oligonucleotide
  source 1..24: mol_type = other DNA
caggcgtgggacagcagcacggta

SEQ ID NO: 19582 - protein, 8 aa, synthetic construct
  REGION 1..8: note = Description of Artificial Sequence: Synthetic peptide
QAWDSSTV

SEQ ID NO: 19583 - DNA, 27 bp, synthetic construct
  misc_feature 1..27: note = Description of Artificial Sequence: Synthetic oligonucleotide
  source 1..27: mol_type = other DNA
caggcgtgggacagcagcactgcggta

SEQ ID NO: 19584 - protein, 9 aa, synthetic construct
  REGION 1..9: note = Description of Artificial Sequence: Synthetic peptide
QAWDSSTAV

SEQ ID NO: 19585 - DNA, 30 bp, synthetic construct
  misc_feature 1..30: note = Description of Artificial Sequence: Synthetic oligonucleotide
  source 1..30: mol_type = other DNA
ctgctctactatggtggtgctcaggtggca

SEQ ID NO: 19586 - protein, 10 aa, synthetic construct
  REGION 1..10: note = Description of Artificial Sequence: Synthetic peptide
LLYYGGAQVA

SEQ ID NO: 19587 - DNA, 33 bp, synthetic construct
  misc_feature 1..33: note = Description of Artificial Sequence: Synthetic oligonucleotide
  source 1..33: mol_type = other DNA
ggaacatgggatagcagactgaatgttggggta

SEQ ID NO: 19588 - protein, 11 aa, synthetic construct
  REGION 1..11: note = Description of Artificial Sequence: Synthetic peptide
GTWDSRLNVGV

SEQ ID NO: 19589 - DNA, 27 bp, synthetic construct
  misc_feature 1..27: note = Description of Artificial Sequence: Synthetic oligonucleotide
  source 1..27: mol_type = other DNA
aaggcgtgggacagcagcactgtggta

SEQ ID NO: 19590 - protein, 9 aa, synthetic construct
  REGION 1..9: note = Description of Artificial Sequence: Synthetic peptide
KAWDSSTVV

SEQ ID NO: 19591 - DNA, 36 bp, synthetic construct
  misc_feature 1..36: note = Description of Artificial Sequence: Synthetic oligonucleotide
  source 1..36: mol_type = other DNA
aactcccgggacagcagtggtaaccatcttgtacta

SEQ ID NO: 19592 - protein, 12 aa, synthetic construct
  REGION 1..12: note = Description of Artificial Sequence: Synthetic peptide
NSRDSSGNHLVL

SEQ ID NO: 19593 - DNA, 33 bp, synthetic construct
  misc_feature 1..33: note = Description of Artificial Sequence: Synthetic oligonucleotide
  source 1..33: mol_type = other DNA
ggaacatgggatagcagcctgagtactgtggta

SEQ ID NO: 19594 - protein, 11 aa, synthetic construct
  REGION 1..11: note = Description of Artificial Sequence: Synthetic peptide
GTWDSSLSTVV

SEQ ID NO: 19595 - DNA, 33 bp, synthetic construct
  misc_feature 1..33: note = Description of Artificial Sequence: Synthetic oligonucleotide
  source 1..33: mol_type = other DNA
ggaacatgggatagcagcctgagtgctggggtt

SEQ ID NO: 19596 - protein, 11 aa, synthetic construct
  REGION 1..11: note = Description of Artificial Sequence: Synthetic peptide
GTWDSSLSAGV

SEQ ID NO: 19597 - DNA, 36 bp, synthetic construct
  misc_feature 1..36: note = Description of Artificial Sequence: Synthetic oligonucleotide
  source 1..36: mol_type = other DNA
aactcccgggacagcagtggtaaccatcttgtggta

SEQ ID NO: 19598 - protein, 12 aa, synthetic construct
  REGION 1..12: note = Description of Artificial Sequence: Synthetic peptide
NSRDSSGNHLVV

SEQ ID NO: 19599 - DNA, 33 bp, synthetic construct
  misc_feature 1..33: note = Description of Artificial Sequence: Synthetic oligonucleotide
  source 1..33: mol_type = other DNA
ggaacatgggatcgcaccctgagtgattgggta

SEQ ID NO: 19600 - protein, 11 aa, synthetic construct
  REGION 1..11: note = Description of Artificial Sequence: Synthetic peptide
GTWDRTLSDWV

SEQ ID NO: 19601 - DNA, 33 bp, synthetic construct
  misc_feature 1..33: note = Description of Artificial Sequence: Synthetic oligonucleotide
  source 1..33: mol_type = other DNA
ggaacatgggatggcagactgaatgttggggta

SEQ ID NO: 19602 - protein, 11 aa, synthetic construct
  REGION 1..11: note = Description of Artificial Sequence: Synthetic peptide
GTWDGRLNVGV

SEQ ID NO: 19603 - DNA, 33 bp, synthetic construct
  misc_feature 1..33: note = Description of Artificial Sequence: Synthetic oligonucleotide
  source 1..33: mol_type = other DNA
ggaacatgggatagtagtctgagtactgtggta

SEQ ID NO: 19604 - protein, 11 aa, synthetic construct
  REGION 1..11: note = Description of Artificial Sequence: Synthetic peptide
GTWDSSLSTVV

SEQ ID NO: 19605 - DNA, 27 bp, synthetic construct
  misc_feature 1..27: note = Description of Artificial Sequence: Synthetic oligonucleotide
  source 1..27: mol_type = other DNA
caggcgtgggacagcagcactgtggta

SEQ ID NO: 19606 - protein, 9 aa, synthetic construct
  REGION 1..9: note = Description of Artificial Sequence: Synthetic peptide
QAWDSSTVV

SEQ ID NO: 19607 - DNA, 36 bp, synthetic construct; identical to SEQ ID NO: 19597
  misc_feature 1..36: note = Description of Artificial Sequence: Synthetic oligonucleotide
  source 1..36: mol_type = other DNA

SEQ ID NO: 19608 - protein, 12 aa, synthetic construct
  REGION 1..12: note = Description of Artificial Sequence: Synthetic peptide
NSRDSSGNHLVV

SEQ ID NO: 19609 - DNA, 33 bp, synthetic construct; identical to SEQ ID NO: 19587
  misc_feature 1..33: note = Description of Artificial Sequence: Synthetic oligonucleotide
  source 1..33: mol_type = other DNA

SEQ ID NO: 19610 - protein, 11 aa, synthetic construct
  REGION 1..11: note = Description of Artificial Sequence: Synthetic peptide
GTWDSRLNVGV

SEQ ID NO: 19611 - DNA, 30 bp, synthetic construct
  misc_feature 1..30: note = Description of Artificial Sequence: Synthetic oligonucleotide
  source 1..30: mol_type = other DNA
ctgctctactgtggtggtgctcagctggtg

SEQ ID NO: 19612 - protein, 10 aa, synthetic construct
  REGION 1..10: note = Description of Artificial Sequence: Synthetic peptide
LLYCGGAQLV

SEQ ID NO: 19613 - DNA, 33 bp, synthetic construct
  misc_feature 1..33: note = Description of Artificial Sequence: Synthetic oligonucleotide
  source 1..33: mol_type = other DNA
ggaacatgggatagcagcctgaatactggggta

SEQ ID NO: 19614 - protein, 11 aa, synthetic construct
  REGION 1..11: note = Description of Artificial Sequence: Synthetic peptide
GTWDSSLNTGV

SEQ ID NO: 19615 - DNA, 30 bp, synthetic construct
  misc_feature 1..30: note = Description of Artificial Sequence: Synthetic oligonucleotide
  source 1..30: mol_type = other DNA
atgctctactgtggtggtgctcagctggtg

SEQ ID NO: 19616 - protein, 10 aa, synthetic construct
  REGION 1..10: note = Description of Artificial Sequence: Synthetic peptide
MLYCGGAQLV

SEQ ID NO: 19617 - DNA, 36 bp, synthetic construct; identical to SEQ ID NO: 19597
  misc_feature 1..36: note = Description of Artificial Sequence: Synthetic oligonucleotide
  source 1..36: mol_type = other DNA

SEQ ID NO: 19618 - protein, 12 aa, synthetic construct
  REGION 1..12: note = Description of Artificial Sequence: Synthetic peptide
NSRDSSGNHLVV

SEQ ID NO: 19619 - DNA, 36 bp, synthetic construct
  misc_feature 1..36: note = Description of Artificial Sequence: Synthetic oligonucleotide
  source 1..36: mol_type = other DNA
aactcccgggacagctgtggtaaccatcttgtggta

SEQ ID NO: 19620 - protein, 12 aa, synthetic construct
  REGION 1..12: note = Description of Artificial Sequence: Synthetic peptide
NSRDSCGNHLVV

SEQ ID NO: 19621 - DNA, 33 bp, synthetic construct
  misc_feature 1..33: note = Description of Artificial Sequence: Synthetic oligonucleotide
  source 1..33: mol_type = other DNA
ggaacatgggatagcagcctgagtgtttgtgtc

SEQ ID NO: 19622 - protein, 11 aa, synthetic construct
  REGION 1..11: note = Description of Artificial Sequence: Synthetic peptide
GTWDSSLSVCV

SEQ ID NO: 19623 - DNA, 27 bp, synthetic construct
  misc_feature 1..27: note = Description of Artificial Sequence: Synthetic oligonucleotide
  source 1..27: mol_type = other DNA
atgatttggcacagcagcgctgtggta

SEQ ID NO: 19624 - protein, 9 aa, synthetic construct
  REGION 1..9: note = Description of Artificial Sequence: Synthetic peptide
MIWHSSAVV

SEQ ID NO: 19625 - DNA, 30 bp, synthetic construct
  misc_feature 1..30: note = Description of Artificial Sequence: Synthetic oligonucleotide
  source 1..30: mol_type = other DNA
ctgatcttctatggtggtgtacatgtgata

SEQ ID NO: 19626 - protein, 10 aa, synthetic construct
  REGION 1..10: note = Description of Artificial Sequence: Synthetic peptide
LIFYGGVHVI

SEQ ID NO: 19627 - DNA, 33 bp, synthetic construct
  misc_feature 1..33: note = Description of Artificial Sequence: Synthetic oligonucleotide
  source 1..33: mol_type = other DNA
ggaacatgggatagcagcctgagtgctggggta

SEQ ID NO: 19628 - protein, 11 aa, synthetic construct
  REGION 1..11: note = Description of Artificial Sequence: Synthetic peptide
GTWDSSLSAGV

SEQ ID NO: 19629 - DNA, 30 bp, synthetic construct
  misc_feature 1..30: note = Description of Artificial Sequence: Synthetic oligonucleotide
  source 1..30: mol_type = other DNA
ctgctatactatggtggtgctcagctggtg

SEQ ID NO: 19630 - protein, 10 aa, synthetic construct
  REGION 1..10: note = Description of Artificial Sequence: Synthetic peptide
LLYYGGAQLV

SEQ ID NO: 19631 - DNA, 33 bp, synthetic construct
  misc_feature 1..33: note = Description of Artificial Sequence: Synthetic oligonucleotide
  source 1..33: mol_type = other DNA
gcagcgtgggatgacagcctgaatggttgggtg

SEQ ID NO: 19632 - protein, 11 aa, synthetic construct
  REGION 1..11: note = Description of Artificial Sequence: Synthetic peptide
AAWDDSLNGWV

SEQ ID NO: 19633 - DNA, 30 bp, synthetic construct
  misc_feature 1..30: note = Description of Artificial Sequence: Synthetic oligonucleotide
  source 1..30: mol_type = other DNA
ctgttctactatggtggtgctcaggtgata

SEQ ID NO: 19634 - protein, 10 aa, synthetic construct
  REGION 1..10: note = Description of Artificial Sequence: Synthetic peptide
LFYYGGAQVI

SEQ ID NO: 19635 - DNA, 30 bp, synthetic construct
  misc_feature 1..30: note = Description of Artificial Sequence: Synthetic oligonucleotide
  source 1..30: mol_type = other DNA
ctgctgtactatggtggtgctcagctgatg

SEQ ID NO: 19636 - protein, 10 aa, synthetic construct
  REGION 1..10: note = Description of Artificial Sequence: Synthetic peptide
LLYYGGAQLM

SEQ ID NO: 19637 - DNA, 33 bp, synthetic construct
  misc_feature 1..33: note = Description of Artificial Sequence: Synthetic oligonucleotide
  source 1..33: mol_type = other DNA
aattcccgggacagcagtggtaaccatctggta

SEQ ID NO: 19638 - protein, 11 aa, synthetic construct
  REGION 1..11: note = Description of Artificial Sequence: Synthetic peptide
NSRDSSGNHLV

SEQ ID NO: 19639 - DNA, 27 bp, synthetic construct
  misc_feature 1..27: note = Description of Artificial Sequence: Synthetic oligonucleotide
  source 1..27: mol_type = other DNA
caggcgtgggacagcagcactgcggta

SEQ ID NO: 19640 - protein, 9 aa, synthetic construct
  REGION 1..9: note = Description of Artificial Sequence: Synthetic peptide
QAWDSSTAV

SEQ ID NO: 19641 - DNA, 33 bp, synthetic construct
  misc_feature 1..33: note = Description of Artificial Sequence: Synthetic oligonucleotide
  source 1..33: mol_type = other DNA
ggaacatgggatcgcaccatgagtgattgggta

SEQ ID NO: 19642 - protein, 11 aa, synthetic construct
  REGION 1..11: note = Description of Artificial Sequence: Synthetic peptide
GTWDRTMSDWV

SEQ ID NO: 19643 - DNA, 30 bp, synthetic construct
  misc_feature 1..30: note = Description of Artificial Sequence: Synthetic oligonucleotide
  source 1..30: mol_type = other DNA
ctgatctactatggtggtgctcagctgatg

SEQ ID NO: 19644 - protein, 10 aa, synthetic construct
  REGION 1..10: note = Description of Artificial Sequence: Synthetic peptide
LIYYGGAQLM

SEQ ID NO: 19645 - DNA, 33 bp, synthetic construct; identical to SEQ ID NO: 19595
  misc_feature 1..33: note = Description of Artificial Sequence: Synthetic oligonucleotide
  source 1..33: mol_type = other DNA

SEQ ID NO: 19646 - protein, 11 aa, synthetic construct
  REGION 1..11: note = Description of Artificial Sequence: Synthetic peptide
GTWDSSLSAGV

SEQ ID NO: 19647 - DNA, 30 bp, synthetic construct
  misc_feature 1..30: note = Description of Artificial Sequence: Synthetic oligonucleotide
  source 1..30: mol_type = other DNA
ctgatctactatggtggtgctcagctggca

SEQ ID NO: 19648 - protein, 10 aa, synthetic construct
  REGION 1..10: note = Description of Artificial Sequence: Synthetic peptide
LIYYGGAQLA

SEQ ID NO: 19649 - DNA, 33 bp, synthetic construct
  misc_feature 1..33: note = Description of Artificial Sequence: Synthetic oligonucleotide
  source 1..33: mol_type = other DNA
ggaacatgggatagcagcctgagtgttggggta

SEQ ID NO: 19650 - protein, 11 aa, synthetic construct
  REGION 1..11: note = Description of Artificial Sequence: Synthetic peptide
GTWDSSLSVGV

SEQ ID NO: 19651 - DNA, 27 bp, synthetic construct
  misc_feature 1..27: note = Description of Artificial Sequence: Synthetic oligonucleotide
  source 1..27: mol_type = other DNA
caggcgtgggacagtgtcactgtggta

SEQ ID NO: 19652 - protein, 9 aa, synthetic construct
  REGION 1..9: note = Description of Artificial Sequence: Synthetic peptide
QAWDSVTVV

SEQ ID NO: 19653 - DNA, 33 bp, synthetic construct
  misc_feature 1..33: note = Description of Artificial Sequence: Synthetic oligonucleotide
  source 1..33: mol_type = other DNA
gcaacatgggatgacagcctgagtgtttgggtg

SEQ ID NO: 19654 - protein, 11 aa, synthetic construct
  REGION 1..11: note = Description of Artificial Sequence: Synthetic peptide
ATWDDSLSVWV

SEQ ID NO: 19655 - DNA, 27 bp, synthetic construct
  misc_feature 1..27: note = Description of Artificial Sequence: Synthetic oligonucleotide
  source 1..27: mol_type = other DNA
caggcgtgggacagaggaattgtggta

SEQ ID NO: 19656 - protein, 9 aa, synthetic construct
  REGION 1..9: note = Description of Artificial Sequence: Synthetic peptide
QAWDRGIVV

SEQ ID NO: 19657 - DNA, 33 bp, synthetic construct; identical to SEQ ID NO: 19641
  misc_feature 1..33: note = Description of Artificial Sequence: Synthetic oligonucleotide
  source 1..33: mol_type = other DNA

SEQ ID NO: 19658 - protein, 11 aa, synthetic construct
  REGION 1..11: note = Description of Artificial Sequence: Synthetic peptide
GTWDRTMSDWV

SEQ ID NO: 19659 - DNA, 30 bp, synthetic construct
  misc_feature 1..30: note = Description of Artificial Sequence: Synthetic oligonucleotide
  source 1..30: mol_type = other DNA
ctgattttctatggtggtgtacatgtgata

SEQ ID NO: 19660 - protein, 10 aa, synthetic construct
  REGION 1..10: note = Description of Artificial Sequence: Synthetic peptide
LIFYGGVHVI

SEQ ID NO: 19661 - DNA, 33 bp, synthetic construct
  misc_feature 1..33: note = Description of Artificial Sequence: Synthetic oligonucleotide
  source 1..33: mol_type = other DNA
ggaatatgggatcgcagtctgagtgttatggtg

SEQ ID NO: 19662 - protein, 11 aa, synthetic construct
  REGION 1..11: note = Description of Artificial Sequence: Synthetic peptide
GIWDRSLSVMV

SEQ ID NO: 19663 - DNA, 33 bp, synthetic construct
  misc_feature 1..33: note = Description of Artificial Sequence: Synthetic oligonucleotide
  source 1..33: mol_type = other DNA
gcagcatgggatgacagtatgaatggtccggtg

SEQ ID NO: 19664 - protein, 11 aa, synthetic construct
  REGION 1..11: note = Description of Artificial Sequence: Synthetic peptide
AAWDDSMNGPV

SEQ ID NO: 19665 - DNA, 30 bp, synthetic construct
  misc_feature 1..30: note = Description of Artificial Sequence: Synthetic oligonucleotide
  source 1..30: mol_type = other DNA
ctgctctactatggtggtgctcagctggtg

SEQ ID NO: 19666 - protein, 10 aa, synthetic construct
  REGION 1..10: note = Description of Artificial Sequence: Synthetic peptide
LLYYGGAQLV

SEQ ID NO: 19667 - DNA, 30 bp, synthetic construct; identical to SEQ ID NO: 19625
  misc_feature 1..30: note = Description of Artificial Sequence: Synthetic oligonucleotide
  source 1..30: mol_type = other DNA

SEQ ID NO: 19668 - protein, 10 aa, synthetic construct
  REGION 1..10: note = Description of Artificial Sequence: Synthetic peptide
LIFYGGVHVI

SEQ ID NO: 19669 - DNA, 33 bp, synthetic construct; identical to SEQ ID NO: 19621
  misc_feature 1..33: note = Description of Artificial Sequence: Synthetic oligonucleotide
  source 1..33: mol_type = other DNA

SEQ ID NO: 19670 - protein, 11 aa, synthetic construct
  REGION 1..11: note = Description of Artificial Sequence: Synthetic peptide
GTWDSSLSVCV

SEQ ID NO: 19671 - DNA, 30 bp, synthetic construct
  misc_feature 1..30: note = Description of Artificial Sequence: Synthetic oligonucleotide
  source 1..30: mol_type = other DNA
atgctttacagtggtggagctcagatggtg

SEQ ID NO: 19672 - protein, 10 aa, synthetic construct
  REGION 1..10: note = Description of Artificial Sequence: Synthetic peptide
MLYSGGAQMV

SEQ ID NO: 19673 - DNA, 33 bp, synthetic construct
  misc_feature 1..33: note = Description of Artificial Sequence: Synthetic oligonucleotide
  source 1..33: mol_type = other DNA
ggaacatgggatagcagcctgagtgcttgtgtc

SEQ ID NO: 19674 - protein, 11 aa, synthetic construct
  REGION 1..11: note = Description of Artificial Sequence: Synthetic peptide
GTWDSSLSACV

SEQ ID NO: 19675 - DNA, 33 bp, synthetic construct
  misc_feature 1..33: note = Description of Artificial Sequence: Synthetic oligonucleotide
  source 1..33: mol_type = other DNA
gcagcatgggatgacagcctgaatggtccggtg

SEQ ID NO: 19676 - protein, 11 aa, synthetic construct
  REGION 1..11: note = Description of Artificial Sequence: Synthetic peptide
AAWDDSLNGPV

SEQ ID NO: 19677 - DNA, 30 bp, synthetic construct
  misc_feature 1..30: note = Description of Artificial Sequence: Synthetic oligonucleotide
  source 1..30: mol_type = other DNA
ctgatctactatggtggtgctcagctggtg

SEQ ID NO: 19678 - protein, 10 aa, synthetic construct
  REGION 1..10: note = Description of Artificial Sequence: Synthetic peptide
LIYYGGAQLV

SEQ ID NO: 19679 - DNA, 33 bp, synthetic construct
  misc_feature 1..33: note = Description of Artificial Sequence: Synthetic oligonucleotide
  source 1..33: mol_type = other DNA
ggaacttgggatagcagcctgaatactggggta

SEQ ID NO: 19680 - protein, 11 aa, synthetic construct
  REGION 1..11: note = Description of Artificial Sequence: Synthetic peptide
GTWDSSLNTGV

SEQ ID NO: 19681 - DNA, 30 bp, synthetic construct; identical to SEQ ID NO: 19677
  misc_feature 1..30: note = Description of Artificial Sequence: Synthetic oligonucleotide
  source 1..30: mol_type = other DNA

SEQ ID NO: 19682 - protein, 10 aa, synthetic construct
  REGION 1..10: note = Description of Artificial Sequence: Synthetic peptide
LIYYGGAQLV

SEQ ID NO: 19683 - DNA, 30 bp, synthetic construct
  misc_feature 1..30: note = Description of Artificial Sequence: Synthetic oligonucleotide
  source 1..30: mol_type = other DNA
ctgctctattatggtggtgctcacctggca

SEQ ID NO: 19684 - protein, 10 aa, synthetic construct
  REGION 1..10: note = Description of Artificial Sequence: Synthetic peptide
LLYYGGAHLA

SEQ ID NO: 19685 - DNA, 27 bp, synthetic construct
  misc_feature 1..27: note = Description of Artificial Sequence: Synthetic oligonucleotide
  source 1..27: mol_type = other DNA
caggcgtgggacagcagcactgtggta

SEQ ID NO: 19686 - protein, 9 aa, synthetic construct
  REGION 1..9: note = Description of Artificial Sequence: Synthetic peptide
QAWDSSTVV

SEQ ID NO: 19687 - DNA, 27 bp, synthetic construct
  misc_feature 1..27: note = Description of Artificial Sequence: Synthetic oligonucleotide
  source 1..27: mol_type = other DNA
caggtgtgggacagcggcactgcggta

SEQ ID NO: 19688 - protein, 9 aa, synthetic construct
  REGION 1..9: note = Description of Artificial Sequence: Synthetic peptide
QVWDSGTAV

SEQ ID NO: 19689 - DNA, 27 bp, synthetic construct
  misc_feature 1..27: note = Description of Artificial Sequence: Synthetic oligonucleotide
  source 1..27: mol_type = other DNA
caggcgtgggacagcagcactgtggta

SEQ ID NO: 19690 - protein, 9 aa, synthetic construct
  REGION 1..9: note = Description of Artificial Sequence: Synthetic peptide
QAWDSSTVV

SEQ ID NO: 19691 - DNA, 27 bp, synthetic construct
  misc_feature 1..27: note = Description of Artificial Sequence: Synthetic oligonucleotide
  source 1..27: mol_type = other DNA
caggtgtgggacagcggcactgcggta

SEQ ID NO: 19692 - protein, 9 aa, synthetic construct
  REGION 1..9: note = Description of Artificial Sequence: Synthetic peptide
QVWDSGTAV

SEQ ID NO: 19693 - DNA, 27 bp, synthetic construct
  misc_feature 1..27: note = Description of Artificial Sequence: Synthetic oligonucleotide
  source 1..27: mol_type = other DNA
caggattgggacagcagcactgtggtg

SEQ ID NO: 19694 - protein, 9 aa, synthetic construct
  REGION 1..9: note = Description of Artificial Sequence: Synthetic peptide
QDWDSSTVV

SEQ ID NO: 19695 - DNA, 33 bp, synthetic construct; identical to SEQ ID NO: 19627
  misc_feature 1..33: note = Description of Artificial Sequence: Synthetic oligonucleotide
  source 1..33: mol_type = other DNA

SEQ ID NO: 19696 - protein, 11 aa, synthetic construct
  REGION 1..11: note = Description of Artificial Sequence: Synthetic peptide
GTWDSSLSAGV

SEQ ID NO: 19697 - DNA, 27 bp, synthetic construct
  misc_feature 1..27: note = Description of Artificial Sequence: Synthetic oligonucleotide
  source 1..27: mol_type = other DNA
caggattgggacagcagcactgtggtg

SEQ ID NO: 19698 - protein, 9 aa, synthetic construct
  REGION 1..9: note = Description of Artificial Sequence: Synthetic peptide
QDWDSSTVV

SEQ ID NO: 19699 - DNA, 30 bp, synthetic construct; identical to SEQ ID NO: 19665
  misc_feature 1..30: note = Description of Artificial Sequence: Synthetic oligonucleotide
  source 1..30: mol_type = other DNA

SEQ ID NO: 19700 - protein, 10 aa, synthetic construct
  REGION 1..10: note = Description of Artificial Sequence: Synthetic peptide
LLYYGGAQLV

SEQ ID NO: 19701 - DNA, 30 bp, synthetic construct
  misc_feature 1..30: note = Description of Artificial Sequence: Synthetic oligonucleotide
  source 1..30: mol_type = other DNA
agctcatataccagcagccgcactctggta

SEQ ID NO: 19702 - protein, 10 aa, synthetic construct
  REGION 1..10: note = Description of Artificial Sequence: Synthetic peptide
SSYTSSRTLV

SEQ ID NO: 19703 - DNA, 30 bp, synthetic construct
  misc_feature 1..30: note = Description of Artificial Sequence: Synthetic oligonucleotide
  source 1..30: mol_type = other DNA
aactcatatacaagcagcatcacttgggtg

SEQ ID NO: 19704 - protein, 10 aa, synthetic construct
  REGION 1..10: note = Description of Artificial Sequence: Synthetic peptide
NSYTSSITWV

SEQ ID NO: 19705 - DNA, 30 bp, synthetic construct
  misc_feature 1..30: note = Description of Artificial Sequence: Synthetic oligonucleotide
  source 1..30: mol_type = other DNA
ggctcatatgtaaaaggcatcacttgggtg

SEQ ID NO: 19706 - protein, 10 aa, synthetic construct
  REGION 1..10: note = Description of Artificial Sequence: Synthetic peptide
GSYVKGITWV

SEQ ID NO: 19707 - DNA, 30 bp, synthetic construct; identical to SEQ ID NO: 19703
  misc_feature 1..30: note = Description of Artificial Sequence: Synthetic oligonucleotide
  source 1..30: mol_type = other DNA

SEQ ID NO: 19708 - protein, 10 aa, synthetic construct
  REGION 1..10: note = Description of Artificial Sequence: Synthetic peptide
NSYTSSITWV

SEQ ID NO: 19709 - DNA, 27 bp, synthetic construct
  misc_feature 1..27: note = Description of Artificial Sequence: Synthetic oligonucleotide
  source 1..27: mol_type = other DNA
caggtgtgggacagcagtactgcggtg

SEQ ID NO: 19710 - protein, 9 aa, synthetic construct
  REGION 1..9: note = Description of Artificial Sequence: Synthetic peptide
QVWDSSTAV

SEQ ID NO: 19711 - DNA, 30 bp, synthetic construct
  misc_feature 1..30: note = Description of Artificial Sequence: Synthetic oligonucleotide
  source 1..30: mol_type = other DNA
caattagtgtacagcagtgatacttatgtc

SEQ ID NO: 19712 - protein, 10 aa, synthetic construct
  REGION 1..10: note = Description of Artificial Sequence: Synthetic peptide
QLVYSSDTYV

SEQ ID NO: 19713 - DNA, 30 bp, synthetic construct
  misc_feature 1..30: note = Description of Artificial Sequence: Synthetic oligonucleotide
  source 1..30: mol_type = other DNA
aactcatatacaagaagcatcacttgggtg

SEQ ID NO: 19714 - protein, 10 aa, synthetic construct
  REGION 1..10: note = Description of Artificial Sequence: Synthetic peptide
NSYTRSITWV

SEQ ID NO: 19715 - DNA, 30 bp, synthetic construct; identical to SEQ ID NO: 19665
  misc_feature 1..30: note = Description of Artificial Sequence: Synthetic oligonucleotide
  source 1..30: mol_type = other DNA

SEQ ID NO: 19716 - protein, 10 aa, synthetic construct
  REGION 1..10: note = Description of Artificial Sequence: Synthetic peptide
LLYYGGAQLV

SEQ ID NO: 19717 - DNA, 30 bp, synthetic construct
  misc_feature 1..30: note = Description of Artificial Sequence: Synthetic oligonucleotide
  source 1..30: mol_type = other DNA
ctgctctactatggtggtgctcagctggca

SEQ ID NO: 19718 - protein, 10 aa, synthetic construct
  REGION 1..10: note = Description of Artificial Sequence: Synthetic peptide
LLYYGGAQLA

SEQ ID NO: 19719 - DNA, 30 bp, synthetic construct; identical to SEQ ID NO: 19717
  misc_feature 1..30: note = Description of Artificial Sequence: Synthetic oligonucleotide
  source 1..30: mol_type = other DNA

SEQ ID NO: 19720 - protein, 10 aa, synthetic construct
  REGION 1..10: note = Description of Artificial Sequence: Synthetic peptide
LLYYGGAQLA

SEQ ID NO: 19721 - DNA, 30 bp, synthetic construct
  misc_feature 1..30: note = Description of Artificial Sequence: Synthetic oligonucleotide
  source 1..30: mol_type = other DNA
agctcatatacacgcagcatcacttgggtg

SEQ ID NO: 19722 - protein, 10 aa, synthetic construct
  REGION 1..10: note = Description of Artificial Sequence: Synthetic peptide
SSYTRSITWV

SEQ ID NO: 19723 - DNA, 30 bp, synthetic construct; identical to SEQ ID NO: 19705
  misc_feature 1..30: note = Description of Artificial Sequence: Synthetic oligonucleotide
  source 1..30: mol_type = other DNA

SEQ ID NO: 19724 - protein, 10 aa, synthetic construct
  REGION 1..10: note = Description of Artificial Sequence: Synthetic peptide
GSYVKGITWV

SEQ ID NO: 19725 - DNA, 30 bp, synthetic construct; identical to SEQ ID NO: 19703
  misc_feature 1..30: note = Description of Artificial Sequence: Synthetic oligonucleotide
  source 1..30: mol_type = other DNA

SEQ ID NO: 19726 - protein, 10 aa, synthetic construct
  REGION 1..10: note = Description of Artificial Sequence: Synthetic peptide
NSYTSSITWV

SEQ ID NO: 19727 - DNA, 30 bp, synthetic construct; identical to SEQ ID NO: 19703
  misc_feature 1..30: note = Description of Artificial Sequence: Synthetic oligonucleotide
  source 1..30: mol_type = other DNA

SEQ ID NO: 19728 - protein, 10 aa, synthetic construct
  REGION 1..10: note = Description of Artificial Sequence: Synthetic peptide
NSYTSSITWV

SEQ ID NO: 19729 - DNA, 30 bp, synthetic construct
  misc_feature 1..30: note = Description of Artificial Sequence: Synthetic oligonucleotide
  source 1..30: mol_type = other DNA
ctgctctactatggtggtgctcaggtggga

SEQ ID NO: 19730 - protein, 10 aa, synthetic construct
  REGION 1..10: note = Description of Artificial Sequence: Synthetic peptide
LLYYGGAQVG

SEQ ID NO: 19731 - DNA, 30 bp, synthetic construct
  misc_feature 1..30: note = Description of Artificial Sequence: Synthetic oligonucleotide
  source 1..30: mol_type = other DNA
ctgctctactatggtggtgctcatgtggta

SEQ ID NO: 19732 - protein, 10 aa, synthetic construct
  REGION 1..10: note = Description of Artificial Sequence: Synthetic peptide
LLYYGGAHVV

SEQ ID NO: 19733 - DNA, 30 bp, synthetic construct
  misc_feature 1..30: note = Description of Artificial Sequence: Synthetic oligonucleotide
  source 1..30: mol_type = other DNA
aactcatatacacgcagcatcacttgggtg

SEQ ID NO: 19734 - protein, 10 aa, synthetic construct
  REGION 1..10: note = Description of Artificial Sequence: Synthetic peptide
NSYTRSITWV

SEQ ID NO: 19735 - DNA, 30 bp, synthetic construct
  misc_feature 1..30: note = Description of Artificial Sequence: Synthetic oligonucleotide
  source 1..30: mol_type = other DNA
tgctcatatacaagaagaatcacttgggtg

SEQ ID NO: 19736 - protein, 10 aa, synthetic construct
  REGION 1..10: note = Description of Artificial Sequence: Synthetic peptide
CSYTRRITWV

SEQ ID NO: 19737 - DNA, 30 bp, synthetic construct
  misc_feature 1..30: note = Description of Artificial Sequence: Synthetic oligonucleotide
  source 1..30: mol_type = other DNA
ctgctctactttggtggtgctcagctggca

SEQ ID NO: 19738 - protein, 10 aa, synthetic construct
  REGION 1..10: note = Description of Artificial Sequence: Synthetic peptide
LLYFGGAQLA

SEQ ID NO: 19739 - DNA, 30 bp, synthetic construct; identical to SEQ ID NO: 19701
  misc_feature 1..30: note = Description of Artificial Sequence: Synthetic oligonucleotide
  source 1..30: mol_type = other DNA

SEQ ID NO: 19740 - protein, 10 aa, synthetic construct
  REGION 1..10: note = Description of Artificial Sequence: Synthetic peptide
SSYTSSRTLV

SEQ ID NO: 19741 - DNA, 30 bp, synthetic construct; identical to SEQ ID NO: 19731
  misc_feature 1..30: note = Description of Artificial Sequence: Synthetic oligonucleotide
  source 1..30: mol_type = other DNA

SEQ ID NO: 19742 - protein, 10 aa, synthetic construct
  REGION 1..10: note = Description of Artificial Sequence: Synthetic peptide
LLYYGGAHVV

SEQ ID NO: 19743 - DNA, 33 bp, synthetic construct
  misc_feature 1..33: note = Description of Artificial Sequence: Synthetic oligonucleotide
  source 1..33: mol_type = other DNA
ggagcatgggatagcagcctgagtgctgtggta

SEQ ID NO: 19744 - protein, 11 aa, synthetic construct
  REGION 1..11: note = Description of Artificial Sequence: Synthetic peptide
GAWDSSLSAVV

SEQ ID NO: 19745 - DNA, 30 bp, synthetic construct
  misc_feature 1..30: note = Description of Artificial Sequence: Synthetic oligonucleotide
  source 1..30: mol_type = other DNA
ctgctctactgtgatggtgcccagctggtg

SEQ ID NO: 19746 - protein, 10 aa, synthetic construct
  REGION 1..10: note = Description of Artificial Sequence: Synthetic peptide
LLYCDGAQLV

SEQ ID NO: 19747 - DNA, 30 bp, synthetic construct
  misc_feature 1..30: note = Description of Artificial Sequence: Synthetic oligonucleotide
  source 1..30: mol_type = other DNA
ctgctctactatggtggcgctcagctggca

SEQ ID NO: 19748 - protein, 10 aa, synthetic construct
  REGION 1..10: note = Description of Artificial Sequence: Synthetic peptide
LLYYGGAQLA

SEQ ID NO: 19749 - DNA, 27 bp, synthetic construct
  misc_feature 1..27: note = Description of Artificial Sequence: Synthetic oligonucleotide
  source 1..27: mol_type = other DNA
caggcgtgggacagcagcactgtggta

SEQ ID NO: 19750 - protein, 9 aa, synthetic construct
  REGION 1..9: note = Description of Artificial Sequence: Synthetic peptide
QAWDSSTVV

SEQ ID NO: 19751 - DNA, 30 bp, synthetic construct
  misc_feature 1..30: note = Description of Artificial Sequence: Synthetic oligonucleotide
  source 1..30: mol_type = other DNA
aactcatataaaaggggcagcacttgggtg

SEQ ID NO: 19752 - protein, 10 aa, synthetic construct
  REGION 1..10: note = Description of Artificial Sequence: Synthetic peptide
NSYKRGSTWV

SEQ ID NO: 19753 - DNA, 30 bp, synthetic construct; identical to SEQ ID NO: 19729
  misc_feature 1..30: note = Description of Artificial Sequence: Synthetic oligonucleotide
  source 1..30: mol_type = other DNA

SEQ ID NO: 19754 - protein, 10 aa, synthetic construct
  REGION 1..10: note = Description of Artificial Sequence: Synthetic peptide
LLYYGGAQVG

SEQ ID NO: 19755 - DNA, 30 bp, synthetic construct; identical to SEQ ID NO: 19703
  misc_feature 1..30: note = Description of Artificial Sequence: Synthetic oligonucleotide
  source 1..30: mol_type = other DNA

SEQ ID NO: 19756 - protein, 10 aa, synthetic construct
  REGION 1..10: note = Description of Artificial Sequence: Synthetic peptide
NSYTSSITWV

SEQ ID NO: 19757 - DNA, 30 bp, synthetic construct; identical to SEQ ID NO: 19729
  misc_feature 1..30: note = Description of Artificial Sequence: Synthetic oligonucleotide
  source 1..30: mol_type = other DNA

SEQ ID NO: 19758 - protein, 10 aa, synthetic construct
  REGION 1..10: note = Description of Artificial Sequence: Synthetic peptide
LLYYGGAQVG

SEQ ID NO: 19759 - DNA, 30 bp, synthetic construct
  misc_feature 1..30: note = Description of Artificial Sequence: Synthetic oligonucleotide
  source 1..30: mol_type = other DNA
ctgctctactgtgatggtgctcagctggtg

SEQ ID NO: 19760 - protein, 10 aa, synthetic construct
  REGION 1..10: note = Description of Artificial Sequence: Synthetic peptide
LLYCDGAQLV

SEQ ID NO: 19761 - DNA, 27 bp, synthetic construct
  misc_feature 1..27: note = Description of Artificial Sequence: Synthetic oligonucleotide
  source 1..27: mol_type = other DNA
caggtgtgggacagcagcactggggtg

SEQ ID NO: 19762 - protein, 9 aa, synthetic construct
  REGION 1..9: note = Description of Artificial Sequence: Synthetic peptide
QVWDSSTGV

SEQ ID NO: 19763 - DNA, 30 bp, synthetic construct; identical to SEQ ID NO: 19705
  misc_feature 1..30: note = Description of Artificial Sequence: Synthetic oligonucleotide
  source 1..30: mol_type = other DNA

SEQ ID NO: 19764 - protein, 10 aa, synthetic construct
  REGION 1..10: note = Description of Artificial Sequence: Synthetic peptide
GSYVKGITWV

SEQ ID NO: 19765 - DNA, 30 bp, synthetic construct
  misc_feature 1..30: note = Description of Artificial Sequence: Synthetic oligonucleotide
  source 1..30: mol_type = other DNA
caattaatagtcagcagtgatacttatgtc

SEQ ID NO: 19766 - protein, 10 aa, synthetic construct
  REGION 1..10: note = Description of Artificial Sequence: Synthetic peptide
QLIVSSDTYV

SEQ ID NO: 19767 - DNA, 30 bp, synthetic construct; identical to SEQ ID NO: 19711
  misc_feature 1..30: note = Description of Artificial Sequence: Synthetic oligonucleotide
  source 1..30: mol_type = other DNA

SEQ ID NO: 19768 - protein, 10 aa, synthetic construct
  REGION 1..10: note = Description of Artificial Sequence: Synthetic peptide
QLVYSSDTYV

SEQ ID NO: 19769 - DNA, 33 bp, synthetic construct
  misc_feature 1..33: note = Description of Artificial Sequence: Synthetic oligonucleotide
  source 1..33: mol_type = other DNA
ggaacatgggatagcagcctgaatactgtggta

SEQ ID NO: 19770 - protein, 11 aa, synthetic construct
  REGION 1..11: note = Description of Artificial Sequence: Synthetic peptide
GTWDSSLNTVV

SEQ ID NO: 19771 - DNA, 30 bp, synthetic construct
  misc_feature 1..30: note = Description of Artificial Sequence: Synthetic oligonucleotide
  source 1..30: mol_type = other DNA
caattagttgtcagcagtgatacttatgtc

SEQ ID NO: 19772 - protein, 10 aa, synthetic construct
  REGION 1..10: note = Description of Artificial Sequence: Synthetic peptide
QLVVSSDTYV

SEQ ID NO: 19773 - DNA, 30 bp, synthetic construct
  misc_feature 1..30: note = Description of Artificial Sequence: Synthetic oligonucleotide
  source 1..30: mol_type = other DNA
tgctcatatacaaggagcatcacttgggtg

SEQ ID NO: 19774 - protein, 10 aa, synthetic construct
  REGION 1..10: note = Description of Artificial Sequence: Synthetic peptide
CSYTRSITWV

SEQ ID NO: 19775 - DNA, 30 bp, synthetic construct; identical to SEQ ID NO: 19733
  misc_feature 1..30: note = Description of Artificial Sequence: Synthetic oligonucleotide
  source 1..30: mol_type = other DNA

SEQ ID NO: 19776 - protein, 10 aa, synthetic construct
  REGION 1..10: note = Description of Artificial Sequence: Synthetic peptide
NSYTRSITWV

SEQ ID NO: 19777 - DNA, 30 bp, synthetic construct; identical to SEQ ID NO: 19733
  misc_feature 1..30: note = Description of Artificial Sequence: Synthetic oligonucleotide
  source 1..30: mol_type = other DNA

SEQ ID NO: 19778 - protein, 10 aa, synthetic construct
  REGION 1..10: note = Description of Artificial Sequence: Synthetic peptide
NSYTRSITWV

SEQ ID NO: 19779 - DNA, 27 bp, synthetic construct
  misc_feature 1..27: note = Description of Artificial Sequence: Synthetic oligonucleotide
  source 1..27: mol_type = other DNA
caggcgtgggacagcagcactgtggta

SEQ ID NO: 19780 - protein, 9 aa, synthetic construct
  REGION 1..9: note = Description of Artificial Sequence: Synthetic peptide
QAWDSSTVV

SEQ ID NO: 19781 - DNA, 30 bp, synthetic construct
  misc_feature 1..30: note = Description of Artificial Sequence: Synthetic oligonucleotide
  source 1..30: mol_type = other DNA
cagtcctatgacaacagcctgagtggtgtg

SEQ ID NO: 19782 - protein, 10 aa, synthetic construct
  REGION 1..10: note = Description of Artificial Sequence: Synthetic peptide
QSYDNSLSGV

SEQ ID NO: 19783 - DNA, 30 bp, synthetic construct
  misc_feature 1..30: note = Description of Artificial Sequence: Synthetic oligonucleotide
  source 1..30: mol_type = other DNA
caggcgtgggacagcaacactgcatgtgtc

SEQ ID NO: 19784 - protein, 10 aa, synthetic construct
  REGION 1..10: note = Description of Artificial Sequence: Synthetic peptide
QAWDSNTACV

SEQ ID NO: 19785 - DNA, 30 bp, synthetic construct
  misc_feature 1..30: note = Description of Artificial Sequence: Synthetic oligonucleotide
  source 1..30: mol_type = other DNA
caggcgtgggacagcagaactgctgtggta

SEQ ID NO: 19786 - protein, 10 aa, synthetic construct
  REGION 1..10: note = Description of Artificial Sequence: Synthetic peptide
QAWDSRTAVV

SEQ ID NO: 19787 - DNA, 27 bp, synthetic construct
  misc_feature 1..27: note = Description of Artificial Sequence: Synthetic oligonucleotide
  source 1..27: mol_type = other DNA
caggcgtgggacaacggcgctgcggtt

SEQ ID NO: 19788 - protein, 9 aa, synthetic construct
  REGION 1..9: note = Description of Artificial Sequence: Synthetic peptide
QAWDNGAAV

SEQ ID NO: 19789 - DNA, 30 bp, synthetic construct
  misc_feature 1..30: note = Description of Artificial Sequence: Synthetic oligonucleotide
  source 1..30: mol_type = other DNA
caatcagcagacagcagtggtacttatgtc

SEQ ID NO: 19790 - protein, 10 aa, synthetic construct
  REGION 1..10: note = Description of Artificial Sequence: Synthetic peptide
QSADSSGTYV

SEQ ID NO: 19791 - DNA, 30 bp, synthetic construct; identical to SEQ ID NO: 19781
  misc_feature 1..30: note = Description of Artificial Sequence: Synthetic oligonucleotide
  source 1..30: mol_type = other DNA

SEQ ID NO: 19792 - protein, 10 aa, synthetic construct
  REGION 1..10: note = Description of Artificial Sequence: Synthetic peptide
QSYDNSLSGV

SEQ ID NO: 19793 - DNA, 27 bp, synthetic construct
  misc_feature 1..27: note = Description of Artificial Sequence: Synthetic oligonucleotide
  source 1..27: mol_type = other DNA
caggcgtgggacaacggcgctgcggtt

SEQ ID NO: 19794 - protein, 9 aa, synthetic construct
  REGION 1..9: note = Description of Artificial Sequence: Synthetic peptide
QAWDNGAAV

SEQ ID NO: 19795 - DNA, 30 bp, synthetic construct; identical to SEQ ID NO: 19781
  misc_feature 1..30: note = Description of Artificial Sequence: Synthetic oligonucleotide
  source 1..30: mol_type = other DNA

SEQ ID NO: 19796 - protein, 10 aa, synthetic construct
  REGION 1..10: note = Description of Artificial Sequence: Synthetic peptide
QSYDNSLSGV

SEQ ID NO: 19797 - DNA, 27 bp, synthetic construct
  misc_feature 1..27: note = Description of Artificial Sequence: Synthetic oligonucleotide
  source 1..27: mol_type = other DNA
caggcgtgggtcaacaacactatgata

SEQ ID NO: 19798 - protein, 9 aa, synthetic construct
  REGION 1..9: note = Description of Artificial Sequence: Synthetic peptide
QAWVNNTMI

SEQ ID NO: 19799 - DNA, 30 bp, synthetic construct
  misc_feature 1..30: note = Description of Artificial Sequence: Synthetic oligonucleotide
  source 1..30: mol_type = other DNA
cagtcctatgacaacaacctgagtggtgtg

SEQ ID NO: 19800 - protein, 10 aa, synthetic construct
  REGION 1..10: note = Description of Artificial Sequence: Synthetic peptide
QSYDNNLSGV

SEQ ID NO: 19801 - DNA, 27 bp, synthetic construct
  misc_feature 1..27: note = Description of Artificial Sequence: Synthetic oligonucleotide
  source 1..27: mol_type = other DNA
caggcgtggaacagcagcaatgtggta

SEQ ID NO: 19802 - protein, 9 aa, synthetic construct
  REGION 1..9: note = Description of Artificial Sequence: Synthetic peptide
QAWNSSNVV

SEQ ID NO: 19803 - DNA, 33 bp, synthetic construct
  misc_feature 1..33: note = Description of Artificial Sequence: Synthetic oligonucleotide
  source 1..33: mol_type = other DNA
aactcaacagacagcagtggtaatcatgtggta

SEQ ID NO: 19804 - protein, 11 aa, synthetic construct
  REGION 1..11: note = Description of Artificial Sequence: Synthetic peptide
NSTDSSGNHVV

SEQ ID NO: 19805 - DNA, 27 bp, synthetic construct
  misc_feature 1..27: note = Description of Artificial Sequence: Synthetic oligonucleotide
  source 1..27: mol_type = other DNA
caacagtattatagttacccattcact

SEQ ID NO: 19806 - protein, 9 aa, synthetic construct
  REGION 1..9: note = Description of Artificial Sequence: Synthetic peptide
QQYYSYPFT

SEQ ID NO: 19807 - DNA, 27 bp, synthetic construct
  misc_feature 1..27: note = Description of Artificial Sequence: Synthetic oligonucleotide
  source 1..27: mol_type = other DNA
ctacagcgtgatagttacccgttcact

SEQ ID NO: 19808 - protein, 9 aa, synthetic construct
  REGION 1..9: note = Description of Artificial Sequence: Synthetic peptide
LQRDSYPFT

SEQ ID NO: 19809 - DNA, 27 bp, synthetic construct
  misc_feature 1..27: note = Description of Artificial Sequence: Synthetic oligonucleotide
  source 1..27: mol_type = other DNA
caacaatatcagaattaccccttcact

SEQ ID NO: 19810 - protein, 9 aa, synthetic construct
  REGION 1..9: note = Description of Artificial Sequence: Synthetic peptide
QQYQNYPFT

SEQ ID NO: 19811 - DNA, 27 bp, synthetic construct
  misc_feature 1..27: note = Description of Artificial Sequence: Synthetic oligonucleotide
  source 1..27: mol_type = other DNA
gtgcaaggtacacactggcctcggacg

SEQ ID NO: 19812 - protein, 9 aa, synthetic construct
  REGION 1..9: note = Description of Artificial Sequence: Synthetic peptide
VQGTHWPRT

SEQ ID NO: 19813 - DNA, 27 bp, synthetic construct
  misc_feature 1..27: note = Description of Artificial Sequence: Synthetic oligonucleotide
  source 1..27: mol_type = other DNA
cagcagtatagtaactggccattcact

SEQ ID NO: 19814 - protein, 9 aa, synthetic construct
  REGION 1..9: note = Description of Artificial Sequence: Synthetic peptide
QQYSNWPFT

SEQ ID NO: 19815 - DNA, 27 bp, synthetic construct
  misc_feature 1..27: note = Description of Artificial Sequence: Synthetic oligonucleotide
  source 1..27: mol_type = other DNA
caacagagtcacagtttcccattcact

SEQ ID NO: 19816 - protein, 9 aa, synthetic construct
  REGION 1..9: note = Description of Artificial Sequence: Synthetic peptide
QQSHSFPFT

SEQ ID NO: 19817 - DNA, 27 bp, synthetic construct
  misc_feature 1..27: note = Description of Artificial Sequence: Synthetic oligonucleotide
  source 1..27: mol_type = other DNA
caacaggctaacagtttcccgctcact

SEQ ID NO: 19818 - protein, 9 aa, synthetic construct
  REGION 1..9: note = Description of Artificial Sequence: Synthetic peptide
QQANSFPLT

SEQ ID NO: 19819 - DNA, 27 bp, synthetic construct
  misc_feature 1..27: note = Description of Artificial Sequence: Synthetic oligonucleotide
  source 1..27: mol_type = other DNA
caacaggctaacagtttcccattcact

SEQ ID NO: 19820 - protein, 9 aa, synthetic construct
  REGION 1..9: note = Description of Artificial Sequence: Synthetic peptide
QQANSFPFT

SEQ ID NO: 19821 - DNA, 27 bp, synthetic construct
  misc_feature 1..27: note = Description of Artificial Sequence: Synthetic oligonucleotide
  source 1..27: mol_type = other DNA
atgcaacctctacaaactccgttcact

SEQ ID NO: 19822 - protein, 9 aa, synthetic construct
  REGION 1..9: note = Description of Artificial Sequence: Synthetic peptide
MQPLQTPFT

SEQ ID NO: 19823 - DNA, 27 bp, synthetic construct
  misc_feature 1..27: note = Description of Artificial Sequence: Synthetic oligonucleotide
  source 1..27: mol_type = other DNA
atgcaaggtacacactggtcgctcact

SEQ ID NO: 19824 - protein, 9 aa, synthetic construct
  REGION 1..9: note = Description of Artificial Sequence: Synthetic peptide
MQGTHWSLT

SEQ ID NO: 19825 - DNA, 27 bp, synthetic construct
  misc_feature 1..27: note = Description of Artificial Sequence: Synthetic oligonucleotide
  source 1..27: mol_type = other DNA
atgcaaggtacacactggttgctcact

SEQ ID NO: 19826 - protein, 9 aa, synthetic construct
  REGION 1..9: note = Description of Artificial Sequence: Synthetic peptide
MQGTHWLLT

SEQ ID NO: 19827 - DNA, 27 bp, synthetic construct
  misc_feature 1..27: note = Description of Artificial Sequence: Synthetic oligonucleotide
  source 1..27: mol_type = other DNA
atgcaaggtacacactggcctcccact

SEQ ID NO: 19828 - protein, 9 aa, synthetic construct
  REGION 1..9: note = Description of Artificial Sequence: Synthetic peptide
MQGTHWPPT

SEQ ID NO: 19829 - DNA, 27 bp, synthetic construct
  misc_feature 1..27: note = Description of Artificial Sequence: Synthetic oligonucleotide
  source 1..27: mol_type = other DNA
atgcaaggtacacactggcctcccact

SEQ ID NO: 19830 - protein, 9 aa, synthetic construct
  REGION 1..9: note = Description of Artificial Sequence: Synthetic peptide
MQGTHWPPT

SEQ ID NO: 19831 - DNA, 27 bp, synthetic construct
  misc_feature 1..27: note = Description of Artificial Sequence: Synthetic oligonucleotide
  source 1..27: mol_type = other DNA
caacagtataatagttacccgctcagt

SEQ ID NO: 19832 - protein, 9 aa, synthetic construct
  REGION 1..9: note = Description of Artificial Sequence: Synthetic peptide
QQYNSYPLS

SEQ ID NO: 19833 - DNA, 27 bp, synthetic construct
  misc_feature 1..27: note = Description of Artificial Sequence: Synthetic oligonucleotide
  source 1..27: mol_type = other DNA
caacagtgtgatagtttccctctcact

SEQ ID NO: 19834 - protein, 9 aa, synthetic construct
  REGION 1..9: note = Description of Artificial Sequence: Synthetic peptide
QQCDSFPLT

SEQ ID NO: 19835 - DNA, 30 bp, synthetic construct
  misc_feature 1..30: note = Description of Artificial Sequence: Synthetic oligonucleotide
  source 1..30: mol_type = other DNA
ctacagcacaatagttaccctccgtggacg

SEQ ID NO: 19836 - protein, 10 aa, synthetic construct
  REGION 1..10: note = Description of Artificial Sequence: Synthetic peptide
LQHNSYPPWT

SEQ ID NO: 19837 - DNA, 27 bp, synthetic construct
  misc_feature 1..27: note = Description of Artificial Sequence: Synthetic oligonucleotide
  source 1..27: mol_type = other DNA
caacaatctgatagttaccctctcact

SEQ ID NO: 19838 - protein, 9 aa, synthetic construct
  REGION 1..9: note = Description of Artificial Sequence: Synthetic peptide
QQSDSYPLT

SEQ ID NO: 19839 - DNA, 27 bp, synthetic construct
  misc_feature 1..27: note = Description of Artificial Sequence: Synthetic oligonucleotide
  source 1..27: mol_type = other DNA
caacaatctgatagttaccctctcact

SEQ ID NO: 19840 - protein, 9 aa, synthetic construct
  REGION 1..9: note = Description of Artificial Sequence: Synthetic peptide
QQSDSYPLT

SEQ ID NO: 19841 - DNA, 27 bp, synthetic construct
  misc_feature 1..27: note = Description of Artificial Sequence: Synthetic oligonucleotide
  source 1..27: mol_type = other DNA
atgcaaggtacacactggcctctcact

SEQ ID NO: 19842 - protein, 9 aa, synthetic construct
  REGION 1..9: note = Description of Artificial Sequence: Synthetic peptide
MQGTHWPLT

SEQ ID NO: 19843 - DNA, 27 bp, synthetic construct
  misc_feature 1..27: note = Description of Artificial Sequence: Synthetic oligonucleotide
  source 1..27: mol_type = other DNA
caacaatctaatagttaccctctcact

SEQ ID NO: 19844 - protein, 9 aa, synthetic construct
  REGION 1..9: note = Description of Artificial Sequence: Synthetic peptide
QQSNSYPLT

SEQ ID NO: 19845 - DNA, 27 bp, synthetic construct
  misc_feature 1..27: note = Description of Artificial Sequence: Synthetic oligonucleotide
  source 1..27: mol_type = other DNA
caacattatcttaattaccctctcacc

SEQ ID NO: 19846 - protein, 9 aa, synthetic construct
  REGION 1..9: note = Description of Artificial Sequence: Synthetic peptide
QHYLNYPLT

SEQ ID NO: 19847 - DNA, 27 bp, synthetic construct
  misc_feature 1..27: note = Description of Artificial Sequence: Synthetic oligonucleotide
  source 1..27: mol_type = other DNA
ctacagcataatagttacccgtggacg

SEQ ID NO: 19848 - protein, 9 aa, synthetic construct
  REGION 1..9: note = Description of Artificial Sequence: Synthetic peptide
LQHNSYPWT

SEQ ID NO: 19849 - DNA, 27 bp, synthetic construct
  misc_feature 1..27: note = Description of Artificial Sequence: Synthetic oligonucleotide
  source 1..27: mol_type = other DNA
caacagagttacagtattccgctcact

SEQ ID NO: 19850 - protein, 9 aa, synthetic construct
  REGION 1..9: note = Description of Artificial Sequence: Synthetic peptide
QQSYSIPLT

SEQ ID NO: 19851 - DNA, 27 bp, synthetic construct
  misc_feature 1..27: note = Description of Artificial Sequence: Synthetic oligonucleotide
  source 1..27: mol_type = other DNA
ctacagcattatagtttccctcggacg

SEQ ID NO: 19852 - protein, 9 aa, synthetic construct
  REGION 1..9: note = Description of Artificial Sequence: Synthetic peptide
LQHYSFPRT

SEQ ID NO: 19853 - DNA, 27 bp, synthetic construct
  misc_feature 1..27: note = Description of Artificial Sequence: Synthetic oligonucleotide
  source 1..27: mol_type = other DNA
gtacagcattatagtttccctcggacg

SEQ ID NO: 19854 - protein, 9 aa, synthetic construct
  REGION 1..9: note = Description of Artificial Sequence: Synthetic peptide
VQHYSFPRT

SEQ ID NO: 19855 - DNA, 24 bp, synthetic construct
  misc_feature 1..24: note = Description of Artificial Sequence: Synthetic oligonucleotide
  source 1..24: mol_type = other DNA
atgcaaggtgcacactggttcacc

SEQ ID NO: 19856 - protein, 8 aa, synthetic construct
  REGION 1..8: note = Description of Artificial Sequence: Synthetic peptide
MQGAHWFT

SEQ ID NO: 19857 - DNA, 27 bp, synthetic construct
  misc_feature 1..27: note = Description of Artificial Sequence: Synthetic oligonucleotide
  source 1..27: mol_type = other DNA
caacagtatgataatctcccgatcacc

SEQ ID NO: 19858 - protein, 9 aa, synthetic construct
  REGION 1..9: note = Description of Artificial Sequence: Synthetic peptide
QQYDNLPIT

SEQ ID NO: 19859 - DNA, 27 bp, synthetic construct
  misc_feature 1..27: note = Description of Artificial Sequence: Synthetic oligonucleotide
  source 1..27: mol_type = other DNA
atgcaacctctacaaactccgttcact

SEQ ID NO: 19860 - protein, 9 aa, synthetic construct
  REGION 1..9: note = Description of Artificial Sequence: Synthetic peptide
MQPLQTPFT

SEQ ID NO: 19861 - DNA, 27 bp, synthetic construct
  misc_feature 1..27: note = Description of Artificial Sequence: Synthetic oligonucleotide
  source 1..27: mol_type = other DNA
cagcagtatggttgctcaccgctcact

SEQ ID NO: 19862 - protein, 9 aa, synthetic construct
  REGION 1..9: note = Description of Artificial Sequence: Synthetic peptide
QQYGCSPLT

SEQ ID NO: 19863 - DNA, 27 bp, synthetic construct
  misc_feature 1..27: note = Description of Artificial Sequence: Synthetic oligonucleotide
  source 1..27: mol_type = other DNA
cagcactatgataactcaccgtggacg

SEQ ID NO: 19864 - protein, 9 aa, synthetic construct
  REGION 1..9: note = Description of Artificial Sequence: Synthetic peptide
QHYDNSPWT

SEQ ID NO: 19865 - DNA, 27 bp, synthetic construct
  misc_feature 1..27: note = Description of Artificial Sequence: Synthetic oligonucleotide
  source 1..27: mol_type = other DNA
caacaggctaaaagtttcccgctcact

SEQ ID NO: 19866 - protein, 9 aa, synthetic construct
  REGION 1..9: note = Description of Artificial Sequence: Synthetic peptide
QQAKSFPLT

SEQ ID NO: 19867 - DNA, 27 bp, synthetic construct
  misc_feature 1..27: note = Description of Artificial Sequence: Synthetic oligonucleotide
  source 1..27: mol_type = other DNA
cagcactatgataactcaccgtggacg

SEQ ID NO: 19868 - protein, 9 aa, synthetic construct
  REGION 1..9: note = Description of Artificial Sequence: Synthetic peptide
QHYDNSPWT

SEQ ID NO: 19869 - DNA, 27 bp, synthetic construct
  misc_feature 1..27: note = Description of Artificial Sequence: Synthetic oligonucleotide
  source 1..27: mol_type = other DNA
cagcactatgataactcaccgtggacg

SEQ ID NO: 19870 - protein, 9 aa, synthetic construct
  REGION 1..9: note = Description of Artificial Sequence: Synthetic peptide
QHYDNSPWT

SEQ ID NO: 19871 - DNA, 30 bp, synthetic construct; identical to SEQ ID NO: 17805
  misc_feature 1..30: note = Description of Artificial Sequence: Synthetic oligonucleotide
  source 1..30: mol_type = other DNA

SEQ ID NO: 19872 - protein, 10 aa, synthetic construct
  REGION 1..10: note = Description of Artificial Sequence: Synthetic peptide
QQYNNWPPLT

SEQ ID NO: 19873 - DNA, 27 bp, synthetic construct
  misc_feature 1..27: note = Description of Artificial Sequence: Synthetic oligonucleotide
  source 1..27: mol_type = other DNA
cagcagtatgaaagttcaccgtggacg

SEQ ID NO: 19874 - protein, 9 aa, synthetic construct
  REGION 1..9: note = Description of Artificial Sequence: Synthetic peptide
QQYESSPWT

SEQ ID NO: 19875 - DNA, 27 bp, synthetic construct
  misc_feature 1..27: note = Description of Artificial Sequence: Synthetic oligonucleotide
  source 1..27: mol_type = other DNA
cagcactatgataactcaccgtggacg

SEQ ID NO: 19876 - protein, 9 aa, synthetic construct
  REGION 1..9: note = Description of Artificial Sequence: Synthetic peptide
QHYDNSPWT

SEQ ID NO: 19877 - DNA, 27 bp, synthetic construct
  misc_feature 1..27: note = Description of Artificial Sequence: Synthetic oligonucleotide
  source 1..27: mol_type = other DNA
atacagcatagtaattacccgctcact

SEQ ID NO: 19878 - protein, 9 aa, synthetic construct
  REGION 1..9: note = Description of Artificial Sequence: Synthetic peptide
IQHSNYPLT

SEQ ID NO: 19879 - DNA, 27 bp, synthetic construct
  misc_feature 1..27: note = Description of Artificial Sequence: Synthetic oligonucleotide
  source 1..27: mol_type = other DNA
cagcactctgataactcaccgtggacg

SEQ ID NO: 19880 - protein, 9 aa, synthetic construct
  REGION 1..9: note = Description of Artificial Sequence: Synthetic peptide
QHSDNSPWT

SEQ ID NO: 19881 - DNA, 27 bp, synthetic construct
  misc_feature 1..27: note = Description of Artificial Sequence: Synthetic oligonucleotide
  source 1..27: mol_type = other DNA
cagcaatattatagtactcctccgacg

SEQ ID NO: 19882 - protein, 9 aa, synthetic construct
  REGION 1..9: note = Description of Artificial Sequence: Synthetic peptide
QQYYSTPPT

SEQ ID NO: 19883 - DNA, 27 bp, synthetic construct
  misc_feature 1..27: note = Description of Artificial Sequence: Synthetic oligonucleotide
  source 1..27: mol_type = other DNA
cagcaatattatagtactccgtggacg

SEQ ID NO: 19884 - protein, 9 aa, synthetic construct
  REGION 1..9: note = Description of Artificial Sequence: Synthetic peptide
QQYYSTPWT

SEQ ID NO: 19885 - DNA, 27 bp, synthetic construct
  misc_feature 1..27: note = Description of Artificial Sequence: Synthetic oligonucleotide
  source 1..27: mol_type = other DNA
cagcaatattatagtactccgtgcagt

SEQ ID NO: 19886 - protein, 9 aa, synthetic construct
  REGION 1..9: note = Description of Artificial Sequence: Synthetic peptide
QQYYSTPCS

SEQ ID NO: 19887 - DNA, 27 bp, synthetic construct
  misc_feature 1..27: note = Description of Artificial Sequence: Synthetic oligonucleotide
  source 1..27: mol_type = other DNA
cagcattatgataactcaccgtggacg

SEQ ID NO: 19888 - protein, 9 aa, synthetic construct
  REGION 1..9: note = Description of Artificial Sequence: Synthetic peptide
QHYDNSPWT

SEQ ID NO: 19889 - DNA, 27 bp, synthetic construct
  misc_feature 1..27: note = Description of Artificial Sequence: Synthetic oligonucleotide
  source 1..27: mol_type = other DNA
atgcaagctctacaccctcctctcact

SEQ ID NO: 19890 - protein, 9 aa, synthetic construct
  REGION 1..9: note = Description of Artificial Sequence: Synthetic peptide
MQALHPPLT

SEQ ID NO: 19891 - DNA, 27 bp, synthetic construct
  misc_feature 1..27: note = Description of Artificial Sequence: Synthetic oligonucleotide
  source 1..27: mol_type = other DNA
cagcagtatggttgctcaccgctcact

SEQ ID NO: 19892 - protein, 9 aa, synthetic construct
  REGION 1..9: note = Description of Artificial Sequence: Synthetic peptide
QQYGCSPLT

SEQ ID NO: 19893 - DNA, 27 bp, synthetic construct
  misc_feature 1..27: note = Description of Artificial Sequence: Synthetic oligonucleotide
  source 1..27: mol_type = other DNA
cagcaatattatagtattcctccgacg

SEQ ID NO: 19894 - protein, 9 aa, synthetic construct
  REGION 1..9: note = Description of Artificial Sequence: Synthetic peptide
QQYYSIPPT

SEQ ID NO: 19895 - DNA, 24 bp, synthetic construct
  misc_feature 1..24: note = Description of Artificial Sequence: Synthetic oligonucleotide
  source 1..24: mol_type = other DNA
cagcagtatggtagctcaaggacg

SEQ ID NO: 19896 - protein, 8 aa, synthetic construct
  REGION 1..8: note = Description of Artificial Sequence: Synthetic peptide
QQYGSSRT

SEQ ID NO: 19897 - DNA, 27 bp, synthetic construct
  misc_feature 1..27: note = Description of Artificial Sequence: Synthetic oligonucleotide
  source 1..27: mol_type = other DNA
ctacggtatgatacttaccctctcact

SEQ ID NO: 19898 - protein, 9 aa, synthetic construct
  REGION 1..9: note = Description of Artificial Sequence: Synthetic peptide
LRYDTYPLT

SEQ ID NO: 19899 - DNA, 27 bp, synthetic construct
  misc_feature 1..27: note = Description of Artificial Sequence: Synthetic oligonucleotide
  source 1..27: mol_type = other DNA
cagcagtattatagtactcctccgacg

SEQ ID NO: 19900 - protein, 9 aa, synthetic construct
  REGION 1..9: note = Description of Artificial Sequence: Synthetic peptide
QQYYSTPPT

SEQ ID NO: 19901 - DNA, 27 bp, synthetic construct
  misc_feature 1..27: note = Description of Artificial Sequence: Synthetic oligonucleotide
  source 1..27: mol_type = other DNA
cagcagtattatagtactcctccgacg

SEQ ID NO: 19902 - protein, 9 aa, synthetic construct
  REGION 1..9: note = Description of Artificial Sequence: Synthetic peptide
QQYYSTPPT

SEQ ID NO: 19903 - DNA, 27 bp, synthetic construct
  misc_feature 1..27: note = Description of Artificial Sequence: Synthetic oligonucleotide
  source 1..27: mol_type = other DNA
cagcagtattatagtactcctccgacg

SEQ ID NO: 19904 - protein, 9 aa, synthetic construct
  REGION 1..9: note = Description of Artificial Sequence: Synthetic peptide
QQYYSTPPT

SEQ ID NO: 19905 - DNA, 27 bp, synthetic construct
  misc_feature 1..27: note = Description of Artificial Sequence: Synthetic oligonucleotide
  source 1..27: mol_type = other DNA
cagcagtattatagtactcctccgacg

SEQ ID NO: 19906 - protein, 9 aa, synthetic construct
  REGION 1..9: note = Description of Artificial Sequence: Synthetic peptide
QQYYSTPPT

SEQ ID NO: 19907 - DNA, 27 bp, synthetic construct
  misc_feature 1..27: note = Description of Artificial Sequence: Synthetic oligonucleotide
  source 1..27: mol_type = other DNA
cagcagtattatagtactcctccgacg

SEQ ID NO: 19908 - protein, 9 aa, synthetic construct
  REGION 1..9: note = Description of Artificial Sequence: Synthetic peptide
QQYYSTPPT

SEQ ID NO: 19909 - DNA, 27 bp, synthetic construct
  misc_feature 1..27: note = Description of Artificial Sequence: Synthetic oligonucleotide
  source 1..27: mol_type = other DNA
cagcagtattatagtactcctccgacg

SEQ ID NO: 19910 - protein, 9 aa, synthetic construct
  REGION 1..9: note = Description of Artificial Sequence: Synthetic peptide
QQYYSTPPT

SEQ ID NO: 19911 - DNA, 27 bp, synthetic construct
  misc_feature 1..27: note = Description of Artificial Sequence: Synthetic oligonucleotide
  source 1..27: mol_type = other DNA
cagcagtattatagtactcctccgacg

SEQ ID NO: 19912 - protein, 9 aa, synthetic construct
  REGION 1..9: note = Description of Artificial Sequence: Synthetic peptide
QQYYSTPPT

SEQ ID NO: 19913 - DNA, 27 bp, synthetic construct
  misc_feature 1..27: note = Description of Artificial Sequence: Synthetic oligonucleotide
  source 1..27: mol_type = other DNA
cagcagtattatagtactcctccgacg

SEQ ID NO: 19914 - protein, 9 aa, synthetic construct
  REGION 1..9: note = Description of Artificial Sequence: Synthetic peptide
QQYYSTPPT

SEQ ID NO: 19915 - DNA, 27 bp, synthetic construct
  misc_feature 1..27: note = Description of Artificial Sequence: Synthetic oligonucleotide
  source 1..27: mol_type = other DNA
cagcagtattatagtactcctccgacg

SEQ ID NO: 19916 - protein, 9 aa, synthetic construct
  REGION 1..9: note = Description of Artificial Sequence: Synthetic peptide
QQYYSTPPT

SEQ ID NO: 19917 - DNA, 27 bp, synthetic construct
  misc_feature 1..27: note = Description of Artificial Sequence: Synthetic oligonucleotide
  source 1..27: mol_type = other DNA
cagcagtattatagtactcctccgacg

SEQ ID NO: 19918 - protein, 9 aa, synthetic construct
  REGION 1..9: note = Description of Artificial Sequence: Synthetic peptide
QQYYSTPPT

SEQ ID NO: 19919 - DNA, 27 bp, synthetic construct
  misc_feature 1..27: note = Description of Artificial Sequence: Synthetic oligonucleotide
  source 1..27: mol_type = other DNA
cagcagtattatagtactcctccgacg

SEQ ID NO: 19920 - protein, 9 aa, synthetic construct
  REGION 1..9: note = Description of Artificial Sequence: Synthetic peptide
QQYYSTPPT

SEQ ID NO: 19921 - DNA, 27 bp, synthetic construct
  misc_feature 1..27: note = Description of Artificial Sequence: Synthetic oligonucleotide
  source 1..27: mol_type = other DNA
cagcagtattatagtactcctccgacg

SEQ ID NO: 19922 - protein, 9 aa, synthetic construct
  REGION 1..9: note = Description of Artificial Sequence: Synthetic peptide
QQYYSTPPT

SEQ ID NO: 19923 - DNA, 27 bp, synthetic construct
  misc_feature 1..27: note = Description of Artificial Sequence: Synthetic oligonucleotide
  source 1..27: mol_type = other DNA
cagcaatattatagtactccagtcact

SEQ ID NO: 19924 - protein, 9 aa, synthetic construct
  REGION 1..9: note = Description of Artificial Sequence: Synthetic peptide
QQYYSTPVT

SEQ ID NO: 19925 - DNA, 27 bp, synthetic construct
  misc_feature 1..27: note = Description of Artificial Sequence: Synthetic oligonucleotide
  source 1..27: mol_type = other DNA
cagcaatattataatgctccagtcact

SEQ ID NO: 19926 - protein, 9 aa, synthetic construct
  REGION 1..9: note = Description of Artificial Sequence: Synthetic peptide
QQYYNAPVT

SEQ ID NO: 19927 - DNA, 27 bp, synthetic construct
  misc_feature 1..27: note = Description of Artificial Sequence: Synthetic oligonucleotide
  source 1..27: mol_type = other DNA
cagcaatattatcaaactccagtcact

SEQ ID NO: 19928 - protein, 9 aa, synthetic construct
  REGION 1..9: note = Description of Artificial Sequence: Synthetic peptide
QQYYQTPVT

SEQ ID NO: 19929 - DNA, 27 bp, synthetic construct
  misc_feature 1..27: note = Description of Artificial Sequence: Synthetic oligonucleotide
  source 1..27: mol_type = other DNA
cagcaatattataatactccagtcact

SEQ ID NO: 19930 - protein, 9 aa, synthetic construct
  REGION 1..9: note = Description of Artificial Sequence: Synthetic peptide
QQYYNTPVT

SEQ ID NO: 19931 - DNA, 27 bp, synthetic construct
  misc_feature 1..27: note = Description of Artificial Sequence: Synthetic oligonucleotide
  source 1..27: mol_type = other DNA
cagcaatattataatactccagtcact

SEQ ID NO: 19932 - protein, 9 aa, synthetic construct
  REGION 1..9: note = Description of Artificial Sequence: Synthetic peptide
QQYYNTPVT

SEQ ID NO: 19933 - DNA, 27 bp, synthetic construct
  misc_feature 1..27: note = Description of Artificial Sequence: Synthetic oligonucleotide
  source 1..27: mol_type = other DNA
cagcaatattataatactccagtcact

SEQ ID NO: 19934 - protein, 9 aa, synthetic construct
  REGION 1..9: note = Description of Artificial Sequence: Synthetic peptide
QQYYNTPVT

SEQ ID NO: 19935 - DNA, 27 bp, synthetic construct
  misc_feature 1..27: note = Description of Artificial Sequence: Synthetic oligonucleotide
  source 1..27: mol_type = other DNA
cagcaatattatagtactccagtcact

SEQ ID NO: 19936 - protein, 9 aa, synthetic construct
  REGION 1..9: note = Description of Artificial Sequence: Synthetic peptide
QQYYSTPVT

SEQ ID NO: 19937 - DNA, 27 bp, synthetic construct
  misc_feature 1..27: note = Description of Artificial Sequence: Synthetic oligonucleotide
  source 1..27: mol_type = other DNA
cagcaatattatagtactccagtcact

SEQ ID NO: 19938 - protein, 9 aa, synthetic construct
  REGION 1..9: note = Description of Artificial Sequence: Synthetic peptide
QQYYSTPVT

SEQ ID NO: 19939 - DNA, 27 bp, synthetic construct
  misc_feature 1..27: note = Description of Artificial Sequence: Synthetic oligonucleotide
  source 1..27: mol_type = other DNA
cagcaatattataatgctccagtcact

SEQ ID NO: 19940 - protein, 9 aa, synthetic construct
  REGION 1..9: note = Description of Artificial Sequence: Synthetic peptide
QQYYNAPVT

SEQ ID NO: 19941 - DNA, 27 bp, synthetic construct
  misc_feature 1..27: note = Description of Artificial Sequence: Synthetic oligonucleotide
  source 1..27: mol_type = other DNA
cagcaatattatcaaactccagtcact

SEQ ID NO: 19942 - protein, 9 aa, synthetic construct
  REGION 1..9: note = Description of Artificial Sequence: Synthetic peptide
QQYYQTPVT

SEQ ID NO: 19943 - DNA, 27 bp, synthetic construct
  misc_feature 1..27: note = Description of Artificial Sequence: Synthetic oligonucleotide
  source 1..27: mol_type = other DNA
cagcaatattatcaaactccagtcact

SEQ ID NO: 19944 - protein, 9 aa, synthetic construct
  REGION 1..9: note = Description of Artificial Sequence: Synthetic peptide
QQYYQTPVT

SEQ ID NO: 19945 - DNA, 27 bp, synthetic construct
  misc_feature 1..27: note = Description of Artificial Sequence: Synthetic oligonucleotide
  source 1..27: mol_type = other DNA
cagcaatattatcaaactccagtcact

SEQ ID NO: 19946 - protein, 9 aa, synthetic construct
  REGION 1..9: note = Description of Artificial Sequence: Synthetic peptide
QQYYQTPVT

SEQ ID NO: 19947 - DNA, 27 bp, synthetic construct
  misc_feature 1..27: note = Description of Artificial Sequence: Synthetic oligonucleotide
  source 1..27: mol_type = other DNA
cagcaatattatagtactccagtcact

SEQ ID NO: 19948 - protein, 9 aa, synthetic construct
  REGION 1..9: note = Description of Artificial Sequence: Synthetic peptide
QQYYSTPVT

SEQ ID NO: 19949 - DNA, 27 bp, synthetic construct
  misc_feature 1..27: note = Description of Artificial Sequence: Synthetic oligonucleotide
  source 1..27: mol_type = other DNA
cagcaatattatagtactccagtcact

SEQ ID NO: 19950 - protein, 9 aa, synthetic construct
  REGION 1..9: note = Description of Artificial Sequence: Synthetic peptide
QQYYSTPVT

SEQ ID NO: 19951 - DNA, 27 bp, synthetic construct
  misc_feature 1..27: note = Description of Artificial Sequence: Synthetic oligonucleotide
  source 1..27: mol_type = other DNA
cagcaatattatagtactccagtcact

SEQ ID NO: 19952 - protein, 9 aa, synthetic construct
  REGION 1..9: note = Description of Artificial Sequence: Synthetic peptide
QQYYSTPVT

SEQ ID NO: 19953 - DNA, 27 bp, synthetic construct
  misc_feature 1..27: note = Description of Artificial Sequence: Synthetic oligonucleotide
  source 1..27: mol_type = other DNA
cagcaatattatagtactccagtcact

SEQ ID NO: 19954 - protein, 9 aa, synthetic construct
  REGION 1..9: note = Description of Artificial Sequence: Synthetic peptide
QQYYSTPVT

SEQ ID NO: 19955 - DNA, 27 bp, synthetic construct
  misc_feature 1..27: note = Description of Artificial Sequence: Synthetic oligonucleotide
  source 1..27: mol_type = other DNA
cagcaatattatagtactccagtcact

SEQ ID NO: 19956 - protein, 9 aa, synthetic construct
  REGION 1..9: note = Description of Artificial Sequence: Synthetic peptide
QQYYSTPVT

SEQ ID NO: 19957 - DNA, 27 bp, synthetic construct
  misc_feature 1..27: note = Description of Artificial Sequence: Synthetic oligonucleotide
  source 1..27: mol_type = other DNA
cagcaatattataatactccagtcact

SEQ ID NO: 19958 - protein, 9 aa, synthetic construct
  REGION 1..9: note = Description of Artificial Sequence: Synthetic peptide
QQYYNTPVT

SEQ ID NO: 19959 - DNA, 27 bp, synthetic construct
  misc_feature 1..27: note = Description of Artificial Sequence: Synthetic oligonucleotide
  source 1..27: mol_type = other DNA
caacaggctaacagtttcccattcact

SEQ ID NO: 19960 - protein, 9 aa, synthetic construct
  REGION 1..9: note = Description of Artificial Sequence: Synthetic peptide
QQANSFPFT

SEQ ID NO: 19961 - DNA, 27 bp, synthetic construct
  misc_feature 1..27: note = Description of Artificial Sequence: Synthetic oligonucleotide
  source 1..27: mol_type = other DNA
caacaggctaacagtttcccattcact

SEQ ID NO: 19962 - protein, 9 aa, synthetic construct
  REGION 1..9: note = Description of Artificial Sequence: Synthetic peptide
QQANSFPFT

SEQ ID NO: 19963 - DNA, 27 bp, synthetic construct
  misc_feature 1..27: note = Description of Artificial Sequence: Synthetic oligonucleotide
  source 1..27: mol_type = other DNA
caacaggctaacagtttcccattcact

SEQ ID NO: 19964 - protein, 9 aa, synthetic construct
  REGION 1..9: note = Description of Artificial Sequence: Synthetic peptide
QQANSFPFT

SEQ ID NO: 19965 - DNA, 27 bp, synthetic construct
  misc_feature 1..27: note = Description of Artificial Sequence: Synthetic oligonucleotide
  source 1..27: mol_type = other DNA
caacaggctaacagtttcccattcact

SEQ ID NO: 19966 - protein, 9 aa, synthetic construct
  REGION 1..9: note = Description of Artificial Sequence: Synthetic peptide
QQANSFPFT

SEQ ID NO: 19967 - DNA, 27 bp, synthetic construct
  misc_feature 1..27: note = Description of Artificial Sequence: Synthetic oligonucleotide
  source 1..27: mol_type = other DNA
caacaggctaacagtttcccattcact

SEQ ID NO: 19968 - protein, 9 aa, synthetic construct
  REGION 1..9: note = Description of Artificial Sequence: Synthetic peptide
QQANSFPFT

SEQ ID NO: 19969 - DNA, 27 bp, synthetic construct
  misc_feature 1..27: note = Description of Artificial Sequence: Synthetic oligonucleotide
  source 1..27: mol_type = other DNA
caacaggctaacagtttcccattcact

SEQ ID NO: 19970 - protein, 9 aa, synthetic construct
  REGION 1..9: note = Description of Artificial Sequence: Synthetic peptide
QQANSFPFT

SEQ ID NO: 19971 - DNA, 27 bp, synthetic construct
  misc_feature 1..27: note = Description of Artificial Sequence: Synthetic oligonucleotide
  source 1..27: mol_type = other DNA
caacaggctaacagtttcccattcact

SEQ ID NO: 19972 - protein, 9 aa, synthetic construct
  REGION 1..9: note = Description of Artificial Sequence: Synthetic peptide
QQANSFPFT

SEQ ID NO: 19973 - DNA, 27 bp, synthetic construct
  misc_feature 1..27: note = Description of Artificial Sequence: Synthetic oligonucleotide
  source 1..27: mol_type = other DNA
caacaggctaacagtttcccattcact

SEQ ID NO: 19974 - protein, 9 aa, synthetic construct
  REGION 1..9: note = Description of Artificial Sequence: Synthetic peptide
QQANSFPFT

SEQ ID NO: 19975 - DNA, 27 bp, synthetic construct
  misc_feature 1..27: note = Description of Artificial Sequence: Synthetic oligonucleotide
  source 1..27: mol_type = other DNA
ctacagcattatagttaccctcggacg

SEQ ID NO: 19976 - protein, 9 aa, synthetic construct
  REGION 1..9: note = Description of Artificial Sequence: Synthetic peptide
LQHYSYPRT

SEQ ID NO: 19977 - DNA, 27 bp, synthetic construct
  misc_feature 1..27: note = Description of Artificial Sequence: Synthetic oligonucleotide
  source 1..27: mol_type = other DNA
ctacagcattatagttaccctcggacg

SEQ ID NO: 19978 - protein, 9 aa, synthetic construct
  REGION 1..9: note = Description of Artificial Sequence: Synthetic peptide
LQHYSYPRT

SEQ ID NO: 19979 - DNA, 27 bp, synthetic construct
  misc_feature 1..27: note = Description of Artificial Sequence: Synthetic oligonucleotide
  source 1..27: mol_type = other DNA
ctacagcattatagttaccctcggacg

SEQ ID NO: 19980 - protein, 9 aa, synthetic construct
  REGION 1..9: note = Description of Artificial Sequence: Synthetic peptide
LQHYSYPRT

SEQ ID NO: 19981 - DNA, 27 bp, synthetic construct
  misc_feature 1..27: note = Description of Artificial Sequence: Synthetic oligonucleotide
  source 1..27: mol_type = other DNA
ctacagcattatagttaccctcggacg

SEQ ID NO: 19982 - protein, 9 aa, synthetic construct
  REGION 1..9: note = Description of Artificial Sequence: Synthetic peptide
LQHYSYPRT

SEQ ID NO: 19983 - DNA, 27 bp, synthetic construct
  misc_feature 1..27: note = Description of Artificial Sequence: Synthetic oligonucleotide
  source 1..27: mol_type = other DNA
ctacagcattatagttaccctcggacg

SEQ ID NO: 19984 - protein, 9 aa, synthetic construct
  REGION 1..9: note = Description of Artificial Sequence: Synthetic peptide
LQHYSYPRT

SEQ ID NO: 19985 - DNA, 27 bp, synthetic construct
  misc_feature 1..27: note = Description of Artificial Sequence: Synthetic oligonucleotide
  source 1..27: mol_type = other DNA
ctacagcattatagttaccctcggacg

SEQ ID NO: 19986 - protein, 9 aa, synthetic construct
  REGION 1..9: note = Description of Artificial Sequence: Synthetic peptide
LQHYSYPRT

SEQ ID NO: 19987 - DNA, 27 bp, synthetic construct
  misc_feature 1..27: note = Description of Artificial Sequence: Synthetic oligonucleotide
  source 1..27: mol_type = other DNA
ctacagcattatagttaccctcggacg

SEQ ID NO: 19988 - protein, 9 aa, synthetic construct
  REGION 1..9: note = Description of Artificial Sequence: Synthetic peptide
LQHYSYPRT

SEQ ID NO: 19989 - DNA, 27 bp, synthetic construct
  misc_feature 1..27: note = Description of Artificial Sequence: Synthetic oligonucleotide
  source 1..27: mol_type = other DNA
ctacagcattatagttaccctcggacg

SEQ ID NO: 19990 - protein, 9 aa, synthetic construct
  REGION 1..9: note = Description of Artificial Sequence: Synthetic peptide
LQHYSYPRT

SEQ ID NO: 19991 - DNA, 27 bp, synthetic construct
  misc_feature 1..27: note = Description of Artificial Sequence: Synthetic oligonucleotide
  source 1..27: mol_type = other DNA
ctacagcattatagttaccctcggacg

SEQ ID NO: 19992 - protein, 9 aa, synthetic construct
  REGION 1..9: note = Description of Artificial Sequence: Synthetic peptide
LQHYSYPRT

SEQ ID NO: 19993 - DNA, 27 bp, synthetic construct
  misc_feature 1..27: note = Description of Artificial Sequence: Synthetic oligonucleotide
  source 1..27: mol_type = other DNA
ctacagcattatagttaccctcggacg

SEQ ID NO: 19994 - protein, 9 aa, synthetic construct
  REGION 1..9: note = Description of Artificial Sequence: Synthetic peptide
LQHYSYPRT

SEQ ID NO: 19995 - DNA, 27 bp, synthetic construct
  misc_feature 1..27: note = Description of Artificial Sequence: Synthetic oligonucleotide
  source 1..27: mol_type = other DNA
ctacagcattatagttaccctcggacg

SEQ ID NO: 19996 - protein, 9 aa, synthetic construct
  REGION 1..9: note = Description of Artificial Sequence: Synthetic peptide
LQHYSYPRT

SEQ ID NO: 19997 - DNA, 27 bp, synthetic construct
  misc_feature 1..27: note = Description of Artificial Sequence: Synthetic oligonucleotide
  source 1..27: mol_type = other DNA
ctacagcattatagttaccctcggacg

SEQ ID NO: 19998 - protein, 9 aa, synthetic construct
  REGION 1..9: note = Description of Artificial Sequence: Synthetic peptide
LQHYSYPRT

SEQ ID NO: 19999 - DNA, 27 bp, synthetic construct
  misc_feature 1..27: note = Description of Artificial Sequence: Synthetic oligonucleotide
  source 1..27: mol_type = other DNA
ctacagcattatagttaccctcggacg

SEQ ID NO: 20000 - protein, 9 aa, synthetic construct
  REGION 1..9: note = Description of Artificial Sequence: Synthetic peptide
LQHYSYPRT

SEQ ID NO: 20001 - DNA, 27 bp, synthetic construct
  misc_feature 1..27: note = Description of Artificial Sequence: Synthetic oligonucleotide
  source 1..27: mol_type = other DNA
ctacagcattatagttaccctcggacg

SEQ ID NO: 20002 - protein, 9 aa, synthetic construct
  REGION 1..9: note = Description of Artificial Sequence: Synthetic peptide
LQHYSYPRT

SEQ ID NO: 20003 - DNA, 27 bp, synthetic construct
  misc_feature 1..27: note = Description of Artificial Sequence: Synthetic oligonucleotide
  source 1..27: mol_type = other DNA
caacagacttacagtaccccgctcact

SEQ ID NO: 20004 - protein, 9 aa, synthetic construct
  REGION 1..9: note = Description of Artificial Sequence: Synthetic peptide
QQTYSTPLT

SEQ ID NO: 20005 - DNA, 27 bp, synthetic construct
  misc_feature 1..27: note = Description of Artificial Sequence: Synthetic oligonucleotide
  source 1..27: mol_type = other DNA
caacagacttacagtaccccgctcact

SEQ ID NO: 20006 - protein, 9 aa, synthetic construct
  REGION 1..9: note = Description of Artificial Sequence: Synthetic peptide
QQTYSTPLT

SEQ ID NO: 20007 - DNA, 27 bp, synthetic construct
  misc_feature 1..27: note = Description of Artificial Sequence: Synthetic oligonucleotide
  source 1..27: mol_type = other DNA
caacagacttacagtaccccgctcact

SEQ ID NO: 20008 - protein, 9 aa, synthetic construct
  REGION 1..9: note = Description of Artificial Sequence: Synthetic peptide
QQTYSTPLT

SEQ ID NO: 20009 - DNA, 27 bp, synthetic construct
  misc_feature 1..27: note = Description of Artificial Sequence: Synthetic oligonucleotide
  source 1..27: mol_type = other DNA
caacagacttacagtaccccgctcact

SEQ ID NO: 20010 - protein, 9 aa, synthetic construct
  REGION 1..9: note = Description of Artificial Sequence: Synthetic peptide
QQTYSTPLT

SEQ ID NO: 20011 - DNA, 27 bp, synthetic construct
  misc_feature 1..27: note = Description of Artificial Sequence: Synthetic oligonucleotide
  source 1..27: mol_type = other DNA
caacagacttacagtaccccgctcact

SEQ ID NO: 20012 - protein, 9 aa, synthetic construct
  REGION 1..9: note = Description of Artificial Sequence: Synthetic peptide
QQTYSTPLT

SEQ ID NO: 20013 - DNA, 27 bp, synthetic construct
  misc_feature 1..27: note = Description of Artificial Sequence: Synthetic oligonucleotide
  source 1..27: mol_type = other DNA
caacagacttacagtaccccgctcact

SEQ ID NO: 20014 - protein, 9 aa, synthetic construct
  REGION 1..9: note = Description of Artificial Sequence: Synthetic peptide
QQTYSTPLT

SEQ ID NO: 20015 - DNA, 27 bp, synthetic construct
  misc_feature 1..27: note = Description of Artificial Sequence: Synthetic oligonucleotide
  source 1..27: mol_type = other DNA
caacagacttacagtaccccgctcact

SEQ ID NO: 20016 - protein, 9 aa, synthetic construct
  REGION 1..9: note = Description of Artificial Sequence: Synthetic peptide
QQTYSTPLT

SEQ ID NO: 20017 - DNA, 27 bp, synthetic construct
  misc_feature 1..27: note = Description of Artificial Sequence: Synthetic oligonucleotide
  source 1..27: mol_type = other DNA
caacagacttacagtaccccgctcact

SEQ ID NO: 20018 - protein, 9 aa, synthetic construct
  REGION 1..9: note = Description of Artificial Sequence: Synthetic peptide
QQTYSTPLT

SEQ ID NO: 20019 - DNA, 27 bp, synthetic construct
  misc_feature 1..27: note = Description of Artificial Sequence: Synthetic oligonucleotide
  source 1..27: mol_type = other DNA
caacagacttacagtaccccgctcact

SEQ ID NO: 20020 - protein, 9 aa, synthetic construct
  REGION 1..9: note = Description of Artificial Sequence: Synthetic peptide
QQTYSTPLT

SEQ ID NO: 20021 - DNA, 27 bp, synthetic construct
  misc_feature 1..27: note = Description of Artificial Sequence: Synthetic oligonucleotide
  source 1..27: mol_type = other DNA
caacagacttacagtaccccgctcact

SEQ ID NO: 20022 - protein, 9 aa, synthetic construct
  REGION 1..9: note = Description of Artificial Sequence: Synthetic peptide
QQTYSTPLT

SEQ ID NO: 20023 - DNA, 27 bp, synthetic construct
  misc_feature 1..27: note = Description of Artificial Sequence: Synthetic oligonucleotide
  source 1..27: mol_type = other DNA
caacagacttacagtaccccgctcact

SEQ ID NO: 20024 - protein, 9 aa, synthetic construct
  REGION 1..9: note = Description of Artificial Sequence: Synthetic peptide
QQTYSTPLT

SEQ ID NO: 20025 - DNA, 27 bp, synthetic construct
  misc_feature 1..27: note = Description of Artificial Sequence: Synthetic oligonucleotide
  source 1..27: mol_type = other DNA
caacagacttacagtaccccgctcact

SEQ ID NO: 20026 - protein, 9 aa, synthetic construct
  REGION 1..9: note = Description of Artificial Sequence: Synthetic peptide
QQTYSTPLT

SEQ ID NO: 20027 - DNA, 27 bp, synthetic construct
  misc_feature 1..27: note = Description of Artificial Sequence: Synthetic oligonucleotide
  source 1..27: mol_type = other DNA
caacagacttacagtaccccgctcact

SEQ ID NO: 20028 - protein, 9 aa, synthetic construct
  REGION 1..9: note = Description of Artificial Sequence: Synthetic peptide
QQTYSTPLT

SEQ ID NO: 20029 - DNA, 27 bp, synthetic construct
  misc_feature 1..27: note = Description of Artificial Sequence: Synthetic oligonucleotide
  source 1..27: mol_type = other DNA
caacagacttacagtaccccgctcact

SEQ ID NO: 20030 - protein, 9 aa, synthetic construct
  REGION 1..9: note = Description of Artificial Sequence: Synthetic peptide
QQTYSTPLT

SEQ ID NO: 20031 - DNA, 27 bp, synthetic construct
  misc_feature 1..27: note = Description of Artificial Sequence: Synthetic oligonucleotide
  source 1..27: mol_type = other DNA
caacagacttacagtaccccgctcact

SEQ ID NO: 20032 - protein, 9 aa, synthetic construct
  REGION 1..9: note = Description of Artificial Sequence: Synthetic peptide
QQTYSTPLT

SEQ ID NO: 20033 - DNA, 27 bp, synthetic construct
  misc_feature 1..27: note = Description of Artificial Sequence: Synthetic oligonucleotide
  source 1..27: mol_type = other DNA
caacagacttacagtaccccgctcact

SEQ ID NO: 20034 - protein, 9 aa, synthetic construct
  REGION 1..9: note = Description of Artificial Sequence: Synthetic peptide
QQTYSTPLT

SEQ ID NO: 20035 - DNA, 27 bp, synthetic construct
  misc_feature 1..27: note = Description of Artificial Sequence: Synthetic oligonucleotide
  source 1..27: mol_type = other DNA
caacagacttacagtaccccgctcact

SEQ ID NO: 20036 - protein, 9 aa, synthetic construct
  REGION 1..9: note = Description of Artificial Sequence: Synthetic peptide
QQTYSTPLT

SEQ ID NO: 20037 - DNA, 27 bp, synthetic construct
  misc_feature 1..27: note = Description of Artificial Sequence: Synthetic oligonucleotide
  source 1..27: mol_type = other DNA
caacagacttacagtaccccgctcact

SEQ ID NO: 20038 - protein, 9 aa, synthetic construct
  REGION 1..9: note = Description of Artificial Sequence: Synthetic peptide
QQTYSTPLT

SEQ ID NO: 20039 - DNA, 27 bp, synthetic construct
  misc_feature 1..27: note = Description of Artificial Sequence: Synthetic oligonucleotide
  source 1..27: mol_type = other DNA
caacagacttacagtaccccgctcact

SEQ ID NO: 20040 - protein, 9 aa, synthetic construct
  REGION 1..9: note = Description of Artificial Sequence: Synthetic peptide
QQTYSTPLT

SEQ ID NO: 20041 - DNA, 27 bp, synthetic construct
  misc_feature 1..27: note = Description of Artificial Sequence: Synthetic oligonucleotide
  source 1..27: mol_type = other DNA
caacagacttacagtaccccgctcact

SEQ ID NO: 20042 - protein, 9 aa, synthetic construct
  REGION 1..9: note = Description of Artificial Sequence: Synthetic peptide
QQTYSTPLT

SEQ ID NO: 20043 - DNA, 27 bp, synthetic construct
  misc_feature 1..27: note = Description of Artificial Sequence: Synthetic oligonucleotide
  source 1..27: mol_type = other DNA
caacagacttacagtaccccgctcact

SEQ ID NO: 20044 - protein, 9 aa, synthetic construct
  REGION 1..9: note = Description of Artificial Sequence: Synthetic peptide
QQTYSTPLT

SEQ ID NO: 20045 - DNA, 27 bp, synthetic construct
  misc_feature 1..27: note = Description of Artificial Sequence: Synthetic oligonucleotide
  source 1..27: mol_type = other DNA
caacaatatggtaggtcaccattcaat

SEQ ID NO: 20046 - protein, 9 aa, synthetic construct
  REGION 1..9: note = Description of Artificial Sequence: Synthetic peptide
QQYGRSPFN

SEQ ID NO: 20047 - DNA, 33 bp, synthetic construct
  misc_feature 1..33: note = Description of Artificial Sequence: Synthetic oligonucleotide
  source 1..33: mol_type = other DNA
cagtcctatgacaacagcctgagtggttcggta

SEQ ID NO: 20048 - protein, 11 aa, synthetic construct
  REGION 1..11: note = Description of Artificial Sequence: Synthetic peptide
QSYDNSLSGSV

SEQ ID NO: 20049 - DNA, 27 bp, synthetic construct
  misc_feature 1..27: note = Description of Artificial Sequence: Synthetic oligonucleotide
  source 1..27: mol_type = other DNA
atgcaaggtacacactggccgctcact

SEQ ID NO: 20050 - protein, 9 aa, synthetic construct
  REGION 1..9: note = Description of Artificial Sequence: Synthetic peptide
MQGTHWPLT

SEQ ID NO: 20051 - DNA, 27 bp, synthetic construct
  misc_feature 1..27: note = Description of Artificial Sequence: Synthetic oligonucleotide
  source 1..27: mol_type = other DNA
cagcagtattatagtactcctccgacg

SEQ ID NO: 20052 - protein, 9 aa, synthetic construct
  REGION 1..9: note = Description of Artificial Sequence: Synthetic peptide
QQYYSTPPT

SEQ ID NO: 20053 - DNA, 27 bp, synthetic construct
  misc_feature 1..27: note = Description of Artificial Sequence: Synthetic oligonucleotide
  source 1..27: mol_type = other DNA
caacaggctaacagtttcccattcact

SEQ ID NO: 20054 - protein, 9 aa, synthetic construct
  REGION 1..9: note = Description of Artificial Sequence: Synthetic peptide
QQANSFPFT

SEQ ID NO: 20055 - DNA, 27 bp, synthetic construct
  misc_feature 1..27: note = Description of Artificial Sequence: Synthetic oligonucleotide
  source 1..27: mol_type = other DNA
caacagacttacagtaccccgctcact

SEQ ID NO: 20056 - protein, 9 aa, synthetic construct
  REGION 1..9: note = Description of Artificial Sequence: Synthetic peptide
QQTYSTPLT

SEQ ID NO: 20057 - DNA, 27 bp, synthetic construct
  misc_feature 1..27: note = Description of Artificial Sequence: Synthetic oligonucleotide
  source 1..27: mol_type = other DNA
cagcaatattatagttctcctcctact

SEQ ID NO: 20058 - protein, 9 aa, synthetic construct
  REGION 1..9: note = Description of Artificial Sequence: Synthetic peptide
QQYYSSPPT

SEQ ID NO: 20059 - DNA, 27 bp, synthetic construct
  misc_feature 1..27: note = Description of Artificial Sequence: Synthetic oligonucleotide
  source 1..27: mol_type = other DNA
caccaatatcttagtagtcctctgacg

SEQ ID NO: 20060 - protein, 9 aa, synthetic construct
  REGION 1..9: note = Description of Artificial Sequence: Synthetic peptide
HQYLSSPLT

SEQ ID NO: 20061 - DNA, 27 bp, synthetic construct
  misc_feature 1..27: note = Description of Artificial Sequence: Synthetic oligonucleotide
  source 1..27: mol_type = other DNA
cagcagtataatacctggcctctcact

SEQ ID NO: 20062 - protein, 9 aa, synthetic construct
  REGION 1..9: note = Description of Artificial Sequence: Synthetic peptide
QQYNTWPLT

SEQ ID NO: 20063 - DNA, 27 bp, synthetic construct
  misc_feature 1..27: note = Description of Artificial Sequence: Synthetic oligonucleotide
  source 1..27: mol_type = other DNA
caacagagtcacagtttcccattcact

SEQ ID NO: 20064 - protein, 9 aa, synthetic construct
  REGION 1..9: note = Description of Artificial Sequence: Synthetic peptide
QQSHSFPFT

SEQ ID NO: 20065 - DNA, 27 bp, synthetic construct
  misc_feature 1..27: note = Description of Artificial Sequence: Synthetic oligonucleotide
  source 1..27: mol_type = other DNA
caggcgcggaacagccgcagaggggta

SEQ ID NO: 20066 - protein, 9 aa, synthetic construct
  REGION 1..9: note = Description of Artificial Sequence: Synthetic peptide
QARNSRRGV

SEQ ID NO: 20067 - DNA, 27 bp, synthetic construct
  misc_feature 1..27: note = Description of Artificial Sequence: Synthetic oligonucleotide
  source 1..27: mol_type = other DNA
caggcgtgggacaacagaactatggta

SEQ ID NO: 20068 - protein, 9 aa, synthetic construct
  REGION 1..9: note = Description of Artificial Sequence: Synthetic peptide
QAWDNRTMV

SEQ ID NO: 20069 - DNA, 33 bp, synthetic construct; identical to SEQ ID NO: 18941
  misc_feature 1..33: note = Description of Artificial Sequence: Synthetic oligonucleotide
  source 1..33: mol_type = other DNA

SEQ ID NO: 20070 - protein, 11 aa, synthetic construct
  REGION 1..11: note = Description of Artificial Sequence: Synthetic peptide
TAWDDSLNGWV

SEQ ID NO: 20071 - DNA, 33 bp, synthetic construct; identical to SEQ ID NO: 19463
  misc_feature 1..33: note = Description of Artificial Sequence: Synthetic oligonucleotide
  source 1..33: mol_type = other DNA

SEQ ID NO: 20072 - protein, 11 aa, synthetic construct
  REGION 1..11: note = Description of Artificial Sequence: Synthetic peptide
AAWDDSLNGWV

SEQ ID NO: 20073 - DNA, 33 bp, synthetic construct
  misc_feature 1..33: note = Description of Artificial Sequence: Synthetic oligonucleotide
  source 1..33: mol_type = other DNA
acagcatgggatgacagcctgaatgattgggtg

SEQ ID NO: 20074 - protein, 11 aa, synthetic construct
  REGION 1..11: note = Description of Artificial Sequence: Synthetic peptide
TAWDDSLNDWV

SEQ ID NO: 20075 - DNA, 27 bp, synthetic construct
  misc_feature 1..27: note = Description of Artificial Sequence: Synthetic oligonucleotide
  source 1..27: mol_type = other DNA
caggcgtgggacagcacccctgtgata

SEQ ID NO: 20076 - protein, 9 aa, synthetic construct
  REGION 1..9: note = Description of Artificial Sequence: Synthetic peptide
QAWDSTPVI

SEQ ID NO: 20077 - DNA, 27 bp, synthetic construct
  misc_feature 1..27: note = Description of Artificial Sequence: Synthetic oligonucleotide
  source 1..27: mol_type = other DNA
caggcgtgggacagcagcactgtggta

SEQ ID NO: 20078 - protein, 9 aa, synthetic construct
  REGION 1..9: note = Description of Artificial Sequence: Synthetic peptide
QAWDSSTVV

SEQ ID NO: 20079 - DNA, 27 bp, synthetic construct
  misc_feature 1..27: note = Description of Artificial Sequence: Synthetic oligonucleotide
  source 1..27: mol_type = other DNA
ctacagcatcatagttatcctcggacg

SEQ ID NO: 20080 - protein, 9 aa, synthetic construct
  REGION 1..9: note = Description of Artificial Sequence: Synthetic peptide
LQHHSYPRT

SEQ ID NO: 20081 - DNA, 27 bp, synthetic construct
  misc_feature 1..27: note = Description of Artificial Sequence: Synthetic oligonucleotide
  source 1..27: mol_type = other DNA
cagcaatattttagtactccgtggacg

SEQ ID NO: 20082 - protein, 9 aa, synthetic construct
  REGION 1..9: note = Description of Artificial Sequence: Synthetic peptide
QQYFSTPWT

SEQ ID NO: 20083 - DNA, 27 bp, synthetic construct
  misc_feature 1..27: note = Description of Artificial Sequence: Synthetic oligonucleotide
  source 1..27: mol_type = other DNA
cagcagtcttttacctggctccggacg

SEQ ID NO: 20084 - protein, 9 aa, synthetic construct
  REGION 1..9: note = Description of Artificial Sequence: Synthetic peptide
QQSFTWLRT

SEQ ID NO: 20085 - DNA, 27 bp, synthetic construct
  misc_feature 1..27: note = Description of Artificial Sequence: Synthetic oligonucleotide
  source 1..27: mol_type = other DNA
caacattatcttacttacccgctcact

SEQ ID NO: 20086 - protein, 9 aa, synthetic construct
  REGION 1..9: note = Description of Artificial Sequence: Synthetic peptide
QHYLTYPLT

SEQ ID NO: 20087 - DNA, 27 bp, synthetic construct
  misc_feature 1..27: note = Description of Artificial Sequence: Synthetic oligonucleotide
  source 1..27: mol_type = other DNA
cagcagtatgagatctcaccgtggacg

SEQ ID NO: 20088 - protein, 9 aa, synthetic construct
  REGION 1..9: note = Description of Artificial Sequence: Synthetic peptide
QQYEISPWT

SEQ ID NO: 20089 - DNA, 27 bp, synthetic construct
  misc_feature 1..27: note = Description of Artificial Sequence: Synthetic oligonucleotide
  source 1..27: mol_type = other DNA
cagcaatattttagtgttcctctgacg

SEQ ID NO: 20090 - protein, 9 aa, synthetic construct
  REGION 1..9: note = Description of Artificial Sequence: Synthetic peptide
QQYFSVPLT

SEQ ID NO: 20091 - DNA, 27 bp, synthetic construct
  misc_feature 1..27: note = Description of Artificial Sequence: Synthetic oligonucleotide
  source 1..27: mol_type = other DNA
cagcaatattatagtattcctctgacg

SEQ ID NO: 20092 - protein, 9 aa, synthetic construct
  REGION 1..9: note = Description of Artificial Sequence: Synthetic peptide
QQYYSIPLT

SEQ ID NO: 20093 - DNA, 27 bp, synthetic construct
  misc_feature 1..27: note = Description of Artificial Sequence: Synthetic oligonucleotide
  source 1..27: mol_type = other DNA
cagcaatatcatagtattcctccgacg

SEQ ID NO: 20094 - protein, 9 aa, synthetic construct
  REGION 1..9: note = Description of Artificial Sequence: Synthetic peptide
QQYHSIPPT

SEQ ID NO: 20095 - DNA, 27 bp, synthetic construct
  misc_feature 1..27: note = Description of Artificial Sequence: Synthetic oligonucleotide
  source 1..27: mol_type = other DNA
cagcaatattatagtactccgtgcagt

SEQ ID NO: 20096 - protein, 9 aa, synthetic construct
  REGION 1..9: note = Description of Artificial Sequence: Synthetic peptide
QQYYSTPCS

SEQ ID NO: 20097 - DNA, 27 bp, synthetic construct
  misc_feature 1..27: note = Description of Artificial Sequence: Synthetic oligonucleotide
  source 1..27: mol_type = other DNA
cagcaatatcatagttctcctctgacg

SEQ ID NO: 20098 - protein, 9 aa, synthetic construct
  REGION 1..9: note = Description of Artificial Sequence: Synthetic peptide
QQYHSSPLT

SEQ ID NO: 20099 - DNA, 27 bp, synthetic construct
  misc_feature 1..27: note = Description of Artificial Sequence: Synthetic oligonucleotide
  source 1..27: mol_type = other DNA
ttacagcataatgattacccattcact

SEQ ID NO: 20100 - protein, 9 aa, synthetic construct
  REGION 1..9: note = Description of Artificial Sequence: Synthetic peptide
LQHNDYPFT

SEQ ID NO: 20101 - DNA, 27 bp, synthetic construct
  misc_feature 1..27: note = Description of Artificial Sequence: Synthetic oligonucleotide
  source 1..27: mol_type = other DNA
ctacagcataatgattacccattcact

SEQ ID NO: 20102 - protein, 9 aa, synthetic construct
  REGION 1..9: note = Description of Artificial Sequence: Synthetic peptide
LQHNDYPFT

SEQ ID NO: 20103 - DNA, 27 bp, synthetic construct
  misc_feature 1..27: note = Description of Artificial Sequence: Synthetic oligonucleotide
  source 1..27: mol_type = other DNA
caacaggctaacagtttcccgtggacg

SEQ ID NO: 20104 - protein, 9 aa, synthetic construct
  REGION 1..9: note = Description of Artificial Sequence: Synthetic peptide
QQANSFPWT

SEQ ID NO: 20105 - DNA, 27 bp, synthetic construct
  misc_feature 1..27: note = Description of Artificial Sequence: Synthetic oligonucleotide
  source 1..27: mol_type = other DNA
ctacagcataatgattacccattcact

SEQ ID NO: 20106 - protein, 9 aa, synthetic construct
  REGION 1..9: note = Description of Artificial Sequence: Synthetic peptide
LQHNDYPFT

SEQ ID NO: 20107 - DNA, 27 bp, synthetic construct
  misc_feature 1..27: note = Description of Artificial Sequence: Synthetic oligonucleotide
  source 1..27: mol_type = other DNA
ctacagcataatgattacccattcact

SEQ ID NO: 20108 - protein, 9 aa, synthetic construct
  REGION 1..9: note = Description of Artificial Sequence: Synthetic peptide
LQHNDYPFT

SEQ ID NO: 20109 - DNA, 27 bp, synthetic construct
  misc_feature 1..27: note = Description of Artificial Sequence: Synthetic oligonucleotide
  source 1..27: mol_type = other DNA
caacaggctaacagtttcccgtggacg

SEQ ID NO: 20110 - protein, 9 aa, synthetic construct
  REGION 1..9: note = Description of Artificial Sequence: Synthetic peptide
QQANSFPWT

SEQ ID NO: 20111 - DNA, 36 bp, synthetic construct
  misc_feature 1..36: note = Description of Artificial Sequence: Synthetic oligonucleotide
  source 1..36: mol_type = other DNA
agaggagcagtggctccgtactacggtatggacgtc

SEQ ID NO: 20112 - protein, 12 aa, synthetic construct
  REGION 1..12: note = Description of Artificial Sequence: Synthetic peptide
RGAVAPYYGMDV

SEQ ID NO: 20113 - DNA, 27 bp, synthetic construct
  misc_feature 1..27: note = Description of Artificial Sequence: Synthetic oligonucleotide
  source 1..27: mol_type = other DNA
agcagtggctggtacatgtttgactac

SEQ ID NO: 20114 - protein, 9 aa, synthetic construct
  REGION 1..9: note = Description of Artificial Sequence: Synthetic peptide
SSGWYMFDY

SEQ ID NO: 20115 - DNA, 27 bp, synthetic construct
  misc_feature 1..27: note = Description of Artificial Sequence: Synthetic oligonucleotide
  source 1..27: mol_type = other DNA
tccagtggctggaactggttcgacccc

SEQ ID NO: 20116 - protein, 9 aa, synthetic construct
  REGION 1..9: note = Description of Artificial Sequence: Synthetic peptide
SSGWNWFDP

SEQ ID NO: 20117 - DNA, 36 bp, synthetic construct
  misc_feature 1..36: note = Description of Artificial Sequence: Synthetic oligonucleotide
  source 1..36: mol_type = other DNA
gatcacagatatggggttcggggaggctttgactac

SEQ ID NO: 20118 - protein, 12 aa, synthetic construct
  REGION 1..12: note = Description of Artificial Sequence: Synthetic peptide
DHRYGVRGGFDY

SEQ ID NO: 20119 - DNA, 27 bp, synthetic construct
  misc_feature 1..27: note = Description of Artificial Sequence: Synthetic oligonucleotide
  source 1..27: mol_type = other DNA
ggggaagcagtggctgtcttcgacccc

SEQ ID NO: 20120 - protein, 9 aa, synthetic construct
  REGION 1..9: note = Description of Artificial Sequence: Synthetic peptide
GEAVAVFDP

SEQ ID NO: 20121 - DNA, 51 bp, synthetic construct
  misc_feature 1..51: note = Description of Artificial Sequence: Synthetic oligonucleotide
  source 1..51: mol_type = other DNA
gatcgggtggagggttcggggactccctactactactacggtatggacgtc

SEQ ID NO: 20122 - protein, 17 aa, synthetic construct
  REGION 1..17: note = Description of Artificial Sequence: Synthetic peptide
DRVEGSGTPYYYYGMDV

SEQ ID NO: 20123 - DNA, 24 bp, synthetic construct
  misc_feature 1..24: note = Description of Artificial Sequence: Synthetic oligonucleotide
  source 1..24: mol_type = other DNA
gatagtaggtcgtcctgggactac

SEQ ID NO: 20124 - protein, 8 aa, synthetic construct
  REGION 1..8: note = Description of Artificial Sequence: Synthetic peptide
DSRSSWDY

SEQ ID NO: 20125 - DNA, 21 bp, synthetic construct
  misc_feature 1..21: note = Description of Artificial Sequence: Synthetic oligonucleotide
  source 1..21: mol_type = other DNA
gggttcggtgactgggactac

SEQ ID NO: 20126 - protein, 7 aa, synthetic construct
  REGION 1..7: note = Description of Artificial Sequence: Synthetic peptide
GFGDWDY

SEQ ID NO: 20127 - DNA, 24 bp, synthetic construct
  misc_feature 1..24: note = Description of Artificial Sequence: Synthetic oligonucleotide
  source 1..24: mol_type = other DNA
gacggtaccagcagctttgactac

SEQ ID NO: 20128 - protein, 8 aa, synthetic construct
  REGION 1..8: note = Description of Artificial Sequence: Synthetic peptide
DGTSSFDY

SEQ ID NO: 20129 - DNA, 24 bp, synthetic construct
  misc_feature 1..24: note = Description of Artificial Sequence: Synthetic oligonucleotide
  source 1..24: mol_type = other DNA
gacggtaccagtagctttgactac

SEQ ID NO: 20130 - protein, 8 aa, synthetic construct
  REGION 1..8: note = Description of Artificial Sequence: Synthetic peptide
DGTSSFDY

SEQ ID NO: 20131 - DNA, 21 bp, synthetic construct
  misc_feature 1..21: note = Description of Artificial Sequence: Synthetic oligonucleotide
  source 1..21: mol_type = other DNA
gactacggcggtatggacgtc

SEQ ID NO: 20132 - protein, 7 aa, synthetic construct
  REGION 1..7: note = Description of Artificial Sequence: Synthetic peptide
DYGGMDV

SEQ ID NO: 20133 - DNA, 42 bp, synthetic construct
  misc_feature 1..42: note = Description of Artificial Sequence: Synthetic oligonucleotide
  source 1..42: mol_type = other DNA
gaaaactatagcagtggctggtacgggtacggtatggacgtc

SEQ ID NO: 20134 - protein, 14 aa, synthetic construct
  REGION 1..14: note = Description of Artificial Sequence: Synthetic peptide
ENYSSGWYGYGMDV

SEQ ID NO: 20135 - DNA, 36 bp, synthetic construct
  misc_feature 1..36: note = Description of Artificial Sequence: Synthetic oligonucleotide
  source 1..36: mol_type = other DNA
aggtatagcagcagctggtcgggcggtatggacgtc

SEQ ID NO: 20136 - protein, 12 aa, synthetic construct
  REGION 1..12: note = Description of Artificial Sequence: Synthetic peptide
RYSSSWSGGMDV

SEQ ID NO: 20137 - DNA, 33 bp, synthetic construct
  misc_feature 1..33: note = Description of Artificial Sequence: Synthetic oligonucleotide
  source 1..33: mol_type = other DNA
gatcgggggatcgggtacaacgatatggacgtc

SEQ ID NO: 20138 - protein, 11 aa, synthetic construct
  REGION 1..11: note = Description of Artificial Sequence: Synthetic peptide
DRGIGYNDMDV

SEQ ID NO: 20139 - DNA, 36 bp, synthetic construct
  misc_feature 1..36: note = Description of Artificial Sequence: Synthetic oligonucleotide
  source 1..36: mol_type = other DNA
gatcattacgatttttggagtggtcactttgactac

SEQ ID NO: 20140 - protein, 12 aa, synthetic construct
  REGION 1..12: note = Description of Artificial Sequence: Synthetic peptide
DHYDFWSGHFDY

SEQ ID NO: 20141 - DNA, 24 bp, synthetic construct
  misc_feature 1..24: note = Description of Artificial Sequence: Synthetic oligonucleotide
  source 1..24: mol_type = other DNA
gaagtggggatgacttctgactac

SEQ ID NO: 20142 - protein, 8 aa, synthetic construct
  REGION 1..8: note = Description of Artificial Sequence: Synthetic peptide
EVGMTSDY

SEQ ID NO: 20143 - DNA, 39 bp, synthetic construct
  misc_feature 1..39: note = Description of Artificial Sequence: Synthetic oligonucleotide
  source 1..39: mol_type = other DNA
ggagacccgtataactggaactcctacgctatggacgtc

SEQ ID NO: 20144 - protein, 13 aa, synthetic construct
  REGION 1..13: note = Description of Artificial Sequence: Synthetic peptide
GDPYNWNSYAMDV

SEQ ID NO: 20145 - DNA, 42 bp, synthetic construct
  misc_feature 1..42: note = Description of Artificial Sequence: Synthetic oligonucleotide
  source 1..42: mol_type = other DNA
gaacggtatagcagtggcttgtacgactacggtatggacgtc

SEQ ID NO: 20146 - protein, 14 aa, synthetic construct
  REGION 1..14: note = Description of Artificial Sequence: Synthetic peptide
ERYSSGLYDYGMDV

SEQ ID NO: 20147 - DNA, 36 bp, synthetic construct
  misc_feature 1..36: note = Description of Artificial Sequence: Synthetic oligonucleotide
  source 1..36: mol_type = other DNA
gacaaaaatataatgggagatacttggtttgacttc

SEQ ID NO: 20148 - protein, 12 aa, synthetic construct
  REGION 1..12: note = Description of Artificial Sequence: Synthetic peptide
DKNIMGDTWFDF

SEQ ID NO: 20149 - DNA, 30 bp, synthetic construct
  misc_feature 1..30: note = Description of Artificial Sequence: Synthetic oligonucleotide
  source 1..30: mol_type = other DNA
ggaaagaactatggctcctactttgactac

SEQ ID NO: 20150 - protein, 10 aa, synthetic construct
  REGION 1..10: note = Description of Artificial Sequence: Synthetic peptide
GKNYGSYFDY

SEQ ID NO: 20151 - DNA, 21 bp, synthetic construct
  misc_feature 1..21: note = Description of Artificial Sequence: Synthetic oligonucleotide
  source 1..21: mol_type = other DNA
gactacggcggtatggacgtc

SEQ ID NO: 20152 - protein, 7 aa, synthetic construct
  REGION 1..7: note = Description of Artificial Sequence: Synthetic peptide
DYGGMDV

SEQ ID NO: 20153 - DNA, 21 bp, synthetic construct
  misc_feature 1..21: note = Description of Artificial Sequence: Synthetic oligonucleotide
  source 1..21: mol_type = other DNA
gactacggcggtatggacgtc

SEQ ID NO: 20154 - protein, 7 aa, synthetic construct
  REGION 1..7: note = Description of Artificial Sequence: Synthetic peptide
DYGGMDV

SEQ ID NO: 20155 - DNA, 33 bp, synthetic construct
  misc_feature 1..33: note = Description of Artificial Sequence: Synthetic oligonucleotide
  source 1..33: mol_type = other DNA
ggtacccacgggtactactacggtgtggacgtc

SEQ ID NO: 20156 - protein, 11 aa, synthetic construct
  REGION 1..11: note = Description of Artificial Sequence: Synthetic peptide
GTHGYYYGVDV

SEQ ID NO: 20157 - DNA, 21 bp, synthetic construct
  misc_feature 1..21: note = Description of Artificial Sequence: Synthetic oligonucleotide
  source 1..21: mol_type = other DNA
gactacggcggtatggacgtc

SEQ ID NO: 20158 - protein, 7 aa, synthetic construct
  REGION 1..7: note = Description of Artificial Sequence: Synthetic peptide
DYGGMDV

SEQ ID NO: 20159 - DNA, 36 bp, synthetic construct
  misc_feature 1..36: note = Description of Artificial Sequence: Synthetic oligonucleotide
  source 1..36: mol_type = other DNA
atggactacagtaactactactacggtatggacgtc

SEQ ID NO: 20160 - protein, 12 aa, synthetic construct
  REGION 1..12: note = Description of Artificial Sequence: Synthetic peptide
MDYSNYYYGMDV

SEQ ID NO: 20161 - DNA, 21 bp, synthetic construct
  misc_feature 1..21: note = Description of Artificial Sequence: Synthetic oligonucleotide
  source 1..21: mol_type = other DNA
gactacggcggtatggacgtc

SEQ ID NO: 20162 - protein, 7 aa, synthetic construct
  REGION 1..7: note = Description of Artificial Sequence: Synthetic peptide
DYGGMDV

SEQ ID NO: 20163 - DNA, 42 bp, synthetic construct
  misc_feature 1..42: note = Description of Artificial Sequence: Synthetic oligonucleotide
  source 1..42: mol_type = other DNA
gagttgtatagcagcaactggtacgactacggtatggacgtc

SEQ ID NO: 20164 - protein, 14 aa, synthetic construct
  REGION 1..14: note = Description of Artificial Sequence: Synthetic peptide
ELYSSNWYDYGMDV

SEQ ID NO: 20165 - DNA, 12 bp, synthetic construct
  misc_feature 1..12: note = Description of Artificial Sequence: Synthetic oligonucleotide
  source 1..12: mol_type = other DNA
agcctcgacctc

SEQ ID NO: 20166 - protein, 4 aa, synthetic construct
  REGION 1..4: note = Description of Artificial Sequence: Synthetic peptide
SLDL

SEQ ID NO: 20167 - DNA, 18 bp, synthetic construct
  misc_feature 1..18: note = Description of Artificial Sequence: Synthetic oligonucleotide
  source 1..18: mol_type = other DNA
gtcaactcttttgactcc

SEQ ID NO: 20168 - protein, 6 aa, synthetic construct
  REGION 1..6: note = Description of Artificial Sequence: Synthetic peptide
VNSFDS

SEQ ID NO: 20169 - DNA, 39 bp, synthetic construct
  misc_feature 1..39: note = Description of Artificial Sequence: Synthetic oligonucleotide
  source 1..39: mol_type = other DNA
agaggccgtgaatatagtggctacgattactttgactac

SEQ ID NO: 20170 - protein, 13 aa, synthetic construct
  REGION 1..13: note = Description of Artificial Sequence: Synthetic peptide
RGREYSGYDYFDY

SEQ ID NO: 20171 - DNA, 27 bp, synthetic construct
  misc_feature 1..27: note = Description of Artificial Sequence: Synthetic oligonucleotide
  source 1..27: mol_type = other DNA
agcagtggctggtacgtttttgactac

SEQ ID NO: 20172 - protein, 9 aa, synthetic construct
  REGION 1..9: note = Description of Artificial Sequence: Synthetic peptide
SSGWYVFDY

SEQ ID NO: 20173 - DNA, 27 bp, synthetic construct
  misc_feature 1..27: note = Description of Artificial Sequence: Synthetic oligonucleotide
  source 1..27: mol_type = other DNA
agcagtggctggtacgtttttgactcc

SEQ ID NO: 20174 - protein, 9 aa, synthetic construct
  REGION 1..9: note = Description of Artificial Sequence: Synthetic peptide
SSGWYVFDS

SEQ ID NO: 20175 - DNA, 27 bp, synthetic construct
  misc_feature 1..27: note = Description of Artificial Sequence: Synthetic oligonucleotide
  source 1..27: mol_type = other DNA
agcagtggctggtacctctttgactac

SEQ ID NO: 20176 - protein, 9 aa, synthetic construct
  REGION 1..9: note = Description of Artificial Sequence: Synthetic peptide
SSGWYLFDY

SEQ ID NO: 20177 - DNA, 27 bp, synthetic construct
  misc_feature 1..27: note = Description of Artificial Sequence: Synthetic oligonucleotide
  source 1..27: mol_type = other DNA
cttgactctaactggggtcttgactac

SEQ ID NO: 20178 - protein, 9 aa, synthetic construct
  REGION 1..9: note = Description of Artificial Sequence: Synthetic peptide
LDSNWGLDY

SEQ ID NO: 20179 - DNA, 42 bp, synthetic construct
  misc_feature 1..42: note = Description of Artificial Sequence: Synthetic oligonucleotide
  source 1..42: mol_type = other DNA
gagaggtatagcagtggctggtacgactacggtttggacgtc

SEQ ID NO: 20180 - protein, 14 aa, synthetic construct
  REGION 1..14: note = Description of Artificial Sequence: Synthetic peptide
ERYSSGWYDYGLDV

SEQ ID NO: 20181 - DNA, 42 bp, synthetic construct
  misc_feature 1..42: note = Description of Artificial Sequence: Synthetic oligonucleotide
  source 1..42: mol_type = other DNA
gaacagtatagcagcagctggtacgacttcggtctggacgtc

SEQ ID NO: 20182 - protein, 14 aa, synthetic construct
  REGION 1..14: note = Description of Artificial Sequence: Synthetic peptide
EQYSSSWYDFGLDV

SEQ ID NO: 20183 - DNA, 45 bp, synthetic construct
  misc_feature 1..45: note = Description of Artificial Sequence: Synthetic oligonucleotide
  source 1..45: mol_type = other DNA
gaggaggatcgcagtggctggtactactactacggtatggacgtc

SEQ ID NO: 20184 - protein, 15 aa, synthetic construct
  REGION 1..15: note = Description of Artificial Sequence: Synthetic peptide
EEDRSGWYYYYGMDV

SEQ ID NO: 20185 - DNA, 24 bp, synthetic construct
  misc_feature 1..24: note = Description of Artificial Sequence: Synthetic oligonucleotide
  source 1..24: mol_type = other DNA
gcagtggctgtctcctttgactac

SEQ ID NO: 20186 - protein, 8 aa, synthetic construct
  REGION 1..8: note = Description of Artificial Sequence: Synthetic peptide
AVAVSFDY

SEQ ID NO: 20187 - DNA, 45 bp, synthetic construct
  misc_feature 1..45: note = Description of Artificial Sequence: Synthetic oligonucleotide
  source 1..45: mol_type = other DNA
gatagagcagtggctggaaactacttctactacggtatggacgtc

SEQ ID NO: 20188 - protein, 15 aa, synthetic construct
  REGION 1..15: note = Description of Artificial Sequence: Synthetic peptide
DRAVAGNYFYYGMDV

SEQ ID NO: 20189 - DNA, 27 bp, synthetic construct
  misc_feature 1..27: note = Description of Artificial Sequence: Synthetic oligonucleotide
  source 1..27: mol_type = other DNA
catgatttactttggtcccttgacttc

SEQ ID NO: 20190 - protein, 9 aa, synthetic construct
  REGION 1..9: note = Description of Artificial Sequence: Synthetic peptide
HDLLWSLDF

SEQ ID NO: 20191 - DNA, 27 bp, synthetic construct
  misc_feature 1..27: note = Description of Artificial Sequence: Synthetic oligonucleotide
  source 1..27: mol_type = other DNA
agtagtggctggtacaaatttgactac

SEQ ID NO: 20192 - protein, 9 aa, synthetic construct
  REGION 1..9: note = Description of Artificial Sequence: Synthetic peptide
SSGWYKFDY

SEQ ID NO: 20193 - DNA, 15 bp, synthetic construct
  misc_feature 1..15: note = Description of Artificial Sequence: Synthetic oligonucleotide
  source 1..15: mol_type = other DNA
gatagaggcagcagc

SEQ ID NO: 20194 - protein, 5 aa, synthetic construct
  REGION 1..5: note = Description of Artificial Sequence: Synthetic peptide
DRGSS

SEQ ID NO: 20195 - DNA, 15 bp, synthetic construct
  misc_feature 1..15: note = Description of Artificial Sequence: Synthetic oligonucleotide
  source 1..15: mol_type = other DNA
gatagaggcagcagc

SEQ ID NO: 20196 - protein, 5 aa, synthetic construct
  REGION 1..5: note = Description of Artificial Sequence: Synthetic peptide
DRGSS

SEQ ID NO: 20197 - DNA, 42 bp, synthetic construct
  misc_feature 1..42: note = Description of Artificial Sequence: Synthetic oligonucleotide
  source 1..42: mol_type = other DNA
gagagatataccagtggctggtatgactacggtatggacgtc

SEQ ID NO: 20198 - protein, 14 aa, synthetic construct
  REGION 1..14: note = Description of Artificial Sequence: Synthetic peptide
ERYTSGWYDYGMDV

SEQ ID NO: 20199 - DNA, 42 bp, synthetic construct; identical to SEQ ID NO: 20197
  misc_feature 1..42: note = Description of Artificial Sequence: Synthetic oligonucleotide
  source 1..42: mol_type = other DNA

SEQ ID NO: 20200 - protein, 14 aa, synthetic construct
  REGION 1..14: note = Description of Artificial Sequence: Synthetic peptide
ERYTSGWYDYGMDV

SEQ ID NO: 20201 - DNA, 24 bp, synthetic construct
  misc_feature 1..24: note = Description of Artificial Sequence: Synthetic oligonucleotide
  source 1..24: mol_type = other DNA
gatggtaccagctcgtttgactac

SEQ ID NO: 20202 - protein, 8 aa, synthetic construct
  REGION 1..8: note = Description of Artificial Sequence: Synthetic peptide
DGTSSFDY

SEQ ID NO: 20203 - DNA, 24 bp, synthetic construct
  misc_feature 1..24: note = Description of Artificial Sequence: Synthetic oligonucleotide
  source 1..24: mol_type = other DNA
gatggtaccagctcgtttgactac

SEQ ID NO: 20204 - protein, 8 aa, synthetic construct
  REGION 1..8: note = Description of Artificial Sequence: Synthetic peptide
DGTSSFDY

SEQ ID NO: 20205 - DNA, 24 bp, synthetic construct
  misc_feature 1..24: note = Description of Artificial Sequence: Synthetic oligonucleotide
  source 1..24: mol_type = other DNA
gatggtaccagctcgtttgactac

SEQ ID NO: 20206 - protein, 8 aa, synthetic construct
  REGION 1..8: note = Description of Artificial Sequence: Synthetic peptide
DGTSSFDY

SEQ ID NO: 20207 - DNA, 24 bp, synthetic construct
  misc_feature 1..24: note = Description of Artificial Sequence: Synthetic oligonucleotide
  source 1..24: mol_type = other DNA
gatggtaccagctcgtttgactac

SEQ ID NO: 20208 - protein, 8 aa, synthetic construct
  REGION 1..8: note = Description of Artificial Sequence: Synthetic peptide
DGTSSFDY

SEQ ID NO: 20209 - DNA, 45 bp, synthetic construct
  misc_feature 1..45: note = Description of Artificial Sequence: Synthetic oligonucleotide
  source 1..45: mol_type = other DNA
gtgtattactatggttcggggagttattataacgagtttgacaac

SEQ ID NO: 20210 - protein, 15 aa, synthetic construct
  REGION 1..15: note = Description of Artificial Sequence: Synthetic peptide
VYYYGSGSYYNEFDN

SEQ ID NO: 20211 - DNA, 45 bp, synthetic construct; identical to SEQ ID NO: 20209
  misc_feature 1..45: note = Description of Artificial Sequence: Synthetic oligonucleotide
  source 1..45: mol_type = other DNA

SEQ ID NO: 20212 - protein, 15 aa, synthetic construct
  REGION 1..15: note = Description of Artificial Sequence: Synthetic peptide
VYYYGSGSYYNEFDN

SEQ ID NO: 20213 - DNA, 45 bp, synthetic construct
  misc_feature 1..45: note = Description of Artificial Sequence: Synthetic oligonucleotide
  source 1..45: mol_type = other DNA
gccttttactatggttcggggacttattataacgaatttgactac

SEQ ID NO: 20214 - protein, 15 aa, synthetic construct
  REGION 1..15: note = Description of Artificial Sequence: Synthetic peptide
AFYYGSGTYYNEFDY

SEQ ID NO: 20215 - DNA, 30 bp, synthetic construct
  misc_feature 1..30: note = Description of Artificial Sequence: Synthetic oligonucleotide
  source 1..30: mol_type = other DNA
accggtgtcagctgctgctattttcactat

SEQ ID NO: 20216 - protein, 10 aa, synthetic construct
  REGION 1..10: note = Description of Artificial Sequence: Synthetic peptide
TGVSCCYFHY

SEQ ID NO: 20217 - DNA, 24 bp, synthetic construct
  misc_feature 1..24: note = Description of Artificial Sequence: Synthetic oligonucleotide
  source 1..24: mol_type = other DNA
atagcagcagttgcctttgactac

SEQ ID NO: 20218 - protein, 8 aa, synthetic construct
  REGION 1..8: note = Description of Artificial Sequence: Synthetic peptide
IAAVAFDY

SEQ ID NO: 20219 - DNA, 57 bp, synthetic construct
  misc_feature 1..57: note = Description of Artificial Sequence: Synthetic oligonucleotide
  source 1..57: mol_type = other DNA
ggatattgtagtagttccagctgctatttgcaaccgggttattacggtatggacgtc

SEQ ID NO: 20220 - protein, 19 aa, synthetic construct
  REGION 1..19: note = Description of Artificial Sequence: Synthetic peptide
GYCSSSSCYLQPGYYGMDV

SEQ ID NO: 20221 - DNA, 27 bp, synthetic construct
  misc_feature 1..27: note = Description of Artificial Sequence: Synthetic oligonucleotide
  source 1..27: mol_type = other DNA
aggggacagcagctggccctcgactac

SEQ ID NO: 20222 - protein, 9 aa, synthetic construct
  REGION 1..9: note = Description of Artificial Sequence: Synthetic peptide
RGQQLALDY

SEQ ID NO: 20223 - DNA, 63 bp, synthetic construct
  misc_feature 1..63: note = Description of Artificial Sequence: Synthetic oligonucleotide
  source 1..63: mol_type = other DNA
gatagggtatattgtagtagtaccagctgctccccttactactactactacggtatggacgtc

SEQ ID NO: 20224 - protein, 21 aa, synthetic construct
  REGION 1..21: note = Description of Artificial Sequence: Synthetic peptide
DRVYCSSTSCSPYYYYYGMDV

SEQ ID NO: 20225 - DNA, 24 bp, synthetic construct
  misc_feature 1..24: note = Description of Artificial Sequence: Synthetic oligonucleotide
  source 1..24: mol_type = other DNA
cttatagaagtggcctttgactat

SEQ ID NO: 20226 - protein, 8 aa, synthetic construct
  REGION 1..8: note = Description of Artificial Sequence: Synthetic peptide
LIEVAFDY

SEQ ID NO: 20227 - DNA, 45 bp, synthetic construct
  misc_feature 1..45: note = Description of Artificial Sequence: Synthetic oligonucleotide
  source 1..45: mol_type = other DNA
tggggacgtggatacagctatgaatactactacggtatggacgtc

SEQ ID NO: 20228 - protein, 15 aa, synthetic construct
  REGION 1..15: note = Description of Artificial Sequence: Synthetic peptide
WGRGYSYEYYYGMDV

SEQ ID NO: 20229 - DNA, 45 bp, synthetic construct
  misc_feature 1..45: note = Description of Artificial Sequence: Synthetic oligonucleotide
  source 1..45: mol_type = other DNA
tcgtactactatggttcggggagttattataacgagtttgactac

SEQ ID NO: 20230 - protein, 15 aa, synthetic construct
  REGION 1..15: note = Description of Artificial Sequence: Synthetic peptide
SYYYGSGSYYNEFDY

SEQ ID NO: 20231 - DNA, 24 bp, synthetic construct
  misc_feature 1..24: note = Description of Artificial Sequence: Synthetic oligonucleotide
  source 1..24: mol_type = other DNA
gagcttgcctggtacgaggactac

SEQ ID NO: 20232 - protein, 8 aa, synthetic construct
  REGION 1..8: note = Description of Artificial Sequence: Synthetic peptide
ELAWYEDY

SEQ ID NO: 20233 - DNA, 18 bp, synthetic construct
  misc_feature 1..18: note = Description of Artificial Sequence: Synthetic oligonucleotide
  source 1..18: mol_type = other DNA
gtggcttcatttgactac

SEQ ID NO: 20234 - protein, 6 aa, synthetic construct
  REGION 1..6: note = Description of Artificial Sequence: Synthetic peptide
VASFDY

SEQ ID NO: 20235 - DNA, 27 bp, synthetic construct
  misc_feature 1..27: note = Description of Artificial Sequence: Synthetic oligonucleotide
  source 1..27: mol_type = other DNA
catggaaaagactggggccttgactac

SEQ ID NO: 20236 - protein, 9 aa, synthetic construct
  REGION 1..9: note = Description of Artificial Sequence: Synthetic peptide
HGKDWGLDY

SEQ ID NO: 20237 - DNA, 15 bp, synthetic construct
  misc_feature 1..15: note = Description of Artificial Sequence: Synthetic oligonucleotide
  source 1..15: mol_type = other DNA
gatcgaggctccatc

SEQ ID NO: 20238 - protein, 5 aa, synthetic construct
  REGION 1..5: note = Description of Artificial Sequence: Synthetic peptide
DRGSI

SEQ ID NO: 20239 - DNA, 24 bp, synthetic construct
  misc_feature 1..24: note = Description of Artificial Sequence: Synthetic oligonucleotide
  source 1..24: mol_type = other DNA
gatcttggctggacggaagagtac

SEQ ID NO: 20240 - protein, 8 aa, synthetic construct
  REGION 1..8: note = Description of Artificial Sequence: Synthetic peptide
DLGWTEEY

SEQ ID NO: 20241 - DNA, 27 bp, synthetic construct
  misc_feature 1..27: note = Description of Artificial Sequence: Synthetic oligonucleotide
  source 1..27: mol_type = other DNA
catagtagcagctggtcccttgacaac

SEQ ID NO: 20242 - protein, 9 aa, synthetic construct
  REGION 1..9: note = Description of Artificial Sequence: Synthetic peptide
HSSSWSLDN

SEQ ID NO: 20243 - DNA, 24 bp, synthetic construct
  misc_feature 1..24: note = Description of Artificial Sequence: Synthetic oligonucleotide
  source 1..24: mol_type = other DNA
gaactggggttccggtctgactac

SEQ ID NO: 20244 - protein, 8 aa, synthetic construct
  REGION 1..8: note = Description of Artificial Sequence: Synthetic peptide
ELGFRSDY

SEQ ID NO: 20245 - DNA, 18 bp, synthetic construct
  misc_feature 1..18: note = Description of Artificial Sequence: Synthetic oligonucleotide
  source 1..18: mol_type = other DNA
gtagcagcctttgactac

SEQ ID NO: 20246 - protein, 6 aa, synthetic construct
  REGION 1..6: note = Description of Artificial Sequence: Synthetic peptide
VAAFDY

SEQ ID NO: 20247 - DNA, 42 bp, synthetic construct
  misc_feature 1..42: note = Description of Artificial Sequence: Synthetic oligonucleotide
  source 1..42: mol_type = other DNA
gaaaagtatagcagcagctggtacgactacggtatggacgtc

SEQ ID NO: 20248 - protein, 14 aa, synthetic construct
  REGION 1..14: note = Description of Artificial Sequence: Synthetic peptide
EKYSSSWYDYGMDV

SEQ ID NO: 20249 - DNA, 48 bp, synthetic construct
  misc_feature 1..48: note = Description of Artificial Sequence: Synthetic oligonucleotide
  source 1..48: mol_type = other DNA
gtaagcagtggctggtcccatcactactactactacggtatggacgtc

SEQ ID NO: 20250 - protein, 16 aa, synthetic construct
  REGION 1..16: note = Description of Artificial Sequence: Synthetic peptide
VSSGWSHHYYYYGMDV

SEQ ID NO: 20251 - DNA, 27 bp, synthetic construct
  misc_feature 1..27: note = Description of Artificial Sequence: Synthetic oligonucleotide
  source 1..27: mol_type = other DNA
catggaaaagactggggccttgactac

SEQ ID NO: 20252 - protein, 9 aa, synthetic construct
  REGION 1..9: note = Description of Artificial Sequence: Synthetic peptide
HGKDWGLDY

SEQ ID NO: 20253 - DNA, 24 bp, synthetic construct
  misc_feature 1..24: note = Description of Artificial Sequence: Synthetic oligonucleotide
  source 1..24: mol_type = other DNA
gagctaggcttccagtctgactac

SEQ ID NO: 20254 - protein, 8 aa, synthetic construct
  REGION 1..8: note = Description of Artificial Sequence: Synthetic peptide
ELGFQSDY

SEQ ID NO: 20255 - DNA, 27 bp, synthetic construct
  misc_feature 1..27: note = Description of Artificial Sequence: Synthetic oligonucleotide
  source 1..27: mol_type = other DNA
catagtagcagttggtcccttgacgac

SEQ ID NO: 20256 - protein, 9 aa, synthetic construct
  REGION 1..9: note = Description of Artificial Sequence: Synthetic peptide
HSSSWSLDD

SEQ ID NO: 20257 - DNA, 24 bp, synthetic construct
  misc_feature 1..24: note = Description of Artificial Sequence: Synthetic oligonucleotide
  source 1..24: mol_type = other DNA
gaactggggttccggtctgactac

SEQ ID NO: 20258 - protein, 8 aa, synthetic construct
  REGION 1..8: note = Description of Artificial Sequence: Synthetic peptide
ELGFRSDY

SEQ ID NO: 20259 - DNA, 33 bp, synthetic construct
  misc_feature 1..33: note = Description of Artificial Sequence: Synthetic oligonucleotide
  source 1..33: mol_type = other DNA
gatctgatagcagcagctggtacggttgactac

SEQ ID NO: 20260 - protein, 11 aa, synthetic construct
  REGION 1..11: note = Description of Artificial Sequence: Synthetic peptide
DLIAAAGTVDY

SEQ ID NO: 20261 - DNA, 48 bp, synthetic construct
  misc_feature 1..48: note = Description of Artificial Sequence: Synthetic oligonucleotide
  source 1..48: mol_type = other DNA
gtaaacagtggctggtcccatcactactactactacggtatggacgtc

SEQ ID NO: 20262 - protein, 16 aa, synthetic construct
  REGION 1..16: note = Description of Artificial Sequence: Synthetic peptide
VNSGWSHHYYYYGMDV

SEQ ID NO: 20263 - DNA, 30 bp, synthetic construct
  misc_feature 1..30: note = Description of Artificial Sequence: Synthetic oligonucleotide
  source 1..30: mol_type = other DNA
tatcggaataaccggggatacttcgatctc

SEQ ID NO: 20264 - protein, 10 aa, synthetic construct
  REGION 1..10: note = Description of Artificial Sequence: Synthetic peptide
YRNNRGYFDL

SEQ ID NO: 20265 - DNA, 36 bp, synthetic construct
  misc_feature 1..36: note = Description of Artificial Sequence: Synthetic oligonucleotide
  source 1..36: mol_type = other DNA
cgtttggcagtggctggctcggaggcttttgatatc

SEQ ID NO: 20266 - protein, 12 aa, synthetic construct
  REGION 1..12: note = Description of Artificial Sequence: Synthetic peptide
RLAVAGSEAFDI

SEQ ID NO: 20267 - DNA, 24 bp, synthetic construct
  misc_feature 1..24: note = Description of Artificial Sequence: Synthetic oligonucleotide
  source 1..24: mol_type = other DNA
gaactggggttccggtctgactac

SEQ ID NO: 20268 - protein, 8 aa, synthetic construct
  REGION 1..8: note = Description of Artificial Sequence: Synthetic peptide
ELGFRSDY

SEQ ID NO: 20269 - DNA, 27 bp, synthetic construct
  misc_feature 1..27: note = Description of Artificial Sequence: Synthetic oligonucleotide
  source 1..27: mol_type = other DNA
catggaaaagactggggccttgactac

SEQ ID NO: 20270 - protein, 9 aa, synthetic construct
  REGION 1..9: note = Description of Artificial Sequence: Synthetic peptide
HGKDWGLDY

SEQ ID NO: 20271 - DNA, 24 bp, synthetic construct
  misc_feature 1..24: note = Description of Artificial Sequence: Synthetic oligonucleotide
  source 1..24: mol_type = other DNA
gaactggggttccggtctgactac

SEQ ID NO: 20272 - protein, 8 aa, synthetic construct
  REGION 1..8: note = Description of Artificial Sequence: Synthetic peptide
ELGFRSDY

SEQ ID NO: 20273 - DNA, 30 bp, synthetic construct
  misc_feature 1..30: note = Description of Artificial Sequence: Synthetic oligonucleotide
  source 1..30: mol_type = other DNA
gatcgggcctatagcagctcgtctgactac

SEQ ID NO: 20274 - protein, 10 aa, synthetic construct
  REGION 1..10: note = Description of Artificial Sequence: Synthetic peptide
DRAYSSSSDY

SEQ ID NO: 20275 - DNA, 27 bp, synthetic construct
  misc_feature 1..27: note = Description of Artificial Sequence: Synthetic oligonucleotide
  source 1..27: mol_type = other DNA
gatctgagtatgggcggaatggacgtc

SEQ ID NO: 20276 - protein, 9 aa, synthetic construct
  REGION 1..9: note = Description of Artificial Sequence: Synthetic peptide
DLSMGGMDV

SEQ ID NO: 20277 - DNA, 24 bp, synthetic construct
  misc_feature 1..24: note = Description of Artificial Sequence: Synthetic oligonucleotide
  source 1..24: mol_type = other DNA
gaactaggcttccagtctgactac

SEQ ID NO: 20278 - protein, 8 aa, synthetic construct
  REGION 1..8: note = Description of Artificial Sequence: Synthetic peptide
ELGFQSDY

SEQ ID NO: 20279 - DNA, 36 bp, synthetic construct; identical to SEQ ID NO: 20265
  misc_feature 1..36: note = Description of Artificial Sequence: Synthetic oligonucleotide
  source 1..36: mol_type = other DNA

SEQ ID NO: 20280 - protein, 12 aa, synthetic construct
  REGION 1..12: note = Description of Artificial Sequence: Synthetic peptide
RLAVAGSEAFDI

SEQ ID NO: 20281 - DNA, 24 bp, synthetic construct
  misc_feature 1..24: note = Description of Artificial Sequence: Synthetic oligonucleotide
  source 1..24: mol_type = other DNA
gagcttggctggtacgaggactac

SEQ ID NO: 20282 - protein, 8 aa, synthetic construct
  REGION 1..8: note = Description of Artificial Sequence: Synthetic peptide
ELGWYEDY

SEQ ID NO: 20283 - DNA, 27 bp, synthetic construct
  misc_feature 1..27: note = Description of Artificial Sequence: Synthetic oligonucleotide
  source 1..27: mol_type = other DNA
cattccagtagctggtcccttgactac

SEQ ID NO: 20284 - protein, 9 aa, synthetic construct
  REGION 1..9: note = Description of Artificial Sequence: Synthetic peptide
HSSSWSLDY

SEQ ID NO: 20285 - DNA, 36 bp, synthetic construct
  misc_feature 1..36: note = Description of Artificial Sequence: Synthetic oligonucleotide
  source 1..36: mol_type = other DNA
aggatagcagcagctggtacggagtacttcgatctc

SEQ ID NO: 20286 - protein, 12 aa, synthetic construct
  REGION 1..12: note = Description of Artificial Sequence: Synthetic peptide
RIAAAGTEYFDL

SEQ ID NO: 20287 - DNA, 24 bp, synthetic construct
  misc_feature 1..24: note = Description of Artificial Sequence: Synthetic oligonucleotide
  source 1..24: mol_type = other DNA
gaactggggttccggtctgactac

SEQ ID NO: 20288 - protein, 8 aa, synthetic construct
  REGION 1..8: note = Description of Artificial Sequence: Synthetic peptide
ELGFRSDY

SEQ ID NO: 20289-20290 - skipped (2 entries)

SEQ ID NO: 20291 - DNA, 24 bp, synthetic construct
  misc_feature 1..24: note = Description of Artificial Sequence: Synthetic oligonucleotide
  source 1..24: mol_type = other DNA
agtgggagctacttctttgactac

SEQ ID NO: 20292 - protein, 8 aa, synthetic construct
  REGION 1..8: note = Description of Artificial Sequence: Synthetic peptide
SGSYFFDY

SEQ ID NO: 20293 - DNA, 24 bp, synthetic construct
  misc_feature 1..24: note = Description of Artificial Sequence: Synthetic oligonucleotide
  source 1..24: mol_type = other DNA
gatcttggctggacggaagaatac

SEQ ID NO: 20294 - protein, 8 aa, synthetic construct
  REGION 1..8: note = Description of Artificial Sequence: Synthetic peptide
DLGWTEEY

SEQ ID NO: 20295 - DNA, 24 bp, synthetic construct
  misc_feature 1..24: note = Description of Artificial Sequence: Synthetic oligonucleotide
  source 1..24: mol_type = other DNA
gatcttggctggacggaagagtac

SEQ ID NO: 20296 - protein, 8 aa, synthetic construct
  REGION 1..8: note = Description of Artificial Sequence: Synthetic peptide
DLGWTEEY

SEQ ID NO: 20297 - DNA, 24 bp, synthetic construct
  misc_feature 1..24: note = Description of Artificial Sequence: Synthetic oligonucleotide
  source 1..24: mol_type = other DNA
ggaggtgggagcccttttgactac

SEQ ID NO: 20298 - protein, 8 aa, synthetic construct
  REGION 1..8: note = Description of Artificial Sequence: Synthetic peptide
GGGSPFDY

SEQ ID NO: 20299 - DNA, 30 bp, synthetic construct
  misc_feature 1..30: note = Description of Artificial Sequence: Synthetic oligonucleotide
  source 1..30: mol_type = other DNA
gatcgggcctatagtagctcgtctgactac

SEQ ID NO: 20300 - protein, 10 aa, synthetic construct
  REGION 1..10: note = Description of Artificial Sequence: Synthetic peptide
DRAYSSSSDY

SEQ ID NO: 20301 - DNA, 36 bp, synthetic construct
  misc_feature 1..36: note = Description of Artificial Sequence: Synthetic oligonucleotide
  source 1..36: mol_type = other DNA
cgtatagcagtggctggctcggaggcttttgatatc

SEQ ID NO: 20302 - protein, 12 aa, synthetic construct
  REGION 1..12: note = Description of Artificial Sequence: Synthetic peptide
RIAVAGSEAFDI

SEQ ID NO: 20303 - DNA, 24 bp, synthetic construct
  misc_feature 1..24: note = Description of Artificial Sequence: Synthetic oligonucleotide
  source 1..24: mol_type = other DNA
gagctaggcttccagtctgatcac

SEQ ID NO: 20304 - protein, 8 aa, synthetic construct
  REGION 1..8: note = Description of Artificial Sequence: Synthetic peptide
ELGFQSDH

SEQ ID NO: 20305 - DNA, 36 bp, synthetic construct; identical to SEQ ID NO: 20265
  misc_feature 1..36: note = Description of Artificial Sequence: Synthetic oligonucleotide
  source 1..36: mol_type = other DNA

SEQ ID NO: 20306 - protein, 12 aa, synthetic construct
  REGION 1..12: note = Description of Artificial Sequence: Synthetic peptide
RLAVAGSEAFDI

SEQ ID NO: 20307 - DNA, 36 bp, synthetic construct
  misc_feature 1..36: note = Description of Artificial Sequence: Synthetic oligonucleotide
  source 1..36: mol_type = other DNA
cgtttagcagtggctggctcggaggcttttcatatc

SEQ ID NO: 20308 - protein, 12 aa, synthetic construct
  REGION 1..12: note = Description of Artificial Sequence: Synthetic peptide
RLAVAGSEAFHI

SEQ ID NO: 20309 - DNA, 27 bp, synthetic construct
  misc_feature 1..27: note = Description of Artificial Sequence: Synthetic oligonucleotide
  source 1..27: mol_type = other DNA
catagcaccagctggtcccttgactac

SEQ ID NO: 20310 - protein, 9 aa, synthetic construct
  REGION 1..9: note = Description of Artificial Sequence: Synthetic peptide
HSTSWSLDY

SEQ ID NO: 20311 - DNA, 24 bp, synthetic construct
  misc_feature 1..24: note = Description of Artificial Sequence: Synthetic oligonucleotide
  source 1..24: mol_type = other DNA
ggaggtgggagcccttttgactac

SEQ ID NO: 20312 - protein, 8 aa, synthetic construct
  REGION 1..8: note = Description of Artificial Sequence: Synthetic peptide
GGGSPFDY

SEQ ID NO: 20313 - DNA, 24 bp, synthetic construct
  misc_feature 1..24: note = Description of Artificial Sequence: Synthetic oligonucleotide
  source 1..24: mol_type = other DNA
gagcttgcctggtacgaggactcc

SEQ ID NO: 20314 - protein, 8 aa, synthetic construct
  REGION 1..8: note = Description of Artificial Sequence: Synthetic peptide
ELAWYEDS

SEQ ID NO: 20315-20316 - skipped (2 entries)

SEQ ID NO: 20317 - DNA, 24 bp, synthetic construct
  misc_feature 1..24: note = Description of Artificial Sequence: Synthetic oligonucleotide
  source 1..24: mol_type = other DNA
gaactggggttccggtttgactac

SEQ ID NO: 20318 - protein, 8 aa, synthetic construct
  REGION 1..8: note = Description of Artificial Sequence: Synthetic peptide
ELGFRFDY

SEQ ID NO: 20319 - DNA, 18 bp, synthetic construct
  misc_feature 1..18: note = Description of Artificial Sequence: Synthetic oligonucleotide
  source 1..18: mol_type = other DNA
aaggctgggtttgactac

SEQ ID NO: 20320 - protein, 6 aa, synthetic construct
  REGION 1..6: note = Description of Artificial Sequence: Synthetic peptide
KAGFDY

SEQ ID NO: 20321 - DNA, 36 bp, synthetic construct; identical to SEQ ID NO: 20301
  misc_feature 1..36: note = Description of Artificial Sequence: Synthetic oligonucleotide
  source 1..36: mol_type = other DNA

SEQ ID NO: 20322 - protein, 12 aa, synthetic construct
  REGION 1..12: note = Description of Artificial Sequence: Synthetic peptide
RIAVAGSEAFDI

SEQ ID NO: 20323 - DNA, 36 bp, synthetic construct
  misc_feature 1..36: note = Description of Artificial Sequence: Synthetic oligonucleotide
  source 1..36: mol_type = other DNA
cgtctggcagtggctggctcggaggcttttgatatc

SEQ ID NO: 20324 - protein, 12 aa, synthetic construct
  REGION 1..12: note = Description of Artificial Sequence: Synthetic peptide
RLAVAGSEAFDI

SEQ ID NO: 20325 - DNA, 15 bp, synthetic construct
  misc_feature 1..15: note = Description of Artificial Sequence: Synthetic oligonucleotide
  source 1..15: mol_type = other DNA
gatcgtgggagctac

SEQ ID NO: 20326 - protein, 5 aa, synthetic construct
  REGION 1..5: note = Description of Artificial Sequence: Synthetic peptide
DRGSY

SEQ ID NO: 20327 - DNA, 30 bp, synthetic construct
  misc_feature 1..30: note = Description of Artificial Sequence: Synthetic oligonucleotide
  source 1..30: mol_type = other DNA
tatcggaataaccgggggtacttcgatctc

SEQ ID NO: 20328 - protein, 10 aa, synthetic construct
  REGION 1..10: note = Description of Artificial Sequence: Synthetic peptide
YRNNRGYFDL

SEQ ID NO: 20329 - DNA, 36 bp, synthetic construct
  misc_feature 1..36: note = Description of Artificial Sequence: Synthetic oligonucleotide
  source 1..36: mol_type = other DNA
agatataccagtgactggcatgatgcttttgatatc

SEQ ID NO: 20330 - protein, 12 aa, synthetic construct
  REGION 1..12: note = Description of Artificial Sequence: Synthetic peptide
RYTSDWHDAFDI

SEQ ID NO: 20331 - DNA, 24 bp, synthetic construct
  misc_feature 1..24: note = Description of Artificial Sequence: Synthetic oligonucleotide
  source 1..24: mol_type = other DNA
gagcttggctggtacgaggactac

SEQ ID NO: 20332 - protein, 8 aa, synthetic construct
  REGION 1..8: note = Description of Artificial Sequence: Synthetic peptide
ELGWYEDY

SEQ ID NO: 20333 - DNA, 15 bp, synthetic construct
  misc_feature 1..15: note = Description of Artificial Sequence: Synthetic oligonucleotide
  source 1..15: mol_type = other DNA
gatcggggcagtggc

SEQ ID NO: 20334 - protein, 5 aa, synthetic construct
  REGION 1..5: note = Description of Artificial Sequence: Synthetic peptide
DRGSG

SEQ ID NO: 20335 - DNA, 36 bp, synthetic construct
  misc_feature 1..36: note = Description of Artificial Sequence: Synthetic oligonucleotide
  source 1..36: mol_type = other DNA
aggtataccagtgactggcatgatgcttttgatatc

SEQ ID NO: 20336 - protein, 12 aa, synthetic construct
  REGION 1..12: note = Description of Artificial Sequence: Synthetic peptide
RYTSDWHDAFDI

SEQ ID NO: 20337 - DNA, 27 bp, synthetic construct
  misc_feature 1..27: note = Description of Artificial Sequence: Synthetic oligonucleotide
  source 1..27: mol_type = other DNA
gatctgagtatgggcggtatggacgtc

SEQ ID NO: 20338 - protein, 9 aa, synthetic construct
  REGION 1..9: note = Description of Artificial Sequence: Synthetic peptide
DLSMGGMDV

SEQ ID NO: 20339 - DNA, 24 bp, synthetic construct
  misc_feature 1..24: note = Description of Artificial Sequence: Synthetic oligonucleotide
  source 1..24: mol_type = other DNA
gaggttggctggtacgaggactac

SEQ ID NO: 20340 - protein, 8 aa, synthetic construct
  REGION 1..8: note = Description of Artificial Sequence: Synthetic peptide
EVGWYEDY

SEQ ID NO: 20341 - DNA, 42 bp, synthetic construct
  misc_feature 1..42: note = Description of Artificial Sequence: Synthetic oligonucleotide
  source 1..42: mol_type = other DNA
gagaagtatagcagcagctggtacgactacggtatggacgtc

SEQ ID NO: 20342 - protein, 14 aa, synthetic construct
  REGION 1..14: note = Description of Artificial Sequence: Synthetic peptide
EKYSSSWYDYGMDV

SEQ ID NO: 20343 - DNA, 24 bp, synthetic construct
  misc_feature 1..24: note = Description of Artificial Sequence: Synthetic oligonucleotide
  source 1..24: mol_type = other DNA
gaactggggttccggtctgactac

SEQ ID NO: 20344 - protein, 8 aa, synthetic construct
  REGION 1..8: note = Description of Artificial Sequence: Synthetic peptide
ELGFRSDY

SEQ ID NO: 20345 - DNA, 18 bp, synthetic construct
  misc_feature 1..18: note = Description of Artificial Sequence: Synthetic oligonucleotide
  source 1..18: mol_type = other DNA
gtagcagctcttgactac

SEQ ID NO: 20346 - protein, 6 aa, synthetic construct
  REGION 1..6: note = Description of Artificial Sequence: Synthetic peptide
VAALDY

SEQ ID NO: 20347 - DNA, 12 bp, synthetic construct
  misc_feature 1..12: note = Description of Artificial Sequence: Synthetic oligonucleotide
  source 1..12: mol_type = other DNA
aactgggactac

SEQ ID NO: 20348 - protein, 4 aa, synthetic construct
  REGION 1..4: note = Description of Artificial Sequence: Synthetic peptide
NWDY

SEQ ID NO: 20349 - DNA, 33 bp, synthetic construct
  misc_feature 1..33: note = Description of Artificial Sequence: Synthetic oligonucleotide
  source 1..33: mol_type = other DNA
gatctaatagcagcagctggtacggttgactac

SEQ ID NO: 20350 - protein, 11 aa, synthetic construct
  REGION 1..11: note = Description of Artificial Sequence: Synthetic peptide
DLIAAAGTVDY

SEQ ID NO: 20351 - DNA, 21 bp, synthetic construct
  misc_feature 1..21: note = Description of Artificial Sequence: Synthetic oligonucleotide
  source 1..21: mol_type = other DNA
ggggtatggttcggggacctc

SEQ ID NO: 20352 - protein, 7 aa, synthetic construct
  REGION 1..7: note = Description of Artificial Sequence: Synthetic peptide
GVWFGDL

SEQ ID NO: 20353 - DNA, 24 bp, synthetic construct
  misc_feature 1..24: note = Description of Artificial Sequence: Synthetic oligonucleotide
  source 1..24: mol_type = other DNA
gagcttggctggtacgaggactac

SEQ ID NO: 20354 - protein, 8 aa, synthetic construct
  REGION 1..8: note = Description of Artificial Sequence: Synthetic peptide
ELGWYEDY

SEQ ID NO: 20355 - DNA, 36 bp, synthetic construct; identical to SEQ ID NO: 20265
  misc_feature 1..36: note = Description of Artificial Sequence: Synthetic oligonucleotide
  source 1..36: mol_type = other DNA

SEQ ID NO: 20356 - protein, 12 aa, synthetic construct
  REGION 1..12: note = Description of Artificial Sequence: Synthetic peptide
RLAVAGSEAFDI

SEQ ID NO: 20357 - DNA, 36 bp, synthetic construct
  misc_feature 1..36: note = Description of Artificial Sequence: Synthetic oligonucleotide
  source 1..36: mol_type = other DNA
cgtttagcagtggctggctcggaggcttttgatatc

SEQ ID NO: 20358 - protein, 12 aa, synthetic construct
  REGION 1..12: note = Description of Artificial Sequence: Synthetic peptide
RLAVAGSEAFDI

SEQ ID NO: 20359 - DNA, 36 bp, synthetic construct
  misc_feature 1..36: note = Description of Artificial Sequence: Synthetic oligonucleotide
  source 1..36: mol_type = other DNA
cgtatggcagtggctggctcggaggcttttgatatc

SEQ ID NO: 20360 - protein, 12 aa, synthetic construct
  REGION 1..12: note = Description of Artificial Sequence: Synthetic peptide
RMAVAGSEAFDI

SEQ ID NO: 20361 - DNA, 36 bp, synthetic construct
  misc_feature 1..36: note = Description of Artificial Sequence: Synthetic oligonucleotide
  source 1..36: mol_type = other DNA
agaaatagcagtggctggcatgatgtttttgatatc

SEQ ID NO: 20362 - protein, 12 aa, synthetic construct
  REGION 1..12: note = Description of Artificial Sequence: Synthetic peptide
RNSSGWHDVFDI

SEQ ID NO: 20363 - DNA, 15 bp, synthetic construct
  misc_feature 1..15: note = Description of Artificial Sequence: Synthetic oligonucleotide
  source 1..15: mol_type = other DNA
gatcggggcagtggc

SEQ ID NO: 20364 - protein, 5 aa, synthetic construct
  REGION 1..5: note = Description of Artificial Sequence: Synthetic peptide
DRGSG

SEQ ID NO: 20365 - DNA, 36 bp, synthetic construct; identical to SEQ ID NO: 20335
  misc_feature 1..36: note = Description of Artificial Sequence: Synthetic oligonucleotide
  source 1..36: mol_type = other DNA

SEQ ID NO: 20366 - protein, 12 aa, synthetic construct
  REGION 1..12: note = Description of Artificial Sequence: Synthetic peptide
RYTSDWHDAFDI

SEQ ID NO: 20367 - DNA, 24 bp, synthetic construct
  misc_feature 1..24: note = Description of Artificial Sequence: Synthetic oligonucleotide
  source 1..24: mol_type = other DNA
gaactggggttccggtttgactac

SEQ ID NO: 20368 - protein, 8 aa, synthetic construct
  REGION 1..8: note = Description of Artificial Sequence: Synthetic peptide
ELGFRFDY

SEQ ID NO: 20369 - DNA, 27 bp, synthetic construct
  misc_feature 1..27: note = Description of Artificial Sequence: Synthetic oligonucleotide
  source 1..27: mol_type = other DNA
cttagcagcagctgggacttccagcac

SEQ ID NO: 20370 - protein, 9 aa, synthetic construct
  REGION 1..9: note = Description of Artificial Sequence: Synthetic peptide
LSSSWDFQH

SEQ ID NO: 20371 - DNA, 18 bp, synthetic construct
  misc_feature 1..18: note = Description of Artificial Sequence: Synthetic oligonucleotide
  source 1..18: mol_type = other DNA
gcggctggctttgactac

SEQ ID NO: 20372 - protein, 6 aa, synthetic construct
  REGION 1..6: note = Description of Artificial Sequence: Synthetic peptide
AAGFDY

SEQ ID NO: 20373 - DNA, 15 bp, synthetic construct
  misc_feature 1..15: note = Description of Artificial Sequence: Synthetic oligonucleotide
  source 1..15: mol_type = other DNA
gataggggcagcctc

SEQ ID NO: 20374 - protein, 5 aa, synthetic construct
  REGION 1..5: note = Description of Artificial Sequence: Synthetic peptide
DRGSL

SEQ ID NO: 20375 - DNA, 24 bp, synthetic construct
  misc_feature 1..24: note = Description of Artificial Sequence: Synthetic oligonucleotide
  source 1..24: mol_type = other DNA
gaagtggggttccggtctgactac

SEQ ID NO: 20376 - protein, 8 aa, synthetic construct
  REGION 1..8: note = Description of Artificial Sequence: Synthetic peptide
EVGFRSDY

SEQ ID NO: 20377 - DNA, 18 bp, synthetic construct
  misc_feature 1..18: note = Description of Artificial Sequence: Synthetic oligonucleotide
  source 1..18: mol_type = other DNA
gtagcagcccttgactcc

SEQ ID NO: 20378 - protein, 6 aa, synthetic construct
  REGION 1..6: note = Description of Artificial Sequence: Synthetic peptide
VAALDS

SEQ ID NO: 20379 - DNA, 18 bp, synthetic construct
  misc_feature 1..18: note = Description of Artificial Sequence: Synthetic oligonucleotide
  source 1..18: mol_type = other DNA
actggggtctttgactac

SEQ ID NO: 20380 - protein, 6 aa, synthetic construct
  REGION 1..6: note = Description of Artificial Sequence: Synthetic peptide
TGVFDY

SEQ ID NO: 20381 - DNA, 27 bp, synthetic construct
  misc_feature 1..27: note = Description of Artificial Sequence: Synthetic oligonucleotide
  source 1..27: mol_type = other DNA
agcagtggctgggaggtctttgactac

SEQ ID NO: 20382 - protein, 9 aa, synthetic construct
  REGION 1..9: note = Description of Artificial Sequence: Synthetic peptide
SSGWEVFDY

SEQ ID NO: 20383 - DNA, 15 bp, synthetic construct
  misc_feature 1..15: note = Description of Artificial Sequence: Synthetic oligonucleotide
  source 1..15: mol_type = other DNA
gacagaggcagtctc

SEQ ID NO: 20384 - protein, 5 aa, synthetic construct
  REGION 1..5: note = Description of Artificial Sequence: Synthetic peptide
DRGSL

SEQ ID NO: 20385 - DNA, 24 bp, synthetic construct
  misc_feature 1..24: note = Description of Artificial Sequence: Synthetic oligonucleotide
  source 1..24: mol_type = other DNA
gatcttggctggacggaagagtac

SEQ ID NO: 20386 - protein, 8 aa, synthetic construct
  REGION 1..8: note = Description of Artificial Sequence: Synthetic peptide
DLGWTEEY

SEQ ID NO: 20387 - DNA, 15 bp, synthetic construct
  misc_feature 1..15: note = Description of Artificial Sequence: Synthetic oligonucleotide
  source 1..15: mol_type = other DNA
gatcgtgggagctac

SEQ ID NO: 20388 - protein, 5 aa, synthetic construct
  REGION 1..5: note = Description of Artificial Sequence: Synthetic peptide
DRGSY

SEQ ID NO: 20389 - DNA, 27 bp, synthetic construct
  misc_feature 1..27: note = Description of Artificial Sequence: Synthetic oligonucleotide
  source 1..27: mol_type = other DNA
catggaaaagactggggccttgactac

SEQ ID NO: 20390 - protein, 9 aa, synthetic construct
  REGION 1..9: note = Description of Artificial Sequence: Synthetic peptide
HGKDWGLDY

SEQ ID NO: 20391 - DNA, 24 bp, synthetic construct
  misc_feature 1..24: note = Description of Artificial Sequence: Synthetic oligonucleotide
  source 1..24: mol_type = other DNA
gatcttggctggacggaagagtac

SEQ ID NO: 20392 - protein, 8 aa, synthetic construct
  REGION 1..8: note = Description of Artificial Sequence: Synthetic peptide
DLGWTEEY

SEQ ID NO: 20393 - DNA, 27 bp, synthetic construct
  misc_feature 1..27: note = Description of Artificial Sequence: Synthetic oligonucleotide
  source 1..27: mol_type = other DNA
gatctgagtatgggcggtatggacgtc

SEQ ID NO: 20394 - protein, 9 aa, synthetic construct
  REGION 1..9: note = Description of Artificial Sequence: Synthetic peptide
DLSMGGMDV

SEQ ID NO: 20395 - DNA, 27 bp, synthetic construct
  misc_feature 1..27: note = Description of Artificial Sequence: Synthetic oligonucleotide
  source 1..27: mol_type = other DNA
ctcagcagcagctggtccgttgactac

SEQ ID NO: 20396 - protein, 9 aa, synthetic construct
  REGION 1..9: note = Description of Artificial Sequence: Synthetic peptide
LSSSWSVDY

SEQ ID NO: 20397 - DNA, 18 bp, synthetic construct
  misc_feature 1..18: note = Description of Artificial Sequence: Synthetic oligonucleotide
  source 1..18: mol_type = other DNA
accagtggctttgactac

SEQ ID NO: 20398 - protein, 6 aa, synthetic construct
  REGION 1..6: note = Description of Artificial Sequence: Synthetic peptide
TSGFDY

SEQ ID NO: 20399 - DNA, 27 bp, synthetic construct
  misc_feature 1..27: note = Description of Artificial Sequence: Synthetic oligonucleotide
  source 1..27: mol_type = other DNA
gtagcagtggcaggcggtatggacgtc

SEQ ID NO: 20400 - protein, 9 aa, synthetic construct
  REGION 1..9: note = Description of Artificial Sequence: Synthetic peptide
VAVAGGMDV

SEQ ID NO: 20401 - DNA, 36 bp, synthetic construct
  misc_feature 1..36: note = Description of Artificial Sequence: Synthetic oligonucleotide
  source 1..36: mol_type = other DNA
aggtataacagtggctggcatgatgtttttgatatc

SEQ ID NO: 20402 - protein, 12 aa, synthetic construct
  REGION 1..12: note = Description of Artificial Sequence: Synthetic peptide
RYNSGWHDVFDI

SEQ ID NO: 20403 - DNA, 24 bp, synthetic construct
  misc_feature 1..24: note = Description of Artificial Sequence: Synthetic oligonucleotide
  source 1..24: mol_type = other DNA
gagttggggttccggtctgactac

SEQ ID NO: 20404 - protein, 8 aa, synthetic construct
  REGION 1..8: note = Description of Artificial Sequence: Synthetic peptide
ELGFRSDY

SEQ ID NO: 20405 - DNA, 36 bp, synthetic construct
  misc_feature 1..36: note = Description of Artificial Sequence: Synthetic oligonucleotide
  source 1..36: mol_type = other DNA
cgtttggcagtggctggctcggaggcttgtgatatc

SEQ ID NO: 20406 - protein, 12 aa, synthetic construct
  REGION 1..12: note = Description of Artificial Sequence: Synthetic peptide
RLAVAGSEACDI

SEQ ID NO: 20407 - DNA, 30 bp, synthetic construct
  misc_feature 1..30: note = Description of Artificial Sequence: Synthetic oligonucleotide
  source 1..30: mol_type = other DNA
gatgggggatttttggagtggttagactac

SEQ ID NO: 20408 - protein, 10 aa, synthetic construct
  REGION 1..10: note = Description of Artificial Sequence: Synthetic peptide
DGGFLEWLDY

SEQ ID NO: 20409 - DNA, 36 bp, synthetic construct; identical to SEQ ID NO: 20301
  misc_feature 1..36: note = Description of Artificial Sequence: Synthetic oligonucleotide
  source 1..36: mol_type = other DNA

SEQ ID NO: 20410 - protein, 12 aa, synthetic construct
  REGION 1..12: note = Description of Artificial Sequence: Synthetic peptide
RIAVAGSEAFDI

SEQ ID NO: 20411 - DNA, 21 bp, synthetic construct
  misc_feature 1..21: note = Description of Artificial Sequence: Synthetic oligonucleotide
  source 1..21: mol_type = other DNA
ggggtttggttcggggacttc

SEQ ID NO: 20412 - protein, 7 aa, synthetic construct
  REGION 1..7: note = Description of Artificial Sequence: Synthetic peptide
GVWFGDF

SEQ ID NO: 20413 - DNA, 27 bp, synthetic construct
  misc_feature 1..27: note = Description of Artificial Sequence: Synthetic oligonucleotide
  source 1..27: mol_type = other DNA
ctgagcagcagctggtcttttgactac

SEQ ID NO: 20414 - protein, 9 aa, synthetic construct
  REGION 1..9: note = Description of Artificial Sequence: Synthetic peptide
LSSSWSFDY

SEQ ID NO: 20415 - DNA, 27 bp, synthetic construct
  misc_feature 1..27: note = Description of Artificial Sequence: Synthetic oligonucleotide
  source 1..27: mol_type = other DNA
catggaaaagactggggccttgactac

SEQ ID NO: 20416 - protein, 9 aa, synthetic construct
  REGION 1..9: note = Description of Artificial Sequence: Synthetic peptide
HGKDWGLDY

SEQ ID NO: 20417 - DNA, 27 bp, synthetic construct
  misc_feature 1..27: note = Description of Artificial Sequence: Synthetic oligonucleotide
  source 1..27: mol_type = other DNA
ctcagcagcagctggtccattgacaac

SEQ ID NO: 20418 - protein, 9 aa, synthetic construct
  REGION 1..9: note = Description of Artificial Sequence: Synthetic peptide
LSSSWSIDN

SEQ ID NO: 20419 - DNA, 24 bp, synthetic construct
  misc_feature 1..24: note = Description of Artificial Sequence: Synthetic oligonucleotide
  source 1..24: mol_type = other DNA
tcactatggtccccctttgactac

SEQ ID NO: 20420 - protein, 8 aa, synthetic construct
  REGION 1..8: note = Description of Artificial Sequence: Synthetic peptide
SLWSPFDY

SEQ ID NO: 20421 - DNA, 27 bp, synthetic construct
  misc_feature 1..27: note = Description of Artificial Sequence: Synthetic oligonucleotide
  source 1..27: mol_type = other DNA
ggcccgacttcggggtggttcgacccc

SEQ ID NO: 20422 - protein, 9 aa, synthetic construct
  REGION 1..9: note = Description of Artificial Sequence: Synthetic peptide
GPTSGWFDP

SEQ ID NO: 20423 - DNA, 24 bp, synthetic construct
  misc_feature 1..24: note = Description of Artificial Sequence: Synthetic oligonucleotide
  source 1..24: mol_type = other DNA
gatcttggctggacggaagagtac

SEQ ID NO: 20424 - protein, 8 aa, synthetic construct
  REGION 1..8: note = Description of Artificial Sequence: Synthetic peptide
DLGWTEEY

SEQ ID NO: 20425 - DNA, 27 bp, synthetic construct
  misc_feature 1..27: note = Description of Artificial Sequence: Synthetic oligonucleotide
  source 1..27: mol_type = other DNA
catagcggcagctggtcccttgactac

SEQ ID NO: 20426 - protein, 9 aa, synthetic construct
  REGION 1..9: note = Description of Artificial Sequence: Synthetic peptide
HSGSWSLDY

SEQ ID NO: 20427 - DNA, 42 bp, synthetic construct; identical to SEQ ID NO: 20247
  misc_feature 1..42: note = Description of Artificial Sequence: Synthetic oligonucleotide
  source 1..42: mol_type = other DNA

SEQ ID NO: 20428 - protein, 14 aa, synthetic construct
  REGION 1..14: note = Description of Artificial Sequence: Synthetic peptide
EKYSSSWYDYGMDV

SEQ ID NO: 20429 - DNA, 27 bp, synthetic construct
  misc_feature 1..27: note = Description of Artificial Sequence: Synthetic oligonucleotide
  source 1..27: mol_type = other DNA
catggaaaagactggggccttgactac

SEQ ID NO: 20430 - protein, 9 aa, synthetic construct
  REGION 1..9: note = Description of Artificial Sequence: Synthetic peptide
HGKDWGLDY

SEQ ID NO: 20431 - DNA, 18 bp, synthetic construct
  misc_feature 1..18: note = Description of Artificial Sequence: Synthetic oligonucleotide
  source 1..18: mol_type = other DNA
agctccttgtttgactac

SEQ ID NO: 20432 - protein, 6 aa, synthetic construct
  REGION 1..6: note = Description of Artificial Sequence: Synthetic peptide
SSLFDY

SEQ ID NO: 20433 - DNA, 18 bp, synthetic construct
  misc_feature 1..18: note = Description of Artificial Sequence: Synthetic oligonucleotide
  source 1..18: mol_type = other DNA
agcagtggctggttcgcc

SEQ ID NO: 20434 - protein, 6 aa, synthetic construct
  REGION 1..6: note = Description of Artificial Sequence: Synthetic peptide
SSGWFA

SEQ ID NO: 20435 - DNA, 15 bp, synthetic construct
  misc_feature 1..15: note = Description of Artificial Sequence: Synthetic oligonucleotide
  source 1..15: mol_type = other DNA
gatcggggcagtctc

SEQ ID NO: 20436 - protein, 5 aa, synthetic construct
  REGION 1..5: note = Description of Artificial Sequence: Synthetic peptide
DRGSL

SEQ ID NO: 20437 - DNA, 42 bp, synthetic construct
  misc_feature 1..42: note = Description of Artificial Sequence: Synthetic oligonucleotide
  source 1..42: mol_type = other DNA
gaggaatatagtagtggctggtacgactacggtatggacgtc

SEQ ID NO: 20438 - protein, 14 aa, synthetic construct
  REGION 1..14: note = Description of Artificial Sequence: Synthetic peptide
EEYSSGWYDYGMDV

SEQ ID NO: 20439 - DNA, 15 bp, synthetic construct
  misc_feature 1..15: note = Description of Artificial Sequence: Synthetic oligonucleotide
  source 1..15: mol_type = other DNA
gatcgtgggagctgc

SEQ ID NO: 20440 - protein, 5 aa, synthetic construct
  REGION 1..5: note = Description of Artificial Sequence: Synthetic peptide
DRGSC

SEQ ID NO: 20441 - DNA, 15 bp, synthetic construct
  misc_feature 1..15: note = Description of Artificial Sequence: Synthetic oligonucleotide
  source 1..15: mol_type = other DNA
gatcgtgggagcctc

SEQ ID NO: 20442 - protein, 5 aa, synthetic construct
  REGION 1..5: note = Description of Artificial Sequence: Synthetic peptide
DRGSL

SEQ ID NO: 20443 - DNA, 36 bp, synthetic construct; identical to SEQ ID NO: 20265
  misc_feature 1..36: note = Description of Artificial Sequence: Synthetic oligonucleotide
  source 1..36: mol_type = other DNA

SEQ ID NO: 20444 - protein, 12 aa, synthetic construct
  REGION 1..12: note = Description of Artificial Sequence: Synthetic peptide
RLAVAGSEAFDI

SEQ ID NO: 20445 - DNA, 24 bp, synthetic construct
  misc_feature 1..24: note = Description of Artificial Sequence: Synthetic oligonucleotide
  source 1..24: mol_type = other DNA
gaactggggttccggtctgactat

SEQ ID NO: 20446 - protein, 8 aa, synthetic construct
  REGION 1..8: note = Description of Artificial Sequence: Synthetic peptide
ELGFRSDY

SEQ ID NO: 20447 - DNA, 18 bp, synthetic construct
  misc_feature 1..18: note = Description of Artificial Sequence: Synthetic oligonucleotide
  source 1..18: mol_type = other DNA
gtagtgggagctgtccac

SEQ ID NO: 20448 - protein, 6 aa, synthetic construct
  REGION 1..6: note = Description of Artificial Sequence: Synthetic peptide
VVGAVH

SEQ ID NO: 20449 - DNA, 27 bp, synthetic construct
  misc_feature 1..27: note = Description of Artificial Sequence: Synthetic oligonucleotide
  source 1..27: mol_type = other DNA
catggaaaagactggggccttgactac

SEQ ID NO: 20450 - protein, 9 aa, synthetic construct
  REGION 1..9: note = Description of Artificial Sequence: Synthetic peptide
HGKDWGLDY

SEQ ID NO: 20451 - DNA, 24 bp, synthetic construct
  misc_feature 1..24: note = Description of Artificial Sequence: Synthetic oligonucleotide
  source 1..24: mol_type = other DNA
gagcttgcctggtacgaagactac

SEQ ID NO: 20452 - protein, 8 aa, synthetic construct
  REGION 1..8: note = Description of Artificial Sequence: Synthetic peptide
ELAWYEDY

SEQ ID NO: 20453 - DNA, 36 bp, synthetic construct
  misc_feature 1..36: note = Description of Artificial Sequence: Synthetic oligonucleotide
  source 1..36: mol_type = other DNA
gaggacggtgccttcggctactacggtatggacgtc

SEQ ID NO: 20454 - protein, 12 aa, synthetic construct
  REGION 1..12: note = Description of Artificial Sequence: Synthetic peptide
EDGAFGYYGMDV

SEQ ID NO: 20455 - DNA, 24 bp, synthetic construct
  misc_feature 1..24: note = Description of Artificial Sequence: Synthetic oligonucleotide
  source 1..24: mol_type = other DNA
gaattggggttccggtctgactac

SEQ ID NO: 20456 - protein, 8 aa, synthetic construct
  REGION 1..8: note = Description of Artificial Sequence: Synthetic peptide
ELGFRSDY

SEQ ID NO: 20457 - DNA, 36 bp, synthetic construct
  misc_feature 1..36: note = Description of Artificial Sequence: Synthetic oligonucleotide
  source 1..36: mol_type = other DNA
cggggatacagctatggcgggtacggtatggacgtc

SEQ ID NO: 20458 - protein, 12 aa, synthetic construct
  REGION 1..12: note = Description of Artificial Sequence: Synthetic peptide
RGYSYGGYGMDV

SEQ ID NO: 20459 - DNA, 27 bp, synthetic construct
  misc_feature 1..27: note = Description of Artificial Sequence: Synthetic oligonucleotide
  source 1..27: mol_type = other DNA
ctgagcagcagctggtcttttgactac

SEQ ID NO: 20460 - protein, 9 aa, synthetic construct
  REGION 1..9: note = Description of Artificial Sequence: Synthetic peptide
LSSSWSFDY

SEQ ID NO: 20461 - DNA, 42 bp, synthetic construct; identical to SEQ ID NO: 20197
  misc_feature 1..42: note = Description of Artificial Sequence: Synthetic oligonucleotide
  source 1..42: mol_type = other DNA

SEQ ID NO: 20462 - protein, 14 aa, synthetic construct
  REGION 1..14: note = Description of Artificial Sequence: Synthetic peptide
ERYTSGWYDYGMDV

SEQ ID NO: 20463 - DNA, 42 bp, synthetic construct
  misc_feature 1..42: note = Description of Artificial Sequence: Synthetic oligonucleotide
  source 1..42: mol_type = other DNA
tattgtagtagtgccaggtgcccttatgatgcctttgatatc

SEQ ID NO: 20464 - protein, 14 aa, synthetic construct
  REGION 1..14: note = Description of Artificial Sequence: Synthetic peptide
YCSSARCPYDAFDI

SEQ ID NO: 20465 - DNA, 24 bp, synthetic construct
  misc_feature 1..24: note = Description of Artificial Sequence: Synthetic oligonucleotide
  source 1..24: mol_type = other DNA
gatcttggctggacggaagagtac

SEQ ID NO: 20466 - protein, 8 aa, synthetic construct
  REGION 1..8: note = Description of Artificial Sequence: Synthetic peptide
DLGWTEEY

SEQ ID NO: 20467 - DNA, 36 bp, synthetic construct; identical to SEQ ID NO: 20301
  misc_feature 1..36: note = Description of Artificial Sequence: Synthetic oligonucleotide
  source 1..36: mol_type = other DNA

SEQ ID NO: 20468 - protein, 12 aa, synthetic construct
  REGION 1..12: note = Description of Artificial Sequence: Synthetic peptide
RIAVAGSEAFDI

SEQ ID NO: 20469 - DNA, 24 bp, synthetic construct
  misc_feature 1..24: note = Description of Artificial Sequence: Synthetic oligonucleotide
  source 1..24: mol_type = other DNA
gagttaggcttccagtctgactac

SEQ ID NO: 20470 - protein, 8 aa, synthetic construct
  REGION 1..8: note = Description of Artificial Sequence: Synthetic peptide
ELGFQSDY

SEQ ID NO: 20471 - DNA, 27 bp, synthetic construct
  misc_feature 1..27: note = Description of Artificial Sequence: Synthetic oligonucleotide
  source 1..27: mol_type = other DNA
catggaaaagactggggccttgacttc

SEQ ID NO: 20472 - protein, 9 aa, synthetic construct
  REGION 1..9: note = Description of Artificial Sequence: Synthetic peptide
HGKDWGLDF

SEQ ID NO: 20473 - DNA, 42 bp, synthetic construct
  misc_feature 1..42: note = Description of Artificial Sequence: Synthetic oligonucleotide
  source 1..42: mol_type = other DNA
gaaaggtatagcagtggctggcacgactacggtatggacgtc

SEQ ID NO: 20474 - protein, 14 aa, synthetic construct
  REGION 1..14: note = Description of Artificial Sequence: Synthetic peptide
ERYSSGWHDYGMDV

SEQ ID NO: 20475 - DNA, 27 bp, synthetic construct
  misc_feature 1..27: note = Description of Artificial Sequence: Synthetic oligonucleotide
  source 1..27: mol_type = other DNA
agcagtggctggtactactttgactac

SEQ ID NO: 20476 - protein, 9 aa, synthetic construct
  REGION 1..9: note = Description of Artificial Sequence: Synthetic peptide
SSGWYYFDY

SEQ ID NO: 20477 - DNA, 36 bp, synthetic construct
  misc_feature 1..36: note = Description of Artificial Sequence: Synthetic oligonucleotide
  source 1..36: mol_type = other DNA
aggtatagcagcagctggtcagggggtatggacgtc

SEQ ID NO: 20478 - protein, 12 aa, synthetic construct
  REGION 1..12: note = Description of Artificial Sequence: Synthetic peptide
RYSSSWSGGMDV

SEQ ID NO: 20479 - DNA, 18 bp, synthetic construct
  misc_feature 1..18: note = Description of Artificial Sequence: Synthetic oligonucleotide
  source 1..18: mol_type = other DNA
ggggggtccctcttctac

SEQ ID NO: 20480 - protein, 6 aa, synthetic construct
  REGION 1..6: note = Description of Artificial Sequence: Synthetic peptide
GGSLFY

SEQ ID NO: 20481-20482 - skipped (2 entries)

SEQ ID NO: 20483 - DNA, 24 bp, synthetic construct
  misc_feature 1..24: note = Description of Artificial Sequence: Synthetic oligonucleotide
  source 1..24: mol_type = other DNA
gagcttggctggtacgaggactac

SEQ ID NO: 20484 - protein, 8 aa, synthetic construct
  REGION 1..8: note = Description of Artificial Sequence: Synthetic peptide
ELGWYEDY

SEQ ID NO: 20485 - DNA, 27 bp, synthetic construct
  misc_feature 1..27: note = Description of Artificial Sequence: Synthetic oligonucleotide
  source 1..27: mol_type = other DNA
catagcaccagctggtcccttgactac

SEQ ID NO: 20486 - protein, 9 aa, synthetic construct
  REGION 1..9: note = Description of Artificial Sequence: Synthetic peptide
HSTSWSLDY

SEQ ID NO: 20487 - DNA, 21 bp, synthetic construct
  misc_feature 1..21: note = Description of Artificial Sequence: Synthetic oligonucleotide
  source 1..21: mol_type = other DNA
gaaggctggaacacggactac

SEQ ID NO: 20488 - protein, 7 aa, synthetic construct
  REGION 1..7: note = Description of Artificial Sequence: Synthetic peptide
EGWNTDY

SEQ ID NO: 20489 - DNA, 24 bp, synthetic construct
  misc_feature 1..24: note = Description of Artificial Sequence: Synthetic oligonucleotide
  source 1..24: mol_type = other DNA
gagctaggcttccagtctgactac

SEQ ID NO: 20490 - protein, 8 aa, synthetic construct
  REGION 1..8: note = Description of Artificial Sequence: Synthetic peptide
ELGFQSDY

SEQ ID NO: 20491 - DNA, 36 bp, synthetic construct; identical to SEQ ID NO: 20301
  misc_feature 1..36: note = Description of Artificial Sequence: Synthetic oligonucleotide
  source 1..36: mol_type = other DNA

SEQ ID NO: 20492 - protein, 12 aa, synthetic construct
  REGION 1..12: note = Description of Artificial Sequence: Synthetic peptide
RIAVAGSEAFDI

SEQ ID NO: 20493 - DNA, 27 bp, synthetic construct
  misc_feature 1..27: note = Description of Artificial Sequence: Synthetic oligonucleotide
  source 1..27: mol_type = other DNA
catagcagtagctggtcccttgactac

SEQ ID NO: 20494 - protein, 9 aa, synthetic construct
  REGION 1..9: note = Description of Artificial Sequence: Synthetic peptide
HSSSWSLDY

SEQ ID NO: 20495 - DNA, 24 bp, synthetic construct
  misc_feature 1..24: note = Description of Artificial Sequence: Synthetic oligonucleotide
  source 1..24: mol_type = other DNA
gagcttgcctggtacgaggactac

SEQ ID NO: 20496 - protein, 8 aa, synthetic construct
  REGION 1..8: note = Description of Artificial Sequence: Synthetic peptide
ELAWYEDY

SEQ ID NO: 20497 - DNA, 24 bp, synthetic construct
  misc_feature 1..24: note = Description of Artificial Sequence: Synthetic oligonucleotide
  source 1..24: mol_type = other DNA
gaaattggctggttagatgactac

SEQ ID NO: 20498 - protein, 8 aa, synthetic construct
  REGION 1..8: note = Description of Artificial Sequence: Synthetic peptide
EIGWLDDY

SEQ ID NO: 20499 - DNA, 42 bp, synthetic construct
  misc_feature 1..42: note = Description of Artificial Sequence: Synthetic oligonucleotide
  source 1..42: mol_type = other DNA
gagaggtatagcagcagctggtacgactacggtatggacgtc

SEQ ID NO: 20500 - protein, 14 aa, synthetic construct
  REGION 1..14: note = Description of Artificial Sequence: Synthetic peptide
ERYSSSWYDYGMDV

SEQ ID NO: 20501 - DNA, 18 bp, synthetic construct
  misc_feature 1..18: note = Description of Artificial Sequence: Synthetic oligonucleotide
  source 1..18: mol_type = other DNA
gtggcgtcctttgactgc

SEQ ID NO: 20502 - protein, 6 aa, synthetic construct
  REGION 1..6: note = Description of Artificial Sequence: Synthetic peptide
VASFDC

SEQ ID NO: 20503 - DNA, 24 bp, synthetic construct
  misc_feature 1..24: note = Description of Artificial Sequence: Synthetic oligonucleotide
  source 1..24: mol_type = other DNA
gaattaggctggtacgacgactac

SEQ ID NO: 20504 - protein, 8 aa, synthetic construct
  REGION 1..8: note = Description of Artificial Sequence: Synthetic peptide
ELGWYDDY

SEQ ID NO: 20505 - DNA, 24 bp, synthetic construct
  misc_feature 1..24: note = Description of Artificial Sequence: Synthetic oligonucleotide
  source 1..24: mol_type = other DNA
gaactgggaatgacgggtgactac

SEQ ID NO: 20506 - protein, 8 aa, synthetic construct
  REGION 1..8: note = Description of Artificial Sequence: Synthetic peptide
ELGMTGDY

SEQ ID NO: 20507 - DNA, 30 bp, synthetic construct
  misc_feature 1..30: note = Description of Artificial Sequence: Synthetic oligonucleotide
  source 1..30: mol_type = other DNA
gaaaatagcagctcgtactactttgactac

SEQ ID NO: 20508 - protein, 10 aa, synthetic construct
  REGION 1..10: note = Description of Artificial Sequence: Synthetic peptide
ENSSSYYFDY

SEQ ID NO: 20509 - DNA, 36 bp, synthetic construct
  misc_feature 1..36: note = Description of Artificial Sequence: Synthetic oligonucleotide
  source 1..36: mol_type = other DNA
agatatagcagcagctggacggggggtatggacgtc

SEQ ID NO: 20510 - protein, 12 aa, synthetic construct
  REGION 1..12: note = Description of Artificial Sequence: Synthetic peptide
RYSSSWTGGMDV

SEQ ID NO: 20511 - DNA, 27 bp, synthetic construct
  misc_feature 1..27: note = Description of Artificial Sequence: Synthetic oligonucleotide
  source 1..27: mol_type = other DNA
agcagtggctggtactactttgactac

SEQ ID NO: 20512 - protein, 9 aa, synthetic construct
  REGION 1..9: note = Description of Artificial Sequence: Synthetic peptide
SSGWYYFDY

SEQ ID NO: 20513 - DNA, 36 bp, synthetic construct
  misc_feature 1..36: note = Description of Artificial Sequence: Synthetic oligonucleotide
  source 1..36: mol_type = other DNA
gagggatacgatttttggagtggcttctttgactcc

SEQ ID NO: 20514 - protein, 12 aa, synthetic construct
  REGION 1..12: note = Description of Artificial Sequence: Synthetic peptide
EGYDFWSGFFDS

SEQ ID NO: 20515 - DNA, 24 bp, synthetic construct
  misc_feature 1..24: note = Description of Artificial Sequence: Synthetic oligonucleotide
  source 1..24: mol_type = other DNA
gaactggggttcctctctgactac

SEQ ID NO: 20516 - protein, 8 aa, synthetic construct
  REGION 1..8: note = Description of Artificial Sequence: Synthetic peptide
ELGFLSDY

SEQ ID NO: 20517 - DNA, 27 bp, synthetic construct
  misc_feature 1..27: note = Description of Artificial Sequence: Synthetic oligonucleotide
  source 1..27: mol_type = other DNA
agcagtggctggtactactttgactac

SEQ ID NO: 20518 - protein, 9 aa, synthetic construct
  REGION 1..9: note = Description of Artificial Sequence: Synthetic peptide
SSGWYYFDY

SEQ ID NO: 20519 - DNA, 36 bp, synthetic construct; identical to SEQ ID NO: 20477
  misc_feature 1..36: note = Description of Artificial Sequence: Synthetic oligonucleotide
  source 1..36: mol_type = other DNA

SEQ ID NO: 20520 - protein, 12 aa, synthetic construct
  REGION 1..12: note = Description of Artificial Sequence: Synthetic peptide
RYSSSWSGGMDV

SEQ ID NO: 20521 - DNA, 24 bp, synthetic construct
  misc_feature 1..24: note = Description of Artificial Sequence: Synthetic oligonucleotide
  source 1..24: mol_type = other DNA
gaaattggctggttagatgactac

SEQ ID NO: 20522 - protein, 8 aa, synthetic construct
  REGION 1..8: note = Description of Artificial Sequence: Synthetic peptide
EIGWLDDY

SEQ ID NO: 20523 - DNA, 42 bp, synthetic construct
  misc_feature 1..42: note = Description of Artificial Sequence: Synthetic oligonucleotide
  source 1..42: mol_type = other DNA
ggggagctactagaggactactactactacggaatggacgtc

SEQ ID NO: 20524 - protein, 14 aa, synthetic construct
  REGION 1..14: note = Description of Artificial Sequence: Synthetic peptide
GELLEDYYYYGMDV

SEQ ID NO: 20525 - DNA, 42 bp, synthetic construct
  misc_feature 1..42: note = Description of Artificial Sequence: Synthetic oligonucleotide
  source 1..42: mol_type = other DNA
ggggagctactagaggactactacttctacggtatggacgtc

SEQ ID NO: 20526 - protein, 14 aa, synthetic construct
  REGION 1..14: note = Description of Artificial Sequence: Synthetic peptide
GELLEDYYFYGMDV

SEQ ID NO: 20527 - DNA, 24 bp, synthetic construct
  misc_feature 1..24: note = Description of Artificial Sequence: Synthetic oligonucleotide
  source 1..24: mol_type = other DNA
gaaattggctggttagatgactac

SEQ ID NO: 20528 - protein, 8 aa, synthetic construct
  REGION 1..8: note = Description of Artificial Sequence: Synthetic peptide
EIGWLDDY

SEQ ID NO: 20529 - DNA, 18 bp, synthetic construct
  misc_feature 1..18: note = Description of Artificial Sequence: Synthetic oligonucleotide
  source 1..18: mol_type = other DNA
acggctggttttgactac

SEQ ID NO: 20530 - protein, 6 aa, synthetic construct
  REGION 1..6: note = Description of Artificial Sequence: Synthetic peptide
TAGFDY

SEQ ID NO: 20531 - DNA, 18 bp, synthetic construct
  misc_feature 1..18: note = Description of Artificial Sequence: Synthetic oligonucleotide
  source 1..18: mol_type = other DNA
ctgactacctttgacttc

SEQ ID NO: 20532 - protein, 6 aa, synthetic construct
  REGION 1..6: note = Description of Artificial Sequence: Synthetic peptide
LTTFDF

SEQ ID NO: 20533 - DNA, 36 bp, synthetic construct
  misc_feature 1..36: note = Description of Artificial Sequence: Synthetic oligonucleotide
  source 1..36: mol_type = other DNA
aagatagcagtggctggtactcactactttgactac

SEQ ID NO: 20534 - protein, 12 aa, synthetic construct
  REGION 1..12: note = Description of Artificial Sequence: Synthetic peptide
KIAVAGTHYFDY

SEQ ID NO: 20535 - DNA, 27 bp, synthetic construct
  misc_feature 1..27: note = Description of Artificial Sequence: Synthetic oligonucleotide
  source 1..27: mol_type = other DNA
gattcctccccctacggtatggacgtc

SEQ ID NO: 20536 - protein, 9 aa, synthetic construct
  REGION 1..9: note = Description of Artificial Sequence: Synthetic peptide
DSSPYGMDV

SEQ ID NO: 20537 - DNA, 24 bp, synthetic construct
  misc_feature 1..24: note = Description of Artificial Sequence: Synthetic oligonucleotide
  source 1..24: mol_type = other DNA
gaattaggctggtacgacgactac

SEQ ID NO: 20538 - protein, 8 aa, synthetic construct
  REGION 1..8: note = Description of Artificial Sequence: Synthetic peptide
ELGWYDDY

SEQ ID NO: 20539 - DNA, 27 bp, synthetic construct
  misc_feature 1..27: note = Description of Artificial Sequence: Synthetic oligonucleotide
  source 1..27: mol_type = other DNA
agcagtggctggtactactttgactac

SEQ ID NO: 20540 - protein, 9 aa, synthetic construct
  REGION 1..9: note = Description of Artificial Sequence: Synthetic peptide
SSGWYYFDY

SEQ ID NO: 20541 - DNA, 18 bp, synthetic construct
  misc_feature 1..18: note = Description of Artificial Sequence: Synthetic oligonucleotide
  source 1..18: mol_type = other DNA
actggggtctttgactac

SEQ ID NO: 20542 - protein, 6 aa, synthetic construct
  REGION 1..6: note = Description of Artificial Sequence: Synthetic peptide
TGVFDY

SEQ ID NO: 20543 - DNA, 42 bp, synthetic construct; identical to SEQ ID NO: 20525
  misc_feature 1..42: note = Description of Artificial Sequence: Synthetic oligonucleotide
  source 1..42: mol_type = other DNA

SEQ ID NO: 20544 - protein, 14 aa, synthetic construct
  REGION 1..14: note = Description of Artificial Sequence: Synthetic peptide
GELLEDYYFYGMDV

SEQ ID NO: 20545 - DNA, 21 bp, synthetic construct
  misc_feature 1..21: note = Description of Artificial Sequence: Synthetic oligonucleotide
  source 1..21: mol_type = other DNA
ggcaatatagcaagggactac

SEQ ID NO: 20546 - protein, 7 aa, synthetic construct
  REGION 1..7: note = Description of Artificial Sequence: Synthetic peptide
GNIARDY

SEQ ID NO: 20547 - DNA, 24 bp, synthetic construct
  misc_feature 1..24: note = Description of Artificial Sequence: Synthetic oligonucleotide
  source 1..24: mol_type = other DNA
gaactggggttcctctctgactac

SEQ ID NO: 20548 - protein, 8 aa, synthetic construct
  REGION 1..8: note = Description of Artificial Sequence: Synthetic peptide
ELGFLSDY

SEQ ID NO: 20549 - DNA, 24 bp, synthetic construct
  misc_feature 1..24: note = Description of Artificial Sequence: Synthetic oligonucleotide
  source 1..24: mol_type = other DNA
gaattaggctggtacgacgactac

SEQ ID NO: 20550 - protein, 8 aa, synthetic construct
  REGION 1..8: note = Description of Artificial Sequence: Synthetic peptide
ELGWYDDY

SEQ ID NO: 20551 - DNA, 42 bp, synthetic construct
  misc_feature 1..42: note = Description of Artificial Sequence: Synthetic oligonucleotide
  source 1..42: mol_type = other DNA
gaggagtatagcagtggctggtacgactacggtatggacgtc

SEQ ID NO: 20552 - protein, 14 aa, synthetic construct
  REGION 1..14: note = Description of Artificial Sequence: Synthetic peptide
EEYSSGWYDYGMDV

SEQ ID NO: 20553 - DNA, 18 bp, synthetic construct
  misc_feature 1..18: note = Description of Artificial Sequence: Synthetic oligonucleotide
  source 1..18: mol_type = other DNA
gtggcgtcctttgactac

SEQ ID NO: 20554 - protein, 6 aa, synthetic construct
  REGION 1..6: note = Description of Artificial Sequence: Synthetic peptide
VASFDY

SEQ ID NO: 20555 - DNA, 24 bp, synthetic construct
  misc_feature 1..24: note = Description of Artificial Sequence: Synthetic oligonucleotide
  source 1..24: mol_type = other DNA
gaaattggctggttagatgactac

SEQ ID NO: 20556 - protein, 8 aa, synthetic construct
  REGION 1..8: note = Description of Artificial Sequence: Synthetic peptide
EIGWLDDY

SEQ ID NO: 20557 - DNA, 24 bp, synthetic construct
  misc_feature 1..24: note = Description of Artificial Sequence: Synthetic oligonucleotide
  source 1..24: mol_type = other DNA
gaactggggatgacgggtgactcc

SEQ ID NO: 20558 - protein, 8 aa, synthetic construct
  REGION 1..8: note = Description of Artificial Sequence: Synthetic peptide
ELGMTGDS

SEQ ID NO: 20559 - DNA, 42 bp, synthetic construct
  misc_feature 1..42: note = Description of Artificial Sequence: Synthetic oligonucleotide
  source 1..42: mol_type = other DNA
ggggagctactagaggactactacttctacggtttggacgtc

SEQ ID NO: 20560 - protein, 14 aa, synthetic construct
  REGION 1..14: note = Description of Artificial Sequence: Synthetic peptide
GELLEDYYFYGLDV

SEQ ID NO: 20561 - DNA, 33 bp, synthetic construct
  misc_feature 1..33: note = Description of Artificial Sequence: Synthetic oligonucleotide
  source 1..33: mol_type = other DNA
gatcgggtgaaagctcatgatggttttgatatc

SEQ ID NO: 20562 - protein, 11 aa, synthetic construct
  REGION 1..11: note = Description of Artificial Sequence: Synthetic peptide
DRVKAHDGFDI

SEQ ID NO: 20563 - DNA, 42 bp, synthetic construct; identical to SEQ ID NO: 20525
  misc_feature 1..42: note = Description of Artificial Sequence: Synthetic oligonucleotide
  source 1..42: mol_type = other DNA

SEQ ID NO: 20564 - protein, 14 aa, synthetic construct
  REGION 1..14: note = Description of Artificial Sequence: Synthetic peptide
GELLEDYYFYGMDV

SEQ ID NO: 20565 - DNA, 24 bp, synthetic construct
  misc_feature 1..24: note = Description of Artificial Sequence: Synthetic oligonucleotide
  source 1..24: mol_type = other DNA
gaactggggatgacgggtgactcc

SEQ ID NO: 20566 - protein, 8 aa, synthetic construct
  REGION 1..8: note = Description of Artificial Sequence: Synthetic peptide
ELGMTGDS

SEQ ID NO: 20567 - DNA, 24 bp, synthetic construct
  misc_feature 1..24: note = Description of Artificial Sequence: Synthetic oligonucleotide
  source 1..24: mol_type = other DNA
gaactggggatgacgggtgactac

SEQ ID NO: 20568 - protein, 8 aa, synthetic construct
  REGION 1..8: note = Description of Artificial Sequence: Synthetic peptide
ELGMTGDY

SEQ ID NO: 20569 - DNA, 27 bp, synthetic construct
  misc_feature 1..27: note = Description of Artificial Sequence: Synthetic oligonucleotide
  source 1..27: mol_type = other DNA
agcagtggctggtactactttgactac

SEQ ID NO: 20570 - protein, 9 aa, synthetic construct
  REGION 1..9: note = Description of Artificial Sequence: Synthetic peptide
SSGWYYFDY

SEQ ID NO: 20571 - DNA, 36 bp, synthetic construct
  misc_feature 1..36: note = Description of Artificial Sequence: Synthetic oligonucleotide
  source 1..36: mol_type = other DNA
aggtatagcaacagctggtcagggggtatggacgtc

SEQ ID NO: 20572 - protein, 12 aa, synthetic construct
  REGION 1..12: note = Description of Artificial Sequence: Synthetic peptide
RYSNSWSGGMDV

SEQ ID NO: 20573 - DNA, 39 bp, synthetic construct
  misc_feature 1..39: note = Description of Artificial Sequence: Synthetic oligonucleotide
  source 1..39: mol_type = other DNA
ttggggcgtatagcagtgactggtccttactttgactac

SEQ ID NO: 20574 - protein, 13 aa, synthetic construct
  REGION 1..13: note = Description of Artificial Sequence: Synthetic peptide
LGRIAVTGPYFDY

SEQ ID NO: 20575 - DNA, 24 bp, synthetic construct
  misc_feature 1..24: note = Description of Artificial Sequence: Synthetic oligonucleotide
  source 1..24: mol_type = other DNA
gaaattggctggttagatgactac

SEQ ID NO: 20576 - protein, 8 aa, synthetic construct
  REGION 1..8: note = Description of Artificial Sequence: Synthetic peptide
EIGWLDDY

SEQ ID NO: 20577 - DNA, 24 bp, synthetic construct
  misc_feature 1..24: note = Description of Artificial Sequence: Synthetic oligonucleotide
  source 1..24: mol_type = other DNA
gaactggggttcctctctgactac

SEQ ID NO: 20578 - protein, 8 aa, synthetic construct
  REGION 1..8: note = Description of Artificial Sequence: Synthetic peptide
ELGFLSDY

SEQ ID NO: 20579 - DNA, 30 bp, synthetic construct
  misc_feature 1..30: note = Description of Artificial Sequence: Synthetic oligonucleotide
  source 1..30: mol_type = other DNA
gaaaatagcagttcgtactactttgactac

SEQ ID NO: 20580 - protein, 10 aa, synthetic construct
  REGION 1..10: note = Description of Artificial Sequence: Synthetic peptide
ENSSSYYFDY

SEQ ID NO: 20581 - DNA, 42 bp, synthetic construct; identical to SEQ ID NO: 20525
  misc_feature 1..42: note = Description of Artificial Sequence: Synthetic oligonucleotide
  source 1..42: mol_type = other DNA

SEQ ID NO: 20582 - protein, 14 aa, synthetic construct
  REGION 1..14: note = Description of Artificial Sequence: Synthetic peptide
GELLEDYYFYGMDV

SEQ ID NO: 20583 - DNA, 15 bp, synthetic construct
  misc_feature 1..15: note = Description of Artificial Sequence: Synthetic oligonucleotide
  source 1..15: mol_type = other DNA
gatcgaggcagcagc

SEQ ID NO: 20584 - protein, 5 aa, synthetic construct
  REGION 1..5: note = Description of Artificial Sequence: Synthetic peptide
DRGSS

SEQ ID NO: 20585 - DNA, 42 bp, synthetic construct
  misc_feature 1..42: note = Description of Artificial Sequence: Synthetic oligonucleotide
  source 1..42: mol_type = other DNA
cgtggatatagtggctacgaggacctcctctactttgactgc

SEQ ID NO: 20586 - protein, 14 aa, synthetic construct
  REGION 1..14: note = Description of Artificial Sequence: Synthetic peptide
RGYSGYEDLLYFDC

SEQ ID NO: 20587 - DNA, 36 bp, synthetic construct; identical to SEQ ID NO: 20477
  misc_feature 1..36: note = Description of Artificial Sequence: Synthetic oligonucleotide
  source 1..36: mol_type = other DNA

SEQ ID NO: 20588 - protein, 12 aa, synthetic construct
  REGION 1..12: note = Description of Artificial Sequence: Synthetic peptide
RYSSSWSGGMDV

SEQ ID NO: 20589 - DNA, 27 bp, synthetic construct
  misc_feature 1..27: note = Description of Artificial Sequence: Synthetic oligonucleotide
  source 1..27: mol_type = other DNA
gattcctccccctacggtatggacgtc

SEQ ID NO: 20590 - protein, 9 aa, synthetic construct
  REGION 1..9: note = Description of Artificial Sequence: Synthetic peptide
DSSPYGMDV

SEQ ID NO: 20591 - DNA, 27 bp, synthetic construct
  misc_feature 1..27: note = Description of Artificial Sequence: Synthetic oligonucleotide
  source 1..27: mol_type = other DNA
cggacccagtttgatgattttgatatc

SEQ ID NO: 20592 - protein, 9 aa, synthetic construct
  REGION 1..9: note = Description of Artificial Sequence: Synthetic peptide
RTQFDDFDI

SEQ ID NO: 20593 - DNA, 24 bp, synthetic construct
  misc_feature 1..24: note = Description of Artificial Sequence: Synthetic oligonucleotide
  source 1..24: mol_type = other DNA
gaactggggatgacgggtgactcc

SEQ ID NO: 20594 - protein, 8 aa, synthetic construct
  REGION 1..8: note = Description of Artificial Sequence: Synthetic peptide
ELGMTGDS

SEQ ID NO: 20595 - DNA, 36 bp, synthetic construct
  misc_feature 1..36: note = Description of Artificial Sequence: Synthetic oligonucleotide
  source 1..36: mol_type = other DNA
agggggtatagcagtggaggctacggtatggacgtc

SEQ ID NO: 20596 - protein, 12 aa, synthetic construct
  REGION 1..12: note = Description of Artificial Sequence: Synthetic peptide
RGYSSGGYGMDV

SEQ ID NO: 20597 - DNA, 15 bp, synthetic construct
  misc_feature 1..15: note = Description of Artificial Sequence: Synthetic oligonucleotide
  source 1..15: mol_type = other DNA
gatagggggagcctc

SEQ ID NO: 20598 - protein, 5 aa, synthetic construct
  REGION 1..5: note = Description of Artificial Sequence: Synthetic peptide
DRGSL

SEQ ID NO: 20599 - DNA, 27 bp, synthetic construct
  misc_feature 1..27: note = Description of Artificial Sequence: Synthetic oligonucleotide
  source 1..27: mol_type = other DNA
cggactccctatgatgtctttgatatc

SEQ ID NO: 20600 - protein, 9 aa, synthetic construct
  REGION 1..9: note = Description of Artificial Sequence: Synthetic peptide
RTPYDVFDI

SEQ ID NO: 20601 - DNA, 15 bp, synthetic construct
  misc_feature 1..15: note = Description of Artificial Sequence: Synthetic oligonucleotide
  source 1..15: mol_type = other DNA
gagtggggggactac

SEQ ID NO: 20602 - protein, 5 aa, synthetic construct
  REGION 1..5: note = Description of Artificial Sequence: Synthetic peptide
EWGDY

SEQ ID NO: 20603 - DNA, 33 bp, synthetic construct
  misc_feature 1..33: note = Description of Artificial Sequence: Synthetic oligonucleotide
  source 1..33: mol_type = other DNA
gacgggtacggtggtaactccttctttgactac

SEQ ID NO: 20604 - protein, 11 aa, synthetic construct
  REGION 1..11: note = Description of Artificial Sequence: Synthetic peptide
DGYGGNSFFDY

SEQ ID NO: 20605 - DNA, 24 bp, synthetic construct
  misc_feature 1..24: note = Description of Artificial Sequence: Synthetic oligonucleotide
  source 1..24: mol_type = other DNA
gaactggggatgacgggtgactcc

SEQ ID NO: 20606 - protein, 8 aa, synthetic construct
  REGION 1..8: note = Description of Artificial Sequence: Synthetic peptide
ELGMTGDS

SEQ ID NO: 20607 - DNA, 36 bp, synthetic construct
  misc_feature 1..36: note = Description of Artificial Sequence: Synthetic oligonucleotide
  source 1..36: mol_type = other DNA
gagaggtacgatttttggagtggttgtatggacgtc

SEQ ID NO: 20608 - protein, 12 aa, synthetic construct
  REGION 1..12: note = Description of Artificial Sequence: Synthetic peptide
ERYDFWSGCMDV

SEQ ID NO: 20609 - DNA, 24 bp, synthetic construct
  misc_feature 1..24: note = Description of Artificial Sequence: Synthetic oligonucleotide
  source 1..24: mol_type = other DNA
gaactggggatgacgggtgactcc

SEQ ID NO: 20610 - protein, 8 aa, synthetic construct
  REGION 1..8: note = Description of Artificial Sequence: Synthetic peptide
ELGMTGDS

SEQ ID NO: 20611 - DNA, 36 bp, synthetic construct
  misc_feature 1..36: note = Description of Artificial Sequence: Synthetic oligonucleotide
  source 1..36: mol_type = other DNA
gatcgatacgatttttggagtggttattttgactac

SEQ ID NO: 20612 - protein, 12 aa, synthetic construct
  REGION 1..12: note = Description of Artificial Sequence: Synthetic peptide
DRYDFWSGYFDY

SEQ ID NO: 20613 - DNA, 24 bp, synthetic construct
  misc_feature 1..24: note = Description of Artificial Sequence: Synthetic oligonucleotide
  source 1..24: mol_type = other DNA
gaaattggctggttagatgactac

SEQ ID NO: 20614 - protein, 8 aa, synthetic construct
  REGION 1..8: note = Description of Artificial Sequence: Synthetic peptide
EIGWLDDY

SEQ ID NO: 20615 - DNA, 42 bp, synthetic construct
  misc_feature 1..42: note = Description of Artificial Sequence: Synthetic oligonucleotide
  source 1..42: mol_type = other DNA
ggggagctattagaggactactactactacggaatggacgtc

SEQ ID NO: 20616 - protein, 14 aa, synthetic construct
  REGION 1..14: note = Description of Artificial Sequence: Synthetic peptide
GELLEDYYYYGMDV

SEQ ID NO: 20617 - DNA, 48 bp, synthetic construct
  misc_feature 1..48: note = Description of Artificial Sequence: Synthetic oligonucleotide
  source 1..48: mol_type = other DNA
gatagtagcaatttcagcaactggtacgattactacggtatggacgtc

SEQ ID NO: 20618 - protein, 16 aa, synthetic construct
  REGION 1..16: note = Description of Artificial Sequence: Synthetic peptide
DSSNFSNWYDYYGMDV

SEQ ID NO: 20619 - DNA, 36 bp, synthetic construct
  misc_feature 1..36: note = Description of Artificial Sequence: Synthetic oligonucleotide
  source 1..36: mol_type = other DNA
accgctgctgggtatagcagcagctggtttgactac

SEQ ID NO: 20620 - protein, 12 aa, synthetic construct
  REGION 1..12: note = Description of Artificial Sequence: Synthetic peptide
TAAGYSSSWFDY

SEQ ID NO: 20621 - DNA, 42 bp, synthetic construct; identical to SEQ ID NO: 20551
  misc_feature 1..42: note = Description of Artificial Sequence: Synthetic oligonucleotide
  source 1..42: mol_type = other DNA

SEQ ID NO: 20622 - protein, 14 aa, synthetic construct
  REGION 1..14: note = Description of Artificial Sequence: Synthetic peptide
EEYSSGWYDYGMDV

SEQ ID NO: 20623 - DNA, 24 bp, synthetic construct
  misc_feature 1..24: note = Description of Artificial Sequence: Synthetic oligonucleotide
  source 1..24: mol_type = other DNA
gaactggggatgacgggtgactcc

SEQ ID NO: 20624 - protein, 8 aa, synthetic construct
  REGION 1..8: note = Description of Artificial Sequence: Synthetic peptide
ELGMTGDS

SEQ ID NO: 20625 - DNA, 36 bp, synthetic construct; identical to SEQ ID NO: 20619
  misc_feature 1..36: note = Description of Artificial Sequence: Synthetic oligonucleotide
  source 1..36: mol_type = other DNA

SEQ ID NO: 20626 - protein, 12 aa, synthetic construct
  REGION 1..12: note = Description of Artificial Sequence: Synthetic peptide
TAAGYSSSWFDY

SEQ ID NO: 20627 - DNA, 24 bp, synthetic construct
  misc_feature 1..24: note = Description of Artificial Sequence: Synthetic oligonucleotide
  source 1..24: mol_type = other DNA
gaactggggatgacgagtgactac

SEQ ID NO: 20628 - protein, 8 aa, synthetic construct
  REGION 1..8: note = Description of Artificial Sequence: Synthetic peptide
ELGMTSDY

SEQ ID NO: 20629 - DNA, 24 bp, synthetic construct
  misc_feature 1..24: note = Description of Artificial Sequence: Synthetic oligonucleotide
  source 1..24: mol_type = other DNA
gaaatgggctggtacgatgactac

SEQ ID NO: 20630 - protein, 8 aa, synthetic construct
  REGION 1..8: note = Description of Artificial Sequence: Synthetic peptide
EMGWYDDY

SEQ ID NO: 20631 - DNA, 42 bp, synthetic construct
  misc_feature 1..42: note = Description of Artificial Sequence: Synthetic oligonucleotide
  source 1..42: mol_type = other DNA
ggggagttactagaggactactactactacggaatggacgtc

SEQ ID NO: 20632 - protein, 14 aa, synthetic construct
  REGION 1..14: note = Description of Artificial Sequence: Synthetic peptide
GELLEDYYYYGMDV

SEQ ID NO: 20633 - DNA, 42 bp, synthetic construct; identical to SEQ ID NO: 20525
  misc_feature 1..42: note = Description of Artificial Sequence: Synthetic oligonucleotide
  source 1..42: mol_type = other DNA

SEQ ID NO: 20634 - protein, 14 aa, synthetic construct
  REGION 1..14: note = Description of Artificial Sequence: Synthetic peptide
GELLEDYYFYGMDV

SEQ ID NO: 20635 - DNA, 36 bp, synthetic construct; identical to SEQ ID NO: 20595
  misc_feature 1..36: note = Description of Artificial Sequence: Synthetic oligonucleotide
  source 1..36: mol_type = other DNA

SEQ ID NO: 20636 - protein, 12 aa, synthetic construct
  REGION 1..12: note = Description of Artificial Sequence: Synthetic peptide
RGYSSGGYGMDV

SEQ ID NO: 20637 - DNA, 18 bp, synthetic construct
  misc_feature 1..18: note = Description of Artificial Sequence: Synthetic oligonucleotide
  source 1..18: mol_type = other DNA
aagaaggctaacgactac

SEQ ID NO: 20638 - protein, 6 aa, synthetic construct
  REGION 1..6: note = Description of Artificial Sequence: Synthetic peptide
KKANDY

SEQ ID NO: 20639 - DNA, 30 bp, synthetic construct
  misc_feature 1..30: note = Description of Artificial Sequence: Synthetic oligonucleotide
  source 1..30: mol_type = other DNA
gaaaatagcagttcgttctactttgactac

SEQ ID NO: 20640 - protein, 10 aa, synthetic construct
  REGION 1..10: note = Description of Artificial Sequence: Synthetic peptide
ENSSSFYFDY

SEQ ID NO: 20641 - DNA, 42 bp, synthetic construct; identical to SEQ ID NO: 20525
  misc_feature 1..42: note = Description of Artificial Sequence: Synthetic oligonucleotide
  source 1..42: mol_type = other DNA

SEQ ID NO: 20642 - protein, 14 aa, synthetic construct
  REGION 1..14: note = Description of Artificial Sequence: Synthetic peptide
GELLEDYYFYGMDV

SEQ ID NO: 20643 - DNA, 42 bp, synthetic construct
  misc_feature 1..42: note = Description of Artificial Sequence: Synthetic oligonucleotide
  source 1..42: mol_type = other DNA
ggggagctattagaggactactacttctacggtatggacgtc

SEQ ID NO: 20644 - protein, 14 aa, synthetic construct
  REGION 1..14: note = Description of Artificial Sequence: Synthetic peptide
GELLEDYYFYGMDV

SEQ ID NO: 20645 - DNA, 24 bp, synthetic construct
  misc_feature 1..24: note = Description of Artificial Sequence: Synthetic oligonucleotide
  source 1..24: mol_type = other DNA
gaaatgggctggtacgatgactac

SEQ ID NO: 20646 - protein, 8 aa, synthetic construct
  REGION 1..8: note = Description of Artificial Sequence: Synthetic peptide
EMGWYDDY

SEQ ID NO: 20647 - DNA, 42 bp, synthetic construct
  misc_feature 1..42: note = Description of Artificial Sequence: Synthetic oligonucleotide
  source 1..42: mol_type = other DNA
ggggaactactagaggactactcctactacggtatcgacgtc

SEQ ID NO: 20648 - protein, 14 aa, synthetic construct
  REGION 1..14: note = Description of Artificial Sequence: Synthetic peptide
GELLEDYSYYGIDV

SEQ ID NO: 20649 - DNA, 18 bp, synthetic construct
  misc_feature 1..18: note = Description of Artificial Sequence: Synthetic oligonucleotide
  source 1..18: mol_type = other DNA
acaaacggtatggacgtc

SEQ ID NO: 20650 - protein, 6 aa, synthetic construct
  REGION 1..6: note = Description of Artificial Sequence: Synthetic peptide
TNGMDV

SEQ ID NO: 20651 - DNA, 24 bp, synthetic construct
  misc_feature 1..24: note = Description of Artificial Sequence: Synthetic oligonucleotide
  source 1..24: mol_type = other DNA
gacggtaccagctcctttgactac

SEQ ID NO: 20652 - protein, 8 aa, synthetic construct
  REGION 1..8: note = Description of Artificial Sequence: Synthetic peptide
DGTSSFDY

SEQ ID NO: 20653 - DNA, 18 bp, synthetic construct
  misc_feature 1..18: note = Description of Artificial Sequence: Synthetic oligonucleotide
  source 1..18: mol_type = other DNA
ttaactggttttgactac

SEQ ID NO: 20654 - protein, 6 aa, synthetic construct
  REGION 1..6: note = Description of Artificial Sequence: Synthetic peptide
LTGFDY

SEQ ID NO: 20655 - DNA, 24 bp, synthetic construct
  misc_feature 1..24: note = Description of Artificial Sequence: Synthetic oligonucleotide
  source 1..24: mol_type = other DNA
gatggaactgggtcctttgactac

SEQ ID NO: 20656 - protein, 8 aa, synthetic construct
  REGION 1..8: note = Description of Artificial Sequence: Synthetic peptide
DGTGSFDY

SEQ ID NO: 20657 - DNA, 24 bp, synthetic construct
  misc_feature 1..24: note = Description of Artificial Sequence: Synthetic oligonucleotide
  source 1..24: mol_type = other DNA
gatggaactgggtcctttgactac

SEQ ID NO: 20658 - protein, 8 aa, synthetic construct
  REGION 1..8: note = Description of Artificial Sequence: Synthetic peptide
DGTGSFDY

SEQ ID NO: 20659 - DNA, 27 bp, synthetic construct
  misc_feature 1..27: note = Description of Artificial Sequence: Synthetic oligonucleotide
  source 1..27: mol_type = other DNA
agcagtggctggtacttttttgactac

SEQ ID NO: 20660 - protein, 9 aa, synthetic construct
  REGION 1..9: note = Description of Artificial Sequence: Synthetic peptide
SSGWYFFDY

SEQ ID NO: 20661 - DNA, 18 bp, synthetic construct
  misc_feature 1..18: note = Description of Artificial Sequence: Synthetic oligonucleotide
  source 1..18: mol_type = other DNA
acttccctctttgactac

SEQ ID NO: 20662 - protein, 6 aa, synthetic construct
  REGION 1..6: note = Description of Artificial Sequence: Synthetic peptide
TSLFDY

SEQ ID NO: 20663 - DNA, 30 bp, synthetic construct; identical to SEQ ID NO: 20507
  misc_feature 1..30: note = Description of Artificial Sequence: Synthetic oligonucleotide
  source 1..30: mol_type = other DNA

SEQ ID NO: 20664 - protein, 10 aa, synthetic construct
  REGION 1..10: note = Description of Artificial Sequence: Synthetic peptide
ENSSSYYFDY

SEQ ID NO: 20665 - DNA, 27 bp, synthetic construct
  misc_feature 1..27: note = Description of Artificial Sequence: Synthetic oligonucleotide
  source 1..27: mol_type = other DNA
ctgagcagcagctggtcttttgactac

SEQ ID NO: 20666 - protein, 9 aa, synthetic construct
  REGION 1..9: note = Description of Artificial Sequence: Synthetic peptide
LSSSWSFDY

SEQ ID NO: 20667 - DNA, 42 bp, synthetic construct
  misc_feature 1..42: note = Description of Artificial Sequence: Synthetic oligonucleotide
  source 1..42: mol_type = other DNA
ggggagttagtagaggactactacttctacggtatggacgtc

SEQ ID NO: 20668 - protein, 14 aa, synthetic construct
  REGION 1..14: note = Description of Artificial Sequence: Synthetic peptide
GELVEDYYFYGMDV

SEQ ID NO: 20669 - DNA, 24 bp, synthetic construct
  misc_feature 1..24: note = Description of Artificial Sequence: Synthetic oligonucleotide
  source 1..24: mol_type = other DNA
gatggaactgggtcctttgactac

SEQ ID NO: 20670 - protein, 8 aa, synthetic construct
  REGION 1..8: note = Description of Artificial Sequence: Synthetic peptide
DGTGSFDY

SEQ ID NO: 20671 - DNA, 30 bp, synthetic construct; identical to SEQ ID NO: 20507
  misc_feature 1..30: note = Description of Artificial Sequence: Synthetic oligonucleotide
  source 1..30: mol_type = other DNA

SEQ ID NO: 20672 - protein, 10 aa, synthetic construct
  REGION 1..10: note = Description of Artificial Sequence: Synthetic peptide
ENSSSYYFDY

SEQ ID NO: 20673 - DNA, 42 bp, synthetic construct
  misc_feature 1..42: note = Description of Artificial Sequence: Synthetic oligonucleotide
  source 1..42: mol_type = other DNA
ggggagctacttgaggactactacttctacggtatggacgtc

SEQ ID NO: 20674 - protein, 14 aa, synthetic construct
  REGION 1..14: note = Description of Artificial Sequence: Synthetic peptide
GELLEDYYFYGMDV

SEQ ID NO: 20675 - DNA, 42 bp, synthetic construct
  misc_feature 1..42: note = Description of Artificial Sequence: Synthetic oligonucleotide
  source 1..42: mol_type = other DNA
ggggaactactagaggactactacttctacggtatggacgtc

SEQ ID NO: 20676 - protein, 14 aa, synthetic construct
  REGION 1..14: note = Description of Artificial Sequence: Synthetic peptide
GELLEDYYFYGMDV

SEQ ID NO: 20677 - DNA, 42 bp, synthetic construct
  misc_feature 1..42: note = Description of Artificial Sequence: Synthetic oligonucleotide
  source 1..42: mol_type = other DNA
ggggagctactagaggactactactacttcgctatggacgtc

SEQ ID NO: 20678 - protein, 14 aa, synthetic construct
  REGION 1..14: note = Description of Artificial Sequence: Synthetic peptide
GELLEDYYYFAMDV

SEQ ID NO: 20679 - DNA, 48 bp, synthetic construct
  misc_feature 1..48: note = Description of Artificial Sequence: Synthetic oligonucleotide
  source 1..48: mol_type = other DNA
gatattagtaatttcagcagctggtacgattactacgctatggacgtc

SEQ ID NO: 20680 - protein, 16 aa, synthetic construct
  REGION 1..16: note = Description of Artificial Sequence: Synthetic peptide
DISNFSSWYDYYAMDV

SEQ ID NO: 20681 - DNA, 42 bp, synthetic construct; identical to SEQ ID NO: 20525
  misc_feature 1..42: note = Description of Artificial Sequence: Synthetic oligonucleotide
  source 1..42: mol_type = other DNA

SEQ ID NO: 20682 - protein, 14 aa, synthetic construct
  REGION 1..14: note = Description of Artificial Sequence: Synthetic peptide
GELLEDYYFYGMDV

SEQ ID NO: 20683 - DNA, 24 bp, synthetic construct
  misc_feature 1..24: note = Description of Artificial Sequence: Synthetic oligonucleotide
  source 1..24: mol_type = other DNA
gatggaactgggtcctttgactac

SEQ ID NO: 20684 - protein, 8 aa, synthetic construct
  REGION 1..8: note = Description of Artificial Sequence: Synthetic peptide
DGTGSFDY

SEQ ID NO: 20685 - DNA, 33 bp, synthetic construct
  misc_feature 1..33: note = Description of Artificial Sequence: Synthetic oligonucleotide
  source 1..33: mol_type = other DNA
gatcgggtgagagctcatgatggttttgatatc

SEQ ID NO: 20686 - protein, 11 aa, synthetic construct
  REGION 1..11: note = Description of Artificial Sequence: Synthetic peptide
DRVRAHDGFDI

SEQ ID NO: 20687 - DNA, 24 bp, synthetic construct
  misc_feature 1..24: note = Description of Artificial Sequence: Synthetic oligonucleotide
  source 1..24: mol_type = other DNA
gatggaactgggtcctttgactac

SEQ ID NO: 20688 - protein, 8 aa, synthetic construct
  REGION 1..8: note = Description of Artificial Sequence: Synthetic peptide
DGTGSFDY

SEQ ID NO: 20689 - DNA, 42 bp, synthetic construct
  misc_feature 1..42: note = Description of Artificial Sequence: Synthetic oligonucleotide
  source 1..42: mol_type = other DNA
ggggagctactagaggactactactactacggtatggacgtc

SEQ ID NO: 20690 - protein, 14 aa, synthetic construct
  REGION 1..14: note = Description of Artificial Sequence: Synthetic peptide
GELLEDYYYYGMDV

SEQ ID NO: 20691 - DNA, 18 bp, synthetic construct
  misc_feature 1..18: note = Description of Artificial Sequence: Synthetic oligonucleotide
  source 1..18: mol_type = other DNA
gtctctggctttgactac

SEQ ID NO: 20692 - protein, 6 aa, synthetic construct
  REGION 1..6: note = Description of Artificial Sequence: Synthetic peptide
VSGFDY

SEQ ID NO: 20693 - DNA, 30 bp, synthetic construct; identical to SEQ ID NO: 20507
  misc_feature 1..30: note = Description of Artificial Sequence: Synthetic oligonucleotide
  source 1..30: mol_type = other DNA

SEQ ID NO: 20694 - protein, 10 aa, synthetic construct
  REGION 1..10: note = Description of Artificial Sequence: Synthetic peptide
ENSSSYYFDY

SEQ ID NO: 20695 - DNA, 42 bp, synthetic construct
  misc_feature 1..42: note = Description of Artificial Sequence: Synthetic oligonucleotide
  source 1..42: mol_type = other DNA
ggggagctactagaggactactcctactacggtatggacgtc

SEQ ID NO: 20696 - protein, 14 aa, synthetic construct
  REGION 1..14: note = Description of Artificial Sequence: Synthetic peptide
GELLEDYSYYGMDV

SEQ ID NO: 20697 - DNA, 42 bp, synthetic construct
  misc_feature 1..42: note = Description of Artificial Sequence: Synthetic oligonucleotide
  source 1..42: mol_type = other DNA
ggggagttactagaggactactacttctacggtatggacgtc

SEQ ID NO: 20698 - protein, 14 aa, synthetic construct
  REGION 1..14: note = Description of Artificial Sequence: Synthetic peptide
GELLEDYYFYGMDV

SEQ ID NO: 20699 - DNA, 42 bp, synthetic construct; identical to SEQ ID NO: 20525
  misc_feature 1..42: note = Description of Artificial Sequence: Synthetic oligonucleotide
  source 1..42: mol_type = other DNA

SEQ ID NO: 20700 - protein, 14 aa, synthetic construct
  REGION 1..14: note = Description of Artificial Sequence: Synthetic peptide
GELLEDYYFYGMDV

SEQ ID NO: 20701 - DNA, 15 bp, synthetic construct
  misc_feature 1..15: note = Description of Artificial Sequence: Synthetic oligonucleotide
  source 1..15: mol_type = other DNA
gatcggggggggacc

SEQ ID NO: 20702 - protein, 5 aa, synthetic construct
  REGION 1..5: note = Description of Artificial Sequence: Synthetic peptide
DRGGT

SEQ ID NO: 20703 - DNA, 24 bp, synthetic construct
  misc_feature 1..24: note = Description of Artificial Sequence: Synthetic oligonucleotide
  source 1..24: mol_type = other DNA
gatggaactgggtcctttgactac

SEQ ID NO: 20704 - protein, 8 aa, synthetic construct
  REGION 1..8: note = Description of Artificial Sequence: Synthetic peptide
DGTGSFDY

SEQ ID NO: 20705 - DNA, 30 bp, synthetic construct; identical to SEQ ID NO: 20507
  misc_feature 1..30: note = Description of Artificial Sequence: Synthetic oligonucleotide
  source 1..30: mol_type = other DNA

SEQ ID NO: 20706 - protein, 10 aa, synthetic construct
  REGION 1..10: note = Description of Artificial Sequence: Synthetic peptide
ENSSSYYFDY

SEQ ID NO: 20707 - DNA, 30 bp, synthetic construct; identical to SEQ ID NO: 20507
  misc_feature 1..30: note = Description of Artificial Sequence: Synthetic oligonucleotide
  source 1..30: mol_type = other DNA

SEQ ID NO: 20708 - protein, 10 aa, synthetic construct
  REGION 1..10: note = Description of Artificial Sequence: Synthetic peptide
ENSSSYYFDY

SEQ ID NO: 20709 - DNA, 36 bp, synthetic construct; identical to SEQ ID NO: 20595
  misc_feature 1..36: note = Description of Artificial Sequence: Synthetic oligonucleotide
  source 1..36: mol_type = other DNA

SEQ ID NO: 20710 - protein, 12 aa, synthetic construct
  REGION 1..12: note = Description of Artificial Sequence: Synthetic peptide
RGYSSGGYGMDV

SEQ ID NO: 20711 - DNA, 24 bp, synthetic construct
  misc_feature 1..24: note = Description of Artificial Sequence: Synthetic oligonucleotide
  source 1..24: mol_type = other DNA
gatggaactgggtcctttgactac

SEQ ID NO: 20712 - protein, 8 aa, synthetic construct
  REGION 1..8: note = Description of Artificial Sequence: Synthetic peptide
DGTGSFDY

SEQ ID NO: 20713 - DNA, 18 bp, synthetic construct
  misc_feature 1..18: note = Description of Artificial Sequence: Synthetic oligonucleotide
  source 1..18: mol_type = other DNA
acaaacggtatggacgtc

SEQ ID NO: 20714 - protein, 6 aa, synthetic construct
  REGION 1..6: note = Description of Artificial Sequence: Synthetic peptide
TNGMDV

SEQ ID NO: 20715 - DNA, 27 bp, synthetic construct
  misc_feature 1..27: note = Description of Artificial Sequence: Synthetic oligonucleotide
  source 1..27: mol_type = other DNA
agcagtggctggtacttttttgactac

SEQ ID NO: 20716 - protein, 9 aa, synthetic construct
  REGION 1..9: note = Description of Artificial Sequence: Synthetic peptide
SSGWYFFDY

SEQ ID NO: 20717 - DNA, 42 bp, synthetic construct; identical to SEQ ID NO: 20525
  misc_feature 1..42: note = Description of Artificial Sequence: Synthetic oligonucleotide
  source 1..42: mol_type = other DNA

SEQ ID NO: 20718 - protein, 14 aa, synthetic construct
  REGION 1..14: note = Description of Artificial Sequence: Synthetic peptide
GELLEDYYFYGMDV

SEQ ID NO: 20719 - DNA, 18 bp, synthetic construct
  misc_feature 1..18: note = Description of Artificial Sequence: Synthetic oligonucleotide
  source 1..18: mol_type = other DNA
aagaagtctaacgactac

SEQ ID NO: 20720 - protein, 6 aa, synthetic construct
  REGION 1..6: note = Description of Artificial Sequence: Synthetic peptide
KKSNDY

SEQ ID NO: 20721 - DNA, 42 bp, synthetic construct
  misc_feature 1..42: note = Description of Artificial Sequence: Synthetic oligonucleotide
  source 1..42: mol_type = other DNA
ggggagctactagaggactactactactacgctatggacgtc

SEQ ID NO: 20722 - protein, 14 aa, synthetic construct
  REGION 1..14: note = Description of Artificial Sequence: Synthetic peptide
GELLEDYYYYAMDV

SEQ ID NO: 20723 - DNA, 27 bp, synthetic construct
  misc_feature 1..27: note = Description of Artificial Sequence: Synthetic oligonucleotide
  source 1..27: mol_type = other DNA
gattcctccccctacggtatggacgtc

SEQ ID NO: 20724 - protein, 9 aa, synthetic construct
  REGION 1..9: note = Description of Artificial Sequence: Synthetic peptide
DSSPYGMDV

SEQ ID NO: 20725 - DNA, 63 bp, synthetic construct; identical to SEQ ID NO: 20223
  misc_feature 1..63: note = Description of Artificial Sequence: Synthetic oligonucleotide
  source 1..63: mol_type = other DNA

SEQ ID NO: 20726 - protein, 21 aa, synthetic construct
  REGION 1..21: note = Description of Artificial Sequence: Synthetic peptide
DRVYCSSTSCSPYYYYYGMDV

SEQ ID NO: 20727 - DNA, 45 bp, synthetic construct
  misc_feature 1..45: note = Description of Artificial Sequence: Synthetic oligonucleotide
  source 1..45: mol_type = other DNA
gggttttactatggttcggggagttattataacgacctcgacccc

SEQ ID NO: 20728 - protein, 15 aa, synthetic construct
  REGION 1..15: note = Description of Artificial Sequence: Synthetic peptide
GFYYGSGSYYNDLDP

SEQ ID NO: 20729 - DNA, 42 bp, synthetic construct
  misc_feature 1..42: note = Description of Artificial Sequence: Synthetic oligonucleotide
  source 1..42: mol_type = other DNA
gatcggagggggggctatggagtccccgatgcttttgatatc

SEQ ID NO: 20730 - protein, 14 aa, synthetic construct
  REGION 1..14: note = Description of Artificial Sequence: Synthetic peptide
DRRGGYGVPDAFDI

SEQ ID NO: 20731 - DNA, 63 bp, synthetic construct
  misc_feature 1..63: note = Description of Artificial Sequence: Synthetic oligonucleotide
  source 1..63: mol_type = other DNA
gatcgggtctattgtagtagtaccagctgcgtcccttactacgactactacggtatggacgtc

SEQ ID NO: 20732 - protein, 21 aa, synthetic construct
  REGION 1..21: note = Description of Artificial Sequence: Synthetic peptide
DRVYCSSTSCVPYYDYYGMDV

SEQ ID NO: 20733 - DNA, 60 bp, synthetic construct
  misc_feature 1..60: note = Description of Artificial Sequence: Synthetic oligonucleotide
  source 1..60: mol_type = other DNA
gaggattcctattgtagtagtaccagctgcccttactactactactacggtatggacgtc

SEQ ID NO: 20734 - protein, 20 aa, synthetic construct
  REGION 1..20: note = Description of Artificial Sequence: Synthetic peptide
EDSYCSSTSCPYYYYYGMDV

SEQ ID NO: 20735 - DNA, 45 bp, synthetic construct
  misc_feature 1..45: note = Description of Artificial Sequence: Synthetic oligonucleotide
  source 1..45: mol_type = other DNA
gggtattactatggttcggggagttattataacgacctcgacccc

SEQ ID NO: 20736 - protein, 15 aa, synthetic construct
  REGION 1..15: note = Description of Artificial Sequence: Synthetic peptide
GYYYGSGSYYNDLDP

SEQ ID NO: 20737 - DNA, 45 bp, synthetic construct
  misc_feature 1..45: note = Description of Artificial Sequence: Synthetic oligonucleotide
  source 1..45: mol_type = other DNA
tggggacgtggatacagctatgagtactactacggtatggacgtc

SEQ ID NO: 20738 - protein, 15 aa, synthetic construct
  REGION 1..15: note = Description of Artificial Sequence: Synthetic peptide
WGRGYSYEYYYGMDV

SEQ ID NO: 20739 - DNA, 45 bp, synthetic construct
  misc_feature 1..45: note = Description of Artificial Sequence: Synthetic oligonucleotide
  source 1..45: mol_type = other DNA
tcctattactatggttcggggagttattataacgagtttgactac

SEQ ID NO: 20740 - protein, 15 aa, synthetic construct
  REGION 1..15: note = Description of Artificial Sequence: Synthetic peptide
SYYYGSGSYYNEFDY

SEQ ID NO: 20741 - DNA, 24 bp, synthetic construct
  misc_feature 1..24: note = Description of Artificial Sequence: Synthetic oligonucleotide
  source 1..24: mol_type = other DNA
atagtagcagttgcctttgactac

SEQ ID NO: 20742 - protein, 8 aa, synthetic construct
  REGION 1..8: note = Description of Artificial Sequence: Synthetic peptide
IVAVAFDY

SEQ ID NO: 20743 - DNA, 60 bp, synthetic construct
  misc_feature 1..60: note = Description of Artificial Sequence: Synthetic oligonucleotide
  source 1..60: mol_type = other DNA
gagaggtgtagtactaccagttgctatttaggaattacgggctactacggtatggacgtc

SEQ ID NO: 20744 - protein, 20 aa, synthetic construct
  REGION 1..20: note = Description of Artificial Sequence: Synthetic peptide
ERCSTTSCYLGITGYYGMDV

SEQ ID NO: 20745 - DNA, 24 bp, synthetic construct
  misc_feature 1..24: note = Description of Artificial Sequence: Synthetic oligonucleotide
  source 1..24: mol_type = other DNA
ttaatagcagtgacttttgactcc

SEQ ID NO: 20746 - protein, 8 aa, synthetic construct
  REGION 1..8: note = Description of Artificial Sequence: Synthetic peptide
LIAVTFDS

SEQ ID NO: 20747 - DNA, 51 bp, synthetic construct
  misc_feature 1..51: note = Description of Artificial Sequence: Synthetic oligonucleotide
  source 1..51: mol_type = other DNA
gatcgggtagcagcagctggtaccccctactactactacggtatggacgtc

SEQ ID NO: 20748 - protein, 17 aa, synthetic construct
  REGION 1..17: note = Description of Artificial Sequence: Synthetic peptide
DRVAAAGTPYYYYGMDV

SEQ ID NO: 20749 - DNA, 57 bp, synthetic construct
  misc_feature 1..57: note = Description of Artificial Sequence: Synthetic oligonucleotide
  source 1..57: mol_type = other DNA
gatacgggtcctatagcagctcgtctcgcttactactactactacgctatggacgtc

SEQ ID NO: 20750 - protein, 19 aa, synthetic construct
  REGION 1..19: note = Description of Artificial Sequence: Synthetic peptide
DTGPIAARLAYYYYYAMDV

SEQ ID NO: 20751 - DNA, 57 bp, synthetic construct
  misc_feature 1..57: note = Description of Artificial Sequence: Synthetic oligonucleotide
  source 1..57: mol_type = other DNA
gaatattgtggtggtgactgctattccccttactactactactacggtatggacgtc

SEQ ID NO: 20752 - protein, 19 aa, synthetic construct
  REGION 1..19: note = Description of Artificial Sequence: Synthetic peptide
EYCGGDCYSPYYYYYGMDV

SEQ ID NO: 20753 - DNA, 63 bp, synthetic construct; identical to SEQ ID NO: 20223
  misc_feature 1..63: note = Description of Artificial Sequence: Synthetic oligonucleotide
  source 1..63: mol_type = other DNA

SEQ ID NO: 20754 - protein, 21 aa, synthetic construct
  REGION 1..21: note = Description of Artificial Sequence: Synthetic peptide
DRVYCSSTSCSPYYYYYGMDV

SEQ ID NO: 20755 - DNA, 45 bp, synthetic construct
  misc_feature 1..45: note = Description of Artificial Sequence: Synthetic oligonucleotide
  source 1..45: mol_type = other DNA
gtgtattaccatggttcggggagttattataacgagtttgattat

SEQ ID NO: 20756 - protein, 15 aa, synthetic construct
  REGION 1..15: note = Description of Artificial Sequence: Synthetic peptide
VYYHGSGSYYNEFDY

SEQ ID NO: 20757 - DNA, 57 bp, synthetic construct; identical to SEQ ID NO: 20751
  misc_feature 1..57: note = Description of Artificial Sequence: Synthetic oligonucleotide
  source 1..57: mol_type = other DNA

SEQ ID NO: 20758 - protein, 19 aa, synthetic construct
  REGION 1..19: note = Description of Artificial Sequence: Synthetic peptide
EYCGGDCYSPYYYYYGMDV

SEQ ID NO: 20759 - DNA, 63 bp, synthetic construct
  misc_feature 1..63: note = Description of Artificial Sequence: Synthetic oligonucleotide
  source 1..63: mol_type = other DNA
gatcgggtatcttgtagtagttccagctgctatccttactactactactacggtatggacgtc

SEQ ID NO: 20760 - protein, 21 aa, synthetic construct
  REGION 1..21: note = Description of Artificial Sequence: Synthetic peptide
DRVSCSSSSCYPYYYYYGMDV

SEQ ID NO: 20761 - DNA, 45 bp, synthetic construct
  misc_feature 1..45: note = Description of Artificial Sequence: Synthetic oligonucleotide
  source 1..45: mol_type = other DNA
tcgttttactatggttcggggacttattataacgagtttgactac

SEQ ID NO: 20762 - protein, 15 aa, synthetic construct
  REGION 1..15: note = Description of Artificial Sequence: Synthetic peptide
SFYYGSGTYYNEFDY

SEQ ID NO: 20763 - DNA, 45 bp, synthetic construct
  misc_feature 1..45: note = Description of Artificial Sequence: Synthetic oligonucleotide
  source 1..45: mol_type = other DNA
tcgtattactatggttcggggacttattataacgagtttgactac

SEQ ID NO: 20764 - protein, 15 aa, synthetic construct
  REGION 1..15: note = Description of Artificial Sequence: Synthetic peptide
SYYYGSGTYYNEFDY

SEQ ID NO: 20765 - DNA, 45 bp, synthetic construct
  misc_feature 1..45: note = Description of Artificial Sequence: Synthetic oligonucleotide
  source 1..45: mol_type = other DNA
gcgaattactatggttcggggagttattataacgactttgactac

SEQ ID NO: 20766 - protein, 15 aa, synthetic construct
  REGION 1..15: note = Description of Artificial Sequence: Synthetic peptide
ANYYGSGSYYNDFDY

SEQ ID NO: 20767 - DNA, 24 bp, synthetic construct
  misc_feature 1..24: note = Description of Artificial Sequence: Synthetic oligonucleotide
  source 1..24: mol_type = other DNA
ttaatagcagtggcttttgactat

SEQ ID NO: 20768 - protein, 8 aa, synthetic construct
  REGION 1..8: note = Description of Artificial Sequence: Synthetic peptide
LIAVAFDY

SEQ ID NO: 20769 - DNA, 45 bp, synthetic construct
  misc_feature 1..45: note = Description of Artificial Sequence: Synthetic oligonucleotide
  source 1..45: mol_type = other DNA
ggatattattatgcttcggggagttattataacgacctcgacccc

SEQ ID NO: 20770 - protein, 15 aa, synthetic construct
  REGION 1..15: note = Description of Artificial Sequence: Synthetic peptide
GYYYASGSYYNDLDP

SEQ ID NO: 20771 - DNA, 45 bp, synthetic construct
  misc_feature 1..45: note = Description of Artificial Sequence: Synthetic oligonucleotide
  source 1..45: mol_type = other DNA
tcgtatttttatggttcggggagttattataacgagtttgactac

SEQ ID NO: 20772 - protein, 15 aa, synthetic construct
  REGION 1..15: note = Description of Artificial Sequence: Synthetic peptide
SYFYGSGSYYNEFDY

SEQ ID NO: 20773 - DNA, 24 bp, synthetic construct
  misc_feature 1..24: note = Description of Artificial Sequence: Synthetic oligonucleotide
  source 1..24: mol_type = other DNA
attatagcagtggcttttgactac

SEQ ID NO: 20774 - protein, 8 aa, synthetic construct
  REGION 1..8: note = Description of Artificial Sequence: Synthetic peptide
IIAVAFDY

SEQ ID NO: 20775 - DNA, 24 bp, synthetic construct
  misc_feature 1..24: note = Description of Artificial Sequence: Synthetic oligonucleotide
  source 1..24: mol_type = other DNA
ttaatagcagtttcctttgactac

SEQ ID NO: 20776 - protein, 8 aa, synthetic construct
  REGION 1..8: note = Description of Artificial Sequence: Synthetic peptide
LIAVSFDY

SEQ ID NO: 20777 - DNA, 45 bp, synthetic construct
  misc_feature 1..45: note = Description of Artificial Sequence: Synthetic oligonucleotide
  source 1..45: mol_type = other DNA
gtgtattactatggttcggggagttattataacgagtttgactac

SEQ ID NO: 20778 - protein, 15 aa, synthetic construct
  REGION 1..15: note = Description of Artificial Sequence: Synthetic peptide
VYYYGSGSYYNEFDY

SEQ ID NO: 20779 - DNA, 45 bp, synthetic construct; identical to SEQ ID NO: 20763
  misc_feature 1..45: note = Description of Artificial Sequence: Synthetic oligonucleotide
  source 1..45: mol_type = other DNA

SEQ ID NO: 20780 - protein, 15 aa, synthetic construct
  REGION 1..15: note = Description of Artificial Sequence: Synthetic peptide
SYYYGSGTYYNEFDY

SEQ ID NO: 20781 - DNA, 45 bp, synthetic construct
  misc_feature 1..45: note = Description of Artificial Sequence: Synthetic oligonucleotide
  source 1..45: mol_type = other DNA
tggggacgtggatacaactatgagtactactacggtatggacgtc

SEQ ID NO: 20782 - protein, 15 aa, synthetic construct
  REGION 1..15: note = Description of Artificial Sequence: Synthetic peptide
WGRGYNYEYYYGMDV

SEQ ID NO: 20783 - DNA, 60 bp, synthetic construct
  misc_feature 1..60: note = Description of Artificial Sequence: Synthetic oligonucleotide
  source 1..60: mol_type = other DNA
gagaggtgtagtactaccagctgctatttaggaattacgggctactacggtatggacgtc

SEQ ID NO: 20784 - protein, 20 aa, synthetic construct
  REGION 1..20: note = Description of Artificial Sequence: Synthetic peptide
ERCSTTSCYLGITGYYGMDV

SEQ ID NO: 20785 - DNA, 57 bp, synthetic construct; identical to SEQ ID NO: 20751
  misc_feature 1..57: note = Description of Artificial Sequence: Synthetic oligonucleotide
  source 1..57: mol_type = other DNA

SEQ ID NO: 20786 - protein, 19 aa, synthetic construct
  REGION 1..19: note = Description of Artificial Sequence: Synthetic peptide
EYCGGDCYSPYYYYYGMDV

SEQ ID NO: 20787 - DNA, 27 bp, synthetic construct
  misc_feature 1..27: note = Description of Artificial Sequence: Synthetic oligonucleotide
  source 1..27: mol_type = other DNA
agcagtggctggtactactttgactac

SEQ ID NO: 20788 - protein, 9 aa, synthetic construct
  REGION 1..9: note = Description of Artificial Sequence: Synthetic peptide
SSGWYYFDY

SEQ ID NO: 20789 - DNA, 45 bp, synthetic construct
  misc_feature 1..45: note = Description of Artificial Sequence: Synthetic oligonucleotide
  source 1..45: mol_type = other DNA
gtgtatttctatggttcggggagttattataacgagtttgactac

SEQ ID NO: 20790 - protein, 15 aa, synthetic construct
  REGION 1..15: note = Description of Artificial Sequence: Synthetic peptide
VYFYGSGSYYNEFDY

SEQ ID NO: 20791 - DNA, 21 bp, synthetic construct
  misc_feature 1..21: note = Description of Artificial Sequence: Synthetic oligonucleotide
  source 1..21: mol_type = other DNA
gaaggctggaacacggactac

SEQ ID NO: 20792 - protein, 7 aa, synthetic construct
  REGION 1..7: note = Description of Artificial Sequence: Synthetic peptide
EGWNTDY

SEQ ID NO: 20793 - DNA, 27 bp, synthetic construct
  misc_feature 1..27: note = Description of Artificial Sequence: Synthetic oligonucleotide
  source 1..27: mol_type = other DNA
catggaaaagactggggccttgactac

SEQ ID NO: 20794 - protein, 9 aa, synthetic construct
  REGION 1..9: note = Description of Artificial Sequence: Synthetic peptide
HGKDWGLDY

SEQ ID NO: 20795 - DNA, 27 bp, synthetic construct
  misc_feature 1..27: note = Description of Artificial Sequence: Synthetic oligonucleotide
  source 1..27: mol_type = other DNA
cacagcagcagctggtctcttgactac

SEQ ID NO: 20796 - protein, 9 aa, synthetic construct
  REGION 1..9: note = Description of Artificial Sequence: Synthetic peptide
HSSSWSLDY

SEQ ID NO: 20797 - DNA, 27 bp, synthetic construct
  misc_feature 1..27: note = Description of Artificial Sequence: Synthetic oligonucleotide
  source 1..27: mol_type = other DNA
gggagcagctcgtccgggtttgactac

SEQ ID NO: 20798 - protein, 9 aa, synthetic construct
  REGION 1..9: note = Description of Artificial Sequence: Synthetic peptide
GSSSSGFDY

SEQ ID NO: 20799 - DNA, 36 bp, synthetic construct
  misc_feature 1..36: note = Description of Artificial Sequence: Synthetic oligonucleotide
  source 1..36: mol_type = other DNA
ctggggaaagactactactactacggtatggacgtc

SEQ ID NO: 20800 - protein, 12 aa, synthetic construct
  REGION 1..12: note = Description of Artificial Sequence: Synthetic peptide
LGKDYYYYGMDV

SEQ ID NO: 20801 - DNA, 24 bp, synthetic construct
  misc_feature 1..24: note = Description of Artificial Sequence: Synthetic oligonucleotide
  source 1..24: mol_type = other DNA
gatcttggctggacggaagagtac

SEQ ID NO: 20802 - protein, 8 aa, synthetic construct
  REGION 1..8: note = Description of Artificial Sequence: Synthetic peptide
DLGWTEEY

SEQ ID NO: 20803 - DNA, 27 bp, synthetic construct
  misc_feature 1..27: note = Description of Artificial Sequence: Synthetic oligonucleotide
  source 1..27: mol_type = other DNA
catagcggcagctggtcccttgactac

SEQ ID NO: 20804 - protein, 9 aa, synthetic construct
  REGION 1..9: note = Description of Artificial Sequence: Synthetic peptide
HSGSWSLDY

SEQ ID NO: 20805 - DNA, 27 bp, synthetic construct
  misc_feature 1..27: note = Description of Artificial Sequence: Synthetic oligonucleotide
  source 1..27: mol_type = other DNA
cacagcagcagctggtctcttgactgc

SEQ ID NO: 20806 - protein, 9 aa, synthetic construct
  REGION 1..9: note = Description of Artificial Sequence: Synthetic peptide
HSSSWSLDC

SEQ ID NO: 20807 - DNA, 24 bp, synthetic construct
  misc_feature 1..24: note = Description of Artificial Sequence: Synthetic oligonucleotide
  source 1..24: mol_type = other DNA
gaactggggttccggtctgactac

SEQ ID NO: 20808 - protein, 8 aa, synthetic construct
  REGION 1..8: note = Description of Artificial Sequence: Synthetic peptide
ELGFRSDY

SEQ ID NO: 20809 - DNA, 24 bp, synthetic construct
  misc_feature 1..24: note = Description of Artificial Sequence: Synthetic oligonucleotide
  source 1..24: mol_type = other DNA
gagctggggttccggtctgactac

SEQ ID NO: 20810 - protein, 8 aa, synthetic construct
  REGION 1..8: note = Description of Artificial Sequence: Synthetic peptide
ELGFRSDY

SEQ ID NO: 20811 - DNA, 24 bp, synthetic construct
  misc_feature 1..24: note = Description of Artificial Sequence: Synthetic oligonucleotide
  source 1..24: mol_type = other DNA
gaagtgggattcactgaggactac

SEQ ID NO: 20812 - protein, 8 aa, synthetic construct
  REGION 1..8: note = Description of Artificial Sequence: Synthetic peptide
EVGFTEDY

SEQ ID NO: 20813 - DNA, 36 bp, synthetic construct
  misc_feature 1..36: note = Description of Artificial Sequence: Synthetic oligonucleotide
  source 1..36: mol_type = other DNA
cgtgtagcagtggctggctcggaggcttttgctatc

SEQ ID NO: 20814 - protein, 12 aa, synthetic construct
  REGION 1..12: note = Description of Artificial Sequence: Synthetic peptide
RVAVAGSEAFAI

SEQ ID NO: 20815 - DNA, 24 bp, synthetic construct
  misc_feature 1..24: note = Description of Artificial Sequence: Synthetic oligonucleotide
  source 1..24: mol_type = other DNA
gaactggggttccggtctgactac

SEQ ID NO: 20816 - protein, 8 aa, synthetic construct
  REGION 1..8: note = Description of Artificial Sequence: Synthetic peptide
ELGFRSDY

SEQ ID NO: 20817 - DNA, 24 bp, synthetic construct
  misc_feature 1..24: note = Description of Artificial Sequence: Synthetic oligonucleotide
  source 1..24: mol_type = other DNA
gaactggggttccggtctgactac

SEQ ID NO: 20818 - protein, 8 aa, synthetic construct
  REGION 1..8: note = Description of Artificial Sequence: Synthetic peptide
ELGFRSDY

SEQ ID NO: 20819 - DNA, 24 bp, synthetic construct
  misc_feature 1..24: note = Description of Artificial Sequence: Synthetic oligonucleotide
  source 1..24: mol_type = other DNA
gaactggggttccggtctgactac

SEQ ID NO: 20820 - protein, 8 aa, synthetic construct
  REGION 1..8: note = Description of Artificial Sequence: Synthetic peptide
ELGFRSDY

SEQ ID NO: 20821 - DNA, 27 bp, synthetic construct
  misc_feature 1..27: note = Description of Artificial Sequence: Synthetic oligonucleotide
  source 1..27: mol_type = other DNA
catggaaaagactggggccttgactac

SEQ ID NO: 20822 - protein, 9 aa, synthetic construct
  REGION 1..9: note = Description of Artificial Sequence: Synthetic peptide
HGKDWGLDY

SEQ ID NO: 20823 - DNA, 18 bp, synthetic construct
  misc_feature 1..18: note = Description of Artificial Sequence: Synthetic oligonucleotide
  source 1..18: mol_type = other DNA
gtggcttcatttgactac

SEQ ID NO: 20824 - protein, 6 aa, synthetic construct
  REGION 1..6: note = Description of Artificial Sequence: Synthetic peptide
VASFDY

SEQ ID NO: 20825 - DNA, 24 bp, synthetic construct
  misc_feature 1..24: note = Description of Artificial Sequence: Synthetic oligonucleotide
  source 1..24: mol_type = other DNA
gatcttggctggacggaagagtac

SEQ ID NO: 20826 - protein, 8 aa, synthetic construct
  REGION 1..8: note = Description of Artificial Sequence: Synthetic peptide
DLGWTEEY

SEQ ID NO: 20827 - DNA, 27 bp, synthetic construct
  misc_feature 1..27: note = Description of Artificial Sequence: Synthetic oligonucleotide
  source 1..27: mol_type = other DNA
gatctgagtatgggcggtatggacgtc

SEQ ID NO: 20828 - protein, 9 aa, synthetic construct
  REGION 1..9: note = Description of Artificial Sequence: Synthetic peptide
DLSMGGMDV

SEQ ID NO: 20829 - DNA, 27 bp, synthetic construct
  misc_feature 1..27: note = Description of Artificial Sequence: Synthetic oligonucleotide
  source 1..27: mol_type = other DNA
gatgagaggctggggatttttgactac

SEQ ID NO: 20830 - protein, 9 aa, synthetic construct
  REGION 1..9: note = Description of Artificial Sequence: Synthetic peptide
DERLGIFDY

SEQ ID NO: 20831 - DNA, 36 bp, synthetic construct; identical to SEQ ID NO: 20357
  misc_feature 1..36: note = Description of Artificial Sequence: Synthetic oligonucleotide
  source 1..36: mol_type = other DNA

SEQ ID NO: 20832 - protein, 12 aa, synthetic construct
  REGION 1..12: note = Description of Artificial Sequence: Synthetic peptide
RLAVAGSEAFDI

SEQ ID NO: 20833 - DNA, 27 bp, synthetic construct
  misc_feature 1..27: note = Description of Artificial Sequence: Synthetic oligonucleotide
  source 1..27: mol_type = other DNA
gacgagaggctggggatttttgactac

SEQ ID NO: 20834 - protein, 9 aa, synthetic construct
  REGION 1..9: note = Description of Artificial Sequence: Synthetic peptide
DERLGIFDY

SEQ ID NO: 20835 - DNA, 24 bp, synthetic construct
  misc_feature 1..24: note = Description of Artificial Sequence: Synthetic oligonucleotide
  source 1..24: mol_type = other DNA
gaactggggttccggtctgactac

SEQ ID NO: 20836 - protein, 8 aa, synthetic construct
  REGION 1..8: note = Description of Artificial Sequence: Synthetic peptide
ELGFRSDY

SEQ ID NO: 20837 - DNA, 24 bp, synthetic construct
  misc_feature 1..24: note = Description of Artificial Sequence: Synthetic oligonucleotide
  source 1..24: mol_type = other DNA
gaagtgggattccggtctgactac

SEQ ID NO: 20838 - protein, 8 aa, synthetic construct
  REGION 1..8: note = Description of Artificial Sequence: Synthetic peptide
EVGFRSDY

SEQ ID NO: 20839 - DNA, 36 bp, synthetic construct; identical to SEQ ID NO: 20301
  misc_feature 1..36: note = Description of Artificial Sequence: Synthetic oligonucleotide
  source 1..36: mol_type = other DNA

SEQ ID NO: 20840 - protein, 12 aa, synthetic construct
  REGION 1..12: note = Description of Artificial Sequence: Synthetic peptide
RIAVAGSEAFDI

SEQ ID NO: 20841 - DNA, 42 bp, synthetic construct
  misc_feature 1..42: note = Description of Artificial Sequence: Synthetic oligonucleotide
  source 1..42: mol_type = other DNA
gaaaagtataccagcagctggtacgactacggtatggacgtc

SEQ ID NO: 20842 - protein, 14 aa, synthetic construct
  REGION 1..14: note = Description of Artificial Sequence: Synthetic peptide
EKYTSSWYDYGMDV

SEQ ID NO: 20843 - DNA, 24 bp, synthetic construct
  misc_feature 1..24: note = Description of Artificial Sequence: Synthetic oligonucleotide
  source 1..24: mol_type = other DNA
gagctggggttccggtctgactac

SEQ ID NO: 20844 - protein, 8 aa, synthetic construct
  REGION 1..8: note = Description of Artificial Sequence: Synthetic peptide
ELGFRSDY

SEQ ID NO: 20845 - DNA, 27 bp, synthetic construct
  misc_feature 1..27: note = Description of Artificial Sequence: Synthetic oligonucleotide
  source 1..27: mol_type = other DNA
gacgagaggctggggatttttgactac

SEQ ID NO: 20846 - protein, 9 aa, synthetic construct
  REGION 1..9: note = Description of Artificial Sequence: Synthetic peptide
DERLGIFDY

SEQ ID NO: 20847 - DNA, 15 bp, synthetic construct
  misc_feature 1..15: note = Description of Artificial Sequence: Synthetic oligonucleotide
  source 1..15: mol_type = other DNA
gatcggggcagcgtc

SEQ ID NO: 20848 - protein, 5 aa, synthetic construct
  REGION 1..5: note = Description of Artificial Sequence: Synthetic peptide
DRGSV

SEQ ID NO: 20849 - DNA, 27 bp, synthetic construct
  misc_feature 1..27: note = Description of Artificial Sequence: Synthetic oligonucleotide
  source 1..27: mol_type = other DNA
catggaaaagactggggccttgaagac

SEQ ID NO: 20850 - protein, 9 aa, synthetic construct
  REGION 1..9: note = Description of Artificial Sequence: Synthetic peptide
HGKDWGLED

SEQ ID NO: 20851 - DNA, 24 bp, synthetic construct
  misc_feature 1..24: note = Description of Artificial Sequence: Synthetic oligonucleotide
  source 1..24: mol_type = other DNA
gaaatggggttcctgtctgactac

SEQ ID NO: 20852 - protein, 8 aa, synthetic construct
  REGION 1..8: note = Description of Artificial Sequence: Synthetic peptide
EMGFLSDY

SEQ ID NO: 20853 - DNA, 24 bp, synthetic construct
  misc_feature 1..24: note = Description of Artificial Sequence: Synthetic oligonucleotide
  source 1..24: mol_type = other DNA
gatcttggctggacggaagagtac

SEQ ID NO: 20854 - protein, 8 aa, synthetic construct
  REGION 1..8: note = Description of Artificial Sequence: Synthetic peptide
DLGWTEEY

SEQ ID NO: 20855 - DNA, 36 bp, synthetic construct; identical to SEQ ID NO: 20335
  misc_feature 1..36: note = Description of Artificial Sequence: Synthetic oligonucleotide
  source 1..36: mol_type = other DNA

SEQ ID NO: 20856 - protein, 12 aa, synthetic construct
  REGION 1..12: note = Description of Artificial Sequence: Synthetic peptide
RYTSDWHDAFDI

SEQ ID NO: 20857 - DNA, 27 bp, synthetic construct
  misc_feature 1..27: note = Description of Artificial Sequence: Synthetic oligonucleotide
  source 1..27: mol_type = other DNA
ctgagcagcagctggtcttttgactac

SEQ ID NO: 20858 - protein, 9 aa, synthetic construct
  REGION 1..9: note = Description of Artificial Sequence: Synthetic peptide
LSSSWSFDY

SEQ ID NO: 20859 - DNA, 24 bp, synthetic construct
  misc_feature 1..24: note = Description of Artificial Sequence: Synthetic oligonucleotide
  source 1..24: mol_type = other DNA
gagctggggttcctctctgactac

SEQ ID NO: 20860 - protein, 8 aa, synthetic construct
  REGION 1..8: note = Description of Artificial Sequence: Synthetic peptide
ELGFLSDY

SEQ ID NO: 20861 - DNA, 24 bp, synthetic construct
  misc_feature 1..24: note = Description of Artificial Sequence: Synthetic oligonucleotide
  source 1..24: mol_type = other DNA
gagctggggttcctctctgactac

SEQ ID NO: 20862 - protein, 8 aa, synthetic construct
  REGION 1..8: note = Description of Artificial Sequence: Synthetic peptide
ELGFLSDY

SEQ ID NO: 20863 - DNA, 27 bp, synthetic construct
  misc_feature 1..27: note = Description of Artificial Sequence: Synthetic oligonucleotide
  source 1..27: mol_type = other DNA
ctaagcagcaactgggactttgacaac

SEQ ID NO: 20864 - protein, 9 aa, synthetic construct
  REGION 1..9: note = Description of Artificial Sequence: Synthetic peptide
LSSNWDFDN

SEQ ID NO: 20865 - DNA, 36 bp, synthetic construct; identical to SEQ ID NO: 20357
  misc_feature 1..36: note = Description of Artificial Sequence: Synthetic oligonucleotide
  source 1..36: mol_type = other DNA

SEQ ID NO: 20866 - protein, 12 aa, synthetic construct
  REGION 1..12: note = Description of Artificial Sequence: Synthetic peptide
RLAVAGSEAFDI

SEQ ID NO: 20867 - DNA, 36 bp, synthetic construct
  misc_feature 1..36: note = Description of Artificial Sequence: Synthetic oligonucleotide
  source 1..36: mol_type = other DNA
gatttgaagagcagtggctgccttttctttgactac

SEQ ID NO: 20868 - protein, 12 aa, synthetic construct
  REGION 1..12: note = Description of Artificial Sequence: Synthetic peptide
DLKSSGCLFFDY

SEQ ID NO: 20869 - DNA, 36 bp, synthetic construct
  misc_feature 1..36: note = Description of Artificial Sequence: Synthetic oligonucleotide
  source 1..36: mol_type = other DNA
cggggaaacagctatggcgggtacggtatggacgtc

SEQ ID NO: 20870 - protein, 12 aa, synthetic construct
  REGION 1..12: note = Description of Artificial Sequence: Synthetic peptide
RGNSYGGYGMDV

SEQ ID NO: 20871 - DNA, 18 bp, synthetic construct
  misc_feature 1..18: note = Description of Artificial Sequence: Synthetic oligonucleotide
  source 1..18: mol_type = other DNA
gtggcttcatttgactac

SEQ ID NO: 20872 - protein, 6 aa, synthetic construct
  REGION 1..6: note = Description of Artificial Sequence: Synthetic peptide
VASFDY

SEQ ID NO: 20873 - DNA, 18 bp, synthetic construct
  misc_feature 1..18: note = Description of Artificial Sequence: Synthetic oligonucleotide
  source 1..18: mol_type = other DNA
gtggcttcatttgactac

SEQ ID NO: 20874 - protein, 6 aa, synthetic construct
  REGION 1..6: note = Description of Artificial Sequence: Synthetic peptide
VASFDY

SEQ ID NO: 20875 - DNA, 36 bp, synthetic construct
  misc_feature 1..36: note = Description of Artificial Sequence: Synthetic oligonucleotide
  source 1..36: mol_type = other DNA
cgtatagcagtggctggctcggaggcttttgctatc

SEQ ID NO: 20876 - protein, 12 aa, synthetic construct
  REGION 1..12: note = Description of Artificial Sequence: Synthetic peptide
RIAVAGSEAFAI

SEQ ID NO: 20877 - DNA, 27 bp, synthetic construct
  misc_feature 1..27: note = Description of Artificial Sequence: Synthetic oligonucleotide
  source 1..27: mol_type = other DNA
gatgagaggctggggatttttgactac

SEQ ID NO: 20878 - protein, 9 aa, synthetic construct
  REGION 1..9: note = Description of Artificial Sequence: Synthetic peptide
DERLGIFDY

SEQ ID NO: 20879 - DNA, 42 bp, synthetic construct; identical to SEQ ID NO: 20341
  misc_feature 1..42: note = Description of Artificial Sequence: Synthetic oligonucleotide
  source 1..42: mol_type = other DNA

SEQ ID NO: 20880 - protein, 14 aa, synthetic construct
  REGION 1..14: note = Description of Artificial Sequence: Synthetic peptide
EKYSSSWYDYGMDV

SEQ ID NO: 20881 - DNA, 30 bp, synthetic construct
  misc_feature 1..30: note = Description of Artificial Sequence: Synthetic oligonucleotide
  source 1..30: mol_type = other DNA
gatcgggcctatagcagctcgtctgacttc

SEQ ID NO: 20882 - protein, 10 aa, synthetic construct
  REGION 1..10: note = Description of Artificial Sequence: Synthetic peptide
DRAYSSSSDF

SEQ ID NO: 20883 - DNA, 15 bp, synthetic construct
  misc_feature 1..15: note = Description of Artificial Sequence: Synthetic oligonucleotide
  source 1..15: mol_type = other DNA
gatcggggcagtggc

SEQ ID NO: 20884 - protein, 5 aa, synthetic construct
  REGION 1..5: note = Description of Artificial Sequence: Synthetic peptide
DRGSG

SEQ ID NO: 20885 - DNA, 42 bp, synthetic construct; identical to SEQ ID NO: 20247
  misc_feature 1..42: note = Description of Artificial Sequence: Synthetic oligonucleotide
  source 1..42: mol_type = other DNA

SEQ ID NO: 20886 - protein, 14 aa, synthetic construct
  REGION 1..14: note = Description of Artificial Sequence: Synthetic peptide
EKYSSSWYDYGMDV

SEQ ID NO: 20887 - DNA, 36 bp, synthetic construct; identical to SEQ ID NO: 20457
  misc_feature 1..36: note = Description of Artificial Sequence: Synthetic oligonucleotide
  source 1..36: mol_type = other DNA

SEQ ID NO: 20888 - protein, 12 aa, synthetic construct
  REGION 1..12: note = Description of Artificial Sequence: Synthetic peptide
RGYSYGGYGMDV

SEQ ID NO: 20889 - DNA, 24 bp, synthetic construct
  misc_feature 1..24: note = Description of Artificial Sequence: Synthetic oligonucleotide
  source 1..24: mol_type = other DNA
gagctggggttcctctctgattac

SEQ ID NO: 20890 - protein, 8 aa, synthetic construct
  REGION 1..8: note = Description of Artificial Sequence: Synthetic peptide
ELGFLSDY

SEQ ID NO: 20891 - DNA, 18 bp, synthetic construct
  misc_feature 1..18: note = Description of Artificial Sequence: Synthetic oligonucleotide
  source 1..18: mol_type = other DNA
gtggcttcattcgactac

SEQ ID NO: 20892 - protein, 6 aa, synthetic construct
  REGION 1..6: note = Description of Artificial Sequence: Synthetic peptide
VASFDY

SEQ ID NO: 20893 - DNA, 42 bp, synthetic construct; identical to SEQ ID NO: 20341
  misc_feature 1..42: note = Description of Artificial Sequence: Synthetic oligonucleotide
  source 1..42: mol_type = other DNA

SEQ ID NO: 20894 - protein, 14 aa, synthetic construct
  REGION 1..14: note = Description of Artificial Sequence: Synthetic peptide
EKYSSSWYDYGMDV

SEQ ID NO: 20895 - DNA, 27 bp, synthetic construct
  misc_feature 1..27: note = Description of Artificial Sequence: Synthetic oligonucleotide
  source 1..27: mol_type = other DNA
gatgagaggctggggatttttgactac

SEQ ID NO: 20896 - protein, 9 aa, synthetic construct
  REGION 1..9: note = Description of Artificial Sequence: Synthetic peptide
DERLGIFDY

SEQ ID NO: 20897 - DNA, 24 bp, synthetic construct
  misc_feature 1..24: note = Description of Artificial Sequence: Synthetic oligonucleotide
  source 1..24: mol_type = other DNA
gaactaggcttccagtctgactac

SEQ ID NO: 20898 - protein, 8 aa, synthetic construct
  REGION 1..8: note = Description of Artificial Sequence: Synthetic peptide
ELGFQSDY

SEQ ID NO: 20899 - DNA, 27 bp, synthetic construct
  misc_feature 1..27: note = Description of Artificial Sequence: Synthetic oligonucleotide
  source 1..27: mol_type = other DNA
gatctgagaatgggcggtatggacgtc

SEQ ID NO: 20900 - protein, 9 aa, synthetic construct
  REGION 1..9: note = Description of Artificial Sequence: Synthetic peptide
DLRMGGMDV

SEQ ID NO: 20901 - DNA, 27 bp, synthetic construct
  misc_feature 1..27: note = Description of Artificial Sequence: Synthetic oligonucleotide
  source 1..27: mol_type = other DNA
ctaagcagcaactgggactttgactac

SEQ ID NO: 20902 - protein, 9 aa, synthetic construct
  REGION 1..9: note = Description of Artificial Sequence: Synthetic peptide
LSSNWDFDY

SEQ ID NO: 20903 - DNA, 27 bp, synthetic construct
  misc_feature 1..27: note = Description of Artificial Sequence: Synthetic oligonucleotide
  source 1..27: mol_type = other DNA
gatctgagtatgggcggtatggacgtc

SEQ ID NO: 20904 - protein, 9 aa, synthetic construct
  REGION 1..9: note = Description of Artificial Sequence: Synthetic peptide
DLSMGGMDV

SEQ ID NO: 20905 - DNA, 27 bp, synthetic construct
  misc_feature 1..27: note = Description of Artificial Sequence: Synthetic oligonucleotide
  source 1..27: mol_type = other DNA
gatgagaggctggggatttttgactac

SEQ ID NO: 20906 - protein, 9 aa, synthetic construct
  REGION 1..9: note = Description of Artificial Sequence: Synthetic peptide
DERLGIFDY

SEQ ID NO: 20907 - DNA, 24 bp, synthetic construct
  misc_feature 1..24: note = Description of Artificial Sequence: Synthetic oligonucleotide
  source 1..24: mol_type = other DNA
gaattggggttccggtctgactac

SEQ ID NO: 20908 - protein, 8 aa, synthetic construct
  REGION 1..8: note = Description of Artificial Sequence: Synthetic peptide
ELGFRSDY

SEQ ID NO: 20909 - DNA, 33 bp, synthetic construct
  misc_feature 1..33: note = Description of Artificial Sequence: Synthetic oligonucleotide
  source 1..33: mol_type = other DNA
aggatagcagctggtatggagtacttcgatctc

SEQ ID NO: 20910 - protein, 11 aa, synthetic construct
  REGION 1..11: note = Description of Artificial Sequence: Synthetic peptide
RIAAGMEYFDL

SEQ ID NO: 20911 - DNA, 42 bp, synthetic construct
  misc_feature 1..42: note = Description of Artificial Sequence: Synthetic oligonucleotide
  source 1..42: mol_type = other DNA
tattgtagtagtaccaggtgcccttatgatgcctttgatatc

SEQ ID NO: 20912 - protein, 14 aa, synthetic construct
  REGION 1..14: note = Description of Artificial Sequence: Synthetic peptide
YCSSTRCPYDAFDI

SEQ ID NO: 20913 - DNA, 27 bp, synthetic construct
  misc_feature 1..27: note = Description of Artificial Sequence: Synthetic oligonucleotide
  source 1..27: mol_type = other DNA
agcagtggctgggaggtctttgactac

SEQ ID NO: 20914 - protein, 9 aa, synthetic construct
  REGION 1..9: note = Description of Artificial Sequence: Synthetic peptide
SSGWEVFDY

SEQ ID NO: 20915 - DNA, 18 bp, synthetic construct
  misc_feature 1..18: note = Description of Artificial Sequence: Synthetic oligonucleotide
  source 1..18: mol_type = other DNA
gtagcagcctttgactcc

SEQ ID NO: 20916 - protein, 6 aa, synthetic construct
  REGION 1..6: note = Description of Artificial Sequence: Synthetic peptide
VAAFDS

SEQ ID NO: 20917 - DNA, 15 bp, synthetic construct
  misc_feature 1..15: note = Description of Artificial Sequence: Synthetic oligonucleotide
  source 1..15: mol_type = other DNA
gatcgtgggagctac

SEQ ID NO: 20918 - protein, 5 aa, synthetic construct
  REGION 1..5: note = Description of Artificial Sequence: Synthetic peptide
DRGSY

SEQ ID NO: 20919 - DNA, 24 bp, synthetic construct
  misc_feature 1..24: note = Description of Artificial Sequence: Synthetic oligonucleotide
  source 1..24: mol_type = other DNA
gatcttggctggacggaagagtac

SEQ ID NO: 20920 - protein, 8 aa, synthetic construct
  REGION 1..8: note = Description of Artificial Sequence: Synthetic peptide
DLGWTEEY

SEQ ID NO: 20921 - DNA, 42 bp, synthetic construct
  misc_feature 1..42: note = Description of Artificial Sequence: Synthetic oligonucleotide
  source 1..42: mol_type = other DNA
gagagatatagcagtggctggtatgactacggtttggacgtc

SEQ ID NO: 20922 - protein, 14 aa, synthetic construct
  REGION 1..14: note = Description of Artificial Sequence: Synthetic peptide
ERYSSGWYDYGLDV

SEQ ID NO: 20923 - DNA, 18 bp, synthetic construct
  misc_feature 1..18: note = Description of Artificial Sequence: Synthetic oligonucleotide
  source 1..18: mol_type = other DNA
gttaacctctttgactac

SEQ ID NO: 20924 - protein, 6 aa, synthetic construct
  REGION 1..6: note = Description of Artificial Sequence: Synthetic peptide
VNLFDY

SEQ ID NO: 20925 - DNA, 24 bp, synthetic construct
  misc_feature 1..24: note = Description of Artificial Sequence: Synthetic oligonucleotide
  source 1..24: mol_type = other DNA
gatggtaccagctcgtttgactac

SEQ ID NO: 20926 - protein, 8 aa, synthetic construct
  REGION 1..8: note = Description of Artificial Sequence: Synthetic peptide
DGTSSFDY

SEQ ID NO: 20927 - DNA, 42 bp, synthetic construct; identical to SEQ ID NO: 20463
  misc_feature 1..42: note = Description of Artificial Sequence: Synthetic oligonucleotide
  source 1..42: mol_type = other DNA

SEQ ID NO: 20928 - protein, 14 aa, synthetic construct
  REGION 1..14: note = Description of Artificial Sequence: Synthetic peptide
YCSSARCPYDAFDI

SEQ ID NO: 20929 - DNA, 27 bp, synthetic construct
  misc_feature 1..27: note = Description of Artificial Sequence: Synthetic oligonucleotide
  source 1..27: mol_type = other DNA
gggagcagctcgtccggctttgactac

SEQ ID NO: 20930 - protein, 9 aa, synthetic construct
  REGION 1..9: note = Description of Artificial Sequence: Synthetic peptide
GSSSSGFDY

SEQ ID NO: 20931 - DNA, 24 bp, synthetic construct
  misc_feature 1..24: note = Description of Artificial Sequence: Synthetic oligonucleotide
  source 1..24: mol_type = other DNA
gaacttggctggtacgaggactac

SEQ ID NO: 20932 - protein, 8 aa, synthetic construct
  REGION 1..8: note = Description of Artificial Sequence: Synthetic peptide
ELGWYEDY

SEQ ID NO: 20933 - DNA, 27 bp, synthetic construct
  misc_feature 1..27: note = Description of Artificial Sequence: Synthetic oligonucleotide
  source 1..27: mol_type = other DNA
cacagtaccagctggtctcttgaccac

SEQ ID NO: 20934 - protein, 9 aa, synthetic construct
  REGION 1..9: note = Description of Artificial Sequence: Synthetic peptide
HSTSWSLDH

SEQ ID NO: 20935 - DNA, 27 bp, synthetic construct
  misc_feature 1..27: note = Description of Artificial Sequence: Synthetic oligonucleotide
  source 1..27: mol_type = other DNA
gatctgagtatgggcggtatggacgtc

SEQ ID NO: 20936 - protein, 9 aa, synthetic construct
  REGION 1..9: note = Description of Artificial Sequence: Synthetic peptide
DLSMGGMDV

SEQ ID NO: 20937 - DNA, 42 bp, synthetic construct
  misc_feature 1..42: note = Description of Artificial Sequence: Synthetic oligonucleotide
  source 1..42: mol_type = other DNA
gaaaggtataccagtggctggcacgactacggtatggacgtc

SEQ ID NO: 20938 - protein, 14 aa, synthetic construct
  REGION 1..14: note = Description of Artificial Sequence: Synthetic peptide
ERYTSGWHDYGMDV

SEQ ID NO: 20939 - DNA, 18 bp, synthetic construct
  misc_feature 1..18: note = Description of Artificial Sequence: Synthetic oligonucleotide
  source 1..18: mol_type = other DNA
ggggggtccctcttctac

SEQ ID NO: 20940 - protein, 6 aa, synthetic construct
  REGION 1..6: note = Description of Artificial Sequence: Synthetic peptide
GGSLFY

SEQ ID NO: 20941 - DNA, 42 bp, synthetic construct; identical to SEQ ID NO: 20341
  misc_feature 1..42: note = Description of Artificial Sequence: Synthetic oligonucleotide
  source 1..42: mol_type = other DNA

SEQ ID NO: 20942 - protein, 14 aa, synthetic construct
  REGION 1..14: note = Description of Artificial Sequence: Synthetic peptide
EKYSSSWYDYGMDV

SEQ ID NO: 20943 - DNA, 24 bp, synthetic construct
  misc_feature 1..24: note = Description of Artificial Sequence: Synthetic oligonucleotide
  source 1..24: mol_type = other DNA
gaactggggttccggtctgactac

SEQ ID NO: 20944 - protein, 8 aa, synthetic construct
  REGION 1..8: note = Description of Artificial Sequence: Synthetic peptide
ELGFRSDY

SEQ ID NO: 20945 - DNA, 24 bp, synthetic construct
  misc_feature 1..24: note = Description of Artificial Sequence: Synthetic oligonucleotide
  source 1..24: mol_type = other DNA
gaattggggttccggtctgactac

SEQ ID NO: 20946 - protein, 8 aa, synthetic construct
  REGION 1..8: note = Description of Artificial Sequence: Synthetic peptide
ELGFRSDY

SEQ ID NO: 20947 - DNA, 42 bp, synthetic construct; identical to SEQ ID NO: 20341
  misc_feature 1..42: note = Description of Artificial Sequence: Synthetic oligonucleotide
  source 1..42: mol_type = other DNA

SEQ ID NO: 20948 - protein, 14 aa, synthetic construct
  REGION 1..14: note = Description of Artificial Sequence: Synthetic peptide
EKYSSSWYDYGMDV

SEQ ID NO: 20949 - DNA, 36 bp, synthetic construct; identical to SEQ ID NO: 20265
  misc_feature 1..36: note = Description of Artificial Sequence: Synthetic oligonucleotide
  source 1..36: mol_type = other DNA

SEQ ID NO: 20950 - protein, 12 aa, synthetic construct
  REGION 1..12: note = Description of Artificial Sequence: Synthetic peptide
RLAVAGSEAFDI

SEQ ID NO: 20951 - DNA, 15 bp, synthetic construct
  misc_feature 1..15: note = Description of Artificial Sequence: Synthetic oligonucleotide
  source 1..15: mol_type = other DNA
gatcgtgggagcctc

SEQ ID NO: 20952 - protein, 5 aa, synthetic construct
  REGION 1..5: note = Description of Artificial Sequence: Synthetic peptide
DRGSL

SEQ ID NO: 20953 - DNA, 24 bp, synthetic construct
  misc_feature 1..24: note = Description of Artificial Sequence: Synthetic oligonucleotide
  source 1..24: mol_type = other DNA
gaaaaggggggtctatttgactac

SEQ ID NO: 20954 - protein, 8 aa, synthetic construct
  REGION 1..8: note = Description of Artificial Sequence: Synthetic peptide
EKGGLFDY

SEQ ID NO: 20955 - DNA, 42 bp, synthetic construct
  misc_feature 1..42: note = Description of Artificial Sequence: Synthetic oligonucleotide
  source 1..42: mol_type = other DNA
gagaagtatagcagcaactggtacgactacggtatggacgtc

SEQ ID NO: 20956 - protein, 14 aa, synthetic construct
  REGION 1..14: note = Description of Artificial Sequence: Synthetic peptide
EKYSSNWYDYGMDV

SEQ ID NO: 20957 - DNA, 18 bp, synthetic construct
  misc_feature 1..18: note = Description of Artificial Sequence: Synthetic oligonucleotide
  source 1..18: mol_type = other DNA
gctaacctctttgactac

SEQ ID NO: 20958 - protein, 6 aa, synthetic construct
  REGION 1..6: note = Description of Artificial Sequence: Synthetic peptide
ANLFDY

SEQ ID NO: 20959 - DNA, 27 bp, synthetic construct
  misc_feature 1..27: note = Description of Artificial Sequence: Synthetic oligonucleotide
  source 1..27: mol_type = other DNA
ctgaacagcagctggtcttttgactac

SEQ ID NO: 20960 - protein, 9 aa, synthetic construct
  REGION 1..9: note = Description of Artificial Sequence: Synthetic peptide
LNSSWSFDY

SEQ ID NO: 20961 - DNA, 24 bp, synthetic construct
  misc_feature 1..24: note = Description of Artificial Sequence: Synthetic oligonucleotide
  source 1..24: mol_type = other DNA
ggaggtgggagcccttttgactac

SEQ ID NO: 20962 - protein, 8 aa, synthetic construct
  REGION 1..8: note = Description of Artificial Sequence: Synthetic peptide
GGGSPFDY

SEQ ID NO: 20963 - DNA, 24 bp, synthetic construct
  misc_feature 1..24: note = Description of Artificial Sequence: Synthetic oligonucleotide
  source 1..24: mol_type = other DNA
gaattggggttccggtctgactac

SEQ ID NO: 20964 - protein, 8 aa, synthetic construct
  REGION 1..8: note = Description of Artificial Sequence: Synthetic peptide
ELGFRSDY

SEQ ID NO: 20965 - DNA, 42 bp, synthetic construct
  misc_feature 1..42: note = Description of Artificial Sequence: Synthetic oligonucleotide
  source 1..42: mol_type = other DNA
gagaagtatagcagcagctggtacgactacggtttggacgtc

SEQ ID NO: 20966 - protein, 14 aa, synthetic construct
  REGION 1..14: note = Description of Artificial Sequence: Synthetic peptide
EKYSSSWYDYGLDV

SEQ ID NO: 20967 - DNA, 24 bp, synthetic construct
  misc_feature 1..24: note = Description of Artificial Sequence: Synthetic oligonucleotide
  source 1..24: mol_type = other DNA
gagcttggctggtacgaggactac

SEQ ID NO: 20968 - protein, 8 aa, synthetic construct
  REGION 1..8: note = Description of Artificial Sequence: Synthetic peptide
ELGWYEDY

SEQ ID NO: 20969 - DNA, 36 bp, synthetic construct; identical to SEQ ID NO: 20457
  misc_feature 1..36: note = Description of Artificial Sequence: Synthetic oligonucleotide
  source 1..36: mol_type = other DNA

SEQ ID NO: 20970 - protein, 12 aa, synthetic construct
  REGION 1..12: note = Description of Artificial Sequence: Synthetic peptide
RGYSYGGYGMDV

SEQ ID NO: 20971 - DNA, 27 bp, synthetic construct
  misc_feature 1..27: note = Description of Artificial Sequence: Synthetic oligonucleotide
  source 1..27: mol_type = other DNA
ctgagcagcagttggtcttttgacttc

SEQ ID NO: 20972 - protein, 9 aa, synthetic construct
  REGION 1..9: note = Description of Artificial Sequence: Synthetic peptide
LSSSWSFDF

SEQ ID NO: 20973 - DNA, 36 bp, synthetic construct; identical to SEQ ID NO: 20457
  misc_feature 1..36: note = Description of Artificial Sequence: Synthetic oligonucleotide
  source 1..36: mol_type = other DNA

SEQ ID NO: 20974 - protein, 12 aa, synthetic construct
  REGION 1..12: note = Description of Artificial Sequence: Synthetic peptide
RGYSYGGYGMDV

SEQ ID NO: 20975 - DNA, 36 bp, synthetic construct; identical to SEQ ID NO: 20457
  misc_feature 1..36: note = Description of Artificial Sequence: Synthetic oligonucleotide
  source 1..36: mol_type = other DNA

SEQ ID NO: 20976 - protein, 12 aa, synthetic construct
  REGION 1..12: note = Description of Artificial Sequence: Synthetic peptide
RGYSYGGYGMDV

SEQ ID NO: 20977 - DNA, 15 bp, synthetic construct
  misc_feature 1..15: note = Description of Artificial Sequence: Synthetic oligonucleotide
  source 1..15: mol_type = other DNA
gatcgaggctccatc

SEQ ID NO: 20978 - protein, 5 aa, synthetic construct
  REGION 1..5: note = Description of Artificial Sequence: Synthetic peptide
DRGSI

SEQ ID NO: 20979 - DNA, 45 bp, synthetic construct
  misc_feature 1..45: note = Description of Artificial Sequence: Synthetic oligonucleotide
  source 1..45: mol_type = other DNA
gatcggggagcagtggctgcttactactactacggtatagacgtc

SEQ ID NO: 20980 - protein, 15 aa, synthetic construct
  REGION 1..15: note = Description of Artificial Sequence: Synthetic peptide
DRGAVAAYYYYGIDV

SEQ ID NO: 20981 - DNA, 27 bp, synthetic construct
  misc_feature 1..27: note = Description of Artificial Sequence: Synthetic oligonucleotide
  source 1..27: mol_type = other DNA
gatctgagtatgggcggtatggacgtc

SEQ ID NO: 20982 - protein, 9 aa, synthetic construct
  REGION 1..9: note = Description of Artificial Sequence: Synthetic peptide
DLSMGGMDV

SEQ ID NO: 20983 - DNA, 36 bp, synthetic construct; identical to SEQ ID NO: 20265
  misc_feature 1..36: note = Description of Artificial Sequence: Synthetic oligonucleotide
  source 1..36: mol_type = other DNA

SEQ ID NO: 20984 - protein, 12 aa, synthetic construct
  REGION 1..12: note = Description of Artificial Sequence: Synthetic peptide
RLAVAGSEAFDI

SEQ ID NO: 20985 - DNA, 27 bp, synthetic construct
  misc_feature 1..27: note = Description of Artificial Sequence: Synthetic oligonucleotide
  source 1..27: mol_type = other DNA
gatctgagtatgggcggtatggacgtc

SEQ ID NO: 20986 - protein, 9 aa, synthetic construct
  REGION 1..9: note = Description of Artificial Sequence: Synthetic peptide
DLSMGGMDV

SEQ ID NO: 20987 - DNA, 18 bp, synthetic construct
  misc_feature 1..18: note = Description of Artificial Sequence: Synthetic oligonucleotide
  source 1..18: mol_type = other DNA
agctccttgtttgactac

SEQ ID NO: 20988 - protein, 6 aa, synthetic construct
  REGION 1..6: note = Description of Artificial Sequence: Synthetic peptide
SSLFDY

SEQ ID NO: 20989 - DNA, 24 bp, synthetic construct
  misc_feature 1..24: note = Description of Artificial Sequence: Synthetic oligonucleotide
  source 1..24: mol_type = other DNA
gaagtggggtttctttctgactac

SEQ ID NO: 20990 - protein, 8 aa, synthetic construct
  REGION 1..8: note = Description of Artificial Sequence: Synthetic peptide
EVGFLSDY

SEQ ID NO: 20991 - DNA, 36 bp, synthetic construct; identical to SEQ ID NO: 20357
  misc_feature 1..36: note = Description of Artificial Sequence: Synthetic oligonucleotide
  source 1..36: mol_type = other DNA

SEQ ID NO: 20992 - protein, 12 aa, synthetic construct
  REGION 1..12: note = Description of Artificial Sequence: Synthetic peptide
RLAVAGSEAFDI

SEQ ID NO: 20993 - DNA, 24 bp, synthetic construct
  misc_feature 1..24: note = Description of Artificial Sequence: Synthetic oligonucleotide
  source 1..24: mol_type = other DNA
gaactggggtttctctctgactac

SEQ ID NO: 20994 - protein, 8 aa, synthetic construct
  REGION 1..8: note = Description of Artificial Sequence: Synthetic peptide
ELGFLSDY

SEQ ID NO: 20995 - DNA, 18 bp, synthetic construct
  misc_feature 1..18: note = Description of Artificial Sequence: Synthetic oligonucleotide
  source 1..18: mol_type = other DNA
agctccttgtttgactat

SEQ ID NO: 20996 - protein, 6 aa, synthetic construct
  REGION 1..6: note = Description of Artificial Sequence: Synthetic peptide
SSLFDY

SEQ ID NO: 20997 - DNA, 36 bp, synthetic construct; identical to SEQ ID NO: 20457
  misc_feature 1..36: note = Description of Artificial Sequence: Synthetic oligonucleotide
  source 1..36: mol_type = other DNA

SEQ ID NO: 20998 - protein, 12 aa, synthetic construct
  REGION 1..12: note = Description of Artificial Sequence: Synthetic peptide
RGYSYGGYGMDV

SEQ ID NO: 20999 - DNA, 18 bp, synthetic construct
  misc_feature 1..18: note = Description of Artificial Sequence: Synthetic oligonucleotide
  source 1..18: mol_type = other DNA
gttaacaactttgactac

SEQ ID NO: 21000 - protein, 6 aa, synthetic construct
  REGION 1..6: note = Description of Artificial Sequence: Synthetic peptide
VNNFDY

SEQ ID NO: 21001 - DNA, 36 bp, synthetic construct
  misc_feature 1..36: note = Description of Artificial Sequence: Synthetic oligonucleotide
  source 1..36: mol_type = other DNA
cgtataacagctcgtctctactacggtatggacgtc

SEQ ID NO: 21002 - protein, 12 aa, synthetic construct
  REGION 1..12: note = Description of Artificial Sequence: Synthetic peptide
RITARLYYGMDV

SEQ ID NO: 21003 - DNA, 27 bp, synthetic construct
  misc_feature 1..27: note = Description of Artificial Sequence: Synthetic oligonucleotide
  source 1..27: mol_type = other DNA
catggaaaagactggggccttgactac

SEQ ID NO: 21004 - protein, 9 aa, synthetic construct
  REGION 1..9: note = Description of Artificial Sequence: Synthetic peptide
HGKDWGLDY

SEQ ID NO: 21005 - DNA, 42 bp, synthetic construct
  misc_feature 1..42: note = Description of Artificial Sequence: Synthetic oligonucleotide
  source 1..42: mol_type = other DNA
gaggtatatagcagtggctggtacgactacggtatggacgtc

SEQ ID NO: 21006 - protein, 14 aa, synthetic construct
  REGION 1..14: note = Description of Artificial Sequence: Synthetic peptide
EVYSSGWYDYGMDV

SEQ ID NO: 21007 - DNA, 36 bp, synthetic construct; identical to SEQ ID NO: 20357
  misc_feature 1..36: note = Description of Artificial Sequence: Synthetic oligonucleotide
  source 1..36: mol_type = other DNA

SEQ ID NO: 21008 - protein, 12 aa, synthetic construct
  REGION 1..12: note = Description of Artificial Sequence: Synthetic peptide
RLAVAGSEAFDI

SEQ ID NO: 21009 - DNA, 27 bp, synthetic construct
  misc_feature 1..27: note = Description of Artificial Sequence: Synthetic oligonucleotide
  source 1..27: mol_type = other DNA
catggaaaagactggggccttgactac

SEQ ID NO: 21010 - protein, 9 aa, synthetic construct
  REGION 1..9: note = Description of Artificial Sequence: Synthetic peptide
HGKDWGLDY

SEQ ID NO: 21011 - DNA, 36 bp, synthetic construct; identical to SEQ ID NO: 20457
  misc_feature 1..36: note = Description of Artificial Sequence: Synthetic oligonucleotide
  source 1..36: mol_type = other DNA

SEQ ID NO: 21012 - protein, 12 aa, synthetic construct
  REGION 1..12: note = Description of Artificial Sequence: Synthetic peptide
RGYSYGGYGMDV

SEQ ID NO: 21013 - DNA, 27 bp, synthetic construct
  misc_feature 1..27: note = Description of Artificial Sequence: Synthetic oligonucleotide
  source 1..27: mol_type = other DNA
cttagcagcagctgggacttccagcac

SEQ ID NO: 21014 - protein, 9 aa, synthetic construct
  REGION 1..9: note = Description of Artificial Sequence: Synthetic peptide
LSSSWDFQH

SEQ ID NO: 21015 - DNA, 36 bp, synthetic construct; identical to SEQ ID NO: 20875
  misc_feature 1..36: note = Description of Artificial Sequence: Synthetic oligonucleotide
  source 1..36: mol_type = other DNA

SEQ ID NO: 21016 - protein, 12 aa, synthetic construct
  REGION 1..12: note = Description of Artificial Sequence: Synthetic peptide
RIAVAGSEAFAI

SEQ ID NO: 21017 - DNA, 27 bp, synthetic construct
  misc_feature 1..27: note = Description of Artificial Sequence: Synthetic oligonucleotide
  source 1..27: mol_type = other DNA
ctgagcagcagctggtcttttgactac

SEQ ID NO: 21018 - protein, 9 aa, synthetic construct
  REGION 1..9: note = Description of Artificial Sequence: Synthetic peptide
LSSSWSFDY

SEQ ID NO: 21019 - DNA, 24 bp, synthetic construct
  misc_feature 1..24: note = Description of Artificial Sequence: Synthetic oligonucleotide
  source 1..24: mol_type = other DNA
ggaggtgggagcccttttgactcc

SEQ ID NO: 21020 - protein, 8 aa, synthetic construct
  REGION 1..8: note = Description of Artificial Sequence: Synthetic peptide
GGGSPFDS

SEQ ID NO: 21021 - DNA, 27 bp, synthetic construct
  misc_feature 1..27: note = Description of Artificial Sequence: Synthetic oligonucleotide
  source 1..27: mol_type = other DNA
catagcaccagctggtcccttgactac

SEQ ID NO: 21022 - protein, 9 aa, synthetic construct
  REGION 1..9: note = Description of Artificial Sequence: Synthetic peptide
HSTSWSLDY

SEQ ID NO: 21023 - DNA, 24 bp, synthetic construct
  misc_feature 1..24: note = Description of Artificial Sequence: Synthetic oligonucleotide
  source 1..24: mol_type = other DNA
gaactggggttccggtctgactac

SEQ ID NO: 21024 - protein, 8 aa, synthetic construct
  REGION 1..8: note = Description of Artificial Sequence: Synthetic peptide
ELGFRSDY

SEQ ID NO: 21025 - DNA, 12 bp, synthetic construct
  misc_feature 1..12: note = Description of Artificial Sequence: Synthetic oligonucleotide
  source 1..12: mol_type = other DNA
ttaggggactac

SEQ ID NO: 21026 - protein, 4 aa, synthetic construct
  REGION 1..4: note = Description of Artificial Sequence: Synthetic peptide
LGDY

SEQ ID NO: 21027 - DNA, 27 bp, synthetic construct
  misc_feature 1..27: note = Description of Artificial Sequence: Synthetic oligonucleotide
  source 1..27: mol_type = other DNA
ctgagcagcagctggtcctttgactac

SEQ ID NO: 21028 - protein, 9 aa, synthetic construct
  REGION 1..9: note = Description of Artificial Sequence: Synthetic peptide
LSSSWSFDY

SEQ ID NO: 21029 - DNA, 27 bp, synthetic construct
  misc_feature 1..27: note = Description of Artificial Sequence: Synthetic oligonucleotide
  source 1..27: mol_type = other DNA
agtcatggctggttcctctttgactac

SEQ ID NO: 21030 - protein, 9 aa, synthetic construct
  REGION 1..9: note = Description of Artificial Sequence: Synthetic peptide
SHGWFLFDY

SEQ ID NO: 21031 - DNA, 24 bp, synthetic construct
  misc_feature 1..24: note = Description of Artificial Sequence: Synthetic oligonucleotide
  source 1..24: mol_type = other DNA
gagcttgcctggtccgaggactac

SEQ ID NO: 21032 - protein, 8 aa, synthetic construct
  REGION 1..8: note = Description of Artificial Sequence: Synthetic peptide
ELAWSEDY

SEQ ID NO: 21033 - DNA, 18 bp, synthetic construct
  misc_feature 1..18: note = Description of Artificial Sequence: Synthetic oligonucleotide
  source 1..18: mol_type = other DNA
gtagcagcctttgactac

SEQ ID NO: 21034 - protein, 6 aa, synthetic construct
  REGION 1..6: note = Description of Artificial Sequence: Synthetic peptide
VAAFDY

SEQ ID NO: 21035 - DNA, 12 bp, synthetic construct
  misc_feature 1..12: note = Description of Artificial Sequence: Synthetic oligonucleotide
  source 1..12: mol_type = other DNA
ttaggggtctac

SEQ ID NO: 21036 - protein, 4 aa, synthetic construct
  REGION 1..4: note = Description of Artificial Sequence: Synthetic peptide
LGVY

SEQ ID NO: 21037 - DNA, 27 bp, synthetic construct
  misc_feature 1..27: note = Description of Artificial Sequence: Synthetic oligonucleotide
  source 1..27: mol_type = other DNA
cagggcagtggctgggaggttgactac

SEQ ID NO: 21038 - protein, 9 aa, synthetic construct
  REGION 1..9: note = Description of Artificial Sequence: Synthetic peptide
QGSGWEVDY

SEQ ID NO: 21039 - DNA, 27 bp, synthetic construct
  misc_feature 1..27: note = Description of Artificial Sequence: Synthetic oligonucleotide
  source 1..27: mol_type = other DNA
catagcaccagctggtcccttgactac

SEQ ID NO: 21040 - protein, 9 aa, synthetic construct
  REGION 1..9: note = Description of Artificial Sequence: Synthetic peptide
HSTSWSLDY

SEQ ID NO: 21041 - DNA, 36 bp, synthetic construct; identical to SEQ ID NO: 20359
  misc_feature 1..36: note = Description of Artificial Sequence: Synthetic oligonucleotide
  source 1..36: mol_type = other DNA

SEQ ID NO: 21042 - protein, 12 aa, synthetic construct
  REGION 1..12: note = Description of Artificial Sequence: Synthetic peptide
RMAVAGSEAFDI

SEQ ID NO: 21043 - DNA, 27 bp, synthetic construct
  misc_feature 1..27: note = Description of Artificial Sequence: Synthetic oligonucleotide
  source 1..27: mol_type = other DNA
catggaaaagactggggccttgacaac

SEQ ID NO: 21044 - protein, 9 aa, synthetic construct
  REGION 1..9: note = Description of Artificial Sequence: Synthetic peptide
HGKDWGLDN

SEQ ID NO: 21045 - DNA, 36 bp, synthetic construct
  misc_feature 1..36: note = Description of Artificial Sequence: Synthetic oligonucleotide
  source 1..36: mol_type = other DNA
cggggatacagctatggcgggtatggtatggacgtc

SEQ ID NO: 21046 - protein, 12 aa, synthetic construct
  REGION 1..12: note = Description of Artificial Sequence: Synthetic peptide
RGYSYGGYGMDV

SEQ ID NO: 21047 - DNA, 27 bp, synthetic construct
  misc_feature 1..27: note = Description of Artificial Sequence: Synthetic oligonucleotide
  source 1..27: mol_type = other DNA
gatctgagtatgggcggtatggacgtc

SEQ ID NO: 21048 - protein, 9 aa, synthetic construct
  REGION 1..9: note = Description of Artificial Sequence: Synthetic peptide
DLSMGGMDV

SEQ ID NO: 21049 - DNA, 27 bp, synthetic construct
  misc_feature 1..27: note = Description of Artificial Sequence: Synthetic oligonucleotide
  source 1..27: mol_type = other DNA
agcagtggctggtacttctttgactac

SEQ ID NO: 21050 - protein, 9 aa, synthetic construct
  REGION 1..9: note = Description of Artificial Sequence: Synthetic peptide
SSGWYFFDY

SEQ ID NO: 21051 - DNA, 36 bp, synthetic construct
  misc_feature 1..36: note = Description of Artificial Sequence: Synthetic oligonucleotide
  source 1..36: mol_type = other DNA
cgtatcgcagtggctggctcggaggcttttgatatc

SEQ ID NO: 21052 - protein, 12 aa, synthetic construct
  REGION 1..12: note = Description of Artificial Sequence: Synthetic peptide
RIAVAGSEAFDI

SEQ ID NO: 21053 - DNA, 24 bp, synthetic construct
  misc_feature 1..24: note = Description of Artificial Sequence: Synthetic oligonucleotide
  source 1..24: mol_type = other DNA
gagcttgcctggtacgaggactac

SEQ ID NO: 21054 - protein, 8 aa, synthetic construct
  REGION 1..8: note = Description of Artificial Sequence: Synthetic peptide
ELAWYEDY

SEQ ID NO: 21055 - DNA, 24 bp, synthetic construct
  misc_feature 1..24: note = Description of Artificial Sequence: Synthetic oligonucleotide
  source 1..24: mol_type = other DNA
gaactaggcttccagtctgacttc

SEQ ID NO: 21056 - protein, 8 aa, synthetic construct
  REGION 1..8: note = Description of Artificial Sequence: Synthetic peptide
ELGFQSDF

SEQ ID NO: 21057 - DNA, 24 bp, synthetic construct
  misc_feature 1..24: note = Description of Artificial Sequence: Synthetic oligonucleotide
  source 1..24: mol_type = other DNA
gagcttgcctggtacgaggacttc

SEQ ID NO: 21058 - protein, 8 aa, synthetic construct
  REGION 1..8: note = Description of Artificial Sequence: Synthetic peptide
ELAWYEDF

SEQ ID NO: 21059 - DNA, 24 bp, synthetic construct
  misc_feature 1..24: note = Description of Artificial Sequence: Synthetic oligonucleotide
  source 1..24: mol_type = other DNA
gaaatgggctggaccgatgactgc

SEQ ID NO: 21060 - protein, 8 aa, synthetic construct
  REGION 1..8: note = Description of Artificial Sequence: Synthetic peptide
EMGWTDDC

SEQ ID NO: 21061 - DNA, 24 bp, synthetic construct
  misc_feature 1..24: note = Description of Artificial Sequence: Synthetic oligonucleotide
  source 1..24: mol_type = other DNA
gagcttgcctggtacgaggactac

SEQ ID NO: 21062 - protein, 8 aa, synthetic construct
  REGION 1..8: note = Description of Artificial Sequence: Synthetic peptide
ELAWYEDY

SEQ ID NO: 21063 - DNA, 45 bp, synthetic construct
  misc_feature 1..45: note = Description of Artificial Sequence: Synthetic oligonucleotide
  source 1..45: mol_type = other DNA
tcgtttttctatggttcggggagttattataacgaatttgactac

SEQ ID NO: 21064 - protein, 15 aa, synthetic construct
  REGION 1..15: note = Description of Artificial Sequence: Synthetic peptide
SFFYGSGSYYNEFDY

SEQ ID NO: 21065 - DNA, 45 bp, synthetic construct
  misc_feature 1..45: note = Description of Artificial Sequence: Synthetic oligonucleotide
  source 1..45: mol_type = other DNA
tggggacgtggcaacagctatgagtactactacggtatggacgtc

SEQ ID NO: 21066 - protein, 15 aa, synthetic construct
  REGION 1..15: note = Description of Artificial Sequence: Synthetic peptide
WGRGNSYEYYYGMDV

SEQ ID NO: 21067 - DNA, 33 bp, synthetic construct
  misc_feature 1..33: note = Description of Artificial Sequence: Synthetic oligonucleotide
  source 1..33: mol_type = other DNA
aggggtataccagaggctgatgcttttgatatc

SEQ ID NO: 21068 - protein, 11 aa, synthetic construct
  REGION 1..11: note = Description of Artificial Sequence: Synthetic peptide
RGIPEADAFDI

SEQ ID NO: 21069 - DNA, 42 bp, synthetic construct
  misc_feature 1..42: note = Description of Artificial Sequence: Synthetic oligonucleotide
  source 1..42: mol_type = other DNA
tattgtagtagtaccaggtgtccttatgatgcctttgatatc

SEQ ID NO: 21070 - protein, 14 aa, synthetic construct
  REGION 1..14: note = Description of Artificial Sequence: Synthetic peptide
YCSSTRCPYDAFDI

SEQ ID NO: 21071 - DNA, 15 bp, synthetic construct
  misc_feature 1..15: note = Description of Artificial Sequence: Synthetic oligonucleotide
  source 1..15: mol_type = other DNA
gatcgtgggagctcc

SEQ ID NO: 21072 - protein, 5 aa, synthetic construct
  REGION 1..5: note = Description of Artificial Sequence: Synthetic peptide
DRGSS

SEQ ID NO: 21073 - DNA, 33 bp, synthetic construct
  misc_feature 1..33: note = Description of Artificial Sequence: Synthetic oligonucleotide
  source 1..33: mol_type = other DNA
ggatacagctatgggtacaactggttcgacccc

SEQ ID NO: 21074 - protein, 11 aa, synthetic construct
  REGION 1..11: note = Description of Artificial Sequence: Synthetic peptide
GYSYGYNWFDP

SEQ ID NO: 21075 - DNA, 18 bp, synthetic construct
  misc_feature 1..18: note = Description of Artificial Sequence: Synthetic oligonucleotide
  source 1..18: mol_type = other DNA
gtggcttcatttgactac

SEQ ID NO: 21076 - protein, 6 aa, synthetic construct
  REGION 1..6: note = Description of Artificial Sequence: Synthetic peptide
VASFDY

SEQ ID NO: 21077 - DNA, 24 bp, synthetic construct
  misc_feature 1..24: note = Description of Artificial Sequence: Synthetic oligonucleotide
  source 1..24: mol_type = other DNA
gatggtaccagctcgcttgactac

SEQ ID NO: 21078 - protein, 8 aa, synthetic construct
  REGION 1..8: note = Description of Artificial Sequence: Synthetic peptide
DGTSSLDY

SEQ ID NO: 21079 - DNA, 33 bp, synthetic construct; identical to SEQ ID NO: 21073
  misc_feature 1..33: note = Description of Artificial Sequence: Synthetic oligonucleotide
  source 1..33: mol_type = other DNA

SEQ ID NO: 21080 - protein, 11 aa, synthetic construct
  REGION 1..11: note = Description of Artificial Sequence: Synthetic peptide
GYSYGYNWFDP

SEQ ID NO: 21081 - DNA, 57 bp, synthetic construct
  misc_feature 1..57: note = Description of Artificial Sequence: Synthetic oligonucleotide
  source 1..57: mol_type = other DNA
gatacgggtcctatagcagctcgtctcgcttactactactattacgctatggacgtc

SEQ ID NO: 21082 - protein, 19 aa, synthetic construct
  REGION 1..19: note = Description of Artificial Sequence: Synthetic peptide
DTGPIAARLAYYYYYAMDV

SEQ ID NO: 21083 - DNA, 45 bp, synthetic construct
  misc_feature 1..45: note = Description of Artificial Sequence: Synthetic oligonucleotide
  source 1..45: mol_type = other DNA
tcgtattactatggttcggggacttattataacgaatttgactac

SEQ ID NO: 21084 - protein, 15 aa, synthetic construct
  REGION 1..15: note = Description of Artificial Sequence: Synthetic peptide
SYYYGSGTYYNEFDY

SEQ ID NO: 21085 - DNA, 45 bp, synthetic construct; identical to SEQ ID NO: 20737
  misc_feature 1..45: note = Description of Artificial Sequence: Synthetic oligonucleotide
  source 1..45: mol_type = other DNA

SEQ ID NO: 21086 - protein, 15 aa, synthetic construct
  REGION 1..15: note = Description of Artificial Sequence: Synthetic peptide
WGRGYSYEYYYGMDV

SEQ ID NO: 21087 - DNA, 27 bp, synthetic construct
  misc_feature 1..27: note = Description of Artificial Sequence: Synthetic oligonucleotide
  source 1..27: mol_type = other DNA
agtagtggctggtactactttgactac

SEQ ID NO: 21088 - protein, 9 aa, synthetic construct
  REGION 1..9: note = Description of Artificial Sequence: Synthetic peptide
SSGWYYFDY

SEQ ID NO: 21089 - DNA, 27 bp, synthetic construct
  misc_feature 1..27: note = Description of Artificial Sequence: Synthetic oligonucleotide
  source 1..27: mol_type = other DNA
actatagcagttcgtggctttgactac

SEQ ID NO: 21090 - protein, 9 aa, synthetic construct
  REGION 1..9: note = Description of Artificial Sequence: Synthetic peptide
TIAVRGFDY

SEQ ID NO: 21091 - DNA, 18 bp, synthetic construct
  misc_feature 1..18: note = Description of Artificial Sequence: Synthetic oligonucleotide
  source 1..18: mol_type = other DNA
gtggcttcatttgactac

SEQ ID NO: 21092 - protein, 6 aa, synthetic construct
  REGION 1..6: note = Description of Artificial Sequence: Synthetic peptide
VASFDY

SEQ ID NO: 21093 - DNA, 24 bp, synthetic construct
  misc_feature 1..24: note = Description of Artificial Sequence: Synthetic oligonucleotide
  source 1..24: mol_type = other DNA
gatggtaccagctcgtttgactac

SEQ ID NO: 21094 - protein, 8 aa, synthetic construct
  REGION 1..8: note = Description of Artificial Sequence: Synthetic peptide
DGTSSFDY

SEQ ID NO: 21095 - DNA, 27 bp, synthetic construct
  misc_feature 1..27: note = Description of Artificial Sequence: Synthetic oligonucleotide
  source 1..27: mol_type = other DNA
aggggacagcagctggccctcgactac

SEQ ID NO: 21096 - protein, 9 aa, synthetic construct
  REGION 1..9: note = Description of Artificial Sequence: Synthetic peptide
RGQQLALDY

SEQ ID NO: 21097 - DNA, 27 bp, synthetic construct
  misc_feature 1..27: note = Description of Artificial Sequence: Synthetic oligonucleotide
  source 1..27: mol_type = other DNA
agcggtggctggtactactttgactac

SEQ ID NO: 21098 - protein, 9 aa, synthetic construct
  REGION 1..9: note = Description of Artificial Sequence: Synthetic peptide
SGGWYYFDY

SEQ ID NO: 21099 - DNA, 45 bp, synthetic construct; identical to SEQ ID NO: 20737
  misc_feature 1..45: note = Description of Artificial Sequence: Synthetic oligonucleotide
  source 1..45: mol_type = other DNA

SEQ ID NO: 21100 - protein, 15 aa, synthetic construct
  REGION 1..15: note = Description of Artificial Sequence: Synthetic peptide
WGRGYSYEYYYGMDV

SEQ ID NO: 21101 - DNA, 27 bp, synthetic construct
  misc_feature 1..27: note = Description of Artificial Sequence: Synthetic oligonucleotide
  source 1..27: mol_type = other DNA
agcagtggctggtattggttcgacccc

SEQ ID NO: 21102 - protein, 9 aa, synthetic construct
  REGION 1..9: note = Description of Artificial Sequence: Synthetic peptide
SSGWYWFDP

SEQ ID NO: 21103 - DNA, 27 bp, synthetic construct
  misc_feature 1..27: note = Description of Artificial Sequence: Synthetic oligonucleotide
  source 1..27: mol_type = other DNA
agcaatggctggtactactttgactac

SEQ ID NO: 21104 - protein, 9 aa, synthetic construct
  REGION 1..9: note = Description of Artificial Sequence: Synthetic peptide
SNGWYYFDY

SEQ ID NO: 21105 - DNA, 27 bp, synthetic construct
  misc_feature 1..27: note = Description of Artificial Sequence: Synthetic oligonucleotide
  source 1..27: mol_type = other DNA
agcagtggctggtactggttcgacccc

SEQ ID NO: 21106 - protein, 9 aa, synthetic construct
  REGION 1..9: note = Description of Artificial Sequence: Synthetic peptide
SSGWYWFDP

SEQ ID NO: 21107 - DNA, 24 bp, synthetic construct
  misc_feature 1..24: note = Description of Artificial Sequence: Synthetic oligonucleotide
  source 1..24: mol_type = other DNA
gatggaactgggtcctttgactac

SEQ ID NO: 21108 - protein, 8 aa, synthetic construct
  REGION 1..8: note = Description of Artificial Sequence: Synthetic peptide
DGTGSFDY

SEQ ID NO: 21109 - DNA, 27 bp, synthetic construct
  misc_feature 1..27: note = Description of Artificial Sequence: Synthetic oligonucleotide
  source 1..27: mol_type = other DNA
agcagtggctggtacttttttgactac

SEQ ID NO: 21110 - protein, 9 aa, synthetic construct
  REGION 1..9: note = Description of Artificial Sequence: Synthetic peptide
SSGWYFFDY

SEQ ID NO: 21111 - DNA, 27 bp, synthetic construct
  misc_feature 1..27: note = Description of Artificial Sequence: Synthetic oligonucleotide
  source 1..27: mol_type = other DNA
agcagtggctggtacttttttgactac

SEQ ID NO: 21112 - protein, 9 aa, synthetic construct
  REGION 1..9: note = Description of Artificial Sequence: Synthetic peptide
SSGWYFFDY

SEQ ID NO: 21113 - DNA, 18 bp, synthetic construct
  misc_feature 1..18: note = Description of Artificial Sequence: Synthetic oligonucleotide
  source 1..18: mol_type = other DNA
gtggctggctttgactac

SEQ ID NO: 21114 - protein, 6 aa, synthetic construct
  REGION 1..6: note = Description of Artificial Sequence: Synthetic peptide
VAGFDY

SEQ ID NO: 21115 - DNA, 42 bp, synthetic construct; identical to SEQ ID NO: 20525
  misc_feature 1..42: note = Description of Artificial Sequence: Synthetic oligonucleotide
  source 1..42: mol_type = other DNA

SEQ ID NO: 21116 - protein, 14 aa, synthetic construct
  REGION 1..14: note = Description of Artificial Sequence: Synthetic peptide
GELLEDYYFYGMDV

SEQ ID NO: 21117 - DNA, 18 bp, synthetic construct
  misc_feature 1..18: note = Description of Artificial Sequence: Synthetic oligonucleotide
  source 1..18: mol_type = other DNA
aagaaggctaacgactac

SEQ ID NO: 21118 - protein, 6 aa, synthetic construct
  REGION 1..6: note = Description of Artificial Sequence: Synthetic peptide
KKANDY

SEQ ID NO: 21119 - DNA, 18 bp, synthetic construct
  misc_feature 1..18: note = Description of Artificial Sequence: Synthetic oligonucleotide
  source 1..18: mol_type = other DNA
ttaaatggttttgactac

SEQ ID NO: 21120 - protein, 6 aa, synthetic construct
  REGION 1..6: note = Description of Artificial Sequence: Synthetic peptide
LNGFDY

SEQ ID NO: 21121 - DNA, 42 bp, synthetic construct; identical to SEQ ID NO: 20525
  misc_feature 1..42: note = Description of Artificial Sequence: Synthetic oligonucleotide
  source 1..42: mol_type = other DNA

SEQ ID NO: 21122 - protein, 14 aa, synthetic construct
  REGION 1..14: note = Description of Artificial Sequence: Synthetic peptide
GELLEDYYFYGMDV

SEQ ID NO: 21123 - DNA, 18 bp, synthetic construct
  misc_feature 1..18: note = Description of Artificial Sequence: Synthetic oligonucleotide
  source 1..18: mol_type = other DNA
aagagggctaacgactac

SEQ ID NO: 21124 - protein, 6 aa, synthetic construct
  REGION 1..6: note = Description of Artificial Sequence: Synthetic peptide
KRANDY

SEQ ID NO: 21125 - DNA, 27 bp, synthetic construct
  misc_feature 1..27: note = Description of Artificial Sequence: Synthetic oligonucleotide
  source 1..27: mol_type = other DNA
agcagtggctggtacttttttgactac

SEQ ID NO: 21126 - protein, 9 aa, synthetic construct
  REGION 1..9: note = Description of Artificial Sequence: Synthetic peptide
SSGWYFFDY

SEQ ID NO: 21127 - DNA, 42 bp, synthetic construct; identical to SEQ ID NO: 20525
  misc_feature 1..42: note = Description of Artificial Sequence: Synthetic oligonucleotide
  source 1..42: mol_type = other DNA

SEQ ID NO: 21128 - protein, 14 aa, synthetic construct
  REGION 1..14: note = Description of Artificial Sequence: Synthetic peptide
GELLEDYYFYGMDV

SEQ ID NO: 21129 - DNA, 57 bp, synthetic construct; identical to SEQ ID NO: 20749
  misc_feature 1..57: note = Description of Artificial Sequence: Synthetic oligonucleotide
  source 1..57: mol_type = other DNA

SEQ ID NO: 21130 - protein, 19 aa, synthetic construct
  REGION 1..19: note = Description of Artificial Sequence: Synthetic peptide
DTGPIAARLAYYYYYAMDV

SEQ ID NO: 21131 - DNA, 30 bp, synthetic construct
  misc_feature 1..30: note = Description of Artificial Sequence: Synthetic oligonucleotide
  source 1..30: mol_type = other DNA
accggttctagctgctgctattttgactac

SEQ ID NO: 21132 - protein, 10 aa, synthetic construct
  REGION 1..10: note = Description of Artificial Sequence: Synthetic peptide
TGSSCCYFDY

SEQ ID NO: 21133 - DNA, 24 bp, synthetic construct
  misc_feature 1..24: note = Description of Artificial Sequence: Synthetic oligonucleotide
  source 1..24: mol_type = other DNA
gaattggggttccggtctgactac

SEQ ID NO: 21134 - protein, 8 aa, synthetic construct
  REGION 1..8: note = Description of Artificial Sequence: Synthetic peptide
ELGFRSDY

SEQ ID NO: 21135 - DNA, 18 bp, synthetic construct
  misc_feature 1..18: note = Description of Artificial Sequence: Synthetic oligonucleotide
  source 1..18: mol_type = other DNA
gtgaatctctttgactac

SEQ ID NO: 21136 - protein, 6 aa, synthetic construct
  REGION 1..6: note = Description of Artificial Sequence: Synthetic peptide
VNLFDY

SEQ ID NO: 21137 - DNA, 24 bp, synthetic construct
  misc_feature 1..24: note = Description of Artificial Sequence: Synthetic oligonucleotide
  source 1..24: mol_type = other DNA
gatggaactgggtcctttgactac

SEQ ID NO: 21138 - protein, 8 aa, synthetic construct
  REGION 1..8: note = Description of Artificial Sequence: Synthetic peptide
DGTGSFDY

SEQ ID NO: 21139 - DNA, 12 bp, synthetic construct
  misc_feature 1..12: note = Description of Artificial Sequence: Synthetic oligonucleotide
  source 1..12: mol_type = other DNA
ctggggaactac

SEQ ID NO: 21140 - protein, 4 aa, synthetic construct
  REGION 1..4: note = Description of Artificial Sequence: Synthetic peptide
LGNY

SEQ ID NO: 21141 - DNA, 18 bp, synthetic construct
  misc_feature 1..18: note = Description of Artificial Sequence: Synthetic oligonucleotide
  source 1..18: mol_type = other DNA
gtcaacggtatggacgtc

SEQ ID NO: 21142 - protein, 6 aa, synthetic construct
  REGION 1..6: note = Description of Artificial Sequence: Synthetic peptide
VNGMDV

SEQ ID NO: 21143 - DNA, 57 bp, synthetic construct; identical to SEQ ID NO: 20749
  misc_feature 1..57: note = Description of Artificial Sequence: Synthetic oligonucleotide
  source 1..57: mol_type = other DNA

SEQ ID NO: 21144 - protein, 19 aa, synthetic construct
  REGION 1..19: note = Description of Artificial Sequence: Synthetic peptide
DTGPIAARLAYYYYYAMDV

SEQ ID NO: 21145 - DNA, 18 bp, synthetic construct
  misc_feature 1..18: note = Description of Artificial Sequence: Synthetic oligonucleotide
  source 1..18: mol_type = other DNA
actaatgggtttgacttc

SEQ ID NO: 21146 - protein, 6 aa, synthetic construct
  REGION 1..6: note = Description of Artificial Sequence: Synthetic peptide
TNGFDF

SEQ ID NO: 21147 - DNA, 18 bp, synthetic construct
  misc_feature 1..18: note = Description of Artificial Sequence: Synthetic oligonucleotide
  source 1..18: mol_type = other DNA
aaggctgggcttgatatc

SEQ ID NO: 21148 - protein, 6 aa, synthetic construct
  REGION 1..6: note = Description of Artificial Sequence: Synthetic peptide
KAGLDI

SEQ ID NO: 21149 - DNA, 18 bp, synthetic construct
  misc_feature 1..18: note = Description of Artificial Sequence: Synthetic oligonucleotide
  source 1..18: mol_type = other DNA
actaacctctttgactac

SEQ ID NO: 21150 - protein, 6 aa, synthetic construct
  REGION 1..6: note = Description of Artificial Sequence: Synthetic peptide
TNLFDY

SEQ ID NO: 21151 - DNA, 27 bp, synthetic construct
  misc_feature 1..27: note = Description of Artificial Sequence: Synthetic oligonucleotide
  source 1..27: mol_type = other DNA
ctggacaggggctggtcctttgactac

SEQ ID NO: 21152 - protein, 9 aa, synthetic construct
  REGION 1..9: note = Description of Artificial Sequence: Synthetic peptide
LDRGWSFDY

SEQ ID NO: 21153 - DNA, 36 bp, synthetic construct
  misc_feature 1..36: note = Description of Artificial Sequence: Synthetic oligonucleotide
  source 1..36: mol_type = other DNA
agggggatagtgggagctactgaggcttttgatatc

SEQ ID NO: 21154 - protein, 12 aa, synthetic construct
  REGION 1..12: note = Description of Artificial Sequence: Synthetic peptide
RGIVGATEAFDI

SEQ ID NO: 21155 - DNA, 27 bp, synthetic construct
  misc_feature 1..27: note = Description of Artificial Sequence: Synthetic oligonucleotide
  source 1..27: mol_type = other DNA
catggacaagactggggccttgactac

SEQ ID NO: 21156 - protein, 9 aa, synthetic construct
  REGION 1..9: note = Description of Artificial Sequence: Synthetic peptide
HGQDWGLDY

SEQ ID NO: 21157 - DNA, 12 bp, synthetic construct
  misc_feature 1..12: note = Description of Artificial Sequence: Synthetic oligonucleotide
  source 1..12: mol_type = other DNA
ctgggtaactac

SEQ ID NO: 21158 - protein, 4 aa, synthetic construct
  REGION 1..4: note = Description of Artificial Sequence: Synthetic peptide
LGNY

SEQ ID NO: 21159 - DNA, 27 bp, synthetic construct
  misc_feature 1..27: note = Description of Artificial Sequence: Synthetic oligonucleotide
  source 1..27: mol_type = other DNA
agcagtggctggtactactttgactac

SEQ ID NO: 21160 - protein, 9 aa, synthetic construct
  REGION 1..9: note = Description of Artificial Sequence: Synthetic peptide
SSGWYYFDY

SEQ ID NO: 21161 - DNA, 27 bp, synthetic construct
  misc_feature 1..27: note = Description of Artificial Sequence: Synthetic oligonucleotide
  source 1..27: mol_type = other DNA
agcagtggctggtactactttgactac

SEQ ID NO: 21162 - protein, 9 aa, synthetic construct
  REGION 1..9: note = Description of Artificial Sequence: Synthetic peptide
SSGWYYFDY

SEQ ID NO: 21163 - DNA, 45 bp, synthetic construct; identical to SEQ ID NO: 20777
  misc_feature 1..45: note = Description of Artificial Sequence: Synthetic oligonucleotide
  source 1..45: mol_type = other DNA

SEQ ID NO: 21164 - protein, 15 aa, synthetic construct
  REGION 1..15: note = Description of Artificial Sequence: Synthetic peptide
VYYYGSGSYYNEFDY

SEQ ID NO: 21165 - DNA, 45 bp, synthetic construct; identical to SEQ ID NO: 20777
  misc_feature 1..45: note = Description of Artificial Sequence: Synthetic oligonucleotide
  source 1..45: mol_type = other DNA

SEQ ID NO: 21166 - protein, 15 aa, synthetic construct
  REGION 1..15: note = Description of Artificial Sequence: Synthetic peptide
VYYYGSGSYYNEFDY

SEQ ID NO: 21167 - DNA, 27 bp, synthetic construct
  misc_feature 1..27: note = Description of Artificial Sequence: Synthetic oligonucleotide
  source 1..27: mol_type = other DNA
agcagtggctggtactactttgactac

SEQ ID NO: 21168 - protein, 9 aa, synthetic construct
  REGION 1..9: note = Description of Artificial Sequence: Synthetic peptide
SSGWYYFDY

SEQ ID NO: 21169 - DNA, 27 bp, synthetic construct
  misc_feature 1..27: note = Description of Artificial Sequence: Synthetic oligonucleotide
  source 1..27: mol_type = other DNA
agcagtggctggtactactttgactac

SEQ ID NO: 21170 - protein, 9 aa, synthetic construct
  REGION 1..9: note = Description of Artificial Sequence: Synthetic peptide
SSGWYYFDY

SEQ ID NO: 21171 - DNA, 27 bp, synthetic construct
  misc_feature 1..27: note = Description of Artificial Sequence: Synthetic oligonucleotide
  source 1..27: mol_type = other DNA
gatctgagtatgggcggtatggacgtc

SEQ ID NO: 21172 - protein, 9 aa, synthetic construct
  REGION 1..9: note = Description of Artificial Sequence: Synthetic peptide
DLSMGGMDV

SEQ ID NO: 21173 - DNA, 24 bp, synthetic construct
  misc_feature 1..24: note = Description of Artificial Sequence: Synthetic oligonucleotide
  source 1..24: mol_type = other DNA
gatgttaccagctcgtttgactat

SEQ ID NO: 21174 - protein, 8 aa, synthetic construct
  REGION 1..8: note = Description of Artificial Sequence: Synthetic peptide
DVTSSFDY

SEQ ID NO: 21175 - DNA, 24 bp, synthetic construct
  misc_feature 1..24: note = Description of Artificial Sequence: Synthetic oligonucleotide
  source 1..24: mol_type = other DNA
gatggtaccagctcgtttgactac

SEQ ID NO: 21176 - protein, 8 aa, synthetic construct
  REGION 1..8: note = Description of Artificial Sequence: Synthetic peptide
DGTSSFDY

SEQ ID NO: 21177 - DNA, 27 bp, synthetic construct
  misc_feature 1..27: note = Description of Artificial Sequence: Synthetic oligonucleotide
  source 1..27: mol_type = other DNA
agcagtggctggtactactttgacttc

SEQ ID NO: 21178 - protein, 9 aa, synthetic construct
  REGION 1..9: note = Description of Artificial Sequence: Synthetic peptide
SSGWYYFDF

SEQ ID NO: 21179 - DNA, 42 bp, synthetic construct; identical to SEQ ID NO: 20551
  misc_feature 1..42: note = Description of Artificial Sequence: Synthetic oligonucleotide
  source 1..42: mol_type = other DNA

SEQ ID NO: 21180 - protein, 14 aa, synthetic construct
  REGION 1..14: note = Description of Artificial Sequence: Synthetic peptide
EEYSSGWYDYGMDV

SEQ ID NO: 21181 - DNA, 42 bp, synthetic construct; identical to SEQ ID NO: 20551
  misc_feature 1..42: note = Description of Artificial Sequence: Synthetic oligonucleotide
  source 1..42: mol_type = other DNA

SEQ ID NO: 21182 - protein, 14 aa, synthetic construct
  REGION 1..14: note = Description of Artificial Sequence: Synthetic peptide
EEYSSGWYDYGMDV

SEQ ID NO: 21183 - DNA, 27 bp, synthetic construct
  misc_feature 1..27: note = Description of Artificial Sequence: Synthetic oligonucleotide
  source 1..27: mol_type = other DNA
gatgagaggctggggatttttgactac

SEQ ID NO: 21184 - protein, 9 aa, synthetic construct
  REGION 1..9: note = Description of Artificial Sequence: Synthetic peptide
DERLGIFDY

SEQ ID NO: 21185 - DNA, 30 bp, synthetic construct; identical to SEQ ID NO: 20507
  misc_feature 1..30: note = Description of Artificial Sequence: Synthetic oligonucleotide
  source 1..30: mol_type = other DNA

SEQ ID NO: 21186 - protein, 10 aa, synthetic construct
  REGION 1..10: note = Description of Artificial Sequence: Synthetic peptide
ENSSSYYFDY

SEQ ID NO: 21187 - DNA, 27 bp, synthetic construct
  misc_feature 1..27: note = Description of Artificial Sequence: Synthetic oligonucleotide
  source 1..27: mol_type = other DNA
agcagtggctggtactactttgactac

SEQ ID NO: 21188 - protein, 9 aa, synthetic construct
  REGION 1..9: note = Description of Artificial Sequence: Synthetic peptide
SSGWYYFDY

SEQ ID NO: 21189 - DNA, 15 bp, synthetic construct
  misc_feature 1..15: note = Description of Artificial Sequence: Synthetic oligonucleotide
  source 1..15: mol_type = other DNA
gatcggggcagtgaa

SEQ ID NO: 21190 - protein, 5 aa, synthetic construct
  REGION 1..5: note = Description of Artificial Sequence: Synthetic peptide
DRGSE

SEQ ID NO: 21191 - DNA, 27 bp, synthetic construct
  misc_feature 1..27: note = Description of Artificial Sequence: Synthetic oligonucleotide
  source 1..27: mol_type = other DNA
gaaaggagtgggagctattttgactac

SEQ ID NO: 21192 - protein, 9 aa, synthetic construct
  REGION 1..9: note = Description of Artificial Sequence: Synthetic peptide
ERSGSYFDY

SEQ ID NO: 21193 - DNA, 24 bp, synthetic construct
  misc_feature 1..24: note = Description of Artificial Sequence: Synthetic oligonucleotide
  source 1..24: mol_type = other DNA
gagctaggattttccaatgactac

SEQ ID NO: 21194 - protein, 8 aa, synthetic construct
  REGION 1..8: note = Description of Artificial Sequence: Synthetic peptide
ELGFSNDY

SEQ ID NO: 21195 - DNA, 18 bp, synthetic construct
  misc_feature 1..18: note = Description of Artificial Sequence: Synthetic oligonucleotide
  source 1..18: mol_type = other DNA
gtgacctcttttgactac

SEQ ID NO: 21196 - protein, 6 aa, synthetic construct
  REGION 1..6: note = Description of Artificial Sequence: Synthetic peptide
VTSFDY

SEQ ID NO: 21197 - DNA, 27 bp, synthetic construct
  misc_feature 1..27: note = Description of Artificial Sequence: Synthetic oligonucleotide
  source 1..27: mol_type = other DNA
gaaaggagtgggagctattttgactac

SEQ ID NO: 21198 - protein, 9 aa, synthetic construct
  REGION 1..9: note = Description of Artificial Sequence: Synthetic peptide
ERSGSYFDY

SEQ ID NO: 21199 - DNA, 12 bp, synthetic construct
  misc_feature 1..12: note = Description of Artificial Sequence: Synthetic oligonucleotide
  source 1..12: mol_type = other DNA
gatacaatctac

SEQ ID NO: 21200 - protein, 4 aa, synthetic construct
  REGION 1..4: note = Description of Artificial Sequence: Synthetic peptide
DTIY

SEQ ID NO: 21201 - DNA, 27 bp, synthetic construct
  misc_feature 1..27: note = Description of Artificial Sequence: Synthetic oligonucleotide
  source 1..27: mol_type = other DNA
agcagtggctggaccctctttgactac

SEQ ID NO: 21202 - protein, 9 aa, synthetic construct
  REGION 1..9: note = Description of Artificial Sequence: Synthetic peptide
SSGWTLFDY

SEQ ID NO: 21203 - DNA, 27 bp, synthetic construct
  misc_feature 1..27: note = Description of Artificial Sequence: Synthetic oligonucleotide
  source 1..27: mol_type = other DNA
gaaaggagtgggagctattttgactac

SEQ ID NO: 21204 - protein, 9 aa, synthetic construct
  REGION 1..9: note = Description of Artificial Sequence: Synthetic peptide
ERSGSYFDY

SEQ ID NO: 21205 - DNA, 12 bp, synthetic construct
  misc_feature 1..12: note = Description of Artificial Sequence: Synthetic oligonucleotide
  source 1..12: mol_type = other DNA
gatacaatctac

SEQ ID NO: 21206 - protein, 4 aa, synthetic construct
  REGION 1..4: note = Description of Artificial Sequence: Synthetic peptide
DTIY

SEQ ID NO: 21207 - DNA, 27 bp, synthetic construct
  misc_feature 1..27: note = Description of Artificial Sequence: Synthetic oligonucleotide
  source 1..27: mol_type = other DNA
cgaacgccctctgatgtttttgatatc

SEQ ID NO: 21208 - protein, 9 aa, synthetic construct
  REGION 1..9: note = Description of Artificial Sequence: Synthetic peptide
RTPSDVFDI

SEQ ID NO: 21209 - DNA, 36 bp, synthetic construct
  misc_feature 1..36: note = Description of Artificial Sequence: Synthetic oligonucleotide
  source 1..36: mol_type = other DNA
cggtatgtcagaagctgggtgggaggtatggacgtc

SEQ ID NO: 21210 - protein, 12 aa, synthetic construct
  REGION 1..12: note = Description of Artificial Sequence: Synthetic peptide
RYVRSWVGGMDV

SEQ ID NO: 21211 - DNA, 42 bp, synthetic construct
  misc_feature 1..42: note = Description of Artificial Sequence: Synthetic oligonucleotide
  source 1..42: mol_type = other DNA
gagaggtatagcagtggctggtacgactacggtatggacgtc

SEQ ID NO: 21212 - protein, 14 aa, synthetic construct
  REGION 1..14: note = Description of Artificial Sequence: Synthetic peptide
ERYSSGWYDYGMDV

SEQ ID NO: 21213 - DNA, 24 bp, synthetic construct
  misc_feature 1..24: note = Description of Artificial Sequence: Synthetic oligonucleotide
  source 1..24: mol_type = other DNA
gaactaggattttccaccgactac

SEQ ID NO: 21214 - protein, 8 aa, synthetic construct
  REGION 1..8: note = Description of Artificial Sequence: Synthetic peptide
ELGFSTDY

SEQ ID NO: 21215 - DNA, 42 bp, synthetic construct
  misc_feature 1..42: note = Description of Artificial Sequence: Synthetic oligonucleotide
  source 1..42: mol_type = other DNA
gaaaggtatagcagtggcttgtacgactacggtatggacgtc

SEQ ID NO: 21216 - protein, 14 aa, synthetic construct
  REGION 1..14: note = Description of Artificial Sequence: Synthetic peptide
ERYSSGLYDYGMDV

SEQ ID NO: 21217 - DNA, 27 bp, synthetic construct
  misc_feature 1..27: note = Description of Artificial Sequence: Synthetic oligonucleotide
  source 1..27: mol_type = other DNA
cgaacgccctctgatgcttttgatatc

SEQ ID NO: 21218 - protein, 9 aa, synthetic construct
  REGION 1..9: note = Description of Artificial Sequence: Synthetic peptide
RTPSDAFDI

SEQ ID NO: 21219 - DNA, 42 bp, synthetic construct
  misc_feature 1..42: note = Description of Artificial Sequence: Synthetic oligonucleotide
  source 1..42: mol_type = other DNA
gtcccgtatagcagcagctggtacgactacggtatggacgtc

SEQ ID NO: 21220 - protein, 14 aa, synthetic construct
  REGION 1..14: note = Description of Artificial Sequence: Synthetic peptide
VPYSSSWYDYGMDV

SEQ ID NO: 21221 - DNA, 21 bp, synthetic construct
  misc_feature 1..21: note = Description of Artificial Sequence: Synthetic oligonucleotide
  source 1..21: mol_type = other DNA
ggggtggctataaagaactac

SEQ ID NO: 21222 - protein, 7 aa, synthetic construct
  REGION 1..7: note = Description of Artificial Sequence: Synthetic peptide
GVAIKNY

SEQ ID NO: 21223 - DNA, 24 bp, synthetic construct
  misc_feature 1..24: note = Description of Artificial Sequence: Synthetic oligonucleotide
  source 1..24: mol_type = other DNA
gaactggggttcctctctgactac

SEQ ID NO: 21224 - protein, 8 aa, synthetic construct
  REGION 1..8: note = Description of Artificial Sequence: Synthetic peptide
ELGFLSDY

SEQ ID NO: 21225 - DNA, 42 bp, synthetic construct
  misc_feature 1..42: note = Description of Artificial Sequence: Synthetic oligonucleotide
  source 1..42: mol_type = other DNA
gaaccatatagcagcagctggtacgactacggtatggacgtc

SEQ ID NO: 21226 - protein, 14 aa, synthetic construct
  REGION 1..14: note = Description of Artificial Sequence: Synthetic peptide
EPYSSSWYDYGMDV

SEQ ID NO: 21227 - DNA, 36 bp, synthetic construct
  misc_feature 1..36: note = Description of Artificial Sequence: Synthetic oligonucleotide
  source 1..36: mol_type = other DNA
cggtatagcagcagctgggtggggggtatggacgtc

SEQ ID NO: 21228 - protein, 12 aa, synthetic construct
  REGION 1..12: note = Description of Artificial Sequence: Synthetic peptide
RYSSSWVGGMDV

SEQ ID NO: 21229 - DNA, 42 bp, synthetic construct; identical to SEQ ID NO: 21215
  misc_feature 1..42: note = Description of Artificial Sequence: Synthetic oligonucleotide
  source 1..42: mol_type = other DNA

SEQ ID NO: 21230 - protein, 14 aa, synthetic construct
  REGION 1..14: note = Description of Artificial Sequence: Synthetic peptide
ERYSSGLYDYGMDV

SEQ ID NO: 21231 - DNA, 27 bp, synthetic construct
  misc_feature 1..27: note = Description of Artificial Sequence: Synthetic oligonucleotide
  source 1..27: mol_type = other DNA
gaaaggagtgggagctattttgactac

SEQ ID NO: 21232 - protein, 9 aa, synthetic construct
  REGION 1..9: note = Description of Artificial Sequence: Synthetic peptide
ERSGSYFDY

SEQ ID NO: 21233 - DNA, 36 bp, synthetic construct
  misc_feature 1..36: note = Description of Artificial Sequence: Synthetic oligonucleotide
  source 1..36: mol_type = other DNA
gatcgggggcagtggctcctaggcggtatggacgtc

SEQ ID NO: 21234 - protein, 12 aa, synthetic construct
  REGION 1..12: note = Description of Artificial Sequence: Synthetic peptide
DRGQWLLGGMDV

SEQ ID NO: 21235 - DNA, 45 bp, synthetic construct
  misc_feature 1..45: note = Description of Artificial Sequence: Synthetic oligonucleotide
  source 1..45: mol_type = other DNA
agtggatacagctatgcttactactactactacggtatggacgtc

SEQ ID NO: 21236 - protein, 15 aa, synthetic construct
  REGION 1..15: note = Description of Artificial Sequence: Synthetic peptide
SGYSYAYYYYYGMDV

SEQ ID NO: 21237 - DNA, 33 bp, synthetic construct
  misc_feature 1..33: note = Description of Artificial Sequence: Synthetic oligonucleotide
  source 1..33: mol_type = other DNA
gatctaatagcagcagctgggacgggagactac

SEQ ID NO: 21238 - protein, 11 aa, synthetic construct
  REGION 1..11: note = Description of Artificial Sequence: Synthetic peptide
DLIAAAGTGDY

SEQ ID NO: 21239 - DNA, 12 bp, synthetic construct
  misc_feature 1..12: note = Description of Artificial Sequence: Synthetic oligonucleotide
  source 1..12: mol_type = other DNA
gatacaatctac

SEQ ID NO: 21240 - protein, 4 aa, synthetic construct
  REGION 1..4: note = Description of Artificial Sequence: Synthetic peptide
DTIY

SEQ ID NO: 21241 - DNA, 42 bp, synthetic construct; identical to SEQ ID NO: 21215
  misc_feature 1..42: note = Description of Artificial Sequence: Synthetic oligonucleotide
  source 1..42: mol_type = other DNA

SEQ ID NO: 21242 - protein, 14 aa, synthetic construct
  REGION 1..14: note = Description of Artificial Sequence: Synthetic peptide
ERYSSGLYDYGMDV

SEQ ID NO: 21243 - DNA, 27 bp, synthetic construct
  misc_feature 1..27: note = Description of Artificial Sequence: Synthetic oligonucleotide
  source 1..27: mol_type = other DNA
cgaacgccctctgatgtttttgatatc

SEQ ID NO: 21244 - protein, 9 aa, synthetic construct
  REGION 1..9: note = Description of Artificial Sequence: Synthetic peptide
RTPSDVFDI

SEQ ID NO: 21245 - DNA, 42 bp, synthetic construct; identical to SEQ ID NO: 21215
  misc_feature 1..42: note = Description of Artificial Sequence: Synthetic oligonucleotide
  source 1..42: mol_type = other DNA

SEQ ID NO: 21246 - protein, 14 aa, synthetic construct
  REGION 1..14: note = Description of Artificial Sequence: Synthetic peptide
ERYSSGLYDYGMDV

SEQ ID NO: 21247 - DNA, 27 bp, synthetic construct
  misc_feature 1..27: note = Description of Artificial Sequence: Synthetic oligonucleotide
  source 1..27: mol_type = other DNA
gaaaggagtgggagctattttgactac

SEQ ID NO: 21248 - protein, 9 aa, synthetic construct
  REGION 1..9: note = Description of Artificial Sequence: Synthetic peptide
ERSGSYFDY

SEQ ID NO: 21249 - DNA, 27 bp, synthetic construct
  misc_feature 1..27: note = Description of Artificial Sequence: Synthetic oligonucleotide
  source 1..27: mol_type = other DNA
cgaacgccctctgatgcttttgatatc

SEQ ID NO: 21250 - protein, 9 aa, synthetic construct
  REGION 1..9: note = Description of Artificial Sequence: Synthetic peptide
RTPSDAFDI

SEQ ID NO: 21251 - DNA, 18 bp, synthetic construct
  misc_feature 1..18: note = Description of Artificial Sequence: Synthetic oligonucleotide
  source 1..18: mol_type = other DNA
gtgacctcttttgactac

SEQ ID NO: 21252 - protein, 6 aa, synthetic construct
  REGION 1..6: note = Description of Artificial Sequence: Synthetic peptide
VTSFDY

SEQ ID NO: 21253 - DNA, 33 bp, synthetic construct
  misc_feature 1..33: note = Description of Artificial Sequence: Synthetic oligonucleotide
  source 1..33: mol_type = other DNA
gatctaatagcagcaactgggacgggagactac

SEQ ID NO: 21254 - protein, 11 aa, synthetic construct
  REGION 1..11: note = Description of Artificial Sequence: Synthetic peptide
DLIAATGTGDY

SEQ ID NO: 21255 - DNA, 36 bp, synthetic construct
  misc_feature 1..36: note = Description of Artificial Sequence: Synthetic oligonucleotide
  source 1..36: mol_type = other DNA
gatcgatacgatttttggagtggttactttgactac

SEQ ID NO: 21256 - protein, 12 aa, synthetic construct
  REGION 1..12: note = Description of Artificial Sequence: Synthetic peptide
DRYDFWSGYFDY

SEQ ID NO: 21257 - DNA, 42 bp, synthetic construct; identical to SEQ ID NO: 21215
  misc_feature 1..42: note = Description of Artificial Sequence: Synthetic oligonucleotide
  source 1..42: mol_type = other DNA

SEQ ID NO: 21258 - protein, 14 aa, synthetic construct
  REGION 1..14: note = Description of Artificial Sequence: Synthetic peptide
ERYSSGLYDYGMDV

SEQ ID NO: 21259 - DNA, 24 bp, synthetic construct
  misc_feature 1..24: note = Description of Artificial Sequence: Synthetic oligonucleotide
  source 1..24: mol_type = other DNA
gaactaggattttccaatgactac

SEQ ID NO: 21260 - protein, 8 aa, synthetic construct
  REGION 1..8: note = Description of Artificial Sequence: Synthetic peptide
ELGFSNDY

SEQ ID NO: 21261 - DNA, 42 bp, synthetic construct
  misc_feature 1..42: note = Description of Artificial Sequence: Synthetic oligonucleotide
  source 1..42: mol_type = other DNA
gtcccgtatagcagcagttggtacgactacggtatggacgtc

SEQ ID NO: 21262 - protein, 14 aa, synthetic construct
  REGION 1..14: note = Description of Artificial Sequence: Synthetic peptide
VPYSSSWYDYGMDV

SEQ ID NO: 21263 - DNA, 27 bp, synthetic construct
  misc_feature 1..27: note = Description of Artificial Sequence: Synthetic oligonucleotide
  source 1..27: mol_type = other DNA
gaaaggagtgggagctattttgactac

SEQ ID NO: 21264 - protein, 9 aa, synthetic construct
  REGION 1..9: note = Description of Artificial Sequence: Synthetic peptide
ERSGSYFDY

SEQ ID NO: 21265 - DNA, 24 bp, synthetic construct
  misc_feature 1..24: note = Description of Artificial Sequence: Synthetic oligonucleotide
  source 1..24: mol_type = other DNA
gagctaggattttccaatgactac

SEQ ID NO: 21266 - protein, 8 aa, synthetic construct
  REGION 1..8: note = Description of Artificial Sequence: Synthetic peptide
ELGFSNDY

SEQ ID NO: 21267 - DNA, 24 bp, synthetic construct
  misc_feature 1..24: note = Description of Artificial Sequence: Synthetic oligonucleotide
  source 1..24: mol_type = other DNA
gaactaggattttccaatgactac

SEQ ID NO: 21268 - protein, 8 aa, synthetic construct
  REGION 1..8: note = Description of Artificial Sequence: Synthetic peptide
ELGFSNDY

SEQ ID NO: 21269 - DNA, 36 bp, synthetic construct
  misc_feature 1..36: note = Description of Artificial Sequence: Synthetic oligonucleotide
  source 1..36: mol_type = other DNA
cggtatagcagcagctggatgggaggtatggacgtc

SEQ ID NO: 21270 - protein, 12 aa, synthetic construct
  REGION 1..12: note = Description of Artificial Sequence: Synthetic peptide
RYSSSWMGGMDV

SEQ ID NO: 21271 - DNA, 12 bp, synthetic construct
  misc_feature 1..12: note = Description of Artificial Sequence: Synthetic oligonucleotide
  source 1..12: mol_type = other DNA
gatacaatctac

SEQ ID NO: 21272 - protein, 4 aa, synthetic construct
  REGION 1..4: note = Description of Artificial Sequence: Synthetic peptide
DTIY

SEQ ID NO: 21273 - DNA, 24 bp, synthetic construct
  misc_feature 1..24: note = Description of Artificial Sequence: Synthetic oligonucleotide
  source 1..24: mol_type = other DNA
gaactggggatgctctttgactac

SEQ ID NO: 21274 - protein, 8 aa, synthetic construct
  REGION 1..8: note = Description of Artificial Sequence: Synthetic peptide
ELGMLFDY

SEQ ID NO: 21275 - DNA, 36 bp, synthetic construct
  misc_feature 1..36: note = Description of Artificial Sequence: Synthetic oligonucleotide
  source 1..36: mol_type = other DNA
cggtatagccgcagctgggtgggaggtatggacgtc

SEQ ID NO: 21276 - protein, 12 aa, synthetic construct
  REGION 1..12: note = Description of Artificial Sequence: Synthetic peptide
RYSRSWVGGMDV

SEQ ID NO: 21277 - DNA, 33 bp, synthetic construct
  misc_feature 1..33: note = Description of Artificial Sequence: Synthetic oligonucleotide
  source 1..33: mol_type = other DNA
gatcttatagcagcagctggtacagttgactac

SEQ ID NO: 21278 - protein, 11 aa, synthetic construct
  REGION 1..11: note = Description of Artificial Sequence: Synthetic peptide
DLIAAAGTVDY

SEQ ID NO: 21279 - DNA, 36 bp, synthetic construct
  misc_feature 1..36: note = Description of Artificial Sequence: Synthetic oligonucleotide
  source 1..36: mol_type = other DNA
gatcgggggcagtggctcataggcggtatggacgtc

SEQ ID NO: 21280 - protein, 12 aa, synthetic construct
  REGION 1..12: note = Description of Artificial Sequence: Synthetic peptide
DRGQWLIGGMDV

SEQ ID NO: 21281 - DNA, 36 bp, synthetic construct
  misc_feature 1..36: note = Description of Artificial Sequence: Synthetic oligonucleotide
  source 1..36: mol_type = other DNA
cggtatagcagaagctgggtgggaggtatggacgtc

SEQ ID NO: 21282 - protein, 12 aa, synthetic construct
  REGION 1..12: note = Description of Artificial Sequence: Synthetic peptide
RYSRSWVGGMDV

SEQ ID NO: 21283 - DNA, 30 bp, synthetic construct
  misc_feature 1..30: note = Description of Artificial Sequence: Synthetic oligonucleotide
  source 1..30: mol_type = other DNA
attatccgggagcagtgggcctttgactac

SEQ ID NO: 21284 - protein, 10 aa, synthetic construct
  REGION 1..10: note = Description of Artificial Sequence: Synthetic peptide
IIREQWAFDY

SEQ ID NO: 21285 - DNA, 12 bp, synthetic construct
  misc_feature 1..12: note = Description of Artificial Sequence: Synthetic oligonucleotide
  source 1..12: mol_type = other DNA
gatacagtctac

SEQ ID NO: 21286 - protein, 4 aa, synthetic construct
  REGION 1..4: note = Description of Artificial Sequence: Synthetic peptide
DTVY

SEQ ID NO: 21287 - DNA, 24 bp, synthetic construct
  misc_feature 1..24: note = Description of Artificial Sequence: Synthetic oligonucleotide
  source 1..24: mol_type = other DNA
gaattagggtgggaggctgactac

SEQ ID NO: 21288 - protein, 8 aa, synthetic construct
  REGION 1..8: note = Description of Artificial Sequence: Synthetic peptide
ELGWEADY

SEQ ID NO: 21289 - DNA, 36 bp, synthetic construct
  misc_feature 1..36: note = Description of Artificial Sequence: Synthetic oligonucleotide
  source 1..36: mol_type = other DNA
cgtatagcagtggctgggaatgaggcttttgatatc

SEQ ID NO: 21290 - protein, 12 aa, synthetic construct
  REGION 1..12: note = Description of Artificial Sequence: Synthetic peptide
RIAVAGNEAFDI

SEQ ID NO: 21291 - DNA, 42 bp, synthetic construct
  misc_feature 1..42: note = Description of Artificial Sequence: Synthetic oligonucleotide
  source 1..42: mol_type = other DNA
gagaggtatagcagcagctggtacgactacggtctggacgtc

SEQ ID NO: 21292 - protein, 14 aa, synthetic construct
  REGION 1..14: note = Description of Artificial Sequence: Synthetic peptide
ERYSSSWYDYGLDV

SEQ ID NO: 21293 - DNA, 36 bp, synthetic construct; identical to SEQ ID NO: 21289
  misc_feature 1..36: note = Description of Artificial Sequence: Synthetic oligonucleotide
  source 1..36: mol_type = other DNA

SEQ ID NO: 21294 - protein, 12 aa, synthetic construct
  REGION 1..12: note = Description of Artificial Sequence: Synthetic peptide
RIAVAGNEAFDI

SEQ ID NO: 21295 - DNA, 27 bp, synthetic construct
  misc_feature 1..27: note = Description of Artificial Sequence: Synthetic oligonucleotide
  source 1..27: mol_type = other DNA
tgtgggcgggagcagtggcttgactac

SEQ ID NO: 21296 - protein, 9 aa, synthetic construct
  REGION 1..9: note = Description of Artificial Sequence: Synthetic peptide
CGREQWLDY

SEQ ID NO: 21297 - DNA, 24 bp, synthetic construct
  misc_feature 1..24: note = Description of Artificial Sequence: Synthetic oligonucleotide
  source 1..24: mol_type = other DNA
gaacttgcctggtacgaggactac

SEQ ID NO: 21298 - protein, 8 aa, synthetic construct
  REGION 1..8: note = Description of Artificial Sequence: Synthetic peptide
ELAWYEDY

SEQ ID NO: 21299 - DNA, 30 bp, synthetic construct
  misc_feature 1..30: note = Description of Artificial Sequence: Synthetic oligonucleotide
  source 1..30: mol_type = other DNA
gcagtggctgcccctggtgtttttgatatc

SEQ ID NO: 21300 - protein, 10 aa, synthetic construct
  REGION 1..10: note = Description of Artificial Sequence: Synthetic peptide
AVAAPGVFDI

SEQ ID NO: 21301 - DNA, 24 bp, synthetic construct
  misc_feature 1..24: note = Description of Artificial Sequence: Synthetic oligonucleotide
  source 1..24: mol_type = other DNA
gaactggggatgagatctgactac

SEQ ID NO: 21302 - protein, 8 aa, synthetic construct
  REGION 1..8: note = Description of Artificial Sequence: Synthetic peptide
ELGMRSDY

SEQ ID NO: 21303 - DNA, 30 bp, synthetic construct
  misc_feature 1..30: note = Description of Artificial Sequence: Synthetic oligonucleotide
  source 1..30: mol_type = other DNA
gcagtggctgcccctggtgcttttgatatc

SEQ ID NO: 21304 - protein, 10 aa, synthetic construct
  REGION 1..10: note = Description of Artificial Sequence: Synthetic peptide
AVAAPGAFDI

SEQ ID NO: 21305 - DNA, 30 bp, synthetic construct; identical to SEQ ID NO: 21303
  misc_feature 1..30: note = Description of Artificial Sequence: Synthetic oligonucleotide
  source 1..30: mol_type = other DNA

SEQ ID NO: 21306 - protein, 10 aa, synthetic construct
  REGION 1..10: note = Description of Artificial Sequence: Synthetic peptide
AVAAPGAFDI

SEQ ID NO: 21307 - DNA, 24 bp, synthetic construct
  misc_feature 1..24: note = Description of Artificial Sequence: Synthetic oligonucleotide
  source 1..24: mol_type = other DNA
gaactggggttcctctctgactac

SEQ ID NO: 21308 - protein, 8 aa, synthetic construct
  REGION 1..8: note = Description of Artificial Sequence: Synthetic peptide
ELGFLSDY

SEQ ID NO: 21309 - DNA, 36 bp, synthetic construct; identical to SEQ ID NO: 20135
  misc_feature 1..36: note = Description of Artificial Sequence: Synthetic oligonucleotide
  source 1..36: mol_type = other DNA

SEQ ID NO: 21310 - protein, 12 aa, synthetic construct
  REGION 1..12: note = Description of Artificial Sequence: Synthetic peptide
RYSSSWSGGMDV

SEQ ID NO: 21311 - DNA, 36 bp, synthetic construct
  misc_feature 1..36: note = Description of Artificial Sequence: Synthetic oligonucleotide
  source 1..36: mol_type = other DNA
gctatagcagcggctggtgcccactattttgactac

SEQ ID NO: 21312 - protein, 12 aa, synthetic construct
  REGION 1..12: note = Description of Artificial Sequence: Synthetic peptide
AIAAAGAHYFDY

SEQ ID NO: 21313 - DNA, 36 bp, synthetic construct
  misc_feature 1..36: note = Description of Artificial Sequence: Synthetic oligonucleotide
  source 1..36: mol_type = other DNA
aggtatagcagcagctggtcgggcggaatggacgtc

SEQ ID NO: 21314 - protein, 12 aa, synthetic construct
  REGION 1..12: note = Description of Artificial Sequence: Synthetic peptide
RYSSSWSGGMDV

SEQ ID NO: 21315 - DNA, 36 bp, synthetic construct
  misc_feature 1..36: note = Description of Artificial Sequence: Synthetic oligonucleotide
  source 1..36: mol_type = other DNA
gcaagggcagtggctgggtcacactggttcgacccc

SEQ ID NO: 21316 - protein, 12 aa, synthetic construct
  REGION 1..12: note = Description of Artificial Sequence: Synthetic peptide
ARAVAGSHWFDP

SEQ ID NO: 21317 - DNA, 24 bp, synthetic construct
  misc_feature 1..24: note = Description of Artificial Sequence: Synthetic oligonucleotide
  source 1..24: mol_type = other DNA
gatctggggatgatcgaggactac

SEQ ID NO: 21318 - protein, 8 aa, synthetic construct
  REGION 1..8: note = Description of Artificial Sequence: Synthetic peptide
DLGMIEDY

SEQ ID NO: 21319 - DNA, 36 bp, synthetic construct; identical to SEQ ID NO: 20135
  misc_feature 1..36: note = Description of Artificial Sequence: Synthetic oligonucleotide
  source 1..36: mol_type = other DNA

SEQ ID NO: 21320 - protein, 12 aa, synthetic construct
  REGION 1..12: note = Description of Artificial Sequence: Synthetic peptide
RYSSSWSGGMDV

SEQ ID NO: 21321 - DNA, 36 bp, synthetic construct; identical to SEQ ID NO: 20135
  misc_feature 1..36: note = Description of Artificial Sequence: Synthetic oligonucleotide
  source 1..36: mol_type = other DNA

SEQ ID NO: 21322 - protein, 12 aa, synthetic construct
  REGION 1..12: note = Description of Artificial Sequence: Synthetic peptide
RYSSSWSGGMDV

SEQ ID NO: 21323 - DNA, 24 bp, synthetic construct
  misc_feature 1..24: note = Description of Artificial Sequence: Synthetic oligonucleotide
  source 1..24: mol_type = other DNA
gacggtaccagcagctttgacttc

SEQ ID NO: 21324 - protein, 8 aa, synthetic construct
  REGION 1..8: note = Description of Artificial Sequence: Synthetic peptide
DGTSSFDF

SEQ ID NO: 21325 - DNA, 36 bp, synthetic construct
  misc_feature 1..36: note = Description of Artificial Sequence: Synthetic oligonucleotide
  source 1..36: mol_type = other DNA
cgtatagcagtggctgggaatgatgcttttgatatc

SEQ ID NO: 21326 - protein, 12 aa, synthetic construct
  REGION 1..12: note = Description of Artificial Sequence: Synthetic peptide
RIAVAGNDAFDI

SEQ ID NO: 21327 - DNA, 12 bp, synthetic construct
  misc_feature 1..12: note = Description of Artificial Sequence: Synthetic oligonucleotide
  source 1..12: mol_type = other DNA
gatacaatctac

SEQ ID NO: 21328 - protein, 4 aa, synthetic construct
  REGION 1..4: note = Description of Artificial Sequence: Synthetic peptide
DTIY

SEQ ID NO: 21329 - DNA, 36 bp, synthetic construct; identical to SEQ ID NO: 21289
  misc_feature 1..36: note = Description of Artificial Sequence: Synthetic oligonucleotide
  source 1..36: mol_type = other DNA

SEQ ID NO: 21330 - protein, 12 aa, synthetic construct
  REGION 1..12: note = Description of Artificial Sequence: Synthetic peptide
RIAVAGNEAFDI

SEQ ID NO: 21331 - DNA, 18 bp, synthetic construct
  misc_feature 1..18: note = Description of Artificial Sequence: Synthetic oligonucleotide
  source 1..18: mol_type = other DNA
gtagcaacttttgactac

SEQ ID NO: 21332 - protein, 6 aa, synthetic construct
  REGION 1..6: note = Description of Artificial Sequence: Synthetic peptide
VATFDY

SEQ ID NO: 21333 - DNA, 36 bp, synthetic construct; identical to SEQ ID NO: 21289
  misc_feature 1..36: note = Description of Artificial Sequence: Synthetic oligonucleotide
  source 1..36: mol_type = other DNA

SEQ ID NO: 21334 - protein, 12 aa, synthetic construct
  REGION 1..12: note = Description of Artificial Sequence: Synthetic peptide
RIAVAGNEAFDI

SEQ ID NO: 21335 - DNA, 48 bp, synthetic construct
  misc_feature 1..48: note = Description of Artificial Sequence: Synthetic oligonucleotide
  source 1..48: mol_type = other DNA
ggagggcagctcggcgggtttaactactactactacggtatggacgtc

SEQ ID NO: 21336 - protein, 16 aa, synthetic construct
  REGION 1..16: note = Description of Artificial Sequence: Synthetic peptide
GGQLGGFNYYYYGMDV

SEQ ID NO: 21337 - DNA, 51 bp, synthetic construct
  misc_feature 1..51: note = Description of Artificial Sequence: Synthetic oligonucleotide
  source 1..51: mol_type = other DNA
gatcggagcatagtagtggctggtccctgggactactacggtatggacgtc

SEQ ID NO: 21338 - protein, 17 aa, synthetic construct
  REGION 1..17: note = Description of Artificial Sequence: Synthetic peptide
DRSIVVAGPWDYYGMDV

SEQ ID NO: 21339 - DNA, 36 bp, synthetic construct
  misc_feature 1..36: note = Description of Artificial Sequence: Synthetic oligonucleotide
  source 1..36: mol_type = other DNA
aggtatagcagcagttggtcgggcggtatggacgtc

SEQ ID NO: 21340 - protein, 12 aa, synthetic construct
  REGION 1..12: note = Description of Artificial Sequence: Synthetic peptide
RYSSSWSGGMDV

SEQ ID NO: 21341 - DNA, 33 bp, synthetic construct
  misc_feature 1..33: note = Description of Artificial Sequence: Synthetic oligonucleotide
  source 1..33: mol_type = other DNA
gggataactggatcacacggtgcttttgatatc

SEQ ID NO: 21342 - protein, 11 aa, synthetic construct
  REGION 1..11: note = Description of Artificial Sequence: Synthetic peptide
GITGSHGAFDI

SEQ ID NO: 21343 - DNA, 24 bp, synthetic construct
  misc_feature 1..24: note = Description of Artificial Sequence: Synthetic oligonucleotide
  source 1..24: mol_type = other DNA
gaactgggatttctctctgactac

SEQ ID NO: 21344 - protein, 8 aa, synthetic construct
  REGION 1..8: note = Description of Artificial Sequence: Synthetic peptide
ELGFLSDY

SEQ ID NO: 21345 - DNA, 18 bp, synthetic construct
  misc_feature 1..18: note = Description of Artificial Sequence: Synthetic oligonucleotide
  source 1..18: mol_type = other DNA
gtgactgcttttgactac

SEQ ID NO: 21346 - protein, 6 aa, synthetic construct
  REGION 1..6: note = Description of Artificial Sequence: Synthetic peptide
VTAFDY

SEQ ID NO: 21347 - DNA, 36 bp, synthetic construct; identical to SEQ ID NO: 21315
  misc_feature 1..36: note = Description of Artificial Sequence: Synthetic oligonucleotide
  source 1..36: mol_type = other DNA

SEQ ID NO: 21348 - protein, 12 aa, synthetic construct
  REGION 1..12: note = Description of Artificial Sequence: Synthetic peptide
ARAVAGSHWFDP

SEQ ID NO: 21349 - DNA, 15 bp, synthetic construct
  misc_feature 1..15: note = Description of Artificial Sequence: Synthetic oligonucleotide
  source 1..15: mol_type = other DNA
gctcgccttgactac

SEQ ID NO: 21350 - protein, 5 aa, synthetic construct
  REGION 1..5: note = Description of Artificial Sequence: Synthetic peptide
ARLDY

SEQ ID NO: 21351 - DNA, 24 bp, synthetic construct
  misc_feature 1..24: note = Description of Artificial Sequence: Synthetic oligonucleotide
  source 1..24: mol_type = other DNA
gacggtaccagcagctttgacttc

SEQ ID NO: 21352 - protein, 8 aa, synthetic construct
  REGION 1..8: note = Description of Artificial Sequence: Synthetic peptide
DGTSSFDF

SEQ ID NO: 21353 - DNA, 48 bp, synthetic construct
  misc_feature 1..48: note = Description of Artificial Sequence: Synthetic oligonucleotide
  source 1..48: mol_type = other DNA
ggagggcagctcggcggctttaacttctactactacggtatggacgtc

SEQ ID NO: 21354 - protein, 16 aa, synthetic construct
  REGION 1..16: note = Description of Artificial Sequence: Synthetic peptide
GGQLGGFNFYYYGMDV

SEQ ID NO: 21355 - DNA, 24 bp, synthetic construct
  misc_feature 1..24: note = Description of Artificial Sequence: Synthetic oligonucleotide
  source 1..24: mol_type = other DNA
gatggcacctcgtcctttgactac

SEQ ID NO: 21356 - protein, 8 aa, synthetic construct
  REGION 1..8: note = Description of Artificial Sequence: Synthetic peptide
DGTSSFDY

SEQ ID NO: 21357 - DNA, 24 bp, synthetic construct
  misc_feature 1..24: note = Description of Artificial Sequence: Synthetic oligonucleotide
  source 1..24: mol_type = other DNA
gagctgggatttctctctgactac

SEQ ID NO: 21358 - protein, 8 aa, synthetic construct
  REGION 1..8: note = Description of Artificial Sequence: Synthetic peptide
ELGFLSDY

SEQ ID NO: 21359 - DNA, 36 bp, synthetic construct; identical to SEQ ID NO: 21325
  misc_feature 1..36: note = Description of Artificial Sequence: Synthetic oligonucleotide
  source 1..36: mol_type = other DNA

SEQ ID NO: 21360 - protein, 12 aa, synthetic construct
  REGION 1..12: note = Description of Artificial Sequence: Synthetic peptide
RIAVAGNDAFDI

SEQ ID NO: 21361 - DNA, 24 bp, synthetic construct
  misc_feature 1..24: note = Description of Artificial Sequence: Synthetic oligonucleotide
  source 1..24: mol_type = other DNA
gagctgggatttctctctgactac

SEQ ID NO: 21362 - protein, 8 aa, synthetic construct
  REGION 1..8: note = Description of Artificial Sequence: Synthetic peptide
ELGFLSDY

SEQ ID NO: 21363 - DNA, 24 bp, synthetic construct
  misc_feature 1..24: note = Description of Artificial Sequence: Synthetic oligonucleotide
  source 1..24: mol_type = other DNA
gaactggggttcctctctgacttc

SEQ ID NO: 21364 - protein, 8 aa, synthetic construct
  REGION 1..8: note = Description of Artificial Sequence: Synthetic peptide
ELGFLSDF

SEQ ID NO: 21365 - DNA, 24 bp, synthetic construct
  misc_feature 1..24: note = Description of Artificial Sequence: Synthetic oligonucleotide
  source 1..24: mol_type = other DNA
gatggcacctcgtcctttgactac

SEQ ID NO: 21366 - protein, 8 aa, synthetic construct
  REGION 1..8: note = Description of Artificial Sequence: Synthetic peptide
DGTSSFDY

SEQ ID NO: 21367 - DNA, 24 bp, synthetic construct
  misc_feature 1..24: note = Description of Artificial Sequence: Synthetic oligonucleotide
  source 1..24: mol_type = other DNA
gatctggggatgatcgaggacttc

SEQ ID NO: 21368 - protein, 8 aa, synthetic construct
  REGION 1..8: note = Description of Artificial Sequence: Synthetic peptide
DLGMIEDF

SEQ ID NO: 21369 - DNA, 27 bp, synthetic construct
  misc_feature 1..27: note = Description of Artificial Sequence: Synthetic oligonucleotide
  source 1..27: mol_type = other DNA
aatgggcgagagcagtggcttgactac

SEQ ID NO: 21370 - protein, 9 aa, synthetic construct
  REGION 1..9: note = Description of Artificial Sequence: Synthetic peptide
NGREQWLDY

SEQ ID NO: 21371 - DNA, 18 bp, synthetic construct
  misc_feature 1..18: note = Description of Artificial Sequence: Synthetic oligonucleotide
  source 1..18: mol_type = other DNA
gttagcagtaatgactac

SEQ ID NO: 21372 - protein, 6 aa, synthetic construct
  REGION 1..6: note = Description of Artificial Sequence: Synthetic peptide
VSSNDY

SEQ ID NO: 21373 - DNA, 36 bp, synthetic construct
  misc_feature 1..36: note = Description of Artificial Sequence: Synthetic oligonucleotide
  source 1..36: mol_type = other DNA
aggtcagcagctcggccgggctacggtatggacgtc

SEQ ID NO: 21374 - protein, 12 aa, synthetic construct
  REGION 1..12: note = Description of Artificial Sequence: Synthetic peptide
RSAARPGYGMDV

SEQ ID NO: 21375 - DNA, 24 bp, synthetic construct
  misc_feature 1..24: note = Description of Artificial Sequence: Synthetic oligonucleotide
  source 1..24: mol_type = other DNA
gagctgggatttctctctgactac

SEQ ID NO: 21376 - protein, 8 aa, synthetic construct
  REGION 1..8: note = Description of Artificial Sequence: Synthetic peptide
ELGFLSDY

SEQ ID NO: 21377 - DNA, 36 bp, synthetic construct; identical to SEQ ID NO: 20135
  misc_feature 1..36: note = Description of Artificial Sequence: Synthetic oligonucleotide
  source 1..36: mol_type = other DNA

SEQ ID NO: 21378 - protein, 12 aa, synthetic construct
  REGION 1..12: note = Description of Artificial Sequence: Synthetic peptide
RYSSSWSGGMDV

SEQ ID NO: 21379 - DNA, 36 bp, synthetic construct
  misc_feature 1..36: note = Description of Artificial Sequence: Synthetic oligonucleotide
  source 1..36: mol_type = other DNA
gattctctgtatagcagcagctggttgtttgactac

SEQ ID NO: 21380 - protein, 12 aa, synthetic construct
  REGION 1..12: note = Description of Artificial Sequence: Synthetic peptide
DSLYSSSWLFDY

SEQ ID NO: 21381 - DNA, 24 bp, synthetic construct
  misc_feature 1..24: note = Description of Artificial Sequence: Synthetic oligonucleotide
  source 1..24: mol_type = other DNA
gatggcacctcgtcctttgactac

SEQ ID NO: 21382 - protein, 8 aa, synthetic construct
  REGION 1..8: note = Description of Artificial Sequence: Synthetic peptide
DGTSSFDY

SEQ ID NO: 21383 - DNA, 18 bp, synthetic construct
  misc_feature 1..18: note = Description of Artificial Sequence: Synthetic oligonucleotide
  source 1..18: mol_type = other DNA
gtcaactcctttgactac

SEQ ID NO: 21384 - protein, 6 aa, synthetic construct
  REGION 1..6: note = Description of Artificial Sequence: Synthetic peptide
VNSFDY

SEQ ID NO: 21385 - DNA, 15 bp, synthetic construct
  misc_feature 1..15: note = Description of Artificial Sequence: Synthetic oligonucleotide
  source 1..15: mol_type = other DNA
gatcggggcagcacc

SEQ ID NO: 21386 - protein, 5 aa, synthetic construct
  REGION 1..5: note = Description of Artificial Sequence: Synthetic peptide
DRGST

SEQ ID NO: 21387 - DNA, 24 bp, synthetic construct
  misc_feature 1..24: note = Description of Artificial Sequence: Synthetic oligonucleotide
  source 1..24: mol_type = other DNA
ggccttggctttacgggagactac

SEQ ID NO: 21388 - protein, 8 aa, synthetic construct
  REGION 1..8: note = Description of Artificial Sequence: Synthetic peptide
GLGFTGDY

SEQ ID NO: 21389 - DNA, 33 bp, synthetic construct
  misc_feature 1..33: note = Description of Artificial Sequence: Synthetic oligonucleotide
  source 1..33: mol_type = other DNA
aaggtcgtggatacagccatggctcttgactac

SEQ ID NO: 21390 - protein, 11 aa, synthetic construct
  REGION 1..11: note = Description of Artificial Sequence: Synthetic peptide
KVVDTAMALDY

SEQ ID NO: 21391 - DNA, 36 bp, synthetic construct
  misc_feature 1..36: note = Description of Artificial Sequence: Synthetic oligonucleotide
  source 1..36: mol_type = other DNA
cggggagcagctcgtcctggctacggtatggacgtc

SEQ ID NO: 21392 - protein, 12 aa, synthetic construct
  REGION 1..12: note = Description of Artificial Sequence: Synthetic peptide
RGAARPGYGMDV

SEQ ID NO: 21393 - DNA, 18 bp, synthetic construct
  misc_feature 1..18: note = Description of Artificial Sequence: Synthetic oligonucleotide
  source 1..18: mol_type = other DNA
gtggccctttttgactac

SEQ ID NO: 21394 - protein, 6 aa, synthetic construct
  REGION 1..6: note = Description of Artificial Sequence: Synthetic peptide
VALFDY

SEQ ID NO: 21395 - DNA, 33 bp, synthetic construct
  misc_feature 1..33: note = Description of Artificial Sequence: Synthetic oligonucleotide
  source 1..33: mol_type = other DNA
cctctagtgggagcccatgatgcttttgaaatc

SEQ ID NO: 21396 - protein, 11 aa, synthetic construct
  REGION 1..11: note = Description of Artificial Sequence: Synthetic peptide
PLVGAHDAFEI

SEQ ID NO: 21397 - DNA, 24 bp, synthetic construct
  misc_feature 1..24: note = Description of Artificial Sequence: Synthetic oligonucleotide
  source 1..24: mol_type = other DNA
gaactggggatgacgtctgactac

SEQ ID NO: 21398 - protein, 8 aa, synthetic construct
  REGION 1..8: note = Description of Artificial Sequence: Synthetic peptide
ELGMTSDY

SEQ ID NO: 21399 - DNA, 36 bp, synthetic construct
  misc_feature 1..36: note = Description of Artificial Sequence: Synthetic oligonucleotide
  source 1..36: mol_type = other DNA
cgacgggcagctcgtccagggtacggtatggacgtc

SEQ ID NO: 21400 - protein, 12 aa, synthetic construct
  REGION 1..12: note = Description of Artificial Sequence: Synthetic peptide
RRAARPGYGMDV

SEQ ID NO: 21401 - DNA, 24 bp, synthetic construct
  misc_feature 1..24: note = Description of Artificial Sequence: Synthetic oligonucleotide
  source 1..24: mol_type = other DNA
gacggtaccagcagctttgactac

SEQ ID NO: 21402 - protein, 8 aa, synthetic construct
  REGION 1..8: note = Description of Artificial Sequence: Synthetic peptide
DGTSSFDY

SEQ ID NO: 21403 - DNA, 24 bp, synthetic construct
  misc_feature 1..24: note = Description of Artificial Sequence: Synthetic oligonucleotide
  source 1..24: mol_type = other DNA
gcccgtattgggtactttgactcc

SEQ ID NO: 21404 - protein, 8 aa, synthetic construct
  REGION 1..8: note = Description of Artificial Sequence: Synthetic peptide
ARIGYFDS

SEQ ID NO: 21405 - DNA, 24 bp, synthetic construct
  misc_feature 1..24: note = Description of Artificial Sequence: Synthetic oligonucleotide
  source 1..24: mol_type = other DNA
gaactgggatttctctctgacttc

SEQ ID NO: 21406 - protein, 8 aa, synthetic construct
  REGION 1..8: note = Description of Artificial Sequence: Synthetic peptide
ELGFLSDF

SEQ ID NO: 21407 - DNA, 24 bp, synthetic construct
  misc_feature 1..24: note = Description of Artificial Sequence: Synthetic oligonucleotide
  source 1..24: mol_type = other DNA
gaactggggttcctttctgattat

SEQ ID NO: 21408 - protein, 8 aa, synthetic construct
  REGION 1..8: note = Description of Artificial Sequence: Synthetic peptide
ELGFLSDY

SEQ ID NO: 21409 - DNA, 36 bp, synthetic construct
  misc_feature 1..36: note = Description of Artificial Sequence: Synthetic oligonucleotide
  source 1..36: mol_type = other DNA
ctggggaaggactactactactacggtatggacgtc

SEQ ID NO: 21410 - protein, 12 aa, synthetic construct
  REGION 1..12: note = Description of Artificial Sequence: Synthetic peptide
LGKDYYYYGMDV

SEQ ID NO: 21411 - DNA, 15 bp, synthetic construct
  misc_feature 1..15: note = Description of Artificial Sequence: Synthetic oligonucleotide
  source 1..15: mol_type = other DNA
atgactacagtaatt

SEQ ID NO: 21412 - protein, 5 aa, synthetic construct
  REGION 1..5: note = Description of Artificial Sequence: Synthetic peptide
MTTVI

SEQ ID NO: 21413 - DNA, 36 bp, synthetic construct; identical to SEQ ID NO: 20135
  misc_feature 1..36: note = Description of Artificial Sequence: Synthetic oligonucleotide
  source 1..36: mol_type = other DNA

SEQ ID NO: 21414 - protein, 12 aa, synthetic construct
  REGION 1..12: note = Description of Artificial Sequence: Synthetic peptide
RYSSSWSGGMDV

SEQ ID NO: 21415 - DNA, 24 bp, synthetic construct
  misc_feature 1..24: note = Description of Artificial Sequence: Synthetic oligonucleotide
  source 1..24: mol_type = other DNA
gaactggggatgacgtctgactac

SEQ ID NO: 21416 - protein, 8 aa, synthetic construct
  REGION 1..8: note = Description of Artificial Sequence: Synthetic peptide
ELGMTSDY

SEQ ID NO: 21417 - DNA, 24 bp, synthetic construct
  misc_feature 1..24: note = Description of Artificial Sequence: Synthetic oligonucleotide
  source 1..24: mol_type = other DNA
gaattggggttcctctctgactac

SEQ ID NO: 21418 - protein, 8 aa, synthetic construct
  REGION 1..8: note = Description of Artificial Sequence: Synthetic peptide
ELGFLSDY

SEQ ID NO: 21419 - DNA, 24 bp, synthetic construct
  misc_feature 1..24: note = Description of Artificial Sequence: Synthetic oligonucleotide
  source 1..24: mol_type = other DNA
gatggcagatcgtcctttgactac

SEQ ID NO: 21420 - protein, 8 aa, synthetic construct
  REGION 1..8: note = Description of Artificial Sequence: Synthetic peptide
DGRSSFDY

SEQ ID NO: 21421 - DNA, 36 bp, synthetic construct
  misc_feature 1..36: note = Description of Artificial Sequence: Synthetic oligonucleotide
  source 1..36: mol_type = other DNA
gatcacggtatagtgggaactatttactttgactac

SEQ ID NO: 21422 - protein, 12 aa, synthetic construct
  REGION 1..12: note = Description of Artificial Sequence: Synthetic peptide
DHGIVGTIYFDY

SEQ ID NO: 21423 - DNA, 36 bp, synthetic construct; identical to SEQ ID NO: 20135
  misc_feature 1..36: note = Description of Artificial Sequence: Synthetic oligonucleotide
  source 1..36: mol_type = other DNA

SEQ ID NO: 21424 - protein, 12 aa, synthetic construct
  REGION 1..12: note = Description of Artificial Sequence: Synthetic peptide
RYSSSWSGGMDV

SEQ ID NO: 21425 - DNA, 36 bp, synthetic construct; identical to SEQ ID NO: 20135
  misc_feature 1..36: note = Description of Artificial Sequence: Synthetic oligonucleotide
  source 1..36: mol_type = other DNA

SEQ ID NO: 21426 - protein, 12 aa, synthetic construct
  REGION 1..12: note = Description of Artificial Sequence: Synthetic peptide
RYSSSWSGGMDV

SEQ ID NO: 21427 - DNA, 24 bp, synthetic construct
  misc_feature 1..24: note = Description of Artificial Sequence: Synthetic oligonucleotide
  source 1..24: mol_type = other DNA
gaactgggatttctctctgactac

SEQ ID NO: 21428 - protein, 8 aa, synthetic construct
  REGION 1..8: note = Description of Artificial Sequence: Synthetic peptide
ELGFLSDY

SEQ ID NO: 21429 - DNA, 12 bp, synthetic construct
  misc_feature 1..12: note = Description of Artificial Sequence: Synthetic oligonucleotide
  source 1..12: mol_type = other DNA
gggactgactac

SEQ ID NO: 21430 - protein, 4 aa, synthetic construct
  REGION 1..4: note = Description of Artificial Sequence: Synthetic peptide
GTDY

SEQ ID NO: 21431 - DNA, 15 bp, synthetic construct
  misc_feature 1..15: note = Description of Artificial Sequence: Synthetic oligonucleotide
  source 1..15: mol_type = other DNA
gaatggtttgactac

SEQ ID NO: 21432 - protein, 5 aa, synthetic construct
  REGION 1..5: note = Description of Artificial Sequence: Synthetic peptide
EWFDY

SEQ ID NO: 21433 - DNA, 36 bp, synthetic construct; identical to SEQ ID NO: 20135
  misc_feature 1..36: note = Description of Artificial Sequence: Synthetic oligonucleotide
  source 1..36: mol_type = other DNA

SEQ ID NO: 21434 - protein, 12 aa, synthetic construct
  REGION 1..12: note = Description of Artificial Sequence: Synthetic peptide
RYSSSWSGGMDV

SEQ ID NO: 21435 - DNA, 36 bp, synthetic construct; identical to SEQ ID NO: 21399
  misc_feature 1..36: note = Description of Artificial Sequence: Synthetic oligonucleotide
  source 1..36: mol_type = other DNA

SEQ ID NO: 21436 - protein, 12 aa, synthetic construct
  REGION 1..12: note = Description of Artificial Sequence: Synthetic peptide
RRAARPGYGMDV

SEQ ID NO: 21437 - DNA, 27 bp, synthetic construct
  misc_feature 1..27: note = Description of Artificial Sequence: Synthetic oligonucleotide
  source 1..27: mol_type = other DNA
gacgagcagctcgggacctttgactac

SEQ ID NO: 21438 - protein, 9 aa, synthetic construct
  REGION 1..9: note = Description of Artificial Sequence: Synthetic peptide
DEQLGTFDY

SEQ ID NO: 21439 - DNA, 36 bp, synthetic construct; identical to SEQ ID NO: 21315
  misc_feature 1..36: note = Description of Artificial Sequence: Synthetic oligonucleotide
  source 1..36: mol_type = other DNA

SEQ ID NO: 21440 - protein, 12 aa, synthetic construct
  REGION 1..12: note = Description of Artificial Sequence: Synthetic peptide
ARAVAGSHWFDP

SEQ ID NO: 21441 - DNA, 24 bp, synthetic construct
  misc_feature 1..24: note = Description of Artificial Sequence: Synthetic oligonucleotide
  source 1..24: mol_type = other DNA
gaagtggggttcctgaatgactac

SEQ ID NO: 21442 - protein, 8 aa, synthetic construct
  REGION 1..8: note = Description of Artificial Sequence: Synthetic peptide
EVGFLNDY

SEQ ID NO: 21443 - DNA, 42 bp, synthetic construct
  misc_feature 1..42: note = Description of Artificial Sequence: Synthetic oligonucleotide
  source 1..42: mol_type = other DNA
gatcgaggagatggttactacttctactacggtatggacgtc

SEQ ID NO: 21444 - protein, 14 aa, synthetic construct
  REGION 1..14: note = Description of Artificial Sequence: Synthetic peptide
DRGDGYYFYYGMDV

SEQ ID NO: 21445 - DNA, 45 bp, synthetic construct
  misc_feature 1..45: note = Description of Artificial Sequence: Synthetic oligonucleotide
  source 1..45: mol_type = other DNA
gggagaggtcgatatagtgactacggtcatgatgcttttgatatc

SEQ ID NO: 21446 - protein, 15 aa, synthetic construct
  REGION 1..15: note = Description of Artificial Sequence: Synthetic peptide
GRGRYSDYGHDAFDI

SEQ ID NO: 21447 - DNA, 27 bp, synthetic construct
  misc_feature 1..27: note = Description of Artificial Sequence: Synthetic oligonucleotide
  source 1..27: mol_type = other DNA
agcagtggctggtacgtttttgactac

SEQ ID NO: 21448 - protein, 9 aa, synthetic construct
  REGION 1..9: note = Description of Artificial Sequence: Synthetic peptide
SSGWYVFDY

SEQ ID NO: 21449 - DNA, 15 bp, synthetic construct
  misc_feature 1..15: note = Description of Artificial Sequence: Synthetic oligonucleotide
  source 1..15: mol_type = other DNA
gatcggggcagcagc

SEQ ID NO: 21450 - protein, 5 aa, synthetic construct
  REGION 1..5: note = Description of Artificial Sequence: Synthetic peptide
DRGSS

SEQ ID NO: 21451 - DNA, 33 bp, synthetic construct; identical to SEQ ID NO: 21389
  misc_feature 1..33: note = Description of Artificial Sequence: Synthetic oligonucleotide
  source 1..33: mol_type = other DNA

SEQ ID NO: 21452 - protein, 11 aa, synthetic construct
  REGION 1..11: note = Description of Artificial Sequence: Synthetic peptide
KVVDTAMALDY

SEQ ID NO: 21453 - DNA, 18 bp, synthetic construct
  misc_feature 1..18: note = Description of Artificial Sequence: Synthetic oligonucleotide
  source 1..18: mol_type = other DNA
gtggctacttttgactac

SEQ ID NO: 21454 - protein, 6 aa, synthetic construct
  REGION 1..6: note = Description of Artificial Sequence: Synthetic peptide
VATFDY

SEQ ID NO: 21455 - DNA, 24 bp, synthetic construct
  misc_feature 1..24: note = Description of Artificial Sequence: Synthetic oligonucleotide
  source 1..24: mol_type = other DNA
gatggcacctcgtcttttgactac

SEQ ID NO: 21456 - protein, 8 aa, synthetic construct
  REGION 1..8: note = Description of Artificial Sequence: Synthetic peptide
DGTSSFDY

SEQ ID NO: 21457 - DNA, 27 bp, synthetic construct
  misc_feature 1..27: note = Description of Artificial Sequence: Synthetic oligonucleotide
  source 1..27: mol_type = other DNA
gacgagcagctcgggacctttgactac

SEQ ID NO: 21458 - protein, 9 aa, synthetic construct
  REGION 1..9: note = Description of Artificial Sequence: Synthetic peptide
DEQLGTFDY

SEQ ID NO: 21459 - DNA, 24 bp, synthetic construct
  misc_feature 1..24: note = Description of Artificial Sequence: Synthetic oligonucleotide
  source 1..24: mol_type = other DNA
gatggcacctcgtcttttgactat

SEQ ID NO: 21460 - protein, 8 aa, synthetic construct
  REGION 1..8: note = Description of Artificial Sequence: Synthetic peptide
DGTSSFDY

SEQ ID NO: 21461 - DNA, 33 bp, synthetic construct
  misc_feature 1..33: note = Description of Artificial Sequence: Synthetic oligonucleotide
  source 1..33: mol_type = other DNA
gagggagcaactcgtccgacgggttttgactac

SEQ ID NO: 21462 - protein, 11 aa, synthetic construct
  REGION 1..11: note = Description of Artificial Sequence: Synthetic peptide
EGATRPTGFDY

SEQ ID NO: 21463 - DNA, 48 bp, synthetic construct; identical to SEQ ID NO: 21335
  misc_feature 1..48: note = Description of Artificial Sequence: Synthetic oligonucleotide
  source 1..48: mol_type = other DNA

SEQ ID NO: 21464 - protein, 16 aa, synthetic construct
  REGION 1..16: note = Description of Artificial Sequence: Synthetic peptide
GGQLGGFNYYYYGMDV

SEQ ID NO: 21465 - DNA, 24 bp, synthetic construct
  misc_feature 1..24: note = Description of Artificial Sequence: Synthetic oligonucleotide
  source 1..24: mol_type = other DNA
gaactggggatgaacggagactac

SEQ ID NO: 21466 - protein, 8 aa, synthetic construct
  REGION 1..8: note = Description of Artificial Sequence: Synthetic peptide
ELGMNGDY

SEQ ID NO: 21467 - DNA, 36 bp, synthetic construct
  misc_feature 1..36: note = Description of Artificial Sequence: Synthetic oligonucleotide
  source 1..36: mol_type = other DNA
cggtatagcagcagctgggacgggggtatggacgtc

SEQ ID NO: 21468 - protein, 12 aa, synthetic construct
  REGION 1..12: note = Description of Artificial Sequence: Synthetic peptide
RYSSSWDGGMDV

SEQ ID NO: 21469 - DNA, 24 bp, synthetic construct
  misc_feature 1..24: note = Description of Artificial Sequence: Synthetic oligonucleotide
  source 1..24: mol_type = other DNA
gatgttctggacccttttgactac

SEQ ID NO: 21470 - protein, 8 aa, synthetic construct
  REGION 1..8: note = Description of Artificial Sequence: Synthetic peptide
DVLDPFDY

SEQ ID NO: 21471 - DNA, 36 bp, synthetic construct
  misc_feature 1..36: note = Description of Artificial Sequence: Synthetic oligonucleotide
  source 1..36: mol_type = other DNA
aggtatagcagaagctggacgggaggcatggacgtc

SEQ ID NO: 21472 - protein, 12 aa, synthetic construct
  REGION 1..12: note = Description of Artificial Sequence: Synthetic peptide
RYSRSWTGGMDV

SEQ ID NO: 21473 - DNA, 24 bp, synthetic construct
  misc_feature 1..24: note = Description of Artificial Sequence: Synthetic oligonucleotide
  source 1..24: mol_type = other DNA
gaactggggatgaccggagactac

SEQ ID NO: 21474 - protein, 8 aa, synthetic construct
  REGION 1..8: note = Description of Artificial Sequence: Synthetic peptide
ELGMTGDY

SEQ ID NO: 21475 - DNA, 48 bp, synthetic construct
  misc_feature 1..48: note = Description of Artificial Sequence: Synthetic oligonucleotide
  source 1..48: mol_type = other DNA
gggggcctactgggagctaccaactactattattacggtatggacgtc

SEQ ID NO: 21476 - protein, 16 aa, synthetic construct
  REGION 1..16: note = Description of Artificial Sequence: Synthetic peptide
GGLLGATNYYYYGMDV

SEQ ID NO: 21477 - DNA, 27 bp, synthetic construct
  misc_feature 1..27: note = Description of Artificial Sequence: Synthetic oligonucleotide
  source 1..27: mol_type = other DNA
agcagtggctggtacttctttgactac

SEQ ID NO: 21478 - protein, 9 aa, synthetic construct
  REGION 1..9: note = Description of Artificial Sequence: Synthetic peptide
SSGWYFFDY

SEQ ID NO: 21479 - DNA, 18 bp, synthetic construct
  misc_feature 1..18: note = Description of Artificial Sequence: Synthetic oligonucleotide
  source 1..18: mol_type = other DNA
ctaactggatttgactat

SEQ ID NO: 21480 - protein, 6 aa, synthetic construct
  REGION 1..6: note = Description of Artificial Sequence: Synthetic peptide
LTGFDY

SEQ ID NO: 21481 - DNA, 12 bp, synthetic construct
  misc_feature 1..12: note = Description of Artificial Sequence: Synthetic oligonucleotide
  source 1..12: mol_type = other DNA
ttggggattgac

SEQ ID NO: 21482 - protein, 4 aa, synthetic construct
  REGION 1..4: note = Description of Artificial Sequence: Synthetic peptide
LGID

SEQ ID NO: 21483 - DNA, 27 bp, synthetic construct
  misc_feature 1..27: note = Description of Artificial Sequence: Synthetic oligonucleotide
  source 1..27: mol_type = other DNA
ctggacagtggctggtcgtttgactac

SEQ ID NO: 21484 - protein, 9 aa, synthetic construct
  REGION 1..9: note = Description of Artificial Sequence: Synthetic peptide
LDSGWSFDY

SEQ ID NO: 21485 - DNA, 36 bp, synthetic construct
  misc_feature 1..36: note = Description of Artificial Sequence: Synthetic oligonucleotide
  source 1..36: mol_type = other DNA
tttttcggtatagtgggagccgggtactttgactac

SEQ ID NO: 21486 - protein, 12 aa, synthetic construct
  REGION 1..12: note = Description of Artificial Sequence: Synthetic peptide
FFGIVGAGYFDY

SEQ ID NO: 21487 - DNA, 36 bp, synthetic construct
  misc_feature 1..36: note = Description of Artificial Sequence: Synthetic oligonucleotide
  source 1..36: mol_type = other DNA
ctggggaaggactaccactactacggtatggacgtc

SEQ ID NO: 21488 - protein, 12 aa, synthetic construct
  REGION 1..12: note = Description of Artificial Sequence: Synthetic peptide
LGKDYHYYGMDV

SEQ ID NO: 21489 - DNA, 36 bp, synthetic construct
  misc_feature 1..36: note = Description of Artificial Sequence: Synthetic oligonucleotide
  source 1..36: mol_type = other DNA
aggtatagcagaagctggacgggaggtatggacgtc

SEQ ID NO: 21490 - protein, 12 aa, synthetic construct
  REGION 1..12: note = Description of Artificial Sequence: Synthetic peptide
RYSRSWTGGMDV

SEQ ID NO: 21491 - DNA, 36 bp, synthetic construct
  misc_feature 1..36: note = Description of Artificial Sequence: Synthetic oligonucleotide
  source 1..36: mol_type = other DNA
gagggaaaaactgggggggtttcttactttgactac

SEQ ID NO: 21492 - protein, 12 aa, synthetic construct
  REGION 1..12: note = Description of Artificial Sequence: Synthetic peptide
EGKTGGVSYFDY

SEQ ID NO: 21493 - DNA, 36 bp, synthetic construct; identical to SEQ ID NO: 21491
  misc_feature 1..36: note = Description of Artificial Sequence: Synthetic oligonucleotide
  source 1..36: mol_type = other DNA

SEQ ID NO: 21494 - protein, 12 aa, synthetic construct
  REGION 1..12: note = Description of Artificial Sequence: Synthetic peptide
EGKTGGVSYFDY

SEQ ID NO: 21495 - DNA, 24 bp, synthetic construct
  misc_feature 1..24: note = Description of Artificial Sequence: Synthetic oligonucleotide
  source 1..24: mol_type = other DNA
gatgttctggacccttttgactac

SEQ ID NO: 21496 - protein, 8 aa, synthetic construct
  REGION 1..8: note = Description of Artificial Sequence: Synthetic peptide
DVLDPFDY

SEQ ID NO: 21497 - DNA, 42 bp, synthetic construct; identical to SEQ ID NO: 21211
  misc_feature 1..42: note = Description of Artificial Sequence: Synthetic oligonucleotide
  source 1..42: mol_type = other DNA

SEQ ID NO: 21498 - protein, 14 aa, synthetic construct
  REGION 1..14: note = Description of Artificial Sequence: Synthetic peptide
ERYSSGWYDYGMDV

SEQ ID NO: 21499 - DNA, 36 bp, synthetic construct
  misc_feature 1..36: note = Description of Artificial Sequence: Synthetic oligonucleotide
  source 1..36: mol_type = other DNA
aggtatagcagaagctgggcgggaggcatggacgtc

SEQ ID NO: 21500 - protein, 12 aa, synthetic construct
  REGION 1..12: note = Description of Artificial Sequence: Synthetic peptide
RYSRSWAGGMDV

SEQ ID NO: 21501 - DNA, 27 bp, synthetic construct
  misc_feature 1..27: note = Description of Artificial Sequence: Synthetic oligonucleotide
  source 1..27: mol_type = other DNA
agcagtggctggtaccgctttgactac

SEQ ID NO: 21502 - protein, 9 aa, synthetic construct
  REGION 1..9: note = Description of Artificial Sequence: Synthetic peptide
SSGWYRFDY

SEQ ID NO: 21503 - DNA, 27 bp, synthetic construct
  misc_feature 1..27: note = Description of Artificial Sequence: Synthetic oligonucleotide
  source 1..27: mol_type = other DNA
agcagtggctggtactactttgactac

SEQ ID NO: 21504 - protein, 9 aa, synthetic construct
  REGION 1..9: note = Description of Artificial Sequence: Synthetic peptide
SSGWYYFDY

SEQ ID NO: 21505 - DNA, 36 bp, synthetic construct
  misc_feature 1..36: note = Description of Artificial Sequence: Synthetic oligonucleotide
  source 1..36: mol_type = other DNA
cggggggtctacggtgactttgatgcttttgatatc

SEQ ID NO: 21506 - protein, 12 aa, synthetic construct
  REGION 1..12: note = Description of Artificial Sequence: Synthetic peptide
RGVYGDFDAFDI

SEQ ID NO: 21507 - DNA, 24 bp, synthetic construct
  misc_feature 1..24: note = Description of Artificial Sequence: Synthetic oligonucleotide
  source 1..24: mol_type = other DNA
ttggaactggggatctttgactac

SEQ ID NO: 21508 - protein, 8 aa, synthetic construct
  REGION 1..8: note = Description of Artificial Sequence: Synthetic peptide
LELGIFDY

SEQ ID NO: 21509 - DNA, 12 bp, synthetic construct
  misc_feature 1..12: note = Description of Artificial Sequence: Synthetic oligonucleotide
  source 1..12: mol_type = other DNA
tttggagtggac

SEQ ID NO: 21510 - protein, 4 aa, synthetic construct
  REGION 1..4: note = Description of Artificial Sequence: Synthetic peptide
FGVD

SEQ ID NO: 21511 - DNA, 30 bp, synthetic construct
  misc_feature 1..30: note = Description of Artificial Sequence: Synthetic oligonucleotide
  source 1..30: mol_type = other DNA
gaagacccgcgtaccagctgctctgactac

SEQ ID NO: 21512 - protein, 10 aa, synthetic construct
  REGION 1..10: note = Description of Artificial Sequence: Synthetic peptide
EDPRTSCSDY

SEQ ID NO: 21513 - DNA, 30 bp, synthetic construct
  misc_feature 1..30: note = Description of Artificial Sequence: Synthetic oligonucleotide
  source 1..30: mol_type = other DNA
gataatggtaactggaactaccttgactac

SEQ ID NO: 21514 - protein, 10 aa, synthetic construct
  REGION 1..10: note = Description of Artificial Sequence: Synthetic peptide
DNGNWNYLDY

SEQ ID NO: 21515 - DNA, 27 bp, synthetic construct
  misc_feature 1..27: note = Description of Artificial Sequence: Synthetic oligonucleotide
  source 1..27: mol_type = other DNA
ctgagcagtggctggtcctttgactac

SEQ ID NO: 21516 - protein, 9 aa, synthetic construct
  REGION 1..9: note = Description of Artificial Sequence: Synthetic peptide
LSSGWSFDY

SEQ ID NO: 21517 - DNA, 18 bp, synthetic construct
  misc_feature 1..18: note = Description of Artificial Sequence: Synthetic oligonucleotide
  source 1..18: mol_type = other DNA
gttaactcttttgactcc

SEQ ID NO: 21518 - protein, 6 aa, synthetic construct
  REGION 1..6: note = Description of Artificial Sequence: Synthetic peptide
VNSFDS

SEQ ID NO: 21519 - DNA, 24 bp, synthetic construct
  misc_feature 1..24: note = Description of Artificial Sequence: Synthetic oligonucleotide
  source 1..24: mol_type = other DNA
gagcttgggttcagcagtgactac

SEQ ID NO: 21520 - protein, 8 aa, synthetic construct
  REGION 1..8: note = Description of Artificial Sequence: Synthetic peptide
ELGFSSDY

SEQ ID NO: 21521 - DNA, 36 bp, synthetic construct
  misc_feature 1..36: note = Description of Artificial Sequence: Synthetic oligonucleotide
  source 1..36: mol_type = other DNA
gatcagggcatagtgggagctacttggtttgactac

SEQ ID NO: 21522 - protein, 12 aa, synthetic construct
  REGION 1..12: note = Description of Artificial Sequence: Synthetic peptide
DQGIVGATWFDY

SEQ ID NO: 21523 - DNA, 33 bp, synthetic construct
  misc_feature 1..33: note = Description of Artificial Sequence: Synthetic oligonucleotide
  source 1..33: mol_type = other DNA
ctggggatagactactactacggtatggacgtc

SEQ ID NO: 21524 - protein, 11 aa, synthetic construct
  REGION 1..11: note = Description of Artificial Sequence: Synthetic peptide
LGIDYYYGMDV

SEQ ID NO: 21525 - DNA, 45 bp, synthetic construct
  misc_feature 1..45: note = Description of Artificial Sequence: Synthetic oligonucleotide
  source 1..45: mol_type = other DNA
gctccgggtatagcagcagctggtacatggggatactttgactac

SEQ ID NO: 21526 - protein, 15 aa, synthetic construct
  REGION 1..15: note = Description of Artificial Sequence: Synthetic peptide
APGIAAAGTWGYFDY

SEQ ID NO: 21527 - DNA, 18 bp, synthetic construct
  misc_feature 1..18: note = Description of Artificial Sequence: Synthetic oligonucleotide
  source 1..18: mol_type = other DNA
actacgcactttgactac

SEQ ID NO: 21528 - protein, 6 aa, synthetic construct
  REGION 1..6: note = Description of Artificial Sequence: Synthetic peptide
TTHFDY

SEQ ID NO: 21529 - DNA, 15 bp, synthetic construct
  misc_feature 1..15: note = Description of Artificial Sequence: Synthetic oligonucleotide
  source 1..15: mol_type = other DNA
gatcggggcagcagc

SEQ ID NO: 21530 - protein, 5 aa, synthetic construct
  REGION 1..5: note = Description of Artificial Sequence: Synthetic peptide
DRGSS

SEQ ID NO: 21531 - DNA, 18 bp, synthetic construct
  misc_feature 1..18: note = Description of Artificial Sequence: Synthetic oligonucleotide
  source 1..18: mol_type = other DNA
gtggctggctttgactac

SEQ ID NO: 21532 - protein, 6 aa, synthetic construct
  REGION 1..6: note = Description of Artificial Sequence: Synthetic peptide
VAGFDY

SEQ ID NO: 21533 - DNA, 36 bp, synthetic construct; identical to SEQ ID NO: 21491
  misc_feature 1..36: note = Description of Artificial Sequence: Synthetic oligonucleotide
  source 1..36: mol_type = other DNA

SEQ ID NO: 21534 - protein, 12 aa, synthetic construct
  REGION 1..12: note = Description of Artificial Sequence: Synthetic peptide
EGKTGGVSYFDY

SEQ ID NO: 21535 - DNA, 36 bp, synthetic construct
  misc_feature 1..36: note = Description of Artificial Sequence: Synthetic oligonucleotide
  source 1..36: mol_type = other DNA
gattatggtatagtgggagctacatattttgactac

SEQ ID NO: 21536 - protein, 12 aa, synthetic construct
  REGION 1..12: note = Description of Artificial Sequence: Synthetic peptide
DYGIVGATYFDY

SEQ ID NO: 21537 - DNA, 24 bp, synthetic construct
  misc_feature 1..24: note = Description of Artificial Sequence: Synthetic oligonucleotide
  source 1..24: mol_type = other DNA
gaactggggatgaggtctgactac

SEQ ID NO: 21538 - protein, 8 aa, synthetic construct
  REGION 1..8: note = Description of Artificial Sequence: Synthetic peptide
ELGMRSDY

SEQ ID NO: 21539 - DNA, 27 bp, synthetic construct
  misc_feature 1..27: note = Description of Artificial Sequence: Synthetic oligonucleotide
  source 1..27: mol_type = other DNA
agggactggaacgacgtttttgactac

SEQ ID NO: 21540 - protein, 9 aa, synthetic construct
  REGION 1..9: note = Description of Artificial Sequence: Synthetic peptide
RDWNDVFDY

SEQ ID NO: 21541 - DNA, 12 bp, synthetic construct
  misc_feature 1..12: note = Description of Artificial Sequence: Synthetic oligonucleotide
  source 1..12: mol_type = other DNA
gatatgattacg

SEQ ID NO: 21542 - protein, 4 aa, synthetic construct
  REGION 1..4: note = Description of Artificial Sequence: Synthetic peptide
DMIT

SEQ ID NO: 21543 - DNA, 24 bp, synthetic construct
  misc_feature 1..24: note = Description of Artificial Sequence: Synthetic oligonucleotide
  source 1..24: mol_type = other DNA
gatgggagaagtggttttgactac

SEQ ID NO: 21544 - protein, 8 aa, synthetic construct
  REGION 1..8: note = Description of Artificial Sequence: Synthetic peptide
DGRSGFDY

SEQ ID NO: 21545 - DNA, 36 bp, synthetic construct
  misc_feature 1..36: note = Description of Artificial Sequence: Synthetic oligonucleotide
  source 1..36: mol_type = other DNA
tttttcggtgtagtgggagtcgggtgctttgactac

SEQ ID NO: 21546 - protein, 12 aa, synthetic construct
  REGION 1..12: note = Description of Artificial Sequence: Synthetic peptide
FFGVVGVGCFDY

SEQ ID NO: 21547 - DNA, 24 bp, synthetic construct
  misc_feature 1..24: note = Description of Artificial Sequence: Synthetic oligonucleotide
  source 1..24: mol_type = other DNA
ttggaactggggatctttgactac

SEQ ID NO: 21548 - protein, 8 aa, synthetic construct
  REGION 1..8: note = Description of Artificial Sequence: Synthetic peptide
LELGIFDY

SEQ ID NO: 21549 - DNA, 36 bp, synthetic construct; identical to SEQ ID NO: 21487
  misc_feature 1..36: note = Description of Artificial Sequence: Synthetic oligonucleotide
  source 1..36: mol_type = other DNA

SEQ ID NO: 21550 - protein, 12 aa, synthetic construct
  REGION 1..12: note = Description of Artificial Sequence: Synthetic peptide
LGKDYHYYGMDV

SEQ ID NO: 21551 - DNA, 27 bp, synthetic construct
  misc_feature 1..27: note = Description of Artificial Sequence: Synthetic oligonucleotide
  source 1..27: mol_type = other DNA
agcagtggctggaactggttcgacccc

SEQ ID NO: 21552 - protein, 9 aa, synthetic construct
  REGION 1..9: note = Description of Artificial Sequence: Synthetic peptide
SSGWNWFDP

SEQ ID NO: 21553 - DNA, 27 bp, synthetic construct
  misc_feature 1..27: note = Description of Artificial Sequence: Synthetic oligonucleotide
  source 1..27: mol_type = other DNA
agcagtggctggtaccggttcgacccc

SEQ ID NO: 21554 - protein, 9 aa, synthetic construct
  REGION 1..9: note = Description of Artificial Sequence: Synthetic peptide
SSGWYRFDP

SEQ ID NO: 21555 - DNA, 36 bp, synthetic construct
  misc_feature 1..36: note = Description of Artificial Sequence: Synthetic oligonucleotide
  source 1..36: mol_type = other DNA
tttttcggtatagtgggtgccgggtactttgactac

SEQ ID NO: 21556 - protein, 12 aa, synthetic construct
  REGION 1..12: note = Description of Artificial Sequence: Synthetic peptide
FFGIVGAGYFDY

SEQ ID NO: 21557 - DNA, 36 bp, synthetic construct
  misc_feature 1..36: note = Description of Artificial Sequence: Synthetic oligonucleotide
  source 1..36: mol_type = other DNA
tttttcggtatagtgggagccgggttctttgactcc

SEQ ID NO: 21558 - protein, 12 aa, synthetic construct
  REGION 1..12: note = Description of Artificial Sequence: Synthetic peptide
FFGIVGAGFFDS

SEQ ID NO: 21559 - DNA, 24 bp, synthetic construct
  misc_feature 1..24: note = Description of Artificial Sequence: Synthetic oligonucleotide
  source 1..24: mol_type = other DNA
gaactggggatgaggtctgactac

SEQ ID NO: 21560 - protein, 8 aa, synthetic construct
  REGION 1..8: note = Description of Artificial Sequence: Synthetic peptide
ELGMRSDY

SEQ ID NO: 21561 - DNA, 27 bp, synthetic construct
  misc_feature 1..27: note = Description of Artificial Sequence: Synthetic oligonucleotide
  source 1..27: mol_type = other DNA
agcagtggctggtactactttgactac

SEQ ID NO: 21562 - protein, 9 aa, synthetic construct
  REGION 1..9: note = Description of Artificial Sequence: Synthetic peptide
SSGWYYFDY

SEQ ID NO: 21563 - DNA, 36 bp, synthetic construct; identical to SEQ ID NO: 21485
  misc_feature 1..36: note = Description of Artificial Sequence: Synthetic oligonucleotide
  source 1..36: mol_type = other DNA

SEQ ID NO: 21564 - protein, 12 aa, synthetic construct
  REGION 1..12: note = Description of Artificial Sequence: Synthetic peptide
FFGIVGAGYFDY

SEQ ID NO: 21565 - DNA, 21 bp, synthetic construct
  misc_feature 1..21: note = Description of Artificial Sequence: Synthetic oligonucleotide
  source 1..21: mol_type = other DNA
gatcgggtcacttttgactac

SEQ ID NO: 21566 - protein, 7 aa, synthetic construct
  REGION 1..7: note = Description of Artificial Sequence: Synthetic peptide
DRVTFDY

SEQ ID NO: 21567 - DNA, 36 bp, synthetic construct
  misc_feature 1..36: note = Description of Artificial Sequence: Synthetic oligonucleotide
  source 1..36: mol_type = other DNA
tttttcggtatggtgggagccggattctttgactac

SEQ ID NO: 21568 - protein, 12 aa, synthetic construct
  REGION 1..12: note = Description of Artificial Sequence: Synthetic peptide
FFGMVGAGFFDY

SEQ ID NO: 21569 - DNA, 36 bp, synthetic construct; identical to SEQ ID NO: 21467
  misc_feature 1..36: note = Description of Artificial Sequence: Synthetic oligonucleotide
  source 1..36: mol_type = other DNA

SEQ ID NO: 21570 - protein, 12 aa, synthetic construct
  REGION 1..12: note = Description of Artificial Sequence: Synthetic peptide
RYSSSWDGGMDV

SEQ ID NO: 21571 - DNA, 27 bp, synthetic construct
  misc_feature 1..27: note = Description of Artificial Sequence: Synthetic oligonucleotide
  source 1..27: mol_type = other DNA
agcagtggctggtacttctttgactac

SEQ ID NO: 21572 - protein, 9 aa, synthetic construct
  REGION 1..9: note = Description of Artificial Sequence: Synthetic peptide
SSGWYFFDY

SEQ ID NO: 21573 - DNA, 21 bp, synthetic construct
  misc_feature 1..21: note = Description of Artificial Sequence: Synthetic oligonucleotide
  source 1..21: mol_type = other DNA
gatccggggccctttgactac

SEQ ID NO: 21574 - protein, 7 aa, synthetic construct
  REGION 1..7: note = Description of Artificial Sequence: Synthetic peptide
DPGPFDY

SEQ ID NO: 21575 - DNA, 36 bp, synthetic construct
  misc_feature 1..36: note = Description of Artificial Sequence: Synthetic oligonucleotide
  source 1..36: mol_type = other DNA
aggggggtctacggtgactacgaggcttttgatatc

SEQ ID NO: 21576 - protein, 12 aa, synthetic construct
  REGION 1..12: note = Description of Artificial Sequence: Synthetic peptide
RGVYGDYEAFDI

SEQ ID NO: 21577 - DNA, 39 bp, synthetic construct
  misc_feature 1..39: note = Description of Artificial Sequence: Synthetic oligonucleotide
  source 1..39: mol_type = other DNA
gagaggggtatagcagtggggtactacggtatggacgtc

SEQ ID NO: 21578 - protein, 13 aa, synthetic construct
  REGION 1..13: note = Description of Artificial Sequence: Synthetic peptide
ERGIAVGYYGMDV

SEQ ID NO: 21579 - DNA, 27 bp, synthetic construct
  misc_feature 1..27: note = Description of Artificial Sequence: Synthetic oligonucleotide
  source 1..27: mol_type = other DNA
catagcagcagctggtcccttgactac

SEQ ID NO: 21580 - protein, 9 aa, synthetic construct
  REGION 1..9: note = Description of Artificial Sequence: Synthetic peptide
HSSSWSLDY

SEQ ID NO: 21581 - DNA, 48 bp, synthetic construct
  misc_feature 1..48: note = Description of Artificial Sequence: Synthetic oligonucleotide
  source 1..48: mol_type = other DNA
gggggcctactgggagctaccaactactactactacggtatggacgtc

SEQ ID NO: 21582 - protein, 16 aa, synthetic construct
  REGION 1..16: note = Description of Artificial Sequence: Synthetic peptide
GGLLGATNYYYYGMDV

SEQ ID NO: 21583 - DNA, 36 bp, synthetic construct
  misc_feature 1..36: note = Description of Artificial Sequence: Synthetic oligonucleotide
  source 1..36: mol_type = other DNA
gaatggggaatggcagtggctggcccgtttgactac

SEQ ID NO: 21584 - protein, 12 aa, synthetic construct
  REGION 1..12: note = Description of Artificial Sequence: Synthetic peptide
EWGMAVAGPFDY

SEQ ID NO: 21585 - DNA, 48 bp, synthetic construct
  misc_feature 1..48: note = Description of Artificial Sequence: Synthetic oligonucleotide
  source 1..48: mol_type = other DNA
gggggcctactgggagctacctactactactactacggtatggacgtc

SEQ ID NO: 21586 - protein, 16 aa, synthetic construct
  REGION 1..16: note = Description of Artificial Sequence: Synthetic peptide
GGLLGATYYYYYGMDV

SEQ ID NO: 21587 - DNA, 27 bp, synthetic construct
  misc_feature 1..27: note = Description of Artificial Sequence: Synthetic oligonucleotide
  source 1..27: mol_type = other DNA
agcagtggctggtactactttgactac

SEQ ID NO: 21588 - protein, 9 aa, synthetic construct
  REGION 1..9: note = Description of Artificial Sequence: Synthetic peptide
SSGWYYFDY

SEQ ID NO: 21589 - DNA, 30 bp, synthetic construct; identical to SEQ ID NO: 21511
  misc_feature 1..30: note = Description of Artificial Sequence: Synthetic oligonucleotide
  source 1..30: mol_type = other DNA

SEQ ID NO: 21590 - protein, 10 aa, synthetic construct
  REGION 1..10: note = Description of Artificial Sequence: Synthetic peptide
EDPRTSCSDY

SEQ ID NO: 21591 - DNA, 36 bp, synthetic construct
  misc_feature 1..36: note = Description of Artificial Sequence: Synthetic oligonucleotide
  source 1..36: mol_type = other DNA
gatagcctctcgggtatagcagcagcttttgactac

SEQ ID NO: 21592 - protein, 12 aa, synthetic construct
  REGION 1..12: note = Description of Artificial Sequence: Synthetic peptide
DSLSGIAAAFDY

SEQ ID NO: 21593 - DNA, 18 bp, synthetic construct
  misc_feature 1..18: note = Description of Artificial Sequence: Synthetic oligonucleotide
  source 1..18: mol_type = other DNA
ctacgtaattttgactac

SEQ ID NO: 21594 - protein, 6 aa, synthetic construct
  REGION 1..6: note = Description of Artificial Sequence: Synthetic peptide
LRNFDY

SEQ ID NO: 21595 - DNA, 45 bp, synthetic construct
  misc_feature 1..45: note = Description of Artificial Sequence: Synthetic oligonucleotide
  source 1..45: mol_type = other DNA
gctccgggtgtagcagcagctggttcatggggatactttgactac

SEQ ID NO: 21596 - protein, 15 aa, synthetic construct
  REGION 1..15: note = Description of Artificial Sequence: Synthetic peptide
APGVAAAGSWGYFDY

SEQ ID NO: 21597 - DNA, 30 bp, synthetic construct
  misc_feature 1..30: note = Description of Artificial Sequence: Synthetic oligonucleotide
  source 1..30: mol_type = other DNA
gatgatcccagatcctcggccggggactac

SEQ ID NO: 21598 - protein, 10 aa, synthetic construct
  REGION 1..10: note = Description of Artificial Sequence: Synthetic peptide
DDPRSSAGDY

SEQ ID NO: 21599 - DNA, 24 bp, synthetic construct
  misc_feature 1..24: note = Description of Artificial Sequence: Synthetic oligonucleotide
  source 1..24: mol_type = other DNA
gagcttgggttcagcagtgactat

SEQ ID NO: 21600 - protein, 8 aa, synthetic construct
  REGION 1..8: note = Description of Artificial Sequence: Synthetic peptide
ELGFSSDY

SEQ ID NO: 21601 - DNA, 42 bp, synthetic construct
  misc_feature 1..42: note = Description of Artificial Sequence: Synthetic oligonucleotide
  source 1..42: mol_type = other DNA
gaaaggtatagcagcagctggtacgactacggtatggacgtc

SEQ ID NO: 21602 - protein, 14 aa, synthetic construct
  REGION 1..14: note = Description of Artificial Sequence: Synthetic peptide
ERYSSSWYDYGMDV

SEQ ID NO: 21603 - DNA, 24 bp, synthetic construct
  misc_feature 1..24: note = Description of Artificial Sequence: Synthetic oligonucleotide
  source 1..24: mol_type = other DNA
tttagcagtggcttttttgactac

SEQ ID NO: 21604 - protein, 8 aa, synthetic construct
  REGION 1..8: note = Description of Artificial Sequence: Synthetic peptide
FSSGFFDY

SEQ ID NO: 21605 - DNA, 42 bp, synthetic construct
  misc_feature 1..42: note = Description of Artificial Sequence: Synthetic oligonucleotide
  source 1..42: mol_type = other DNA
gaacggtatagcagtggctggtacgactacggtatggacgtc

SEQ ID NO: 21606 - protein, 14 aa, synthetic construct
  REGION 1..14: note = Description of Artificial Sequence: Synthetic peptide
ERYSSGWYDYGMDV

SEQ ID NO: 21607 - DNA, 36 bp, synthetic construct
  misc_feature 1..36: note = Description of Artificial Sequence: Synthetic oligonucleotide
  source 1..36: mol_type = other DNA
gatacatacgatttttggagtggttatttgggctac

SEQ ID NO: 21608 - protein, 12 aa, synthetic construct
  REGION 1..12: note = Description of Artificial Sequence: Synthetic peptide
DTYDFWSGYLGY

SEQ ID NO: 21609 - DNA, 45 bp, synthetic construct
  misc_feature 1..45: note = Description of Artificial Sequence: Synthetic oligonucleotide
  source 1..45: mol_type = other DNA
gctccgggtactgcagcaactggtacatggggatactttgactac

SEQ ID NO: 21610 - protein, 15 aa, synthetic construct
  REGION 1..15: note = Description of Artificial Sequence: Synthetic peptide
APGTAATGTWGYFDY

SEQ ID NO: 21611 - DNA, 24 bp, synthetic construct
  misc_feature 1..24: note = Description of Artificial Sequence: Synthetic oligonucleotide
  source 1..24: mol_type = other DNA
gaactcgggttcctctctgaccac

SEQ ID NO: 21612 - protein, 8 aa, synthetic construct
  REGION 1..8: note = Description of Artificial Sequence: Synthetic peptide
ELGFLSDH

SEQ ID NO: 21613 - DNA, 27 bp, synthetic construct
  misc_feature 1..27: note = Description of Artificial Sequence: Synthetic oligonucleotide
  source 1..27: mol_type = other DNA
ctggacagtggctggtcctttgactac

SEQ ID NO: 21614 - protein, 9 aa, synthetic construct
  REGION 1..9: note = Description of Artificial Sequence: Synthetic peptide
LDSGWSFDY

SEQ ID NO: 21615 - DNA, 27 bp, synthetic construct
  misc_feature 1..27: note = Description of Artificial Sequence: Synthetic oligonucleotide
  source 1..27: mol_type = other DNA
aggaactacgacgatgcttttgatatc

SEQ ID NO: 21616 - protein, 9 aa, synthetic construct
  REGION 1..9: note = Description of Artificial Sequence: Synthetic peptide
RNYDDAFDI

SEQ ID NO: 21617 - DNA, 24 bp, synthetic construct
  misc_feature 1..24: note = Description of Artificial Sequence: Synthetic oligonucleotide
  source 1..24: mol_type = other DNA
gaacttgggttcagcagtgactac

SEQ ID NO: 21618 - protein, 8 aa, synthetic construct
  REGION 1..8: note = Description of Artificial Sequence: Synthetic peptide
ELGFSSDY

SEQ ID NO: 21619 - DNA, 45 bp, synthetic construct
  misc_feature 1..45: note = Description of Artificial Sequence: Synthetic oligonucleotide
  source 1..45: mol_type = other DNA
gctccgggtaaagcagcagctggtacatggggatactttgactac

SEQ ID NO: 21620 - protein, 15 aa, synthetic construct
  REGION 1..15: note = Description of Artificial Sequence: Synthetic peptide
APGKAAAGTWGYFDY

SEQ ID NO: 21621 - DNA, 27 bp, synthetic construct
  misc_feature 1..27: note = Description of Artificial Sequence: Synthetic oligonucleotide
  source 1..27: mol_type = other DNA
ggggaagcagtggctgtcttcgacccc

SEQ ID NO: 21622 - protein, 9 aa, synthetic construct
  REGION 1..9: note = Description of Artificial Sequence: Synthetic peptide
GEAVAVFDP

SEQ ID NO: 21623 - DNA, 36 bp, synthetic construct; identical to SEQ ID NO: 21521
  misc_feature 1..36: note = Description of Artificial Sequence: Synthetic oligonucleotide
  source 1..36: mol_type = other DNA

SEQ ID NO: 21624 - protein, 12 aa, synthetic construct
  REGION 1..12: note = Description of Artificial Sequence: Synthetic peptide
DQGIVGATWFDY

SEQ ID NO: 21625 - DNA, 12 bp, synthetic construct
  misc_feature 1..12: note = Description of Artificial Sequence: Synthetic oligonucleotide
  source 1..12: mol_type = other DNA
acaagtgggagc

SEQ ID NO: 21626 - protein, 4 aa, synthetic construct
  REGION 1..4: note = Description of Artificial Sequence: Synthetic peptide
TSGS

SEQ ID NO: 21627 - DNA, 45 bp, synthetic construct
  misc_feature 1..45: note = Description of Artificial Sequence: Synthetic oligonucleotide
  source 1..45: mol_type = other DNA
gctccgggtacagcagcagctggtacatggggatactttgactac

SEQ ID NO: 21628 - protein, 15 aa, synthetic construct
  REGION 1..15: note = Description of Artificial Sequence: Synthetic peptide
APGTAAAGTWGYFDY

SEQ ID NO: 21629 - DNA, 45 bp, synthetic construct
  misc_feature 1..45: note = Description of Artificial Sequence: Synthetic oligonucleotide
  source 1..45: mol_type = other DNA
gctccgggcacagtagcagctggtacatggggatactttgactat

SEQ ID NO: 21630 - protein, 15 aa, synthetic construct
  REGION 1..15: note = Description of Artificial Sequence: Synthetic peptide
APGTVAAGTWGYFDY

SEQ ID NO: 21631 - DNA, 24 bp, synthetic construct
  misc_feature 1..24: note = Description of Artificial Sequence: Synthetic oligonucleotide
  source 1..24: mol_type = other DNA
gaacttgggttcagcagtgactac

SEQ ID NO: 21632 - protein, 8 aa, synthetic construct
  REGION 1..8: note = Description of Artificial Sequence: Synthetic peptide
ELGFSSDY

SEQ ID NO: 21633 - DNA, 30 bp, synthetic construct
  misc_feature 1..30: note = Description of Artificial Sequence: Synthetic oligonucleotide
  source 1..30: mol_type = other DNA
gaagacccgcgtaccagttgttctgactac

SEQ ID NO: 21634 - protein, 10 aa, synthetic construct
  REGION 1..10: note = Description of Artificial Sequence: Synthetic peptide
EDPRTSCSDY

SEQ ID NO: 21635 - DNA, 18 bp, synthetic construct
  misc_feature 1..18: note = Description of Artificial Sequence: Synthetic oligonucleotide
  source 1..18: mol_type = other DNA
accaatgcttttgatatc

SEQ ID NO: 21636 - protein, 6 aa, synthetic construct
  REGION 1..6: note = Description of Artificial Sequence: Synthetic peptide
TNAFDI

SEQ ID NO: 21637 - DNA, 33 bp, synthetic construct; identical to SEQ ID NO: 21523
  misc_feature 1..33: note = Description of Artificial Sequence: Synthetic oligonucleotide
  source 1..33: mol_type = other DNA

SEQ ID NO: 21638 - protein, 11 aa, synthetic construct
  REGION 1..11: note = Description of Artificial Sequence: Synthetic peptide
LGIDYYYGMDV

SEQ ID NO: 21639 - DNA, 42 bp, synthetic construct
  misc_feature 1..42: note = Description of Artificial Sequence: Synthetic oligonucleotide
  source 1..42: mol_type = other DNA
gagatgtatagcagcaactggtacgactacggtttggacgtc

SEQ ID NO: 21640 - protein, 14 aa, synthetic construct
  REGION 1..14: note = Description of Artificial Sequence: Synthetic peptide
EMYSSNWYDYGLDV

SEQ ID NO: 21641 - DNA, 24 bp, synthetic construct
  misc_feature 1..24: note = Description of Artificial Sequence: Synthetic oligonucleotide
  source 1..24: mol_type = other DNA
gatagtagaagttcgtgggactac

SEQ ID NO: 21642 - protein, 8 aa, synthetic construct
  REGION 1..8: note = Description of Artificial Sequence: Synthetic peptide
DSRSSWDY

SEQ ID NO: 21643 - DNA, 36 bp, synthetic construct; identical to SEQ ID NO: 21521
  misc_feature 1..36: note = Description of Artificial Sequence: Synthetic oligonucleotide
  source 1..36: mol_type = other DNA

SEQ ID NO: 21644 - protein, 12 aa, synthetic construct
  REGION 1..12: note = Description of Artificial Sequence: Synthetic peptide
DQGIVGATWFDY

SEQ ID NO: 21645 - DNA, 45 bp, synthetic construct; identical to SEQ ID NO: 21609
  misc_feature 1..45: note = Description of Artificial Sequence: Synthetic oligonucleotide
  source 1..45: mol_type = other DNA

SEQ ID NO: 21646 - protein, 15 aa, synthetic construct
  REGION 1..15: note = Description of Artificial Sequence: Synthetic peptide
APGTAATGTWGYFDY

SEQ ID NO: 21647 - DNA, 21 bp, synthetic construct
  misc_feature 1..21: note = Description of Artificial Sequence: Synthetic oligonucleotide
  source 1..21: mol_type = other DNA
agtatcccggaatttgactat

SEQ ID NO: 21648 - protein, 7 aa, synthetic construct
  REGION 1..7: note = Description of Artificial Sequence: Synthetic peptide
SIPEFDY

SEQ ID NO: 21649 - DNA, 24 bp, synthetic construct
  misc_feature 1..24: note = Description of Artificial Sequence: Synthetic oligonucleotide
  source 1..24: mol_type = other DNA
tctagtgggagcccctttgactac

SEQ ID NO: 21650 - protein, 8 aa, synthetic construct
  REGION 1..8: note = Description of Artificial Sequence: Synthetic peptide
SSGSPFDY

SEQ ID NO: 21651 - DNA, 18 bp, synthetic construct
  misc_feature 1..18: note = Description of Artificial Sequence: Synthetic oligonucleotide
  source 1..18: mol_type = other DNA
gtcaacagctttgactcc

SEQ ID NO: 21652 - protein, 6 aa, synthetic construct
  REGION 1..6: note = Description of Artificial Sequence: Synthetic peptide
VNSFDS

SEQ ID NO: 21653 - DNA, 24 bp, synthetic construct
  misc_feature 1..24: note = Description of Artificial Sequence: Synthetic oligonucleotide
  source 1..24: mol_type = other DNA
gaactggggatgacctctgactgc

SEQ ID NO: 21654 - protein, 8 aa, synthetic construct
  REGION 1..8: note = Description of Artificial Sequence: Synthetic peptide
ELGMTSDC

SEQ ID NO: 21655 - DNA, 27 bp, synthetic construct
  misc_feature 1..27: note = Description of Artificial Sequence: Synthetic oligonucleotide
  source 1..27: mol_type = other DNA
catagcaccagctggtccattgactac

SEQ ID NO: 21656 - protein, 9 aa, synthetic construct
  REGION 1..9: note = Description of Artificial Sequence: Synthetic peptide
HSTSWSIDY

SEQ ID NO: 21657 - DNA, 30 bp, synthetic construct
  misc_feature 1..30: note = Description of Artificial Sequence: Synthetic oligonucleotide
  source 1..30: mol_type = other DNA
gatatccctagcaactcggcgggggactac

SEQ ID NO: 21658 - protein, 10 aa, synthetic construct
  REGION 1..10: note = Description of Artificial Sequence: Synthetic peptide
DIPSNSAGDY

SEQ ID NO: 21659 - DNA, 24 bp, synthetic construct
  misc_feature 1..24: note = Description of Artificial Sequence: Synthetic oligonucleotide
  source 1..24: mol_type = other DNA
gatagcatatcgtcgtgggactac

SEQ ID NO: 21660 - protein, 8 aa, synthetic construct
  REGION 1..8: note = Description of Artificial Sequence: Synthetic peptide
DSISSWDY

SEQ ID NO: 21661 - DNA, 36 bp, synthetic construct; identical to SEQ ID NO: 21521
  misc_feature 1..36: note = Description of Artificial Sequence: Synthetic oligonucleotide
  source 1..36: mol_type = other DNA

SEQ ID NO: 21662 - protein, 12 aa, synthetic construct
  REGION 1..12: note = Description of Artificial Sequence: Synthetic peptide
DQGIVGATWFDY

SEQ ID NO: 21663 - DNA, 45 bp, synthetic construct
  misc_feature 1..45: note = Description of Artificial Sequence: Synthetic oligonucleotide
  source 1..45: mol_type = other DNA
gctccgggtaaagcagcagctggtacatggggattctttgactac

SEQ ID NO: 21664 - protein, 15 aa, synthetic construct
  REGION 1..15: note = Description of Artificial Sequence: Synthetic peptide
APGKAAAGTWGFFDY

SEQ ID NO: 21665 - DNA, 30 bp, synthetic construct; identical to SEQ ID NO: 21597
  misc_feature 1..30: note = Description of Artificial Sequence: Synthetic oligonucleotide
  source 1..30: mol_type = other DNA

SEQ ID NO: 21666 - protein, 10 aa, synthetic construct
  REGION 1..10: note = Description of Artificial Sequence: Synthetic peptide
DDPRSSAGDY

SEQ ID NO: 21667 - DNA, 27 bp, synthetic construct
  misc_feature 1..27: note = Description of Artificial Sequence: Synthetic oligonucleotide
  source 1..27: mol_type = other DNA
agcagtggctggtacgtctttgactac

SEQ ID NO: 21668 - protein, 9 aa, synthetic construct
  REGION 1..9: note = Description of Artificial Sequence: Synthetic peptide
SSGWYVFDY

SEQ ID NO: 21669 - DNA, 24 bp, synthetic construct
  misc_feature 1..24: note = Description of Artificial Sequence: Synthetic oligonucleotide
  source 1..24: mol_type = other DNA
gacctactggacccacgggactac

SEQ ID NO: 21670 - protein, 8 aa, synthetic construct
  REGION 1..8: note = Description of Artificial Sequence: Synthetic peptide
DLLDPRDY

SEQ ID NO: 21671 - DNA, 45 bp, synthetic construct; identical to SEQ ID NO: 21525
  misc_feature 1..45: note = Description of Artificial Sequence: Synthetic oligonucleotide
  source 1..45: mol_type = other DNA

SEQ ID NO: 21672 - protein, 15 aa, synthetic construct
  REGION 1..15: note = Description of Artificial Sequence: Synthetic peptide
APGIAAAGTWGYFDY

SEQ ID NO: 21673 - DNA, 45 bp, synthetic construct; identical to SEQ ID NO: 21609
  misc_feature 1..45: note = Description of Artificial Sequence: Synthetic oligonucleotide
  source 1..45: mol_type = other DNA

SEQ ID NO: 21674 - protein, 15 aa, synthetic construct
  REGION 1..15: note = Description of Artificial Sequence: Synthetic peptide
APGTAATGTWGYFDY

SEQ ID NO: 21675 - DNA, 18 bp, synthetic construct
  misc_feature 1..18: note = Description of Artificial Sequence: Synthetic oligonucleotide
  source 1..18: mol_type = other DNA
gtggccgcctttgactgc

SEQ ID NO: 21676 - protein, 6 aa, synthetic construct
  REGION 1..6: note = Description of Artificial Sequence: Synthetic peptide
VAAFDC

SEQ ID NO: 21677 - DNA, 24 bp, synthetic construct
  misc_feature 1..24: note = Description of Artificial Sequence: Synthetic oligonucleotide
  source 1..24: mol_type = other DNA
gaattggggtggcaggatgattac

SEQ ID NO: 21678 - protein, 8 aa, synthetic construct
  REGION 1..8: note = Description of Artificial Sequence: Synthetic peptide
ELGWQDDY

SEQ ID NO: 21679 - DNA, 27 bp, synthetic construct
  misc_feature 1..27: note = Description of Artificial Sequence: Synthetic oligonucleotide
  source 1..27: mol_type = other DNA
agcagtggctggtactactttgactac

SEQ ID NO: 21680 - protein, 9 aa, synthetic construct
  REGION 1..9: note = Description of Artificial Sequence: Synthetic peptide
SSGWYYFDY

SEQ ID NO: 21681 - DNA, 24 bp, synthetic construct
  misc_feature 1..24: note = Description of Artificial Sequence: Synthetic oligonucleotide
  source 1..24: mol_type = other DNA
gaactggggatgttgtctgactac

SEQ ID NO: 21682 - protein, 8 aa, synthetic construct
  REGION 1..8: note = Description of Artificial Sequence: Synthetic peptide
ELGMLSDY

SEQ ID NO: 21683 - DNA, 18 bp, synthetic construct
  misc_feature 1..18: note = Description of Artificial Sequence: Synthetic oligonucleotide
  source 1..18: mol_type = other DNA
accaatgcttttgatatc

SEQ ID NO: 21684 - protein, 6 aa, synthetic construct
  REGION 1..6: note = Description of Artificial Sequence: Synthetic peptide
TNAFDI

SEQ ID NO: 21685 - DNA, 45 bp, synthetic construct; identical to SEQ ID NO: 21663
  misc_feature 1..45: note = Description of Artificial Sequence: Synthetic oligonucleotide
  source 1..45: mol_type = other DNA

SEQ ID NO: 21686 - protein, 15 aa, synthetic construct
  REGION 1..15: note = Description of Artificial Sequence: Synthetic peptide
APGKAAAGTWGFFDY

SEQ ID NO: 21687 - DNA, 24 bp, synthetic construct
  misc_feature 1..24: note = Description of Artificial Sequence: Synthetic oligonucleotide
  source 1..24: mol_type = other DNA
gaactggggatgttgtctgactac

SEQ ID NO: 21688 - protein, 8 aa, synthetic construct
  REGION 1..8: note = Description of Artificial Sequence: Synthetic peptide
ELGMLSDY

SEQ ID NO: 21689 - DNA, 36 bp, synthetic construct
  misc_feature 1..36: note = Description of Artificial Sequence: Synthetic oligonucleotide
  source 1..36: mol_type = other DNA
cgtatagcagtgactgggacggaatggtacgacccc

SEQ ID NO: 21690 - protein, 12 aa, synthetic construct
  REGION 1..12: note = Description of Artificial Sequence: Synthetic peptide
RIAVTGTEWYDP

SEQ ID NO: 21691 - DNA, 24 bp, synthetic construct
  misc_feature 1..24: note = Description of Artificial Sequence: Synthetic oligonucleotide
  source 1..24: mol_type = other DNA
gagcttggtttcagcagtgactac

SEQ ID NO: 21692 - protein, 8 aa, synthetic construct
  REGION 1..8: note = Description of Artificial Sequence: Synthetic peptide
ELGFSSDY

SEQ ID NO: 21693 - DNA, 45 bp, synthetic construct
  misc_feature 1..45: note = Description of Artificial Sequence: Synthetic oligonucleotide
  source 1..45: mol_type = other DNA
gctccgggtacagcaccagctgggtcatggggatactttgactac

SEQ ID NO: 21694 - protein, 15 aa, synthetic construct
  REGION 1..15: note = Description of Artificial Sequence: Synthetic peptide
APGTAPAGSWGYFDY

SEQ ID NO: 21695 - DNA, 45 bp, synthetic construct
  misc_feature 1..45: note = Description of Artificial Sequence: Synthetic oligonucleotide
  source 1..45: mol_type = other DNA
gctccgggtacagcagcagctgggtcatggggatgctttgactac

SEQ ID NO: 21696 - protein, 15 aa, synthetic construct
  REGION 1..15: note = Description of Artificial Sequence: Synthetic peptide
APGTAAAGSWGCFDY

SEQ ID NO: 21697 - DNA, 21 bp, synthetic construct
  misc_feature 1..21: note = Description of Artificial Sequence: Synthetic oligonucleotide
  source 1..21: mol_type = other DNA
agtatcccggactttgactac

SEQ ID NO: 21698 - protein, 7 aa, synthetic construct
  REGION 1..7: note = Description of Artificial Sequence: Synthetic peptide
SIPDFDY

SEQ ID NO: 21699 - DNA, 42 bp, synthetic construct
  misc_feature 1..42: note = Description of Artificial Sequence: Synthetic oligonucleotide
  source 1..42: mol_type = other DNA
tgggatagcagcagctggtacgacgtgactccctttgactac

SEQ ID NO: 21700 - protein, 14 aa, synthetic construct
  REGION 1..14: note = Description of Artificial Sequence: Synthetic peptide
WDSSSWYDVTPFDY

SEQ ID NO: 21701 - DNA, 42 bp, synthetic construct
  misc_feature 1..42: note = Description of Artificial Sequence: Synthetic oligonucleotide
  source 1..42: mol_type = other DNA
gaaaggtatagcagcagctggttcgactacggtatggacgtc

SEQ ID NO: 21702 - protein, 14 aa, synthetic construct
  REGION 1..14: note = Description of Artificial Sequence: Synthetic peptide
ERYSSSWFDYGMDV

SEQ ID NO: 21703 - DNA, 21 bp, synthetic construct
  misc_feature 1..21: note = Description of Artificial Sequence: Synthetic oligonucleotide
  source 1..21: mol_type = other DNA
gactacggtggccttgactac

SEQ ID NO: 21704 - protein, 7 aa, synthetic construct
  REGION 1..7: note = Description of Artificial Sequence: Synthetic peptide
DYGGLDY

SEQ ID NO: 21705 - DNA, 21 bp, synthetic construct
  misc_feature 1..21: note = Description of Artificial Sequence: Synthetic oligonucleotide
  source 1..21: mol_type = other DNA
gactacggcggtatggacgtc

SEQ ID NO: 21706 - protein, 7 aa, synthetic construct
  REGION 1..7: note = Description of Artificial Sequence: Synthetic peptide
DYGGMDV

SEQ ID NO: 21707 - DNA, 27 bp, synthetic construct
  misc_feature 1..27: note = Description of Artificial Sequence: Synthetic oligonucleotide
  source 1..27: mol_type = other DNA
agcagtggctggaacttctttgactac

SEQ ID NO: 21708 - protein, 9 aa, synthetic construct
  REGION 1..9: note = Description of Artificial Sequence: Synthetic peptide
SSGWNFFDY

SEQ ID NO: 21709 - DNA, 27 bp, synthetic construct
  misc_feature 1..27: note = Description of Artificial Sequence: Synthetic oligonucleotide
  source 1..27: mol_type = other DNA
agcagtggctggtactactttgactac

SEQ ID NO: 21710 - protein, 9 aa, synthetic construct
  REGION 1..9: note = Description of Artificial Sequence: Synthetic peptide
SSGWYYFDY

SEQ ID NO: 21711 - DNA, 27 bp, synthetic construct
  misc_feature 1..27: note = Description of Artificial Sequence: Synthetic oligonucleotide
  source 1..27: mol_type = other DNA
agtagtggctggtactggttcgacccc

SEQ ID NO: 21712 - protein, 9 aa, synthetic construct
  REGION 1..9: note = Description of Artificial Sequence: Synthetic peptide
SSGWYWFDP

SEQ ID NO: 21713 - DNA, 27 bp, synthetic construct
  misc_feature 1..27: note = Description of Artificial Sequence: Synthetic oligonucleotide
  source 1..27: mol_type = other DNA
tccagtggctggtactggttcgacccc

SEQ ID NO: 21714 - protein, 9 aa, synthetic construct
  REGION 1..9: note = Description of Artificial Sequence: Synthetic peptide
SSGWYWFDP

SEQ ID NO: 21715 - DNA, 27 bp, synthetic construct
  misc_feature 1..27: note = Description of Artificial Sequence: Synthetic oligonucleotide
  source 1..27: mol_type = other DNA
agcagtggctggtactggttcgacccc

SEQ ID NO: 21716 - protein, 9 aa, synthetic construct
  REGION 1..9: note = Description of Artificial Sequence: Synthetic peptide
SSGWYWFDP

SEQ ID NO: 21717 - DNA, 36 bp, synthetic construct
  misc_feature 1..36: note = Description of Artificial Sequence: Synthetic oligonucleotide
  source 1..36: mol_type = other DNA
gatcgcaatatagtgggagctacttactttgagtcc

SEQ ID NO: 21718 - protein, 12 aa, synthetic construct
  REGION 1..12: note = Description of Artificial Sequence: Synthetic peptide
DRNIVGATYFES

SEQ ID NO: 21719 - DNA, 27 bp, synthetic construct
  misc_feature 1..27: note = Description of Artificial Sequence: Synthetic oligonucleotide
  source 1..27: mol_type = other DNA
agcagtggctggtacatgtttgactac

SEQ ID NO: 21720 - protein, 9 aa, synthetic construct
  REGION 1..9: note = Description of Artificial Sequence: Synthetic peptide
SSGWYMFDY

SEQ ID NO: 21721 - DNA, 27 bp, synthetic construct
  misc_feature 1..27: note = Description of Artificial Sequence: Synthetic oligonucleotide
  source 1..27: mol_type = other DNA
cttgactctaactggggtcttgactac

SEQ ID NO: 21722 - protein, 9 aa, synthetic construct
  REGION 1..9: note = Description of Artificial Sequence: Synthetic peptide
LDSNWGLDY

SEQ ID NO: 21723 - DNA, 27 bp, synthetic construct
  misc_feature 1..27: note = Description of Artificial Sequence: Synthetic oligonucleotide
  source 1..27: mol_type = other DNA
tccagtggctggaactggttcgacccc

SEQ ID NO: 21724 - protein, 9 aa, synthetic construct
  REGION 1..9: note = Description of Artificial Sequence: Synthetic peptide
SSGWNWFDP

SEQ ID NO: 21725 - DNA, 21 bp, synthetic construct
  misc_feature 1..21: note = Description of Artificial Sequence: Synthetic oligonucleotide
  source 1..21: mol_type = other DNA
gactacgggggtttggacgtc

SEQ ID NO: 21726 - protein, 7 aa, synthetic construct
  REGION 1..7: note = Description of Artificial Sequence: Synthetic peptide
DYGGLDV

SEQ ID NO: 21727 - DNA, 21 bp, synthetic construct
  misc_feature 1..21: note = Description of Artificial Sequence: Synthetic oligonucleotide
  source 1..21: mol_type = other DNA
gactacggcggtatggacgtc

SEQ ID NO: 21728 - protein, 7 aa, synthetic construct
  REGION 1..7: note = Description of Artificial Sequence: Synthetic peptide
DYGGMDV

SEQ ID NO: 21729 - DNA, 21 bp, synthetic construct
  misc_feature 1..21: note = Description of Artificial Sequence: Synthetic oligonucleotide
  source 1..21: mol_type = other DNA
gactacggcggtatggacgtc

SEQ ID NO: 21730 - protein, 7 aa, synthetic construct
  REGION 1..7: note = Description of Artificial Sequence: Synthetic peptide
DYGGMDV

SEQ ID NO: 21731 - DNA, 27 bp, synthetic construct
  misc_feature 1..27: note = Description of Artificial Sequence: Synthetic oligonucleotide
  source 1..27: mol_type = other DNA
ctgcgacctaactgggactttgactac

SEQ ID NO: 21732 - protein, 9 aa, synthetic construct
  REGION 1..9: note = Description of Artificial Sequence: Synthetic peptide
LRPNWDFDY

SEQ ID NO: 21733 - DNA, 21 bp, synthetic construct
  misc_feature 1..21: note = Description of Artificial Sequence: Synthetic oligonucleotide
  source 1..21: mol_type = other DNA
gactacggcggtatggacgtc

SEQ ID NO: 21734 - protein, 7 aa, synthetic construct
  REGION 1..7: note = Description of Artificial Sequence: Synthetic peptide
DYGGMDV

SEQ ID NO: 21735 - DNA, 27 bp, synthetic construct
  misc_feature 1..27: note = Description of Artificial Sequence: Synthetic oligonucleotide
  source 1..27: mol_type = other DNA
agcagtggctggtactggttcgacccc

SEQ ID NO: 21736 - protein, 9 aa, synthetic construct
  REGION 1..9: note = Description of Artificial Sequence: Synthetic peptide
SSGWYWFDP

SEQ ID NO: 21737 - DNA, 27 bp, synthetic construct
  misc_feature 1..27: note = Description of Artificial Sequence: Synthetic oligonucleotide
  source 1..27: mol_type = other DNA
agcagtggctggtactactttgactac

SEQ ID NO: 21738 - protein, 9 aa, synthetic construct
  REGION 1..9: note = Description of Artificial Sequence: Synthetic peptide
SSGWYYFDY

SEQ ID NO: 21739 - DNA, 27 bp, synthetic construct
  misc_feature 1..27: note = Description of Artificial Sequence: Synthetic oligonucleotide
  source 1..27: mol_type = other DNA
agcagtggctggtactggttcgacccc

SEQ ID NO: 21740 - protein, 9 aa, synthetic construct
  REGION 1..9: note = Description of Artificial Sequence: Synthetic peptide
SSGWYWFDP

SEQ ID NO: 21741 - DNA, 27 bp, synthetic construct
  misc_feature 1..27: note = Description of Artificial Sequence: Synthetic oligonucleotide
  source 1..27: mol_type = other DNA
agtagtggctggtactggttcgacccc

SEQ ID NO: 21742 - protein, 9 aa, synthetic construct
  REGION 1..9: note = Description of Artificial Sequence: Synthetic peptide
SSGWYWFDP

SEQ ID NO: 21743 - DNA, 21 bp, synthetic construct
  misc_feature 1..21: note = Description of Artificial Sequence: Synthetic oligonucleotide
  source 1..21: mol_type = other DNA
gactacggtgggcttgactac

SEQ ID NO: 21744 - protein, 7 aa, synthetic construct
  REGION 1..7: note = Description of Artificial Sequence: Synthetic peptide
DYGGLDY

SEQ ID NO: 21745 - DNA, 21 bp, synthetic construct
  misc_feature 1..21: note = Description of Artificial Sequence: Synthetic oligonucleotide
  source 1..21: mol_type = other DNA
gactacggtggccttgactac

SEQ ID NO: 21746 - protein, 7 aa, synthetic construct
  REGION 1..7: note = Description of Artificial Sequence: Synthetic peptide
DYGGLDY

SEQ ID NO: 21747 - DNA, 21 bp, synthetic construct
  misc_feature 1..21: note = Description of Artificial Sequence: Synthetic oligonucleotide
  source 1..21: mol_type = other DNA
gactacggcggtatggacgtc

SEQ ID NO: 21748 - protein, 7 aa, synthetic construct
  REGION 1..7: note = Description of Artificial Sequence: Synthetic peptide
DYGGMDV

SEQ ID NO: 21749 - DNA, 27 bp, synthetic construct
  misc_feature 1..27: note = Description of Artificial Sequence: Synthetic oligonucleotide
  source 1..27: mol_type = other DNA
tccagtggctggcactggttcgacccc

SEQ ID NO: 21750 - protein, 9 aa, synthetic construct
  REGION 1..9: note = Description of Artificial Sequence: Synthetic peptide
SSGWHWFDP

SEQ ID NO: 21751 - DNA, 27 bp, synthetic construct
  misc_feature 1..27: note = Description of Artificial Sequence: Synthetic oligonucleotide
  source 1..27: mol_type = other DNA
agtagtggctggtactggttcgacccc

SEQ ID NO: 21752 - protein, 9 aa, synthetic construct
  REGION 1..9: note = Description of Artificial Sequence: Synthetic peptide
SSGWYWFDP

SEQ ID NO: 21753 - DNA, 21 bp, synthetic construct
  misc_feature 1..21: note = Description of Artificial Sequence: Synthetic oligonucleotide
  source 1..21: mol_type = other DNA
gtgggacctactacggactac

SEQ ID NO: 21754 - protein, 7 aa, synthetic construct
  REGION 1..7: note = Description of Artificial Sequence: Synthetic peptide
VGPTTDY

SEQ ID NO: 21755 - DNA, 21 bp, synthetic construct
  misc_feature 1..21: note = Description of Artificial Sequence: Synthetic oligonucleotide
  source 1..21: mol_type = other DNA
gactacgggggtttggacgtc

SEQ ID NO: 21756 - protein, 7 aa, synthetic construct
  REGION 1..7: note = Description of Artificial Sequence: Synthetic peptide
DYGGLDV

SEQ ID NO: 21757 - DNA, 33 bp, synthetic construct
  misc_feature 1..33: note = Description of Artificial Sequence: Synthetic oligonucleotide
  source 1..33: mol_type = other DNA
gatggcagctatggttatgacggccttgactac

SEQ ID NO: 21758 - protein, 11 aa, synthetic construct
  REGION 1..11: note = Description of Artificial Sequence: Synthetic peptide
DGSYGYDGLDY

SEQ ID NO: 21759 - DNA, 36 bp, synthetic construct; identical to SEQ ID NO: 21717
  misc_feature 1..36: note = Description of Artificial Sequence: Synthetic oligonucleotide
  source 1..36: mol_type = other DNA

SEQ ID NO: 21760 - protein, 12 aa, synthetic construct
  REGION 1..12: note = Description of Artificial Sequence: Synthetic peptide
DRNIVGATYFES

SEQ ID NO: 21761 - DNA, 48 bp, synthetic construct
  misc_feature 1..48: note = Description of Artificial Sequence: Synthetic oligonucleotide
  source 1..48: mol_type = other DNA
gagtttccatatagtggaagctacctctactactacggtatggacgtc

SEQ ID NO: 21762 - protein, 16 aa, synthetic construct
  REGION 1..16: note = Description of Artificial Sequence: Synthetic peptide
EFPYSGSYLYYYGMDV

SEQ ID NO: 21763 - DNA, 21 bp, synthetic construct
  misc_feature 1..21: note = Description of Artificial Sequence: Synthetic oligonucleotide
  source 1..21: mol_type = other DNA
gactacggcggtatggacgtc

SEQ ID NO: 21764 - protein, 7 aa, synthetic construct
  REGION 1..7: note = Description of Artificial Sequence: Synthetic peptide
DYGGMDV

SEQ ID NO: 21765 - DNA, 27 bp, synthetic construct
  misc_feature 1..27: note = Description of Artificial Sequence: Synthetic oligonucleotide
  source 1..27: mol_type = other DNA
agcagtggctggtactactttgactac

SEQ ID NO: 21766 - protein, 9 aa, synthetic construct
  REGION 1..9: note = Description of Artificial Sequence: Synthetic peptide
SSGWYYFDY

SEQ ID NO: 21767 - DNA, 27 bp, synthetic construct
  misc_feature 1..27: note = Description of Artificial Sequence: Synthetic oligonucleotide
  source 1..27: mol_type = other DNA
agcagtggctggtactactttgactac

SEQ ID NO: 21768 - protein, 9 aa, synthetic construct
  REGION 1..9: note = Description of Artificial Sequence: Synthetic peptide
SSGWYYFDY

SEQ ID NO: 21769 - DNA, 21 bp, synthetic construct
  misc_feature 1..21: note = Description of Artificial Sequence: Synthetic oligonucleotide
  source 1..21: mol_type = other DNA
gactacggcggtatggacgtc

SEQ ID NO: 21770 - protein, 7 aa, synthetic construct
  REGION 1..7: note = Description of Artificial Sequence: Synthetic peptide
DYGGMDV

SEQ ID NO: 21771 - DNA, 21 bp, synthetic construct
  misc_feature 1..21: note = Description of Artificial Sequence: Synthetic oligonucleotide
  source 1..21: mol_type = other DNA
gactacggcggtatggacgtc

SEQ ID NO: 21772 - protein, 7 aa, synthetic construct
  REGION 1..7: note = Description of Artificial Sequence: Synthetic peptide
DYGGMDV

SEQ ID NO: 21773 - DNA, 51 bp, synthetic construct
  misc_feature 1..51: note = Description of Artificial Sequence: Synthetic oligonucleotide
  source 1..51: mol_type = other DNA
gttcttgactacggtgactccttgggctactactactacggtatggacgtc

SEQ ID NO: 21774 - protein, 17 aa, synthetic construct
  REGION 1..17: note = Description of Artificial Sequence: Synthetic peptide
VLDYGDSLGYYYYGMDV

SEQ ID NO: 21775 - DNA, 21 bp, synthetic construct
  misc_feature 1..21: note = Description of Artificial Sequence: Synthetic oligonucleotide
  source 1..21: mol_type = other DNA
gactacggtggtttggacgtc

SEQ ID NO: 21776 - protein, 7 aa, synthetic construct
  REGION 1..7: note = Description of Artificial Sequence: Synthetic peptide
DYGGLDV

SEQ ID NO: 21777 - DNA, 36 bp, synthetic construct
  misc_feature 1..36: note = Description of Artificial Sequence: Synthetic oligonucleotide
  source 1..36: mol_type = other DNA
gatcggagtatattgggagctactttctttgactac

SEQ ID NO: 21778 - protein, 12 aa, synthetic construct
  REGION 1..12: note = Description of Artificial Sequence: Synthetic peptide
DRSILGATFFDY

SEQ ID NO: 21779 - DNA, 21 bp, synthetic construct
  misc_feature 1..21: note = Description of Artificial Sequence: Synthetic oligonucleotide
  source 1..21: mol_type = other DNA
gactacggtgggcttgactac

SEQ ID NO: 21780 - protein, 7 aa, synthetic construct
  REGION 1..7: note = Description of Artificial Sequence: Synthetic peptide
DYGGLDY

SEQ ID NO: 21781 - DNA, 33 bp, synthetic construct
  misc_feature 1..33: note = Description of Artificial Sequence: Synthetic oligonucleotide
  source 1..33: mol_type = other DNA
gatggcagctatggttacgacggccttgactac

SEQ ID NO: 21782 - protein, 11 aa, synthetic construct
  REGION 1..11: note = Description of Artificial Sequence: Synthetic peptide
DGSYGYDGLDY

SEQ ID NO: 21783 - DNA, 27 bp, synthetic construct
  misc_feature 1..27: note = Description of Artificial Sequence: Synthetic oligonucleotide
  source 1..27: mol_type = other DNA
tccagtggctggcactggttcgacccc

SEQ ID NO: 21784 - protein, 9 aa, synthetic construct
  REGION 1..9: note = Description of Artificial Sequence: Synthetic peptide
SSGWHWFDP

SEQ ID NO: 21785 - DNA, 21 bp, synthetic construct
  misc_feature 1..21: note = Description of Artificial Sequence: Synthetic oligonucleotide
  source 1..21: mol_type = other DNA
gactacggcggtatggacgtc

SEQ ID NO: 21786 - protein, 7 aa, synthetic construct
  REGION 1..7: note = Description of Artificial Sequence: Synthetic peptide
DYGGMDV

SEQ ID NO: 21787 - DNA, 21 bp, synthetic construct
  misc_feature 1..21: note = Description of Artificial Sequence: Synthetic oligonucleotide
  source 1..21: mol_type = other DNA
gactacggcggtatggacgtc

SEQ ID NO: 21788 - protein, 7 aa, synthetic construct
  REGION 1..7: note = Description of Artificial Sequence: Synthetic peptide
DYGGMDV

SEQ ID NO: 21789 - DNA, 27 bp, synthetic construct
  misc_feature 1..27: note = Description of Artificial Sequence: Synthetic oligonucleotide
  source 1..27: mol_type = other DNA
agcagtggctggtactggttcgacccc

SEQ ID NO: 21790 - protein, 9 aa, synthetic construct
  REGION 1..9: note = Description of Artificial Sequence: Synthetic peptide
SSGWYWFDP

SEQ ID NO: 21791 - DNA, 21 bp, synthetic construct
  misc_feature 1..21: note = Description of Artificial Sequence: Synthetic oligonucleotide
  source 1..21: mol_type = other DNA
gactacggcggtatggacgtc

SEQ ID NO: 21792 - protein, 7 aa, synthetic construct
  REGION 1..7: note = Description of Artificial Sequence: Synthetic peptide
DYGGMDV

SEQ ID NO: 21793 - DNA, 27 bp, synthetic construct
  misc_feature 1..27: note = Description of Artificial Sequence: Synthetic oligonucleotide
  source 1..27: mol_type = other DNA
agtagtggctggtactggttcgacccc

SEQ ID NO: 21794 - protein, 9 aa, synthetic construct
  REGION 1..9: note = Description of Artificial Sequence: Synthetic peptide
SSGWYWFDP

SEQ ID NO: 21795 - DNA, 21 bp, synthetic construct
  misc_feature 1..21: note = Description of Artificial Sequence: Synthetic oligonucleotide
  source 1..21: mol_type = other DNA
gactacggcggtatggacgtc

SEQ ID NO: 21796 - protein, 7 aa, synthetic construct
  REGION 1..7: note = Description of Artificial Sequence: Synthetic peptide
DYGGMDV

SEQ ID NO: 21797 - DNA, 27 bp, synthetic construct
  misc_feature 1..27: note = Description of Artificial Sequence: Synthetic oligonucleotide
  source 1..27: mol_type = other DNA
agcagtggctggtactggttcgacccc

SEQ ID NO: 21798 - protein, 9 aa, synthetic construct
  REGION 1..9: note = Description of Artificial Sequence: Synthetic peptide
SSGWYWFDP

SEQ ID NO: 21799 - DNA, 27 bp, synthetic construct
  misc_feature 1..27: note = Description of Artificial Sequence: Synthetic oligonucleotide
  source 1..27: mol_type = other DNA
agtagtggctggtactggttcgacccc

SEQ ID NO: 21800 - protein, 9 aa, synthetic construct
  REGION 1..9: note = Description of Artificial Sequence: Synthetic peptide
SSGWYWFDP

SEQ ID NO: 21801 - DNA, 21 bp, synthetic construct
  misc_feature 1..21: note = Description of Artificial Sequence: Synthetic oligonucleotide
  source 1..21: mol_type = other DNA
gactacggcggtatggacgtc

SEQ ID NO: 21802 - protein, 7 aa, synthetic construct
  REGION 1..7: note = Description of Artificial Sequence: Synthetic peptide
DYGGMDV

SEQ ID NO: 21803 - DNA, 27 bp, synthetic construct
  misc_feature 1..27: note = Description of Artificial Sequence: Synthetic oligonucleotide
  source 1..27: mol_type = other DNA
agcagtggctggtactggttcgacccc

SEQ ID NO: 21804 - protein, 9 aa, synthetic construct
  REGION 1..9: note = Description of Artificial Sequence: Synthetic peptide
SSGWYWFDP

SEQ ID NO: 21805 - DNA, 33 bp, synthetic construct; identical to SEQ ID NO: 21781
  misc_feature 1..33: note = Description of Artificial Sequence: Synthetic oligonucleotide
  source 1..33: mol_type = other DNA

SEQ ID NO: 21806 - protein, 11 aa, synthetic construct
  REGION 1..11: note = Description of Artificial Sequence: Synthetic peptide
DGSYGYDGLDY

SEQ ID NO: 21807 - DNA, 27 bp, synthetic construct
  misc_feature 1..27: note = Description of Artificial Sequence: Synthetic oligonucleotide
  source 1..27: mol_type = other DNA
tccagtggctggtactggttcgacccc

SEQ ID NO: 21808 - protein, 9 aa, synthetic construct
  REGION 1..9: note = Description of Artificial Sequence: Synthetic peptide
SSGWYWFDP

SEQ ID NO: 21809 - DNA, 27 bp, synthetic construct
  misc_feature 1..27: note = Description of Artificial Sequence: Synthetic oligonucleotide
  source 1..27: mol_type = other DNA
agcagtggctggtactggttcgacccc

SEQ ID NO: 21810 - protein, 9 aa, synthetic construct
  REGION 1..9: note = Description of Artificial Sequence: Synthetic peptide
SSGWYWFDP

SEQ ID NO: 21811 - DNA, 48 bp, synthetic construct
  misc_feature 1..48: note = Description of Artificial Sequence: Synthetic oligonucleotide
  source 1..48: mol_type = other DNA
gatgaggggttcggggagttcgactactacaactacggtatggacgtc

SEQ ID NO: 21812 - protein, 16 aa, synthetic construct
  REGION 1..16: note = Description of Artificial Sequence: Synthetic peptide
DEGFGEFDYYNYGMDV

SEQ ID NO: 21813 - DNA, 36 bp, synthetic construct
  misc_feature 1..36: note = Description of Artificial Sequence: Synthetic oligonucleotide
  source 1..36: mol_type = other DNA
gatcggagtatactgggagctgctttctttgactac

SEQ ID NO: 21814 - protein, 12 aa, synthetic construct
  REGION 1..12: note = Description of Artificial Sequence: Synthetic peptide
DRSILGAAFFDY

SEQ ID NO: 21815 - DNA, 21 bp, synthetic construct
  misc_feature 1..21: note = Description of Artificial Sequence: Synthetic oligonucleotide
  source 1..21: mol_type = other DNA
gtgggagctactacggactac

SEQ ID NO: 21816 - protein, 7 aa, synthetic construct
  REGION 1..7: note = Description of Artificial Sequence: Synthetic peptide
VGATTDY

SEQ ID NO: 21817 - DNA, 27 bp, synthetic construct
  misc_feature 1..27: note = Description of Artificial Sequence: Synthetic oligonucleotide
  source 1..27: mol_type = other DNA
agtagtggctggtacaaatttgactac

SEQ ID NO: 21818 - protein, 9 aa, synthetic construct
  REGION 1..9: note = Description of Artificial Sequence: Synthetic peptide
SSGWYKFDY

SEQ ID NO: 21819 - DNA, 21 bp, synthetic construct
  misc_feature 1..21: note = Description of Artificial Sequence: Synthetic oligonucleotide
  source 1..21: mol_type = other DNA
gactacggtggccttgactac

SEQ ID NO: 21820 - protein, 7 aa, synthetic construct
  REGION 1..7: note = Description of Artificial Sequence: Synthetic peptide
DYGGLDY

SEQ ID NO: 21821 - DNA, 27 bp, synthetic construct
  misc_feature 1..27: note = Description of Artificial Sequence: Synthetic oligonucleotide
  source 1..27: mol_type = other DNA
tccagtggctggcactggttcgacccc

SEQ ID NO: 21822 - protein, 9 aa, synthetic construct
  REGION 1..9: note = Description of Artificial Sequence: Synthetic peptide
SSGWHWFDP

SEQ ID NO: 21823 - DNA, 27 bp, synthetic construct
  misc_feature 1..27: note = Description of Artificial Sequence: Synthetic oligonucleotide
  source 1..27: mol_type = other DNA
agcagtggctggaacttctttgactac

SEQ ID NO: 21824 - protein, 9 aa, synthetic construct
  REGION 1..9: note = Description of Artificial Sequence: Synthetic peptide
SSGWNFFDY

SEQ ID NO: 21825 - DNA, 27 bp, synthetic construct
  misc_feature 1..27: note = Description of Artificial Sequence: Synthetic oligonucleotide
  source 1..27: mol_type = other DNA
tccagtggctggaactggttcgacccc

SEQ ID NO: 21826 - protein, 9 aa, synthetic construct
  REGION 1..9: note = Description of Artificial Sequence: Synthetic peptide
SSGWNWFDP

SEQ ID NO: 21827 - DNA, 27 bp, synthetic construct
  misc_feature 1..27: note = Description of Artificial Sequence: Synthetic oligonucleotide
  source 1..27: mol_type = other DNA
tccagtggctggcactggttcgacccc

SEQ ID NO: 21828 - protein, 9 aa, synthetic construct
  REGION 1..9: note = Description of Artificial Sequence: Synthetic peptide
SSGWHWFDP

SEQ ID NO: 21829 - DNA, 21 bp, synthetic construct
  misc_feature 1..21: note = Description of Artificial Sequence: Synthetic oligonucleotide
  source 1..21: mol_type = other DNA
gactacggcggtatggacgtc

SEQ ID NO: 21830 - protein, 7 aa, synthetic construct
  REGION 1..7: note = Description of Artificial Sequence: Synthetic peptide
DYGGMDV

SEQ ID NO: 21831 - DNA, 21 bp, synthetic construct
  misc_feature 1..21: note = Description of Artificial Sequence: Synthetic oligonucleotide
  source 1..21: mol_type = other DNA
gactacggcggtatggacgtc

SEQ ID NO: 21832 - protein, 7 aa, synthetic construct
  REGION 1..7: note = Description of Artificial Sequence: Synthetic peptide
DYGGMDV

SEQ ID NO: 21833 - DNA, 27 bp, synthetic construct
  misc_feature 1..27: note = Description of Artificial Sequence: Synthetic oligonucleotide
  source 1..27: mol_type = other DNA
agcagtggctggtaccattttgactac

SEQ ID NO: 21834 - protein, 9 aa, synthetic construct
  REGION 1..9: note = Description of Artificial Sequence: Synthetic peptide
SSGWYHFDY

SEQ ID NO: 21835 - DNA, 33 bp, synthetic construct; identical to SEQ ID NO: 21757
  misc_feature 1..33: note = Description of Artificial Sequence: Synthetic oligonucleotide
  source 1..33: mol_type = other DNA

SEQ ID NO: 21836 - protein, 11 aa, synthetic construct
  REGION 1..11: note = Description of Artificial Sequence: Synthetic peptide
DGSYGYDGLDY

SEQ ID NO: 21837 - DNA, 21 bp, synthetic construct
  misc_feature 1..21: note = Description of Artificial Sequence: Synthetic oligonucleotide
  source 1..21: mol_type = other DNA
gtgggagctactacggactac

SEQ ID NO: 21838 - protein, 7 aa, synthetic construct
  REGION 1..7: note = Description of Artificial Sequence: Synthetic peptide
VGATTDY

SEQ ID NO: 21839 - DNA, 36 bp, synthetic construct; identical to SEQ ID NO: 21717
  misc_feature 1..36: note = Description of Artificial Sequence: Synthetic oligonucleotide
  source 1..36: mol_type = other DNA

SEQ ID NO: 21840 - protein, 12 aa, synthetic construct
  REGION 1..12: note = Description of Artificial Sequence: Synthetic peptide
DRNIVGATYFES

SEQ ID NO: 21841 - DNA, 27 bp, synthetic construct
  misc_feature 1..27: note = Description of Artificial Sequence: Synthetic oligonucleotide
  source 1..27: mol_type = other DNA
tccagtggctggtactggttcgacccc

SEQ ID NO: 21842 - protein, 9 aa, synthetic construct
  REGION 1..9: note = Description of Artificial Sequence: Synthetic peptide
SSGWYWFDP

SEQ ID NO: 21843 - DNA, 27 bp, synthetic construct
  misc_feature 1..27: note = Description of Artificial Sequence: Synthetic oligonucleotide
  source 1..27: mol_type = other DNA
agtagtggctggtacaaatttgactac

SEQ ID NO: 21844 - protein, 9 aa, synthetic construct
  REGION 1..9: note = Description of Artificial Sequence: Synthetic peptide
SSGWYKFDY

SEQ ID NO: 21845 - DNA, 27 bp, synthetic construct
  misc_feature 1..27: note = Description of Artificial Sequence: Synthetic oligonucleotide
  source 1..27: mol_type = other DNA
agcagtggctggtactactttgactac

SEQ ID NO: 21846 - protein, 9 aa, synthetic construct
  REGION 1..9: note = Description of Artificial Sequence: Synthetic peptide
SSGWYYFDY

SEQ ID NO: 21847 - DNA, 21 bp, synthetic construct
  misc_feature 1..21: note = Description of Artificial Sequence: Synthetic oligonucleotide
  source 1..21: mol_type = other DNA
gactacggcggtatggacgtc

SEQ ID NO: 21848 - protein, 7 aa, synthetic construct
  REGION 1..7: note = Description of Artificial Sequence: Synthetic peptide
DYGGMDV

SEQ ID NO: 21849 - DNA, 27 bp, synthetic construct
  misc_feature 1..27: note = Description of Artificial Sequence: Synthetic oligonucleotide
  source 1..27: mol_type = other DNA
tccagtggctggaactggttcgacccc

SEQ ID NO: 21850 - protein, 9 aa, synthetic construct
  REGION 1..9: note = Description of Artificial Sequence: Synthetic peptide
SSGWNWFDP

SEQ ID NO: 21851 - DNA, 21 bp, synthetic construct
  misc_feature 1..21: note = Description of Artificial Sequence: Synthetic oligonucleotide
  source 1..21: mol_type = other DNA
gactacggcggtatggacgtc

SEQ ID NO: 21852 - protein, 7 aa, synthetic construct
  REGION 1..7: note = Description of Artificial Sequence: Synthetic peptide
DYGGMDV

SEQ ID NO: 21853 - DNA, 21 bp, synthetic construct
  misc_feature 1..21: note = Description of Artificial Sequence: Synthetic oligonucleotide
  source 1..21: mol_type = other DNA
gactacggcggtatggacgtc

SEQ ID NO: 21854 - protein, 7 aa, synthetic construct
  REGION 1..7: note = Description of Artificial Sequence: Synthetic peptide
DYGGMDV

SEQ ID NO: 21855 - DNA, 27 bp, synthetic construct
  misc_feature 1..27: note = Description of Artificial Sequence: Synthetic oligonucleotide
  source 1..27: mol_type = other DNA
agcagtggctggtacttctttgactac

SEQ ID NO: 21856 - protein, 9 aa, synthetic construct
  REGION 1..9: note = Description of Artificial Sequence: Synthetic peptide
SSGWYFFDY

SEQ ID NO: 21857 - DNA, 21 bp, synthetic construct
  misc_feature 1..21: note = Description of Artificial Sequence: Synthetic oligonucleotide
  source 1..21: mol_type = other DNA
gactacggcggtatggacgtc

SEQ ID NO: 21858 - protein, 7 aa, synthetic construct
  REGION 1..7: note = Description of Artificial Sequence: Synthetic peptide
DYGGMDV

SEQ ID NO: 21859 - DNA, 21 bp, synthetic construct
  misc_feature 1..21: note = Description of Artificial Sequence: Synthetic oligonucleotide
  source 1..21: mol_type = other DNA
gactacggcggtatggacgtc

SEQ ID NO: 21860 - protein, 7 aa, synthetic construct
  REGION 1..7: note = Description of Artificial Sequence: Synthetic peptide
DYGGMDV

SEQ ID NO: 21861 - DNA, 21 bp, synthetic construct
  misc_feature 1..21: note = Description of Artificial Sequence: Synthetic oligonucleotide
  source 1..21: mol_type = other DNA
gactacggcggtatggacgtc

SEQ ID NO: 21862 - protein, 7 aa, synthetic construct
  REGION 1..7: note = Description of Artificial Sequence: Synthetic peptide
DYGGMDV

SEQ ID NO: 21863 - DNA, 27 bp, synthetic construct
  misc_feature 1..27: note = Description of Artificial Sequence: Synthetic oligonucleotide
  source 1..27: mol_type = other DNA
agtagtggctggtactggttcgacccc

SEQ ID NO: 21864 - protein, 9 aa, synthetic construct
  REGION 1..9: note = Description of Artificial Sequence: Synthetic peptide
SSGWYWFDP

SEQ ID NO: 21865 - DNA, 27 bp, synthetic construct
  misc_feature 1..27: note = Description of Artificial Sequence: Synthetic oligonucleotide
  source 1..27: mol_type = other DNA
agcagtggctggtactggttcgacccc

SEQ ID NO: 21866 - protein, 9 aa, synthetic construct
  REGION 1..9: note = Description of Artificial Sequence: Synthetic peptide
SSGWYWFDP

SEQ ID NO: 21867 - DNA, 21 bp, synthetic construct
  misc_feature 1..21: note = Description of Artificial Sequence: Synthetic oligonucleotide
  source 1..21: mol_type = other DNA
gactacggcggtatggacgtc

SEQ ID NO: 21868 - protein, 7 aa, synthetic construct
  REGION 1..7: note = Description of Artificial Sequence: Synthetic peptide
DYGGMDV

SEQ ID NO: 21869 - DNA, 27 bp, synthetic construct
  misc_feature 1..27: note = Description of Artificial Sequence: Synthetic oligonucleotide
  source 1..27: mol_type = other DNA
accagtggctggaacttctttgactac

SEQ ID NO: 21870 - protein, 9 aa, synthetic construct
  REGION 1..9: note = Description of Artificial Sequence: Synthetic peptide
TSGWNFFDY

SEQ ID NO: 21871 - DNA, 21 bp, synthetic construct
  misc_feature 1..21: note = Description of Artificial Sequence: Synthetic oligonucleotide
  source 1..21: mol_type = other DNA
gactacgggggtttggacgtc

SEQ ID NO: 21872 - protein, 7 aa, synthetic construct
  REGION 1..7: note = Description of Artificial Sequence: Synthetic peptide
DYGGLDV

SEQ ID NO: 21873 - DNA, 21 bp, synthetic construct
  misc_feature 1..21: note = Description of Artificial Sequence: Synthetic oligonucleotide
  source 1..21: mol_type = other DNA
gactacggtgggcttgactac

SEQ ID NO: 21874 - protein, 7 aa, synthetic construct
  REGION 1..7: note = Description of Artificial Sequence: Synthetic peptide
DYGGLDY

SEQ ID NO: 21875 - DNA, 21 bp, synthetic construct
  misc_feature 1..21: note = Description of Artificial Sequence: Synthetic oligonucleotide
  source 1..21: mol_type = other DNA
gactacgggggtatagacgtc

SEQ ID NO: 21876 - protein, 7 aa, synthetic construct
  REGION 1..7: note = Description of Artificial Sequence: Synthetic peptide
DYGGIDV

SEQ ID NO: 21877 - DNA, 27 bp, synthetic construct
  misc_feature 1..27: note = Description of Artificial Sequence: Synthetic oligonucleotide
  source 1..27: mol_type = other DNA
agcagtggctggtacatctttgactac

SEQ ID NO: 21878 - protein, 9 aa, synthetic construct
  REGION 1..9: note = Description of Artificial Sequence: Synthetic peptide
SSGWYIFDY

SEQ ID NO: 21879 - DNA, 27 bp, synthetic construct
  misc_feature 1..27: note = Description of Artificial Sequence: Synthetic oligonucleotide
  source 1..27: mol_type = other DNA
agcagtggctggtactggttcgacccc

SEQ ID NO: 21880 - protein, 9 aa, synthetic construct
  REGION 1..9: note = Description of Artificial Sequence: Synthetic peptide
SSGWYWFDP

SEQ ID NO: 21881 - DNA, 21 bp, synthetic construct
  misc_feature 1..21: note = Description of Artificial Sequence: Synthetic oligonucleotide
  source 1..21: mol_type = other DNA
gactacggtgggcttgactac

SEQ ID NO: 21882 - protein, 7 aa, synthetic construct
  REGION 1..7: note = Description of Artificial Sequence: Synthetic peptide
DYGGLDY

SEQ ID NO: 21883 - DNA, 33 bp, synthetic construct; identical to SEQ ID NO: 21757
  misc_feature 1..33: note = Description of Artificial Sequence: Synthetic oligonucleotide
  source 1..33: mol_type = other DNA

SEQ ID NO: 21884 - protein, 11 aa, synthetic construct
  REGION 1..11: note = Description of Artificial Sequence: Synthetic peptide
DGSYGYDGLDY

SEQ ID NO: 21885 - DNA, 33 bp, synthetic construct
  misc_feature 1..33: note = Description of Artificial Sequence: Synthetic oligonucleotide
  source 1..33: mol_type = other DNA
gatggcagctatgggtatgacggccttgactac

SEQ ID NO: 21886 - protein, 11 aa, synthetic construct
  REGION 1..11: note = Description of Artificial Sequence: Synthetic peptide
DGSYGYDGLDY

SEQ ID NO: 21887 - DNA, 21 bp, synthetic construct
  misc_feature 1..21: note = Description of Artificial Sequence: Synthetic oligonucleotide
  source 1..21: mol_type = other DNA
gactacggcggtatggacgtc

SEQ ID NO: 21888 - protein, 7 aa, synthetic construct
  REGION 1..7: note = Description of Artificial Sequence: Synthetic peptide
DYGGMDV

SEQ ID NO: 21889 - DNA, 27 bp, synthetic construct
  misc_feature 1..27: note = Description of Artificial Sequence: Synthetic oligonucleotide
  source 1..27: mol_type = other DNA
agcagtggctggtactggttcgacccc

SEQ ID NO: 21890 - protein, 9 aa, synthetic construct
  REGION 1..9: note = Description of Artificial Sequence: Synthetic peptide
SSGWYWFDP

SEQ ID NO: 21891 - DNA, 21 bp, synthetic construct
  misc_feature 1..21: note = Description of Artificial Sequence: Synthetic oligonucleotide
  source 1..21: mol_type = other DNA
gactacggcggtatggacgtc

SEQ ID NO: 21892 - protein, 7 aa, synthetic construct
  REGION 1..7: note = Description of Artificial Sequence: Synthetic peptide
DYGGMDV

SEQ ID NO: 21893 - DNA, 21 bp, synthetic construct
  misc_feature 1..21: note = Description of Artificial Sequence: Synthetic oligonucleotide
  source 1..21: mol_type = other DNA
gactacggcggtatggacgtc

SEQ ID NO: 21894 - protein, 7 aa, synthetic construct
  REGION 1..7: note = Description of Artificial Sequence: Synthetic peptide
DYGGMDV

SEQ ID NO: 21895 - DNA, 27 bp, synthetic construct
  misc_feature 1..27: note = Description of Artificial Sequence: Synthetic oligonucleotide
  source 1..27: mol_type = other DNA
tccagtggctggaactggttcgacccc

SEQ ID NO: 21896 - protein, 9 aa, synthetic construct
  REGION 1..9: note = Description of Artificial Sequence: Synthetic peptide
SSGWNWFDP

SEQ ID NO: 21897 - DNA, 27 bp, synthetic construct
  misc_feature 1..27: note = Description of Artificial Sequence: Synthetic oligonucleotide
  source 1..27: mol_type = other DNA
agcagtggctggtactggttcgacccc

SEQ ID NO: 21898 - protein, 9 aa, synthetic construct
  REGION 1..9: note = Description of Artificial Sequence: Synthetic peptide
SSGWYWFDP

SEQ ID NO: 21899 - DNA, 21 bp, synthetic construct
  misc_feature 1..21: note = Description of Artificial Sequence: Synthetic oligonucleotide
  source 1..21: mol_type = other DNA
gactacggcggtatggacgtc

SEQ ID NO: 21900 - protein, 7 aa, synthetic construct
  REGION 1..7: note = Description of Artificial Sequence: Synthetic peptide
DYGGMDV

SEQ ID NO: 21901 - DNA, 21 bp, synthetic construct
  misc_feature 1..21: note = Description of Artificial Sequence: Synthetic oligonucleotide
  source 1..21: mol_type = other DNA
gactacggcggtatggacgtc

SEQ ID NO: 21902 - protein, 7 aa, synthetic construct
  REGION 1..7: note = Description of Artificial Sequence: Synthetic peptide
DYGGMDV

SEQ ID NO: 21903 - DNA, 27 bp, synthetic construct
  misc_feature 1..27: note = Description of Artificial Sequence: Synthetic oligonucleotide
  source 1..27: mol_type = other DNA
agcagtggctggtactggttcgacccc

SEQ ID NO: 21904 - protein, 9 aa, synthetic construct
  REGION 1..9: note = Description of Artificial Sequence: Synthetic peptide
SSGWYWFDP

SEQ ID NO: 21905 - DNA, 27 bp, synthetic construct
  misc_feature 1..27: note = Description of Artificial Sequence: Synthetic oligonucleotide
  source 1..27: mol_type = other DNA
agtagtggctggtactggttcgacccc

SEQ ID NO: 21906 - protein, 9 aa, synthetic construct
  REGION 1..9: note = Description of Artificial Sequence: Synthetic peptide
SSGWYWFDP

SEQ ID NO: 21907 - DNA, 27 bp, synthetic construct
  misc_feature 1..27: note = Description of Artificial Sequence: Synthetic oligonucleotide
  source 1..27: mol_type = other DNA
agtagtggctggtactggttcgacccc

SEQ ID NO: 21908 - protein, 9 aa, synthetic construct
  REGION 1..9: note = Description of Artificial Sequence: Synthetic peptide
SSGWYWFDP

SEQ ID NO: 21909 - DNA, 21 bp, synthetic construct
  misc_feature 1..21: note = Description of Artificial Sequence: Synthetic oligonucleotide
  source 1..21: mol_type = other DNA
gactacggcggtatggacgtc

SEQ ID NO: 21910 - protein, 7 aa, synthetic construct
  REGION 1..7: note = Description of Artificial Sequence: Synthetic peptide
DYGGMDV

SEQ ID NO: 21911 - DNA, 27 bp, synthetic construct
  misc_feature 1..27: note = Description of Artificial Sequence: Synthetic oligonucleotide
  source 1..27: mol_type = other DNA
agcagtggctggtactggttcgacccc

SEQ ID NO: 21912 - protein, 9 aa, synthetic construct
  REGION 1..9: note = Description of Artificial Sequence: Synthetic peptide
SSGWYWFDP

SEQ ID NO: 21913 - DNA, 51 bp, synthetic construct
  misc_feature 1..51: note = Description of Artificial Sequence: Synthetic oligonucleotide
  source 1..51: mol_type = other DNA
ggcttttacgatactttgactggttccggctactactacgttatggacgtc

SEQ ID NO: 21914 - protein, 17 aa, synthetic construct
  REGION 1..17: note = Description of Artificial Sequence: Synthetic peptide
GFYDTLTGSGYYYVMDV

SEQ ID NO: 21915 - DNA, 21 bp, synthetic construct
  misc_feature 1..21: note = Description of Artificial Sequence: Synthetic oligonucleotide
  source 1..21: mol_type = other DNA
gactacggcggtatggacgtc

SEQ ID NO: 21916 - protein, 7 aa, synthetic construct
  REGION 1..7: note = Description of Artificial Sequence: Synthetic peptide
DYGGMDV

SEQ ID NO: 21917 - DNA, 27 bp, synthetic construct
  misc_feature 1..27: note = Description of Artificial Sequence: Synthetic oligonucleotide
  source 1..27: mol_type = other DNA
agtagtggctggtactggttcgacccc

SEQ ID NO: 21918 - protein, 9 aa, synthetic construct
  REGION 1..9: note = Description of Artificial Sequence: Synthetic peptide
SSGWYWFDP

SEQ ID NO: 21919 - DNA, 27 bp, synthetic construct
  misc_feature 1..27: note = Description of Artificial Sequence: Synthetic oligonucleotide
  source 1..27: mol_type = other DNA
agcagtggctggtactggttcgacccc

SEQ ID NO: 21920 - protein, 9 aa, synthetic construct
  REGION 1..9: note = Description of Artificial Sequence: Synthetic peptide
SSGWYWFDP

SEQ ID NO: 21921 - DNA, 27 bp, synthetic construct
  misc_feature 1..27: note = Description of Artificial Sequence: Synthetic oligonucleotide
  source 1..27: mol_type = other DNA
agcagtggctggtactggttcgacccc

SEQ ID NO: 21922 - protein, 9 aa, synthetic construct
  REGION 1..9: note = Description of Artificial Sequence: Synthetic peptide
SSGWYWFDP

SEQ ID NO: 21923 - DNA, 27 bp, synthetic construct
  misc_feature 1..27: note = Description of Artificial Sequence: Synthetic oligonucleotide
  source 1..27: mol_type = other DNA
agtagtggctggtactggttcgacccc

SEQ ID NO: 21924 - protein, 9 aa, synthetic construct
  REGION 1..9: note = Description of Artificial Sequence: Synthetic peptide
SSGWYWFDP

SEQ ID NO: 21925 - DNA, 21 bp, synthetic construct
  misc_feature 1..21: note = Description of Artificial Sequence: Synthetic oligonucleotide
  source 1..21: mol_type = other DNA
gactacggtgggcttgactac

SEQ ID NO: 21926 - protein, 7 aa, synthetic construct
  REGION 1..7: note = Description of Artificial Sequence: Synthetic peptide
DYGGLDY

SEQ ID NO: 21927 - DNA, 21 bp, synthetic construct
  misc_feature 1..21: note = Description of Artificial Sequence: Synthetic oligonucleotide
  source 1..21: mol_type = other DNA
gactacggcggtatggacgtc

SEQ ID NO: 21928 - protein, 7 aa, synthetic construct
  REGION 1..7: note = Description of Artificial Sequence: Synthetic peptide
DYGGMDV

SEQ ID NO: 21929 - DNA, 27 bp, synthetic construct
  misc_feature 1..27: note = Description of Artificial Sequence: Synthetic oligonucleotide
  source 1..27: mol_type = other DNA
tccagtggctggcactggttcgacccc

SEQ ID NO: 21930 - protein, 9 aa, synthetic construct
  REGION 1..9: note = Description of Artificial Sequence: Synthetic peptide
SSGWHWFDP

SEQ ID NO: 21931 - DNA, 21 bp, synthetic construct
  misc_feature 1..21: note = Description of Artificial Sequence: Synthetic oligonucleotide
  source 1..21: mol_type = other DNA
gactacggtgggcttgactac

SEQ ID NO: 21932 - protein, 7 aa, synthetic construct
  REGION 1..7: note = Description of Artificial Sequence: Synthetic peptide
DYGGLDY

SEQ ID NO: 21933 - DNA, 27 bp, synthetic construct
  misc_feature 1..27: note = Description of Artificial Sequence: Synthetic oligonucleotide
  source 1..27: mol_type = other DNA
agcagtggctggtacatctttgactac

SEQ ID NO: 21934 - protein, 9 aa, synthetic construct
  REGION 1..9: note = Description of Artificial Sequence: Synthetic peptide
SSGWYIFDY

SEQ ID NO: 21935 - DNA, 27 bp, synthetic construct
  misc_feature 1..27: note = Description of Artificial Sequence: Synthetic oligonucleotide
  source 1..27: mol_type = other DNA
tccagtggctggcactggttcgacccc

SEQ ID NO: 21936 - protein, 9 aa, synthetic construct
  REGION 1..9: note = Description of Artificial Sequence: Synthetic peptide
SSGWHWFDP

SEQ ID NO: 21937 - DNA, 33 bp, synthetic construct; identical to SEQ ID NO: 21781
  misc_feature 1..33: note = Description of Artificial Sequence: Synthetic oligonucleotide
  source 1..33: mol_type = other DNA

SEQ ID NO: 21938 - protein, 11 aa, synthetic construct
  REGION 1..11: note = Description of Artificial Sequence: Synthetic peptide
DGSYGYDGLDY

SEQ ID NO: 21939 - DNA, 21 bp, synthetic construct
  misc_feature 1..21: note = Description of Artificial Sequence: Synthetic oligonucleotide
  source 1..21: mol_type = other DNA
gactacgggggtatagacgtc

SEQ ID NO: 21940 - protein, 7 aa, synthetic construct
  REGION 1..7: note = Description of Artificial Sequence: Synthetic peptide
DYGGIDV

SEQ ID NO: 21941 - DNA, 36 bp, synthetic construct
  misc_feature 1..36: note = Description of Artificial Sequence: Synthetic oligonucleotide
  source 1..36: mol_type = other DNA
gatccctttatagtgggagctacttactttgactac

SEQ ID NO: 21942 - protein, 12 aa, synthetic construct
  REGION 1..12: note = Description of Artificial Sequence: Synthetic peptide
DPFIVGATYFDY

SEQ ID NO: 21943 - DNA, 27 bp, synthetic construct
  misc_feature 1..27: note = Description of Artificial Sequence: Synthetic oligonucleotide
  source 1..27: mol_type = other DNA
tccagtggctggtactggttcgacccc

SEQ ID NO: 21944 - protein, 9 aa, synthetic construct
  REGION 1..9: note = Description of Artificial Sequence: Synthetic peptide
SSGWYWFDP

SEQ ID NO: 21945 - DNA, 21 bp, synthetic construct
  misc_feature 1..21: note = Description of Artificial Sequence: Synthetic oligonucleotide
  source 1..21: mol_type = other DNA
gactacggcggtatggacgtc

SEQ ID NO: 21946 - protein, 7 aa, synthetic construct
  REGION 1..7: note = Description of Artificial Sequence: Synthetic peptide
DYGGMDV

SEQ ID NO: 21947 - DNA, 21 bp, synthetic construct
  misc_feature 1..21: note = Description of Artificial Sequence: Synthetic oligonucleotide
  source 1..21: mol_type = other DNA
gactacggcggtatggacgtc

SEQ ID NO: 21948 - protein, 7 aa, synthetic construct
  REGION 1..7: note = Description of Artificial Sequence: Synthetic peptide
DYGGMDV

SEQ ID NO: 21949 - DNA, 27 bp, synthetic construct
  misc_feature 1..27: note = Description of Artificial Sequence: Synthetic oligonucleotide
  source 1..27: mol_type = other DNA
agtagtggctggtactggttcgacccc

SEQ ID NO: 21950 - protein, 9 aa, synthetic construct
  REGION 1..9: note = Description of Artificial Sequence: Synthetic peptide
SSGWYWFDP

SEQ ID NO: 21951 - DNA, 21 bp, synthetic construct
  misc_feature 1..21: note = Description of Artificial Sequence: Synthetic oligonucleotide
  source 1..21: mol_type = other DNA
gactacggcggtatggacgtc

SEQ ID NO: 21952 - protein, 7 aa, synthetic construct
  REGION 1..7: note = Description of Artificial Sequence: Synthetic peptide
DYGGMDV

SEQ ID NO: 21953 - DNA, 21 bp, synthetic construct
  misc_feature 1..21: note = Description of Artificial Sequence: Synthetic oligonucleotide
  source 1..21: mol_type = other DNA
gactacggtgggcttgactac

SEQ ID NO: 21954 - protein, 7 aa, synthetic construct
  REGION 1..7: note = Description of Artificial Sequence: Synthetic peptide
DYGGLDY

SEQ ID NO: 21955 - DNA, 21 bp, synthetic construct
  misc_feature 1..21: note = Description of Artificial Sequence: Synthetic oligonucleotide
  source 1..21: mol_type = other DNA
gactacgggggtttggacgtc

SEQ ID NO: 21956 - protein, 7 aa, synthetic construct
  REGION 1..7: note = Description of Artificial Sequence: Synthetic peptide
DYGGLDV

SEQ ID NO: 21957 - DNA, 21 bp, synthetic construct
  misc_feature 1..21: note = Description of Artificial Sequence: Synthetic oligonucleotide
  source 1..21: mol_type = other DNA
gactacggcggtatggacgtc

SEQ ID NO: 21958 - protein, 7 aa, synthetic construct
  REGION 1..7: note = Description of Artificial Sequence: Synthetic peptide
DYGGMDV

SEQ ID NO: 21959 - DNA, 27 bp, synthetic construct
  misc_feature 1..27: note = Description of Artificial Sequence: Synthetic oligonucleotide
  source 1..27: mol_type = other DNA
accagtggctggaacttctttgactac

SEQ ID NO: 21960 - protein, 9 aa, synthetic construct
  REGION 1..9: note = Description of Artificial Sequence: Synthetic peptide
TSGWNFFDY

SEQ ID NO: 21961 - DNA, 21 bp, synthetic construct
  misc_feature 1..21: note = Description of Artificial Sequence: Synthetic oligonucleotide
  source 1..21: mol_type = other DNA
gactacggtggtttggacgtc

SEQ ID NO: 21962 - protein, 7 aa, synthetic construct
  REGION 1..7: note = Description of Artificial Sequence: Synthetic peptide
DYGGLDV

SEQ ID NO: 21963 - DNA, 27 bp, synthetic construct
  misc_feature 1..27: note = Description of Artificial Sequence: Synthetic oligonucleotide
  source 1..27: mol_type = other DNA
agtagtggctggtacaaatttgactac

SEQ ID NO: 21964 - protein, 9 aa, synthetic construct
  REGION 1..9: note = Description of Artificial Sequence: Synthetic peptide
SSGWYKFDY

SEQ ID NO: 21965 - DNA, 27 bp, synthetic construct
  misc_feature 1..27: note = Description of Artificial Sequence: Synthetic oligonucleotide
  source 1..27: mol_type = other DNA
agtagtggctggtactggttcgacccc

SEQ ID NO: 21966 - protein, 9 aa, synthetic construct
  REGION 1..9: note = Description of Artificial Sequence: Synthetic peptide
SSGWYWFDP

SEQ ID NO: 21967 - DNA, 21 bp, synthetic construct
  misc_feature 1..21: note = Description of Artificial Sequence: Synthetic oligonucleotide
  source 1..21: mol_type = other DNA
gactacggcggtatggacgtc

SEQ ID NO: 21968 - protein, 7 aa, synthetic construct
  REGION 1..7: note = Description of Artificial Sequence: Synthetic peptide
DYGGMDV

SEQ ID NO: 21969 - DNA, 21 bp, synthetic construct
  misc_feature 1..21: note = Description of Artificial Sequence: Synthetic oligonucleotide
  source 1..21: mol_type = other DNA
gactacggcggtatggacgtc

SEQ ID NO: 21970 - protein, 7 aa, synthetic construct
  REGION 1..7: note = Description of Artificial Sequence: Synthetic peptide
DYGGMDV

SEQ ID NO: 21971 - DNA, 27 bp, synthetic construct
  misc_feature 1..27: note = Description of Artificial Sequence: Synthetic oligonucleotide
  source 1..27: mol_type = other DNA
tccagtggctggtcctggttcgacccc

SEQ ID NO: 21972 - protein, 9 aa, synthetic construct
  REGION 1..9: note = Description of Artificial Sequence: Synthetic peptide
SSGWSWFDP

SEQ ID NO: 21973 - DNA, 21 bp, synthetic construct
  misc_feature 1..21: note = Description of Artificial Sequence: Synthetic oligonucleotide
  source 1..21: mol_type = other DNA
gactacggcggtatggacgtc

SEQ ID NO: 21974 - protein, 7 aa, synthetic construct
  REGION 1..7: note = Description of Artificial Sequence: Synthetic peptide
DYGGMDV

SEQ ID NO: 21975 - DNA, 21 bp, synthetic construct
  misc_feature 1..21: note = Description of Artificial Sequence: Synthetic oligonucleotide
  source 1..21: mol_type = other DNA
gactacggtggtttggacgtc

SEQ ID NO: 21976 - protein, 7 aa, synthetic construct
  REGION 1..7: note = Description of Artificial Sequence: Synthetic peptide
DYGGLDV

SEQ ID NO: 21977 - DNA, 21 bp, synthetic construct
  misc_feature 1..21: note = Description of Artificial Sequence: Synthetic oligonucleotide
  source 1..21: mol_type = other DNA
gactacggcggtatggacgtc

SEQ ID NO: 21978 - protein, 7 aa, synthetic construct
  REGION 1..7: note = Description of Artificial Sequence: Synthetic peptide
DYGGMDV

SEQ ID NO: 21979 - DNA, 33 bp, synthetic construct
  misc_feature 1..33: note = Description of Artificial Sequence: Synthetic oligonucleotide
  source 1..33: mol_type = other DNA
gattttggagtgggctactacggtatggacgtc

SEQ ID NO: 21980 - protein, 11 aa, synthetic construct
  REGION 1..11: note = Description of Artificial Sequence: Synthetic peptide
DFGVGYYGMDV

SEQ ID NO: 21981 - DNA, 21 bp, synthetic construct
  misc_feature 1..21: note = Description of Artificial Sequence: Synthetic oligonucleotide
  source 1..21: mol_type = other DNA
gactacggcggtatggacgtc

SEQ ID NO: 21982 - protein, 7 aa, synthetic construct
  REGION 1..7: note = Description of Artificial Sequence: Synthetic peptide
DYGGMDV

SEQ ID NO: 21983 - DNA, 27 bp, synthetic construct
  misc_feature 1..27: note = Description of Artificial Sequence: Synthetic oligonucleotide
  source 1..27: mol_type = other DNA
agcagtggctggtactggttcgacccc

SEQ ID NO: 21984 - protein, 9 aa, synthetic construct
  REGION 1..9: note = Description of Artificial Sequence: Synthetic peptide
SSGWYWFDP

SEQ ID NO: 21985 - DNA, 27 bp, synthetic construct
  misc_feature 1..27: note = Description of Artificial Sequence: Synthetic oligonucleotide
  source 1..27: mol_type = other DNA
agcagtggctggtacttctttgactac

SEQ ID NO: 21986 - protein, 9 aa, synthetic construct
  REGION 1..9: note = Description of Artificial Sequence: Synthetic peptide
SSGWYFFDY

SEQ ID NO: 21987 - DNA, 21 bp, synthetic construct
  misc_feature 1..21: note = Description of Artificial Sequence: Synthetic oligonucleotide
  source 1..21: mol_type = other DNA
gactacggcggtatggacgtc

SEQ ID NO: 21988 - protein, 7 aa, synthetic construct
  REGION 1..7: note = Description of Artificial Sequence: Synthetic peptide
DYGGMDV

SEQ ID NO: 21989 - DNA, 27 bp, synthetic construct
  misc_feature 1..27: note = Description of Artificial Sequence: Synthetic oligonucleotide
  source 1..27: mol_type = other DNA
agcagtggctggtactactttgactac

SEQ ID NO: 21990 - protein, 9 aa, synthetic construct
  REGION 1..9: note = Description of Artificial Sequence: Synthetic peptide
SSGWYYFDY

SEQ ID NO: 21991 - DNA, 21 bp, synthetic construct
  misc_feature 1..21: note = Description of Artificial Sequence: Synthetic oligonucleotide
  source 1..21: mol_type = other DNA
gactacggcggtatggacgtc

SEQ ID NO: 21992 - protein, 7 aa, synthetic construct
  REGION 1..7: note = Description of Artificial Sequence: Synthetic peptide
DYGGMDV

SEQ ID NO: 21993 - DNA, 27 bp, synthetic construct
  misc_feature 1..27: note = Description of Artificial Sequence: Synthetic oligonucleotide
  source 1..27: mol_type = other DNA
agcagtggctggtactggttcgacccc

SEQ ID NO: 21994 - protein, 9 aa, synthetic construct
  REGION 1..9: note = Description of Artificial Sequence: Synthetic peptide
SSGWYWFDP

SEQ ID NO: 21995 - DNA, 27 bp, synthetic construct
  misc_feature 1..27: note = Description of Artificial Sequence: Synthetic oligonucleotide
  source 1..27: mol_type = other DNA
agcagtggctggtactactttgactac

SEQ ID NO: 21996 - protein, 9 aa, synthetic construct
  REGION 1..9: note = Description of Artificial Sequence: Synthetic peptide
SSGWYYFDY

SEQ ID NO: 21997 - DNA, 60 bp, synthetic construct
  misc_feature 1..60: note = Description of Artificial Sequence: Synthetic oligonucleotide
  source 1..60: mol_type = other DNA
gggttttacgattttttgactggttattcccccacctactactactacgatatggacgtc

SEQ ID NO: 21998 - protein, 20 aa, synthetic construct
  REGION 1..20: note = Description of Artificial Sequence: Synthetic peptide
GFYDFLTGYSPTYYYYDMDV

SEQ ID NO: 21999 - DNA, 21 bp, synthetic construct
  misc_feature 1..21: note = Description of Artificial Sequence: Synthetic oligonucleotide
  source 1..21: mol_type = other DNA
gactacggcggtatggacgtc

SEQ ID NO: 22000 - protein, 7 aa, synthetic construct
  REGION 1..7: note = Description of Artificial Sequence: Synthetic peptide
DYGGMDV

SEQ ID NO: 22001 - DNA, 21 bp, synthetic construct
  misc_feature 1..21: note = Description of Artificial Sequence: Synthetic oligonucleotide
  source 1..21: mol_type = other DNA
gactacggcggtatggacgtc

SEQ ID NO: 22002 - protein, 7 aa, synthetic construct
  REGION 1..7: note = Description of Artificial Sequence: Synthetic peptide
DYGGMDV

SEQ ID NO: 22003 - DNA, 21 bp, synthetic construct
  misc_feature 1..21: note = Description of Artificial Sequence: Synthetic oligonucleotide
  source 1..21: mol_type = other DNA
gactacggcggtatggacgtc

SEQ ID NO: 22004 - protein, 7 aa, synthetic construct
  REGION 1..7: note = Description of Artificial Sequence: Synthetic peptide
DYGGMDV

SEQ ID NO: 22005 - DNA, 27 bp, synthetic construct
  misc_feature 1..27: note = Description of Artificial Sequence: Synthetic oligonucleotide
  source 1..27: mol_type = other DNA
agcagtggctggtactactttgactcc

SEQ ID NO: 22006 - protein, 9 aa, synthetic construct
  REGION 1..9: note = Description of Artificial Sequence: Synthetic peptide
SSGWYYFDS

SEQ ID NO: 22007 - DNA, 21 bp, synthetic construct
  misc_feature 1..21: note = Description of Artificial Sequence: Synthetic oligonucleotide
  source 1..21: mol_type = other DNA
gactacggcggtatggacgtc

SEQ ID NO: 22008 - protein, 7 aa, synthetic construct
  REGION 1..7: note = Description of Artificial Sequence: Synthetic peptide
DYGGMDV

SEQ ID NO: 22009 - DNA, 51 bp, synthetic construct
  misc_feature 1..51: note = Description of Artificial Sequence: Synthetic oligonucleotide
  source 1..51: mol_type = other DNA
gctcttgactacggtgactccttgggctactactactacggtatggacgtc

SEQ ID NO: 22010 - protein, 17 aa, synthetic construct
  REGION 1..17: note = Description of Artificial Sequence: Synthetic peptide
ALDYGDSLGYYYYGMDV

SEQ ID NO: 22011 - DNA, 21 bp, synthetic construct
  misc_feature 1..21: note = Description of Artificial Sequence: Synthetic oligonucleotide
  source 1..21: mol_type = other DNA
gactacggcggtatggacgtc

SEQ ID NO: 22012 - protein, 7 aa, synthetic construct
  REGION 1..7: note = Description of Artificial Sequence: Synthetic peptide
DYGGMDV

SEQ ID NO: 22013 - DNA, 21 bp, synthetic construct
  misc_feature 1..21: note = Description of Artificial Sequence: Synthetic oligonucleotide
  source 1..21: mol_type = other DNA
gactacggcggtatggacgtc

SEQ ID NO: 22014 - protein, 7 aa, synthetic construct
  REGION 1..7: note = Description of Artificial Sequence: Synthetic peptide
DYGGMDV

SEQ ID NO: 22015 - DNA, 21 bp, synthetic construct
  misc_feature 1..21: note = Description of Artificial Sequence: Synthetic oligonucleotide
  source 1..21: mol_type = other DNA
gactacggcggtatggacgtc

SEQ ID NO: 22016 - protein, 7 aa, synthetic construct
  REGION 1..7: note = Description of Artificial Sequence: Synthetic peptide
DYGGMDV

SEQ ID NO: 22017 - DNA, 21 bp, synthetic construct
  misc_feature 1..21: note = Description of Artificial Sequence: Synthetic oligonucleotide
  source 1..21: mol_type = other DNA
gactacggtggtttggacgtc

SEQ ID NO: 22018 - protein, 7 aa, synthetic construct
  REGION 1..7: note = Description of Artificial Sequence: Synthetic peptide
DYGGLDV

SEQ ID NO: 22019 - DNA, 21 bp, synthetic construct
  misc_feature 1..21: note = Description of Artificial Sequence: Synthetic oligonucleotide
  source 1..21: mol_type = other DNA
gactacggcggtatggacgtc

SEQ ID NO: 22020 - protein, 7 aa, synthetic construct
  REGION 1..7: note = Description of Artificial Sequence: Synthetic peptide
DYGGMDV

SEQ ID NO: 22021 - DNA, 21 bp, synthetic construct
  misc_feature 1..21: note = Description of Artificial Sequence: Synthetic oligonucleotide
  source 1..21: mol_type = other DNA
gactacggcggtatggacgtc

SEQ ID NO: 22022 - protein, 7 aa, synthetic construct
  REGION 1..7: note = Description of Artificial Sequence: Synthetic peptide
DYGGMDV

SEQ ID NO: 22023 - DNA, 21 bp, synthetic construct
  misc_feature 1..21: note = Description of Artificial Sequence: Synthetic oligonucleotide
  source 1..21: mol_type = other DNA
gactacggcggtatggacgtc

SEQ ID NO: 22024 - protein, 7 aa, synthetic construct
  REGION 1..7: note = Description of Artificial Sequence: Synthetic peptide
DYGGMDV

SEQ ID NO: 22025 - DNA, 24 bp, synthetic construct
  misc_feature 1..24: note = Description of Artificial Sequence: Synthetic oligonucleotide
  source 1..24: mol_type = other DNA
gagatggggtggttagatgactac

SEQ ID NO: 22026 - protein, 8 aa, synthetic construct
  REGION 1..8: note = Description of Artificial Sequence: Synthetic peptide
EMGWLDDY

SEQ ID NO: 22027 - DNA, 27 bp, synthetic construct
  misc_feature 1..27: note = Description of Artificial Sequence: Synthetic oligonucleotide
  source 1..27: mol_type = other DNA
tccagtggctggcactggttcgacccc

SEQ ID NO: 22028 - protein, 9 aa, synthetic construct
  REGION 1..9: note = Description of Artificial Sequence: Synthetic peptide
SSGWHWFDP

SEQ ID NO: 22029 - DNA, 27 bp, synthetic construct
  misc_feature 1..27: note = Description of Artificial Sequence: Synthetic oligonucleotide
  source 1..27: mol_type = other DNA
agcagtggctggtacatctttgactac

SEQ ID NO: 22030 - protein, 9 aa, synthetic construct
  REGION 1..9: note = Description of Artificial Sequence: Synthetic peptide
SSGWYIFDY

SEQ ID NO: 22031 - DNA, 21 bp, synthetic construct
  misc_feature 1..21: note = Description of Artificial Sequence: Synthetic oligonucleotide
  source 1..21: mol_type = other DNA
gactacggcggtatggacgtc

SEQ ID NO: 22032 - protein, 7 aa, synthetic construct
  REGION 1..7: note = Description of Artificial Sequence: Synthetic peptide
DYGGMDV

SEQ ID NO: 22033 - DNA, 51 bp, synthetic construct; identical to SEQ ID NO: 21773
  misc_feature 1..51: note = Description of Artificial Sequence: Synthetic oligonucleotide
  source 1..51: mol_type = other DNA

SEQ ID NO: 22034 - protein, 17 aa, synthetic construct
  REGION 1..17: note = Description of Artificial Sequence: Synthetic peptide
VLDYGDSLGYYYYGMDV

SEQ ID NO: 22035 - DNA, 27 bp, synthetic construct
  misc_feature 1..27: note = Description of Artificial Sequence: Synthetic oligonucleotide
  source 1..27: mol_type = other DNA
agcagtggctggtactggttcgacccc

SEQ ID NO: 22036 - protein, 9 aa, synthetic construct
  REGION 1..9: note = Description of Artificial Sequence: Synthetic peptide
SSGWYWFDP

SEQ ID NO: 22037 - DNA, 21 bp, synthetic construct
  misc_feature 1..21: note = Description of Artificial Sequence: Synthetic oligonucleotide
  source 1..21: mol_type = other DNA
gactacggcggtatggacgtc

SEQ ID NO: 22038 - protein, 7 aa, synthetic construct
  REGION 1..7: note = Description of Artificial Sequence: Synthetic peptide
DYGGMDV

SEQ ID NO: 22039 - DNA, 21 bp, synthetic construct
  misc_feature 1..21: note = Description of Artificial Sequence: Synthetic oligonucleotide
  source 1..21: mol_type = other DNA
gactacggcggtatggacgtc

SEQ ID NO: 22040 - protein, 7 aa, synthetic construct
  REGION 1..7: note = Description of Artificial Sequence: Synthetic peptide
DYGGMDV

SEQ ID NO: 22041 - DNA, 21 bp, synthetic construct
  misc_feature 1..21: note = Description of Artificial Sequence: Synthetic oligonucleotide
  source 1..21: mol_type = other DNA
gactacggcggtatggacgtc

SEQ ID NO: 22042 - protein, 7 aa, synthetic construct
  REGION 1..7: note = Description of Artificial Sequence: Synthetic peptide
DYGGMDV

SEQ ID NO: 22043 - DNA, 21 bp, synthetic construct
  misc_feature 1..21: note = Description of Artificial Sequence: Synthetic oligonucleotide
  source 1..21: mol_type = other DNA
gactacggcggtatggacgtc

SEQ ID NO: 22044 - protein, 7 aa, synthetic construct
  REGION 1..7: note = Description of Artificial Sequence: Synthetic peptide
DYGGMDV

SEQ ID NO: 22045 - DNA, 27 bp, synthetic construct
  misc_feature 1..27: note = Description of Artificial Sequence: Synthetic oligonucleotide
  source 1..27: mol_type = other DNA
agcagtggctggtactggttcgacccc

SEQ ID NO: 22046 - protein, 9 aa, synthetic construct
  REGION 1..9: note = Description of Artificial Sequence: Synthetic peptide
SSGWYWFDP

SEQ ID NO: 22047 - DNA, 21 bp, synthetic construct
  misc_feature 1..21: note = Description of Artificial Sequence: Synthetic oligonucleotide
  source 1..21: mol_type = other DNA
gactacggcggtatggacgtc

SEQ ID NO: 22048 - protein, 7 aa, synthetic construct
  REGION 1..7: note = Description of Artificial Sequence: Synthetic peptide
DYGGMDV

SEQ ID NO: 22049 - DNA, 21 bp, synthetic construct
  misc_feature 1..21: note = Description of Artificial Sequence: Synthetic oligonucleotide
  source 1..21: mol_type = other DNA
gactacggcggtttggacgtc

SEQ ID NO: 22050 - protein, 7 aa, synthetic construct
  REGION 1..7: note = Description of Artificial Sequence: Synthetic peptide
DYGGLDV

SEQ ID NO: 22051 - DNA, 51 bp, synthetic construct; identical to SEQ ID NO: 22009
  misc_feature 1..51: note = Description of Artificial Sequence: Synthetic oligonucleotide
  source 1..51: mol_type = other DNA

SEQ ID NO: 22052 - protein, 17 aa, synthetic construct
  REGION 1..17: note = Description of Artificial Sequence: Synthetic peptide
ALDYGDSLGYYYYGMDV

SEQ ID NO: 22053 - DNA, 36 bp, synthetic construct; identical to SEQ ID NO: 21941
  misc_feature 1..36: note = Description of Artificial Sequence: Synthetic oligonucleotide
  source 1..36: mol_type = other DNA

SEQ ID NO: 22054 - protein, 12 aa, synthetic construct
  REGION 1..12: note = Description of Artificial Sequence: Synthetic peptide
DPFIVGATYFDY

SEQ ID NO: 22055 - DNA, 21 bp, synthetic construct
  misc_feature 1..21: note = Description of Artificial Sequence: Synthetic oligonucleotide
  source 1..21: mol_type = other DNA
gactacggcggtatggacgtc

SEQ ID NO: 22056 - protein, 7 aa, synthetic construct
  REGION 1..7: note = Description of Artificial Sequence: Synthetic peptide
DYGGMDV

SEQ ID NO: 22057 - DNA, 27 bp, synthetic construct
  misc_feature 1..27: note = Description of Artificial Sequence: Synthetic oligonucleotide
  source 1..27: mol_type = other DNA
agcagtggctggtacttttttgactac

SEQ ID NO: 22058 - protein, 9 aa, synthetic construct
  REGION 1..9: note = Description of Artificial Sequence: Synthetic peptide
SSGWYFFDY

SEQ ID NO: 22059 - DNA, 21 bp, synthetic construct
  misc_feature 1..21: note = Description of Artificial Sequence: Synthetic oligonucleotide
  source 1..21: mol_type = other DNA
gactacggcggtatggacgtc

SEQ ID NO: 22060 - protein, 7 aa, synthetic construct
  REGION 1..7: note = Description of Artificial Sequence: Synthetic peptide
DYGGMDV

SEQ ID NO: 22061 - DNA, 27 bp, synthetic construct
  misc_feature 1..27: note = Description of Artificial Sequence: Synthetic oligonucleotide
  source 1..27: mol_type = other DNA
accagtggcgggaagttcttcgactac

SEQ ID NO: 22062 - protein, 9 aa, synthetic construct
  REGION 1..9: note = Description of Artificial Sequence: Synthetic peptide
TSGGKFFDY

SEQ ID NO: 22063 - DNA, 21 bp, synthetic construct
  misc_feature 1..21: note = Description of Artificial Sequence: Synthetic oligonucleotide
  source 1..21: mol_type = other DNA
gactacggcggtatggacgtc

SEQ ID NO: 22064 - protein, 7 aa, synthetic construct
  REGION 1..7: note = Description of Artificial Sequence: Synthetic peptide
DYGGMDV

SEQ ID NO: 22065 - DNA, 21 bp, synthetic construct
  misc_feature 1..21: note = Description of Artificial Sequence: Synthetic oligonucleotide
  source 1..21: mol_type = other DNA
gactacggcggtatggacgtc

SEQ ID NO: 22066 - protein, 7 aa, synthetic construct
  REGION 1..7: note = Description of Artificial Sequence: Synthetic peptide
DYGGMDV

SEQ ID NO: 22067 - DNA, 21 bp, synthetic construct
  misc_feature 1..21: note = Description of Artificial Sequence: Synthetic oligonucleotide
  source 1..21: mol_type = other DNA
gactacggtgggcttgactac

SEQ ID NO: 22068 - protein, 7 aa, synthetic construct
  REGION 1..7: note = Description of Artificial Sequence: Synthetic peptide
DYGGLDY

SEQ ID NO: 22069 - DNA, 21 bp, synthetic construct
  misc_feature 1..21: note = Description of Artificial Sequence: Synthetic oligonucleotide
  source 1..21: mol_type = other DNA
gactacggcggtatggacgtc

SEQ ID NO: 22070 - protein, 7 aa, synthetic construct
  REGION 1..7: note = Description of Artificial Sequence: Synthetic peptide
DYGGMDV

SEQ ID NO: 22071 - DNA, 42 bp, synthetic construct
  misc_feature 1..42: note = Description of Artificial Sequence: Synthetic oligonucleotide
  source 1..42: mol_type = other DNA
gaaaaatatagcagtggctggtacgactacggtatggacgtc

SEQ ID NO: 22072 - protein, 14 aa, synthetic construct
  REGION 1..14: note = Description of Artificial Sequence: Synthetic peptide
EKYSSGWYDYGMDV

SEQ ID NO: 22073 - DNA, 27 bp, synthetic construct
  misc_feature 1..27: note = Description of Artificial Sequence: Synthetic oligonucleotide
  source 1..27: mol_type = other DNA
tccagtggctggcactggttcgacccc

SEQ ID NO: 22074 - protein, 9 aa, synthetic construct
  REGION 1..9: note = Description of Artificial Sequence: Synthetic peptide
SSGWHWFDP

SEQ ID NO: 22075 - DNA, 27 bp, synthetic construct
  misc_feature 1..27: note = Description of Artificial Sequence: Synthetic oligonucleotide
  source 1..27: mol_type = other DNA
agcagtggctggtactactttgactac

SEQ ID NO: 22076 - protein, 9 aa, synthetic construct
  REGION 1..9: note = Description of Artificial Sequence: Synthetic peptide
SSGWYYFDY

SEQ ID NO: 22077 - DNA, 27 bp, synthetic construct
  misc_feature 1..27: note = Description of Artificial Sequence: Synthetic oligonucleotide
  source 1..27: mol_type = other DNA
tccagtggctggaagtggttcgacccc

SEQ ID NO: 22078 - protein, 9 aa, synthetic construct
  REGION 1..9: note = Description of Artificial Sequence: Synthetic peptide
SSGWKWFDP

SEQ ID NO: 22079 - DNA, 27 bp, synthetic construct
  misc_feature 1..27: note = Description of Artificial Sequence: Synthetic oligonucleotide
  source 1..27: mol_type = other DNA
accagtggctggaagttctttgactac

SEQ ID NO: 22080 - protein, 9 aa, synthetic construct
  REGION 1..9: note = Description of Artificial Sequence: Synthetic peptide
TSGWKFFDY

SEQ ID NO: 22081 - DNA, 21 bp, synthetic construct
  misc_feature 1..21: note = Description of Artificial Sequence: Synthetic oligonucleotide
  source 1..21: mol_type = other DNA
gactacggcggtatggacgtc

SEQ ID NO: 22082 - protein, 7 aa, synthetic construct
  REGION 1..7: note = Description of Artificial Sequence: Synthetic peptide
DYGGMDV

SEQ ID NO: 22083 - DNA, 21 bp, synthetic construct
  misc_feature 1..21: note = Description of Artificial Sequence: Synthetic oligonucleotide
  source 1..21: mol_type = other DNA
gactacggcggtatggacgtc

SEQ ID NO: 22084 - protein, 7 aa, synthetic construct
  REGION 1..7: note = Description of Artificial Sequence: Synthetic peptide
DYGGMDV

SEQ ID NO: 22085 - DNA, 36 bp, synthetic construct; identical to SEQ ID NO: 21717
  misc_feature 1..36: note = Description of Artificial Sequence: Synthetic oligonucleotide
  source 1..36: mol_type = other DNA

SEQ ID NO: 22086 - protein, 12 aa, synthetic construct
  REGION 1..12: note = Description of Artificial Sequence: Synthetic peptide
DRNIVGATYFES

SEQ ID NO: 22087 - DNA, 27 bp, synthetic construct
  misc_feature 1..27: note = Description of Artificial Sequence: Synthetic oligonucleotide
  source 1..27: mol_type = other DNA
tccagtggctggaactggttcgacccc

SEQ ID NO: 22088 - protein, 9 aa, synthetic construct
  REGION 1..9: note = Description of Artificial Sequence: Synthetic peptide
SSGWNWFDP

SEQ ID NO: 22089 - DNA, 21 bp, synthetic construct
  misc_feature 1..21: note = Description of Artificial Sequence: Synthetic oligonucleotide
  source 1..21: mol_type = other DNA
gactacggcggtatggacgtc

SEQ ID NO: 22090 - protein, 7 aa, synthetic construct
  REGION 1..7: note = Description of Artificial Sequence: Synthetic peptide
DYGGMDV

SEQ ID NO: 22091 - DNA, 21 bp, synthetic construct
  misc_feature 1..21: note = Description of Artificial Sequence: Synthetic oligonucleotide
  source 1..21: mol_type = other DNA
gactacggcggtatggacgtc

SEQ ID NO: 22092 - protein, 7 aa, synthetic construct
  REGION 1..7: note = Description of Artificial Sequence: Synthetic peptide
DYGGMDV

SEQ ID NO: 22093 - DNA, 21 bp, synthetic construct
  misc_feature 1..21: note = Description of Artificial Sequence: Synthetic oligonucleotide
  source 1..21: mol_type = other DNA
gactacggcggtatggacgtc

SEQ ID NO: 22094 - protein, 7 aa, synthetic construct
  REGION 1..7: note = Description of Artificial Sequence: Synthetic peptide
DYGGMDV

SEQ ID NO: 22095 - DNA, 27 bp, synthetic construct
  misc_feature 1..27: note = Description of Artificial Sequence: Synthetic oligonucleotide
  source 1..27: mol_type = other DNA
agcagtggctggtactggttcgacccc

SEQ ID NO: 22096 - protein, 9 aa, synthetic construct
  REGION 1..9: note = Description of Artificial Sequence: Synthetic peptide
SSGWYWFDP

SEQ ID NO: 22097 - DNA, 27 bp, synthetic construct
  misc_feature 1..27: note = Description of Artificial Sequence: Synthetic oligonucleotide
  source 1..27: mol_type = other DNA
agcagtggctggtactggttcgacccc

SEQ ID NO: 22098 - protein, 9 aa, synthetic construct
  REGION 1..9: note = Description of Artificial Sequence: Synthetic peptide
SSGWYWFDP

SEQ ID NO: 22099 - DNA, 27 bp, synthetic construct
  misc_feature 1..27: note = Description of Artificial Sequence: Synthetic oligonucleotide
  source 1..27: mol_type = other DNA
tccagtggctggtactggttcgacccc

SEQ ID NO: 22100 - protein, 9 aa, synthetic construct
  REGION 1..9: note = Description of Artificial Sequence: Synthetic peptide
SSGWYWFDP

SEQ ID NO: 22101 - DNA, 27 bp, synthetic construct
  misc_feature 1..27: note = Description of Artificial Sequence: Synthetic oligonucleotide
  source 1..27: mol_type = other DNA
cttgactctaactggggtcttgactac

SEQ ID NO: 22102 - protein, 9 aa, synthetic construct
  REGION 1..9: note = Description of Artificial Sequence: Synthetic peptide
LDSNWGLDY

SEQ ID NO: 22103 - DNA, 51 bp, synthetic construct; identical to SEQ ID NO: 21913
  misc_feature 1..51: note = Description of Artificial Sequence: Synthetic oligonucleotide
  source 1..51: mol_type = other DNA

SEQ ID NO: 22104 - protein, 17 aa, synthetic construct
  REGION 1..17: note = Description of Artificial Sequence: Synthetic peptide
GFYDTLTGSGYYYVMDV

SEQ ID NO: 22105 - DNA, 27 bp, synthetic construct
  misc_feature 1..27: note = Description of Artificial Sequence: Synthetic oligonucleotide
  source 1..27: mol_type = other DNA
tccagtggctggtcctggttcgacccc

SEQ ID NO: 22106 - protein, 9 aa, synthetic construct
  REGION 1..9: note = Description of Artificial Sequence: Synthetic peptide
SSGWSWFDP

SEQ ID NO: 22107 - DNA, 27 bp, synthetic construct
  misc_feature 1..27: note = Description of Artificial Sequence: Synthetic oligonucleotide
  source 1..27: mol_type = other DNA
agtagtggctggtacaaatttgactac

SEQ ID NO: 22108 - protein, 9 aa, synthetic construct
  REGION 1..9: note = Description of Artificial Sequence: Synthetic peptide
SSGWYKFDY

SEQ ID NO: 22109 - DNA, 51 bp, synthetic construct
  misc_feature 1..51: note = Description of Artificial Sequence: Synthetic oligonucleotide
  source 1..51: mol_type = other DNA
ggcggctacgatgttttgcctgggaataactactactacgatatggacgtc

SEQ ID NO: 22110 - protein, 17 aa, synthetic construct
  REGION 1..17: note = Description of Artificial Sequence: Synthetic peptide
GGYDVLPGNNYYYDMDV

SEQ ID NO: 22111 - DNA, 27 bp, synthetic construct
  misc_feature 1..27: note = Description of Artificial Sequence: Synthetic oligonucleotide
  source 1..27: mol_type = other DNA
agcagtggctggtacttttttgactac

SEQ ID NO: 22112 - protein, 9 aa, synthetic construct
  REGION 1..9: note = Description of Artificial Sequence: Synthetic peptide
SSGWYFFDY

SEQ ID NO: 22113 - DNA, 21 bp, synthetic construct
  misc_feature 1..21: note = Description of Artificial Sequence: Synthetic oligonucleotide
  source 1..21: mol_type = other DNA
gactacggcggtatggacgtc

SEQ ID NO: 22114 - protein, 7 aa, synthetic construct
  REGION 1..7: note = Description of Artificial Sequence: Synthetic peptide
DYGGMDV

SEQ ID NO: 22115 - DNA, 27 bp, synthetic construct
  misc_feature 1..27: note = Description of Artificial Sequence: Synthetic oligonucleotide
  source 1..27: mol_type = other DNA
agcagtggctggtactggttcgacccc

SEQ ID NO: 22116 - protein, 9 aa, synthetic construct
  REGION 1..9: note = Description of Artificial Sequence: Synthetic peptide
SSGWYWFDP

SEQ ID NO: 22117 - DNA, 21 bp, synthetic construct
  misc_feature 1..21: note = Description of Artificial Sequence: Synthetic oligonucleotide
  source 1..21: mol_type = other DNA
gactacggcggtatggacgtc

SEQ ID NO: 22118 - protein, 7 aa, synthetic construct
  REGION 1..7: note = Description of Artificial Sequence: Synthetic peptide
DYGGMDV

SEQ ID NO: 22119 - DNA, 39 bp, synthetic construct
  misc_feature 1..39: note = Description of Artificial Sequence: Synthetic oligonucleotide
  source 1..39: mol_type = other DNA
gatcgtttagtgggagctaccgctgatgcttttgatatc

SEQ ID NO: 22120 - protein, 13 aa, synthetic construct
  REGION 1..13: note = Description of Artificial Sequence: Synthetic peptide
DRLVGATADAFDI

SEQ ID NO: 22121 - DNA, 27 bp, synthetic construct
  misc_feature 1..27: note = Description of Artificial Sequence: Synthetic oligonucleotide
  source 1..27: mol_type = other DNA
cttgatctcctgtggagttttgactac

SEQ ID NO: 22122 - protein, 9 aa, synthetic construct
  REGION 1..9: note = Description of Artificial Sequence: Synthetic peptide
LDLLWSFDY

SEQ ID NO: 22123 - DNA, 39 bp, synthetic construct
  misc_feature 1..39: note = Description of Artificial Sequence: Synthetic oligonucleotide
  source 1..39: mol_type = other DNA
cgggtgacggactacggtggtaacgactggttcgacccc

SEQ ID NO: 22124 - protein, 13 aa, synthetic construct
  REGION 1..13: note = Description of Artificial Sequence: Synthetic peptide
RVTDYGGNDWFDP

SEQ ID NO: 22125 - DNA, 45 bp, synthetic construct
  misc_feature 1..45: note = Description of Artificial Sequence: Synthetic oligonucleotide
  source 1..45: mol_type = other DNA
atgggtatagaagtggctgtggactactactacggtatggacgtc

SEQ ID NO: 22126 - protein, 15 aa, synthetic construct
  REGION 1..15: note = Description of Artificial Sequence: Synthetic peptide
MGIEVAVDYYYGMDV

SEQ ID NO: 22127 - DNA, 27 bp, synthetic construct
  misc_feature 1..27: note = Description of Artificial Sequence: Synthetic oligonucleotide
  source 1..27: mol_type = other DNA
agcagtggctggtactactttgactac

SEQ ID NO: 22128 - protein, 9 aa, synthetic construct
  REGION 1..9: note = Description of Artificial Sequence: Synthetic peptide
SSGWYYFDY

SEQ ID NO: 22129 - DNA, 33 bp, synthetic construct
  misc_feature 1..33: note = Description of Artificial Sequence: Synthetic oligonucleotide
  source 1..33: mol_type = other DNA
gggaaatataactggaaccatgcttttgatatc

SEQ ID NO: 22130 - protein, 11 aa, synthetic construct
  REGION 1..11: note = Description of Artificial Sequence: Synthetic peptide
GKYNWNHAFDI

SEQ ID NO: 22131 - DNA, 42 bp, synthetic construct
  misc_feature 1..42: note = Description of Artificial Sequence: Synthetic oligonucleotide
  source 1..42: mol_type = other DNA
aaggataatgattacgtttgggggagtccttactttgactac

SEQ ID NO: 22132 - protein, 14 aa, synthetic construct
  REGION 1..14: note = Description of Artificial Sequence: Synthetic peptide
KDNDYVWGSPYFDY

SEQ ID NO: 22133 - DNA, 27 bp, synthetic construct
  misc_feature 1..27: note = Description of Artificial Sequence: Synthetic oligonucleotide
  source 1..27: mol_type = other DNA
agcagtggctggtactcctttgactac

SEQ ID NO: 22134 - protein, 9 aa, synthetic construct
  REGION 1..9: note = Description of Artificial Sequence: Synthetic peptide
SSGWYSFDY

SEQ ID NO: 22135 - DNA, 39 bp, synthetic construct; identical to SEQ ID NO: 22123
  misc_feature 1..39: note = Description of Artificial Sequence: Synthetic oligonucleotide
  source 1..39: mol_type = other DNA

SEQ ID NO: 22136 - protein, 13 aa, synthetic construct
  REGION 1..13: note = Description of Artificial Sequence: Synthetic peptide
RVTDYGGNDWFDP

SEQ ID NO: 22137 - DNA, 27 bp, synthetic construct
  misc_feature 1..27: note = Description of Artificial Sequence: Synthetic oligonucleotide
  source 1..27: mol_type = other DNA
agcagtggctggtacttttttgactac

SEQ ID NO: 22138 - protein, 9 aa, synthetic construct
  REGION 1..9: note = Description of Artificial Sequence: Synthetic peptide
SSGWYFFDY

SEQ ID NO: 22139 - DNA, 24 bp, synthetic construct
  misc_feature 1..24: note = Description of Artificial Sequence: Synthetic oligonucleotide
  source 1..24: mol_type = other DNA
gaattgggatttctctctgactat

SEQ ID NO: 22140 - protein, 8 aa, synthetic construct
  REGION 1..8: note = Description of Artificial Sequence: Synthetic peptide
ELGFLSDY

SEQ ID NO: 22141 - DNA, 27 bp, synthetic construct
  misc_feature 1..27: note = Description of Artificial Sequence: Synthetic oligonucleotide
  source 1..27: mol_type = other DNA
ggtagcagctcgtccgggtttgactac

SEQ ID NO: 22142 - protein, 9 aa, synthetic construct
  REGION 1..9: note = Description of Artificial Sequence: Synthetic peptide
GSSSSGFDY

SEQ ID NO: 22143 - DNA, 36 bp, synthetic construct
  misc_feature 1..36: note = Description of Artificial Sequence: Synthetic oligonucleotide
  source 1..36: mol_type = other DNA
aggtatagcagcagctggtcggggggtatggacgtc

SEQ ID NO: 22144 - protein, 12 aa, synthetic construct
  REGION 1..12: note = Description of Artificial Sequence: Synthetic peptide
RYSSSWSGGMDV

SEQ ID NO: 22145 - DNA, 36 bp, synthetic construct
  misc_feature 1..36: note = Description of Artificial Sequence: Synthetic oligonucleotide
  source 1..36: mol_type = other DNA
gggggagcttactactcctactacggtatggacgtc

SEQ ID NO: 22146 - protein, 12 aa, synthetic construct
  REGION 1..12: note = Description of Artificial Sequence: Synthetic peptide
GGAYYSYYGMDV

SEQ ID NO: 22147 - DNA, 33 bp, synthetic construct
  misc_feature 1..33: note = Description of Artificial Sequence: Synthetic oligonucleotide
  source 1..33: mol_type = other DNA
gggggatataactggaaccatgcttttgatttc

SEQ ID NO: 22148 - protein, 11 aa, synthetic construct
  REGION 1..11: note = Description of Artificial Sequence: Synthetic peptide
GGYNWNHAFDF

SEQ ID NO: 22149 - DNA, 27 bp, synthetic construct
  misc_feature 1..27: note = Description of Artificial Sequence: Synthetic oligonucleotide
  source 1..27: mol_type = other DNA
agcagtggctggtacttttttgactac

SEQ ID NO: 22150 - protein, 9 aa, synthetic construct
  REGION 1..9: note = Description of Artificial Sequence: Synthetic peptide
SSGWYFFDY

SEQ ID NO: 22151 - DNA, 27 bp, synthetic construct
  misc_feature 1..27: note = Description of Artificial Sequence: Synthetic oligonucleotide
  source 1..27: mol_type = other DNA
agcagtggctggtactactttgactac

SEQ ID NO: 22152 - protein, 9 aa, synthetic construct
  REGION 1..9: note = Description of Artificial Sequence: Synthetic peptide
SSGWYYFDY

SEQ ID NO: 22153 - DNA, 42 bp, synthetic construct; identical to SEQ ID NO: 20179
  misc_feature 1..42: note = Description of Artificial Sequence: Synthetic oligonucleotide
  source 1..42: mol_type = other DNA

SEQ ID NO: 22154 - protein, 14 aa, synthetic construct
  REGION 1..14: note = Description of Artificial Sequence: Synthetic peptide
ERYSSGWYDYGLDV

SEQ ID NO: 22155 - DNA, 27 bp, synthetic construct
  misc_feature 1..27: note = Description of Artificial Sequence: Synthetic oligonucleotide
  source 1..27: mol_type = other DNA
agcagtggctggtactggttcgacccc

SEQ ID NO: 22156 - protein, 9 aa, synthetic construct
  REGION 1..9: note = Description of Artificial Sequence: Synthetic peptide
SSGWYWFDP

SEQ ID NO: 22157 - DNA, 36 bp, synthetic construct
  misc_feature 1..36: note = Description of Artificial Sequence: Synthetic oligonucleotide
  source 1..36: mol_type = other DNA
aggtatagcagcagctggacggggggtatggacgtc

SEQ ID NO: 22158 - protein, 12 aa, synthetic construct
  REGION 1..12: note = Description of Artificial Sequence: Synthetic peptide
RYSSSWTGGMDV

SEQ ID NO: 22159 - DNA, 21 bp, synthetic construct
  misc_feature 1..21: note = Description of Artificial Sequence: Synthetic oligonucleotide
  source 1..21: mol_type = other DNA
gactacggtgtttttgactac

SEQ ID NO: 22160 - protein, 7 aa, synthetic construct
  REGION 1..7: note = Description of Artificial Sequence: Synthetic peptide
DYGVFDY

SEQ ID NO: 22161 - DNA, 15 bp, synthetic construct
  misc_feature 1..15: note = Description of Artificial Sequence: Synthetic oligonucleotide
  source 1..15: mol_type = other DNA
gatcggggcagttgc

SEQ ID NO: 22162 - protein, 5 aa, synthetic construct
  REGION 1..5: note = Description of Artificial Sequence: Synthetic peptide
DRGSC

SEQ ID NO: 22163 - DNA, 42 bp, synthetic construct
  misc_feature 1..42: note = Description of Artificial Sequence: Synthetic oligonucleotide
  source 1..42: mol_type = other DNA
aaggattatgattacgtttgggggagtccttactttgactac

SEQ ID NO: 22164 - protein, 14 aa, synthetic construct
  REGION 1..14: note = Description of Artificial Sequence: Synthetic peptide
KDYDYVWGSPYFDY

SEQ ID NO: 22165 - DNA, 42 bp, synthetic construct; identical to SEQ ID NO: 22163
  misc_feature 1..42: note = Description of Artificial Sequence: Synthetic oligonucleotide
  source 1..42: mol_type = other DNA

SEQ ID NO: 22166 - protein, 14 aa, synthetic construct
  REGION 1..14: note = Description of Artificial Sequence: Synthetic peptide
KDYDYVWGSPYFDY

SEQ ID NO: 22167 - DNA, 36 bp, synthetic construct
  misc_feature 1..36: note = Description of Artificial Sequence: Synthetic oligonucleotide
  source 1..36: mol_type = other DNA
gatcatttcgatttttggagtggtcactttgactac

SEQ ID NO: 22168 - protein, 12 aa, synthetic construct
  REGION 1..12: note = Description of Artificial Sequence: Synthetic peptide
DHFDFWSGHFDY

SEQ ID NO: 22169 - DNA, 42 bp, synthetic construct; identical to SEQ ID NO: 22163
  misc_feature 1..42: note = Description of Artificial Sequence: Synthetic oligonucleotide
  source 1..42: mol_type = other DNA

SEQ ID NO: 22170 - protein, 14 aa, synthetic construct
  REGION 1..14: note = Description of Artificial Sequence: Synthetic peptide
KDYDYVWGSPYFDY

SEQ ID NO: 22171 - DNA, 27 bp, synthetic construct
  misc_feature 1..27: note = Description of Artificial Sequence: Synthetic oligonucleotide
  source 1..27: mol_type = other DNA
agcagtggctggtacttttttgactac

SEQ ID NO: 22172 - protein, 9 aa, synthetic construct
  REGION 1..9: note = Description of Artificial Sequence: Synthetic peptide
SSGWYFFDY

SEQ ID NO: 22173 - DNA, 39 bp, synthetic construct; identical to SEQ ID NO: 22123
  misc_feature 1..39: note = Description of Artificial Sequence: Synthetic oligonucleotide
  source 1..39: mol_type = other DNA

SEQ ID NO: 22174 - protein, 13 aa, synthetic construct
  REGION 1..13: note = Description of Artificial Sequence: Synthetic peptide
RVTDYGGNDWFDP

SEQ ID NO: 22175 - DNA, 36 bp, synthetic construct; identical to SEQ ID NO: 22143
  misc_feature 1..36: note = Description of Artificial Sequence: Synthetic oligonucleotide
  source 1..36: mol_type = other DNA

SEQ ID NO: 22176 - protein, 12 aa, synthetic construct
  REGION 1..12: note = Description of Artificial Sequence: Synthetic peptide
RYSSSWSGGMDV

SEQ ID NO: 22177 - DNA, 36 bp, synthetic construct
  misc_feature 1..36: note = Description of Artificial Sequence: Synthetic oligonucleotide
  source 1..36: mol_type = other DNA
gatcctgtagtagtaccagctgccccctttgactac

SEQ ID NO: 22178 - protein, 12 aa, synthetic construct
  REGION 1..12: note = Description of Artificial Sequence: Synthetic peptide
DPVVVPAAPFDY

SEQ ID NO: 22179 - DNA, 27 bp, synthetic construct
  misc_feature 1..27: note = Description of Artificial Sequence: Synthetic oligonucleotide
  source 1..27: mol_type = other DNA
agcagtggctggtactactttgactac

SEQ ID NO: 22180 - protein, 9 aa, synthetic construct
  REGION 1..9: note = Description of Artificial Sequence: Synthetic peptide
SSGWYYFDY

SEQ ID NO: 22181 - DNA, 39 bp, synthetic construct; identical to SEQ ID NO: 22123
  misc_feature 1..39: note = Description of Artificial Sequence: Synthetic oligonucleotide
  source 1..39: mol_type = other DNA

SEQ ID NO: 22182 - protein, 13 aa, synthetic construct
  REGION 1..13: note = Description of Artificial Sequence: Synthetic peptide
RVTDYGGNDWFDP

SEQ ID NO: 22183 - DNA, 36 bp, synthetic construct
  misc_feature 1..36: note = Description of Artificial Sequence: Synthetic oligonucleotide
  source 1..36: mol_type = other DNA
gatcgttacgatttttggagtggtcactttgactac

SEQ ID NO: 22184 - protein, 12 aa, synthetic construct
  REGION 1..12: note = Description of Artificial Sequence: Synthetic peptide
DRYDFWSGHFDY

SEQ ID NO: 22185 - DNA, 36 bp, synthetic construct; identical to SEQ ID NO: 22143
  misc_feature 1..36: note = Description of Artificial Sequence: Synthetic oligonucleotide
  source 1..36: mol_type = other DNA

SEQ ID NO: 22186 - protein, 12 aa, synthetic construct
  REGION 1..12: note = Description of Artificial Sequence: Synthetic peptide
RYSSSWSGGMDV

SEQ ID NO: 22187 - DNA, 27 bp, synthetic construct
  misc_feature 1..27: note = Description of Artificial Sequence: Synthetic oligonucleotide
  source 1..27: mol_type = other DNA
cttgatccccagtggagttttgactac

SEQ ID NO: 22188 - protein, 9 aa, synthetic construct
  REGION 1..9: note = Description of Artificial Sequence: Synthetic peptide
LDPQWSFDY

SEQ ID NO: 22189 - DNA, 36 bp, synthetic construct
  misc_feature 1..36: note = Description of Artificial Sequence: Synthetic oligonucleotide
  source 1..36: mol_type = other DNA
tacagtacctacgactactactacggtatggacgtc

SEQ ID NO: 22190 - protein, 12 aa, synthetic construct
  REGION 1..12: note = Description of Artificial Sequence: Synthetic peptide
YSTYDYYYGMDV

SEQ ID NO: 22191 - DNA, 36 bp, synthetic construct; identical to SEQ ID NO: 22167
  misc_feature 1..36: note = Description of Artificial Sequence: Synthetic oligonucleotide
  source 1..36: mol_type = other DNA

SEQ ID NO: 22192 - protein, 12 aa, synthetic construct
  REGION 1..12: note = Description of Artificial Sequence: Synthetic peptide
DHFDFWSGHFDY

SEQ ID NO: 22193 - DNA, 24 bp, synthetic construct
  misc_feature 1..24: note = Description of Artificial Sequence: Synthetic oligonucleotide
  source 1..24: mol_type = other DNA
gaaataggattcagtgaggactac

SEQ ID NO: 22194 - protein, 8 aa, synthetic construct
  REGION 1..8: note = Description of Artificial Sequence: Synthetic peptide
EIGFSEDY

SEQ ID NO: 22195 - DNA, 27 bp, synthetic construct
  misc_feature 1..27: note = Description of Artificial Sequence: Synthetic oligonucleotide
  source 1..27: mol_type = other DNA
agcagtggctggtactactttgactac

SEQ ID NO: 22196 - protein, 9 aa, synthetic construct
  REGION 1..9: note = Description of Artificial Sequence: Synthetic peptide
SSGWYYFDY

SEQ ID NO: 22197 - DNA, 39 bp, synthetic construct; identical to SEQ ID NO: 22123
  misc_feature 1..39: note = Description of Artificial Sequence: Synthetic oligonucleotide
  source 1..39: mol_type = other DNA

SEQ ID NO: 22198 - protein, 13 aa, synthetic construct
  REGION 1..13: note = Description of Artificial Sequence: Synthetic peptide
RVTDYGGNDWFDP

SEQ ID NO: 22199 - DNA, 27 bp, synthetic construct
  misc_feature 1..27: note = Description of Artificial Sequence: Synthetic oligonucleotide
  source 1..27: mol_type = other DNA
agcagtggctggtactggtttgactac

SEQ ID NO: 22200 - protein, 9 aa, synthetic construct
  REGION 1..9: note = Description of Artificial Sequence: Synthetic peptide
SSGWYWFDY

SEQ ID NO: 22201 - DNA, 27 bp, synthetic construct
  misc_feature 1..27: note = Description of Artificial Sequence: Synthetic oligonucleotide
  source 1..27: mol_type = other DNA
agcagtggctggtactactttgactac

SEQ ID NO: 22202 - protein, 9 aa, synthetic construct
  REGION 1..9: note = Description of Artificial Sequence: Synthetic peptide
SSGWYYFDY

SEQ ID NO: 22203 - DNA, 36 bp, synthetic construct; identical to SEQ ID NO: 22189
  misc_feature 1..36: note = Description of Artificial Sequence: Synthetic oligonucleotide
  source 1..36: mol_type = other DNA

SEQ ID NO: 22204 - protein, 12 aa, synthetic construct
  REGION 1..12: note = Description of Artificial Sequence: Synthetic peptide
YSTYDYYYGMDV

SEQ ID NO: 22205 - DNA, 27 bp, synthetic construct
  misc_feature 1..27: note = Description of Artificial Sequence: Synthetic oligonucleotide
  source 1..27: mol_type = other DNA
cgaactccggaagatgtttttgatatc

SEQ ID NO: 22206 - protein, 9 aa, synthetic construct
  REGION 1..9: note = Description of Artificial Sequence: Synthetic peptide
RTPEDVFDI

SEQ ID NO: 22207 - DNA, 42 bp, synthetic construct; identical to SEQ ID NO: 22163
  misc_feature 1..42: note = Description of Artificial Sequence: Synthetic oligonucleotide
  source 1..42: mol_type = other DNA

SEQ ID NO: 22208 - protein, 14 aa, synthetic construct
  REGION 1..14: note = Description of Artificial Sequence: Synthetic peptide
KDYDYVWGSPYFDY

SEQ ID NO: 22209 - DNA, 33 bp, synthetic construct
  misc_feature 1..33: note = Description of Artificial Sequence: Synthetic oligonucleotide
  source 1..33: mol_type = other DNA
gggggatataactggaaccatgcttttgatatc

SEQ ID NO: 22210 - protein, 11 aa, synthetic construct
  REGION 1..11: note = Description of Artificial Sequence: Synthetic peptide
GGYNWNHAFDI

SEQ ID NO: 22211 - DNA, 42 bp, synthetic construct; identical to SEQ ID NO: 22163
  misc_feature 1..42: note = Description of Artificial Sequence: Synthetic oligonucleotide
  source 1..42: mol_type = other DNA

SEQ ID NO: 22212 - protein, 14 aa, synthetic construct
  REGION 1..14: note = Description of Artificial Sequence: Synthetic peptide
KDYDYVWGSPYFDY

SEQ ID NO: 22213 - DNA, 42 bp, synthetic construct; identical to SEQ ID NO: 21211
  misc_feature 1..42: note = Description of Artificial Sequence: Synthetic oligonucleotide
  source 1..42: mol_type = other DNA

SEQ ID NO: 22214 - protein, 14 aa, synthetic construct
  REGION 1..14: note = Description of Artificial Sequence: Synthetic peptide
ERYSSGWYDYGMDV

SEQ ID NO: 22215 - DNA, 42 bp, synthetic construct; identical to SEQ ID NO: 22163
  misc_feature 1..42: note = Description of Artificial Sequence: Synthetic oligonucleotide
  source 1..42: mol_type = other DNA

SEQ ID NO: 22216 - protein, 14 aa, synthetic construct
  REGION 1..14: note = Description of Artificial Sequence: Synthetic peptide
KDYDYVWGSPYFDY

SEQ ID NO: 22217 - DNA, 24 bp, synthetic construct
  misc_feature 1..24: note = Description of Artificial Sequence: Synthetic oligonucleotide
  source 1..24: mol_type = other DNA
gaaatagggttcagtgaggactac

SEQ ID NO: 22218 - protein, 8 aa, synthetic construct
  REGION 1..8: note = Description of Artificial Sequence: Synthetic peptide
EIGFSEDY

SEQ ID NO: 22219 - DNA, 27 bp, synthetic construct
  misc_feature 1..27: note = Description of Artificial Sequence: Synthetic oligonucleotide
  source 1..27: mol_type = other DNA
agcagtggctggtactactttgactac

SEQ ID NO: 22220 - protein, 9 aa, synthetic construct
  REGION 1..9: note = Description of Artificial Sequence: Synthetic peptide
SSGWYYFDY

SEQ ID NO: 22221 - DNA, 42 bp, synthetic construct
  misc_feature 1..42: note = Description of Artificial Sequence: Synthetic oligonucleotide
  source 1..42: mol_type = other DNA
gaggagtatagcagcagctggtacgggtacggtatggacgtc

SEQ ID NO: 22222 - protein, 14 aa, synthetic construct
  REGION 1..14: note = Description of Artificial Sequence: Synthetic peptide
EEYSSSWYGYGMDV

SEQ ID NO: 22223 - DNA, 42 bp, synthetic construct; identical to SEQ ID NO: 22163
  misc_feature 1..42: note = Description of Artificial Sequence: Synthetic oligonucleotide
  source 1..42: mol_type = other DNA

SEQ ID NO: 22224 - protein, 14 aa, synthetic construct
  REGION 1..14: note = Description of Artificial Sequence: Synthetic peptide
KDYDYVWGSPYFDY

SEQ ID NO: 22225 - DNA, 27 bp, synthetic construct
  misc_feature 1..27: note = Description of Artificial Sequence: Synthetic oligonucleotide
  source 1..27: mol_type = other DNA
agcagtggctggtacttttttgactac

SEQ ID NO: 22226 - protein, 9 aa, synthetic construct
  REGION 1..9: note = Description of Artificial Sequence: Synthetic peptide
SSGWYFFDY

SEQ ID NO: 22227 - DNA, 24 bp, synthetic construct
  misc_feature 1..24: note = Description of Artificial Sequence: Synthetic oligonucleotide
  source 1..24: mol_type = other DNA
gaaatagggttcagtgaggactac

SEQ ID NO: 22228 - protein, 8 aa, synthetic construct
  REGION 1..8: note = Description of Artificial Sequence: Synthetic peptide
EIGFSEDY

SEQ ID NO: 22229 - DNA, 24 bp, synthetic construct
  misc_feature 1..24: note = Description of Artificial Sequence: Synthetic oligonucleotide
  source 1..24: mol_type = other DNA
tcggcatttagcccttttgattac

SEQ ID NO: 22230 - protein, 8 aa, synthetic construct
  REGION 1..8: note = Description of Artificial Sequence: Synthetic peptide
SAFSPFDY

SEQ ID NO: 22231 - DNA, 36 bp, synthetic construct; identical to SEQ ID NO: 22183
  misc_feature 1..36: note = Description of Artificial Sequence: Synthetic oligonucleotide
  source 1..36: mol_type = other DNA

SEQ ID NO: 22232 - protein, 12 aa, synthetic construct
  REGION 1..12: note = Description of Artificial Sequence: Synthetic peptide
DRYDFWSGHFDY

SEQ ID NO: 22233 - DNA, 39 bp, synthetic construct; identical to SEQ ID NO: 22123
  misc_feature 1..39: note = Description of Artificial Sequence: Synthetic oligonucleotide
  source 1..39: mol_type = other DNA

SEQ ID NO: 22234 - protein, 13 aa, synthetic construct
  REGION 1..13: note = Description of Artificial Sequence: Synthetic peptide
RVTDYGGNDWFDP

SEQ ID NO: 22235 - DNA, 36 bp, synthetic construct
  misc_feature 1..36: note = Description of Artificial Sequence: Synthetic oligonucleotide
  source 1..36: mol_type = other DNA
aggtttagcagcagctggtcggggggtatggacgtc

SEQ ID NO: 22236 - protein, 12 aa, synthetic construct
  REGION 1..12: note = Description of Artificial Sequence: Synthetic peptide
RFSSSWSGGMDV

SEQ ID NO: 22237 - DNA, 39 bp, synthetic construct; identical to SEQ ID NO: 22123
  misc_feature 1..39: note = Description of Artificial Sequence: Synthetic oligonucleotide
  source 1..39: mol_type = other DNA

SEQ ID NO: 22238 - protein, 13 aa, synthetic construct
  REGION 1..13: note = Description of Artificial Sequence: Synthetic peptide
RVTDYGGNDWFDP

SEQ ID NO: 22239 - DNA, 18 bp, synthetic construct
  misc_feature 1..18: note = Description of Artificial Sequence: Synthetic oligonucleotide
  source 1..18: mol_type = other DNA
gatacaccactggtttac

SEQ ID NO: 22240 - protein, 6 aa, synthetic construct
  REGION 1..6: note = Description of Artificial Sequence: Synthetic peptide
DTPLVY

SEQ ID NO: 22241 - DNA, 36 bp, synthetic construct
  misc_feature 1..36: note = Description of Artificial Sequence: Synthetic oligonucleotide
  source 1..36: mol_type = other DNA
gatcgatacgatttttggagtggtcactttgactac

SEQ ID NO: 22242 - protein, 12 aa, synthetic construct
  REGION 1..12: note = Description of Artificial Sequence: Synthetic peptide
DRYDFWSGHFDY

SEQ ID NO: 22243 - DNA, 39 bp, synthetic construct; identical to SEQ ID NO: 22123
  misc_feature 1..39: note = Description of Artificial Sequence: Synthetic oligonucleotide
  source 1..39: mol_type = other DNA

SEQ ID NO: 22244 - protein, 13 aa, synthetic construct
  REGION 1..13: note = Description of Artificial Sequence: Synthetic peptide
RVTDYGGNDWFDP

SEQ ID NO: 22245 - DNA, 48 bp, synthetic construct
  misc_feature 1..48: note = Description of Artificial Sequence: Synthetic oligonucleotide
  source 1..48: mol_type = other DNA
ggggtattactatggttcggggagctagaagatgactggttcgacccc

SEQ ID NO: 22246 - protein, 16 aa, synthetic construct
  REGION 1..16: note = Description of Artificial Sequence: Synthetic peptide
GVLLWFGELEDDWFDP

SEQ ID NO: 22247 - DNA, 36 bp, synthetic construct; identical to SEQ ID NO: 20139
  misc_feature 1..36: note = Description of Artificial Sequence: Synthetic oligonucleotide
  source 1..36: mol_type = other DNA

SEQ ID NO: 22248 - protein, 12 aa, synthetic construct
  REGION 1..12: note = Description of Artificial Sequence: Synthetic peptide
DHYDFWSGHFDY

SEQ ID NO: 22249 - DNA, 39 bp, synthetic construct; identical to SEQ ID NO: 22123
  misc_feature 1..39: note = Description of Artificial Sequence: Synthetic oligonucleotide
  source 1..39: mol_type = other DNA

SEQ ID NO: 22250 - protein, 13 aa, synthetic construct
  REGION 1..13: note = Description of Artificial Sequence: Synthetic peptide
RVTDYGGNDWFDP

SEQ ID NO: 22251 - DNA, 27 bp, synthetic construct
  misc_feature 1..27: note = Description of Artificial Sequence: Synthetic oligonucleotide
  source 1..27: mol_type = other DNA
agcagtggctggtacttttttgactac

SEQ ID NO: 22252 - protein, 9 aa, synthetic construct
  REGION 1..9: note = Description of Artificial Sequence: Synthetic peptide
SSGWYFFDY

SEQ ID NO: 22253 - DNA, 27 bp, synthetic construct
  misc_feature 1..27: note = Description of Artificial Sequence: Synthetic oligonucleotide
  source 1..27: mol_type = other DNA
agcagtggctggtactggtttgactac

SEQ ID NO: 22254 - protein, 9 aa, synthetic construct
  REGION 1..9: note = Description of Artificial Sequence: Synthetic peptide
SSGWYWFDY

SEQ ID NO: 22255 - DNA, 27 bp, synthetic construct
  misc_feature 1..27: note = Description of Artificial Sequence: Synthetic oligonucleotide
  source 1..27: mol_type = other DNA
agcagtggctggtactggttcgacccc

SEQ ID NO: 22256 - protein, 9 aa, synthetic construct
  REGION 1..9: note = Description of Artificial Sequence: Synthetic peptide
SSGWYWFDP

SEQ ID NO: 22257 - DNA, 39 bp, synthetic construct; identical to SEQ ID NO: 22123
  misc_feature 1..39: note = Description of Artificial Sequence: Synthetic oligonucleotide
  source 1..39: mol_type = other DNA

SEQ ID NO: 22258 - protein, 13 aa, synthetic construct
  REGION 1..13: note = Description of Artificial Sequence: Synthetic peptide
RVTDYGGNDWFDP

SEQ ID NO: 22259 - DNA, 36 bp, synthetic construct
  misc_feature 1..36: note = Description of Artificial Sequence: Synthetic oligonucleotide
  source 1..36: mol_type = other DNA
gaggggtacgatttttggagtggttaccttggctac

SEQ ID NO: 22260 - protein, 12 aa, synthetic construct
  REGION 1..12: note = Description of Artificial Sequence: Synthetic peptide
EGYDFWSGYLGY

SEQ ID NO: 22261 - DNA, 33 bp, synthetic construct; identical to SEQ ID NO: 22209
  misc_feature 1..33: note = Description of Artificial Sequence: Synthetic oligonucleotide
  source 1..33: mol_type = other DNA

SEQ ID NO: 22262 - protein, 11 aa, synthetic construct
  REGION 1..11: note = Description of Artificial Sequence: Synthetic peptide
GGYNWNHAFDI

SEQ ID NO: 22263 - DNA, 42 bp, synthetic construct; identical to SEQ ID NO: 22221
  misc_feature 1..42: note = Description of Artificial Sequence: Synthetic oligonucleotide
  source 1..42: mol_type = other DNA

SEQ ID NO: 22264 - protein, 14 aa, synthetic construct
  REGION 1..14: note = Description of Artificial Sequence: Synthetic peptide
EEYSSSWYGYGMDV

SEQ ID NO: 22265 - DNA, 42 bp, synthetic construct; identical to SEQ ID NO: 22131
  misc_feature 1..42: note = Description of Artificial Sequence: Synthetic oligonucleotide
  source 1..42: mol_type = other DNA

SEQ ID NO: 22266 - protein, 14 aa, synthetic construct
  REGION 1..14: note = Description of Artificial Sequence: Synthetic peptide
KDNDYVWGSPYFDY

SEQ ID NO: 22267 - DNA, 27 bp, synthetic construct
  misc_feature 1..27: note = Description of Artificial Sequence: Synthetic oligonucleotide
  source 1..27: mol_type = other DNA
cttgatctccagtggagttttgacttc

SEQ ID NO: 22268 - protein, 9 aa, synthetic construct
  REGION 1..9: note = Description of Artificial Sequence: Synthetic peptide
LDLQWSFDF

SEQ ID NO: 22269 - DNA, 33 bp, synthetic construct
  misc_feature 1..33: note = Description of Artificial Sequence: Synthetic oligonucleotide
  source 1..33: mol_type = other DNA
gaggggggattgggagctaccttctttgactac

SEQ ID NO: 22270 - protein, 11 aa, synthetic construct
  REGION 1..11: note = Description of Artificial Sequence: Synthetic peptide
EGGLGATFFDY

SEQ ID NO: 22271 - DNA, 42 bp, synthetic construct; identical to SEQ ID NO: 22163
  misc_feature 1..42: note = Description of Artificial Sequence: Synthetic oligonucleotide
  source 1..42: mol_type = other DNA

SEQ ID NO: 22272 - protein, 14 aa, synthetic construct
  REGION 1..14: note = Description of Artificial Sequence: Synthetic peptide
KDYDYVWGSPYFDY

SEQ ID NO: 22273 - DNA, 39 bp, synthetic construct; identical to SEQ ID NO: 22123
  misc_feature 1..39: note = Description of Artificial Sequence: Synthetic oligonucleotide
  source 1..39: mol_type = other DNA

SEQ ID NO: 22274 - protein, 13 aa, synthetic construct
  REGION 1..13: note = Description of Artificial Sequence: Synthetic peptide
RVTDYGGNDWFDP

SEQ ID NO: 22275 - DNA, 36 bp, synthetic construct
  misc_feature 1..36: note = Description of Artificial Sequence: Synthetic oligonucleotide
  source 1..36: mol_type = other DNA
gaggcttacgatttttggagtggttattttgactac

SEQ ID NO: 22276 - protein, 12 aa, synthetic construct
  REGION 1..12: note = Description of Artificial Sequence: Synthetic peptide
EAYDFWSGYFDY

SEQ ID NO: 22277 - DNA, 27 bp, synthetic construct
  misc_feature 1..27: note = Description of Artificial Sequence: Synthetic oligonucleotide
  source 1..27: mol_type = other DNA
agcagtggctggtactactttgactac

SEQ ID NO: 22278 - protein, 9 aa, synthetic construct
  REGION 1..9: note = Description of Artificial Sequence: Synthetic peptide
SSGWYYFDY

SEQ ID NO: 22279 - DNA, 18 bp, synthetic construct
  misc_feature 1..18: note = Description of Artificial Sequence: Synthetic oligonucleotide
  source 1..18: mol_type = other DNA
acggcgactaaggactac

SEQ ID NO: 22280 - protein, 6 aa, synthetic construct
  REGION 1..6: note = Description of Artificial Sequence: Synthetic peptide
TATKDY

SEQ ID NO: 22281 - DNA, 36 bp, synthetic construct; identical to SEQ ID NO: 22259
  misc_feature 1..36: note = Description of Artificial Sequence: Synthetic oligonucleotide
  source 1..36: mol_type = other DNA

SEQ ID NO: 22282 - protein, 12 aa, synthetic construct
  REGION 1..12: note = Description of Artificial Sequence: Synthetic peptide
EGYDFWSGYLGY

SEQ ID NO: 22283 - DNA, 33 bp, synthetic construct; identical to SEQ ID NO: 22209
  misc_feature 1..33: note = Description of Artificial Sequence: Synthetic oligonucleotide
  source 1..33: mol_type = other DNA

SEQ ID NO: 22284 - protein, 11 aa, synthetic construct
  REGION 1..11: note = Description of Artificial Sequence: Synthetic peptide
GGYNWNHAFDI

SEQ ID NO: 22285 - DNA, 33 bp, synthetic construct
  misc_feature 1..33: note = Description of Artificial Sequence: Synthetic oligonucleotide
  source 1..33: mol_type = other DNA
gaggggggagtgggagctacgtactttgactac

SEQ ID NO: 22286 - protein, 11 aa, synthetic construct
  REGION 1..11: note = Description of Artificial Sequence: Synthetic peptide
EGGVGATYFDY

SEQ ID NO: 22287 - DNA, 36 bp, synthetic construct
  misc_feature 1..36: note = Description of Artificial Sequence: Synthetic oligonucleotide
  source 1..36: mol_type = other DNA
cgctatagccgcagctgggccgggggtatggacgtc

SEQ ID NO: 22288 - protein, 12 aa, synthetic construct
  REGION 1..12: note = Description of Artificial Sequence: Synthetic peptide
RYSRSWAGGMDV

SEQ ID NO: 22289 - DNA, 27 bp, synthetic construct
  misc_feature 1..27: note = Description of Artificial Sequence: Synthetic oligonucleotide
  source 1..27: mol_type = other DNA
agcagtggctggtacttctttgacaac

SEQ ID NO: 22290 - protein, 9 aa, synthetic construct
  REGION 1..9: note = Description of Artificial Sequence: Synthetic peptide
SSGWYFFDN

SEQ ID NO: 22291 - DNA, 27 bp, synthetic construct
  misc_feature 1..27: note = Description of Artificial Sequence: Synthetic oligonucleotide
  source 1..27: mol_type = other DNA
agcagtggctggtacatctttgactac

SEQ ID NO: 22292 - protein, 9 aa, synthetic construct
  REGION 1..9: note = Description of Artificial Sequence: Synthetic peptide
SSGWYIFDY

SEQ ID NO: 22293 - DNA, 42 bp, synthetic construct
  misc_feature 1..42: note = Description of Artificial Sequence: Synthetic oligonucleotide
  source 1..42: mol_type = other DNA
aggggatttcgatttttggagtggttggggggctttgactac

SEQ ID NO: 22294 - protein, 14 aa, synthetic construct
  REGION 1..14: note = Description of Artificial Sequence: Synthetic peptide
RGFRFLEWLGGFDY

SEQ ID NO: 22295 - DNA, 27 bp, synthetic construct
  misc_feature 1..27: note = Description of Artificial Sequence: Synthetic oligonucleotide
  source 1..27: mol_type = other DNA
agcagtggctggtactacttcgactac

SEQ ID NO: 22296 - protein, 9 aa, synthetic construct
  REGION 1..9: note = Description of Artificial Sequence: Synthetic peptide
SSGWYYFDY

SEQ ID NO: 22297 - DNA, 42 bp, synthetic construct; identical to SEQ ID NO: 22163
  misc_feature 1..42: note = Description of Artificial Sequence: Synthetic oligonucleotide
  source 1..42: mol_type = other DNA

SEQ ID NO: 22298 - protein, 14 aa, synthetic construct
  REGION 1..14: note = Description of Artificial Sequence: Synthetic peptide
KDYDYVWGSPYFDY

SEQ ID NO: 22299 - DNA, 42 bp, synthetic construct; identical to SEQ ID NO: 22163
  misc_feature 1..42: note = Description of Artificial Sequence: Synthetic oligonucleotide
  source 1..42: mol_type = other DNA

SEQ ID NO: 22300 - protein, 14 aa, synthetic construct
  REGION 1..14: note = Description of Artificial Sequence: Synthetic peptide
KDYDYVWGSPYFDY

SEQ ID NO: 22301 - DNA, 39 bp, synthetic construct; identical to SEQ ID NO: 22123
  misc_feature 1..39: note = Description of Artificial Sequence: Synthetic oligonucleotide
  source 1..39: mol_type = other DNA

SEQ ID NO: 22302 - protein, 13 aa, synthetic construct
  REGION 1..13: note = Description of Artificial Sequence: Synthetic peptide
RVTDYGGNDWFDP

SEQ ID NO: 22303 - DNA, 36 bp, synthetic construct; identical to SEQ ID NO: 22241
  misc_feature 1..36: note = Description of Artificial Sequence: Synthetic oligonucleotide
  source 1..36: mol_type = other DNA

SEQ ID NO: 22304 - protein, 12 aa, synthetic construct
  REGION 1..12: note = Description of Artificial Sequence: Synthetic peptide
DRYDFWSGHFDY

SEQ ID NO: 22305 - DNA, 27 bp, synthetic construct
  misc_feature 1..27: note = Description of Artificial Sequence: Synthetic oligonucleotide
  source 1..27: mol_type = other DNA
agcagtggctggtactattttgactac

SEQ ID NO: 22306 - protein, 9 aa, synthetic construct
  REGION 1..9: note = Description of Artificial Sequence: Synthetic peptide
SSGWYYFDY

SEQ ID NO: 22307 - DNA, 27 bp, synthetic construct
  misc_feature 1..27: note = Description of Artificial Sequence: Synthetic oligonucleotide
  source 1..27: mol_type = other DNA
agcagtggctggtactactttgactac

SEQ ID NO: 22308 - protein, 9 aa, synthetic construct
  REGION 1..9: note = Description of Artificial Sequence: Synthetic peptide
SSGWYYFDY

SEQ ID NO: 22309 - DNA, 39 bp, synthetic construct
  misc_feature 1..39: note = Description of Artificial Sequence: Synthetic oligonucleotide
  source 1..39: mol_type = other DNA
gaccatgactacggtgactacaatatctactttgactac

SEQ ID NO: 22310 - protein, 13 aa, synthetic construct
  REGION 1..13: note = Description of Artificial Sequence: Synthetic peptide
DHDYGDYNIYFDY

SEQ ID NO: 22311 - DNA, 27 bp, synthetic construct
  misc_feature 1..27: note = Description of Artificial Sequence: Synthetic oligonucleotide
  source 1..27: mol_type = other DNA
cttgatctccagtggagttttgacttc

SEQ ID NO: 22312 - protein, 9 aa, synthetic construct
  REGION 1..9: note = Description of Artificial Sequence: Synthetic peptide
LDLQWSFDF

SEQ ID NO: 22313 - DNA, 27 bp, synthetic construct
  misc_feature 1..27: note = Description of Artificial Sequence: Synthetic oligonucleotide
  source 1..27: mol_type = other DNA
agcagtggctggtactactttgactac

SEQ ID NO: 22314 - protein, 9 aa, synthetic construct
  REGION 1..9: note = Description of Artificial Sequence: Synthetic peptide
SSGWYYFDY

SEQ ID NO: 22315 - DNA, 39 bp, synthetic construct; identical to SEQ ID NO: 22123
  misc_feature 1..39: note = Description of Artificial Sequence: Synthetic oligonucleotide
  source 1..39: mol_type = other DNA

SEQ ID NO: 22316 - protein, 13 aa, synthetic construct
  REGION 1..13: note = Description of Artificial Sequence: Synthetic peptide
RVTDYGGNDWFDP

SEQ ID NO: 22317 - DNA, 18 bp, synthetic construct
  misc_feature 1..18: note = Description of Artificial Sequence: Synthetic oligonucleotide
  source 1..18: mol_type = other DNA
caggcagcccaggactac

SEQ ID NO: 22318 - protein, 6 aa, synthetic construct
  REGION 1..6: note = Description of Artificial Sequence: Synthetic peptide
QAAQDY

SEQ ID NO: 22319-22320 - skipped (2 entries)

SEQ ID NO: 22321 - DNA, 24 bp, synthetic construct
  misc_feature 1..24: note = Description of Artificial Sequence: Synthetic oligonucleotide
  source 1..24: mol_type = other DNA
gagctggggttcctctctgactat

SEQ ID NO: 22322 - protein, 8 aa, synthetic construct
  REGION 1..8: note = Description of Artificial Sequence: Synthetic peptide
ELGFLSDY

SEQ ID NO: 22323 - DNA, 36 bp, synthetic construct
  misc_feature 1..36: note = Description of Artificial Sequence: Synthetic oligonucleotide
  source 1..36: mol_type = other DNA
aggagcagtggctggtacgaggatgctcttgatatc

SEQ ID NO: 22324 - protein, 12 aa, synthetic construct
  REGION 1..12: note = Description of Artificial Sequence: Synthetic peptide
RSSGWYEDALDI

SEQ ID NO: 22325 - DNA, 18 bp, synthetic construct
  misc_feature 1..18: note = Description of Artificial Sequence: Synthetic oligonucleotide
  source 1..18: mol_type = other DNA
gtagctacctttgactac

SEQ ID NO: 22326 - protein, 6 aa, synthetic construct
  REGION 1..6: note = Description of Artificial Sequence: Synthetic peptide
VATFDY

SEQ ID NO: 22327 - DNA, 15 bp, synthetic construct
  misc_feature 1..15: note = Description of Artificial Sequence: Synthetic oligonucleotide
  source 1..15: mol_type = other DNA
gatagagggtccatc

SEQ ID NO: 22328 - protein, 5 aa, synthetic construct
  REGION 1..5: note = Description of Artificial Sequence: Synthetic peptide
DRGSI

SEQ ID NO: 22329 - DNA, 18 bp, synthetic construct
  misc_feature 1..18: note = Description of Artificial Sequence: Synthetic oligonucleotide
  source 1..18: mol_type = other DNA
tatacctggaacggctac

SEQ ID NO: 22330 - protein, 6 aa, synthetic construct
  REGION 1..6: note = Description of Artificial Sequence: Synthetic peptide
YTWNGY

SEQ ID NO: 22331 - DNA, 27 bp, synthetic construct
  misc_feature 1..27: note = Description of Artificial Sequence: Synthetic oligonucleotide
  source 1..27: mol_type = other DNA
cataaagtggctggtccctttgactac

SEQ ID NO: 22332 - protein, 9 aa, synthetic construct
  REGION 1..9: note = Description of Artificial Sequence: Synthetic peptide
HKVAGPFDY

SEQ ID NO: 22333 - DNA, 15 bp, synthetic construct
  misc_feature 1..15: note = Description of Artificial Sequence: Synthetic oligonucleotide
  source 1..15: mol_type = other DNA
gatcggggcagcagc

SEQ ID NO: 22334 - protein, 5 aa, synthetic construct
  REGION 1..5: note = Description of Artificial Sequence: Synthetic peptide
DRGSS

SEQ ID NO: 22335 - DNA, 15 bp, synthetic construct
  misc_feature 1..15: note = Description of Artificial Sequence: Synthetic oligonucleotide
  source 1..15: mol_type = other DNA
gatcgagggggctat

SEQ ID NO: 22336 - protein, 5 aa, synthetic construct
  REGION 1..5: note = Description of Artificial Sequence: Synthetic peptide
DRGGY

SEQ ID NO: 22337 - DNA, 36 bp, synthetic construct
  misc_feature 1..36: note = Description of Artificial Sequence: Synthetic oligonucleotide
  source 1..36: mol_type = other DNA
gagggatacgatttttggagtggtttctttgactcc

SEQ ID NO: 22338 - protein, 12 aa, synthetic construct
  REGION 1..12: note = Description of Artificial Sequence: Synthetic peptide
EGYDFWSGFFDS

SEQ ID NO: 22339 - DNA, 24 bp, synthetic construct
  misc_feature 1..24: note = Description of Artificial Sequence: Synthetic oligonucleotide
  source 1..24: mol_type = other DNA
gagctggggttcctctctgactac

SEQ ID NO: 22340 - protein, 8 aa, synthetic construct
  REGION 1..8: note = Description of Artificial Sequence: Synthetic peptide
ELGFLSDY

SEQ ID NO: 22341 - DNA, 18 bp, synthetic construct
  misc_feature 1..18: note = Description of Artificial Sequence: Synthetic oligonucleotide
  source 1..18: mol_type = other DNA
gtggctcactttgactac

SEQ ID NO: 22342 - protein, 6 aa, synthetic construct
  REGION 1..6: note = Description of Artificial Sequence: Synthetic peptide
VAHFDY

SEQ ID NO: 22343 - DNA, 15 bp, synthetic construct
  misc_feature 1..15: note = Description of Artificial Sequence: Synthetic oligonucleotide
  source 1..15: mol_type = other DNA
tccaagtttgactcc

SEQ ID NO: 22344 - protein, 5 aa, synthetic construct
  REGION 1..5: note = Description of Artificial Sequence: Synthetic peptide
SKFDS

SEQ ID NO: 22345 - DNA, 15 bp, synthetic construct
  misc_feature 1..15: note = Description of Artificial Sequence: Synthetic oligonucleotide
  source 1..15: mol_type = other DNA
agcagtggctggtct

SEQ ID NO: 22346 - protein, 5 aa, synthetic construct
  REGION 1..5: note = Description of Artificial Sequence: Synthetic peptide
SSGWS

SEQ ID NO: 22347 - DNA, 42 bp, synthetic construct
  misc_feature 1..42: note = Description of Artificial Sequence: Synthetic oligonucleotide
  source 1..42: mol_type = other DNA
gaaccgtatactagtggctggtacgactacggtatggacgtc

SEQ ID NO: 22348 - protein, 14 aa, synthetic construct
  REGION 1..14: note = Description of Artificial Sequence: Synthetic peptide
EPYTSGWYDYGMDV

SEQ ID NO: 22349 - DNA, 24 bp, synthetic construct
  misc_feature 1..24: note = Description of Artificial Sequence: Synthetic oligonucleotide
  source 1..24: mol_type = other DNA
ttgagcagtggctggtttgactac

SEQ ID NO: 22350 - protein, 8 aa, synthetic construct
  REGION 1..8: note = Description of Artificial Sequence: Synthetic peptide
LSSGWFDY

SEQ ID NO: 22351 - DNA, 15 bp, synthetic construct
  misc_feature 1..15: note = Description of Artificial Sequence: Synthetic oligonucleotide
  source 1..15: mol_type = other DNA
gatcggggcagcagc

SEQ ID NO: 22352 - protein, 5 aa, synthetic construct
  REGION 1..5: note = Description of Artificial Sequence: Synthetic peptide
DRGSS

SEQ ID NO: 22353 - DNA, 15 bp, synthetic construct
  misc_feature 1..15: note = Description of Artificial Sequence: Synthetic oligonucleotide
  source 1..15: mol_type = other DNA
gatcggggcagcagc

SEQ ID NO: 22354 - protein, 5 aa, synthetic construct
  REGION 1..5: note = Description of Artificial Sequence: Synthetic peptide
DRGSS

SEQ ID NO: 22355 - DNA, 24 bp, synthetic construct
  misc_feature 1..24: note = Description of Artificial Sequence: Synthetic oligonucleotide
  source 1..24: mol_type = other DNA
gaactgggatgggcggaggactac

SEQ ID NO: 22356 - protein, 8 aa, synthetic construct
  REGION 1..8: note = Description of Artificial Sequence: Synthetic peptide
ELGWAEDY

SEQ ID NO: 22357 - DNA, 15 bp, synthetic construct
  misc_feature 1..15: note = Description of Artificial Sequence: Synthetic oligonucleotide
  source 1..15: mol_type = other DNA
gatcgaggcagcctc

SEQ ID NO: 22358 - protein, 5 aa, synthetic construct
  REGION 1..5: note = Description of Artificial Sequence: Synthetic peptide
DRGSL

SEQ ID NO: 22359 - DNA, 27 bp, synthetic construct
  misc_feature 1..27: note = Description of Artificial Sequence: Synthetic oligonucleotide
  source 1..27: mol_type = other DNA
agcagtggctggtaccgctttgactac

SEQ ID NO: 22360 - protein, 9 aa, synthetic construct
  REGION 1..9: note = Description of Artificial Sequence: Synthetic peptide
SSGWYRFDY

SEQ ID NO: 22361 - DNA, 18 bp, synthetic construct
  misc_feature 1..18: note = Description of Artificial Sequence: Synthetic oligonucleotide
  source 1..18: mol_type = other DNA
gggggctggaaccacgac

SEQ ID NO: 22362 - protein, 6 aa, synthetic construct
  REGION 1..6: note = Description of Artificial Sequence: Synthetic peptide
GGWNHD

SEQ ID NO: 22363 - DNA, 12 bp, synthetic construct
  misc_feature 1..12: note = Description of Artificial Sequence: Synthetic oligonucleotide
  source 1..12: mol_type = other DNA
ggttgggacgtc

SEQ ID NO: 22364 - protein, 4 aa, synthetic construct
  REGION 1..4: note = Description of Artificial Sequence: Synthetic peptide
GWDV

SEQ ID NO: 22365 - DNA, 18 bp, synthetic construct
  misc_feature 1..18: note = Description of Artificial Sequence: Synthetic oligonucleotide
  source 1..18: mol_type = other DNA
aagaaaactggggactac

SEQ ID NO: 22366 - protein, 6 aa, synthetic construct
  REGION 1..6: note = Description of Artificial Sequence: Synthetic peptide
KKTGDY

SEQ ID NO: 22367 - DNA, 36 bp, synthetic construct
  misc_feature 1..36: note = Description of Artificial Sequence: Synthetic oligonucleotide
  source 1..36: mol_type = other DNA
cggagcagctcgtgggggggctacggtatggacgtc

SEQ ID NO: 22368 - protein, 12 aa, synthetic construct
  REGION 1..12: note = Description of Artificial Sequence: Synthetic peptide
RSSSWGGYGMDV

SEQ ID NO: 22369 - DNA, 24 bp, synthetic construct
  misc_feature 1..24: note = Description of Artificial Sequence: Synthetic oligonucleotide
  source 1..24: mol_type = other DNA
gagctggggttcctctctgactac

SEQ ID NO: 22370 - protein, 8 aa, synthetic construct
  REGION 1..8: note = Description of Artificial Sequence: Synthetic peptide
ELGFLSDY

SEQ ID NO: 22371 - DNA, 42 bp, synthetic construct
  misc_feature 1..42: note = Description of Artificial Sequence: Synthetic oligonucleotide
  source 1..42: mol_type = other DNA
gaaccgtataatagtggctggtacgactacggtatggacgtc

SEQ ID NO: 22372 - protein, 14 aa, synthetic construct
  REGION 1..14: note = Description of Artificial Sequence: Synthetic peptide
EPYNSGWYDYGMDV

SEQ ID NO: 22373 - DNA, 42 bp, synthetic construct
  misc_feature 1..42: note = Description of Artificial Sequence: Synthetic oligonucleotide
  source 1..42: mol_type = other DNA
gaaccgtatagtagtggctggtacgactacggtatggacgtc

SEQ ID NO: 22374 - protein, 14 aa, synthetic construct
  REGION 1..14: note = Description of Artificial Sequence: Synthetic peptide
EPYSSGWYDYGMDV

SEQ ID NO: 22375 - DNA, 18 bp, synthetic construct
  misc_feature 1..18: note = Description of Artificial Sequence: Synthetic oligonucleotide
  source 1..18: mol_type = other DNA
gtgagctgggctgactgc

SEQ ID NO: 22376 - protein, 6 aa, synthetic construct
  REGION 1..6: note = Description of Artificial Sequence: Synthetic peptide
VSWADC

SEQ ID NO: 22377 - DNA, 36 bp, synthetic construct
  misc_feature 1..36: note = Description of Artificial Sequence: Synthetic oligonucleotide
  source 1..36: mol_type = other DNA
gaggcctacgatttttggagtggttattatgactac

SEQ ID NO: 22378 - protein, 12 aa, synthetic construct
  REGION 1..12: note = Description of Artificial Sequence: Synthetic peptide
EAYDFWSGYYDY

SEQ ID NO: 22379 - DNA, 12 bp, synthetic construct
  misc_feature 1..12: note = Description of Artificial Sequence: Synthetic oligonucleotide
  source 1..12: mol_type = other DNA
catggatacagc

SEQ ID NO: 22380 - protein, 4 aa, synthetic construct
  REGION 1..4: note = Description of Artificial Sequence: Synthetic peptide
HGYS

SEQ ID NO: 22381 - DNA, 12 bp, synthetic construct
  misc_feature 1..12: note = Description of Artificial Sequence: Synthetic oligonucleotide
  source 1..12: mol_type = other DNA
gataaagattac

SEQ ID NO: 22382 - protein, 4 aa, synthetic construct
  REGION 1..4: note = Description of Artificial Sequence: Synthetic peptide
DKDY

SEQ ID NO: 22383 - DNA, 15 bp, synthetic construct
  misc_feature 1..15: note = Description of Artificial Sequence: Synthetic oligonucleotide
  source 1..15: mol_type = other DNA
agcagtggctggtct

SEQ ID NO: 22384 - protein, 5 aa, synthetic construct
  REGION 1..5: note = Description of Artificial Sequence: Synthetic peptide
SSGWS

SEQ ID NO: 22385 - DNA, 12 bp, synthetic construct
  misc_feature 1..12: note = Description of Artificial Sequence: Synthetic oligonucleotide
  source 1..12: mol_type = other DNA
catggatacagc

SEQ ID NO: 22386 - protein, 4 aa, synthetic construct
  REGION 1..4: note = Description of Artificial Sequence: Synthetic peptide
HGYS

SEQ ID NO: 22387 - DNA, 27 bp, synthetic construct
  misc_feature 1..27: note = Description of Artificial Sequence: Synthetic oligonucleotide
  source 1..27: mol_type = other DNA
ctctctcaacggtgggactttgactac

SEQ ID NO: 22388 - protein, 9 aa, synthetic construct
  REGION 1..9: note = Description of Artificial Sequence: Synthetic peptide
LSQRWDFDY

SEQ ID NO: 22389 - DNA, 27 bp, synthetic construct
  misc_feature 1..27: note = Description of Artificial Sequence: Synthetic oligonucleotide
  source 1..27: mol_type = other DNA
agcagcggctggtacatttttgactac

SEQ ID NO: 22390 - protein, 9 aa, synthetic construct
  REGION 1..9: note = Description of Artificial Sequence: Synthetic peptide
SSGWYIFDY

SEQ ID NO: 22391 - DNA, 42 bp, synthetic construct; identical to SEQ ID NO: 22371
  misc_feature 1..42: note = Description of Artificial Sequence: Synthetic oligonucleotide
  source 1..42: mol_type = other DNA

SEQ ID NO: 22392 - protein, 14 aa, synthetic construct
  REGION 1..14: note = Description of Artificial Sequence: Synthetic peptide
EPYNSGWYDYGMDV

SEQ ID NO: 22393 - DNA, 15 bp, synthetic construct
  misc_feature 1..15: note = Description of Artificial Sequence: Synthetic oligonucleotide
  source 1..15: mol_type = other DNA
gatcggggcagcagc

SEQ ID NO: 22394 - protein, 5 aa, synthetic construct
  REGION 1..5: note = Description of Artificial Sequence: Synthetic peptide
DRGSS

SEQ ID NO: 22395 - DNA, 18 bp, synthetic construct
  misc_feature 1..18: note = Description of Artificial Sequence: Synthetic oligonucleotide
  source 1..18: mol_type = other DNA
aagagttggtttgactac

SEQ ID NO: 22396 - protein, 6 aa, synthetic construct
  REGION 1..6: note = Description of Artificial Sequence: Synthetic peptide
KSWFDY

SEQ ID NO: 22397 - DNA, 27 bp, synthetic construct
  misc_feature 1..27: note = Description of Artificial Sequence: Synthetic oligonucleotide
  source 1..27: mol_type = other DNA
catgacccaaactggggagttgactac

SEQ ID NO: 22398 - protein, 9 aa, synthetic construct
  REGION 1..9: note = Description of Artificial Sequence: Synthetic peptide
HDPNWGVDY

SEQ ID NO: 22399 - DNA, 45 bp, synthetic construct
  misc_feature 1..45: note = Description of Artificial Sequence: Synthetic oligonucleotide
  source 1..45: mol_type = other DNA
gttggtatagaagtggctggtgactactacttcggtatggaagtc

SEQ ID NO: 22400 - protein, 15 aa, synthetic construct
  REGION 1..15: note = Description of Artificial Sequence: Synthetic peptide
VGIEVAGDYYFGMEV

SEQ ID NO: 22401 - DNA, 30 bp, synthetic construct
  misc_feature 1..30: note = Description of Artificial Sequence: Synthetic oligonucleotide
  source 1..30: mol_type = other DNA
aattggggaatggctggcccctttgactac

SEQ ID NO: 22402 - protein, 10 aa, synthetic construct
  REGION 1..10: note = Description of Artificial Sequence: Synthetic peptide
NWGMAGPFDY

SEQ ID NO: 22403 - DNA, 36 bp, synthetic construct
  misc_feature 1..36: note = Description of Artificial Sequence: Synthetic oligonucleotide
  source 1..36: mol_type = other DNA
cggagcagctcgtcggggggctacggtatggacgtc

SEQ ID NO: 22404 - protein, 12 aa, synthetic construct
  REGION 1..12: note = Description of Artificial Sequence: Synthetic peptide
RSSSSGGYGMDV

SEQ ID NO: 22405 - DNA, 24 bp, synthetic construct
  misc_feature 1..24: note = Description of Artificial Sequence: Synthetic oligonucleotide
  source 1..24: mol_type = other DNA
gagattggctggctctctgactac

SEQ ID NO: 22406 - protein, 8 aa, synthetic construct
  REGION 1..8: note = Description of Artificial Sequence: Synthetic peptide
EIGWLSDY

SEQ ID NO: 22407 - DNA, 36 bp, synthetic construct
  misc_feature 1..36: note = Description of Artificial Sequence: Synthetic oligonucleotide
  source 1..36: mol_type = other DNA
cgtatagcagcagctggtcactacggtatggacgtc

SEQ ID NO: 22408 - protein, 12 aa, synthetic construct
  REGION 1..12: note = Description of Artificial Sequence: Synthetic peptide
RIAAAGHYGMDV

SEQ ID NO: 22409 - DNA, 24 bp, synthetic construct
  misc_feature 1..24: note = Description of Artificial Sequence: Synthetic oligonucleotide
  source 1..24: mol_type = other DNA
gagattggctggctctctgactac

SEQ ID NO: 22410 - protein, 8 aa, synthetic construct
  REGION 1..8: note = Description of Artificial Sequence: Synthetic peptide
EIGWLSDY

SEQ ID NO: 22411 - DNA, 42 bp, synthetic construct; identical to SEQ ID NO: 22371
  misc_feature 1..42: note = Description of Artificial Sequence: Synthetic oligonucleotide
  source 1..42: mol_type = other DNA

SEQ ID NO: 22412 - protein, 14 aa, synthetic construct
  REGION 1..14: note = Description of Artificial Sequence: Synthetic peptide
EPYNSGWYDYGMDV

SEQ ID NO: 22413 - DNA, 15 bp, synthetic construct
  misc_feature 1..15: note = Description of Artificial Sequence: Synthetic oligonucleotide
  source 1..15: mol_type = other DNA
gatcggggcagcagc

SEQ ID NO: 22414 - protein, 5 aa, synthetic construct
  REGION 1..5: note = Description of Artificial Sequence: Synthetic peptide
DRGSS

SEQ ID NO: 22415 - DNA, 15 bp, synthetic construct
  misc_feature 1..15: note = Description of Artificial Sequence: Synthetic oligonucleotide
  source 1..15: mol_type = other DNA
gatcggggcagcagc

SEQ ID NO: 22416 - protein, 5 aa, synthetic construct
  REGION 1..5: note = Description of Artificial Sequence: Synthetic peptide
DRGSS

SEQ ID NO: 22417 - DNA, 27 bp, synthetic construct
  misc_feature 1..27: note = Description of Artificial Sequence: Synthetic oligonucleotide
  source 1..27: mol_type = other DNA
agcagtggctggtacttctttgactac

SEQ ID NO: 22418 - protein, 9 aa, synthetic construct
  REGION 1..9: note = Description of Artificial Sequence: Synthetic peptide
SSGWYFFDY

SEQ ID NO: 22419 - DNA, 27 bp, synthetic construct
  misc_feature 1..27: note = Description of Artificial Sequence: Synthetic oligonucleotide
  source 1..27: mol_type = other DNA
agcagtggctggtaccgctttgactac

SEQ ID NO: 22420 - protein, 9 aa, synthetic construct
  REGION 1..9: note = Description of Artificial Sequence: Synthetic peptide
SSGWYRFDY

SEQ ID NO: 22421 - DNA, 45 bp, synthetic construct
  misc_feature 1..45: note = Description of Artificial Sequence: Synthetic oligonucleotide
  source 1..45: mol_type = other DNA
aaaggtatagcagcagttggagactactactacggtatggacgtc

SEQ ID NO: 22422 - protein, 15 aa, synthetic construct
  REGION 1..15: note = Description of Artificial Sequence: Synthetic peptide
KGIAAVGDYYYGMDV

SEQ ID NO: 22423 - DNA, 18 bp, synthetic construct
  misc_feature 1..18: note = Description of Artificial Sequence: Synthetic oligonucleotide
  source 1..18: mol_type = other DNA
tatagcagctcgcactat

SEQ ID NO: 22424 - protein, 6 aa, synthetic construct
  REGION 1..6: note = Description of Artificial Sequence: Synthetic peptide
YSSSHY

SEQ ID NO: 22425 - DNA, 15 bp, synthetic construct
  misc_feature 1..15: note = Description of Artificial Sequence: Synthetic oligonucleotide
  source 1..15: mol_type = other DNA
gatcgaggcagcctc

SEQ ID NO: 22426 - protein, 5 aa, synthetic construct
  REGION 1..5: note = Description of Artificial Sequence: Synthetic peptide
DRGSL

SEQ ID NO: 22427 - DNA, 18 bp, synthetic construct
  misc_feature 1..18: note = Description of Artificial Sequence: Synthetic oligonucleotide
  source 1..18: mol_type = other DNA
ttgagcggtatggacgtc

SEQ ID NO: 22428 - protein, 6 aa, synthetic construct
  REGION 1..6: note = Description of Artificial Sequence: Synthetic peptide
LSGMDV

SEQ ID NO: 22429 - DNA, 15 bp, synthetic construct
  misc_feature 1..15: note = Description of Artificial Sequence: Synthetic oligonucleotide
  source 1..15: mol_type = other DNA
gatcgaggcagcctc

SEQ ID NO: 22430 - protein, 5 aa, synthetic construct
  REGION 1..5: note = Description of Artificial Sequence: Synthetic peptide
DRGSL

SEQ ID NO: 22431 - DNA, 15 bp, synthetic construct
  misc_feature 1..15: note = Description of Artificial Sequence: Synthetic oligonucleotide
  source 1..15: mol_type = other DNA
gcccgtatggacgtc

SEQ ID NO: 22432 - protein, 5 aa, synthetic construct
  REGION 1..5: note = Description of Artificial Sequence: Synthetic peptide
ARMDV

SEQ ID NO: 22433 - DNA, 27 bp, synthetic construct
  misc_feature 1..27: note = Description of Artificial Sequence: Synthetic oligonucleotide
  source 1..27: mol_type = other DNA
agcagtggctggtacatgtttgactac

SEQ ID NO: 22434 - protein, 9 aa, synthetic construct
  REGION 1..9: note = Description of Artificial Sequence: Synthetic peptide
SSGWYMFDY

SEQ ID NO: 22435 - DNA, 18 bp, synthetic construct
  misc_feature 1..18: note = Description of Artificial Sequence: Synthetic oligonucleotide
  source 1..18: mol_type = other DNA
ctaactggctttgactac

SEQ ID NO: 22436 - protein, 6 aa, synthetic construct
  REGION 1..6: note = Description of Artificial Sequence: Synthetic peptide
LTGFDY

SEQ ID NO: 22437 - DNA, 45 bp, synthetic construct
  misc_feature 1..45: note = Description of Artificial Sequence: Synthetic oligonucleotide
  source 1..45: mol_type = other DNA
gttggtattgaagtggctggtgactactactacggtatggaagtc

SEQ ID NO: 22438 - protein, 15 aa, synthetic construct
  REGION 1..15: note = Description of Artificial Sequence: Synthetic peptide
VGIEVAGDYYYGMEV

SEQ ID NO: 22439 - DNA, 45 bp, synthetic construct
  misc_feature 1..45: note = Description of Artificial Sequence: Synthetic oligonucleotide
  source 1..45: mol_type = other DNA
gttggtatagaagtggctggtgactactactacggtatggaagtc

SEQ ID NO: 22440 - protein, 15 aa, synthetic construct
  REGION 1..15: note = Description of Artificial Sequence: Synthetic peptide
VGIEVAGDYYYGMEV

SEQ ID NO: 22441 - DNA, 18 bp, synthetic construct
  misc_feature 1..18: note = Description of Artificial Sequence: Synthetic oligonucleotide
  source 1..18: mol_type = other DNA
tatacctggaacggctac

SEQ ID NO: 22442 - protein, 6 aa, synthetic construct
  REGION 1..6: note = Description of Artificial Sequence: Synthetic peptide
YTWNGY

SEQ ID NO: 22443 - DNA, 39 bp, synthetic construct
  misc_feature 1..39: note = Description of Artificial Sequence: Synthetic oligonucleotide
  source 1..39: mol_type = other DNA
gatcccttacgtggatacaatgacccggttatggactac

SEQ ID NO: 22444 - protein, 13 aa, synthetic construct
  REGION 1..13: note = Description of Artificial Sequence: Synthetic peptide
DPLRGYNDPVMDY

SEQ ID NO: 22445 - DNA, 33 bp, synthetic construct
  misc_feature 1..33: note = Description of Artificial Sequence: Synthetic oligonucleotide
  source 1..33: mol_type = other DNA
gagggaggagtgggagctacctactttgactac

SEQ ID NO: 22446 - protein, 11 aa, synthetic construct
  REGION 1..11: note = Description of Artificial Sequence: Synthetic peptide
EGGVGATYFDY

SEQ ID NO: 22447 - DNA, 42 bp, synthetic construct
  misc_feature 1..42: note = Description of Artificial Sequence: Synthetic oligonucleotide
  source 1..42: mol_type = other DNA
agggggattactgtggttcggaatgaggacggtttggacgtc

SEQ ID NO: 22448 - protein, 14 aa, synthetic construct
  REGION 1..14: note = Description of Artificial Sequence: Synthetic peptide
RGITVVRNEDGLDV

SEQ ID NO: 22449 - DNA, 39 bp, synthetic construct; identical to SEQ ID NO: 22443
  misc_feature 1..39: note = Description of Artificial Sequence: Synthetic oligonucleotide
  source 1..39: mol_type = other DNA

SEQ ID NO: 22450 - protein, 13 aa, synthetic construct
  REGION 1..13: note = Description of Artificial Sequence: Synthetic peptide
DPLRGYNDPVMDY

SEQ ID NO: 22451 - DNA, 33 bp, synthetic construct; identical to SEQ ID NO: 22445
  misc_feature 1..33: note = Description of Artificial Sequence: Synthetic oligonucleotide
  source 1..33: mol_type = other DNA

SEQ ID NO: 22452 - protein, 11 aa, synthetic construct
  REGION 1..11: note = Description of Artificial Sequence: Synthetic peptide
EGGVGATYFDY

SEQ ID NO: 22453 - DNA, 42 bp, synthetic construct; identical to SEQ ID NO: 22447
  misc_feature 1..42: note = Description of Artificial Sequence: Synthetic oligonucleotide
  source 1..42: mol_type = other DNA

SEQ ID NO: 22454 - protein, 14 aa, synthetic construct
  REGION 1..14: note = Description of Artificial Sequence: Synthetic peptide
RGITVVRNEDGLDV

SEQ ID NO: 22455 - DNA, 30 bp, synthetic construct
  misc_feature 1..30: note = Description of Artificial Sequence: Synthetic oligonucleotide
  source 1..30: mol_type = other DNA
gtcgggaggtactactacggtatggacgtc

SEQ ID NO: 22456 - protein, 10 aa, synthetic construct
  REGION 1..10: note = Description of Artificial Sequence: Synthetic peptide
VGRYYYGMDV

SEQ ID NO: 22457 - DNA, 39 bp, synthetic construct
  misc_feature 1..39: note = Description of Artificial Sequence: Synthetic oligonucleotide
  source 1..39: mol_type = other DNA
ggggggactacggtggctacgtggggggtctttgactac

SEQ ID NO: 22458 - protein, 13 aa, synthetic construct
  REGION 1..13: note = Description of Artificial Sequence: Synthetic peptide
GGTTVATWGVFDY

SEQ ID NO: 22459 - DNA, 18 bp, synthetic construct
  misc_feature 1..18: note = Description of Artificial Sequence: Synthetic oligonucleotide
  source 1..18: mol_type = other DNA
gtggctttctttgactat

SEQ ID NO: 22460 - protein, 6 aa, synthetic construct
  REGION 1..6: note = Description of Artificial Sequence: Synthetic peptide
VAFFDY

SEQ ID NO: 22461 - DNA, 42 bp, synthetic construct
  misc_feature 1..42: note = Description of Artificial Sequence: Synthetic oligonucleotide
  source 1..42: mol_type = other DNA
gaaaggtatagcagtggctggtacgactacggtatggacgtc

SEQ ID NO: 22462 - protein, 14 aa, synthetic construct
  REGION 1..14: note = Description of Artificial Sequence: Synthetic peptide
ERYSSGWYDYGMDV

SEQ ID NO: 22463 - DNA, 36 bp, synthetic construct
  misc_feature 1..36: note = Description of Artificial Sequence: Synthetic oligonucleotide
  source 1..36: mol_type = other DNA
gatgcccacgatttttggagtggttactttgactcc

SEQ ID NO: 22464 - protein, 12 aa, synthetic construct
  REGION 1..12: note = Description of Artificial Sequence: Synthetic peptide
DAHDFWSGYFDS

SEQ ID NO: 22465 - DNA, 18 bp, synthetic construct
  misc_feature 1..18: note = Description of Artificial Sequence: Synthetic oligonucleotide
  source 1..18: mol_type = other DNA
gtggctttctttgactat

SEQ ID NO: 22466 - protein, 6 aa, synthetic construct
  REGION 1..6: note = Description of Artificial Sequence: Synthetic peptide
VAFFDY

SEQ ID NO: 22467 - DNA, 30 bp, synthetic construct
  misc_feature 1..30: note = Description of Artificial Sequence: Synthetic oligonucleotide
  source 1..30: mol_type = other DNA
gtcgggaggtactactatggtatggacgtc

SEQ ID NO: 22468 - protein, 10 aa, synthetic construct
  REGION 1..10: note = Description of Artificial Sequence: Synthetic peptide
VGRYYYGMDV

SEQ ID NO: 22469 - DNA, 42 bp, synthetic construct
  misc_feature 1..42: note = Description of Artificial Sequence: Synthetic oligonucleotide
  source 1..42: mol_type = other DNA
gagacgtatagcagcagctggtacgactacggtatggacgtc

SEQ ID NO: 22470 - protein, 14 aa, synthetic construct
  REGION 1..14: note = Description of Artificial Sequence: Synthetic peptide
ETYSSSWYDYGMDV

SEQ ID NO: 22471 - DNA, 39 bp, synthetic construct; identical to SEQ ID NO: 22443
  misc_feature 1..39: note = Description of Artificial Sequence: Synthetic oligonucleotide
  source 1..39: mol_type = other DNA

SEQ ID NO: 22472 - protein, 13 aa, synthetic construct
  REGION 1..13: note = Description of Artificial Sequence: Synthetic peptide
DPLRGYNDPVMDY

SEQ ID NO: 22473 - DNA, 39 bp, synthetic construct; identical to SEQ ID NO: 22443
  misc_feature 1..39: note = Description of Artificial Sequence: Synthetic oligonucleotide
  source 1..39: mol_type = other DNA

SEQ ID NO: 22474 - protein, 13 aa, synthetic construct
  REGION 1..13: note = Description of Artificial Sequence: Synthetic peptide
DPLRGYNDPVMDY

SEQ ID NO: 22475 - DNA, 39 bp, synthetic construct; identical to SEQ ID NO: 22443
  misc_feature 1..39: note = Description of Artificial Sequence: Synthetic oligonucleotide
  source 1..39: mol_type = other DNA

SEQ ID NO: 22476 - protein, 13 aa, synthetic construct
  REGION 1..13: note = Description of Artificial Sequence: Synthetic peptide
DPLRGYNDPVMDY

SEQ ID NO: 22477 - DNA, 39 bp, synthetic construct; identical to SEQ ID NO: 22457
  misc_feature 1..39: note = Description of Artificial Sequence: Synthetic oligonucleotide
  source 1..39: mol_type = other DNA

SEQ ID NO: 22478 - protein, 13 aa, synthetic construct
  REGION 1..13: note = Description of Artificial Sequence: Synthetic peptide
GGTTVATWGVFDY

SEQ ID NO: 22479 - DNA, 27 bp, synthetic construct
  misc_feature 1..27: note = Description of Artificial Sequence: Synthetic oligonucleotide
  source 1..27: mol_type = other DNA
agcagtggctggtactggttcgacccc

SEQ ID NO: 22480 - protein, 9 aa, synthetic construct
  REGION 1..9: note = Description of Artificial Sequence: Synthetic peptide
SSGWYWFDP

SEQ ID NO: 22481 - DNA, 39 bp, synthetic construct; identical to SEQ ID NO: 22443
  misc_feature 1..39: note = Description of Artificial Sequence: Synthetic oligonucleotide
  source 1..39: mol_type = other DNA

SEQ ID NO: 22482 - protein, 13 aa, synthetic construct
  REGION 1..13: note = Description of Artificial Sequence: Synthetic peptide
DPLRGYNDPVMDY

SEQ ID NO: 22483 - DNA, 39 bp, synthetic construct; identical to SEQ ID NO: 22443
  misc_feature 1..39: note = Description of Artificial Sequence: Synthetic oligonucleotide
  source 1..39: mol_type = other DNA

SEQ ID NO: 22484 - protein, 13 aa, synthetic construct
  REGION 1..13: note = Description of Artificial Sequence: Synthetic peptide
DPLRGYNDPVMDY

SEQ ID NO: 22485 - DNA, 39 bp, synthetic construct; identical to SEQ ID NO: 22443
  misc_feature 1..39: note = Description of Artificial Sequence: Synthetic oligonucleotide
  source 1..39: mol_type = other DNA

SEQ ID NO: 22486 - protein, 13 aa, synthetic construct
  REGION 1..13: note = Description of Artificial Sequence: Synthetic peptide
DPLRGYNDPVMDY

SEQ ID NO: 22487 - DNA, 33 bp, synthetic construct
  misc_feature 1..33: note = Description of Artificial Sequence: Synthetic oligonucleotide
  source 1..33: mol_type = other DNA
gatcttattgggggagctacttactttgactac

SEQ ID NO: 22488 - protein, 11 aa, synthetic construct
  REGION 1..11: note = Description of Artificial Sequence: Synthetic peptide
DLIGGATYFDY

SEQ ID NO: 22489 - DNA, 36 bp, synthetic construct
  misc_feature 1..36: note = Description of Artificial Sequence: Synthetic oligonucleotide
  source 1..36: mol_type = other DNA
gatcgtcaccgtttggactactacgctttggacgtc

SEQ ID NO: 22490 - protein, 12 aa, synthetic construct
  REGION 1..12: note = Description of Artificial Sequence: Synthetic peptide
DRHRLDYYALDV

SEQ ID NO: 22491 - DNA, 27 bp, synthetic construct
  misc_feature 1..27: note = Description of Artificial Sequence: Synthetic oligonucleotide
  source 1..27: mol_type = other DNA
tcgaatagcagtggctggtttgactac

SEQ ID NO: 22492 - protein, 9 aa, synthetic construct
  REGION 1..9: note = Description of Artificial Sequence: Synthetic peptide
SNSSGWFDY

SEQ ID NO: 22493 - DNA, 36 bp, synthetic construct
  misc_feature 1..36: note = Description of Artificial Sequence: Synthetic oligonucleotide
  source 1..36: mol_type = other DNA
ctggggatcgactactactactacggtatggacgtc

SEQ ID NO: 22494 - protein, 12 aa, synthetic construct
  REGION 1..12: note = Description of Artificial Sequence: Synthetic peptide
LGIDYYYYGMDV

SEQ ID NO: 22495 - DNA, 15 bp, synthetic construct
  misc_feature 1..15: note = Description of Artificial Sequence: Synthetic oligonucleotide
  source 1..15: mol_type = other DNA
gataggggcagctcc

SEQ ID NO: 22496 - protein, 5 aa, synthetic construct
  REGION 1..5: note = Description of Artificial Sequence: Synthetic peptide
DRGSS

SEQ ID NO: 22497 - DNA, 39 bp, synthetic construct; identical to SEQ ID NO: 22443
  misc_feature 1..39: note = Description of Artificial Sequence: Synthetic oligonucleotide
  source 1..39: mol_type = other DNA

SEQ ID NO: 22498 - protein, 13 aa, synthetic construct
  REGION 1..13: note = Description of Artificial Sequence: Synthetic peptide
DPLRGYNDPVMDY

SEQ ID NO: 22499 - DNA, 36 bp, synthetic construct
  misc_feature 1..36: note = Description of Artificial Sequence: Synthetic oligonucleotide
  source 1..36: mol_type = other DNA
gaggcgtacgatttttggagtggttattgggactac

SEQ ID NO: 22500 - protein, 12 aa, synthetic construct
  REGION 1..12: note = Description of Artificial Sequence: Synthetic peptide
EAYDFWSGYWDY

SEQ ID NO: 22501 - DNA, 39 bp, synthetic construct; identical to SEQ ID NO: 22443
  misc_feature 1..39: note = Description of Artificial Sequence: Synthetic oligonucleotide
  source 1..39: mol_type = other DNA

SEQ ID NO: 22502 - protein, 13 aa, synthetic construct
  REGION 1..13: note = Description of Artificial Sequence: Synthetic peptide
DPLRGYNDPVMDY

SEQ ID NO: 22503 - DNA, 27 bp, synthetic construct
  misc_feature 1..27: note = Description of Artificial Sequence: Synthetic oligonucleotide
  source 1..27: mol_type = other DNA
agcagtggctggtaccggtttgactac

SEQ ID NO: 22504 - protein, 9 aa, synthetic construct
  REGION 1..9: note = Description of Artificial Sequence: Synthetic peptide
SSGWYRFDY

SEQ ID NO: 22505 - DNA, 36 bp, synthetic construct
  misc_feature 1..36: note = Description of Artificial Sequence: Synthetic oligonucleotide
  source 1..36: mol_type = other DNA
agggatacctacaacggttgggatgcttttgatatc

SEQ ID NO: 22506 - protein, 12 aa, synthetic construct
  REGION 1..12: note = Description of Artificial Sequence: Synthetic peptide
RDTYNGWDAFDI

SEQ ID NO: 22507 - DNA, 36 bp, synthetic construct
  misc_feature 1..36: note = Description of Artificial Sequence: Synthetic oligonucleotide
  source 1..36: mol_type = other DNA
gaggcctacgatttttggagtggtttctttgactcc

SEQ ID NO: 22508 - protein, 12 aa, synthetic construct
  REGION 1..12: note = Description of Artificial Sequence: Synthetic peptide
EAYDFWSGFFDS

SEQ ID NO: 22509 - DNA, 36 bp, synthetic construct
  misc_feature 1..36: note = Description of Artificial Sequence: Synthetic oligonucleotide
  source 1..36: mol_type = other DNA
cggtatagcagcagctggtccggtggtatggacgtc

SEQ ID NO: 22510 - protein, 12 aa, synthetic construct
  REGION 1..12: note = Description of Artificial Sequence: Synthetic peptide
RYSSSWSGGMDV

SEQ ID NO: 22511 - DNA, 39 bp, synthetic construct; identical to SEQ ID NO: 22443
  misc_feature 1..39: note = Description of Artificial Sequence: Synthetic oligonucleotide
  source 1..39: mol_type = other DNA

SEQ ID NO: 22512 - protein, 13 aa, synthetic construct
  REGION 1..13: note = Description of Artificial Sequence: Synthetic peptide
DPLRGYNDPVMDY

SEQ ID NO: 22513 - DNA, 27 bp, synthetic construct
  misc_feature 1..27: note = Description of Artificial Sequence: Synthetic oligonucleotide
  source 1..27: mol_type = other DNA
agcagtggctggtactggttcgacccc

SEQ ID NO: 22514 - protein, 9 aa, synthetic construct
  REGION 1..9: note = Description of Artificial Sequence: Synthetic peptide
SSGWYWFDP

SEQ ID NO: 22515 - DNA, 27 bp, synthetic construct
  misc_feature 1..27: note = Description of Artificial Sequence: Synthetic oligonucleotide
  source 1..27: mol_type = other DNA
tcgaatagcagtggctggtttgactac

SEQ ID NO: 22516 - protein, 9 aa, synthetic construct
  REGION 1..9: note = Description of Artificial Sequence: Synthetic peptide
SNSSGWFDY

SEQ ID NO: 22517 - DNA, 42 bp, synthetic construct; identical to SEQ ID NO: 22461
  misc_feature 1..42: note = Description of Artificial Sequence: Synthetic oligonucleotide
  source 1..42: mol_type = other DNA

SEQ ID NO: 22518 - protein, 14 aa, synthetic construct
  REGION 1..14: note = Description of Artificial Sequence: Synthetic peptide
ERYSSGWYDYGMDV

SEQ ID NO: 22519 - DNA, 39 bp, synthetic construct; identical to SEQ ID NO: 22443
  misc_feature 1..39: note = Description of Artificial Sequence: Synthetic oligonucleotide
  source 1..39: mol_type = other DNA

SEQ ID NO: 22520 - protein, 13 aa, synthetic construct
  REGION 1..13: note = Description of Artificial Sequence: Synthetic peptide
DPLRGYNDPVMDY

SEQ ID NO: 22521 - DNA, 39 bp, synthetic construct
  misc_feature 1..39: note = Description of Artificial Sequence: Synthetic oligonucleotide
  source 1..39: mol_type = other DNA
ggggggactacggtgactacgtggggggtctttgactac

SEQ ID NO: 22522 - protein, 13 aa, synthetic construct
  REGION 1..13: note = Description of Artificial Sequence: Synthetic peptide
GGTTVTTWGVFDY

SEQ ID NO: 22523 - DNA, 18 bp, synthetic construct
  misc_feature 1..18: note = Description of Artificial Sequence: Synthetic oligonucleotide
  source 1..18: mol_type = other DNA
acagcgggctttgactac

SEQ ID NO: 22524 - protein, 6 aa, synthetic construct
  REGION 1..6: note = Description of Artificial Sequence: Synthetic peptide
TAGFDY

SEQ ID NO: 22525 - DNA, 27 bp, synthetic construct
  misc_feature 1..27: note = Description of Artificial Sequence: Synthetic oligonucleotide
  source 1..27: mol_type = other DNA
tcgaatagcagtggctggtttgactac

SEQ ID NO: 22526 - protein, 9 aa, synthetic construct
  REGION 1..9: note = Description of Artificial Sequence: Synthetic peptide
SNSSGWFDY

SEQ ID NO: 22527 - DNA, 27 bp, synthetic construct
  misc_feature 1..27: note = Description of Artificial Sequence: Synthetic oligonucleotide
  source 1..27: mol_type = other DNA
agcagtggctggtactactttgactac

SEQ ID NO: 22528 - protein, 9 aa, synthetic construct
  REGION 1..9: note = Description of Artificial Sequence: Synthetic peptide
SSGWYYFDY

SEQ ID NO: 22529 - DNA, 36 bp, synthetic construct
  misc_feature 1..36: note = Description of Artificial Sequence: Synthetic oligonucleotide
  source 1..36: mol_type = other DNA
agggatacctggaacggttgggatgcttttgatatc

SEQ ID NO: 22530 - protein, 12 aa, synthetic construct
  REGION 1..12: note = Description of Artificial Sequence: Synthetic peptide
RDTWNGWDAFDI

SEQ ID NO: 22531 - DNA, 36 bp, synthetic construct
  misc_feature 1..36: note = Description of Artificial Sequence: Synthetic oligonucleotide
  source 1..36: mol_type = other DNA
gatgcccacgatttttggagtggttactttgcctac

SEQ ID NO: 22532 - protein, 12 aa, synthetic construct
  REGION 1..12: note = Description of Artificial Sequence: Synthetic peptide
DAHDFWSGYFAY

SEQ ID NO: 22533 - DNA, 42 bp, synthetic construct; identical to SEQ ID NO: 22447
  misc_feature 1..42: note = Description of Artificial Sequence: Synthetic oligonucleotide
  source 1..42: mol_type = other DNA

SEQ ID NO: 22534 - protein, 14 aa, synthetic construct
  REGION 1..14: note = Description of Artificial Sequence: Synthetic peptide
RGITVVRNEDGLDV

SEQ ID NO: 22535 - DNA, 39 bp, synthetic construct
  misc_feature 1..39: note = Description of Artificial Sequence: Synthetic oligonucleotide
  source 1..39: mol_type = other DNA
gatcccttacgtggatacaatgacccggttttggactac

SEQ ID NO: 22536 - protein, 13 aa, synthetic construct
  REGION 1..13: note = Description of Artificial Sequence: Synthetic peptide
DPLRGYNDPVLDY

SEQ ID NO: 22537 - DNA, 42 bp, synthetic construct
  misc_feature 1..42: note = Description of Artificial Sequence: Synthetic oligonucleotide
  source 1..42: mol_type = other DNA
gaaaagtatagcagcaactggtacgactacggtatggacgtc

SEQ ID NO: 22538 - protein, 14 aa, synthetic construct
  REGION 1..14: note = Description of Artificial Sequence: Synthetic peptide
EKYSSNWYDYGMDV

SEQ ID NO: 22539 - DNA, 18 bp, synthetic construct
  misc_feature 1..18: note = Description of Artificial Sequence: Synthetic oligonucleotide
  source 1..18: mol_type = other DNA
gtgactttctttgactat

SEQ ID NO: 22540 - protein, 6 aa, synthetic construct
  REGION 1..6: note = Description of Artificial Sequence: Synthetic peptide
VTFFDY

SEQ ID NO: 22541 - DNA, 42 bp, synthetic construct
  misc_feature 1..42: note = Description of Artificial Sequence: Synthetic oligonucleotide
  source 1..42: mol_type = other DNA
gaaaagtatagcagcagctggtacgactacggtttggacgtc

SEQ ID NO: 22542 - protein, 14 aa, synthetic construct
  REGION 1..14: note = Description of Artificial Sequence: Synthetic peptide
EKYSSSWYDYGLDV

SEQ ID NO: 22543 - DNA, 42 bp, synthetic construct
  misc_feature 1..42: note = Description of Artificial Sequence: Synthetic oligonucleotide
  source 1..42: mol_type = other DNA
ggttactatgatagtagtggttattactacccttttgacttc

SEQ ID NO: 22544 - protein, 14 aa, synthetic construct
  REGION 1..14: note = Description of Artificial Sequence: Synthetic peptide
GYYDSSGYYYPFDF

SEQ ID NO: 22545 - DNA, 36 bp, synthetic construct
  misc_feature 1..36: note = Description of Artificial Sequence: Synthetic oligonucleotide
  source 1..36: mol_type = other DNA
gagacttacgatttttggagtggttattttgtcttc

SEQ ID NO: 22546 - protein, 12 aa, synthetic construct
  REGION 1..12: note = Description of Artificial Sequence: Synthetic peptide
ETYDFWSGYFVF

SEQ ID NO: 22547 - DNA, 27 bp, synthetic construct
  misc_feature 1..27: note = Description of Artificial Sequence: Synthetic oligonucleotide
  source 1..27: mol_type = other DNA
agcagtggctggtactactttgacttc

SEQ ID NO: 22548 - protein, 9 aa, synthetic construct
  REGION 1..9: note = Description of Artificial Sequence: Synthetic peptide
SSGWYYFDF

SEQ ID NO: 22549 - DNA, 24 bp, synthetic construct
  misc_feature 1..24: note = Description of Artificial Sequence: Synthetic oligonucleotide
  source 1..24: mol_type = other DNA
cgggacggtgactactttgactac

SEQ ID NO: 22550 - protein, 8 aa, synthetic construct
  REGION 1..8: note = Description of Artificial Sequence: Synthetic peptide
RDGDYFDY

SEQ ID NO: 22551 - DNA, 24 bp, synthetic construct
  misc_feature 1..24: note = Description of Artificial Sequence: Synthetic oligonucleotide
  source 1..24: mol_type = other DNA
cggtacggtgactactttgactac

SEQ ID NO: 22552 - protein, 8 aa, synthetic construct
  REGION 1..8: note = Description of Artificial Sequence: Synthetic peptide
RYGDYFDY

SEQ ID NO: 22553 - DNA, 39 bp, synthetic construct; identical to SEQ ID NO: 22443
  misc_feature 1..39: note = Description of Artificial Sequence: Synthetic oligonucleotide
  source 1..39: mol_type = other DNA

SEQ ID NO: 22554 - protein, 13 aa, synthetic construct
  REGION 1..13: note = Description of Artificial Sequence: Synthetic peptide
DPLRGYNDPVMDY

SEQ ID NO: 22555 - DNA, 36 bp, synthetic construct
  misc_feature 1..36: note = Description of Artificial Sequence: Synthetic oligonucleotide
  source 1..36: mol_type = other DNA
gaacggtacgatttttggagtggtcattttgactac

SEQ ID NO: 22556 - protein, 12 aa, synthetic construct
  REGION 1..12: note = Description of Artificial Sequence: Synthetic peptide
ERYDFWSGHFDY

SEQ ID NO: 22557 - DNA, 24 bp, synthetic construct
  misc_feature 1..24: note = Description of Artificial Sequence: Synthetic oligonucleotide
  source 1..24: mol_type = other DNA
cggtacggtgactactttgactac

SEQ ID NO: 22558 - protein, 8 aa, synthetic construct
  REGION 1..8: note = Description of Artificial Sequence: Synthetic peptide
RYGDYFDY

SEQ ID NO: 22559 - DNA, 36 bp, synthetic construct
  misc_feature 1..36: note = Description of Artificial Sequence: Synthetic oligonucleotide
  source 1..36: mol_type = other DNA
cggtatagcggcagctggtccggtggtatggacgtc

SEQ ID NO: 22560 - protein, 12 aa, synthetic construct
  REGION 1..12: note = Description of Artificial Sequence: Synthetic peptide
RYSGSWSGGMDV

SEQ ID NO: 22561 - DNA, 27 bp, synthetic construct
  misc_feature 1..27: note = Description of Artificial Sequence: Synthetic oligonucleotide
  source 1..27: mol_type = other DNA
cggactggggatgatgtttttgatgtc

SEQ ID NO: 22562 - protein, 9 aa, synthetic construct
  REGION 1..9: note = Description of Artificial Sequence: Synthetic peptide
RTGDDVFDV

SEQ ID NO: 22563 - DNA, 42 bp, synthetic construct
  misc_feature 1..42: note = Description of Artificial Sequence: Synthetic oligonucleotide
  source 1..42: mol_type = other DNA
accggtgtggatccctgggactactacaacggaatggacgtc

SEQ ID NO: 22564 - protein, 14 aa, synthetic construct
  REGION 1..14: note = Description of Artificial Sequence: Synthetic peptide
TGVDPWDYYNGMDV

SEQ ID NO: 22565 - DNA, 24 bp, synthetic construct
  misc_feature 1..24: note = Description of Artificial Sequence: Synthetic oligonucleotide
  source 1..24: mol_type = other DNA
gaggttggctggtccgatgactac

SEQ ID NO: 22566 - protein, 8 aa, synthetic construct
  REGION 1..8: note = Description of Artificial Sequence: Synthetic peptide
EVGWSDDY

SEQ ID NO: 22567 - DNA, 30 bp, synthetic construct
  misc_feature 1..30: note = Description of Artificial Sequence: Synthetic oligonucleotide
  source 1..30: mol_type = other DNA
gatcatccccggtggagctacggagactac

SEQ ID NO: 22568 - protein, 10 aa, synthetic construct
  REGION 1..10: note = Description of Artificial Sequence: Synthetic peptide
DHPRWSYGDY

SEQ ID NO: 22569 - DNA, 36 bp, synthetic construct
  misc_feature 1..36: note = Description of Artificial Sequence: Synthetic oligonucleotide
  source 1..36: mol_type = other DNA
gatcattacgatttttggagtgggcactttgacttc

SEQ ID NO: 22570 - protein, 12 aa, synthetic construct
  REGION 1..12: note = Description of Artificial Sequence: Synthetic peptide
DHYDFWSGHFDF

SEQ ID NO: 22571 - DNA, 12 bp, synthetic construct
  misc_feature 1..12: note = Description of Artificial Sequence: Synthetic oligonucleotide
  source 1..12: mol_type = other DNA
aagtttggggac

SEQ ID NO: 22572 - protein, 4 aa, synthetic construct
  REGION 1..4: note = Description of Artificial Sequence: Synthetic peptide
KFGD

SEQ ID NO: 22573 - DNA, 39 bp, synthetic construct
  misc_feature 1..39: note = Description of Artificial Sequence: Synthetic oligonucleotide
  source 1..39: mol_type = other DNA
cgggagacctacgactggggatccgatgcttttgatatc

SEQ ID NO: 22574 - protein, 13 aa, synthetic construct
  REGION 1..13: note = Description of Artificial Sequence: Synthetic peptide
RETYDWGSDAFDI

SEQ ID NO: 22575 - DNA, 27 bp, synthetic construct
  misc_feature 1..27: note = Description of Artificial Sequence: Synthetic oligonucleotide
  source 1..27: mol_type = other DNA
agtagtggctggtacatctttgactac

SEQ ID NO: 22576 - protein, 9 aa, synthetic construct
  REGION 1..9: note = Description of Artificial Sequence: Synthetic peptide
SSGWYIFDY

SEQ ID NO: 22577 - DNA, 24 bp, synthetic construct
  misc_feature 1..24: note = Description of Artificial Sequence: Synthetic oligonucleotide
  source 1..24: mol_type = other DNA
gaggttggctggtccgatgactac

SEQ ID NO: 22578 - protein, 8 aa, synthetic construct
  REGION 1..8: note = Description of Artificial Sequence: Synthetic peptide
EVGWSDDY

SEQ ID NO: 22579 - DNA, 36 bp, synthetic construct
  misc_feature 1..36: note = Description of Artificial Sequence: Synthetic oligonucleotide
  source 1..36: mol_type = other DNA
gatcattacgatttttggagtgggcactttgactac

SEQ ID NO: 22580 - protein, 12 aa, synthetic construct
  REGION 1..12: note = Description of Artificial Sequence: Synthetic peptide
DHYDFWSGHFDY

SEQ ID NO: 22581 - DNA, 27 bp, synthetic construct
  misc_feature 1..27: note = Description of Artificial Sequence: Synthetic oligonucleotide
  source 1..27: mol_type = other DNA
cggactggggatgatgtttttgatatc

SEQ ID NO: 22582 - protein, 9 aa, synthetic construct
  REGION 1..9: note = Description of Artificial Sequence: Synthetic peptide
RTGDDVFDI

SEQ ID NO: 22583 - DNA, 42 bp, synthetic construct
  misc_feature 1..42: note = Description of Artificial Sequence: Synthetic oligonucleotide
  source 1..42: mol_type = other DNA
aggcccccgcagtggctggtagagggctacggtatggacgtc

SEQ ID NO: 22584 - protein, 14 aa, synthetic construct
  REGION 1..14: note = Description of Artificial Sequence: Synthetic peptide
RPPQWLVEGYGMDV

SEQ ID NO: 22585 - DNA, 33 bp, synthetic construct
  misc_feature 1..33: note = Description of Artificial Sequence: Synthetic oligonucleotide
  source 1..33: mol_type = other DNA
aggtatagcagtggctgggactggttcgacccc

SEQ ID NO: 22586 - protein, 11 aa, synthetic construct
  REGION 1..11: note = Description of Artificial Sequence: Synthetic peptide
RYSSGWDWFDP

SEQ ID NO: 22587 - DNA, 21 bp, synthetic construct
  misc_feature 1..21: note = Description of Artificial Sequence: Synthetic oligonucleotide
  source 1..21: mol_type = other DNA
gcaactatggcccttgactac

SEQ ID NO: 22588 - protein, 7 aa, synthetic construct
  REGION 1..7: note = Description of Artificial Sequence: Synthetic peptide
ATMALDY

SEQ ID NO: 22589 - DNA, 36 bp, synthetic construct
  misc_feature 1..36: note = Description of Artificial Sequence: Synthetic oligonucleotide
  source 1..36: mol_type = other DNA
gatcggggatactatggctactacggtatggacgtc

SEQ ID NO: 22590 - protein, 12 aa, synthetic construct
  REGION 1..12: note = Description of Artificial Sequence: Synthetic peptide
DRGYYGYYGMDV

SEQ ID NO: 22591 - DNA, 33 bp, synthetic construct
  misc_feature 1..33: note = Description of Artificial Sequence: Synthetic oligonucleotide
  source 1..33: mol_type = other DNA
gatcagggcgtgggctacgacggtttggacgtc

SEQ ID NO: 22592 - protein, 11 aa, synthetic construct
  REGION 1..11: note = Description of Artificial Sequence: Synthetic peptide
DQGVGYDGLDV

SEQ ID NO: 22593 - DNA, 33 bp, synthetic construct
  misc_feature 1..33: note = Description of Artificial Sequence: Synthetic oligonucleotide
  source 1..33: mol_type = other DNA
gcccagggggtctactactacgttatggacgtc

SEQ ID NO: 22594 - protein, 11 aa, synthetic construct
  REGION 1..11: note = Description of Artificial Sequence: Synthetic peptide
AQGVYYYVMDV

SEQ ID NO: 22595 - DNA, 42 bp, synthetic construct
  misc_feature 1..42: note = Description of Artificial Sequence: Synthetic oligonucleotide
  source 1..42: mol_type = other DNA
gaggaggattactatgatagtagtggcccggggttcgacccc

SEQ ID NO: 22596 - protein, 14 aa, synthetic construct
  REGION 1..14: note = Description of Artificial Sequence: Synthetic peptide
EEDYYDSSGPGFDP

SEQ ID NO: 22597 - DNA, 33 bp, synthetic construct; identical to SEQ ID NO: 22591
  misc_feature 1..33: note = Description of Artificial Sequence: Synthetic oligonucleotide
  source 1..33: mol_type = other DNA

SEQ ID NO: 22598 - protein, 11 aa, synthetic construct
  REGION 1..11: note = Description of Artificial Sequence: Synthetic peptide
DQGVGYDGLDV

SEQ ID NO: 22599 - DNA, 36 bp, synthetic construct
  misc_feature 1..36: note = Description of Artificial Sequence: Synthetic oligonucleotide
  source 1..36: mol_type = other DNA
ctccggtataactggaacttcccttactttgactac

SEQ ID NO: 22600 - protein, 12 aa, synthetic construct
  REGION 1..12: note = Description of Artificial Sequence: Synthetic peptide
LRYNWNFPYFDY

SEQ ID NO: 22601 - DNA, 33 bp, synthetic construct
  misc_feature 1..33: note = Description of Artificial Sequence: Synthetic oligonucleotide
  source 1..33: mol_type = other DNA
tccgggtataattgggacgccggggtcgacccc

SEQ ID NO: 22602 - protein, 11 aa, synthetic construct
  REGION 1..11: note = Description of Artificial Sequence: Synthetic peptide
SGYNWDAGVDP

SEQ ID NO: 22603 - DNA, 33 bp, synthetic construct; identical to SEQ ID NO: 20155
  misc_feature 1..33: note = Description of Artificial Sequence: Synthetic oligonucleotide
  source 1..33: mol_type = other DNA

SEQ ID NO: 22604 - protein, 11 aa, synthetic construct
  REGION 1..11: note = Description of Artificial Sequence: Synthetic peptide
GTHGYYYGVDV

SEQ ID NO: 22605 - DNA, 36 bp, synthetic construct
  misc_feature 1..36: note = Description of Artificial Sequence: Synthetic oligonucleotide
  source 1..36: mol_type = other DNA
gatatgggtagatacagctatggtttctttgactac

SEQ ID NO: 22606 - protein, 12 aa, synthetic construct
  REGION 1..12: note = Description of Artificial Sequence: Synthetic peptide
DMGRYSYGFFDY

SEQ ID NO: 22607 - DNA, 33 bp, synthetic construct
  misc_feature 1..33: note = Description of Artificial Sequence: Synthetic oligonucleotide
  source 1..33: mol_type = other DNA
gatagaagcgtcggctacgacggtttagatgtc

SEQ ID NO: 22608 - protein, 11 aa, synthetic construct
  REGION 1..11: note = Description of Artificial Sequence: Synthetic peptide
DRSVGYDGLDV

SEQ ID NO: 22609 - DNA, 33 bp, synthetic construct; identical to SEQ ID NO: 22591
  misc_feature 1..33: note = Description of Artificial Sequence: Synthetic oligonucleotide
  source 1..33: mol_type = other DNA

SEQ ID NO: 22610 - protein, 11 aa, synthetic construct
  REGION 1..11: note = Description of Artificial Sequence: Synthetic peptide
DQGVGYDGLDV

SEQ ID NO: 22611 - DNA, 36 bp, synthetic construct
  misc_feature 1..36: note = Description of Artificial Sequence: Synthetic oligonucleotide
  source 1..36: mol_type = other DNA
ctccggtataactggaacttccctttctttgactat

SEQ ID NO: 22612 - protein, 12 aa, synthetic construct
  REGION 1..12: note = Description of Artificial Sequence: Synthetic peptide
LRYNWNFPFFDY

SEQ ID NO: 22613 - DNA, 27 bp, synthetic construct
  misc_feature 1..27: note = Description of Artificial Sequence: Synthetic oligonucleotide
  source 1..27: mol_type = other DNA
agcagtggctggtactactttgactac

SEQ ID NO: 22614 - protein, 9 aa, synthetic construct
  REGION 1..9: note = Description of Artificial Sequence: Synthetic peptide
SSGWYYFDY

SEQ ID NO: 22615 - DNA, 51 bp, synthetic construct
  misc_feature 1..51: note = Description of Artificial Sequence: Synthetic oligonucleotide
  source 1..51: mol_type = other DNA
ggggattacgatggttcggggagttatcactactattacggtatggacgtc

SEQ ID NO: 22616 - protein, 17 aa, synthetic construct
  REGION 1..17: note = Description of Artificial Sequence: Synthetic peptide
GDYDGSGSYHYYYGMDV

SEQ ID NO: 22617 - DNA, 33 bp, synthetic construct
  misc_feature 1..33: note = Description of Artificial Sequence: Synthetic oligonucleotide
  source 1..33: mol_type = other DNA
gataggggggtgggttactacggtttggacgtc

SEQ ID NO: 22618 - protein, 11 aa, synthetic construct
  REGION 1..11: note = Description of Artificial Sequence: Synthetic peptide
DRGVGYYGLDV

SEQ ID NO: 22619 - DNA, 51 bp, synthetic construct
  misc_feature 1..51: note = Description of Artificial Sequence: Synthetic oligonucleotide
  source 1..51: mol_type = other DNA
ggggattacgatggttcggggagttatcactactactacggtatggacgtc

SEQ ID NO: 22620 - protein, 17 aa, synthetic construct
  REGION 1..17: note = Description of Artificial Sequence: Synthetic peptide
GDYDGSGSYHYYYGMDV

SEQ ID NO: 22621 - DNA, 51 bp, synthetic construct
  misc_feature 1..51: note = Description of Artificial Sequence: Synthetic oligonucleotide
  source 1..51: mol_type = other DNA
ggggattacgatggttcggggagttatcacttctactacggtatggacgtc

SEQ ID NO: 22622 - protein, 17 aa, synthetic construct
  REGION 1..17: note = Description of Artificial Sequence: Synthetic peptide
GDYDGSGSYHFYYGMDV

SEQ ID NO: 22623 - DNA, 51 bp, synthetic construct; identical to SEQ ID NO: 22615
  misc_feature 1..51: note = Description of Artificial Sequence: Synthetic oligonucleotide
  source 1..51: mol_type = other DNA

SEQ ID NO: 22624 - protein, 17 aa, synthetic construct
  REGION 1..17: note = Description of Artificial Sequence: Synthetic peptide
GDYDGSGSYHYYYGMDV

SEQ ID NO: 22625 - DNA, 36 bp, synthetic construct; identical to SEQ ID NO: 22599
  misc_feature 1..36: note = Description of Artificial Sequence: Synthetic oligonucleotide
  source 1..36: mol_type = other DNA

SEQ ID NO: 22626 - protein, 12 aa, synthetic construct
  REGION 1..12: note = Description of Artificial Sequence: Synthetic peptide
LRYNWNFPYFDY

SEQ ID NO: 22627 - DNA, 27 bp, synthetic construct
  misc_feature 1..27: note = Description of Artificial Sequence: Synthetic oligonucleotide
  source 1..27: mol_type = other DNA
agcagtggctggtacatctttgactac

SEQ ID NO: 22628 - protein, 9 aa, synthetic construct
  REGION 1..9: note = Description of Artificial Sequence: Synthetic peptide
SSGWYIFDY

SEQ ID NO: 22629 - DNA, 33 bp, synthetic construct; identical to SEQ ID NO: 20155
  misc_feature 1..33: note = Description of Artificial Sequence: Synthetic oligonucleotide
  source 1..33: mol_type = other DNA

SEQ ID NO: 22630 - protein, 11 aa, synthetic construct
  REGION 1..11: note = Description of Artificial Sequence: Synthetic peptide
GTHGYYYGVDV

SEQ ID NO: 22631 - DNA, 33 bp, synthetic construct; identical to SEQ ID NO: 22591
  misc_feature 1..33: note = Description of Artificial Sequence: Synthetic oligonucleotide
  source 1..33: mol_type = other DNA

SEQ ID NO: 22632 - protein, 11 aa, synthetic construct
  REGION 1..11: note = Description of Artificial Sequence: Synthetic peptide
DQGVGYDGLDV

SEQ ID NO: 22633 - DNA, 33 bp, synthetic construct
  misc_feature 1..33: note = Description of Artificial Sequence: Synthetic oligonucleotide
  source 1..33: mol_type = other DNA
gatttctctgtagggtacgacggtatggacgtc

SEQ ID NO: 22634 - protein, 11 aa, synthetic construct
  REGION 1..11: note = Description of Artificial Sequence: Synthetic peptide
DFSVGYDGMDV

SEQ ID NO: 22635 - DNA, 33 bp, synthetic construct
  misc_feature 1..33: note = Description of Artificial Sequence: Synthetic oligonucleotide
  source 1..33: mol_type = other DNA
tccgggtataactgggacaacggggtcgacccc

SEQ ID NO: 22636 - protein, 11 aa, synthetic construct
  REGION 1..11: note = Description of Artificial Sequence: Synthetic peptide
SGYNWDNGVDP

SEQ ID NO: 22637 - DNA, 21 bp, synthetic construct
  misc_feature 1..21: note = Description of Artificial Sequence: Synthetic oligonucleotide
  source 1..21: mol_type = other DNA
gctactatggcccttgactac

SEQ ID NO: 22638 - protein, 7 aa, synthetic construct
  REGION 1..7: note = Description of Artificial Sequence: Synthetic peptide
ATMALDY

SEQ ID NO: 22639 - DNA, 42 bp, synthetic construct; identical to SEQ ID NO: 22595
  misc_feature 1..42: note = Description of Artificial Sequence: Synthetic oligonucleotide
  source 1..42: mol_type = other DNA

SEQ ID NO: 22640 - protein, 14 aa, synthetic construct
  REGION 1..14: note = Description of Artificial Sequence: Synthetic peptide
EEDYYDSSGPGFDP

SEQ ID NO: 22641 - DNA, 33 bp, synthetic construct
  misc_feature 1..33: note = Description of Artificial Sequence: Synthetic oligonucleotide
  source 1..33: mol_type = other DNA
gatagaacagtgggatactccggtatggacgtc

SEQ ID NO: 22642 - protein, 11 aa, synthetic construct
  REGION 1..11: note = Description of Artificial Sequence: Synthetic peptide
DRTVGYSGMDV

SEQ ID NO: 22643 - DNA, 36 bp, synthetic construct
  misc_feature 1..36: note = Description of Artificial Sequence: Synthetic oligonucleotide
  source 1..36: mol_type = other DNA
ctccggtataactggaacttcccttactttgacttc

SEQ ID NO: 22644 - protein, 12 aa, synthetic construct
  REGION 1..12: note = Description of Artificial Sequence: Synthetic peptide
LRYNWNFPYFDF

SEQ ID NO: 22645 - DNA, 33 bp, synthetic construct; identical to SEQ ID NO: 22591
  misc_feature 1..33: note = Description of Artificial Sequence: Synthetic oligonucleotide
  source 1..33: mol_type = other DNA

SEQ ID NO: 22646 - protein, 11 aa, synthetic construct
  REGION 1..11: note = Description of Artificial Sequence: Synthetic peptide
DQGVGYDGLDV

SEQ ID NO: 22647 - DNA, 33 bp, synthetic construct
  misc_feature 1..33: note = Description of Artificial Sequence: Synthetic oligonucleotide
  source 1..33: mol_type = other DNA
gatggattcggtgggagctcctactttgactac

SEQ ID NO: 22648 - protein, 11 aa, synthetic construct
  REGION 1..11: note = Description of Artificial Sequence: Synthetic peptide
DGFGGSSYFDY

SEQ ID NO: 22649 - DNA, 12 bp, synthetic construct
  misc_feature 1..12: note = Description of Artificial Sequence: Synthetic oligonucleotide
  source 1..12: mol_type = other DNA
aagtttggggac

SEQ ID NO: 22650 - protein, 4 aa, synthetic construct
  REGION 1..4: note = Description of Artificial Sequence: Synthetic peptide
KFGD

SEQ ID NO: 22651 - DNA, 24 bp, synthetic construct
  misc_feature 1..24: note = Description of Artificial Sequence: Synthetic oligonucleotide
  source 1..24: mol_type = other DNA
gaggttggctggcacgatgactat

SEQ ID NO: 22652 - protein, 8 aa, synthetic construct
  REGION 1..8: note = Description of Artificial Sequence: Synthetic peptide
EVGWHDDY

SEQ ID NO: 22653 - DNA, 24 bp, synthetic construct
  misc_feature 1..24: note = Description of Artificial Sequence: Synthetic oligonucleotide
  source 1..24: mol_type = other DNA
gaggttggctggcacgatgactat

SEQ ID NO: 22654 - protein, 8 aa, synthetic construct
  REGION 1..8: note = Description of Artificial Sequence: Synthetic peptide
EVGWHDDY

SEQ ID NO: 22655 - DNA, 18 bp, synthetic construct
  misc_feature 1..18: note = Description of Artificial Sequence: Synthetic oligonucleotide
  source 1..18: mol_type = other DNA
agcaacctttttgactgc

SEQ ID NO: 22656 - protein, 6 aa, synthetic construct
  REGION 1..6: note = Description of Artificial Sequence: Synthetic peptide
SNLFDC

SEQ ID NO: 22657 - DNA, 12 bp, synthetic construct
  misc_feature 1..12: note = Description of Artificial Sequence: Synthetic oligonucleotide
  source 1..12: mol_type = other DNA
aagtttggggac

SEQ ID NO: 22658 - protein, 4 aa, synthetic construct
  REGION 1..4: note = Description of Artificial Sequence: Synthetic peptide
KFGD

SEQ ID NO: 22659 - DNA, 36 bp, synthetic construct; identical to SEQ ID NO: 22579
  misc_feature 1..36: note = Description of Artificial Sequence: Synthetic oligonucleotide
  source 1..36: mol_type = other DNA

SEQ ID NO: 22660 - protein, 12 aa, synthetic construct
  REGION 1..12: note = Description of Artificial Sequence: Synthetic peptide
DHYDFWSGHFDY

SEQ ID NO: 22661 - DNA, 27 bp, synthetic construct
  misc_feature 1..27: note = Description of Artificial Sequence: Synthetic oligonucleotide
  source 1..27: mol_type = other DNA
cggactggggatgatgtttttgatatc

SEQ ID NO: 22662 - protein, 9 aa, synthetic construct
  REGION 1..9: note = Description of Artificial Sequence: Synthetic peptide
RTGDDVFDI

SEQ ID NO: 22663 - DNA, 12 bp, synthetic construct
  misc_feature 1..12: note = Description of Artificial Sequence: Synthetic oligonucleotide
  source 1..12: mol_type = other DNA
aagtttggggac

SEQ ID NO: 22664 - protein, 4 aa, synthetic construct
  REGION 1..4: note = Description of Artificial Sequence: Synthetic peptide
KFGD

SEQ ID NO: 22665 - DNA, 27 bp, synthetic construct
  misc_feature 1..27: note = Description of Artificial Sequence: Synthetic oligonucleotide
  source 1..27: mol_type = other DNA
aggaacaccgatgatgcttttgatatc

SEQ ID NO: 22666 - protein, 9 aa, synthetic construct
  REGION 1..9: note = Description of Artificial Sequence: Synthetic peptide
RNTDDAFDI

SEQ ID NO: 22667 - DNA, 12 bp, synthetic construct
  misc_feature 1..12: note = Description of Artificial Sequence: Synthetic oligonucleotide
  source 1..12: mol_type = other DNA
aagtttggggac

SEQ ID NO: 22668 - protein, 4 aa, synthetic construct
  REGION 1..4: note = Description of Artificial Sequence: Synthetic peptide
KFGD

SEQ ID NO: 22669 - DNA, 36 bp, synthetic construct
  misc_feature 1..36: note = Description of Artificial Sequence: Synthetic oligonucleotide
  source 1..36: mol_type = other DNA
gagagatacgatttttggagtggtcattttgactac

SEQ ID NO: 22670 - protein, 12 aa, synthetic construct
  REGION 1..12: note = Description of Artificial Sequence: Synthetic peptide
ERYDFWSGHFDY

SEQ ID NO: 22671 - DNA, 36 bp, synthetic construct
  misc_feature 1..36: note = Description of Artificial Sequence: Synthetic oligonucleotide
  source 1..36: mol_type = other DNA
gatcgattcgatttttggagtggttattccgactac

SEQ ID NO: 22672 - protein, 12 aa, synthetic construct
  REGION 1..12: note = Description of Artificial Sequence: Synthetic peptide
DRFDFWSGYSDY

SEQ ID NO: 22673 - DNA, 21 bp, synthetic construct
  misc_feature 1..21: note = Description of Artificial Sequence: Synthetic oligonucleotide
  source 1..21: mol_type = other DNA
gaatgggtgggagccgactac

SEQ ID NO: 22674 - protein, 7 aa, synthetic construct
  REGION 1..7: note = Description of Artificial Sequence: Synthetic peptide
EWVGADY

SEQ ID NO: 22675 - DNA, 51 bp, synthetic construct; identical to SEQ ID NO: 22615
  misc_feature 1..51: note = Description of Artificial Sequence: Synthetic oligonucleotide
  source 1..51: mol_type = other DNA

SEQ ID NO: 22676 - protein, 17 aa, synthetic construct
  REGION 1..17: note = Description of Artificial Sequence: Synthetic peptide
GDYDGSGSYHYYYGMDV

SEQ ID NO: 22677 - DNA, 33 bp, synthetic construct; identical to SEQ ID NO: 20155
  misc_feature 1..33: note = Description of Artificial Sequence: Synthetic oligonucleotide
  source 1..33: mol_type = other DNA

SEQ ID NO: 22678 - protein, 11 aa, synthetic construct
  REGION 1..11: note = Description of Artificial Sequence: Synthetic peptide
GTHGYYYGVDV

SEQ ID NO: 22679 - DNA, 33 bp, synthetic construct
  misc_feature 1..33: note = Description of Artificial Sequence: Synthetic oligonucleotide
  source 1..33: mol_type = other DNA
gatggattcggtgggagctcctattttgactac

SEQ ID NO: 22680 - protein, 11 aa, synthetic construct
  REGION 1..11: note = Description of Artificial Sequence: Synthetic peptide
DGFGGSSYFDY

SEQ ID NO: 22681 - DNA, 51 bp, synthetic construct; identical to SEQ ID NO: 22619
  misc_feature 1..51: note = Description of Artificial Sequence: Synthetic oligonucleotide
  source 1..51: mol_type = other DNA

SEQ ID NO: 22682 - protein, 17 aa, synthetic construct
  REGION 1..17: note = Description of Artificial Sequence: Synthetic peptide
GDYDGSGSYHYYYGMDV

SEQ ID NO: 22683 - DNA, 51 bp, synthetic construct
  misc_feature 1..51: note = Description of Artificial Sequence: Synthetic oligonucleotide
  source 1..51: mol_type = other DNA
ggggattacgatggttcggggagttatcactactactacggtttggacgtc

SEQ ID NO: 22684 - protein, 17 aa, synthetic construct
  REGION 1..17: note = Description of Artificial Sequence: Synthetic peptide
GDYDGSGSYHYYYGLDV

SEQ ID NO: 22685 - DNA, 27 bp, synthetic construct
  misc_feature 1..27: note = Description of Artificial Sequence: Synthetic oligonucleotide
  source 1..27: mol_type = other DNA
agcagtggctggtacatctttgactac

SEQ ID NO: 22686 - protein, 9 aa, synthetic construct
  REGION 1..9: note = Description of Artificial Sequence: Synthetic peptide
SSGWYIFDY

SEQ ID NO: 22687 - DNA, 36 bp, synthetic construct; identical to SEQ ID NO: 22589
  misc_feature 1..36: note = Description of Artificial Sequence: Synthetic oligonucleotide
  source 1..36: mol_type = other DNA

SEQ ID NO: 22688 - protein, 12 aa, synthetic construct
  REGION 1..12: note = Description of Artificial Sequence: Synthetic peptide
DRGYYGYYGMDV

SEQ ID NO: 22689 - DNA, 33 bp, synthetic construct; identical to SEQ ID NO: 20155
  misc_feature 1..33: note = Description of Artificial Sequence: Synthetic oligonucleotide
  source 1..33: mol_type = other DNA

SEQ ID NO: 22690 - protein, 11 aa, synthetic construct
  REGION 1..11: note = Description of Artificial Sequence: Synthetic peptide
GTHGYYYGVDV

SEQ ID NO: 22691 - DNA, 42 bp, synthetic construct
  misc_feature 1..42: note = Description of Artificial Sequence: Synthetic oligonucleotide
  source 1..42: mol_type = other DNA
gaggagtatagcagtggctggttcgggtacggtatggacgtc

SEQ ID NO: 22692 - protein, 14 aa, synthetic construct
  REGION 1..14: note = Description of Artificial Sequence: Synthetic peptide
EEYSSGWFGYGMDV

SEQ ID NO: 22693 - DNA, 21 bp, synthetic construct
  misc_feature 1..21: note = Description of Artificial Sequence: Synthetic oligonucleotide
  source 1..21: mol_type = other DNA
gaatgggtgggagccgactac

SEQ ID NO: 22694 - protein, 7 aa, synthetic construct
  REGION 1..7: note = Description of Artificial Sequence: Synthetic peptide
EWVGADY

SEQ ID NO: 22695 - DNA, 27 bp, synthetic construct
  misc_feature 1..27: note = Description of Artificial Sequence: Synthetic oligonucleotide
  source 1..27: mol_type = other DNA
agcagtggctggtacttctttgactac

SEQ ID NO: 22696 - protein, 9 aa, synthetic construct
  REGION 1..9: note = Description of Artificial Sequence: Synthetic peptide
SSGWYFFDY

SEQ ID NO: 22697 - DNA, 36 bp, synthetic construct; identical to SEQ ID NO: 22599
  misc_feature 1..36: note = Description of Artificial Sequence: Synthetic oligonucleotide
  source 1..36: mol_type = other DNA

SEQ ID NO: 22698 - protein, 12 aa, synthetic construct
  REGION 1..12: note = Description of Artificial Sequence: Synthetic peptide
LRYNWNFPYFDY

SEQ ID NO: 22699 - DNA, 42 bp, synthetic construct; identical to SEQ ID NO: 22595
  misc_feature 1..42: note = Description of Artificial Sequence: Synthetic oligonucleotide
  source 1..42: mol_type = other DNA

SEQ ID NO: 22700 - protein, 14 aa, synthetic construct
  REGION 1..14: note = Description of Artificial Sequence: Synthetic peptide
EEDYYDSSGPGFDP

SEQ ID NO: 22701 - DNA, 33 bp, synthetic construct; identical to SEQ ID NO: 22591
  misc_feature 1..33: note = Description of Artificial Sequence: Synthetic oligonucleotide
  source 1..33: mol_type = other DNA

SEQ ID NO: 22702 - protein, 11 aa, synthetic construct
  REGION 1..11: note = Description of Artificial Sequence: Synthetic peptide
DQGVGYDGLDV

SEQ ID NO: 22703 - DNA, 42 bp, synthetic construct; identical to SEQ ID NO: 22595
  misc_feature 1..42: note = Description of Artificial Sequence: Synthetic oligonucleotide
  source 1..42: mol_type = other DNA

SEQ ID NO: 22704 - protein, 14 aa, synthetic construct
  REGION 1..14: note = Description of Artificial Sequence: Synthetic peptide
EEDYYDSSGPGFDP

SEQ ID NO: 22705 - DNA, 33 bp, synthetic construct; identical to SEQ ID NO: 22607
  misc_feature 1..33: note = Description of Artificial Sequence: Synthetic oligonucleotide
  source 1..33: mol_type = other DNA

SEQ ID NO: 22706 - protein, 11 aa, synthetic construct
  REGION 1..11: note = Description of Artificial Sequence: Synthetic peptide
DRSVGYDGLDV

SEQ ID NO: 22707 - DNA, 51 bp, synthetic construct; identical to SEQ ID NO: 22615
  misc_feature 1..51: note = Description of Artificial Sequence: Synthetic oligonucleotide
  source 1..51: mol_type = other DNA

SEQ ID NO: 22708 - protein, 17 aa, synthetic construct
  REGION 1..17: note = Description of Artificial Sequence: Synthetic peptide
GDYDGSGSYHYYYGMDV

SEQ ID NO: 22709 - DNA, 33 bp, synthetic construct
  misc_feature 1..33: note = Description of Artificial Sequence: Synthetic oligonucleotide
  source 1..33: mol_type = other DNA
gcccacggggtctactactacgctatggacgtc

SEQ ID NO: 22710 - protein, 11 aa, synthetic construct
  REGION 1..11: note = Description of Artificial Sequence: Synthetic peptide
AHGVYYYAMDV

SEQ ID NO: 22711 - DNA, 33 bp, synthetic construct; identical to SEQ ID NO: 22601
  misc_feature 1..33: note = Description of Artificial Sequence: Synthetic oligonucleotide
  source 1..33: mol_type = other DNA

SEQ ID NO: 22712 - protein, 11 aa, synthetic construct
  REGION 1..11: note = Description of Artificial Sequence: Synthetic peptide
SGYNWDAGVDP

SEQ ID NO: 22713 - DNA, 33 bp, synthetic construct; identical to SEQ ID NO: 22591
  misc_feature 1..33: note = Description of Artificial Sequence: Synthetic oligonucleotide
  source 1..33: mol_type = other DNA

SEQ ID NO: 22714 - protein, 11 aa, synthetic construct
  REGION 1..11: note = Description of Artificial Sequence: Synthetic peptide
DQGVGYDGLDV

SEQ ID NO: 22715 - DNA, 33 bp, synthetic construct; identical to SEQ ID NO: 22591
  misc_feature 1..33: note = Description of Artificial Sequence: Synthetic oligonucleotide
  source 1..33: mol_type = other DNA

SEQ ID NO: 22716 - protein, 11 aa, synthetic construct
  REGION 1..11: note = Description of Artificial Sequence: Synthetic peptide
DQGVGYDGLDV

SEQ ID NO: 22717 - DNA, 21 bp, synthetic construct
  misc_feature 1..21: note = Description of Artificial Sequence: Synthetic oligonucleotide
  source 1..21: mol_type = other DNA
gaatgggtgggagccgactac

SEQ ID NO: 22718 - protein, 7 aa, synthetic construct
  REGION 1..7: note = Description of Artificial Sequence: Synthetic peptide
EWVGADY

SEQ ID NO: 22719 - DNA, 33 bp, synthetic construct; identical to SEQ ID NO: 22591
  misc_feature 1..33: note = Description of Artificial Sequence: Synthetic oligonucleotide
  source 1..33: mol_type = other DNA

SEQ ID NO: 22720 - protein, 11 aa, synthetic construct
  REGION 1..11: note = Description of Artificial Sequence: Synthetic peptide
DQGVGYDGLDV

SEQ ID NO: 22721 - DNA, 54 bp, synthetic construct
  misc_feature 1..54: note = Description of Artificial Sequence: Synthetic oligonucleotide
  source 1..54: mol_type = other DNA
gaggattccccttatagtggctacgccttggactacttctacggtatggacgtc

SEQ ID NO: 22722 - protein, 18 aa, synthetic construct
  REGION 1..18: note = Description of Artificial Sequence: Synthetic peptide
EDSPYSGYALDYFYGMDV

SEQ ID NO: 22723 - DNA, 33 bp, synthetic construct
  misc_feature 1..33: note = Description of Artificial Sequence: Synthetic oligonucleotide
  source 1..33: mol_type = other DNA
gatcgtggggttggctactacggtatggacgtc

SEQ ID NO: 22724 - protein, 11 aa, synthetic construct
  REGION 1..11: note = Description of Artificial Sequence: Synthetic peptide
DRGVGYYGMDV

SEQ ID NO: 22725 - DNA, 36 bp, synthetic construct
  misc_feature 1..36: note = Description of Artificial Sequence: Synthetic oligonucleotide
  source 1..36: mol_type = other DNA
ctcatagcagtagttgggtcccactactttgactac

SEQ ID NO: 22726 - protein, 12 aa, synthetic construct
  REGION 1..12: note = Description of Artificial Sequence: Synthetic peptide
LIAVVGSHYFDY

SEQ ID NO: 22727 - DNA, 51 bp, synthetic construct
  misc_feature 1..51: note = Description of Artificial Sequence: Synthetic oligonucleotide
  source 1..51: mol_type = other DNA
ggggattacgatggttcggggagttatcaccactactacggtatggacgtc

SEQ ID NO: 22728 - protein, 17 aa, synthetic construct
  REGION 1..17: note = Description of Artificial Sequence: Synthetic peptide
GDYDGSGSYHHYYGMDV

SEQ ID NO: 22729 - DNA, 33 bp, synthetic construct; identical to SEQ ID NO: 22617
  misc_feature 1..33: note = Description of Artificial Sequence: Synthetic oligonucleotide
  source 1..33: mol_type = other DNA

SEQ ID NO: 22730 - protein, 11 aa, synthetic construct
  REGION 1..11: note = Description of Artificial Sequence: Synthetic peptide
DRGVGYYGLDV

SEQ ID NO: 22731 - DNA, 51 bp, synthetic construct
  misc_feature 1..51: note = Description of Artificial Sequence: Synthetic oligonucleotide
  source 1..51: mol_type = other DNA
ggggattacgatggttcggggagttatcactactaccacggtatggacgtc

SEQ ID NO: 22732 - protein, 17 aa, synthetic construct
  REGION 1..17: note = Description of Artificial Sequence: Synthetic peptide
GDYDGSGSYHYYHGMDV

SEQ ID NO: 22733 - DNA, 33 bp, synthetic construct
  misc_feature 1..33: note = Description of Artificial Sequence: Synthetic oligonucleotide
  source 1..33: mol_type = other DNA
gatagaagcgtcggctacgacggtatggacgtc

SEQ ID NO: 22734 - protein, 11 aa, synthetic construct
  REGION 1..11: note = Description of Artificial Sequence: Synthetic peptide
DRSVGYDGMDV

SEQ ID NO: 22735 - DNA, 33 bp, synthetic construct
  misc_feature 1..33: note = Description of Artificial Sequence: Synthetic oligonucleotide
  source 1..33: mol_type = other DNA
gatcaaggtgtggggtactacggtatggacgtc

SEQ ID NO: 22736 - protein, 11 aa, synthetic construct
  REGION 1..11: note = Description of Artificial Sequence: Synthetic peptide
DQGVGYYGMDV

SEQ ID NO: 22737 - DNA, 33 bp, synthetic construct
  misc_feature 1..33: note = Description of Artificial Sequence: Synthetic oligonucleotide
  source 1..33: mol_type = other DNA
gcgggatataactgggacaacgggtttgactac

SEQ ID NO: 22738 - protein, 11 aa, synthetic construct
  REGION 1..11: note = Description of Artificial Sequence: Synthetic peptide
AGYNWDNGFDY

SEQ ID NO: 22739 - DNA, 42 bp, synthetic construct
  misc_feature 1..42: note = Description of Artificial Sequence: Synthetic oligonucleotide
  source 1..42: mol_type = other DNA
gaggagtatagtagcggctggttcgggtacggtatggacgtc

SEQ ID NO: 22740 - protein, 14 aa, synthetic construct
  REGION 1..14: note = Description of Artificial Sequence: Synthetic peptide
EEYSSGWFGYGMDV

SEQ ID NO: 22741 - DNA, 33 bp, synthetic construct; identical to SEQ ID NO: 22591
  misc_feature 1..33: note = Description of Artificial Sequence: Synthetic oligonucleotide
  source 1..33: mol_type = other DNA

SEQ ID NO: 22742 - protein, 11 aa, synthetic construct
  REGION 1..11: note = Description of Artificial Sequence: Synthetic peptide
DQGVGYDGLDV

SEQ ID NO: 22743 - DNA, 33 bp, synthetic construct; identical to SEQ ID NO: 20155
  misc_feature 1..33: note = Description of Artificial Sequence: Synthetic oligonucleotide
  source 1..33: mol_type = other DNA

SEQ ID NO: 22744 - protein, 11 aa, synthetic construct
  REGION 1..11: note = Description of Artificial Sequence: Synthetic peptide
GTHGYYYGVDV

SEQ ID NO: 22745 - DNA, 33 bp, synthetic construct
  misc_feature 1..33: note = Description of Artificial Sequence: Synthetic oligonucleotide
  source 1..33: mol_type = other DNA
gataggggagtgggttactacggtatggacgtc

SEQ ID NO: 22746 - protein, 11 aa, synthetic construct
  REGION 1..11: note = Description of Artificial Sequence: Synthetic peptide
DRGVGYYGMDV

SEQ ID NO: 22747 - DNA, 21 bp, synthetic construct
  misc_feature 1..21: note = Description of Artificial Sequence: Synthetic oligonucleotide
  source 1..21: mol_type = other DNA
gactacggtgtctttgactac

SEQ ID NO: 22748 - protein, 7 aa, synthetic construct
  REGION 1..7: note = Description of Artificial Sequence: Synthetic peptide
DYGVFDY

SEQ ID NO: 22749 - DNA, 33 bp, synthetic construct; identical to SEQ ID NO: 22591
  misc_feature 1..33: note = Description of Artificial Sequence: Synthetic oligonucleotide
  source 1..33: mol_type = other DNA

SEQ ID NO: 22750 - protein, 11 aa, synthetic construct
  REGION 1..11: note = Description of Artificial Sequence: Synthetic peptide
DQGVGYDGLDV

SEQ ID NO: 22751 - DNA, 36 bp, synthetic construct; identical to SEQ ID NO: 22599
  misc_feature 1..36: note = Description of Artificial Sequence: Synthetic oligonucleotide
  source 1..36: mol_type = other DNA

SEQ ID NO: 22752 - protein, 12 aa, synthetic construct
  REGION 1..12: note = Description of Artificial Sequence: Synthetic peptide
LRYNWNFPYFDY

SEQ ID NO: 22753 - DNA, 33 bp, synthetic construct; identical to SEQ ID NO: 22607
  misc_feature 1..33: note = Description of Artificial Sequence: Synthetic oligonucleotide
  source 1..33: mol_type = other DNA

SEQ ID NO: 22754 - protein, 11 aa, synthetic construct
  REGION 1..11: note = Description of Artificial Sequence: Synthetic peptide
DRSVGYDGLDV

SEQ ID NO: 22755 - DNA, 36 bp, synthetic construct
  misc_feature 1..36: note = Description of Artificial Sequence: Synthetic oligonucleotide
  source 1..36: mol_type = other DNA
cgtttagcactggatggctatgatgcttttgatatc

SEQ ID NO: 22756 - protein, 12 aa, synthetic construct
  REGION 1..12: note = Description of Artificial Sequence: Synthetic peptide
RLALDGYDAFDI

SEQ ID NO: 22757 - DNA, 33 bp, synthetic construct; identical to SEQ ID NO: 22591
  misc_feature 1..33: note = Description of Artificial Sequence: Synthetic oligonucleotide
  source 1..33: mol_type = other DNA

SEQ ID NO: 22758 - protein, 11 aa, synthetic construct
  REGION 1..11: note = Description of Artificial Sequence: Synthetic peptide
DQGVGYDGLDV

SEQ ID NO: 22759 - DNA, 51 bp, synthetic construct; identical to SEQ ID NO: 22619
  misc_feature 1..51: note = Description of Artificial Sequence: Synthetic oligonucleotide
  source 1..51: mol_type = other DNA

SEQ ID NO: 22760 - protein, 17 aa, synthetic construct
  REGION 1..17: note = Description of Artificial Sequence: Synthetic peptide
GDYDGSGSYHYYYGMDV

SEQ ID NO: 22761 - DNA, 51 bp, synthetic construct; identical to SEQ ID NO: 22619
  misc_feature 1..51: note = Description of Artificial Sequence: Synthetic oligonucleotide
  source 1..51: mol_type = other DNA

SEQ ID NO: 22762 - protein, 17 aa, synthetic construct
  REGION 1..17: note = Description of Artificial Sequence: Synthetic peptide
GDYDGSGSYHYYYGMDV

SEQ ID NO: 22763 - DNA, 51 bp, synthetic construct; identical to SEQ ID NO: 22619
  misc_feature 1..51: note = Description of Artificial Sequence: Synthetic oligonucleotide
  source 1..51: mol_type = other DNA

SEQ ID NO: 22764 - protein, 17 aa, synthetic construct
  REGION 1..17: note = Description of Artificial Sequence: Synthetic peptide
GDYDGSGSYHYYYGMDV

SEQ ID NO: 22765 - DNA, 33 bp, synthetic construct; identical to SEQ ID NO: 22647
  misc_feature 1..33: note = Description of Artificial Sequence: Synthetic oligonucleotide
  source 1..33: mol_type = other DNA

SEQ ID NO: 22766 - protein, 11 aa, synthetic construct
  REGION 1..11: note = Description of Artificial Sequence: Synthetic peptide
DGFGGSSYFDY

SEQ ID NO: 22767 - DNA, 51 bp, synthetic construct; identical to SEQ ID NO: 22621
  misc_feature 1..51: note = Description of Artificial Sequence: Synthetic oligonucleotide
  source 1..51: mol_type = other DNA

SEQ ID NO: 22768 - protein, 17 aa, synthetic construct
  REGION 1..17: note = Description of Artificial Sequence: Synthetic peptide
GDYDGSGSYHFYYGMDV

SEQ ID NO: 22769 - DNA, 51 bp, synthetic construct; identical to SEQ ID NO: 22615
  misc_feature 1..51: note = Description of Artificial Sequence: Synthetic oligonucleotide
  source 1..51: mol_type = other DNA

SEQ ID NO: 22770 - protein, 17 aa, synthetic construct
  REGION 1..17: note = Description of Artificial Sequence: Synthetic peptide
GDYDGSGSYHYYYGMDV

SEQ ID NO: 22771 - DNA, 36 bp, synthetic construct
  misc_feature 1..36: note = Description of Artificial Sequence: Synthetic oligonucleotide
  source 1..36: mol_type = other DNA
gatctgggtagatacagctatggtttctttgactac

SEQ ID NO: 22772 - protein, 12 aa, synthetic construct
  REGION 1..12: note = Description of Artificial Sequence: Synthetic peptide
DLGRYSYGFFDY

SEQ ID NO: 22773 - DNA, 27 bp, synthetic construct
  misc_feature 1..27: note = Description of Artificial Sequence: Synthetic oligonucleotide
  source 1..27: mol_type = other DNA
agcagtggctggtacttctttgactac

SEQ ID NO: 22774 - protein, 9 aa, synthetic construct
  REGION 1..9: note = Description of Artificial Sequence: Synthetic peptide
SSGWYFFDY

SEQ ID NO: 22775 - DNA, 39 bp, synthetic construct; identical to SEQ ID NO: 20143
  misc_feature 1..39: note = Description of Artificial Sequence: Synthetic oligonucleotide
  source 1..39: mol_type = other DNA

SEQ ID NO: 22776 - protein, 13 aa, synthetic construct
  REGION 1..13: note = Description of Artificial Sequence: Synthetic peptide
GDPYNWNSYAMDV

SEQ ID NO: 22777 - DNA, 33 bp, synthetic construct
  misc_feature 1..33: note = Description of Artificial Sequence: Synthetic oligonucleotide
  source 1..33: mol_type = other DNA
ggagagtataactggaaccacggtatggacgtc

SEQ ID NO: 22778 - protein, 11 aa, synthetic construct
  REGION 1..11: note = Description of Artificial Sequence: Synthetic peptide
GEYNWNHGMDV

SEQ ID NO: 22779 - DNA, 21 bp, synthetic construct
  misc_feature 1..21: note = Description of Artificial Sequence: Synthetic oligonucleotide
  source 1..21: mol_type = other DNA
gactacggtggtttggactac

SEQ ID NO: 22780 - protein, 7 aa, synthetic construct
  REGION 1..7: note = Description of Artificial Sequence: Synthetic peptide
DYGGLDY

SEQ ID NO: 22781 - DNA, 51 bp, synthetic construct; identical to SEQ ID NO: 22615
  misc_feature 1..51: note = Description of Artificial Sequence: Synthetic oligonucleotide
  source 1..51: mol_type = other DNA

SEQ ID NO: 22782 - protein, 17 aa, synthetic construct
  REGION 1..17: note = Description of Artificial Sequence: Synthetic peptide
GDYDGSGSYHYYYGMDV

SEQ ID NO: 22783 - DNA, 33 bp, synthetic construct
  misc_feature 1..33: note = Description of Artificial Sequence: Synthetic oligonucleotide
  source 1..33: mol_type = other DNA
gatcagggcgtgggctacgacggcttggacgtc

SEQ ID NO: 22784 - protein, 11 aa, synthetic construct
  REGION 1..11: note = Description of Artificial Sequence: Synthetic peptide
DQGVGYDGLDV

SEQ ID NO: 22785 - DNA, 18 bp, synthetic construct
  misc_feature 1..18: note = Description of Artificial Sequence: Synthetic oligonucleotide
  source 1..18: mol_type = other DNA
gactacggtgctgactac

SEQ ID NO: 22786 - protein, 6 aa, synthetic construct
  REGION 1..6: note = Description of Artificial Sequence: Synthetic peptide
DYGADY

SEQ ID NO: 22787 - DNA, 51 bp, synthetic construct; identical to SEQ ID NO: 22619
  misc_feature 1..51: note = Description of Artificial Sequence: Synthetic oligonucleotide
  source 1..51: mol_type = other DNA

SEQ ID NO: 22788 - protein, 17 aa, synthetic construct
  REGION 1..17: note = Description of Artificial Sequence: Synthetic peptide
GDYDGSGSYHYYYGMDV

SEQ ID NO: 22789 - DNA, 51 bp, synthetic construct; identical to SEQ ID NO: 22615
  misc_feature 1..51: note = Description of Artificial Sequence: Synthetic oligonucleotide
  source 1..51: mol_type = other DNA

SEQ ID NO: 22790 - protein, 17 aa, synthetic construct
  REGION 1..17: note = Description of Artificial Sequence: Synthetic peptide
GDYDGSGSYHYYYGMDV

SEQ ID NO: 22791 - DNA, 54 bp, synthetic construct
  misc_feature 1..54: note = Description of Artificial Sequence: Synthetic oligonucleotide
  source 1..54: mol_type = other DNA
gaggattccccttatagtggctacggcttggactactactacggtatggacgtc

SEQ ID NO: 22792 - protein, 18 aa, synthetic construct
  REGION 1..18: note = Description of Artificial Sequence: Synthetic peptide
EDSPYSGYGLDYYYGMDV

SEQ ID NO: 22793 - DNA, 51 bp, synthetic construct
  misc_feature 1..51: note = Description of Artificial Sequence: Synthetic oligonucleotide
  source 1..51: mol_type = other DNA
ggggattacgatggttcggggagttatcacttctactacggtttggacgtc

SEQ ID NO: 22794 - protein, 17 aa, synthetic construct
  REGION 1..17: note = Description of Artificial Sequence: Synthetic peptide
GDYDGSGSYHFYYGLDV

SEQ ID NO: 22795 - DNA, 33 bp, synthetic construct; identical to SEQ ID NO: 22737
  misc_feature 1..33: note = Description of Artificial Sequence: Synthetic oligonucleotide
  source 1..33: mol_type = other DNA

SEQ ID NO: 22796 - protein, 11 aa, synthetic construct
  REGION 1..11: note = Description of Artificial Sequence: Synthetic peptide
AGYNWDNGFDY

SEQ ID NO: 22797 - DNA, 33 bp, synthetic construct; identical to SEQ ID NO: 22617
  misc_feature 1..33: note = Description of Artificial Sequence: Synthetic oligonucleotide
  source 1..33: mol_type = other DNA

SEQ ID NO: 22798 - protein, 11 aa, synthetic construct
  REGION 1..11: note = Description of Artificial Sequence: Synthetic peptide
DRGVGYYGLDV

SEQ ID NO: 22799 - DNA, 21 bp, synthetic construct
  misc_feature 1..21: note = Description of Artificial Sequence: Synthetic oligonucleotide
  source 1..21: mol_type = other DNA
gcaactatggcccttgactac

SEQ ID NO: 22800 - protein, 7 aa, synthetic construct
  REGION 1..7: note = Description of Artificial Sequence: Synthetic peptide
ATMALDY

SEQ ID NO: 22801 - DNA, 51 bp, synthetic construct; identical to SEQ ID NO: 22621
  misc_feature 1..51: note = Description of Artificial Sequence: Synthetic oligonucleotide
  source 1..51: mol_type = other DNA

SEQ ID NO: 22802 - protein, 17 aa, synthetic construct
  REGION 1..17: note = Description of Artificial Sequence: Synthetic peptide
GDYDGSGSYHFYYGMDV

SEQ ID NO: 22803 - DNA, 36 bp, synthetic construct
  misc_feature 1..36: note = Description of Artificial Sequence: Synthetic oligonucleotide
  source 1..36: mol_type = other DNA
gatttcactataactggagctacatattttgactac

SEQ ID NO: 22804 - protein, 12 aa, synthetic construct
  REGION 1..12: note = Description of Artificial Sequence: Synthetic peptide
DFTITGATYFDY

SEQ ID NO: 22805 - DNA, 33 bp, synthetic construct
  misc_feature 1..33: note = Description of Artificial Sequence: Synthetic oligonucleotide
  source 1..33: mol_type = other DNA
aataggggggtgggttactacggtttggacgtc

SEQ ID NO: 22806 - protein, 11 aa, synthetic construct
  REGION 1..11: note = Description of Artificial Sequence: Synthetic peptide
NRGVGYYGLDV

SEQ ID NO: 22807 - DNA, 36 bp, synthetic construct; identical to SEQ ID NO: 22589
  misc_feature 1..36: note = Description of Artificial Sequence: Synthetic oligonucleotide
  source 1..36: mol_type = other DNA

SEQ ID NO: 22808 - protein, 12 aa, synthetic construct
  REGION 1..12: note = Description of Artificial Sequence: Synthetic peptide
DRGYYGYYGMDV

SEQ ID NO: 22809 - DNA, 21 bp, synthetic construct
  misc_feature 1..21: note = Description of Artificial Sequence: Synthetic oligonucleotide
  source 1..21: mol_type = other DNA
ggctacgatattttgactggt

SEQ ID NO: 22810 - protein, 7 aa, synthetic construct
  REGION 1..7: note = Description of Artificial Sequence: Synthetic peptide
GYDILTG

SEQ ID NO: 22811 - DNA, 36 bp, synthetic construct; identical to SEQ ID NO: 22599
  misc_feature 1..36: note = Description of Artificial Sequence: Synthetic oligonucleotide
  source 1..36: mol_type = other DNA

SEQ ID NO: 22812 - protein, 12 aa, synthetic construct
  REGION 1..12: note = Description of Artificial Sequence: Synthetic peptide
LRYNWNFPYFDY

SEQ ID NO: 22813 - DNA, 51 bp, synthetic construct; identical to SEQ ID NO: 22615
  misc_feature 1..51: note = Description of Artificial Sequence: Synthetic oligonucleotide
  source 1..51: mol_type = other DNA

SEQ ID NO: 22814 - protein, 17 aa, synthetic construct
  REGION 1..17: note = Description of Artificial Sequence: Synthetic peptide
GDYDGSGSYHYYYGMDV

SEQ ID NO: 22815 - DNA, 51 bp, synthetic construct; identical to SEQ ID NO: 22615
  misc_feature 1..51: note = Description of Artificial Sequence: Synthetic oligonucleotide
  source 1..51: mol_type = other DNA

SEQ ID NO: 22816 - protein, 17 aa, synthetic construct
  REGION 1..17: note = Description of Artificial Sequence: Synthetic peptide
GDYDGSGSYHYYYGMDV

SEQ ID NO: 22817 - DNA, 33 bp, synthetic construct
  misc_feature 1..33: note = Description of Artificial Sequence: Synthetic oligonucleotide
  source 1..33: mol_type = other DNA
gatcggtctaagggttacgacggtatggacgtc

SEQ ID NO: 22818 - protein, 11 aa, synthetic construct
  REGION 1..11: note = Description of Artificial Sequence: Synthetic peptide
DRSKGYDGMDV

SEQ ID NO: 22819 - DNA, 54 bp, synthetic construct
  misc_feature 1..54: note = Description of Artificial Sequence: Synthetic oligonucleotide
  source 1..54: mol_type = other DNA
gaaccccttggttactatggttcggggagttatggggcctacggtatggacgtc

SEQ ID NO: 22820 - protein, 18 aa, synthetic construct
  REGION 1..18: note = Description of Artificial Sequence: Synthetic peptide
EPLGYYGSGSYGAYGMDV

SEQ ID NO: 22821 - DNA, 21 bp, synthetic construct
  misc_feature 1..21: note = Description of Artificial Sequence: Synthetic oligonucleotide
  source 1..21: mol_type = other DNA
gactacggtgcttttgatatc

SEQ ID NO: 22822 - protein, 7 aa, synthetic construct
  REGION 1..7: note = Description of Artificial Sequence: Synthetic peptide
DYGAFDI

SEQ ID NO: 22823 - DNA, 42 bp, synthetic construct; identical to SEQ ID NO: 22691
  misc_feature 1..42: note = Description of Artificial Sequence: Synthetic oligonucleotide
  source 1..42: mol_type = other DNA

SEQ ID NO: 22824 - protein, 14 aa, synthetic construct
  REGION 1..14: note = Description of Artificial Sequence: Synthetic peptide
EEYSSGWFGYGMDV

SEQ ID NO: 22825 - DNA, 33 bp, synthetic construct
  misc_feature 1..33: note = Description of Artificial Sequence: Synthetic oligonucleotide
  source 1..33: mol_type = other DNA
gataggggggtgggttattacggtttggacgtc

SEQ ID NO: 22826 - protein, 11 aa, synthetic construct
  REGION 1..11: note = Description of Artificial Sequence: Synthetic peptide
DRGVGYYGLDV

SEQ ID NO: 22827 - DNA, 33 bp, synthetic construct; identical to SEQ ID NO: 22607
  misc_feature 1..33: note = Description of Artificial Sequence: Synthetic oligonucleotide
  source 1..33: mol_type = other DNA

SEQ ID NO: 22828 - protein, 11 aa, synthetic construct
  REGION 1..11: note = Description of Artificial Sequence: Synthetic peptide
DRSVGYDGLDV

SEQ ID NO: 22829 - DNA, 21 bp, synthetic construct
  misc_feature 1..21: note = Description of Artificial Sequence: Synthetic oligonucleotide
  source 1..21: mol_type = other DNA
gactacggtgcttttgatatc

SEQ ID NO: 22830 - protein, 7 aa, synthetic construct
  REGION 1..7: note = Description of Artificial Sequence: Synthetic peptide
DYGAFDI

SEQ ID NO: 22831 - DNA, 39 bp, synthetic construct
  misc_feature 1..39: note = Description of Artificial Sequence: Synthetic oligonucleotide
  source 1..39: mol_type = other DNA
gattggttcggggaggggaactactacggtatggacgtc

SEQ ID NO: 22832 - protein, 13 aa, synthetic construct
  REGION 1..13: note = Description of Artificial Sequence: Synthetic peptide
DWFGEGNYYGMDV

SEQ ID NO: 22833 - DNA, 33 bp, synthetic construct
  misc_feature 1..33: note = Description of Artificial Sequence: Synthetic oligonucleotide
  source 1..33: mol_type = other DNA
ggggggtataactggaacaacgggtttgactac

SEQ ID NO: 22834 - protein, 11 aa, synthetic construct
  REGION 1..11: note = Description of Artificial Sequence: Synthetic peptide
GGYNWNNGFDY

SEQ ID NO: 22835 - DNA, 33 bp, synthetic construct; identical to SEQ ID NO: 22591
  misc_feature 1..33: note = Description of Artificial Sequence: Synthetic oligonucleotide
  source 1..33: mol_type = other DNA

SEQ ID NO: 22836 - protein, 11 aa, synthetic construct
  REGION 1..11: note = Description of Artificial Sequence: Synthetic peptide
DQGVGYDGLDV

SEQ ID NO: 22837 - DNA, 51 bp, synthetic construct; identical to SEQ ID NO: 22621
  misc_feature 1..51: note = Description of Artificial Sequence: Synthetic oligonucleotide
  source 1..51: mol_type = other DNA

SEQ ID NO: 22838 - protein, 17 aa, synthetic construct
  REGION 1..17: note = Description of Artificial Sequence: Synthetic peptide
GDYDGSGSYHFYYGMDV

SEQ ID NO: 22839 - DNA, 33 bp, synthetic construct; identical to SEQ ID NO: 22617
  misc_feature 1..33: note = Description of Artificial Sequence: Synthetic oligonucleotide
  source 1..33: mol_type = other DNA

SEQ ID NO: 22840 - protein, 11 aa, synthetic construct
  REGION 1..11: note = Description of Artificial Sequence: Synthetic peptide
DRGVGYYGLDV

SEQ ID NO: 22841 - DNA, 39 bp, synthetic construct
  misc_feature 1..39: note = Description of Artificial Sequence: Synthetic oligonucleotide
  source 1..39: mol_type = other DNA
gaatggctacaattcaggtactactacggtatggacgtc

SEQ ID NO: 22842 - protein, 13 aa, synthetic construct
  REGION 1..13: note = Description of Artificial Sequence: Synthetic peptide
EWLQFRYYYGMDV

SEQ ID NO: 22843 - DNA, 33 bp, synthetic construct
  misc_feature 1..33: note = Description of Artificial Sequence: Synthetic oligonucleotide
  source 1..33: mol_type = other DNA
ggggggtataactggaacaatgggtttgactgt

SEQ ID NO: 22844 - protein, 11 aa, synthetic construct
  REGION 1..11: note = Description of Artificial Sequence: Synthetic peptide
GGYNWNNGFDC

SEQ ID NO: 22845 - DNA, 33 bp, synthetic construct
  misc_feature 1..33: note = Description of Artificial Sequence: Synthetic oligonucleotide
  source 1..33: mol_type = other DNA
ggggggtataactggaaccacggtatggacgtc

SEQ ID NO: 22846 - protein, 11 aa, synthetic construct
  REGION 1..11: note = Description of Artificial Sequence: Synthetic peptide
GGYNWNHGMDV

SEQ ID NO: 22847 - DNA, 21 bp, synthetic construct
  misc_feature 1..21: note = Description of Artificial Sequence: Synthetic oligonucleotide
  source 1..21: mol_type = other DNA
gaatgggtgggagccgactac

SEQ ID NO: 22848 - protein, 7 aa, synthetic construct
  REGION 1..7: note = Description of Artificial Sequence: Synthetic peptide
EWVGADY

SEQ ID NO: 22849 - DNA, 33 bp, synthetic construct; identical to SEQ ID NO: 22647
  misc_feature 1..33: note = Description of Artificial Sequence: Synthetic oligonucleotide
  source 1..33: mol_type = other DNA

SEQ ID NO: 22850 - protein, 11 aa, synthetic construct
  REGION 1..11: note = Description of Artificial Sequence: Synthetic peptide
DGFGGSSYFDY

SEQ ID NO: 22851 - DNA, 21 bp, synthetic construct
  misc_feature 1..21: note = Description of Artificial Sequence: Synthetic oligonucleotide
  source 1..21: mol_type = other DNA
gaatgggtgggagccgactac

SEQ ID NO: 22852 - protein, 7 aa, synthetic construct
  REGION 1..7: note = Description of Artificial Sequence: Synthetic peptide
EWVGADY

SEQ ID NO: 22853 - DNA, 21 bp, synthetic construct
  misc_feature 1..21: note = Description of Artificial Sequence: Synthetic oligonucleotide
  source 1..21: mol_type = other DNA
gaatgggtgggagccgactac

SEQ ID NO: 22854 - protein, 7 aa, synthetic construct
  REGION 1..7: note = Description of Artificial Sequence: Synthetic peptide
EWVGADY

SEQ ID NO: 22855 - DNA, 33 bp, synthetic construct
  misc_feature 1..33: note = Description of Artificial Sequence: Synthetic oligonucleotide
  source 1..33: mol_type = other DNA
ggacagcagtggctggtaaacggtgtggacgtc

SEQ ID NO: 22856 - protein, 11 aa, synthetic construct
  REGION 1..11: note = Description of Artificial Sequence: Synthetic peptide
GQQWLVNGVDV

SEQ ID NO: 22857 - DNA, 45 bp, synthetic construct
  misc_feature 1..45: note = Description of Artificial Sequence: Synthetic oligonucleotide
  source 1..45: mol_type = other DNA
gtggggggtttgactggctcctactactactacggtatggacgtc

SEQ ID NO: 22858 - protein, 15 aa, synthetic construct
  REGION 1..15: note = Description of Artificial Sequence: Synthetic peptide
VGGLTGSYYYYGMDV

SEQ ID NO: 22859 - DNA, 33 bp, synthetic construct; identical to SEQ ID NO: 22617
  misc_feature 1..33: note = Description of Artificial Sequence: Synthetic oligonucleotide
  source 1..33: mol_type = other DNA

SEQ ID NO: 22860 - protein, 11 aa, synthetic construct
  REGION 1..11: note = Description of Artificial Sequence: Synthetic peptide
DRGVGYYGLDV

SEQ ID NO: 22861 - DNA, 27 bp, synthetic construct
  misc_feature 1..27: note = Description of Artificial Sequence: Synthetic oligonucleotide
  source 1..27: mol_type = other DNA
agcggtggctggtacgtgttcgacccc

SEQ ID NO: 22862 - protein, 9 aa, synthetic construct
  REGION 1..9: note = Description of Artificial Sequence: Synthetic peptide
SGGWYVFDP

SEQ ID NO: 22863 - DNA, 45 bp, synthetic construct
  misc_feature 1..45: note = Description of Artificial Sequence: Synthetic oligonucleotide
  source 1..45: mol_type = other DNA
gggggggttcggggagttcccaactactactacgttatggacgtc

SEQ ID NO: 22864 - protein, 15 aa, synthetic construct
  REGION 1..15: note = Description of Artificial Sequence: Synthetic peptide
GGVRGVPNYYYVMDV

SEQ ID NO: 22865 - DNA, 39 bp, synthetic construct; identical to SEQ ID NO: 22831
  misc_feature 1..39: note = Description of Artificial Sequence: Synthetic oligonucleotide
  source 1..39: mol_type = other DNA

SEQ ID NO: 22866 - protein, 13 aa, synthetic construct
  REGION 1..13: note = Description of Artificial Sequence: Synthetic peptide
DWFGEGNYYGMDV

SEQ ID NO: 22867 - DNA, 36 bp, synthetic construct; identical to SEQ ID NO: 20159
  misc_feature 1..36: note = Description of Artificial Sequence: Synthetic oligonucleotide
  source 1..36: mol_type = other DNA

SEQ ID NO: 22868 - protein, 12 aa, synthetic construct
  REGION 1..12: note = Description of Artificial Sequence: Synthetic peptide
MDYSNYYYGMDV

SEQ ID NO: 22869 - DNA, 21 bp, synthetic construct
  misc_feature 1..21: note = Description of Artificial Sequence: Synthetic oligonucleotide
  source 1..21: mol_type = other DNA
gcaactatggcccttgactac

SEQ ID NO: 22870 - protein, 7 aa, synthetic construct
  REGION 1..7: note = Description of Artificial Sequence: Synthetic peptide
ATMALDY

SEQ ID NO: 22871 - DNA, 39 bp, synthetic construct; identical to SEQ ID NO: 20143
  misc_feature 1..39: note = Description of Artificial Sequence: Synthetic oligonucleotide
  source 1..39: mol_type = other DNA

SEQ ID NO: 22872 - protein, 13 aa, synthetic construct
  REGION 1..13: note = Description of Artificial Sequence: Synthetic peptide
GDPYNWNSYAMDV

SEQ ID NO: 22873 - DNA, 51 bp, synthetic construct; identical to SEQ ID NO: 22683
  misc_feature 1..51: note = Description of Artificial Sequence: Synthetic oligonucleotide
  source 1..51: mol_type = other DNA

SEQ ID NO: 22874 - protein, 17 aa, synthetic construct
  REGION 1..17: note = Description of Artificial Sequence: Synthetic peptide
GDYDGSGSYHYYYGLDV

SEQ ID NO: 22875 - DNA, 33 bp, synthetic construct; identical to SEQ ID NO: 22591
  misc_feature 1..33: note = Description of Artificial Sequence: Synthetic oligonucleotide
  source 1..33: mol_type = other DNA

SEQ ID NO: 22876 - protein, 11 aa, synthetic construct
  REGION 1..11: note = Description of Artificial Sequence: Synthetic peptide
DQGVGYDGLDV

SEQ ID NO: 22877 - DNA, 33 bp, synthetic construct
  misc_feature 1..33: note = Description of Artificial Sequence: Synthetic oligonucleotide
  source 1..33: mol_type = other DNA
gatccctctgtagggtacgacggtatggacgtc

SEQ ID NO: 22878 - protein, 11 aa, synthetic construct
  REGION 1..11: note = Description of Artificial Sequence: Synthetic peptide
DPSVGYDGMDV

SEQ ID NO: 22879 - DNA, 51 bp, synthetic construct; identical to SEQ ID NO: 22683
  misc_feature 1..51: note = Description of Artificial Sequence: Synthetic oligonucleotide
  source 1..51: mol_type = other DNA

SEQ ID NO: 22880 - protein, 17 aa, synthetic construct
  REGION 1..17: note = Description of Artificial Sequence: Synthetic peptide
GDYDGSGSYHYYYGLDV

SEQ ID NO: 22881 - DNA, 27 bp, synthetic construct
  misc_feature 1..27: note = Description of Artificial Sequence: Synthetic oligonucleotide
  source 1..27: mol_type = other DNA
agcagtggctggtactactttgactac

SEQ ID NO: 22882 - protein, 9 aa, synthetic construct
  REGION 1..9: note = Description of Artificial Sequence: Synthetic peptide
SSGWYYFDY

SEQ ID NO: 22883 - DNA, 33 bp, synthetic construct; identical to SEQ ID NO: 22591
  misc_feature 1..33: note = Description of Artificial Sequence: Synthetic oligonucleotide
  source 1..33: mol_type = other DNA

SEQ ID NO: 22884 - protein, 11 aa, synthetic construct
  REGION 1..11: note = Description of Artificial Sequence: Synthetic peptide
DQGVGYDGLDV

SEQ ID NO: 22885 - DNA, 27 bp, synthetic construct
  misc_feature 1..27: note = Description of Artificial Sequence: Synthetic oligonucleotide
  source 1..27: mol_type = other DNA
agcagtggctggtactactttgactac

SEQ ID NO: 22886 - protein, 9 aa, synthetic construct
  REGION 1..9: note = Description of Artificial Sequence: Synthetic peptide
SSGWYYFDY

SEQ ID NO: 22887 - DNA, 45 bp, synthetic construct
  misc_feature 1..45: note = Description of Artificial Sequence: Synthetic oligonucleotide
  source 1..45: mol_type = other DNA
gatcggggatatagcaggatagcagtggctggtacctttgactac

SEQ ID NO: 22888 - protein, 15 aa, synthetic construct
  REGION 1..15: note = Description of Artificial Sequence: Synthetic peptide
DRGYSRIAVAGTFDY

SEQ ID NO: 22889 - DNA, 36 bp, synthetic construct; identical to SEQ ID NO: 22599
  misc_feature 1..36: note = Description of Artificial Sequence: Synthetic oligonucleotide
  source 1..36: mol_type = other DNA

SEQ ID NO: 22890 - protein, 12 aa, synthetic construct
  REGION 1..12: note = Description of Artificial Sequence: Synthetic peptide
LRYNWNFPYFDY

SEQ ID NO: 22891 - DNA, 36 bp, synthetic construct
  misc_feature 1..36: note = Description of Artificial Sequence: Synthetic oligonucleotide
  source 1..36: mol_type = other DNA
ggcatagcagtggctggctcgcactactttgactac

SEQ ID NO: 22892 - protein, 12 aa, synthetic construct
  REGION 1..12: note = Description of Artificial Sequence: Synthetic peptide
GIAVAGSHYFDY

SEQ ID NO: 22893 - DNA, 39 bp, synthetic construct
  misc_feature 1..39: note = Description of Artificial Sequence: Synthetic oligonucleotide
  source 1..39: mol_type = other DNA
gaatggctacaatttaggtactactacggtatagacgtc

SEQ ID NO: 22894 - protein, 13 aa, synthetic construct
  REGION 1..13: note = Description of Artificial Sequence: Synthetic peptide
EWLQFRYYYGIDV

SEQ ID NO: 22895 - DNA, 33 bp, synthetic construct; identical to SEQ ID NO: 22607
  misc_feature 1..33: note = Description of Artificial Sequence: Synthetic oligonucleotide
  source 1..33: mol_type = other DNA

SEQ ID NO: 22896 - protein, 11 aa, synthetic construct
  REGION 1..11: note = Description of Artificial Sequence: Synthetic peptide
DRSVGYDGLDV

SEQ ID NO: 22897 - DNA, 33 bp, synthetic construct; identical to SEQ ID NO: 22591
  misc_feature 1..33: note = Description of Artificial Sequence: Synthetic oligonucleotide
  source 1..33: mol_type = other DNA

SEQ ID NO: 22898 - protein, 11 aa, synthetic construct
  REGION 1..11: note = Description of Artificial Sequence: Synthetic peptide
DQGVGYDGLDV

SEQ ID NO: 22899 - DNA, 51 bp, synthetic construct; identical to SEQ ID NO: 22615
  misc_feature 1..51: note = Description of Artificial Sequence: Synthetic oligonucleotide
  source 1..51: mol_type = other DNA

SEQ ID NO: 22900 - protein, 17 aa, synthetic construct
  REGION 1..17: note = Description of Artificial Sequence: Synthetic peptide
GDYDGSGSYHYYYGMDV

SEQ ID NO: 22901 - DNA, 51 bp, synthetic construct; identical to SEQ ID NO: 22615
  misc_feature 1..51: note = Description of Artificial Sequence: Synthetic oligonucleotide
  source 1..51: mol_type = other DNA

SEQ ID NO: 22902 - protein, 17 aa, synthetic construct
  REGION 1..17: note = Description of Artificial Sequence: Synthetic peptide
GDYDGSGSYHYYYGMDV

SEQ ID NO: 22903 - DNA, 51 bp, synthetic construct
  misc_feature 1..51: note = Description of Artificial Sequence: Synthetic oligonucleotide
  source 1..51: mol_type = other DNA
ggggattactatggttcggggagttatcacaactactacggtttggacgtc

SEQ ID NO: 22904 - protein, 17 aa, synthetic construct
  REGION 1..17: note = Description of Artificial Sequence: Synthetic peptide
GDYYGSGSYHNYYGLDV

SEQ ID NO: 22905 - DNA, 33 bp, synthetic construct
  misc_feature 1..33: note = Description of Artificial Sequence: Synthetic oligonucleotide
  source 1..33: mol_type = other DNA
gatcagggcgtgggctactacggtatggacgtc

SEQ ID NO: 22906 - protein, 11 aa, synthetic construct
  REGION 1..11: note = Description of Artificial Sequence: Synthetic peptide
DQGVGYYGMDV

SEQ ID NO: 22907 - DNA, 39 bp, synthetic construct; identical to SEQ ID NO: 22841
  misc_feature 1..39: note = Description of Artificial Sequence: Synthetic oligonucleotide
  source 1..39: mol_type = other DNA

SEQ ID NO: 22908 - protein, 13 aa, synthetic construct
  REGION 1..13: note = Description of Artificial Sequence: Synthetic peptide
EWLQFRYYYGMDV

SEQ ID NO: 22909 - DNA, 36 bp, synthetic construct; identical to SEQ ID NO: 22599
  misc_feature 1..36: note = Description of Artificial Sequence: Synthetic oligonucleotide
  source 1..36: mol_type = other DNA

SEQ ID NO: 22910 - protein, 12 aa, synthetic construct
  REGION 1..12: note = Description of Artificial Sequence: Synthetic peptide
LRYNWNFPYFDY

SEQ ID NO: 22911 - DNA, 51 bp, synthetic construct; identical to SEQ ID NO: 22621
  misc_feature 1..51: note = Description of Artificial Sequence: Synthetic oligonucleotide
  source 1..51: mol_type = other DNA

SEQ ID NO: 22912 - protein, 17 aa, synthetic construct
  REGION 1..17: note = Description of Artificial Sequence: Synthetic peptide
GDYDGSGSYHFYYGMDV

SEQ ID NO: 22913 - DNA, 51 bp, synthetic construct; identical to SEQ ID NO: 22619
  misc_feature 1..51: note = Description of Artificial Sequence: Synthetic oligonucleotide
  source 1..51: mol_type = other DNA

SEQ ID NO: 22914 - protein, 17 aa, synthetic construct
  REGION 1..17: note = Description of Artificial Sequence: Synthetic peptide
GDYDGSGSYHYYYGMDV

SEQ ID NO: 22915 - DNA, 18 bp, synthetic construct
  misc_feature 1..18: note = Description of Artificial Sequence: Synthetic oligonucleotide
  source 1..18: mol_type = other DNA
gactacggtgctgactac

SEQ ID NO: 22916 - protein, 6 aa, synthetic construct
  REGION 1..6: note = Description of Artificial Sequence: Synthetic peptide
DYGADY

SEQ ID NO: 22917 - DNA, 33 bp, synthetic construct; identical to SEQ ID NO: 22905
  misc_feature 1..33: note = Description of Artificial Sequence: Synthetic oligonucleotide
  source 1..33: mol_type = other DNA

SEQ ID NO: 22918 - protein, 11 aa, synthetic construct
  REGION 1..11: note = Description of Artificial Sequence: Synthetic peptide
DQGVGYYGMDV

SEQ ID NO: 22919 - DNA, 33 bp, synthetic construct; identical to SEQ ID NO: 22709
  misc_feature 1..33: note = Description of Artificial Sequence: Synthetic oligonucleotide
  source 1..33: mol_type = other DNA

SEQ ID NO: 22920 - protein, 11 aa, synthetic construct
  REGION 1..11: note = Description of Artificial Sequence: Synthetic peptide
AHGVYYYAMDV

SEQ ID NO: 22921 - DNA, 39 bp, synthetic construct; identical to SEQ ID NO: 22841
  misc_feature 1..39: note = Description of Artificial Sequence: Synthetic oligonucleotide
  source 1..39: mol_type = other DNA

SEQ ID NO: 22922 - protein, 13 aa, synthetic construct
  REGION 1..13: note = Description of Artificial Sequence: Synthetic peptide
EWLQFRYYYGMDV

SEQ ID NO: 22923 - DNA, 51 bp, synthetic construct; identical to SEQ ID NO: 22615
  misc_feature 1..51: note = Description of Artificial Sequence: Synthetic oligonucleotide
  source 1..51: mol_type = other DNA

SEQ ID NO: 22924 - protein, 17 aa, synthetic construct
  REGION 1..17: note = Description of Artificial Sequence: Synthetic peptide
GDYDGSGSYHYYYGMDV

SEQ ID NO: 22925 - DNA, 51 bp, synthetic construct; identical to SEQ ID NO: 22903
  misc_feature 1..51: note = Description of Artificial Sequence: Synthetic oligonucleotide
  source 1..51: mol_type = other DNA

SEQ ID NO: 22926 - protein, 17 aa, synthetic construct
  REGION 1..17: note = Description of Artificial Sequence: Synthetic peptide
GDYYGSGSYHNYYGLDV

SEQ ID NO: 22927 - DNA, 36 bp, synthetic construct
  misc_feature 1..36: note = Description of Artificial Sequence: Synthetic oligonucleotide
  source 1..36: mol_type = other DNA
cgtatagcagtggatggctatgatgcttttgatgtc

SEQ ID NO: 22928 - protein, 12 aa, synthetic construct
  REGION 1..12: note = Description of Artificial Sequence: Synthetic peptide
RIAVDGYDAFDV

SEQ ID NO: 22929 - DNA, 39 bp, synthetic construct
  misc_feature 1..39: note = Description of Artificial Sequence: Synthetic oligonucleotide
  source 1..39: mol_type = other DNA
gaatggctacaatttaggtattactacggtatggacgtc

SEQ ID NO: 22930 - protein, 13 aa, synthetic construct
  REGION 1..13: note = Description of Artificial Sequence: Synthetic peptide
EWLQFRYYYGMDV

SEQ ID NO: 22931 - DNA, 33 bp, synthetic construct
  misc_feature 1..33: note = Description of Artificial Sequence: Synthetic oligonucleotide
  source 1..33: mol_type = other DNA
gccgggtataactggaacaacggtatggacgtc

SEQ ID NO: 22932 - protein, 11 aa, synthetic construct
  REGION 1..11: note = Description of Artificial Sequence: Synthetic peptide
AGYNWNNGMDV

SEQ ID NO: 22933 - DNA, 27 bp, synthetic construct
  misc_feature 1..27: note = Description of Artificial Sequence: Synthetic oligonucleotide
  source 1..27: mol_type = other DNA
agcggtggctggtacgtgttcgacccc

SEQ ID NO: 22934 - protein, 9 aa, synthetic construct
  REGION 1..9: note = Description of Artificial Sequence: Synthetic peptide
SGGWYVFDP

SEQ ID NO: 22935 - DNA, 36 bp, synthetic construct; identical to SEQ ID NO: 22589
  misc_feature 1..36: note = Description of Artificial Sequence: Synthetic oligonucleotide
  source 1..36: mol_type = other DNA

SEQ ID NO: 22936 - protein, 12 aa, synthetic construct
  REGION 1..12: note = Description of Artificial Sequence: Synthetic peptide
DRGYYGYYGMDV

SEQ ID NO: 22937 - DNA, 33 bp, synthetic construct; identical to SEQ ID NO: 20155
  misc_feature 1..33: note = Description of Artificial Sequence: Synthetic oligonucleotide
  source 1..33: mol_type = other DNA

SEQ ID NO: 22938 - protein, 11 aa, synthetic construct
  REGION 1..11: note = Description of Artificial Sequence: Synthetic peptide
GTHGYYYGVDV

SEQ ID NO: 22939 - DNA, 51 bp, synthetic construct; identical to SEQ ID NO: 22619
  misc_feature 1..51: note = Description of Artificial Sequence: Synthetic oligonucleotide
  source 1..51: mol_type = other DNA

SEQ ID NO: 22940 - protein, 17 aa, synthetic construct
  REGION 1..17: note = Description of Artificial Sequence: Synthetic peptide
GDYDGSGSYHYYYGMDV

SEQ ID NO: 22941 - DNA, 18 bp, synthetic construct
  misc_feature 1..18: note = Description of Artificial Sequence: Synthetic oligonucleotide
  source 1..18: mol_type = other DNA
gactacggggcggactac

SEQ ID NO: 22942 - protein, 6 aa, synthetic construct
  REGION 1..6: note = Description of Artificial Sequence: Synthetic peptide
DYGADY

SEQ ID NO: 22943 - DNA, 18 bp, synthetic construct
  misc_feature 1..18: note = Description of Artificial Sequence: Synthetic oligonucleotide
  source 1..18: mol_type = other DNA
gactacggggcggactac

SEQ ID NO: 22944 - protein, 6 aa, synthetic construct
  REGION 1..6: note = Description of Artificial Sequence: Synthetic peptide
DYGADY

SEQ ID NO: 22945 - DNA, 21 bp, synthetic construct
  misc_feature 1..21: note = Description of Artificial Sequence: Synthetic oligonucleotide
  source 1..21: mol_type = other DNA
gactacgggggtttagactac

SEQ ID NO: 22946 - protein, 7 aa, synthetic construct
  REGION 1..7: note = Description of Artificial Sequence: Synthetic peptide
DYGGLDY

SEQ ID NO: 22947 - DNA, 39 bp, synthetic construct
  misc_feature 1..39: note = Description of Artificial Sequence: Synthetic oligonucleotide
  source 1..39: mol_type = other DNA
cacgatttttggagtggttattataagggtatggacgtc

SEQ ID NO: 22948 - protein, 13 aa, synthetic construct
  REGION 1..13: note = Description of Artificial Sequence: Synthetic peptide
HDFWSGYYKGMDV

SEQ ID NO: 22949 - DNA, 27 bp, synthetic construct
  misc_feature 1..27: note = Description of Artificial Sequence: Synthetic oligonucleotide
  source 1..27: mol_type = other DNA
gatcaacggtactacggtatggacgtc

SEQ ID NO: 22950 - protein, 9 aa, synthetic construct
  REGION 1..9: note = Description of Artificial Sequence: Synthetic peptide
DQRYYGMDV

SEQ ID NO: 22951 - DNA, 21 bp, synthetic construct
  misc_feature 1..21: note = Description of Artificial Sequence: Synthetic oligonucleotide
  source 1..21: mol_type = other DNA
gactatggtgtctttgattac

SEQ ID NO: 22952 - protein, 7 aa, synthetic construct
  REGION 1..7: note = Description of Artificial Sequence: Synthetic peptide
DYGVFDY

SEQ ID NO: 22953 - DNA, 33 bp, synthetic construct
  misc_feature 1..33: note = Description of Artificial Sequence: Synthetic oligonucleotide
  source 1..33: mol_type = other DNA
gatcaagggtataactggaactcttttgactac

SEQ ID NO: 22954 - protein, 11 aa, synthetic construct
  REGION 1..11: note = Description of Artificial Sequence: Synthetic peptide
DQGYNWNSFDY

SEQ ID NO: 22955 - DNA, 18 bp, synthetic construct
  misc_feature 1..18: note = Description of Artificial Sequence: Synthetic oligonucleotide
  source 1..18: mol_type = other DNA
gactacggggcggactac

SEQ ID NO: 22956 - protein, 6 aa, synthetic construct
  REGION 1..6: note = Description of Artificial Sequence: Synthetic peptide
DYGADY

SEQ ID NO: 22957 - DNA, 33 bp, synthetic construct
  misc_feature 1..33: note = Description of Artificial Sequence: Synthetic oligonucleotide
  source 1..33: mol_type = other DNA
ggatacagctatggttacaactggttcgacccc

SEQ ID NO: 22958 - protein, 11 aa, synthetic construct
  REGION 1..11: note = Description of Artificial Sequence: Synthetic peptide
GYSYGYNWFDP

SEQ ID NO: 22959 - DNA, 39 bp, synthetic construct
  misc_feature 1..39: note = Description of Artificial Sequence: Synthetic oligonucleotide
  source 1..39: mol_type = other DNA
gggggagctaggagcagtggctggttccactttgactac

SEQ ID NO: 22960 - protein, 13 aa, synthetic construct
  REGION 1..13: note = Description of Artificial Sequence: Synthetic peptide
GGARSSGWFHFDY

SEQ ID NO: 22961 - DNA, 48 bp, synthetic construct
  misc_feature 1..48: note = Description of Artificial Sequence: Synthetic oligonucleotide
  source 1..48: mol_type = other DNA
ggaaggtatagcagggaggattactactactattatgatatggacgtc

SEQ ID NO: 22962 - protein, 16 aa, synthetic construct
  REGION 1..16: note = Description of Artificial Sequence: Synthetic peptide
GRYSREDYYYYYDMDV

SEQ ID NO: 22963 - DNA, 27 bp, synthetic construct
  misc_feature 1..27: note = Description of Artificial Sequence: Synthetic oligonucleotide
  source 1..27: mol_type = other DNA
gatcaacggtactacggtatggacgtc

SEQ ID NO: 22964 - protein, 9 aa, synthetic construct
  REGION 1..9: note = Description of Artificial Sequence: Synthetic peptide
DQRYYGMDV

SEQ ID NO: 22965 - DNA, 27 bp, synthetic construct
  misc_feature 1..27: note = Description of Artificial Sequence: Synthetic oligonucleotide
  source 1..27: mol_type = other DNA
gatcaacggtactacggtatggacgtc

SEQ ID NO: 22966 - protein, 9 aa, synthetic construct
  REGION 1..9: note = Description of Artificial Sequence: Synthetic peptide
DQRYYGMDV

SEQ ID NO: 22967 - DNA, 39 bp, synthetic construct; identical to SEQ ID NO: 22959
  misc_feature 1..39: note = Description of Artificial Sequence: Synthetic oligonucleotide
  source 1..39: mol_type = other DNA

SEQ ID NO: 22968 - protein, 13 aa, synthetic construct
  REGION 1..13: note = Description of Artificial Sequence: Synthetic peptide
GGARSSGWFHFDY

SEQ ID NO: 22969 - DNA, 21 bp, synthetic construct
  misc_feature 1..21: note = Description of Artificial Sequence: Synthetic oligonucleotide
  source 1..21: mol_type = other DNA
gactacgggggtttagactac

SEQ ID NO: 22970 - protein, 7 aa, synthetic construct
  REGION 1..7: note = Description of Artificial Sequence: Synthetic peptide
DYGGLDY

SEQ ID NO: 22971 - DNA, 33 bp, synthetic construct
  misc_feature 1..33: note = Description of Artificial Sequence: Synthetic oligonucleotide
  source 1..33: mol_type = other DNA
aatatagcagcagctgccccttactttgactac

SEQ ID NO: 22972 - protein, 11 aa, synthetic construct
  REGION 1..11: note = Description of Artificial Sequence: Synthetic peptide
NIAAAAPYFDY

SEQ ID NO: 22973 - DNA, 33 bp, synthetic construct
  misc_feature 1..33: note = Description of Artificial Sequence: Synthetic oligonucleotide
  source 1..33: mol_type = other DNA
gatagaacagttggctacaacggtatggacgtc

SEQ ID NO: 22974 - protein, 11 aa, synthetic construct
  REGION 1..11: note = Description of Artificial Sequence: Synthetic peptide
DRTVGYNGMDV

SEQ ID NO: 22975 - DNA, 33 bp, synthetic construct; identical to SEQ ID NO: 22957
  misc_feature 1..33: note = Description of Artificial Sequence: Synthetic oligonucleotide
  source 1..33: mol_type = other DNA

SEQ ID NO: 22976 - protein, 11 aa, synthetic construct
  REGION 1..11: note = Description of Artificial Sequence: Synthetic peptide
GYSYGYNWFDP

SEQ ID NO: 22977 - DNA, 42 bp, synthetic construct; identical to SEQ ID NO: 20145
  misc_feature 1..42: note = Description of Artificial Sequence: Synthetic oligonucleotide
  source 1..42: mol_type = other DNA

SEQ ID NO: 22978 - protein, 14 aa, synthetic construct
  REGION 1..14: note = Description of Artificial Sequence: Synthetic peptide
ERYSSGLYDYGMDV

SEQ ID NO: 22979 - DNA, 24 bp, synthetic construct
  misc_feature 1..24: note = Description of Artificial Sequence: Synthetic oligonucleotide
  source 1..24: mol_type = other DNA
gaactggggttcctctctgactac

SEQ ID NO: 22980 - protein, 8 aa, synthetic construct
  REGION 1..8: note = Description of Artificial Sequence: Synthetic peptide
ELGFLSDY

SEQ ID NO: 22981 - DNA, 21 bp, synthetic construct
  misc_feature 1..21: note = Description of Artificial Sequence: Synthetic oligonucleotide
  source 1..21: mol_type = other DNA
gatagggggggtttggacgtc

SEQ ID NO: 22982 - protein, 7 aa, synthetic construct
  REGION 1..7: note = Description of Artificial Sequence: Synthetic peptide
DRGGLDV

SEQ ID NO: 22983 - DNA, 27 bp, synthetic construct
  misc_feature 1..27: note = Description of Artificial Sequence: Synthetic oligonucleotide
  source 1..27: mol_type = other DNA
agcagtggctggtactactttgactac

SEQ ID NO: 22984 - protein, 9 aa, synthetic construct
  REGION 1..9: note = Description of Artificial Sequence: Synthetic peptide
SSGWYYFDY

SEQ ID NO: 22985 - DNA, 42 bp, synthetic construct
  misc_feature 1..42: note = Description of Artificial Sequence: Synthetic oligonucleotide
  source 1..42: mol_type = other DNA
gaaccgtatagcagcagctggtacgactacggtatggacgtc

SEQ ID NO: 22986 - protein, 14 aa, synthetic construct
  REGION 1..14: note = Description of Artificial Sequence: Synthetic peptide
EPYSSSWYDYGMDV

SEQ ID NO: 22987 - DNA, 33 bp, synthetic construct; identical to SEQ ID NO: 22957
  misc_feature 1..33: note = Description of Artificial Sequence: Synthetic oligonucleotide
  source 1..33: mol_type = other DNA

SEQ ID NO: 22988 - protein, 11 aa, synthetic construct
  REGION 1..11: note = Description of Artificial Sequence: Synthetic peptide
GYSYGYNWFDP

SEQ ID NO: 22989 - DNA, 27 bp, synthetic construct
  misc_feature 1..27: note = Description of Artificial Sequence: Synthetic oligonucleotide
  source 1..27: mol_type = other DNA
gatcaacggtactacggtatggacgtc

SEQ ID NO: 22990 - protein, 9 aa, synthetic construct
  REGION 1..9: note = Description of Artificial Sequence: Synthetic peptide
DQRYYGMDV

SEQ ID NO: 22991 - DNA, 45 bp, synthetic construct
  misc_feature 1..45: note = Description of Artificial Sequence: Synthetic oligonucleotide
  source 1..45: mol_type = other DNA
gggataagtggaaccggctcctactactactacggtgtggacgtc

SEQ ID NO: 22992 - protein, 15 aa, synthetic construct
  REGION 1..15: note = Description of Artificial Sequence: Synthetic peptide
GISGTGSYYYYGVDV

SEQ ID NO: 22993 - DNA, 33 bp, synthetic construct
  misc_feature 1..33: note = Description of Artificial Sequence: Synthetic oligonucleotide
  source 1..33: mol_type = other DNA
gatcgaggtgtcggctacgacggtatggacgtc

SEQ ID NO: 22994 - protein, 11 aa, synthetic construct
  REGION 1..11: note = Description of Artificial Sequence: Synthetic peptide
DRGVGYDGMDV

SEQ ID NO: 22995 - DNA, 33 bp, synthetic construct
  misc_feature 1..33: note = Description of Artificial Sequence: Synthetic oligonucleotide
  source 1..33: mol_type = other DNA
gatctggggatagggtattacggtatggacgtc

SEQ ID NO: 22996 - protein, 11 aa, synthetic construct
  REGION 1..11: note = Description of Artificial Sequence: Synthetic peptide
DLGIGYYGMDV

SEQ ID NO: 22997 - DNA, 18 bp, synthetic construct
  misc_feature 1..18: note = Description of Artificial Sequence: Synthetic oligonucleotide
  source 1..18: mol_type = other DNA
gactacggggccgactac

SEQ ID NO: 22998 - protein, 6 aa, synthetic construct
  REGION 1..6: note = Description of Artificial Sequence: Synthetic peptide
DYGADY

SEQ ID NO: 22999 - DNA, 27 bp, synthetic construct
  misc_feature 1..27: note = Description of Artificial Sequence: Synthetic oligonucleotide
  source 1..27: mol_type = other DNA
gtggggcagtggctggcttttgatatc

SEQ ID NO: 23000 - protein, 9 aa, synthetic construct
  REGION 1..9: note = Description of Artificial Sequence: Synthetic peptide
VGQWLAFDI

SEQ ID NO: 23001 - DNA, 33 bp, synthetic construct
  misc_feature 1..33: note = Description of Artificial Sequence: Synthetic oligonucleotide
  source 1..33: mol_type = other DNA
gatagatcagttggctacgacggtacggacgtc

SEQ ID NO: 23002 - protein, 11 aa, synthetic construct
  REGION 1..11: note = Description of Artificial Sequence: Synthetic peptide
DRSVGYDGTDV

SEQ ID NO: 23003 - DNA, 27 bp, synthetic construct
  misc_feature 1..27: note = Description of Artificial Sequence: Synthetic oligonucleotide
  source 1..27: mol_type = other DNA
gatcaacggtactacggtatggacgtc

SEQ ID NO: 23004 - protein, 9 aa, synthetic construct
  REGION 1..9: note = Description of Artificial Sequence: Synthetic peptide
DQRYYGMDV

SEQ ID NO: 23005 - DNA, 33 bp, synthetic construct
  misc_feature 1..33: note = Description of Artificial Sequence: Synthetic oligonucleotide
  source 1..33: mol_type = other DNA
gatatggggatagggtattatggtatggacgtc

SEQ ID NO: 23006 - protein, 11 aa, synthetic construct
  REGION 1..11: note = Description of Artificial Sequence: Synthetic peptide
DMGIGYYGMDV

SEQ ID NO: 23007 - DNA, 21 bp, synthetic construct
  misc_feature 1..21: note = Description of Artificial Sequence: Synthetic oligonucleotide
  source 1..21: mol_type = other DNA
gactacggtgtctttgactac

SEQ ID NO: 23008 - protein, 7 aa, synthetic construct
  REGION 1..7: note = Description of Artificial Sequence: Synthetic peptide
DYGVFDY

SEQ ID NO: 23009 - DNA, 39 bp, synthetic construct; identical to SEQ ID NO: 22959
  misc_feature 1..39: note = Description of Artificial Sequence: Synthetic oligonucleotide
  source 1..39: mol_type = other DNA

SEQ ID NO: 23010 - protein, 13 aa, synthetic construct
  REGION 1..13: note = Description of Artificial Sequence: Synthetic peptide
GGARSSGWFHFDY

SEQ ID NO: 23011 - DNA, 36 bp, synthetic construct
  misc_feature 1..36: note = Description of Artificial Sequence: Synthetic oligonucleotide
  source 1..36: mol_type = other DNA
gatgtgggtacagtgggagctacctactttgactgc

SEQ ID NO: 23012 - protein, 12 aa, synthetic construct
  REGION 1..12: note = Description of Artificial Sequence: Synthetic peptide
DVGTVGATYFDC

SEQ ID NO: 23013 - DNA, 18 bp, synthetic construct
  misc_feature 1..18: note = Description of Artificial Sequence: Synthetic oligonucleotide
  source 1..18: mol_type = other DNA
gactacggggcggactac

SEQ ID NO: 23014 - protein, 6 aa, synthetic construct
  REGION 1..6: note = Description of Artificial Sequence: Synthetic peptide
DYGADY

SEQ ID NO: 23015 - DNA, 21 bp, synthetic construct
  misc_feature 1..21: note = Description of Artificial Sequence: Synthetic oligonucleotide
  source 1..21: mol_type = other DNA
gactacggtgtccttgactac

SEQ ID NO: 23016 - protein, 7 aa, synthetic construct
  REGION 1..7: note = Description of Artificial Sequence: Synthetic peptide
DYGVLDY

SEQ ID NO: 23017 - DNA, 33 bp, synthetic construct; identical to SEQ ID NO: 22957
  misc_feature 1..33: note = Description of Artificial Sequence: Synthetic oligonucleotide
  source 1..33: mol_type = other DNA

SEQ ID NO: 23018 - protein, 11 aa, synthetic construct
  REGION 1..11: note = Description of Artificial Sequence: Synthetic peptide
GYSYGYNWFDP

SEQ ID NO: 23019 - DNA, 33 bp, synthetic construct; identical to SEQ ID NO: 22953
  misc_feature 1..33: note = Description of Artificial Sequence: Synthetic oligonucleotide
  source 1..33: mol_type = other DNA

SEQ ID NO: 23020 - protein, 11 aa, synthetic construct
  REGION 1..11: note = Description of Artificial Sequence: Synthetic peptide
DQGYNWNSFDY

SEQ ID NO: 23021 - DNA, 33 bp, synthetic construct; identical to SEQ ID NO: 22957
  misc_feature 1..33: note = Description of Artificial Sequence: Synthetic oligonucleotide
  source 1..33: mol_type = other DNA

SEQ ID NO: 23022 - protein, 11 aa, synthetic construct
  REGION 1..11: note = Description of Artificial Sequence: Synthetic peptide
GYSYGYNWFDP

SEQ ID NO: 23023 - DNA, 33 bp, synthetic construct
  misc_feature 1..33: note = Description of Artificial Sequence: Synthetic oligonucleotide
  source 1..33: mol_type = other DNA
gatgcgggtattggatactacggtatagacgtc

SEQ ID NO: 23024 - protein, 11 aa, synthetic construct
  REGION 1..11: note = Description of Artificial Sequence: Synthetic peptide
DAGIGYYGIDV

SEQ ID NO: 23025 - DNA, 24 bp, synthetic construct
  misc_feature 1..24: note = Description of Artificial Sequence: Synthetic oligonucleotide
  source 1..24: mol_type = other DNA
gaactggggttcctctttgactac

SEQ ID NO: 23026 - protein, 8 aa, synthetic construct
  REGION 1..8: note = Description of Artificial Sequence: Synthetic peptide
ELGFLFDY

SEQ ID NO: 23027 - DNA, 42 bp, synthetic construct
  misc_feature 1..42: note = Description of Artificial Sequence: Synthetic oligonucleotide
  source 1..42: mol_type = other DNA
gaacggtatagcagtggcttgtacgactacggtttggacgtc

SEQ ID NO: 23028 - protein, 14 aa, synthetic construct
  REGION 1..14: note = Description of Artificial Sequence: Synthetic peptide
ERYSSGLYDYGLDV

SEQ ID NO: 23029 - DNA, 39 bp, synthetic construct; identical to SEQ ID NO: 22959
  misc_feature 1..39: note = Description of Artificial Sequence: Synthetic oligonucleotide
  source 1..39: mol_type = other DNA

SEQ ID NO: 23030 - protein, 13 aa, synthetic construct
  REGION 1..13: note = Description of Artificial Sequence: Synthetic peptide
GGARSSGWFHFDY

SEQ ID NO: 23031 - DNA, 21 bp, synthetic construct
  misc_feature 1..21: note = Description of Artificial Sequence: Synthetic oligonucleotide
  source 1..21: mol_type = other DNA
gactatggtgtctttgattac

SEQ ID NO: 23032 - protein, 7 aa, synthetic construct
  REGION 1..7: note = Description of Artificial Sequence: Synthetic peptide
DYGVFDY

SEQ ID NO: 23033 - DNA, 33 bp, synthetic construct; identical to SEQ ID NO: 22957
  misc_feature 1..33: note = Description of Artificial Sequence: Synthetic oligonucleotide
  source 1..33: mol_type = other DNA

SEQ ID NO: 23034 - protein, 11 aa, synthetic construct
  REGION 1..11: note = Description of Artificial Sequence: Synthetic peptide
GYSYGYNWFDP

SEQ ID NO: 23035 - DNA, 21 bp, synthetic construct
  misc_feature 1..21: note = Description of Artificial Sequence: Synthetic oligonucleotide
  source 1..21: mol_type = other DNA
gactacggtgtccttgactac

SEQ ID NO: 23036 - protein, 7 aa, synthetic construct
  REGION 1..7: note = Description of Artificial Sequence: Synthetic peptide
DYGVLDY

SEQ ID NO: 23037 - DNA, 33 bp, synthetic construct; identical to SEQ ID NO: 22957
  misc_feature 1..33: note = Description of Artificial Sequence: Synthetic oligonucleotide
  source 1..33: mol_type = other DNA

SEQ ID NO: 23038 - protein, 11 aa, synthetic construct
  REGION 1..11: note = Description of Artificial Sequence: Synthetic peptide
GYSYGYNWFDP

SEQ ID NO: 23039 - DNA, 24 bp, synthetic construct
  misc_feature 1..24: note = Description of Artificial Sequence: Synthetic oligonucleotide
  source 1..24: mol_type = other DNA
gagacgggtttcttgagcgactac

SEQ ID NO: 23040 - protein, 8 aa, synthetic construct
  REGION 1..8: note = Description of Artificial Sequence: Synthetic peptide
ETGFLSDY

SEQ ID NO: 23041 - DNA, 42 bp, synthetic construct; identical to SEQ ID NO: 23027
  misc_feature 1..42: note = Description of Artificial Sequence: Synthetic oligonucleotide
  source 1..42: mol_type = other DNA

SEQ ID NO: 23042 - protein, 14 aa, synthetic construct
  REGION 1..14: note = Description of Artificial Sequence: Synthetic peptide
ERYSSGLYDYGLDV

SEQ ID NO: 23043 - DNA, 21 bp, synthetic construct
  misc_feature 1..21: note = Description of Artificial Sequence: Synthetic oligonucleotide
  source 1..21: mol_type = other DNA
gggttcggtgactgggactac

SEQ ID NO: 23044 - protein, 7 aa, synthetic construct
  REGION 1..7: note = Description of Artificial Sequence: Synthetic peptide
GFGDWDY

SEQ ID NO: 23045 - DNA, 27 bp, synthetic construct
  misc_feature 1..27: note = Description of Artificial Sequence: Synthetic oligonucleotide
  source 1..27: mol_type = other DNA
gatcaacggtactacggtatggacgtc

SEQ ID NO: 23046 - protein, 9 aa, synthetic construct
  REGION 1..9: note = Description of Artificial Sequence: Synthetic peptide
DQRYYGMDV

SEQ ID NO: 23047 - DNA, 33 bp, synthetic construct; identical to SEQ ID NO: 22957
  misc_feature 1..33: note = Description of Artificial Sequence: Synthetic oligonucleotide
  source 1..33: mol_type = other DNA

SEQ ID NO: 23048 - protein, 11 aa, synthetic construct
  REGION 1..11: note = Description of Artificial Sequence: Synthetic peptide
GYSYGYNWFDP

SEQ ID NO: 23049 - DNA, 39 bp, synthetic construct
  misc_feature 1..39: note = Description of Artificial Sequence: Synthetic oligonucleotide
  source 1..39: mol_type = other DNA
gaccggctagtgggagctactaccgatgcttttgatatc

SEQ ID NO: 23050 - protein, 13 aa, synthetic construct
  REGION 1..13: note = Description of Artificial Sequence: Synthetic peptide
DRLVGATTDAFDI

SEQ ID NO: 23051 - DNA, 42 bp, synthetic construct
  misc_feature 1..42: note = Description of Artificial Sequence: Synthetic oligonucleotide
  source 1..42: mol_type = other DNA
gatcctacggtgacccactactattactacggtatggacgtc

SEQ ID NO: 23052 - protein, 14 aa, synthetic construct
  REGION 1..14: note = Description of Artificial Sequence: Synthetic peptide
DPTVTHYYYYGMDV

SEQ ID NO: 23053 - DNA, 33 bp, synthetic construct
  misc_feature 1..33: note = Description of Artificial Sequence: Synthetic oligonucleotide
  source 1..33: mol_type = other DNA
gatcggggagtgggctactacggtacggacgtc

SEQ ID NO: 23054 - protein, 11 aa, synthetic construct
  REGION 1..11: note = Description of Artificial Sequence: Synthetic peptide
DRGVGYYGTDV

SEQ ID NO: 23055 - DNA, 33 bp, synthetic construct
  misc_feature 1..33: note = Description of Artificial Sequence: Synthetic oligonucleotide
  source 1..33: mol_type = other DNA
gatgggagttatggttacgacggtatggacgtc

SEQ ID NO: 23056 - protein, 11 aa, synthetic construct
  REGION 1..11: note = Description of Artificial Sequence: Synthetic peptide
DGSYGYDGMDV

SEQ ID NO: 23057 - DNA, 33 bp, synthetic construct
  misc_feature 1..33: note = Description of Artificial Sequence: Synthetic oligonucleotide
  source 1..33: mol_type = other DNA
ttagactacagtaactacgggtggttcgacccc

SEQ ID NO: 23058 - protein, 11 aa, synthetic construct
  REGION 1..11: note = Description of Artificial Sequence: Synthetic peptide
LDYSNYGWFDP

SEQ ID NO: 23059 - DNA, 33 bp, synthetic construct
  misc_feature 1..33: note = Description of Artificial Sequence: Synthetic oligonucleotide
  source 1..33: mol_type = other DNA
gataggacggtgggctatgatggttttgatatc

SEQ ID NO: 23060 - protein, 11 aa, synthetic construct
  REGION 1..11: note = Description of Artificial Sequence: Synthetic peptide
DRTVGYDGFDI

SEQ ID NO: 23061 - DNA, 33 bp, synthetic construct
  misc_feature 1..33: note = Description of Artificial Sequence: Synthetic oligonucleotide
  source 1..33: mol_type = other DNA
gaccacggtgtcgggtactacggtatggacgtc

SEQ ID NO: 23062 - protein, 11 aa, synthetic construct
  REGION 1..11: note = Description of Artificial Sequence: Synthetic peptide
DHGVGYYGMDV

SEQ ID NO: 23063 - DNA, 42 bp, synthetic construct
  misc_feature 1..42: note = Description of Artificial Sequence: Synthetic oligonucleotide
  source 1..42: mol_type = other DNA
gatcctacggtgacccactactactactacggtatggacgtc

SEQ ID NO: 23064 - protein, 14 aa, synthetic construct
  REGION 1..14: note = Description of Artificial Sequence: Synthetic peptide
DPTVTHYYYYGMDV

SEQ ID NO: 23065 - DNA, 33 bp, synthetic construct
  misc_feature 1..33: note = Description of Artificial Sequence: Synthetic oligonucleotide
  source 1..33: mol_type = other DNA
gactacggtgtcgggtactacggtacggacgtc

SEQ ID NO: 23066 - protein, 11 aa, synthetic construct
  REGION 1..11: note = Description of Artificial Sequence: Synthetic peptide
DYGVGYYGTDV

SEQ ID NO: 23067 - DNA, 33 bp, synthetic construct; identical to SEQ ID NO: 23065
  misc_feature 1..33: note = Description of Artificial Sequence: Synthetic oligonucleotide
  source 1..33: mol_type = other DNA

SEQ ID NO: 23068 - protein, 11 aa, synthetic construct
  REGION 1..11: note = Description of Artificial Sequence: Synthetic peptide
DYGVGYYGTDV

SEQ ID NO: 23069 - DNA, 33 bp, synthetic construct; identical to SEQ ID NO: 23061
  misc_feature 1..33: note = Description of Artificial Sequence: Synthetic oligonucleotide
  source 1..33: mol_type = other DNA

SEQ ID NO: 23070 - protein, 11 aa, synthetic construct
  REGION 1..11: note = Description of Artificial Sequence: Synthetic peptide
DHGVGYYGMDV

SEQ ID NO: 23071 - DNA, 36 bp, synthetic construct
  misc_feature 1..36: note = Description of Artificial Sequence: Synthetic oligonucleotide
  source 1..36: mol_type = other DNA
gatcggagtatagtgggagctacctactttgactac

SEQ ID NO: 23072 - protein, 12 aa, synthetic construct
  REGION 1..12: note = Description of Artificial Sequence: Synthetic peptide
DRSIVGATYFDY

SEQ ID NO: 23073 - DNA, 33 bp, synthetic construct
  misc_feature 1..33: note = Description of Artificial Sequence: Synthetic oligonucleotide
  source 1..33: mol_type = other DNA
gatcggggagtgggctacaacggtatggacgtc

SEQ ID NO: 23074 - protein, 11 aa, synthetic construct
  REGION 1..11: note = Description of Artificial Sequence: Synthetic peptide
DRGVGYNGMDV

SEQ ID NO: 23075 - DNA, 42 bp, synthetic construct
  misc_feature 1..42: note = Description of Artificial Sequence: Synthetic oligonucleotide
  source 1..42: mol_type = other DNA
gaacgttatagcagtggctggtacgactacggtatggacgtc

SEQ ID NO: 23076 - protein, 14 aa, synthetic construct
  REGION 1..14: note = Description of Artificial Sequence: Synthetic peptide
ERYSSGWYDYGMDV

SEQ ID NO: 23077 - DNA, 33 bp, synthetic construct; identical to SEQ ID NO: 23055
  misc_feature 1..33: note = Description of Artificial Sequence: Synthetic oligonucleotide
  source 1..33: mol_type = other DNA

SEQ ID NO: 23078 - protein, 11 aa, synthetic construct
  REGION 1..11: note = Description of Artificial Sequence: Synthetic peptide
DGSYGYDGMDV

SEQ ID NO: 23079 - DNA, 33 bp, synthetic construct; identical to SEQ ID NO: 23065
  misc_feature 1..33: note = Description of Artificial Sequence: Synthetic oligonucleotide
  source 1..33: mol_type = other DNA

SEQ ID NO: 23080 - protein, 11 aa, synthetic construct
  REGION 1..11: note = Description of Artificial Sequence: Synthetic peptide
DYGVGYYGTDV

SEQ ID NO: 23081 - DNA, 33 bp, synthetic construct; identical to SEQ ID NO: 23059
  misc_feature 1..33: note = Description of Artificial Sequence: Synthetic oligonucleotide
  source 1..33: mol_type = other DNA

SEQ ID NO: 23082 - protein, 11 aa, synthetic construct
  REGION 1..11: note = Description of Artificial Sequence: Synthetic peptide
DRTVGYDGFDI

SEQ ID NO: 23083 - DNA, 33 bp, synthetic construct
  misc_feature 1..33: note = Description of Artificial Sequence: Synthetic oligonucleotide
  source 1..33: mol_type = other DNA
gactacggtgtcgggtacgacggtatggacgtc

SEQ ID NO: 23084 - protein, 11 aa, synthetic construct
  REGION 1..11: note = Description of Artificial Sequence: Synthetic peptide
DYGVGYDGMDV

SEQ ID NO: 23085 - DNA, 33 bp, synthetic construct; identical to SEQ ID NO: 23055
  misc_feature 1..33: note = Description of Artificial Sequence: Synthetic oligonucleotide
  source 1..33: mol_type = other DNA

SEQ ID NO: 23086 - protein, 11 aa, synthetic construct
  REGION 1..11: note = Description of Artificial Sequence: Synthetic peptide
DGSYGYDGMDV

SEQ ID NO: 23087 - DNA, 33 bp, synthetic construct; identical to SEQ ID NO: 23065
  misc_feature 1..33: note = Description of Artificial Sequence: Synthetic oligonucleotide
  source 1..33: mol_type = other DNA

SEQ ID NO: 23088 - protein, 11 aa, synthetic construct
  REGION 1..11: note = Description of Artificial Sequence: Synthetic peptide
DYGVGYYGTDV

SEQ ID NO: 23089 - DNA, 27 bp, synthetic construct
  misc_feature 1..27: note = Description of Artificial Sequence: Synthetic oligonucleotide
  source 1..27: mol_type = other DNA
gaaaagcctgggagctactacaaatac

SEQ ID NO: 23090 - protein, 9 aa, synthetic construct
  REGION 1..9: note = Description of Artificial Sequence: Synthetic peptide
EKPGSYYKY

SEQ ID NO: 23091 - DNA, 24 bp, synthetic construct
  misc_feature 1..24: note = Description of Artificial Sequence: Synthetic oligonucleotide
  source 1..24: mol_type = other DNA
gactactactacggtatggacgtc

SEQ ID NO: 23092 - protein, 8 aa, synthetic construct
  REGION 1..8: note = Description of Artificial Sequence: Synthetic peptide
DYYYGMDV

SEQ ID NO: 23093 - DNA, 33 bp, synthetic construct
  misc_feature 1..33: note = Description of Artificial Sequence: Synthetic oligonucleotide
  source 1..33: mol_type = other DNA
gatcggggagtgggctacgacggaatggacgtc

SEQ ID NO: 23094 - protein, 11 aa, synthetic construct
  REGION 1..11: note = Description of Artificial Sequence: Synthetic peptide
DRGVGYDGMDV

SEQ ID NO: 23095 - DNA, 33 bp, synthetic construct
  misc_feature 1..33: note = Description of Artificial Sequence: Synthetic oligonucleotide
  source 1..33: mol_type = other DNA
gataggacggtgggctatgatggttgtgatatc

SEQ ID NO: 23096 - protein, 11 aa, synthetic construct
  REGION 1..11: note = Description of Artificial Sequence: Synthetic peptide
DRTVGYDGCDI

SEQ ID NO: 23097 - DNA, 39 bp, synthetic construct
  misc_feature 1..39: note = Description of Artificial Sequence: Synthetic oligonucleotide
  source 1..39: mol_type = other DNA
gacgggagatacagctatggttacgactggttcgacccc

SEQ ID NO: 23098 - protein, 13 aa, synthetic construct
  REGION 1..13: note = Description of Artificial Sequence: Synthetic peptide
DGRYSYGYDWFDP

SEQ ID NO: 23099 - DNA, 33 bp, synthetic construct; identical to SEQ ID NO: 23065
  misc_feature 1..33: note = Description of Artificial Sequence: Synthetic oligonucleotide
  source 1..33: mol_type = other DNA

SEQ ID NO: 23100 - protein, 11 aa, synthetic construct
  REGION 1..11: note = Description of Artificial Sequence: Synthetic peptide
DYGVGYYGTDV

SEQ ID NO: 23101 - DNA, 42 bp, synthetic construct
  misc_feature 1..42: note = Description of Artificial Sequence: Synthetic oligonucleotide
  source 1..42: mol_type = other DNA
gagaggtataccagcagctggtacgactacggtatggacgtc

SEQ ID NO: 23102 - protein, 14 aa, synthetic construct
  REGION 1..14: note = Description of Artificial Sequence: Synthetic peptide
ERYTSSWYDYGMDV

SEQ ID NO: 23103 - DNA, 42 bp, synthetic construct; identical to SEQ ID NO: 23075
  misc_feature 1..42: note = Description of Artificial Sequence: Synthetic oligonucleotide
  source 1..42: mol_type = other DNA

SEQ ID NO: 23104 - protein, 14 aa, synthetic construct
  REGION 1..14: note = Description of Artificial Sequence: Synthetic peptide
ERYSSGWYDYGMDV

SEQ ID NO: 23105 - DNA, 42 bp, synthetic construct; identical to SEQ ID NO: 23075
  misc_feature 1..42: note = Description of Artificial Sequence: Synthetic oligonucleotide
  source 1..42: mol_type = other DNA

SEQ ID NO: 23106 - protein, 14 aa, synthetic construct
  REGION 1..14: note = Description of Artificial Sequence: Synthetic peptide
ERYSSGWYDYGMDV

SEQ ID NO: 23107 - DNA, 42 bp, synthetic construct; identical to SEQ ID NO: 23075
  misc_feature 1..42: note = Description of Artificial Sequence: Synthetic oligonucleotide
  source 1..42: mol_type = other DNA

SEQ ID NO: 23108 - protein, 14 aa, synthetic construct
  REGION 1..14: note = Description of Artificial Sequence: Synthetic peptide
ERYSSGWYDYGMDV

SEQ ID NO: 23109 - DNA, 33 bp, synthetic construct; identical to SEQ ID NO: 23065
  misc_feature 1..33: note = Description of Artificial Sequence: Synthetic oligonucleotide
  source 1..33: mol_type = other DNA

SEQ ID NO: 23110 - protein, 11 aa, synthetic construct
  REGION 1..11: note = Description of Artificial Sequence: Synthetic peptide
DYGVGYYGTDV

SEQ ID NO: 23111 - DNA, 33 bp, synthetic construct
  misc_feature 1..33: note = Description of Artificial Sequence: Synthetic oligonucleotide
  source 1..33: mol_type = other DNA
gactgcggtgtcggatactacggtacggacgtc

SEQ ID NO: 23112 - protein, 11 aa, synthetic construct
  REGION 1..11: note = Description of Artificial Sequence: Synthetic peptide
DCGVGYYGTDV

SEQ ID NO: 23113 - DNA, 39 bp, synthetic construct
  misc_feature 1..39: note = Description of Artificial Sequence: Synthetic oligonucleotide
  source 1..39: mol_type = other DNA
gacgggagatacagctatggtcacgactggttcgacccc

SEQ ID NO: 23114 - protein, 13 aa, synthetic construct
  REGION 1..13: note = Description of Artificial Sequence: Synthetic peptide
DGRYSYGHDWFDP

SEQ ID NO: 23115 - DNA, 33 bp, synthetic construct
  misc_feature 1..33: note = Description of Artificial Sequence: Synthetic oligonucleotide
  source 1..33: mol_type = other DNA
ttagactacagtaattacgggtggttcgacccc

SEQ ID NO: 23116 - protein, 11 aa, synthetic construct
  REGION 1..11: note = Description of Artificial Sequence: Synthetic peptide
LDYSNYGWFDP

SEQ ID NO: 23117 - DNA, 42 bp, synthetic construct; identical to SEQ ID NO: 23075
  misc_feature 1..42: note = Description of Artificial Sequence: Synthetic oligonucleotide
  source 1..42: mol_type = other DNA

SEQ ID NO: 23118 - protein, 14 aa, synthetic construct
  REGION 1..14: note = Description of Artificial Sequence: Synthetic peptide
ERYSSGWYDYGMDV

SEQ ID NO: 23119 - DNA, 33 bp, synthetic construct
  misc_feature 1..33: note = Description of Artificial Sequence: Synthetic oligonucleotide
  source 1..33: mol_type = other DNA
gatcggggagtgggctactacggtatggacgtc

SEQ ID NO: 23120 - protein, 11 aa, synthetic construct
  REGION 1..11: note = Description of Artificial Sequence: Synthetic peptide
DRGVGYYGMDV

SEQ ID NO: 23121 - DNA, 33 bp, synthetic construct; identical to SEQ ID NO: 23057
  misc_feature 1..33: note = Description of Artificial Sequence: Synthetic oligonucleotide
  source 1..33: mol_type = other DNA

SEQ ID NO: 23122 - protein, 11 aa, synthetic construct
  REGION 1..11: note = Description of Artificial Sequence: Synthetic peptide
LDYSNYGWFDP

SEQ ID NO: 23123 - DNA, 36 bp, synthetic construct
  misc_feature 1..36: note = Description of Artificial Sequence: Synthetic oligonucleotide
  source 1..36: mol_type = other DNA
gatcccaacatagtgggagctacttggtttgactac

SEQ ID NO: 23124 - protein, 12 aa, synthetic construct
  REGION 1..12: note = Description of Artificial Sequence: Synthetic peptide
DPNIVGATWFDY

SEQ ID NO: 23125 - DNA, 24 bp, synthetic construct
  misc_feature 1..24: note = Description of Artificial Sequence: Synthetic oligonucleotide
  source 1..24: mol_type = other DNA
tcgggtttagcagtggaggactac

SEQ ID NO: 23126 - protein, 8 aa, synthetic construct
  REGION 1..8: note = Description of Artificial Sequence: Synthetic peptide
SGLAVEDY

SEQ ID NO: 23127 - DNA, 42 bp, synthetic construct; identical to SEQ ID NO: 23075
  misc_feature 1..42: note = Description of Artificial Sequence: Synthetic oligonucleotide
  source 1..42: mol_type = other DNA

SEQ ID NO: 23128 - protein, 14 aa, synthetic construct
  REGION 1..14: note = Description of Artificial Sequence: Synthetic peptide
ERYSSGWYDYGMDV

SEQ ID NO: 23129 - DNA, 42 bp, synthetic construct; identical to SEQ ID NO: 23075
  misc_feature 1..42: note = Description of Artificial Sequence: Synthetic oligonucleotide
  source 1..42: mol_type = other DNA

SEQ ID NO: 23130 - protein, 14 aa, synthetic construct
  REGION 1..14: note = Description of Artificial Sequence: Synthetic peptide
ERYSSGWYDYGMDV

SEQ ID NO: 23131 - DNA, 42 bp, synthetic construct
  misc_feature 1..42: note = Description of Artificial Sequence: Synthetic oligonucleotide
  source 1..42: mol_type = other DNA
gatggctcttatagcagtggctggtactggggttttgactac

SEQ ID NO: 23132 - protein, 14 aa, synthetic construct
  REGION 1..14: note = Description of Artificial Sequence: Synthetic peptide
DGSYSSGWYWGFDY

SEQ ID NO: 23133 - DNA, 42 bp, synthetic construct; identical to SEQ ID NO: 23075
  misc_feature 1..42: note = Description of Artificial Sequence: Synthetic oligonucleotide
  source 1..42: mol_type = other DNA

SEQ ID NO: 23134 - protein, 14 aa, synthetic construct
  REGION 1..14: note = Description of Artificial Sequence: Synthetic peptide
ERYSSGWYDYGMDV

SEQ ID NO: 23135 - DNA, 33 bp, synthetic construct
  misc_feature 1..33: note = Description of Artificial Sequence: Synthetic oligonucleotide
  source 1..33: mol_type = other DNA
gactacggtgtcgggtactacggtctggacgtc

SEQ ID NO: 23136 - protein, 11 aa, synthetic construct
  REGION 1..11: note = Description of Artificial Sequence: Synthetic peptide
DYGVGYYGLDV

SEQ ID NO: 23137 - DNA, 33 bp, synthetic construct; identical to SEQ ID NO: 23055
  misc_feature 1..33: note = Description of Artificial Sequence: Synthetic oligonucleotide
  source 1..33: mol_type = other DNA

SEQ ID NO: 23138 - protein, 11 aa, synthetic construct
  REGION 1..11: note = Description of Artificial Sequence: Synthetic peptide
DGSYGYDGMDV

SEQ ID NO: 23139 - DNA, 42 bp, synthetic construct; identical to SEQ ID NO: 23075
  misc_feature 1..42: note = Description of Artificial Sequence: Synthetic oligonucleotide
  source 1..42: mol_type = other DNA

SEQ ID NO: 23140 - protein, 14 aa, synthetic construct
  REGION 1..14: note = Description of Artificial Sequence: Synthetic peptide
ERYSSGWYDYGMDV

SEQ ID NO: 23141 - DNA, 42 bp, synthetic construct; identical to SEQ ID NO: 23075
  misc_feature 1..42: note = Description of Artificial Sequence: Synthetic oligonucleotide
  source 1..42: mol_type = other DNA

SEQ ID NO: 23142 - protein, 14 aa, synthetic construct
  REGION 1..14: note = Description of Artificial Sequence: Synthetic peptide
ERYSSGWYDYGMDV

SEQ ID NO: 23143 - DNA, 42 bp, synthetic construct; identical to SEQ ID NO: 23075
  misc_feature 1..42: note = Description of Artificial Sequence: Synthetic oligonucleotide
  source 1..42: mol_type = other DNA

SEQ ID NO: 23144 - protein, 14 aa, synthetic construct
  REGION 1..14: note = Description of Artificial Sequence: Synthetic peptide
ERYSSGWYDYGMDV

SEQ ID NO: 23145 - DNA, 33 bp, synthetic construct; identical to SEQ ID NO: 23073
  misc_feature 1..33: note = Description of Artificial Sequence: Synthetic oligonucleotide
  source 1..33: mol_type = other DNA

SEQ ID NO: 23146 - protein, 11 aa, synthetic construct
  REGION 1..11: note = Description of Artificial Sequence: Synthetic peptide
DRGVGYNGMDV

SEQ ID NO: 23147 - DNA, 54 bp, synthetic construct
  misc_feature 1..54: note = Description of Artificial Sequence: Synthetic oligonucleotide
  source 1..54: mol_type = other DNA
gaccagcagtggctggtacgtgggagggacaactactactacggtatggacgtc

SEQ ID NO: 23148 - protein, 18 aa, synthetic construct
  REGION 1..18: note = Description of Artificial Sequence: Synthetic peptide
DQQWLVRGRDNYYYGMDV

SEQ ID NO: 23149 - DNA, 42 bp, synthetic construct; identical to SEQ ID NO: 23075
  misc_feature 1..42: note = Description of Artificial Sequence: Synthetic oligonucleotide
  source 1..42: mol_type = other DNA

SEQ ID NO: 23150 - protein, 14 aa, synthetic construct
  REGION 1..14: note = Description of Artificial Sequence: Synthetic peptide
ERYSSGWYDYGMDV

SEQ ID NO: 23151 - DNA, 24 bp, synthetic construct
  misc_feature 1..24: note = Description of Artificial Sequence: Synthetic oligonucleotide
  source 1..24: mol_type = other DNA
gatgggaccagctcgtttgactac

SEQ ID NO: 23152 - protein, 8 aa, synthetic construct
  REGION 1..8: note = Description of Artificial Sequence: Synthetic peptide
DGTSSFDY

SEQ ID NO: 23153 - DNA, 33 bp, synthetic construct
  misc_feature 1..33: note = Description of Artificial Sequence: Synthetic oligonucleotide
  source 1..33: mol_type = other DNA
gatcggacagtgggctacaacggtatggacgtc

SEQ ID NO: 23154 - protein, 11 aa, synthetic construct
  REGION 1..11: note = Description of Artificial Sequence: Synthetic peptide
DRTVGYNGMDV

SEQ ID NO: 23155 - DNA, 24 bp, synthetic construct
  misc_feature 1..24: note = Description of Artificial Sequence: Synthetic oligonucleotide
  source 1..24: mol_type = other DNA
gatgggaccagctcgtttgactac

SEQ ID NO: 23156 - protein, 8 aa, synthetic construct
  REGION 1..8: note = Description of Artificial Sequence: Synthetic peptide
DGTSSFDY

SEQ ID NO: 23157 - DNA, 24 bp, synthetic construct
  misc_feature 1..24: note = Description of Artificial Sequence: Synthetic oligonucleotide
  source 1..24: mol_type = other DNA
gactactactacggttttgacgtc

SEQ ID NO: 23158 - protein, 8 aa, synthetic construct
  REGION 1..8: note = Description of Artificial Sequence: Synthetic peptide
DYYYGFDV

SEQ ID NO: 23159 - DNA, 33 bp, synthetic construct
  misc_feature 1..33: note = Description of Artificial Sequence: Synthetic oligonucleotide
  source 1..33: mol_type = other DNA
gatcgggatgtcgggtacaacggtatggacgtc

SEQ ID NO: 23160 - protein, 11 aa, synthetic construct
  REGION 1..11: note = Description of Artificial Sequence: Synthetic peptide
DRDVGYNGMDV

SEQ ID NO: 23161 - DNA, 39 bp, synthetic construct
  misc_feature 1..39: note = Description of Artificial Sequence: Synthetic oligonucleotide
  source 1..39: mol_type = other DNA
gacccttatcgtgtagcagtggctggggcctttgactac

SEQ ID NO: 23162 - protein, 13 aa, synthetic construct
  REGION 1..13: note = Description of Artificial Sequence: Synthetic peptide
DPYRVAVAGAFDY

SEQ ID NO: 23163 - DNA, 21 bp, synthetic construct
  misc_feature 1..21: note = Description of Artificial Sequence: Synthetic oligonucleotide
  source 1..21: mol_type = other DNA
gactacggcgcccttgatttc

SEQ ID NO: 23164 - protein, 7 aa, synthetic construct
  REGION 1..7: note = Description of Artificial Sequence: Synthetic peptide
DYGALDF

SEQ ID NO: 23165 - DNA, 24 bp, synthetic construct
  misc_feature 1..24: note = Description of Artificial Sequence: Synthetic oligonucleotide
  source 1..24: mol_type = other DNA
gatgggaccagctcgtttgactac

SEQ ID NO: 23166 - protein, 8 aa, synthetic construct
  REGION 1..8: note = Description of Artificial Sequence: Synthetic peptide
DGTSSFDY

SEQ ID NO: 23167 - DNA, 39 bp, synthetic construct; identical to SEQ ID NO: 23161
  misc_feature 1..39: note = Description of Artificial Sequence: Synthetic oligonucleotide
  source 1..39: mol_type = other DNA

SEQ ID NO: 23168 - protein, 13 aa, synthetic construct
  REGION 1..13: note = Description of Artificial Sequence: Synthetic peptide
DPYRVAVAGAFDY

SEQ ID NO: 23169 - DNA, 33 bp, synthetic construct; identical to SEQ ID NO: 23159
  misc_feature 1..33: note = Description of Artificial Sequence: Synthetic oligonucleotide
  source 1..33: mol_type = other DNA

SEQ ID NO: 23170 - protein, 11 aa, synthetic construct
  REGION 1..11: note = Description of Artificial Sequence: Synthetic peptide
DRDVGYNGMDV

SEQ ID NO: 23171 - DNA, 24 bp, synthetic construct
  misc_feature 1..24: note = Description of Artificial Sequence: Synthetic oligonucleotide
  source 1..24: mol_type = other DNA
gatgggaccagctcgtttgactac

SEQ ID NO: 23172 - protein, 8 aa, synthetic construct
  REGION 1..8: note = Description of Artificial Sequence: Synthetic peptide
DGTSSFDY

SEQ ID NO: 23173 - DNA, 24 bp, synthetic construct
  misc_feature 1..24: note = Description of Artificial Sequence: Synthetic oligonucleotide
  source 1..24: mol_type = other DNA
gactactactacggtatggacgtc

SEQ ID NO: 23174 - protein, 8 aa, synthetic construct
  REGION 1..8: note = Description of Artificial Sequence: Synthetic peptide
DYYYGMDV

SEQ ID NO: 23175 - DNA, 33 bp, synthetic construct; identical to SEQ ID NO: 23159
  misc_feature 1..33: note = Description of Artificial Sequence: Synthetic oligonucleotide
  source 1..33: mol_type = other DNA

SEQ ID NO: 23176 - protein, 11 aa, synthetic construct
  REGION 1..11: note = Description of Artificial Sequence: Synthetic peptide
DRDVGYNGMDV

SEQ ID NO: 23177 - DNA, 42 bp, synthetic construct
  misc_feature 1..42: note = Description of Artificial Sequence: Synthetic oligonucleotide
  source 1..42: mol_type = other DNA
ggctcctacgatagtagtggttattaccactacttagaccac

SEQ ID NO: 23178 - protein, 14 aa, synthetic construct
  REGION 1..14: note = Description of Artificial Sequence: Synthetic peptide
GSYDSSGYYHYLDH

SEQ ID NO: 23179 - DNA, 36 bp, synthetic construct
  misc_feature 1..36: note = Description of Artificial Sequence: Synthetic oligonucleotide
  source 1..36: mol_type = other DNA
gaggggggctactactattactacggtgtggacgtc

SEQ ID NO: 23180 - protein, 12 aa, synthetic construct
  REGION 1..12: note = Description of Artificial Sequence: Synthetic peptide
EGGYYYYYGVDV

SEQ ID NO: 23181 - DNA, 42 bp, synthetic construct
  misc_feature 1..42: note = Description of Artificial Sequence: Synthetic oligonucleotide
  source 1..42: mol_type = other DNA
gagaggtatagcagcaactggtacgactacggtatggacgtc

SEQ ID NO: 23182 - protein, 14 aa, synthetic construct
  REGION 1..14: note = Description of Artificial Sequence: Synthetic peptide
ERYSSNWYDYGMDV

SEQ ID NO: 23183 - DNA, 42 bp, synthetic construct
  misc_feature 1..42: note = Description of Artificial Sequence: Synthetic oligonucleotide
  source 1..42: mol_type = other DNA
gattggggtggctacagttcttactactacggtatggacgtc

SEQ ID NO: 23184 - protein, 14 aa, synthetic construct
  REGION 1..14: note = Description of Artificial Sequence: Synthetic peptide
DWGGYSSYYYGMDV

SEQ ID NO: 23185 - DNA, 27 bp, synthetic construct
  misc_feature 1..27: note = Description of Artificial Sequence: Synthetic oligonucleotide
  source 1..27: mol_type = other DNA
cagggtcgggactggggtgttgactac

SEQ ID NO: 23186 - protein, 9 aa, synthetic construct
  REGION 1..9: note = Description of Artificial Sequence: Synthetic peptide
QGRDWGVDY

SEQ ID NO: 23187 - DNA, 42 bp, synthetic construct; identical to SEQ ID NO: 20499
  misc_feature 1..42: note = Description of Artificial Sequence: Synthetic oligonucleotide
  source 1..42: mol_type = other DNA

SEQ ID NO: 23188 - protein, 14 aa, synthetic construct
  REGION 1..14: note = Description of Artificial Sequence: Synthetic peptide
ERYSSSWYDYGMDV

SEQ ID NO: 23189 - DNA, 27 bp, synthetic construct
  misc_feature 1..27: note = Description of Artificial Sequence: Synthetic oligonucleotide
  source 1..27: mol_type = other DNA
tccagtggctggaactggttcgacccc

SEQ ID NO: 23190 - protein, 9 aa, synthetic construct
  REGION 1..9: note = Description of Artificial Sequence: Synthetic peptide
SSGWNWFDP

SEQ ID NO: 23191 - DNA, 36 bp, synthetic construct
  misc_feature 1..36: note = Description of Artificial Sequence: Synthetic oligonucleotide
  source 1..36: mol_type = other DNA
gtctatagtgcctacgattctcactggttcgacccc

SEQ ID NO: 23192 - protein, 12 aa, synthetic construct
  REGION 1..12: note = Description of Artificial Sequence: Synthetic peptide
VYSAYDSHWFDP

SEQ ID NO: 23193 - DNA, 42 bp, synthetic construct; identical to SEQ ID NO: 23183
  misc_feature 1..42: note = Description of Artificial Sequence: Synthetic oligonucleotide
  source 1..42: mol_type = other DNA

SEQ ID NO: 23194 - protein, 14 aa, synthetic construct
  REGION 1..14: note = Description of Artificial Sequence: Synthetic peptide
DWGGYSSYYYGMDV

SEQ ID NO: 23195 - DNA, 27 bp, synthetic construct
  misc_feature 1..27: note = Description of Artificial Sequence: Synthetic oligonucleotide
  source 1..27: mol_type = other DNA
agcagtggctggtactactttgactac

SEQ ID NO: 23196 - protein, 9 aa, synthetic construct
  REGION 1..9: note = Description of Artificial Sequence: Synthetic peptide
SSGWYYFDY

SEQ ID NO: 23197 - DNA, 27 bp, synthetic construct
  misc_feature 1..27: note = Description of Artificial Sequence: Synthetic oligonucleotide
  source 1..27: mol_type = other DNA
agcagtggctggtacaagtttgactac

SEQ ID NO: 23198 - protein, 9 aa, synthetic construct
  REGION 1..9: note = Description of Artificial Sequence: Synthetic peptide
SSGWYKFDY

SEQ ID NO: 23199 - DNA, 24 bp, synthetic construct
  misc_feature 1..24: note = Description of Artificial Sequence: Synthetic oligonucleotide
  source 1..24: mol_type = other DNA
gagctaggcttccagtctgactac

SEQ ID NO: 23200 - protein, 8 aa, synthetic construct
  REGION 1..8: note = Description of Artificial Sequence: Synthetic peptide
ELGFQSDY

SEQ ID NO: 23201 - DNA, 42 bp, synthetic construct
  misc_feature 1..42: note = Description of Artificial Sequence: Synthetic oligonucleotide
  source 1..42: mol_type = other DNA
gattggggtggctacagttcttactacttcggtatggacgtc

SEQ ID NO: 23202 - protein, 14 aa, synthetic construct
  REGION 1..14: note = Description of Artificial Sequence: Synthetic peptide
DWGGYSSYYFGMDV

SEQ ID NO: 23203 - DNA, 27 bp, synthetic construct
  misc_feature 1..27: note = Description of Artificial Sequence: Synthetic oligonucleotide
  source 1..27: mol_type = other DNA
agcagtggctggtacaagtttgactac

SEQ ID NO: 23204 - protein, 9 aa, synthetic construct
  REGION 1..9: note = Description of Artificial Sequence: Synthetic peptide
SSGWYKFDY

SEQ ID NO: 23205 - DNA, 42 bp, synthetic construct; identical to SEQ ID NO: 23183
  misc_feature 1..42: note = Description of Artificial Sequence: Synthetic oligonucleotide
  source 1..42: mol_type = other DNA

SEQ ID NO: 23206 - protein, 14 aa, synthetic construct
  REGION 1..14: note = Description of Artificial Sequence: Synthetic peptide
DWGGYSSYYYGMDV

SEQ ID NO: 23207 - DNA, 42 bp, synthetic construct; identical to SEQ ID NO: 21211
  misc_feature 1..42: note = Description of Artificial Sequence: Synthetic oligonucleotide
  source 1..42: mol_type = other DNA

SEQ ID NO: 23208 - protein, 14 aa, synthetic construct
  REGION 1..14: note = Description of Artificial Sequence: Synthetic peptide
ERYSSGWYDYGMDV

SEQ ID NO: 23209 - DNA, 45 bp, synthetic construct
  misc_feature 1..45: note = Description of Artificial Sequence: Synthetic oligonucleotide
  source 1..45: mol_type = other DNA
gatttagcagctcgttcttactactactacttcggtatggacgtc

SEQ ID NO: 23210 - protein, 15 aa, synthetic construct
  REGION 1..15: note = Description of Artificial Sequence: Synthetic peptide
DLAARSYYYYFGMDV

SEQ ID NO: 23211 - DNA, 27 bp, synthetic construct
  misc_feature 1..27: note = Description of Artificial Sequence: Synthetic oligonucleotide
  source 1..27: mol_type = other DNA
agcagtggctggtactggttcgacccc

SEQ ID NO: 23212 - protein, 9 aa, synthetic construct
  REGION 1..9: note = Description of Artificial Sequence: Synthetic peptide
SSGWYWFDP

SEQ ID NO: 23213 - DNA, 42 bp, synthetic construct; identical to SEQ ID NO: 23183
  misc_feature 1..42: note = Description of Artificial Sequence: Synthetic oligonucleotide
  source 1..42: mol_type = other DNA

SEQ ID NO: 23214 - protein, 14 aa, synthetic construct
  REGION 1..14: note = Description of Artificial Sequence: Synthetic peptide
DWGGYSSYYYGMDV

SEQ ID NO: 23215 - DNA, 27 bp, synthetic construct
  misc_feature 1..27: note = Description of Artificial Sequence: Synthetic oligonucleotide
  source 1..27: mol_type = other DNA
agcagtggctggtaccgctttgactac

SEQ ID NO: 23216 - protein, 9 aa, synthetic construct
  REGION 1..9: note = Description of Artificial Sequence: Synthetic peptide
SSGWYRFDY

SEQ ID NO: 23217 - DNA, 24 bp, synthetic construct
  misc_feature 1..24: note = Description of Artificial Sequence: Synthetic oligonucleotide
  source 1..24: mol_type = other DNA
gaagtgggattcactgaggactac

SEQ ID NO: 23218 - protein, 8 aa, synthetic construct
  REGION 1..8: note = Description of Artificial Sequence: Synthetic peptide
EVGFTEDY

SEQ ID NO: 23219 - DNA, 24 bp, synthetic construct
  misc_feature 1..24: note = Description of Artificial Sequence: Synthetic oligonucleotide
  source 1..24: mol_type = other DNA
gaagtgggattcactgaggactac

SEQ ID NO: 23220 - protein, 8 aa, synthetic construct
  REGION 1..8: note = Description of Artificial Sequence: Synthetic peptide
EVGFTEDY

SEQ ID NO: 23221 - DNA, 36 bp, synthetic construct
  misc_feature 1..36: note = Description of Artificial Sequence: Synthetic oligonucleotide
  source 1..36: mol_type = other DNA
gaggccggtgactacggctactacggtatggacgtc

SEQ ID NO: 23222 - protein, 12 aa, synthetic construct
  REGION 1..12: note = Description of Artificial Sequence: Synthetic peptide
EAGDYGYYGMDV

SEQ ID NO: 23223 - DNA, 24 bp, synthetic construct
  misc_feature 1..24: note = Description of Artificial Sequence: Synthetic oligonucleotide
  source 1..24: mol_type = other DNA
gaagtgggatttactgaggactac

SEQ ID NO: 23224 - protein, 8 aa, synthetic construct
  REGION 1..8: note = Description of Artificial Sequence: Synthetic peptide
EVGFTEDY

SEQ ID NO: 23225 - DNA, 27 bp, synthetic construct
  misc_feature 1..27: note = Description of Artificial Sequence: Synthetic oligonucleotide
  source 1..27: mol_type = other DNA
agcagtggctggaccctttttgactac

SEQ ID NO: 23226 - protein, 9 aa, synthetic construct
  REGION 1..9: note = Description of Artificial Sequence: Synthetic peptide
SSGWTLFDY

SEQ ID NO: 23227 - DNA, 27 bp, synthetic construct
  misc_feature 1..27: note = Description of Artificial Sequence: Synthetic oligonucleotide
  source 1..27: mol_type = other DNA
agcagtggctggtaccgctttgactac

SEQ ID NO: 23228 - protein, 9 aa, synthetic construct
  REGION 1..9: note = Description of Artificial Sequence: Synthetic peptide
SSGWYRFDY

SEQ ID NO: 23229 - DNA, 27 bp, synthetic construct
  misc_feature 1..27: note = Description of Artificial Sequence: Synthetic oligonucleotide
  source 1..27: mol_type = other DNA
agcagtggctggtacaagtttgactac

SEQ ID NO: 23230 - protein, 9 aa, synthetic construct
  REGION 1..9: note = Description of Artificial Sequence: Synthetic peptide
SSGWYKFDY

SEQ ID NO: 23231 - DNA, 27 bp, synthetic construct
  misc_feature 1..27: note = Description of Artificial Sequence: Synthetic oligonucleotide
  source 1..27: mol_type = other DNA
agcagtggctggtacaagtttgactac

SEQ ID NO: 23232 - protein, 9 aa, synthetic construct
  REGION 1..9: note = Description of Artificial Sequence: Synthetic peptide
SSGWYKFDY

SEQ ID NO: 23233 - DNA, 36 bp, synthetic construct
  misc_feature 1..36: note = Description of Artificial Sequence: Synthetic oligonucleotide
  source 1..36: mol_type = other DNA
gatcactacgatttttggagtggttatcttacccac

SEQ ID NO: 23234 - protein, 12 aa, synthetic construct
  REGION 1..12: note = Description of Artificial Sequence: Synthetic peptide
DHYDFWSGYLTH

SEQ ID NO: 23235 - DNA, 36 bp, synthetic construct
  misc_feature 1..36: note = Description of Artificial Sequence: Synthetic oligonucleotide
  source 1..36: mol_type = other DNA
gagggtcacgatttttggagtggctttttttgttac

SEQ ID NO: 23236 - protein, 12 aa, synthetic construct
  REGION 1..12: note = Description of Artificial Sequence: Synthetic peptide
EGHDFWSGFFCY

SEQ ID NO: 23237 - DNA, 42 bp, synthetic construct; identical to SEQ ID NO: 20499
  misc_feature 1..42: note = Description of Artificial Sequence: Synthetic oligonucleotide
  source 1..42: mol_type = other DNA

SEQ ID NO: 23238 - protein, 14 aa, synthetic construct
  REGION 1..14: note = Description of Artificial Sequence: Synthetic peptide
ERYSSSWYDYGMDV

SEQ ID NO: 23239 - DNA, 27 bp, synthetic construct
  misc_feature 1..27: note = Description of Artificial Sequence: Synthetic oligonucleotide
  source 1..27: mol_type = other DNA
agcagtggctggtacaagtttgactac

SEQ ID NO: 23240 - protein, 9 aa, synthetic construct
  REGION 1..9: note = Description of Artificial Sequence: Synthetic peptide
SSGWYKFDY

SEQ ID NO: 23241 - DNA, 27 bp, synthetic construct
  misc_feature 1..27: note = Description of Artificial Sequence: Synthetic oligonucleotide
  source 1..27: mol_type = other DNA
agcagtggctggtaccgctttgactac

SEQ ID NO: 23242 - protein, 9 aa, synthetic construct
  REGION 1..9: note = Description of Artificial Sequence: Synthetic peptide
SSGWYRFDY

SEQ ID NO: 23243 - DNA, 36 bp, synthetic construct
  misc_feature 1..36: note = Description of Artificial Sequence: Synthetic oligonucleotide
  source 1..36: mol_type = other DNA
gagaattacgatttttggagtggttattatggctac

SEQ ID NO: 23244 - protein, 12 aa, synthetic construct
  REGION 1..12: note = Description of Artificial Sequence: Synthetic peptide
ENYDFWSGYYGY

SEQ ID NO: 23245 - DNA, 42 bp, synthetic construct
  misc_feature 1..42: note = Description of Artificial Sequence: Synthetic oligonucleotide
  source 1..42: mol_type = other DNA
gagaggtataacagcggctggtacgactacggtttggacgtc

SEQ ID NO: 23246 - protein, 14 aa, synthetic construct
  REGION 1..14: note = Description of Artificial Sequence: Synthetic peptide
ERYNSGWYDYGLDV

SEQ ID NO: 23247 - DNA, 42 bp, synthetic construct; identical to SEQ ID NO: 23183
  misc_feature 1..42: note = Description of Artificial Sequence: Synthetic oligonucleotide
  source 1..42: mol_type = other DNA

SEQ ID NO: 23248 - protein, 14 aa, synthetic construct
  REGION 1..14: note = Description of Artificial Sequence: Synthetic peptide
DWGGYSSYYYGMDV

SEQ ID NO: 23249 - DNA, 24 bp, synthetic construct
  misc_feature 1..24: note = Description of Artificial Sequence: Synthetic oligonucleotide
  source 1..24: mol_type = other DNA
gaagtgggattcactgaggactac

SEQ ID NO: 23250 - protein, 8 aa, synthetic construct
  REGION 1..8: note = Description of Artificial Sequence: Synthetic peptide
EVGFTEDY

SEQ ID NO: 23251 - DNA, 42 bp, synthetic construct; identical to SEQ ID NO: 23183
  misc_feature 1..42: note = Description of Artificial Sequence: Synthetic oligonucleotide
  source 1..42: mol_type = other DNA

SEQ ID NO: 23252 - protein, 14 aa, synthetic construct
  REGION 1..14: note = Description of Artificial Sequence: Synthetic peptide
DWGGYSSYYYGMDV

SEQ ID NO: 23253 - DNA, 42 bp, synthetic construct; identical to SEQ ID NO: 23183
  misc_feature 1..42: note = Description of Artificial Sequence: Synthetic oligonucleotide
  source 1..42: mol_type = other DNA

SEQ ID NO: 23254 - protein, 14 aa, synthetic construct
  REGION 1..14: note = Description of Artificial Sequence: Synthetic peptide
DWGGYSSYYYGMDV

SEQ ID NO: 23255 - DNA, 42 bp, synthetic construct; identical to SEQ ID NO: 23183
  misc_feature 1..42: note = Description of Artificial Sequence: Synthetic oligonucleotide
  source 1..42: mol_type = other DNA

SEQ ID NO: 23256 - protein, 14 aa, synthetic construct
  REGION 1..14: note = Description of Artificial Sequence: Synthetic peptide
DWGGYSSYYYGMDV

SEQ ID NO: 23257 - DNA, 27 bp, synthetic construct
  misc_feature 1..27: note = Description of Artificial Sequence: Synthetic oligonucleotide
  source 1..27: mol_type = other DNA
agcagtggctggtactactttgactac

SEQ ID NO: 23258 - protein, 9 aa, synthetic construct
  REGION 1..9: note = Description of Artificial Sequence: Synthetic peptide
SSGWYYFDY

SEQ ID NO: 23259 - DNA, 42 bp, synthetic construct; identical to SEQ ID NO: 23183
  misc_feature 1..42: note = Description of Artificial Sequence: Synthetic oligonucleotide
  source 1..42: mol_type = other DNA

SEQ ID NO: 23260 - protein, 14 aa, synthetic construct
  REGION 1..14: note = Description of Artificial Sequence: Synthetic peptide
DWGGYSSYYYGMDV

SEQ ID NO: 23261 - DNA, 42 bp, synthetic construct
  misc_feature 1..42: note = Description of Artificial Sequence: Synthetic oligonucleotide
  source 1..42: mol_type = other DNA
gagctgtatagcagcagctggtacgactacggtttggacgtc

SEQ ID NO: 23262 - protein, 14 aa, synthetic construct
  REGION 1..14: note = Description of Artificial Sequence: Synthetic peptide
ELYSSSWYDYGLDV

SEQ ID NO: 23263 - DNA, 27 bp, synthetic construct
  misc_feature 1..27: note = Description of Artificial Sequence: Synthetic oligonucleotide
  source 1..27: mol_type = other DNA
agcagtggctggtactactttgactac

SEQ ID NO: 23264 - protein, 9 aa, synthetic construct
  REGION 1..9: note = Description of Artificial Sequence: Synthetic peptide
SSGWYYFDY

SEQ ID NO: 23265 - DNA, 42 bp, synthetic construct; identical to SEQ ID NO: 23183
  misc_feature 1..42: note = Description of Artificial Sequence: Synthetic oligonucleotide
  source 1..42: mol_type = other DNA

SEQ ID NO: 23266 - protein, 14 aa, synthetic construct
  REGION 1..14: note = Description of Artificial Sequence: Synthetic peptide
DWGGYSSYYYGMDV

SEQ ID NO: 23267 - DNA, 42 bp, synthetic construct; identical to SEQ ID NO: 23183
  misc_feature 1..42: note = Description of Artificial Sequence: Synthetic oligonucleotide
  source 1..42: mol_type = other DNA

SEQ ID NO: 23268 - protein, 14 aa, synthetic construct
  REGION 1..14: note = Description of Artificial Sequence: Synthetic peptide
DWGGYSSYYYGMDV

SEQ ID NO: 23269 - DNA, 42 bp, synthetic construct; identical to SEQ ID NO: 23183
  misc_feature 1..42: note = Description of Artificial Sequence: Synthetic oligonucleotide
  source 1..42: mol_type = other DNA

SEQ ID NO: 23270 - protein, 14 aa, synthetic construct
  REGION 1..14: note = Description of Artificial Sequence: Synthetic peptide
DWGGYSSYYYGMDV

SEQ ID NO: 23271 - DNA, 24 bp, synthetic construct
  misc_feature 1..24: note = Description of Artificial Sequence: Synthetic oligonucleotide
  source 1..24: mol_type = other DNA
gaagtgggattcactgaggactac

SEQ ID NO: 23272 - protein, 8 aa, synthetic construct
  REGION 1..8: note = Description of Artificial Sequence: Synthetic peptide
EVGFTEDY

SEQ ID NO: 23273 - DNA, 21 bp, synthetic construct
  misc_feature 1..21: note = Description of Artificial Sequence: Synthetic oligonucleotide
  source 1..21: mol_type = other DNA
gatcaactatggtttgactac

SEQ ID NO: 23274 - protein, 7 aa, synthetic construct
  REGION 1..7: note = Description of Artificial Sequence: Synthetic peptide
DQLWFDY

SEQ ID NO: 23275 - DNA, 24 bp, synthetic construct
  misc_feature 1..24: note = Description of Artificial Sequence: Synthetic oligonucleotide
  source 1..24: mol_type = other DNA
gaagtgggattcactgaggactac

SEQ ID NO: 23276 - protein, 8 aa, synthetic construct
  REGION 1..8: note = Description of Artificial Sequence: Synthetic peptide
EVGFTEDY

SEQ ID NO: 23277 - DNA, 27 bp, synthetic construct
  misc_feature 1..27: note = Description of Artificial Sequence: Synthetic oligonucleotide
  source 1..27: mol_type = other DNA
agcagtggctggtacaagtttgactac

SEQ ID NO: 23278 - protein, 9 aa, synthetic construct
  REGION 1..9: note = Description of Artificial Sequence: Synthetic peptide
SSGWYKFDY

SEQ ID NO: 23279 - DNA, 27 bp, synthetic construct
  misc_feature 1..27: note = Description of Artificial Sequence: Synthetic oligonucleotide
  source 1..27: mol_type = other DNA
agcagtggctggtaccgctttgactac

SEQ ID NO: 23280 - protein, 9 aa, synthetic construct
  REGION 1..9: note = Description of Artificial Sequence: Synthetic peptide
SSGWYRFDY

SEQ ID NO: 23281 - DNA, 42 bp, synthetic construct; identical to SEQ ID NO: 23183
  misc_feature 1..42: note = Description of Artificial Sequence: Synthetic oligonucleotide
  source 1..42: mol_type = other DNA

SEQ ID NO: 23282 - protein, 14 aa, synthetic construct
  REGION 1..14: note = Description of Artificial Sequence: Synthetic peptide
DWGGYSSYYYGMDV

SEQ ID NO: 23283 - DNA, 27 bp, synthetic construct
  misc_feature 1..27: note = Description of Artificial Sequence: Synthetic oligonucleotide
  source 1..27: mol_type = other DNA
agcagtggctggtactggttcgacccc

SEQ ID NO: 23284 - protein, 9 aa, synthetic construct
  REGION 1..9: note = Description of Artificial Sequence: Synthetic peptide
SSGWYWFDP

SEQ ID NO: 23285 - DNA, 27 bp, synthetic construct
  misc_feature 1..27: note = Description of Artificial Sequence: Synthetic oligonucleotide
  source 1..27: mol_type = other DNA
agcagtggctggtactactttgactac

SEQ ID NO: 23286 - protein, 9 aa, synthetic construct
  REGION 1..9: note = Description of Artificial Sequence: Synthetic peptide
SSGWYYFDY

SEQ ID NO: 23287 - DNA, 12 bp, synthetic construct
  misc_feature 1..12: note = Description of Artificial Sequence: Synthetic oligonucleotide
  source 1..12: mol_type = other DNA
ttaggggtctac

SEQ ID NO: 23288 - protein, 4 aa, synthetic construct
  REGION 1..4: note = Description of Artificial Sequence: Synthetic peptide
LGVY

SEQ ID NO: 23289 - DNA, 24 bp, synthetic construct
  misc_feature 1..24: note = Description of Artificial Sequence: Synthetic oligonucleotide
  source 1..24: mol_type = other DNA
gaagtgggattcactgaggactac

SEQ ID NO: 23290 - protein, 8 aa, synthetic construct
  REGION 1..8: note = Description of Artificial Sequence: Synthetic peptide
EVGFTEDY

SEQ ID NO: 23291 - DNA, 36 bp, synthetic construct
  misc_feature 1..36: note = Description of Artificial Sequence: Synthetic oligonucleotide
  source 1..36: mol_type = other DNA
tggcgaggtaaccccactgactacggtatggacgtc

SEQ ID NO: 23292 - protein, 12 aa, synthetic construct
  REGION 1..12: note = Description of Artificial Sequence: Synthetic peptide
WRGNPTDYGMDV

SEQ ID NO: 23293 - DNA, 36 bp, synthetic construct; identical to SEQ ID NO: 23291
  misc_feature 1..36: note = Description of Artificial Sequence: Synthetic oligonucleotide
  source 1..36: mol_type = other DNA

SEQ ID NO: 23294 - protein, 12 aa, synthetic construct
  REGION 1..12: note = Description of Artificial Sequence: Synthetic peptide
WRGNPTDYGMDV

SEQ ID NO: 23295 - DNA, 36 bp, synthetic construct; identical to SEQ ID NO: 23291
  misc_feature 1..36: note = Description of Artificial Sequence: Synthetic oligonucleotide
  source 1..36: mol_type = other DNA

SEQ ID NO: 23296 - protein, 12 aa, synthetic construct
  REGION 1..12: note = Description of Artificial Sequence: Synthetic peptide
WRGNPTDYGMDV

SEQ ID NO: 23297 - DNA, 48 bp, synthetic construct
  misc_feature 1..48: note = Description of Artificial Sequence: Synthetic oligonucleotide
  source 1..48: mol_type = other DNA
gataggagtgggagctacgggtacttctactactacggtttggacgtc

SEQ ID NO: 23298 - protein, 16 aa, synthetic construct
  REGION 1..16: note = Description of Artificial Sequence: Synthetic peptide
DRSGSYGYFYYYGLDV

SEQ ID NO: 23299 - DNA, 60 bp, synthetic construct
  misc_feature 1..60: note = Description of Artificial Sequence: Synthetic oligonucleotide
  source 1..60: mol_type = other DNA
gcggatattgtattagtaccagctgctatcccttataattactacttcgctatggacgtc

SEQ ID NO: 23300 - protein, 20 aa, synthetic construct
  REGION 1..20: note = Description of Artificial Sequence: Synthetic peptide
ADIVLVPAAIPYNYYFAMDV

SEQ ID NO: 23301 - DNA, 36 bp, synthetic construct; identical to SEQ ID NO: 23291
  misc_feature 1..36: note = Description of Artificial Sequence: Synthetic oligonucleotide
  source 1..36: mol_type = other DNA

SEQ ID NO: 23302 - protein, 12 aa, synthetic construct
  REGION 1..12: note = Description of Artificial Sequence: Synthetic peptide
WRGNPTDYGMDV

SEQ ID NO: 23303 - DNA, 57 bp, synthetic construct
  misc_feature 1..57: note = Description of Artificial Sequence: Synthetic oligonucleotide
  source 1..57: mol_type = other DNA
gatcgggactctggttcggggagttacccctactactactactacggtatggacgtc

SEQ ID NO: 23304 - protein, 19 aa, synthetic construct
  REGION 1..19: note = Description of Artificial Sequence: Synthetic peptide
DRDSGSGSYPYYYYYGMDV

SEQ ID NO: 23305 - DNA, 51 bp, synthetic construct
  misc_feature 1..51: note = Description of Artificial Sequence: Synthetic oligonucleotide
  source 1..51: mol_type = other DNA
gatcgtgactacggtgaccccccctactactactactacggtatggacgtc

SEQ ID NO: 23306 - protein, 17 aa, synthetic construct
  REGION 1..17: note = Description of Artificial Sequence: Synthetic peptide
DRDYGDPPYYYYYGMDV

SEQ ID NO: 23307 - DNA, 51 bp, synthetic construct; identical to SEQ ID NO: 20121
  misc_feature 1..51: note = Description of Artificial Sequence: Synthetic oligonucleotide
  source 1..51: mol_type = other DNA

SEQ ID NO: 23308 - protein, 17 aa, synthetic construct
  REGION 1..17: note = Description of Artificial Sequence: Synthetic peptide
DRVEGSGTPYYYYGMDV

SEQ ID NO: 23309 - DNA, 60 bp, synthetic construct
  misc_feature 1..60: note = Description of Artificial Sequence: Synthetic oligonucleotide
  source 1..60: mol_type = other DNA
gatcgggattattgtagtggtggtacttgtccttactactactactacggtatggacgtc

SEQ ID NO: 23310 - protein, 20 aa, synthetic construct
  REGION 1..20: note = Description of Artificial Sequence: Synthetic peptide
DRDYCSGGTCPYYYYYGMDV

SEQ ID NO: 23311 - DNA, 60 bp, synthetic construct
  misc_feature 1..60: note = Description of Artificial Sequence: Synthetic oligonucleotide
  source 1..60: mol_type = other DNA
gatcgggattattgtagtggtggtagctgcccttactactactactacggtatggacgtc

SEQ ID NO: 23312 - protein, 20 aa, synthetic construct
  REGION 1..20: note = Description of Artificial Sequence: Synthetic peptide
DRDYCSGGSCPYYYYYGMDV

SEQ ID NO: 23313 - DNA, 36 bp, synthetic construct; identical to SEQ ID NO: 23291
  misc_feature 1..36: note = Description of Artificial Sequence: Synthetic oligonucleotide
  source 1..36: mol_type = other DNA

SEQ ID NO: 23314 - protein, 12 aa, synthetic construct
  REGION 1..12: note = Description of Artificial Sequence: Synthetic peptide
WRGNPTDYGMDV

SEQ ID NO: 23315 - DNA, 36 bp, synthetic construct; identical to SEQ ID NO: 23291
  misc_feature 1..36: note = Description of Artificial Sequence: Synthetic oligonucleotide
  source 1..36: mol_type = other DNA

SEQ ID NO: 23316 - protein, 12 aa, synthetic construct
  REGION 1..12: note = Description of Artificial Sequence: Synthetic peptide
WRGNPTDYGMDV

SEQ ID NO: 23317 - DNA, 39 bp, synthetic construct
  misc_feature 1..39: note = Description of Artificial Sequence: Synthetic oligonucleotide
  source 1..39: mol_type = other DNA
gattggggtggctacgattcgagtggctggttcgacccc

SEQ ID NO: 23318 - protein, 13 aa, synthetic construct
  REGION 1..13: note = Description of Artificial Sequence: Synthetic peptide
DWGGYDSSGWFDP

SEQ ID NO: 23319 - DNA, 48 bp, synthetic construct; identical to SEQ ID NO: 23297
  misc_feature 1..48: note = Description of Artificial Sequence: Synthetic oligonucleotide
  source 1..48: mol_type = other DNA

SEQ ID NO: 23320 - protein, 16 aa, synthetic construct
  REGION 1..16: note = Description of Artificial Sequence: Synthetic peptide
DRSGSYGYFYYYGLDV

SEQ ID NO: 23321 - DNA, 48 bp, synthetic construct; identical to SEQ ID NO: 23297
  misc_feature 1..48: note = Description of Artificial Sequence: Synthetic oligonucleotide
  source 1..48: mol_type = other DNA

SEQ ID NO: 23322 - protein, 16 aa, synthetic construct
  REGION 1..16: note = Description of Artificial Sequence: Synthetic peptide
DRSGSYGYFYYYGLDV

SEQ ID NO: 23323 - DNA, 36 bp, synthetic construct; identical to SEQ ID NO: 23291
  misc_feature 1..36: note = Description of Artificial Sequence: Synthetic oligonucleotide
  source 1..36: mol_type = other DNA

SEQ ID NO: 23324 - protein, 12 aa, synthetic construct
  REGION 1..12: note = Description of Artificial Sequence: Synthetic peptide
WRGNPTDYGMDV

SEQ ID NO: 23325 - DNA, 51 bp, synthetic construct; identical to SEQ ID NO: 23305
  misc_feature 1..51: note = Description of Artificial Sequence: Synthetic oligonucleotide
  source 1..51: mol_type = other DNA

SEQ ID NO: 23326 - protein, 17 aa, synthetic construct
  REGION 1..17: note = Description of Artificial Sequence: Synthetic peptide
DRDYGDPPYYYYYGMDV

SEQ ID NO: 23327 - DNA, 60 bp, synthetic construct; identical to SEQ ID NO: 23309
  misc_feature 1..60: note = Description of Artificial Sequence: Synthetic oligonucleotide
  source 1..60: mol_type = other DNA

SEQ ID NO: 23328 - protein, 20 aa, synthetic construct
  REGION 1..20: note = Description of Artificial Sequence: Synthetic peptide
DRDYCSGGTCPYYYYYGMDV

SEQ ID NO: 23329 - DNA, 36 bp, synthetic construct; identical to SEQ ID NO: 23291
  misc_feature 1..36: note = Description of Artificial Sequence: Synthetic oligonucleotide
  source 1..36: mol_type = other DNA

SEQ ID NO: 23330 - protein, 12 aa, synthetic construct
  REGION 1..12: note = Description of Artificial Sequence: Synthetic peptide
WRGNPTDYGMDV

SEQ ID NO: 23331 - DNA, 48 bp, synthetic construct; identical to SEQ ID NO: 23297
  misc_feature 1..48: note = Description of Artificial Sequence: Synthetic oligonucleotide
  source 1..48: mol_type = other DNA

SEQ ID NO: 23332 - protein, 16 aa, synthetic construct
  REGION 1..16: note = Description of Artificial Sequence: Synthetic peptide
DRSGSYGYFYYYGLDV

SEQ ID NO: 23333 - DNA, 36 bp, synthetic construct
  misc_feature 1..36: note = Description of Artificial Sequence: Synthetic oligonucleotide
  source 1..36: mol_type = other DNA
gggatgtatagcagtggctggtacgtctttgactac

SEQ ID NO: 23334 - protein, 12 aa, synthetic construct
  REGION 1..12: note = Description of Artificial Sequence: Synthetic peptide
GMYSSGWYVFDY

SEQ ID NO: 23335 - DNA, 36 bp, synthetic construct; identical to SEQ ID NO: 23291
  misc_feature 1..36: note = Description of Artificial Sequence: Synthetic oligonucleotide
  source 1..36: mol_type = other DNA

SEQ ID NO: 23336 - protein, 12 aa, synthetic construct
  REGION 1..12: note = Description of Artificial Sequence: Synthetic peptide
WRGNPTDYGMDV

SEQ ID NO: 23337 - DNA, 33 bp, synthetic construct
  misc_feature 1..33: note = Description of Artificial Sequence: Synthetic oligonucleotide
  source 1..33: mol_type = other DNA
acggcagtggctggtactgggtggttcgacccc

SEQ ID NO: 23338 - protein, 11 aa, synthetic construct
  REGION 1..11: note = Description of Artificial Sequence: Synthetic peptide
TAVAGTGWFDP

SEQ ID NO: 23339 - DNA, 36 bp, synthetic construct; identical to SEQ ID NO: 23291
  misc_feature 1..36: note = Description of Artificial Sequence: Synthetic oligonucleotide
  source 1..36: mol_type = other DNA

SEQ ID NO: 23340 - protein, 12 aa, synthetic construct
  REGION 1..12: note = Description of Artificial Sequence: Synthetic peptide
WRGNPTDYGMDV

SEQ ID NO: 23341 - DNA, 51 bp, synthetic construct; identical to SEQ ID NO: 23305
  misc_feature 1..51: note = Description of Artificial Sequence: Synthetic oligonucleotide
  source 1..51: mol_type = other DNA

SEQ ID NO: 23342 - protein, 17 aa, synthetic construct
  REGION 1..17: note = Description of Artificial Sequence: Synthetic peptide
DRDYGDPPYYYYYGMDV

SEQ ID NO: 23343 - DNA, 60 bp, synthetic construct
  misc_feature 1..60: note = Description of Artificial Sequence: Synthetic oligonucleotide
  source 1..60: mol_type = other DNA
gatcgggattattgtagtggtggtacctgcccttactactactactacggtatggacgtc

SEQ ID NO: 23344 - protein, 20 aa, synthetic construct
  REGION 1..20: note = Description of Artificial Sequence: Synthetic peptide
DRDYCSGGTCPYYYYYGMDV

SEQ ID NO: 23345 - DNA, 36 bp, synthetic construct; identical to SEQ ID NO: 23291
  misc_feature 1..36: note = Description of Artificial Sequence: Synthetic oligonucleotide
  source 1..36: mol_type = other DNA

SEQ ID NO: 23346 - protein, 12 aa, synthetic construct
  REGION 1..12: note = Description of Artificial Sequence: Synthetic peptide
WRGNPTDYGMDV

SEQ ID NO: 23347 - DNA, 48 bp, synthetic construct; identical to SEQ ID NO: 23297
  misc_feature 1..48: note = Description of Artificial Sequence: Synthetic oligonucleotide
  source 1..48: mol_type = other DNA

SEQ ID NO: 23348 - protein, 16 aa, synthetic construct
  REGION 1..16: note = Description of Artificial Sequence: Synthetic peptide
DRSGSYGYFYYYGLDV

SEQ ID NO: 23349 - DNA, 36 bp, synthetic construct; identical to SEQ ID NO: 23291
  misc_feature 1..36: note = Description of Artificial Sequence: Synthetic oligonucleotide
  source 1..36: mol_type = other DNA

SEQ ID NO: 23350 - protein, 12 aa, synthetic construct
  REGION 1..12: note = Description of Artificial Sequence: Synthetic peptide
WRGNPTDYGMDV

SEQ ID NO: 23351 - DNA, 60 bp, synthetic construct
  misc_feature 1..60: note = Description of Artificial Sequence: Synthetic oligonucleotide
  source 1..60: mol_type = other DNA
gatcgggattattgtagtggtactagctgcccttactactactactacggtatggacgtc

SEQ ID NO: 23352 - protein, 20 aa, synthetic construct
  REGION 1..20: note = Description of Artificial Sequence: Synthetic peptide
DRDYCSGTSCPYYYYYGMDV

SEQ ID NO: 23353 - DNA, 36 bp, synthetic construct; identical to SEQ ID NO: 23291
  misc_feature 1..36: note = Description of Artificial Sequence: Synthetic oligonucleotide
  source 1..36: mol_type = other DNA

SEQ ID NO: 23354 - protein, 12 aa, synthetic construct
  REGION 1..12: note = Description of Artificial Sequence: Synthetic peptide
WRGNPTDYGMDV

SEQ ID NO: 23355 - DNA, 60 bp, synthetic construct
  misc_feature 1..60: note = Description of Artificial Sequence: Synthetic oligonucleotide
  source 1..60: mol_type = other DNA
gatgaccgatcttgtagtagaaccagctgcccttactactactactacggtttggacgtc

SEQ ID NO: 23356 - protein, 20 aa, synthetic construct
  REGION 1..20: note = Description of Artificial Sequence: Synthetic peptide
DDRSCSRTSCPYYYYYGLDV

SEQ ID NO: 23357 - DNA, 36 bp, synthetic construct; identical to SEQ ID NO: 23291
  misc_feature 1..36: note = Description of Artificial Sequence: Synthetic oligonucleotide
  source 1..36: mol_type = other DNA

SEQ ID NO: 23358 - protein, 12 aa, synthetic construct
  REGION 1..12: note = Description of Artificial Sequence: Synthetic peptide
WRGNPTDYGMDV

SEQ ID NO: 23359 - DNA, 36 bp, synthetic construct; identical to SEQ ID NO: 23291
  misc_feature 1..36: note = Description of Artificial Sequence: Synthetic oligonucleotide
  source 1..36: mol_type = other DNA

SEQ ID NO: 23360 - protein, 12 aa, synthetic construct
  REGION 1..12: note = Description of Artificial Sequence: Synthetic peptide
WRGNPTDYGMDV

SEQ ID NO: 23361 - DNA, 60 bp, synthetic construct; identical to SEQ ID NO: 23355
  misc_feature 1..60: note = Description of Artificial Sequence: Synthetic oligonucleotide
  source 1..60: mol_type = other DNA

SEQ ID NO: 23362 - protein, 20 aa, synthetic construct
  REGION 1..20: note = Description of Artificial Sequence: Synthetic peptide
DDRSCSRTSCPYYYYYGLDV

SEQ ID NO: 23363 - DNA, 36 bp, synthetic construct; identical to SEQ ID NO: 23291
  misc_feature 1..36: note = Description of Artificial Sequence: Synthetic oligonucleotide
  source 1..36: mol_type = other DNA

SEQ ID NO: 23364 - protein, 12 aa, synthetic construct
  REGION 1..12: note = Description of Artificial Sequence: Synthetic peptide
WRGNPTDYGMDV

SEQ ID NO: 23365 - DNA, 36 bp, synthetic construct
  misc_feature 1..36: note = Description of Artificial Sequence: Synthetic oligonucleotide
  source 1..36: mol_type = other DNA
tggcgaggtaaccccactgactccggtatggacgtc

SEQ ID NO: 23366 - protein, 12 aa, synthetic construct
  REGION 1..12: note = Description of Artificial Sequence: Synthetic peptide
WRGNPTDSGMDV

SEQ ID NO: 23367 - DNA, 60 bp, synthetic construct
  misc_feature 1..60: note = Description of Artificial Sequence: Synthetic oligonucleotide
  source 1..60: mol_type = other DNA
gatgaccgatcttgtagtagtaccagctgcccttactactactactacggtttggacgtc

SEQ ID NO: 23368 - protein, 20 aa, synthetic construct
  REGION 1..20: note = Description of Artificial Sequence: Synthetic peptide
DDRSCSSTSCPYYYYYGLDV

SEQ ID NO: 23369 - DNA, 60 bp, synthetic construct; identical to SEQ ID NO: 23355
  misc_feature 1..60: note = Description of Artificial Sequence: Synthetic oligonucleotide
  source 1..60: mol_type = other DNA

SEQ ID NO: 23370 - protein, 20 aa, synthetic construct
  REGION 1..20: note = Description of Artificial Sequence: Synthetic peptide
DDRSCSRTSCPYYYYYGLDV

SEQ ID NO: 23371 - DNA, 51 bp, synthetic construct; identical to SEQ ID NO: 20121
  misc_feature 1..51: note = Description of Artificial Sequence: Synthetic oligonucleotide
  source 1..51: mol_type = other DNA

SEQ ID NO: 23372 - protein, 17 aa, synthetic construct
  REGION 1..17: note = Description of Artificial Sequence: Synthetic peptide
DRVEGSGTPYYYYGMDV

SEQ ID NO: 23373 - DNA, 60 bp, synthetic construct
  misc_feature 1..60: note = Description of Artificial Sequence: Synthetic oligonucleotide
  source 1..60: mol_type = other DNA
gatcgggattattgtagtggtggtagctgtccttactactactactacggtatggacgtc

SEQ ID NO: 23374 - protein, 20 aa, synthetic construct
  REGION 1..20: note = Description of Artificial Sequence: Synthetic peptide
DRDYCSGGSCPYYYYYGMDV

SEQ ID NO: 23375 - DNA, 60 bp, synthetic construct; identical to SEQ ID NO: 23311
  misc_feature 1..60: note = Description of Artificial Sequence: Synthetic oligonucleotide
  source 1..60: mol_type = other DNA

SEQ ID NO: 23376 - protein, 20 aa, synthetic construct
  REGION 1..20: note = Description of Artificial Sequence: Synthetic peptide
DRDYCSGGSCPYYYYYGMDV

SEQ ID NO: 23377 - DNA, 36 bp, synthetic construct; identical to SEQ ID NO: 23291
  misc_feature 1..36: note = Description of Artificial Sequence: Synthetic oligonucleotide
  source 1..36: mol_type = other DNA

SEQ ID NO: 23378 - protein, 12 aa, synthetic construct
  REGION 1..12: note = Description of Artificial Sequence: Synthetic peptide
WRGNPTDYGMDV

SEQ ID NO: 23379 - DNA, 60 bp, synthetic construct
  misc_feature 1..60: note = Description of Artificial Sequence: Synthetic oligonucleotide
  source 1..60: mol_type = other DNA
gaggattcctattgtagtggtaccagctgcccctactactactactacggtatggacgtc

SEQ ID NO: 23380 - protein, 20 aa, synthetic construct
  REGION 1..20: note = Description of Artificial Sequence: Synthetic peptide
EDSYCSGTSCPYYYYYGMDV

SEQ ID NO: 23381 - DNA, 36 bp, synthetic construct; identical to SEQ ID NO: 23291
  misc_feature 1..36: note = Description of Artificial Sequence: Synthetic oligonucleotide
  source 1..36: mol_type = other DNA

SEQ ID NO: 23382 - protein, 12 aa, synthetic construct
  REGION 1..12: note = Description of Artificial Sequence: Synthetic peptide
WRGNPTDYGMDV

SEQ ID NO: 23383 - DNA, 60 bp, synthetic construct
  misc_feature 1..60: note = Description of Artificial Sequence: Synthetic oligonucleotide
  source 1..60: mol_type = other DNA
gatcgggattattgtagtggtggtagttgcccttactactactactacggtatggacgtc

SEQ ID NO: 23384 - protein, 20 aa, synthetic construct
  REGION 1..20: note = Description of Artificial Sequence: Synthetic peptide
DRDYCSGGSCPYYYYYGMDV

SEQ ID NO: 23385 - DNA, 39 bp, synthetic construct; identical to SEQ ID NO: 23317
  misc_feature 1..39: note = Description of Artificial Sequence: Synthetic oligonucleotide
  source 1..39: mol_type = other DNA

SEQ ID NO: 23386 - protein, 13 aa, synthetic construct
  REGION 1..13: note = Description of Artificial Sequence: Synthetic peptide
DWGGYDSSGWFDP

SEQ ID NO: 23387 - DNA, 48 bp, synthetic construct
  misc_feature 1..48: note = Description of Artificial Sequence: Synthetic oligonucleotide
  source 1..48: mol_type = other DNA
caggccatagcaagtcgagggaggtactactactacggtatggacgtc

SEQ ID NO: 23388 - protein, 16 aa, synthetic construct
  REGION 1..16: note = Description of Artificial Sequence: Synthetic peptide
QAIASRGRYYYYGMDV

SEQ ID NO: 23389 - DNA, 42 bp, synthetic construct
  misc_feature 1..42: note = Description of Artificial Sequence: Synthetic oligonucleotide
  source 1..42: mol_type = other DNA
gatacggagagatggctaccatactcctacggtatggacgtc

SEQ ID NO: 23390 - protein, 14 aa, synthetic construct
  REGION 1..14: note = Description of Artificial Sequence: Synthetic peptide
DTERWLPYSYGMDV

SEQ ID NO: 23391 - DNA, 63 bp, synthetic construct
  misc_feature 1..63: note = Description of Artificial Sequence: Synthetic oligonucleotide
  source 1..63: mol_type = other DNA
gatcgggttttttgtagtagtaccagctgcctctcttactactactactacggtatggacgtc

SEQ ID NO: 23392 - protein, 21 aa, synthetic construct
  REGION 1..21: note = Description of Artificial Sequence: Synthetic peptide
DRVFCSSTSCLSYYYYYGMDV

SEQ ID NO: 23393 - DNA, 36 bp, synthetic construct; identical to SEQ ID NO: 23291
  misc_feature 1..36: note = Description of Artificial Sequence: Synthetic oligonucleotide
  source 1..36: mol_type = other DNA

SEQ ID NO: 23394 - protein, 12 aa, synthetic construct
  REGION 1..12: note = Description of Artificial Sequence: Synthetic peptide
WRGNPTDYGMDV

SEQ ID NO: 23395 - DNA, 51 bp, synthetic construct; identical to SEQ ID NO: 23305
  misc_feature 1..51: note = Description of Artificial Sequence: Synthetic oligonucleotide
  source 1..51: mol_type = other DNA

SEQ ID NO: 23396 - protein, 17 aa, synthetic construct
  REGION 1..17: note = Description of Artificial Sequence: Synthetic peptide
DRDYGDPPYYYYYGMDV

SEQ ID NO: 23397 - DNA, 48 bp, synthetic construct
  misc_feature 1..48: note = Description of Artificial Sequence: Synthetic oligonucleotide
  source 1..48: mol_type = other DNA
gataggagtgggagctacgggtacttctactactacggtatggacgtc

SEQ ID NO: 23398 - protein, 16 aa, synthetic construct
  REGION 1..16: note = Description of Artificial Sequence: Synthetic peptide
DRSGSYGYFYYYGMDV

SEQ ID NO: 23399 - DNA, 60 bp, synthetic construct
  misc_feature 1..60: note = Description of Artificial Sequence: Synthetic oligonucleotide
  source 1..60: mol_type = other DNA
gatcgggttttttgtagtggtaccagctgcccttactactactactacggtatggacgtc

SEQ ID NO: 23400 - protein, 20 aa, synthetic construct
  REGION 1..20: note = Description of Artificial Sequence: Synthetic peptide
DRVFCSGTSCPYYYYYGMDV

SEQ ID NO: 23401 - DNA, 60 bp, synthetic construct
  misc_feature 1..60: note = Description of Artificial Sequence: Synthetic oligonucleotide
  source 1..60: mol_type = other DNA
gatcgggtttcttgtagtagtaccagctgcccttactactactactacggtatggacgtc

SEQ ID NO: 23402 - protein, 20 aa, synthetic construct
  REGION 1..20: note = Description of Artificial Sequence: Synthetic peptide
DRVSCSSTSCPYYYYYGMDV

SEQ ID NO: 23403 - DNA, 60 bp, synthetic construct; identical to SEQ ID NO: 23401
  misc_feature 1..60: note = Description of Artificial Sequence: Synthetic oligonucleotide
  source 1..60: mol_type = other DNA

SEQ ID NO: 23404 - protein, 20 aa, synthetic construct
  REGION 1..20: note = Description of Artificial Sequence: Synthetic peptide
DRVSCSSTSCPYYYYYGMDV

SEQ ID NO: 23405 - DNA, 60 bp, synthetic construct; identical to SEQ ID NO: 23401
  misc_feature 1..60: note = Description of Artificial Sequence: Synthetic oligonucleotide
  source 1..60: mol_type = other DNA

SEQ ID NO: 23406 - protein, 20 aa, synthetic construct
  REGION 1..20: note = Description of Artificial Sequence: Synthetic peptide
DRVSCSSTSCPYYYYYGMDV

SEQ ID NO: 23407 - DNA, 36 bp, synthetic construct
  misc_feature 1..36: note = Description of Artificial Sequence: Synthetic oligonucleotide
  source 1..36: mol_type = other DNA
gtcgggtatagcggtggctggtacatctttgactac

SEQ ID NO: 23408 - protein, 12 aa, synthetic construct
  REGION 1..12: note = Description of Artificial Sequence: Synthetic peptide
VGYSGGWYIFDY

SEQ ID NO: 23409 - DNA, 60 bp, synthetic construct; identical to SEQ ID NO: 23399
  misc_feature 1..60: note = Description of Artificial Sequence: Synthetic oligonucleotide
  source 1..60: mol_type = other DNA

SEQ ID NO: 23410 - protein, 20 aa, synthetic construct
  REGION 1..20: note = Description of Artificial Sequence: Synthetic peptide
DRVFCSGTSCPYYYYYGMDV

SEQ ID NO: 23411 - DNA, 60 bp, synthetic construct
  misc_feature 1..60: note = Description of Artificial Sequence: Synthetic oligonucleotide
  source 1..60: mol_type = other DNA
tcgaattgtagtagtgccaactgctatacggtggggttctactactacggtttggacgtc

SEQ ID NO: 23412 - protein, 20 aa, synthetic construct
  REGION 1..20: note = Description of Artificial Sequence: Synthetic peptide
SNCSSANCYTVGFYYYGLDV

SEQ ID NO: 23413 - DNA, 60 bp, synthetic construct
  misc_feature 1..60: note = Description of Artificial Sequence: Synthetic oligonucleotide
  source 1..60: mol_type = other DNA
tcgaattgtagtagtgccaactgctatacggtggggttctactactacggtatggacgtc

SEQ ID NO: 23414 - protein, 20 aa, synthetic construct
  REGION 1..20: note = Description of Artificial Sequence: Synthetic peptide
SNCSSANCYTVGFYYYGMDV

SEQ ID NO: 23415 - DNA, 63 bp, synthetic construct
  misc_feature 1..63: note = Description of Artificial Sequence: Synthetic oligonucleotide
  source 1..63: mol_type = other DNA
gatgatagatattgtagtagtcccacctgccatccttactactactactacggtctggacgtc

SEQ ID NO: 23416 - protein, 21 aa, synthetic construct
  REGION 1..21: note = Description of Artificial Sequence: Synthetic peptide
DDRYCSSPTCHPYYYYYGLDV

SEQ ID NO: 23417 - DNA, 60 bp, synthetic construct
  misc_feature 1..60: note = Description of Artificial Sequence: Synthetic oligonucleotide
  source 1..60: mol_type = other DNA
gatcagtacaaccggaacgacggaccaccagcttactactactactacggtttggacgtc

SEQ ID NO: 23418 - protein, 20 aa, synthetic construct
  REGION 1..20: note = Description of Artificial Sequence: Synthetic peptide
DQYNRNDGPPAYYYYYGLDV

SEQ ID NO: 23419 - DNA, 60 bp, synthetic construct
  misc_feature 1..60: note = Description of Artificial Sequence: Synthetic oligonucleotide
  source 1..60: mol_type = other DNA
gatcagtacaaccggaacgacggaccaccagcttactactactactacggtatggacgtc

SEQ ID NO: 23420 - protein, 20 aa, synthetic construct
  REGION 1..20: note = Description of Artificial Sequence: Synthetic peptide
DQYNRNDGPPAYYYYYGMDV

SEQ ID NO: 23421 - DNA, 42 bp, synthetic construct
  misc_feature 1..42: note = Description of Artificial Sequence: Synthetic oligonucleotide
  source 1..42: mol_type = other DNA
ggggatacagctggggttacctattactacggtatggacgtc

SEQ ID NO: 23422 - protein, 14 aa, synthetic construct
  REGION 1..14: note = Description of Artificial Sequence: Synthetic peptide
GDTAGVTYYYGMDV

SEQ ID NO: 23423 - DNA, 66 bp, synthetic construct
  misc_feature 1..66: note = Description of Artificial Sequence: Synthetic oligonucleotide
  source 1..66: mol_type = other DNA
gagggggctacgtattaccatggttcggggagttattatccggctactaactacggtatggacgtc

SEQ ID NO: 23424 - protein, 22 aa, synthetic construct
  REGION 1..22: note = Description of Artificial Sequence: Synthetic peptide
EGATYYHGSGSYYPATNYGMDV

SEQ ID NO: 23425 - DNA, 39 bp, synthetic construct
  misc_feature 1..39: note = Description of Artificial Sequence: Synthetic oligonucleotide
  source 1..39: mol_type = other DNA
cccctttacgatatgggactctactacgatatggacgtc

SEQ ID NO: 23426 - protein, 13 aa, synthetic construct
  REGION 1..13: note = Description of Artificial Sequence: Synthetic peptide
PLYDMGLYYDMDV

SEQ ID NO: 23427 - DNA, 63 bp, synthetic construct
  misc_feature 1..63: note = Description of Artificial Sequence: Synthetic oligonucleotide
  source 1..63: mol_type = other DNA
gatcgggtttattgtagtagtaccagctgccatccctattactactactacgctatggacgtc

SEQ ID NO: 23428 - protein, 21 aa, synthetic construct
  REGION 1..21: note = Description of Artificial Sequence: Synthetic peptide
DRVYCSSTSCHPYYYYYAMDV

SEQ ID NO: 23429 - DNA, 60 bp, synthetic construct
  misc_feature 1..60: note = Description of Artificial Sequence: Synthetic oligonucleotide
  source 1..60: mol_type = other DNA
gatcagtacaacaggaacgacggaccaccagcttactactactactacggtttggacgtc

SEQ ID NO: 23430 - protein, 20 aa, synthetic construct
  REGION 1..20: note = Description of Artificial Sequence: Synthetic peptide
DQYNRNDGPPAYYYYYGLDV

SEQ ID NO: 23431 - DNA, 42 bp, synthetic construct; identical to SEQ ID NO: 23421
  misc_feature 1..42: note = Description of Artificial Sequence: Synthetic oligonucleotide
  source 1..42: mol_type = other DNA

SEQ ID NO: 23432 - protein, 14 aa, synthetic construct
  REGION 1..14: note = Description of Artificial Sequence: Synthetic peptide
GDTAGVTYYYGMDV

SEQ ID NO: 23433 - DNA, 18 bp, synthetic construct
  misc_feature 1..18: note = Description of Artificial Sequence: Synthetic oligonucleotide
  source 1..18: mol_type = other DNA
ggttgggagttaaactac

SEQ ID NO: 23434 - protein, 6 aa, synthetic construct
  REGION 1..6: note = Description of Artificial Sequence: Synthetic peptide
GWELNY

SEQ ID NO: 23435 - DNA, 63 bp, synthetic construct
  misc_feature 1..63: note = Description of Artificial Sequence: Synthetic oligonucleotide
  source 1..63: mol_type = other DNA
gaccgtacgtattactctggttcggggagccccccctactactactactacggtatggacgtc

SEQ ID NO: 23436 - protein, 21 aa, synthetic construct
  REGION 1..21: note = Description of Artificial Sequence: Synthetic peptide
DRTYYSGSGSPPYYYYYGMDV

SEQ ID NO: 23437 - DNA, 18 bp, synthetic construct
  misc_feature 1..18: note = Description of Artificial Sequence: Synthetic oligonucleotide
  source 1..18: mol_type = other DNA
ggctgggagttaaactac

SEQ ID NO: 23438 - protein, 6 aa, synthetic construct
  REGION 1..6: note = Description of Artificial Sequence: Synthetic peptide
GWELNY

SEQ ID NO: 23439 - DNA, 18 bp, synthetic construct
  misc_feature 1..18: note = Description of Artificial Sequence: Synthetic oligonucleotide
  source 1..18: mol_type = other DNA
ggctgggaattaaactac

SEQ ID NO: 23440 - protein, 6 aa, synthetic construct
  REGION 1..6: note = Description of Artificial Sequence: Synthetic peptide
GWELNY

SEQ ID NO: 23441 - DNA, 42 bp, synthetic construct
  misc_feature 1..42: note = Description of Artificial Sequence: Synthetic oligonucleotide
  source 1..42: mol_type = other DNA
gatgaaaggcagtggctgccggccccctacggtatggacgtc

SEQ ID NO: 23442 - protein, 14 aa, synthetic construct
  REGION 1..14: note = Description of Artificial Sequence: Synthetic peptide
DERQWLPAPYGMDV

SEQ ID NO: 23443 - DNA, 48 bp, synthetic construct
  misc_feature 1..48: note = Description of Artificial Sequence: Synthetic oligonucleotide
  source 1..48: mol_type = other DNA
gataaggcagctgggaggaatgacttctactactacggtatggacgtc

SEQ ID NO: 23444 - protein, 16 aa, synthetic construct
  REGION 1..16: note = Description of Artificial Sequence: Synthetic peptide
DKAAGRNDFYYYGMDV

SEQ ID NO: 23445 - DNA, 60 bp, synthetic construct; identical to SEQ ID NO: 23429
  misc_feature 1..60: note = Description of Artificial Sequence: Synthetic oligonucleotide
  source 1..60: mol_type = other DNA

SEQ ID NO: 23446 - protein, 20 aa, synthetic construct
  REGION 1..20: note = Description of Artificial Sequence: Synthetic peptide
DQYNRNDGPPAYYYYYGLDV

SEQ ID NO: 23447 - DNA, 48 bp, synthetic construct; identical to SEQ ID NO: 23443
  misc_feature 1..48: note = Description of Artificial Sequence: Synthetic oligonucleotide
  source 1..48: mol_type = other DNA

SEQ ID NO: 23448 - protein, 16 aa, synthetic construct
  REGION 1..16: note = Description of Artificial Sequence: Synthetic peptide
DKAAGRNDFYYYGMDV

SEQ ID NO: 23449 - DNA, 33 bp, synthetic construct
  misc_feature 1..33: note = Description of Artificial Sequence: Synthetic oligonucleotide
  source 1..33: mol_type = other DNA
gatatccggaactactactacggtttggacgtc

SEQ ID NO: 23450 - protein, 11 aa, synthetic construct
  REGION 1..11: note = Description of Artificial Sequence: Synthetic peptide
DIRNYYYGLDV

SEQ ID NO: 23451 - DNA, 54 bp, synthetic construct
  misc_feature 1..54: note = Description of Artificial Sequence: Synthetic oligonucleotide
  source 1..54: mol_type = other DNA
gaccgtcattacgatttccacgttccctactattactattacggtatggacgtc

SEQ ID NO: 23452 - protein, 18 aa, synthetic construct
  REGION 1..18: note = Description of Artificial Sequence: Synthetic peptide
DRHYDFHVPYYYYYGMDV

SEQ ID NO: 23453 - DNA, 36 bp, synthetic construct
  misc_feature 1..36: note = Description of Artificial Sequence: Synthetic oligonucleotide
  source 1..36: mol_type = other DNA
gatagtaggaaggggttctactacggtctggacgtc

SEQ ID NO: 23454 - protein, 12 aa, synthetic construct
  REGION 1..12: note = Description of Artificial Sequence: Synthetic peptide
DSRKGFYYGLDV

SEQ ID NO: 23455 - DNA, 42 bp, synthetic construct
  misc_feature 1..42: note = Description of Artificial Sequence: Synthetic oligonucleotide
  source 1..42: mol_type = other DNA
ggggggcccccgttctctacggtgactatgtactttgactac

SEQ ID NO: 23456 - protein, 14 aa, synthetic construct
  REGION 1..14: note = Description of Artificial Sequence: Synthetic peptide
GGPPFSTVTMYFDY

SEQ ID NO: 23457 - DNA, 27 bp, synthetic construct
  misc_feature 1..27: note = Description of Artificial Sequence: Synthetic oligonucleotide
  source 1..27: mol_type = other DNA
aaagcagcagctgttgcttttgatatc

SEQ ID NO: 23458 - protein, 9 aa, synthetic construct
  REGION 1..9: note = Description of Artificial Sequence: Synthetic peptide
KAAAVAFDI

SEQ ID NO: 23459 - DNA, 63 bp, synthetic construct
  misc_feature 1..63: note = Description of Artificial Sequence: Synthetic oligonucleotide
  source 1..63: mol_type = other DNA
gggttttattactatggttcggggagtcatgtcccttaccactactactacggtttggacgtc

SEQ ID NO: 23460 - protein, 21 aa, synthetic construct
  REGION 1..21: note = Description of Artificial Sequence: Synthetic peptide
GFYYYGSGSHVPYHYYYGLDV

SEQ ID NO: 23461 - DNA, 42 bp, synthetic construct
  misc_feature 1..42: note = Description of Artificial Sequence: Synthetic oligonucleotide
  source 1..42: mol_type = other DNA
ggggggcccccgttttctacggtgactatgtacttcgactac

SEQ ID NO: 23462 - protein, 14 aa, synthetic construct
  REGION 1..14: note = Description of Artificial Sequence: Synthetic peptide
GGPPFSTVTMYFDY

SEQ ID NO: 23463 - DNA, 39 bp, synthetic construct; identical to SEQ ID NO: 22947
  misc_feature 1..39: note = Description of Artificial Sequence: Synthetic oligonucleotide
  source 1..39: mol_type = other DNA

SEQ ID NO: 23464 - protein, 13 aa, synthetic construct
  REGION 1..13: note = Description of Artificial Sequence: Synthetic peptide
HDFWSGYYKGMDV

SEQ ID NO: 23465 - DNA, 42 bp, synthetic construct
  misc_feature 1..42: note = Description of Artificial Sequence: Synthetic oligonucleotide
  source 1..42: mol_type = other DNA
gaccgctataactggaactacccctactggtacttcgatctc

SEQ ID NO: 23466 - protein, 14 aa, synthetic construct
  REGION 1..14: note = Description of Artificial Sequence: Synthetic peptide
DRYNWNYPYWYFDL

SEQ ID NO: 23467 - DNA, 39 bp, synthetic construct; identical to SEQ ID NO: 22947
  misc_feature 1..39: note = Description of Artificial Sequence: Synthetic oligonucleotide
  source 1..39: mol_type = other DNA

SEQ ID NO: 23468 - protein, 13 aa, synthetic construct
  REGION 1..13: note = Description of Artificial Sequence: Synthetic peptide
HDFWSGYYKGMDV

SEQ ID NO: 23469 - DNA, 63 bp, synthetic construct
  misc_feature 1..63: note = Description of Artificial Sequence: Synthetic oligonucleotide
  source 1..63: mol_type = other DNA
gatcgggtctattgtagtagttccagctgctcatattactactactactacggtatggacgtc

SEQ ID NO: 23470 - protein, 21 aa, synthetic construct
  REGION 1..21: note = Description of Artificial Sequence: Synthetic peptide
DRVYCSSSSCSYYYYYYGMDV

SEQ ID NO: 23471 - DNA, 30 bp, synthetic construct
  misc_feature 1..30: note = Description of Artificial Sequence: Synthetic oligonucleotide
  source 1..30: mol_type = other DNA
ggggactggaactacgagggttttgactac

SEQ ID NO: 23472 - protein, 10 aa, synthetic construct
  REGION 1..10: note = Description of Artificial Sequence: Synthetic peptide
GDWNYEGFDY

SEQ ID NO: 23473 - DNA, 39 bp, synthetic construct
  misc_feature 1..39: note = Description of Artificial Sequence: Synthetic oligonucleotide
  source 1..39: mol_type = other DNA
gatgggtatagcagtggctggttcaactggttcgacccc

SEQ ID NO: 23474 - protein, 13 aa, synthetic construct
  REGION 1..13: note = Description of Artificial Sequence: Synthetic peptide
DGYSSGWFNWFDP

SEQ ID NO: 23475 - DNA, 39 bp, synthetic construct; identical to SEQ ID NO: 22947
  misc_feature 1..39: note = Description of Artificial Sequence: Synthetic oligonucleotide
  source 1..39: mol_type = other DNA

SEQ ID NO: 23476 - protein, 13 aa, synthetic construct
  REGION 1..13: note = Description of Artificial Sequence: Synthetic peptide
HDFWSGYYKGMDV

SEQ ID NO: 23477 - DNA, 39 bp, synthetic construct; identical to SEQ ID NO: 22947
  misc_feature 1..39: note = Description of Artificial Sequence: Synthetic oligonucleotide
  source 1..39: mol_type = other DNA

SEQ ID NO: 23478 - protein, 13 aa, synthetic construct
  REGION 1..13: note = Description of Artificial Sequence: Synthetic peptide
HDFWSGYYKGMDV

SEQ ID NO: 23479 - DNA, 39 bp, synthetic construct; identical to SEQ ID NO: 22947
  misc_feature 1..39: note = Description of Artificial Sequence: Synthetic oligonucleotide
  source 1..39: mol_type = other DNA

SEQ ID NO: 23480 - protein, 13 aa, synthetic construct
  REGION 1..13: note = Description of Artificial Sequence: Synthetic peptide
HDFWSGYYKGMDV

SEQ ID NO: 23481 - DNA, 24 bp, synthetic construct
  misc_feature 1..24: note = Description of Artificial Sequence: Synthetic oligonucleotide
  source 1..24: mol_type = other DNA
gtcacaggtatagcagctccctac

SEQ ID NO: 23482 - protein, 8 aa, synthetic construct
  REGION 1..8: note = Description of Artificial Sequence: Synthetic peptide
VTGIAAPY

SEQ ID NO: 23483 - DNA, 24 bp, synthetic construct
  misc_feature 1..24: note = Description of Artificial Sequence: Synthetic oligonucleotide
  source 1..24: mol_type = other DNA
gcagtggctgtctcctttgactac

SEQ ID NO: 23484 - protein, 8 aa, synthetic construct
  REGION 1..8: note = Description of Artificial Sequence: Synthetic peptide
AVAVSFDY

SEQ ID NO: 23485 - DNA, 24 bp, synthetic construct
  misc_feature 1..24: note = Description of Artificial Sequence: Synthetic oligonucleotide
  source 1..24: mol_type = other DNA
gtcacaggtatagcagctccctac

SEQ ID NO: 23486 - protein, 8 aa, synthetic construct
  REGION 1..8: note = Description of Artificial Sequence: Synthetic peptide
VTGIAAPY

SEQ ID NO: 23487 - DNA, 24 bp, synthetic construct
  misc_feature 1..24: note = Description of Artificial Sequence: Synthetic oligonucleotide
  source 1..24: mol_type = other DNA
cttatagcagtggcctttgactcc

SEQ ID NO: 23488 - protein, 8 aa, synthetic construct
  REGION 1..8: note = Description of Artificial Sequence: Synthetic peptide
LIAVAFDS

SEQ ID NO: 23489 - DNA, 24 bp, synthetic construct
  misc_feature 1..24: note = Description of Artificial Sequence: Synthetic oligonucleotide
  source 1..24: mol_type = other DNA
acctatagtgggagttttgactac

SEQ ID NO: 23490 - protein, 8 aa, synthetic construct
  REGION 1..8: note = Description of Artificial Sequence: Synthetic peptide
TYSGSFDY

SEQ ID NO: 23491 - DNA, 45 bp, synthetic construct
  misc_feature 1..45: note = Description of Artificial Sequence: Synthetic oligonucleotide
  source 1..45: mol_type = other DNA
gatgactatggttcggggagtcccctatactacggtatggacgtc

SEQ ID NO: 23492 - protein, 15 aa, synthetic construct
  REGION 1..15: note = Description of Artificial Sequence: Synthetic peptide
DDYGSGSPLYYGMDV

SEQ ID NO: 23493 - DNA, 45 bp, synthetic construct
  misc_feature 1..45: note = Description of Artificial Sequence: Synthetic oligonucleotide
  source 1..45: mol_type = other DNA
ggggacctcccatacagctcgggctactactacggtatggacgtc

SEQ ID NO: 23494 - protein, 15 aa, synthetic construct
  REGION 1..15: note = Description of Artificial Sequence: Synthetic peptide
GDLPYSSGYYYGMDV

SEQ ID NO: 23495 - DNA, 66 bp, synthetic construct
  misc_feature 1..66: note = Description of Artificial Sequence: Synthetic oligonucleotide
  source 1..66: mol_type = other DNA
gatgagggacgtggatatggtggctacgagaggggatattactactactactacggtatggacgtc

SEQ ID NO: 23496 - protein, 22 aa, synthetic construct
  REGION 1..22: note = Description of Artificial Sequence: Synthetic peptide
DEGRGYGGYERGYYYYYYGMDV

SEQ ID NO: 23497 - DNA, 42 bp, synthetic construct
  misc_feature 1..42: note = Description of Artificial Sequence: Synthetic oligonucleotide
  source 1..42: mol_type = other DNA
ggggatacagctatggtcctctactactacggtatggacgtc

SEQ ID NO: 23498 - protein, 14 aa, synthetic construct
  REGION 1..14: note = Description of Artificial Sequence: Synthetic peptide
GDTAMVLYYYGMDV

SEQ ID NO: 23499 - DNA, 42 bp, synthetic construct
  misc_feature 1..42: note = Description of Artificial Sequence: Synthetic oligonucleotide
  source 1..42: mol_type = other DNA
gcggatacacctatggtcctttacttctacggtatggacgtc

SEQ ID NO: 23500 - protein, 14 aa, synthetic construct
  REGION 1..14: note = Description of Artificial Sequence: Synthetic peptide
ADTPMVLYFYGMDV

SEQ ID NO: 23501 - DNA, 60 bp, synthetic construct
  misc_feature 1..60: note = Description of Artificial Sequence: Synthetic oligonucleotide
  source 1..60: mol_type = other DNA
gatagggactattgtagtagttccagctgcccttactactactactacggtatggacgtc

SEQ ID NO: 23502 - protein, 20 aa, synthetic construct
  REGION 1..20: note = Description of Artificial Sequence: Synthetic peptide
DRDYCSSSSCPYYYYYGMDV

SEQ ID NO: 23503 - DNA, 24 bp, synthetic construct
  misc_feature 1..24: note = Description of Artificial Sequence: Synthetic oligonucleotide
  source 1..24: mol_type = other DNA
gtcacatatatagcagctccctac

SEQ ID NO: 23504 - protein, 8 aa, synthetic construct
  REGION 1..8: note = Description of Artificial Sequence: Synthetic peptide
VTYIAAPY

SEQ ID NO: 23505 - DNA, 42 bp, synthetic construct; identical to SEQ ID NO: 23499
  misc_feature 1..42: note = Description of Artificial Sequence: Synthetic oligonucleotide
  source 1..42: mol_type = other DNA

SEQ ID NO: 23506 - protein, 14 aa, synthetic construct
  REGION 1..14: note = Description of Artificial Sequence: Synthetic peptide
ADTPMVLYFYGMDV

SEQ ID NO: 23507 - DNA, 24 bp, synthetic construct
  misc_feature 1..24: note = Description of Artificial Sequence: Synthetic oligonucleotide
  source 1..24: mol_type = other DNA
cttatagcagtggcctttgactcc

SEQ ID NO: 23508 - protein, 8 aa, synthetic construct
  REGION 1..8: note = Description of Artificial Sequence: Synthetic peptide
LIAVAFDS

SEQ ID NO: 23509 - DNA, 24 bp, synthetic construct
  misc_feature 1..24: note = Description of Artificial Sequence: Synthetic oligonucleotide
  source 1..24: mol_type = other DNA
gtcacaggtatagcagctccctac

SEQ ID NO: 23510 - protein, 8 aa, synthetic construct
  REGION 1..8: note = Description of Artificial Sequence: Synthetic peptide
VTGIAAPY

SEQ ID NO: 23511 - DNA, 27 bp, synthetic construct
  misc_feature 1..27: note = Description of Artificial Sequence: Synthetic oligonucleotide
  source 1..27: mol_type = other DNA
aaagctacctgggtggcttttgatatc

SEQ ID NO: 23512 - protein, 9 aa, synthetic construct
  REGION 1..9: note = Description of Artificial Sequence: Synthetic peptide
KATWVAFDI

SEQ ID NO: 23513 - DNA, 27 bp, synthetic construct
  misc_feature 1..27: note = Description of Artificial Sequence: Synthetic oligonucleotide
  source 1..27: mol_type = other DNA
aaagctacctgggtggcttttgatatc

SEQ ID NO: 23514 - protein, 9 aa, synthetic construct
  REGION 1..9: note = Description of Artificial Sequence: Synthetic peptide
KATWVAFDI

SEQ ID NO: 23515 - DNA, 27 bp, synthetic construct
  misc_feature 1..27: note = Description of Artificial Sequence: Synthetic oligonucleotide
  source 1..27: mol_type = other DNA
aaagctacctgggtggcttttgatatc

SEQ ID NO: 23516 - protein, 9 aa, synthetic construct
  REGION 1..9: note = Description of Artificial Sequence: Synthetic peptide
KATWVAFDI

SEQ ID NO: 23517 - DNA, 27 bp, synthetic construct
  misc_feature 1..27: note = Description of Artificial Sequence: Synthetic oligonucleotide
  source 1..27: mol_type = other DNA
aaaactacctgggtggcttttgatatc

SEQ ID NO: 23518 - protein, 9 aa, synthetic construct
  REGION 1..9: note = Description of Artificial Sequence: Synthetic peptide
KTTWVAFDI

SEQ ID NO: 23519 - DNA, 27 bp, synthetic construct
  misc_feature 1..27: note = Description of Artificial Sequence: Synthetic oligonucleotide
  source 1..27: mol_type = other DNA
aaagctacctgggtggcttttgatatc

SEQ ID NO: 23520 - protein, 9 aa, synthetic construct
  REGION 1..9: note = Description of Artificial Sequence: Synthetic peptide
KATWVAFDI

SEQ ID NO: 23521 - DNA, 51 bp, synthetic construct
  misc_feature 1..51: note = Description of Artificial Sequence: Synthetic oligonucleotide
  source 1..51: mol_type = other DNA
gatcaccgttactatgatagtagtggttattactctgatgcttttgatatc

SEQ ID NO: 23522 - protein, 17 aa, synthetic construct
  REGION 1..17: note = Description of Artificial Sequence: Synthetic peptide
DHRYYDSSGYYSDAFDI

SEQ ID NO: 23523 - DNA, 51 bp, synthetic construct; identical to SEQ ID NO: 23521
  misc_feature 1..51: note = Description of Artificial Sequence: Synthetic oligonucleotide
  source 1..51: mol_type = other DNA

SEQ ID NO: 23524 - protein, 17 aa, synthetic construct
  REGION 1..17: note = Description of Artificial Sequence: Synthetic peptide
DHRYYDSSGYYSDAFDI

SEQ ID NO: 23525 - DNA, 45 bp, synthetic construct
  misc_feature 1..45: note = Description of Artificial Sequence: Synthetic oligonucleotide
  source 1..45: mol_type = other DNA
gcgtattattatggttcggggagttattataatgaatttgatatg

SEQ ID NO: 23526 - protein, 15 aa, synthetic construct
  REGION 1..15: note = Description of Artificial Sequence: Synthetic peptide
AYYYGSGSYYNEFDM

SEQ ID NO: 23527 - DNA, 27 bp, synthetic construct
  misc_feature 1..27: note = Description of Artificial Sequence: Synthetic oligonucleotide
  source 1..27: mol_type = other DNA
aaagctacctgggtggcttttgatatc

SEQ ID NO: 23528 - protein, 9 aa, synthetic construct
  REGION 1..9: note = Description of Artificial Sequence: Synthetic peptide
KATWVAFDI

SEQ ID NO: 23529 - DNA, 45 bp, synthetic construct
  misc_feature 1..45: note = Description of Artificial Sequence: Synthetic oligonucleotide
  source 1..45: mol_type = other DNA
acgtatttctatggttcggggagttattataacggctttgactac

SEQ ID NO: 23530 - protein, 15 aa, synthetic construct
  REGION 1..15: note = Description of Artificial Sequence: Synthetic peptide
TYFYGSGSYYNGFDY

SEQ ID NO: 23531 - DNA, 36 bp, synthetic construct
  misc_feature 1..36: note = Description of Artificial Sequence: Synthetic oligonucleotide
  source 1..36: mol_type = other DNA
gatagagggcatagagggttctacggtatggacgtc

SEQ ID NO: 23532 - protein, 12 aa, synthetic construct
  REGION 1..12: note = Description of Artificial Sequence: Synthetic peptide
DRGHRGFYGMDV

SEQ ID NO: 23533 - DNA, 45 bp, synthetic construct
  misc_feature 1..45: note = Description of Artificial Sequence: Synthetic oligonucleotide
  source 1..45: mol_type = other DNA
gcgtattattatggttcggggagttattataatgaatctgatatg

SEQ ID NO: 23534 - protein, 15 aa, synthetic construct
  REGION 1..15: note = Description of Artificial Sequence: Synthetic peptide
AYYYGSGSYYNESDM

SEQ ID NO: 23535 - DNA, 45 bp, synthetic construct
  misc_feature 1..45: note = Description of Artificial Sequence: Synthetic oligonucleotide
  source 1..45: mol_type = other DNA
acgtattactatgggtcggggagttattataacggctttgactac

SEQ ID NO: 23536 - protein, 15 aa, synthetic construct
  REGION 1..15: note = Description of Artificial Sequence: Synthetic peptide
TYYYGSGSYYNGFDY

SEQ ID NO: 23537 - DNA, 45 bp, synthetic construct
  misc_feature 1..45: note = Description of Artificial Sequence: Synthetic oligonucleotide
  source 1..45: mol_type = other DNA
gcgtattactatggttcggggacttatcataacgaatttgactac

SEQ ID NO: 23538 - protein, 15 aa, synthetic construct
  REGION 1..15: note = Description of Artificial Sequence: Synthetic peptide
AYYYGSGTYHNEFDY

SEQ ID NO: 23539 - DNA, 45 bp, synthetic construct
  misc_feature 1..45: note = Description of Artificial Sequence: Synthetic oligonucleotide
  source 1..45: mol_type = other DNA
acgtattactatggttcggggagttattataacggctttgactac

SEQ ID NO: 23540 - protein, 15 aa, synthetic construct
  REGION 1..15: note = Description of Artificial Sequence: Synthetic peptide
TYYYGSGSYYNGFDY

SEQ ID NO: 23541 - DNA, 27 bp, synthetic construct
  misc_feature 1..27: note = Description of Artificial Sequence: Synthetic oligonucleotide
  source 1..27: mol_type = other DNA
aaagctacctgggtggcttttgatatc

SEQ ID NO: 23542 - protein, 9 aa, synthetic construct
  REGION 1..9: note = Description of Artificial Sequence: Synthetic peptide
KATWVAFDI

SEQ ID NO: 23543 - DNA, 27 bp, synthetic construct
  misc_feature 1..27: note = Description of Artificial Sequence: Synthetic oligonucleotide
  source 1..27: mol_type = other DNA
gagactggaacctgggcttttgatatc

SEQ ID NO: 23544 - protein, 9 aa, synthetic construct
  REGION 1..9: note = Description of Artificial Sequence: Synthetic peptide
ETGTWAFDI

SEQ ID NO: 23545 - DNA, 27 bp, synthetic construct
  misc_feature 1..27: note = Description of Artificial Sequence: Synthetic oligonucleotide
  source 1..27: mol_type = other DNA
aaaactacctgggtggcttttgatatc

SEQ ID NO: 23546 - protein, 9 aa, synthetic construct
  REGION 1..9: note = Description of Artificial Sequence: Synthetic peptide
KTTWVAFDI

SEQ ID NO: 23547 - DNA, 24 bp, synthetic construct
  misc_feature 1..24: note = Description of Artificial Sequence: Synthetic oligonucleotide
  source 1..24: mol_type = other DNA
cttatagcagtggcctttgactac

SEQ ID NO: 23548 - protein, 8 aa, synthetic construct
  REGION 1..8: note = Description of Artificial Sequence: Synthetic peptide
LIAVAFDY

SEQ ID NO: 23549 - DNA, 60 bp, synthetic construct
  misc_feature 1..60: note = Description of Artificial Sequence: Synthetic oligonucleotide
  source 1..60: mol_type = other DNA
gatcgagattattgtagtggtaccagctgcccttattattactactacggtatggacgtc

SEQ ID NO: 23550 - protein, 20 aa, synthetic construct
  REGION 1..20: note = Description of Artificial Sequence: Synthetic peptide
DRDYCSGTSCPYYYYYGMDV

SEQ ID NO: 23551 - DNA, 24 bp, synthetic construct
  misc_feature 1..24: note = Description of Artificial Sequence: Synthetic oligonucleotide
  source 1..24: mol_type = other DNA
cttatagcagtggcctttgactac

SEQ ID NO: 23552 - protein, 8 aa, synthetic construct
  REGION 1..8: note = Description of Artificial Sequence: Synthetic peptide
LIAVAFDY

SEQ ID NO: 23553 - DNA, 27 bp, synthetic construct
  misc_feature 1..27: note = Description of Artificial Sequence: Synthetic oligonucleotide
  source 1..27: mol_type = other DNA
gattcaccagtggctggtactgactac

SEQ ID NO: 23554 - protein, 9 aa, synthetic construct
  REGION 1..9: note = Description of Artificial Sequence: Synthetic peptide
DSPVAGTDY

SEQ ID NO: 23555 - DNA, 60 bp, synthetic construct
  misc_feature 1..60: note = Description of Artificial Sequence: Synthetic oligonucleotide
  source 1..60: mol_type = other DNA
gatcgagattattgtagtagtaccagctgcccttattattactactacggtatggacgtc

SEQ ID NO: 23556 - protein, 20 aa, synthetic construct
  REGION 1..20: note = Description of Artificial Sequence: Synthetic peptide
DRDYCSSTSCPYYYYYGMDV

SEQ ID NO: 23557 - DNA, 60 bp, synthetic construct
  misc_feature 1..60: note = Description of Artificial Sequence: Synthetic oligonucleotide
  source 1..60: mol_type = other DNA
gatcgagattattgtagtagtaccagctgcccttactactactactacggtatggacgtc

SEQ ID NO: 23558 - protein, 20 aa, synthetic construct
  REGION 1..20: note = Description of Artificial Sequence: Synthetic peptide
DRDYCSSTSCPYYYYYGMDV

SEQ ID NO: 23559 - DNA, 27 bp, synthetic construct
  misc_feature 1..27: note = Description of Artificial Sequence: Synthetic oligonucleotide
  source 1..27: mol_type = other DNA
gatgcccccgacttcggtatggacgtc

SEQ ID NO: 23560 - protein, 9 aa, synthetic construct
  REGION 1..9: note = Description of Artificial Sequence: Synthetic peptide
DAPDFGMDV

SEQ ID NO: 23561 - DNA, 60 bp, synthetic construct; identical to SEQ ID NO: 23555
  misc_feature 1..60: note = Description of Artificial Sequence: Synthetic oligonucleotide
  source 1..60: mol_type = other DNA

SEQ ID NO: 23562 - protein, 20 aa, synthetic construct
  REGION 1..20: note = Description of Artificial Sequence: Synthetic peptide
DRDYCSSTSCPYYYYYGMDV

SEQ ID NO: 23563 - DNA, 60 bp, synthetic construct; identical to SEQ ID NO: 23555
  misc_feature 1..60: note = Description of Artificial Sequence: Synthetic oligonucleotide
  source 1..60: mol_type = other DNA

SEQ ID NO: 23564 - protein, 20 aa, synthetic construct
  REGION 1..20: note = Description of Artificial Sequence: Synthetic peptide
DRDYCSSTSCPYYYYYGMDV

SEQ ID NO: 23565 - DNA, 24 bp, synthetic construct
  misc_feature 1..24: note = Description of Artificial Sequence: Synthetic oligonucleotide
  source 1..24: mol_type = other DNA
cttatagcagtggcctgtgactac

SEQ ID NO: 23566 - protein, 8 aa, synthetic construct
  REGION 1..8: note = Description of Artificial Sequence: Synthetic peptide
LIAVACDY

SEQ ID NO: 23567 - DNA, 60 bp, synthetic construct; identical to SEQ ID NO: 23555
  misc_feature 1..60: note = Description of Artificial Sequence: Synthetic oligonucleotide
  source 1..60: mol_type = other DNA

SEQ ID NO: 23568 - protein, 20 aa, synthetic construct
  REGION 1..20: note = Description of Artificial Sequence: Synthetic peptide
DRDYCSSTSCPYYYYYGMDV

SEQ ID NO: 23569 - DNA, 36 bp, synthetic construct; identical to SEQ ID NO: 23291
  misc_feature 1..36: note = Description of Artificial Sequence: Synthetic oligonucleotide
  source 1..36: mol_type = other DNA

SEQ ID NO: 23570 - protein, 12 aa, synthetic construct
  REGION 1..12: note = Description of Artificial Sequence: Synthetic peptide
WRGNPTDYGMDV

SEQ ID NO: 23571 - DNA, 60 bp, synthetic construct; identical to SEQ ID NO: 23311
  misc_feature 1..60: note = Description of Artificial Sequence: Synthetic oligonucleotide
  source 1..60: mol_type = other DNA

SEQ ID NO: 23572 - protein, 20 aa, synthetic construct
  REGION 1..20: note = Description of Artificial Sequence: Synthetic peptide
DRDYCSGGSCPYYYYYGMDV

SEQ ID NO: 23573 - DNA, 63 bp, synthetic construct
  misc_feature 1..63: note = Description of Artificial Sequence: Synthetic oligonucleotide
  source 1..63: mol_type = other DNA
ggagattattactatgatagtagtggtcaccagccttactactactactacggtatggacgtc

SEQ ID NO: 23574 - protein, 21 aa, synthetic construct
  REGION 1..21: note = Description of Artificial Sequence: Synthetic peptide
GDYYYDSSGHQPYYYYYGMDV

SEQ ID NO: 23575 - DNA, 27 bp, synthetic construct
  misc_feature 1..27: note = Description of Artificial Sequence: Synthetic oligonucleotide
  source 1..27: mol_type = other DNA
aaatcgcagctcgtctactttgactac

SEQ ID NO: 23576 - protein, 9 aa, synthetic construct
  REGION 1..9: note = Description of Artificial Sequence: Synthetic peptide
KSQLVYFDY

SEQ ID NO: 23577 - DNA, 60 bp, synthetic construct
  misc_feature 1..60: note = Description of Artificial Sequence: Synthetic oligonucleotide
  source 1..60: mol_type = other DNA
gaaaggacgtattgtagtggtaccacctgcccctactactactactacggtctgggcgtc

SEQ ID NO: 23578 - protein, 20 aa, synthetic construct
  REGION 1..20: note = Description of Artificial Sequence: Synthetic peptide
ERTYCSGTTCPYYYYYGLGV

SEQ ID NO: 23579 - DNA, 24 bp, synthetic construct
  misc_feature 1..24: note = Description of Artificial Sequence: Synthetic oligonucleotide
  source 1..24: mol_type = other DNA
gagaatttttggagtggtgactac

SEQ ID NO: 23580 - protein, 8 aa, synthetic construct
  REGION 1..8: note = Description of Artificial Sequence: Synthetic peptide
ENFWSGDY

SEQ ID NO: 23581 - DNA, 42 bp, synthetic construct; identical to SEQ ID NO: 23455
  misc_feature 1..42: note = Description of Artificial Sequence: Synthetic oligonucleotide
  source 1..42: mol_type = other DNA

SEQ ID NO: 23582 - protein, 14 aa, synthetic construct
  REGION 1..14: note = Description of Artificial Sequence: Synthetic peptide
GGPPFSTVTMYFDY

SEQ ID NO: 23583 - DNA, 42 bp, synthetic construct; identical to SEQ ID NO: 23455
  misc_feature 1..42: note = Description of Artificial Sequence: Synthetic oligonucleotide
  source 1..42: mol_type = other DNA

SEQ ID NO: 23584 - protein, 14 aa, synthetic construct
  REGION 1..14: note = Description of Artificial Sequence: Synthetic peptide
GGPPFSTVTMYFDY

SEQ ID NO: 23585 - DNA, 24 bp, synthetic construct
  misc_feature 1..24: note = Description of Artificial Sequence: Synthetic oligonucleotide
  source 1..24: mol_type = other DNA
attatagcagtggccttccagcat

SEQ ID NO: 23586 - protein, 8 aa, synthetic construct
  REGION 1..8: note = Description of Artificial Sequence: Synthetic peptide
IIAVAFQH

SEQ ID NO: 23587 - DNA, 27 bp, synthetic construct
  misc_feature 1..27: note = Description of Artificial Sequence: Synthetic oligonucleotide
  source 1..27: mol_type = other DNA
aaagcagcagctgttgcttttgatatc

SEQ ID NO: 23588 - protein, 9 aa, synthetic construct
  REGION 1..9: note = Description of Artificial Sequence: Synthetic peptide
KAAAVAFDI

SEQ ID NO: 23589 - DNA, 27 bp, synthetic construct
  misc_feature 1..27: note = Description of Artificial Sequence: Synthetic oligonucleotide
  source 1..27: mol_type = other DNA
gattccccactacgaggctttgactac

SEQ ID NO: 23590 - protein, 9 aa, synthetic construct
  REGION 1..9: note = Description of Artificial Sequence: Synthetic peptide
DSPLRGFDY

SEQ ID NO: 23591 - DNA, 24 bp, synthetic construct
  misc_feature 1..24: note = Description of Artificial Sequence: Synthetic oligonucleotide
  source 1..24: mol_type = other DNA
acgtatagcgggggtatggacgtc

SEQ ID NO: 23592 - protein, 8 aa, synthetic construct
  REGION 1..8: note = Description of Artificial Sequence: Synthetic peptide
TYSGGMDV

SEQ ID NO: 23593 - DNA, 24 bp, synthetic construct
  misc_feature 1..24: note = Description of Artificial Sequence: Synthetic oligonucleotide
  source 1..24: mol_type = other DNA
gatccgggtggcctctttgactac

SEQ ID NO: 23594 - protein, 8 aa, synthetic construct
  REGION 1..8: note = Description of Artificial Sequence: Synthetic peptide
DPGGLFDY

SEQ ID NO: 23595 - DNA, 48 bp, synthetic construct
  misc_feature 1..48: note = Description of Artificial Sequence: Synthetic oligonucleotide
  source 1..48: mol_type = other DNA
gataactggaactacggcgatcactactactacttcggtatggacgtc

SEQ ID NO: 23596 - protein, 16 aa, synthetic construct
  REGION 1..16: note = Description of Artificial Sequence: Synthetic peptide
DNWNYGDHYYYFGMDV

SEQ ID NO: 23597 - DNA, 30 bp, synthetic construct
  misc_feature 1..30: note = Description of Artificial Sequence: Synthetic oligonucleotide
  source 1..30: mol_type = other DNA
tggtactactactactacggtatggacgtc

SEQ ID NO: 23598 - protein, 10 aa, synthetic construct
  REGION 1..10: note = Description of Artificial Sequence: Synthetic peptide
WYYYYYGMDV

SEQ ID NO: 23599 - DNA, 51 bp, synthetic construct
  misc_feature 1..51: note = Description of Artificial Sequence: Synthetic oligonucleotide
  source 1..51: mol_type = other DNA
gatctggataagaggaactttccttattactactactacggtatggacgtc

SEQ ID NO: 23600 - protein, 17 aa, synthetic construct
  REGION 1..17: note = Description of Artificial Sequence: Synthetic peptide
DLDKRNFPYYYYYGMDV

SEQ ID NO: 23601 - DNA, 48 bp, synthetic construct
  misc_feature 1..48: note = Description of Artificial Sequence: Synthetic oligonucleotide
  source 1..48: mol_type = other DNA
gataactggaactacggcgattactactactactacggtatggacgtc

SEQ ID NO: 23602 - protein, 16 aa, synthetic construct
  REGION 1..16: note = Description of Artificial Sequence: Synthetic peptide
DNWNYGDYYYYYGMDV

SEQ ID NO: 23603 - DNA, 45 bp, synthetic construct; identical to SEQ ID NO: 20187
  misc_feature 1..45: note = Description of Artificial Sequence: Synthetic oligonucleotide
  source 1..45: mol_type = other DNA

SEQ ID NO: 23604 - protein, 15 aa, synthetic construct
  REGION 1..15: note = Description of Artificial Sequence: Synthetic peptide
DRAVAGNYFYYGMDV

SEQ ID NO: 23605 - DNA, 24 bp, synthetic construct
  misc_feature 1..24: note = Description of Artificial Sequence: Synthetic oligonucleotide
  source 1..24: mol_type = other DNA
acgtatagcgggggtatggacgtc

SEQ ID NO: 23606 - protein, 8 aa, synthetic construct
  REGION 1..8: note = Description of Artificial Sequence: Synthetic peptide
TYSGGMDV

SEQ ID NO: 23607 - DNA, 30 bp, synthetic construct; identical to SEQ ID NO: 23597
  misc_feature 1..30: note = Description of Artificial Sequence: Synthetic oligonucleotide
  source 1..30: mol_type = other DNA

SEQ ID NO: 23608 - protein, 10 aa, synthetic construct
  REGION 1..10: note = Description of Artificial Sequence: Synthetic peptide
WYYYYYGMDV

SEQ ID NO: 23609 - DNA, 24 bp, synthetic construct
  misc_feature 1..24: note = Description of Artificial Sequence: Synthetic oligonucleotide
  source 1..24: mol_type = other DNA
gatccgggtggcctctttgactac

SEQ ID NO: 23610 - protein, 8 aa, synthetic construct
  REGION 1..8: note = Description of Artificial Sequence: Synthetic peptide
DPGGLFDY

SEQ ID NO: 23611 - DNA, 48 bp, synthetic construct
  misc_feature 1..48: note = Description of Artificial Sequence: Synthetic oligonucleotide
  source 1..48: mol_type = other DNA
gataactggaactacggcgatcactactactattacggaatggacgtc

SEQ ID NO: 23612 - protein, 16 aa, synthetic construct
  REGION 1..16: note = Description of Artificial Sequence: Synthetic peptide
DNWNYGDHYYYYGMDV

SEQ ID NO: 23613 - DNA, 24 bp, synthetic construct
  misc_feature 1..24: note = Description of Artificial Sequence: Synthetic oligonucleotide
  source 1..24: mol_type = other DNA
acgtatagcgggggtatggacgtc

SEQ ID NO: 23614 - protein, 8 aa, synthetic construct
  REGION 1..8: note = Description of Artificial Sequence: Synthetic peptide
TYSGGMDV

SEQ ID NO: 23615 - DNA, 27 bp, synthetic construct
  misc_feature 1..27: note = Description of Artificial Sequence: Synthetic oligonucleotide
  source 1..27: mol_type = other DNA
gatagcagctcgcggggtatggacgtc

SEQ ID NO: 23616 - protein, 9 aa, synthetic construct
  REGION 1..9: note = Description of Artificial Sequence: Synthetic peptide
DSSSRGMDV

SEQ ID NO: 23617 - DNA, 30 bp, synthetic construct
  misc_feature 1..30: note = Description of Artificial Sequence: Synthetic oligonucleotide
  source 1..30: mol_type = other DNA
aagggagtgggaaccatccactttgactac

SEQ ID NO: 23618 - protein, 10 aa, synthetic construct
  REGION 1..10: note = Description of Artificial Sequence: Synthetic peptide
KGVGTIHFDY

SEQ ID NO: 23619 - DNA, 27 bp, synthetic construct
  misc_feature 1..27: note = Description of Artificial Sequence: Synthetic oligonucleotide
  source 1..27: mol_type = other DNA
gatagcagctcgcggggtatggacgtc

SEQ ID NO: 23620 - protein, 9 aa, synthetic construct
  REGION 1..9: note = Description of Artificial Sequence: Synthetic peptide
DSSSRGMDV

SEQ ID NO: 23621 - DNA, 48 bp, synthetic construct
  misc_feature 1..48: note = Description of Artificial Sequence: Synthetic oligonucleotide
  source 1..48: mol_type = other DNA
gataactggaactacggcgatcactactactactacggtatggacgtc

SEQ ID NO: 23622 - protein, 16 aa, synthetic construct
  REGION 1..16: note = Description of Artificial Sequence: Synthetic peptide
DNWNYGDHYYYYGMDV

SEQ ID NO: 23623 - DNA, 48 bp, synthetic construct
  misc_feature 1..48: note = Description of Artificial Sequence: Synthetic oligonucleotide
  source 1..48: mol_type = other DNA
gataactggaactacggcgatcactactactattacggtatggacgtc

SEQ ID NO: 23624 - protein, 16 aa, synthetic construct
  REGION 1..16: note = Description of Artificial Sequence: Synthetic peptide
DNWNYGDHYYYYGMDV

SEQ ID NO: 23625 - DNA, 39 bp, synthetic construct
  misc_feature 1..39: note = Description of Artificial Sequence: Synthetic oligonucleotide
  source 1..39: mol_type = other DNA
gaagggtatagcagtggcttttacagggggtttgacaac

SEQ ID NO: 23626 - protein, 13 aa, synthetic construct
  REGION 1..13: note = Description of Artificial Sequence: Synthetic peptide
EGYSSGFYRGFDN

SEQ ID NO: 23627 - DNA, 54 bp, synthetic construct
  misc_feature 1..54: note = Description of Artificial Sequence: Synthetic oligonucleotide
  source 1..54: mol_type = other DNA
gatcgggtgggaggtactagtcctccttactactactactacggtatggacgtc

SEQ ID NO: 23628 - protein, 18 aa, synthetic construct
  REGION 1..18: note = Description of Artificial Sequence: Synthetic peptide
DRVGGTSPPYYYYYGMDV

SEQ ID NO: 23629 - DNA, 39 bp, synthetic construct
  misc_feature 1..39: note = Description of Artificial Sequence: Synthetic oligonucleotide
  source 1..39: mol_type = other DNA
gatttctatgatagtggtggagaagggtggttcgacccc

SEQ ID NO: 23630 - protein, 13 aa, synthetic construct
  REGION 1..13: note = Description of Artificial Sequence: Synthetic peptide
DFYDSGGEGWFDP

SEQ ID NO: 23631 - DNA, 51 bp, synthetic construct; identical to SEQ ID NO: 23599
  misc_feature 1..51: note = Description of Artificial Sequence: Synthetic oligonucleotide
  source 1..51: mol_type = other DNA

SEQ ID NO: 23632 - protein, 17 aa, synthetic construct
  REGION 1..17: note = Description of Artificial Sequence: Synthetic peptide
DLDKRNFPYYYYYGMDV

SEQ ID NO: 23633 - DNA, 27 bp, synthetic construct
  misc_feature 1..27: note = Description of Artificial Sequence: Synthetic oligonucleotide
  source 1..27: mol_type = other DNA
gacgatcccctctacggaatggacgtc

SEQ ID NO: 23634 - protein, 9 aa, synthetic construct
  REGION 1..9: note = Description of Artificial Sequence: Synthetic peptide
DDPLYGMDV

SEQ ID NO: 23635 - DNA, 18 bp, synthetic construct
  misc_feature 1..18: note = Description of Artificial Sequence: Synthetic oligonucleotide
  source 1..18: mol_type = other DNA
gggtgggagctaaactac

SEQ ID NO: 23636 - protein, 6 aa, synthetic construct
  REGION 1..6: note = Description of Artificial Sequence: Synthetic peptide
GWELNY

SEQ ID NO: 23637 - DNA, 27 bp, synthetic construct
  misc_feature 1..27: note = Description of Artificial Sequence: Synthetic oligonucleotide
  source 1..27: mol_type = other DNA
gactccccggtgacaggatttgactat

SEQ ID NO: 23638 - protein, 9 aa, synthetic construct
  REGION 1..9: note = Description of Artificial Sequence: Synthetic peptide
DSPVTGFDY

SEQ ID NO: 23639 - DNA, 27 bp, synthetic construct
  misc_feature 1..27: note = Description of Artificial Sequence: Synthetic oligonucleotide
  source 1..27: mol_type = other DNA
gatagctccctctacggtatggacgtc

SEQ ID NO: 23640 - protein, 9 aa, synthetic construct
  REGION 1..9: note = Description of Artificial Sequence: Synthetic peptide
DSSLYGMDV

SEQ ID NO: 23641 - DNA, 18 bp, synthetic construct
  misc_feature 1..18: note = Description of Artificial Sequence: Synthetic oligonucleotide
  source 1..18: mol_type = other DNA
ggatgggagctaaactac

SEQ ID NO: 23642 - protein, 6 aa, synthetic construct
  REGION 1..6: note = Description of Artificial Sequence: Synthetic peptide
GWELNY

SEQ ID NO: 23643 - DNA, 24 bp, synthetic construct
  misc_feature 1..24: note = Description of Artificial Sequence: Synthetic oligonucleotide
  source 1..24: mol_type = other DNA
gatcccggtggtatctttgactac

SEQ ID NO: 23644 - protein, 8 aa, synthetic construct
  REGION 1..8: note = Description of Artificial Sequence: Synthetic peptide
DPGGIFDY

SEQ ID NO: 23645 - DNA, 45 bp, synthetic construct; identical to SEQ ID NO: 20187
  misc_feature 1..45: note = Description of Artificial Sequence: Synthetic oligonucleotide
  source 1..45: mol_type = other DNA

SEQ ID NO: 23646 - protein, 15 aa, synthetic construct
  REGION 1..15: note = Description of Artificial Sequence: Synthetic peptide
DRAVAGNYFYYGMDV

SEQ ID NO: 23647 - DNA, 27 bp, synthetic construct
  misc_feature 1..27: note = Description of Artificial Sequence: Synthetic oligonucleotide
  source 1..27: mol_type = other DNA
gatcactccctctacggtatggacgtc

SEQ ID NO: 23648 - protein, 9 aa, synthetic construct
  REGION 1..9: note = Description of Artificial Sequence: Synthetic peptide
DHSLYGMDV

SEQ ID NO: 23649 - DNA, 51 bp, synthetic construct; identical to SEQ ID NO: 23599
  misc_feature 1..51: note = Description of Artificial Sequence: Synthetic oligonucleotide
  source 1..51: mol_type = other DNA

SEQ ID NO: 23650 - protein, 17 aa, synthetic construct
  REGION 1..17: note = Description of Artificial Sequence: Synthetic peptide
DLDKRNFPYYYYYGMDV

SEQ ID NO: 23651 - DNA, 27 bp, synthetic construct
  misc_feature 1..27: note = Description of Artificial Sequence: Synthetic oligonucleotide
  source 1..27: mol_type = other DNA
gatggggctcggcacggtatggacgtc

SEQ ID NO: 23652 - protein, 9 aa, synthetic construct
  REGION 1..9: note = Description of Artificial Sequence: Synthetic peptide
DGARHGMDV

SEQ ID NO: 23653 - DNA, 51 bp, synthetic construct; identical to SEQ ID NO: 23599
  misc_feature 1..51: note = Description of Artificial Sequence: Synthetic oligonucleotide
  source 1..51: mol_type = other DNA

SEQ ID NO: 23654 - protein, 17 aa, synthetic construct
  REGION 1..17: note = Description of Artificial Sequence: Synthetic peptide
DLDKRNFPYYYYYGMDV

SEQ ID NO: 23655 - DNA, 30 bp, synthetic construct
  misc_feature 1..30: note = Description of Artificial Sequence: Synthetic oligonucleotide
  source 1..30: mol_type = other DNA
gatagtcgatattttgactggtttgactac

SEQ ID NO: 23656 - protein, 10 aa, synthetic construct
  REGION 1..10: note = Description of Artificial Sequence: Synthetic peptide
DSRYFDWFDY

SEQ ID NO: 23657 - DNA, 18 bp, synthetic construct
  misc_feature 1..18: note = Description of Artificial Sequence: Synthetic oligonucleotide
  source 1..18: mol_type = other DNA
gggtgggagctaaacaac

SEQ ID NO: 23658 - protein, 6 aa, synthetic construct
  REGION 1..6: note = Description of Artificial Sequence: Synthetic peptide
GWELNN

SEQ ID NO: 23659 - DNA, 45 bp, synthetic construct
  misc_feature 1..45: note = Description of Artificial Sequence: Synthetic oligonucleotide
  source 1..45: mol_type = other DNA
gcctattactatggttcggggacttattataacgagttcgactac

SEQ ID NO: 23660 - protein, 15 aa, synthetic construct
  REGION 1..15: note = Description of Artificial Sequence: Synthetic peptide
AYYYGSGTYYNEFDY

SEQ ID NO: 23661 - DNA, 45 bp, synthetic construct; identical to SEQ ID NO: 20187
  misc_feature 1..45: note = Description of Artificial Sequence: Synthetic oligonucleotide
  source 1..45: mol_type = other DNA

SEQ ID NO: 23662 - protein, 15 aa, synthetic construct
  REGION 1..15: note = Description of Artificial Sequence: Synthetic peptide
DRAVAGNYFYYGMDV

SEQ ID NO: 23663 - DNA, 39 bp, synthetic construct
  misc_feature 1..39: note = Description of Artificial Sequence: Synthetic oligonucleotide
  source 1..39: mol_type = other DNA
gattactatgatactagtggagaagggtggttcgacccc

SEQ ID NO: 23664 - protein, 13 aa, synthetic construct
  REGION 1..13: note = Description of Artificial Sequence: Synthetic peptide
DYYDTSGEGWFDP

SEQ ID NO: 23665 - DNA, 45 bp, synthetic construct
  misc_feature 1..45: note = Description of Artificial Sequence: Synthetic oligonucleotide
  source 1..45: mol_type = other DNA
gagatagcagtggctgggaactacttctactacggtatgggcgtc

SEQ ID NO: 23666 - protein, 15 aa, synthetic construct
  REGION 1..15: note = Description of Artificial Sequence: Synthetic peptide
EIAVAGNYFYYGMGV

SEQ ID NO: 23667 - DNA, 48 bp, synthetic construct
  misc_feature 1..48: note = Description of Artificial Sequence: Synthetic oligonucleotide
  source 1..48: mol_type = other DNA
gaaagggggagtagccacagatggggggactactacggaatggacgtc

SEQ ID NO: 23668 - protein, 16 aa, synthetic construct
  REGION 1..16: note = Description of Artificial Sequence: Synthetic peptide
ERGSSHRWGDYYGMDV

SEQ ID NO: 23669 - DNA, 27 bp, synthetic construct
  misc_feature 1..27: note = Description of Artificial Sequence: Synthetic oligonucleotide
  source 1..27: mol_type = other DNA
gacgatcccctctacggaatggacgtc

SEQ ID NO: 23670 - protein, 9 aa, synthetic construct
  REGION 1..9: note = Description of Artificial Sequence: Synthetic peptide
DDPLYGMDV

SEQ ID NO: 23671 - DNA, 39 bp, synthetic construct
  misc_feature 1..39: note = Description of Artificial Sequence: Synthetic oligonucleotide
  source 1..39: mol_type = other DNA
gattactatgatagtagtggagaagggtggttcgacccc

SEQ ID NO: 23672 - protein, 13 aa, synthetic construct
  REGION 1..13: note = Description of Artificial Sequence: Synthetic peptide
DYYDSSGEGWFDP

SEQ ID NO: 23673 - DNA, 39 bp, synthetic construct
  misc_feature 1..39: note = Description of Artificial Sequence: Synthetic oligonucleotide
  source 1..39: mol_type = other DNA
gaagggtttagcagtggcttttacagggggtttgacaac

SEQ ID NO: 23674 - protein, 13 aa, synthetic construct
  REGION 1..13: note = Description of Artificial Sequence: Synthetic peptide
EGFSSGFYRGFDN

SEQ ID NO: 23675 - DNA, 27 bp, synthetic construct
  misc_feature 1..27: note = Description of Artificial Sequence: Synthetic oligonucleotide
  source 1..27: mol_type = other DNA
gatagcagctcgcggggtatggacgtc

SEQ ID NO: 23676 - protein, 9 aa, synthetic construct
  REGION 1..9: note = Description of Artificial Sequence: Synthetic peptide
DSSSRGMDV

SEQ ID NO: 23677 - DNA, 39 bp, synthetic construct
  misc_feature 1..39: note = Description of Artificial Sequence: Synthetic oligonucleotide
  source 1..39: mol_type = other DNA
gaagggtatagcagtggcttttacaggggatttgccaac

SEQ ID NO: 23678 - protein, 13 aa, synthetic construct
  REGION 1..13: note = Description of Artificial Sequence: Synthetic peptide
EGYSSGFYRGFAN

SEQ ID NO: 23679 - DNA, 48 bp, synthetic construct; identical to SEQ ID NO: 23667
  misc_feature 1..48: note = Description of Artificial Sequence: Synthetic oligonucleotide
  source 1..48: mol_type = other DNA

SEQ ID NO: 23680 - protein, 16 aa, synthetic construct
  REGION 1..16: note = Description of Artificial Sequence: Synthetic peptide
ERGSSHRWGDYYGMDV

SEQ ID NO: 23681 - DNA, 27 bp, synthetic construct
  misc_feature 1..27: note = Description of Artificial Sequence: Synthetic oligonucleotide
  source 1..27: mol_type = other DNA
gatggagcagctctgggtatggacgtc

SEQ ID NO: 23682 - protein, 9 aa, synthetic construct
  REGION 1..9: note = Description of Artificial Sequence: Synthetic peptide
DGAALGMDV

SEQ ID NO: 23683 - DNA, 30 bp, synthetic construct; identical to SEQ ID NO: 23617
  misc_feature 1..30: note = Description of Artificial Sequence: Synthetic oligonucleotide
  source 1..30: mol_type = other DNA

SEQ ID NO: 23684 - protein, 10 aa, synthetic construct
  REGION 1..10: note = Description of Artificial Sequence: Synthetic peptide
KGVGTIHFDY

SEQ ID NO: 23685 - DNA, 27 bp, synthetic construct
  misc_feature 1..27: note = Description of Artificial Sequence: Synthetic oligonucleotide
  source 1..27: mol_type = other DNA
gatggagcagctctgggtatggacgtc

SEQ ID NO: 23686 - protein, 9 aa, synthetic construct
  REGION 1..9: note = Description of Artificial Sequence: Synthetic peptide
DGAALGMDV

SEQ ID NO: 23687 - DNA, 27 bp, synthetic construct
  misc_feature 1..27: note = Description of Artificial Sequence: Synthetic oligonucleotide
  source 1..27: mol_type = other DNA
gatgcagcagcccacggcatggacgtc

SEQ ID NO: 23688 - protein, 9 aa, synthetic construct
  REGION 1..9: note = Description of Artificial Sequence: Synthetic peptide
DAAAHGMDV

SEQ ID NO: 23689 - DNA, 24 bp, synthetic construct
  misc_feature 1..24: note = Description of Artificial Sequence: Synthetic oligonucleotide
  source 1..24: mol_type = other DNA
gatcctggggggctctttgactac

SEQ ID NO: 23690 - protein, 8 aa, synthetic construct
  REGION 1..8: note = Description of Artificial Sequence: Synthetic peptide
DPGGLFDY

SEQ ID NO: 23691 - DNA, 27 bp, synthetic construct
  misc_feature 1..27: note = Description of Artificial Sequence: Synthetic oligonucleotide
  source 1..27: mol_type = other DNA
gaaagtgggagctatgctctttatatc

SEQ ID NO: 23692 - protein, 9 aa, synthetic construct
  REGION 1..9: note = Description of Artificial Sequence: Synthetic peptide
ESGSYALYI

SEQ ID NO: 23693 - DNA, 24 bp, synthetic construct
  misc_feature 1..24: note = Description of Artificial Sequence: Synthetic oligonucleotide
  source 1..24: mol_type = other DNA
gatcctgggggcctctttgactac

SEQ ID NO: 23694 - protein, 8 aa, synthetic construct
  REGION 1..8: note = Description of Artificial Sequence: Synthetic peptide
DPGGLFDY

SEQ ID NO: 23695 - DNA, 27 bp, synthetic construct
  misc_feature 1..27: note = Description of Artificial Sequence: Synthetic oligonucleotide
  source 1..27: mol_type = other DNA
gaaagtgggagctatgctctttatatc

SEQ ID NO: 23696 - protein, 9 aa, synthetic construct
  REGION 1..9: note = Description of Artificial Sequence: Synthetic peptide
ESGSYALYI

SEQ ID NO: 23697 - DNA, 27 bp, synthetic construct
  misc_feature 1..27: note = Description of Artificial Sequence: Synthetic oligonucleotide
  source 1..27: mol_type = other DNA
gagggtgggagctaccaccttgactac

SEQ ID NO: 23698 - protein, 9 aa, synthetic construct
  REGION 1..9: note = Description of Artificial Sequence: Synthetic peptide
EGGSYHLDY

SEQ ID NO: 23699 - DNA, 27 bp, synthetic construct
  misc_feature 1..27: note = Description of Artificial Sequence: Synthetic oligonucleotide
  source 1..27: mol_type = other DNA
gatgatgggagctactactttgactac

SEQ ID NO: 23700 - protein, 9 aa, synthetic construct
  REGION 1..9: note = Description of Artificial Sequence: Synthetic peptide
DDGSYYFDY

SEQ ID NO: 23701 - DNA, 27 bp, synthetic construct
  misc_feature 1..27: note = Description of Artificial Sequence: Synthetic oligonucleotide
  source 1..27: mol_type = other DNA
gagggtgggagctaccaccttgactac

SEQ ID NO: 23702 - protein, 9 aa, synthetic construct
  REGION 1..9: note = Description of Artificial Sequence: Synthetic peptide
EGGSYHLDY

SEQ ID NO: 23703 - DNA, 27 bp, synthetic construct
  misc_feature 1..27: note = Description of Artificial Sequence: Synthetic oligonucleotide
  source 1..27: mol_type = other DNA
gatgagccattgaccggtatggacgtc

SEQ ID NO: 23704 - protein, 9 aa, synthetic construct
  REGION 1..9: note = Description of Artificial Sequence: Synthetic peptide
DEPLTGMDV

SEQ ID NO: 23705 - DNA, 21 bp, synthetic construct
  misc_feature 1..21: note = Description of Artificial Sequence: Synthetic oligonucleotide
  source 1..21: mol_type = other DNA
gggtatgactcgttcgccccc

SEQ ID NO: 23706 - protein, 7 aa, synthetic construct
  REGION 1..7: note = Description of Artificial Sequence: Synthetic peptide
GYDSFAP

SEQ ID NO: 23707 - DNA, 30 bp, synthetic construct
  misc_feature 1..30: note = Description of Artificial Sequence: Synthetic oligonucleotide
  source 1..30: mol_type = other DNA
ggggactggaaccccgagggtttggacgtc

SEQ ID NO: 23708 - protein, 10 aa, synthetic construct
  REGION 1..10: note = Description of Artificial Sequence: Synthetic peptide
GDWNPEGLDV

SEQ ID NO: 23709 - DNA, 30 bp, synthetic construct
  misc_feature 1..30: note = Description of Artificial Sequence: Synthetic oligonucleotide
  source 1..30: mol_type = other DNA
ggggactggaaccccgagggtatggacgtc

SEQ ID NO: 23710 - protein, 10 aa, synthetic construct
  REGION 1..10: note = Description of Artificial Sequence: Synthetic peptide
GDWNPEGMDV

SEQ ID NO: 23711 - DNA, 30 bp, synthetic construct; identical to SEQ ID NO: 23707
  misc_feature 1..30: note = Description of Artificial Sequence: Synthetic oligonucleotide
  source 1..30: mol_type = other DNA

SEQ ID NO: 23712 - protein, 10 aa, synthetic construct
  REGION 1..10: note = Description of Artificial Sequence: Synthetic peptide
GDWNPEGLDV

SEQ ID NO: 23713 - DNA, 27 bp, synthetic construct
  misc_feature 1..27: note = Description of Artificial Sequence: Synthetic oligonucleotide
  source 1..27: mol_type = other DNA
gatcctgggagctacgggttcgacccc

SEQ ID NO: 23714 - protein, 9 aa, synthetic construct
  REGION 1..9: note = Description of Artificial Sequence: Synthetic peptide
DPGSYGFDP

SEQ ID NO: 23715 - DNA, 33 bp, synthetic construct
  misc_feature 1..33: note = Description of Artificial Sequence: Synthetic oligonucleotide
  source 1..33: mol_type = other DNA
ggcctctctgtctactactacggtatgggcgtc

SEQ ID NO: 23716 - protein, 11 aa, synthetic construct
  REGION 1..11: note = Description of Artificial Sequence: Synthetic peptide
GLSVYYYGMGV

SEQ ID NO: 23717 - DNA, 30 bp, synthetic construct; identical to SEQ ID NO: 23707
  misc_feature 1..30: note = Description of Artificial Sequence: Synthetic oligonucleotide
  source 1..30: mol_type = other DNA

SEQ ID NO: 23718 - protein, 10 aa, synthetic construct
  REGION 1..10: note = Description of Artificial Sequence: Synthetic peptide
GDWNPEGLDV

SEQ ID NO: 23719 - DNA, 27 bp, synthetic construct
  misc_feature 1..27: note = Description of Artificial Sequence: Synthetic oligonucleotide
  source 1..27: mol_type = other DNA
gatgggccattgagcggtatggacgtc

SEQ ID NO: 23720 - protein, 9 aa, synthetic construct
  REGION 1..9: note = Description of Artificial Sequence: Synthetic peptide
DGPLSGMDV

SEQ ID NO: 23721 - DNA, 27 bp, synthetic construct
  misc_feature 1..27: note = Description of Artificial Sequence: Synthetic oligonucleotide
  source 1..27: mol_type = other DNA
gattcagcagtgtacaatatggacgtc

SEQ ID NO: 23722 - protein, 9 aa, synthetic construct
  REGION 1..9: note = Description of Artificial Sequence: Synthetic peptide
DSAVYNMDV

SEQ ID NO: 23723 - DNA, 27 bp, synthetic construct
  misc_feature 1..27: note = Description of Artificial Sequence: Synthetic oligonucleotide
  source 1..27: mol_type = other DNA
gattcagcagtgtacggtatggacgtc

SEQ ID NO: 23724 - protein, 9 aa, synthetic construct
  REGION 1..9: note = Description of Artificial Sequence: Synthetic peptide
DSAVYGMDV

SEQ ID NO: 23725 - DNA, 30 bp, synthetic construct; identical to SEQ ID NO: 23709
  misc_feature 1..30: note = Description of Artificial Sequence: Synthetic oligonucleotide
  source 1..30: mol_type = other DNA

SEQ ID NO: 23726 - protein, 10 aa, synthetic construct
  REGION 1..10: note = Description of Artificial Sequence: Synthetic peptide
GDWNPEGMDV

SEQ ID NO: 23727 - DNA, 30 bp, synthetic construct; identical to SEQ ID NO: 23709
  misc_feature 1..30: note = Description of Artificial Sequence: Synthetic oligonucleotide
  source 1..30: mol_type = other DNA

SEQ ID NO: 23728 - protein, 10 aa, synthetic construct
  REGION 1..10: note = Description of Artificial Sequence: Synthetic peptide
GDWNPEGMDV

SEQ ID NO: 23729 - DNA, 30 bp, synthetic construct; identical to SEQ ID NO: 23707
  misc_feature 1..30: note = Description of Artificial Sequence: Synthetic oligonucleotide
  source 1..30: mol_type = other DNA

SEQ ID NO: 23730 - protein, 10 aa, synthetic construct
  REGION 1..10: note = Description of Artificial Sequence: Synthetic peptide
GDWNPEGLDV

SEQ ID NO: 23731 - DNA, 30 bp, synthetic construct
  misc_feature 1..30: note = Description of Artificial Sequence: Synthetic oligonucleotide
  source 1..30: mol_type = other DNA
ggagactggaaccccgagggtttggacgtc

SEQ ID NO: 23732 - protein, 10 aa, synthetic construct
  REGION 1..10: note = Description of Artificial Sequence: Synthetic peptide
GDWNPEGLDV

SEQ ID NO: 23733 - DNA, 27 bp, synthetic construct
  misc_feature 1..27: note = Description of Artificial Sequence: Synthetic oligonucleotide
  source 1..27: mol_type = other DNA
gattcagcagtgtacggtatggacgtc

SEQ ID NO: 23734 - protein, 9 aa, synthetic construct
  REGION 1..9: note = Description of Artificial Sequence: Synthetic peptide
DSAVYGMDV

SEQ ID NO: 23735 - DNA, 27 bp, synthetic construct
  misc_feature 1..27: note = Description of Artificial Sequence: Synthetic oligonucleotide
  source 1..27: mol_type = other DNA
gatagcagctcctacggtatggacgtc

SEQ ID NO: 23736 - protein, 9 aa, synthetic construct
  REGION 1..9: note = Description of Artificial Sequence: Synthetic peptide
DSSSYGMDV

SEQ ID NO: 23737 - DNA, 30 bp, synthetic construct; identical to SEQ ID NO: 23709
  misc_feature 1..30: note = Description of Artificial Sequence: Synthetic oligonucleotide
  source 1..30: mol_type = other DNA

SEQ ID NO: 23738 - protein, 10 aa, synthetic construct
  REGION 1..10: note = Description of Artificial Sequence: Synthetic peptide
GDWNPEGMDV

SEQ ID NO: 23739 - DNA, 30 bp, synthetic construct; identical to SEQ ID NO: 23709
  misc_feature 1..30: note = Description of Artificial Sequence: Synthetic oligonucleotide
  source 1..30: mol_type = other DNA

SEQ ID NO: 23740 - protein, 10 aa, synthetic construct
  REGION 1..10: note = Description of Artificial Sequence: Synthetic peptide
GDWNPEGMDV

SEQ ID NO: 23741 - DNA, 27 bp, synthetic construct
  misc_feature 1..27: note = Description of Artificial Sequence: Synthetic oligonucleotide
  source 1..27: mol_type = other DNA
gattcagcagtgtacaatatggacgtc

SEQ ID NO: 23742 - protein, 9 aa, synthetic construct
  REGION 1..9: note = Description of Artificial Sequence: Synthetic peptide
DSAVYNMDV

SEQ ID NO: 23743 - DNA, 21 bp, synthetic construct
  misc_feature 1..21: note = Description of Artificial Sequence: Synthetic oligonucleotide
  source 1..21: mol_type = other DNA
gggtatgattcgttcgccccc

SEQ ID NO: 23744 - protein, 7 aa, synthetic construct
  REGION 1..7: note = Description of Artificial Sequence: Synthetic peptide
GYDSFAP

SEQ ID NO: 23745 - DNA, 27 bp, synthetic construct
  misc_feature 1..27: note = Description of Artificial Sequence: Synthetic oligonucleotide
  source 1..27: mol_type = other DNA
gatagcagctcctacggtatggacgtc

SEQ ID NO: 23746 - protein, 9 aa, synthetic construct
  REGION 1..9: note = Description of Artificial Sequence: Synthetic peptide
DSSSYGMDV

SEQ ID NO: 23747 - DNA, 33 bp, synthetic construct
  misc_feature 1..33: note = Description of Artificial Sequence: Synthetic oligonucleotide
  source 1..33: mol_type = other DNA
gcaaggggatatcactacagtatctttgactac

SEQ ID NO: 23748 - protein, 11 aa, synthetic construct
  REGION 1..11: note = Description of Artificial Sequence: Synthetic peptide
ARGYHYSIFDY

SEQ ID NO: 23749 - DNA, 27 bp, synthetic construct
  misc_feature 1..27: note = Description of Artificial Sequence: Synthetic oligonucleotide
  source 1..27: mol_type = other DNA
gatggggctgcggagggtatggacgtc

SEQ ID NO: 23750 - protein, 9 aa, synthetic construct
  REGION 1..9: note = Description of Artificial Sequence: Synthetic peptide
DGAAEGMDV

SEQ ID NO: 23751 - DNA, 27 bp, synthetic construct
  misc_feature 1..27: note = Description of Artificial Sequence: Synthetic oligonucleotide
  source 1..27: mol_type = other DNA
gattcagcagtgtacggtatggacgtc

SEQ ID NO: 23752 - protein, 9 aa, synthetic construct
  REGION 1..9: note = Description of Artificial Sequence: Synthetic peptide
DSAVYGMDV

SEQ ID NO: 23753 - DNA, 24 bp, synthetic construct
  misc_feature 1..24: note = Description of Artificial Sequence: Synthetic oligonucleotide
  source 1..24: mol_type = other DNA
gatccgggggggatctttgactac

SEQ ID NO: 23754 - protein, 8 aa, synthetic construct
  REGION 1..8: note = Description of Artificial Sequence: Synthetic peptide
DPGGIFDY

SEQ ID NO: 23755 - DNA, 30 bp, synthetic construct; identical to SEQ ID NO: 23709
  misc_feature 1..30: note = Description of Artificial Sequence: Synthetic oligonucleotide
  source 1..30: mol_type = other DNA

SEQ ID NO: 23756 - protein, 10 aa, synthetic construct
  REGION 1..10: note = Description of Artificial Sequence: Synthetic peptide
GDWNPEGMDV

SEQ ID NO: 23757 - DNA, 27 bp, synthetic construct
  misc_feature 1..27: note = Description of Artificial Sequence: Synthetic oligonucleotide
  source 1..27: mol_type = other DNA
gattcagcagtgtacggtatggacgtc

SEQ ID NO: 23758 - protein, 9 aa, synthetic construct
  REGION 1..9: note = Description of Artificial Sequence: Synthetic peptide
DSAVYGMDV

SEQ ID NO: 23759 - DNA, 30 bp, synthetic construct; identical to SEQ ID NO: 23707
  misc_feature 1..30: note = Description of Artificial Sequence: Synthetic oligonucleotide
  source 1..30: mol_type = other DNA

SEQ ID NO: 23760 - protein, 10 aa, synthetic construct
  REGION 1..10: note = Description of Artificial Sequence: Synthetic peptide
GDWNPEGLDV

SEQ ID NO: 23761 - DNA, 27 bp, synthetic construct
  misc_feature 1..27: note = Description of Artificial Sequence: Synthetic oligonucleotide
  source 1..27: mol_type = other DNA
gattcagcagtgtacggtatggacgtc

SEQ ID NO: 23762 - protein, 9 aa, synthetic construct
  REGION 1..9: note = Description of Artificial Sequence: Synthetic peptide
DSAVYGMDV

SEQ ID NO: 23763 - DNA, 27 bp, synthetic construct
  misc_feature 1..27: note = Description of Artificial Sequence: Synthetic oligonucleotide
  source 1..27: mol_type = other DNA
gatggggctgcggagggtttggacgtc

SEQ ID NO: 23764 - protein, 9 aa, synthetic construct
  REGION 1..9: note = Description of Artificial Sequence: Synthetic peptide
DGAAEGLDV

SEQ ID NO: 23765 - DNA, 30 bp, synthetic construct
  misc_feature 1..30: note = Description of Artificial Sequence: Synthetic oligonucleotide
  source 1..30: mol_type = other DNA
gatctgggactgggatacttctttgactac

SEQ ID NO: 23766 - protein, 10 aa, synthetic construct
  REGION 1..10: note = Description of Artificial Sequence: Synthetic peptide
DLGLGYFFDY

SEQ ID NO: 23767 - DNA, 30 bp, synthetic construct; identical to SEQ ID NO: 23709
  misc_feature 1..30: note = Description of Artificial Sequence: Synthetic oligonucleotide
  source 1..30: mol_type = other DNA

SEQ ID NO: 23768 - protein, 10 aa, synthetic construct
  REGION 1..10: note = Description of Artificial Sequence: Synthetic peptide
GDWNPEGMDV

SEQ ID NO: 23769 - DNA, 33 bp, synthetic construct
  misc_feature 1..33: note = Description of Artificial Sequence: Synthetic oligonucleotide
  source 1..33: mol_type = other DNA
ggcctatctgtctactactacggtatggacgtc

SEQ ID NO: 23770 - protein, 11 aa, synthetic construct
  REGION 1..11: note = Description of Artificial Sequence: Synthetic peptide
GLSVYYYGMDV

SEQ ID NO: 23771 - DNA, 33 bp, synthetic construct
  misc_feature 1..33: note = Description of Artificial Sequence: Synthetic oligonucleotide
  source 1..33: mol_type = other DNA
ggcctctctgtctactactacggtatggacgtc

SEQ ID NO: 23772 - protein, 11 aa, synthetic construct
  REGION 1..11: note = Description of Artificial Sequence: Synthetic peptide
GLSVYYYGMDV

SEQ ID NO: 23773 - DNA, 30 bp, synthetic construct
  misc_feature 1..30: note = Description of Artificial Sequence: Synthetic oligonucleotide
  source 1..30: mol_type = other DNA
tggtactactattactacggtatggacgtc

SEQ ID NO: 23774 - protein, 10 aa, synthetic construct
  REGION 1..10: note = Description of Artificial Sequence: Synthetic peptide
WYYYYYGMDV

SEQ ID NO: 23775 - DNA, 33 bp, synthetic construct; identical to SEQ ID NO: 23769
  misc_feature 1..33: note = Description of Artificial Sequence: Synthetic oligonucleotide
  source 1..33: mol_type = other DNA

SEQ ID NO: 23776 - protein, 11 aa, synthetic construct
  REGION 1..11: note = Description of Artificial Sequence: Synthetic peptide
GLSVYYYGMDV

SEQ ID NO: 23777 - DNA, 30 bp, synthetic construct; identical to SEQ ID NO: 23709
  misc_feature 1..30: note = Description of Artificial Sequence: Synthetic oligonucleotide
  source 1..30: mol_type = other DNA

SEQ ID NO: 23778 - protein, 10 aa, synthetic construct
  REGION 1..10: note = Description of Artificial Sequence: Synthetic peptide
GDWNPEGMDV

SEQ ID NO: 23779 - DNA, 30 bp, synthetic construct; identical to SEQ ID NO: 23709
  misc_feature 1..30: note = Description of Artificial Sequence: Synthetic oligonucleotide
  source 1..30: mol_type = other DNA

SEQ ID NO: 23780 - protein, 10 aa, synthetic construct
  REGION 1..10: note = Description of Artificial Sequence: Synthetic peptide
GDWNPEGMDV

SEQ ID NO: 23781 - DNA, 30 bp, synthetic construct; identical to SEQ ID NO: 23709
  misc_feature 1..30: note = Description of Artificial Sequence: Synthetic oligonucleotide
  source 1..30: mol_type = other DNA

SEQ ID NO: 23782 - protein, 10 aa, synthetic construct
  REGION 1..10: note = Description of Artificial Sequence: Synthetic peptide
GDWNPEGMDV

SEQ ID NO: 23783 - DNA, 57 bp, synthetic construct
  misc_feature 1..57: note = Description of Artificial Sequence: Synthetic oligonucleotide
  source 1..57: mol_type = other DNA
gaggggggcctaggatattgtagtagtaccagctgctatggaggctggttcgacccc

SEQ ID NO: 23784 - protein, 19 aa, synthetic construct
  REGION 1..19: note = Description of Artificial Sequence: Synthetic peptide
EGGLGYCSSTSCYGGWFDP

SEQ ID NO: 23785 - DNA, 39 bp, synthetic construct
  misc_feature 1..39: note = Description of Artificial Sequence: Synthetic oligonucleotide
  source 1..39: mol_type = other DNA
ggagcgtttgattacttctactactacgctatggacgtc

SEQ ID NO: 23786 - protein, 13 aa, synthetic construct
  REGION 1..13: note = Description of Artificial Sequence: Synthetic peptide
GAFDYFYYYAMDV

SEQ ID NO: 23787 - DNA, 63 bp, synthetic construct
  misc_feature 1..63: note = Description of Artificial Sequence: Synthetic oligonucleotide
  source 1..63: mol_type = other DNA
gataaccactattgtagtagtaccagctgctccccatactactactacttcggtatggacgtc

SEQ ID NO: 23788 - protein, 21 aa, synthetic construct
  REGION 1..21: note = Description of Artificial Sequence: Synthetic peptide
DNHYCSSTSCSPYYYYFGMDV

SEQ ID NO: 23789 - DNA, 60 bp, synthetic construct
  misc_feature 1..60: note = Description of Artificial Sequence: Synthetic oligonucleotide
  source 1..60: mol_type = other DNA
gatcgggaatattgtactagtaccagctgcccttactactactactacggtatggacgtc

SEQ ID NO: 23790 - protein, 20 aa, synthetic construct
  REGION 1..20: note = Description of Artificial Sequence: Synthetic peptide
DREYCTSTSCPYYYYYGMDV

SEQ ID NO: 23791 - DNA, 45 bp, synthetic construct
  misc_feature 1..45: note = Description of Artificial Sequence: Synthetic oligonucleotide
  source 1..45: mol_type = other DNA
gggacttactatggttcggggagttattttaacgaacttgactcc

SEQ ID NO: 23792 - protein, 15 aa, synthetic construct
  REGION 1..15: note = Description of Artificial Sequence: Synthetic peptide
GTYYGSGSYFNELDS

SEQ ID NO: 23793 - DNA, 45 bp, synthetic construct
  misc_feature 1..45: note = Description of Artificial Sequence: Synthetic oligonucleotide
  source 1..45: mol_type = other DNA
ggatattactatggttcggggagttattataactggttcgactcc

SEQ ID NO: 23794 - protein, 15 aa, synthetic construct
  REGION 1..15: note = Description of Artificial Sequence: Synthetic peptide
GYYYGSGSYYNWFDS

SEQ ID NO: 23795 - DNA, 39 bp, synthetic construct
  misc_feature 1..39: note = Description of Artificial Sequence: Synthetic oligonucleotide
  source 1..39: mol_type = other DNA
ggagcgtttgattactactactactacgctttggacgtc

SEQ ID NO: 23796 - protein, 13 aa, synthetic construct
  REGION 1..13: note = Description of Artificial Sequence: Synthetic peptide
GAFDYYYYYALDV

SEQ ID NO: 23797 - DNA, 45 bp, synthetic construct; identical to SEQ ID NO: 23791
  misc_feature 1..45: note = Description of Artificial Sequence: Synthetic oligonucleotide
  source 1..45: mol_type = other DNA

SEQ ID NO: 23798 - protein, 15 aa, synthetic construct
  REGION 1..15: note = Description of Artificial Sequence: Synthetic peptide
GTYYGSGSYFNELDS

SEQ ID NO: 23799 - DNA, 39 bp, synthetic construct
  misc_feature 1..39: note = Description of Artificial Sequence: Synthetic oligonucleotide
  source 1..39: mol_type = other DNA
ggagcgtttgattacttctactactacggtatggacgtc

SEQ ID NO: 23800 - protein, 13 aa, synthetic construct
  REGION 1..13: note = Description of Artificial Sequence: Synthetic peptide
GAFDYFYYYGMDV

SEQ ID NO: 23801 - DNA, 57 bp, synthetic construct; identical to SEQ ID NO: 20751
  misc_feature 1..57: note = Description of Artificial Sequence: Synthetic oligonucleotide
  source 1..57: mol_type = other DNA

SEQ ID NO: 23802 - protein, 19 aa, synthetic construct
  REGION 1..19: note = Description of Artificial Sequence: Synthetic peptide
EYCGGDCYSPYYYYYGMDV

SEQ ID NO: 23803 - DNA, 39 bp, synthetic construct; identical to SEQ ID NO: 23799
  misc_feature 1..39: note = Description of Artificial Sequence: Synthetic oligonucleotide
  source 1..39: mol_type = other DNA

SEQ ID NO: 23804 - protein, 13 aa, synthetic construct
  REGION 1..13: note = Description of Artificial Sequence: Synthetic peptide
GAFDYFYYYGMDV

SEQ ID NO: 23805 - DNA, 27 bp, synthetic construct
  misc_feature 1..27: note = Description of Artificial Sequence: Synthetic oligonucleotide
  source 1..27: mol_type = other DNA
aggggacagcagctggccctcgactac

SEQ ID NO: 23806 - protein, 9 aa, synthetic construct
  REGION 1..9: note = Description of Artificial Sequence: Synthetic peptide
RGQQLALDY

SEQ ID NO: 23807 - DNA, 39 bp, synthetic construct
  misc_feature 1..39: note = Description of Artificial Sequence: Synthetic oligonucleotide
  source 1..39: mol_type = other DNA
agagagacgtataactggaactacgaagggtttgactac

SEQ ID NO: 23808 - protein, 13 aa, synthetic construct
  REGION 1..13: note = Description of Artificial Sequence: Synthetic peptide
RETYNWNYEGFDY

SEQ ID NO: 23809 - DNA, 18 bp, synthetic construct
  misc_feature 1..18: note = Description of Artificial Sequence: Synthetic oligonucleotide
  source 1..18: mol_type = other DNA
gtgactgcttttgactac

SEQ ID NO: 23810 - protein, 6 aa, synthetic construct
  REGION 1..6: note = Description of Artificial Sequence: Synthetic peptide
VTAFDY

SEQ ID NO: 23811 - DNA, 18 bp, synthetic construct
  misc_feature 1..18: note = Description of Artificial Sequence: Synthetic oligonucleotide
  source 1..18: mol_type = other DNA
actggggtctttgactac

SEQ ID NO: 23812 - protein, 6 aa, synthetic construct
  REGION 1..6: note = Description of Artificial Sequence: Synthetic peptide
TGVFDY

SEQ ID NO: 23813 - DNA, 18 bp, synthetic construct
  misc_feature 1..18: note = Description of Artificial Sequence: Synthetic oligonucleotide
  source 1..18: mol_type = other DNA
gtggcctcctttgactac

SEQ ID NO: 23814 - protein, 6 aa, synthetic construct
  REGION 1..6: note = Description of Artificial Sequence: Synthetic peptide
VASFDY

SEQ ID NO: 23815 - DNA, 24 bp, synthetic construct
  misc_feature 1..24: note = Description of Artificial Sequence: Synthetic oligonucleotide
  source 1..24: mol_type = other DNA
acctatagtgggagcctggacgtc

SEQ ID NO: 23816 - protein, 8 aa, synthetic construct
  REGION 1..8: note = Description of Artificial Sequence: Synthetic peptide
TYSGSLDV

SEQ ID NO: 23817 - DNA, 36 bp, synthetic construct; identical to SEQ ID NO: 21545
  misc_feature 1..36: note = Description of Artificial Sequence: Synthetic oligonucleotide
  source 1..36: mol_type = other DNA

SEQ ID NO: 23818 - protein, 12 aa, synthetic construct
  REGION 1..12: note = Description of Artificial Sequence: Synthetic peptide
FFGVVGVGCFDY

SEQ ID NO: 23819 - DNA, 24 bp, synthetic construct
  misc_feature 1..24: note = Description of Artificial Sequence: Synthetic oligonucleotide
  source 1..24: mol_type = other DNA
gggggttcgagggggttcgacccc

SEQ ID NO: 23820 - protein, 8 aa, synthetic construct
  REGION 1..8: note = Description of Artificial Sequence: Synthetic peptide
GGSRGFDP

SEQ ID NO: 23821 - DNA, 36 bp, synthetic construct
  misc_feature 1..36: note = Description of Artificial Sequence: Synthetic oligonucleotide
  source 1..36: mol_type = other DNA
gttatagcagtggctggagggcactttttcgacccc

SEQ ID NO: 23822 - protein, 12 aa, synthetic construct
  REGION 1..12: note = Description of Artificial Sequence: Synthetic peptide
VIAVAGGHFFDP

SEQ ID NO: 23823 - DNA, 24 bp, synthetic construct
  misc_feature 1..24: note = Description of Artificial Sequence: Synthetic oligonucleotide
  source 1..24: mol_type = other DNA
gatgggagcagtggctttgactac

SEQ ID NO: 23824 - protein, 8 aa, synthetic construct
  REGION 1..8: note = Description of Artificial Sequence: Synthetic peptide
DGSSGFDY

SEQ ID NO: 23825 - DNA, 48 bp, synthetic construct; identical to SEQ ID NO: 21761
  misc_feature 1..48: note = Description of Artificial Sequence: Synthetic oligonucleotide
  source 1..48: mol_type = other DNA

SEQ ID NO: 23826 - protein, 16 aa, synthetic construct
  REGION 1..16: note = Description of Artificial Sequence: Synthetic peptide
EFPYSGSYLYYYGMDV

SEQ ID NO: 23827 - DNA, 36 bp, synthetic construct; identical to SEQ ID NO: 23291
  misc_feature 1..36: note = Description of Artificial Sequence: Synthetic oligonucleotide
  source 1..36: mol_type = other DNA

SEQ ID NO: 23828 - protein, 12 aa, synthetic construct
  REGION 1..12: note = Description of Artificial Sequence: Synthetic peptide
WRGNPTDYGMDV

SEQ ID NO: 23829 - DNA, 36 bp, synthetic construct; identical to SEQ ID NO: 23291
  misc_feature 1..36: note = Description of Artificial Sequence: Synthetic oligonucleotide
  source 1..36: mol_type = other DNA

SEQ ID NO: 23830 - protein, 12 aa, synthetic construct
  REGION 1..12: note = Description of Artificial Sequence: Synthetic peptide
WRGNPTDYGMDV

SEQ ID NO: 23831 - DNA, 51 bp, synthetic construct; identical to SEQ ID NO: 20121
  misc_feature 1..51: note = Description of Artificial Sequence: Synthetic oligonucleotide
  source 1..51: mol_type = other DNA

SEQ ID NO: 23832 - protein, 17 aa, synthetic construct
  REGION 1..17: note = Description of Artificial Sequence: Synthetic peptide
DRVEGSGTPYYYYGMDV

SEQ ID NO: 23833 - DNA, 51 bp, synthetic construct; identical to SEQ ID NO: 20121
  misc_feature 1..51: note = Description of Artificial Sequence: Synthetic oligonucleotide
  source 1..51: mol_type = other DNA

SEQ ID NO: 23834 - protein, 17 aa, synthetic construct
  REGION 1..17: note = Description of Artificial Sequence: Synthetic peptide
DRVEGSGTPYYYYGMDV

SEQ ID NO: 23835 - DNA, 60 bp, synthetic construct
  misc_feature 1..60: note = Description of Artificial Sequence: Synthetic oligonucleotide
  source 1..60: mol_type = other DNA
gatcgggattattgtagtggtggtaactgcccttactactactactacggtatggacgtc

SEQ ID NO: 23836 - protein, 20 aa, synthetic construct
  REGION 1..20: note = Description of Artificial Sequence: Synthetic peptide
DRDYCSGGNCPYYYYYGMDV

SEQ ID NO: 23837 - DNA, 39 bp, synthetic construct
  misc_feature 1..39: note = Description of Artificial Sequence: Synthetic oligonucleotide
  source 1..39: mol_type = other DNA
gggggggctacggtgactacgtggggggtctttgactac

SEQ ID NO: 23838 - protein, 13 aa, synthetic construct
  REGION 1..13: note = Description of Artificial Sequence: Synthetic peptide
GGATVTTWGVFDY

SEQ ID NO: 23839 - DNA, 36 bp, synthetic construct; identical to SEQ ID NO: 23453
  misc_feature 1..36: note = Description of Artificial Sequence: Synthetic oligonucleotide
  source 1..36: mol_type = other DNA

SEQ ID NO: 23840 - protein, 12 aa, synthetic construct
  REGION 1..12: note = Description of Artificial Sequence: Synthetic peptide
DSRKGFYYGLDV

SEQ ID NO: 23841 - DNA, 39 bp, synthetic construct; identical to SEQ ID NO: 22457
  misc_feature 1..39: note = Description of Artificial Sequence: Synthetic oligonucleotide
  source 1..39: mol_type = other DNA

SEQ ID NO: 23842 - protein, 13 aa, synthetic construct
  REGION 1..13: note = Description of Artificial Sequence: Synthetic peptide
GGTTVATWGVFDY

SEQ ID NO: 23843 - DNA, 39 bp, synthetic construct; identical to SEQ ID NO: 22457
  misc_feature 1..39: note = Description of Artificial Sequence: Synthetic oligonucleotide
  source 1..39: mol_type = other DNA

SEQ ID NO: 23844 - protein, 13 aa, synthetic construct
  REGION 1..13: note = Description of Artificial Sequence: Synthetic peptide
GGTTVATWGVFDY

SEQ ID NO: 23845 - DNA, 57 bp, synthetic construct
  misc_feature 1..57: note = Description of Artificial Sequence: Synthetic oligonucleotide
  source 1..57: mol_type = other DNA
gcatattgtggtggtgactgctatttcccccatctccattactacggtatggacgtc

SEQ ID NO: 23846 - protein, 19 aa, synthetic construct
  REGION 1..19: note = Description of Artificial Sequence: Synthetic peptide
AYCGGDCYFPHLHYYGMDV

SEQ ID NO: 23847 - DNA, 39 bp, synthetic construct; identical to SEQ ID NO: 22521
  misc_feature 1..39: note = Description of Artificial Sequence: Synthetic oligonucleotide
  source 1..39: mol_type = other DNA

SEQ ID NO: 23848 - protein, 13 aa, synthetic construct
  REGION 1..13: note = Description of Artificial Sequence: Synthetic peptide
GGTTVTTWGVFDY

SEQ ID NO: 23849 - DNA, 33 bp, synthetic construct; identical to SEQ ID NO: 22817
  misc_feature 1..33: note = Description of Artificial Sequence: Synthetic oligonucleotide
  source 1..33: mol_type = other DNA

SEQ ID NO: 23850 - protein, 11 aa, synthetic construct
  REGION 1..11: note = Description of Artificial Sequence: Synthetic peptide
DRSKGYDGMDV

SEQ ID NO: 23851 - DNA, 24 bp, synthetic construct
  misc_feature 1..24: note = Description of Artificial Sequence: Synthetic oligonucleotide
  source 1..24: mol_type = other DNA
gaagtgggttggcttgatgactac

SEQ ID NO: 23852 - protein, 8 aa, synthetic construct
  REGION 1..8: note = Description of Artificial Sequence: Synthetic peptide
EVGWLDDY

SEQ ID NO: 23853 - DNA, 45 bp, synthetic construct
  misc_feature 1..45: note = Description of Artificial Sequence: Synthetic oligonucleotide
  source 1..45: mol_type = other DNA
gctggtggaactacggggagctactactacaacggtatggacgtc

SEQ ID NO: 23854 - protein, 15 aa, synthetic construct
  REGION 1..15: note = Description of Artificial Sequence: Synthetic peptide
AGGTTGSYYYNGMDV

SEQ ID NO: 23855 - DNA, 42 bp, synthetic construct; identical to SEQ ID NO: 20145
  misc_feature 1..42: note = Description of Artificial Sequence: Synthetic oligonucleotide
  source 1..42: mol_type = other DNA

SEQ ID NO: 23856 - protein, 14 aa, synthetic construct
  REGION 1..14: note = Description of Artificial Sequence: Synthetic peptide
ERYSSGLYDYGMDV

SEQ ID NO: 23857 - DNA, 42 bp, synthetic construct; identical to SEQ ID NO: 20145
  misc_feature 1..42: note = Description of Artificial Sequence: Synthetic oligonucleotide
  source 1..42: mol_type = other DNA

SEQ ID NO: 23858 - protein, 14 aa, synthetic construct
  REGION 1..14: note = Description of Artificial Sequence: Synthetic peptide
ERYSSGLYDYGMDV

SEQ ID NO: 23859 - DNA, 27 bp, synthetic construct
  misc_feature 1..27: note = Description of Artificial Sequence: Synthetic oligonucleotide
  source 1..27: mol_type = other DNA
gattcccctgacagggggtttgactac

SEQ ID NO: 23860 - protein, 9 aa, synthetic construct
  REGION 1..9: note = Description of Artificial Sequence: Synthetic peptide
DSPDRGFDY

SEQ ID NO: 23861 - DNA, 36 bp, synthetic construct; identical to SEQ ID NO: 20457
  misc_feature 1..36: note = Description of Artificial Sequence: Synthetic oligonucleotide
  source 1..36: mol_type = other DNA

SEQ ID NO: 23862 - protein, 12 aa, synthetic construct
  REGION 1..12: note = Description of Artificial Sequence: Synthetic peptide
RGYSYGGYGMDV

SEQ ID NO: 23863 - DNA, 48 bp, synthetic construct; identical to SEQ ID NO: 21761
  misc_feature 1..48: note = Description of Artificial Sequence: Synthetic oligonucleotide
  source 1..48: mol_type = other DNA

SEQ ID NO: 23864 - protein, 16 aa, synthetic construct
  REGION 1..16: note = Description of Artificial Sequence: Synthetic peptide
EFPYSGSYLYYYGMDV

SEQ ID NO: 23865 - DNA, 27 bp, synthetic construct
  misc_feature 1..27: note = Description of Artificial Sequence: Synthetic oligonucleotide
  source 1..27: mol_type = other DNA
agtagtggctggtactggttcgacccc

SEQ ID NO: 23866 - protein, 9 aa, synthetic construct
  REGION 1..9: note = Description of Artificial Sequence: Synthetic peptide
SSGWYWFDP

SEQ ID NO: 23867 - DNA, 21 bp, synthetic construct
  misc_feature 1..21: note = Description of Artificial Sequence: Synthetic oligonucleotide
  source 1..21: mol_type = other DNA
gactacggcggtatggacgtc

SEQ ID NO: 23868 - protein, 7 aa, synthetic construct
  REGION 1..7: note = Description of Artificial Sequence: Synthetic peptide
DYGGMDV

SEQ ID NO: 23869 - DNA, 39 bp, synthetic construct
  misc_feature 1..39: note = Description of Artificial Sequence: Synthetic oligonucleotide
  source 1..39: mol_type = other DNA
gatcggttagtgggagctacggttgatgcttttgatatc

SEQ ID NO: 23870 - protein, 13 aa, synthetic construct
  REGION 1..13: note = Description of Artificial Sequence: Synthetic peptide
DRLVGATVDAFDI

SEQ ID NO: 23871 - DNA, 21 bp, synthetic construct
  misc_feature 1..21: note = Description of Artificial Sequence: Synthetic oligonucleotide
  source 1..21: mol_type = other DNA
gactacggcggtatggacgtc

SEQ ID NO: 23872 - protein, 7 aa, synthetic construct
  REGION 1..7: note = Description of Artificial Sequence: Synthetic peptide
DYGGMDV

SEQ ID NO: 23873 - DNA, 21 bp, synthetic construct
  misc_feature 1..21: note = Description of Artificial Sequence: Synthetic oligonucleotide
  source 1..21: mol_type = other DNA
gactacggcggtatggacgtc

SEQ ID NO: 23874 - protein, 7 aa, synthetic construct
  REGION 1..7: note = Description of Artificial Sequence: Synthetic peptide
DYGGMDV

SEQ ID NO: 23875 - DNA, 24 bp, synthetic construct
  misc_feature 1..24: note = Description of Artificial Sequence: Synthetic oligonucleotide
  source 1..24: mol_type = other DNA
cttatagcagtggcctttgactac

SEQ ID NO: 23876 - protein, 8 aa, synthetic construct
  REGION 1..8: note = Description of Artificial Sequence: Synthetic peptide
LIAVAFDY

SEQ ID NO: 23877 - DNA, 21 bp, synthetic construct
  misc_feature 1..21: note = Description of Artificial Sequence: Synthetic oligonucleotide
  source 1..21: mol_type = other DNA
gactacggtgggcttgactac

SEQ ID NO: 23878 - protein, 7 aa, synthetic construct
  REGION 1..7: note = Description of Artificial Sequence: Synthetic peptide
DYGGLDY

SEQ ID NO: 23879 - DNA, 21 bp, synthetic construct
  misc_feature 1..21: note = Description of Artificial Sequence: Synthetic oligonucleotide
  source 1..21: mol_type = other DNA
gactacggcggtatggacgtc

SEQ ID NO: 23880 - protein, 7 aa, synthetic construct
  REGION 1..7: note = Description of Artificial Sequence: Synthetic peptide
DYGGMDV

SEQ ID NO: 23881 - DNA, 27 bp, synthetic construct
  misc_feature 1..27: note = Description of Artificial Sequence: Synthetic oligonucleotide
  source 1..27: mol_type = other DNA
cttgactctaactggggtcttgactac

SEQ ID NO: 23882 - protein, 9 aa, synthetic construct
  REGION 1..9: note = Description of Artificial Sequence: Synthetic peptide
LDSNWGLDY

SEQ ID NO: 23883 - DNA, 21 bp, synthetic construct
  misc_feature 1..21: note = Description of Artificial Sequence: Synthetic oligonucleotide
  source 1..21: mol_type = other DNA
gactacggcggtatggacgtc

SEQ ID NO: 23884 - protein, 7 aa, synthetic construct
  REGION 1..7: note = Description of Artificial Sequence: Synthetic peptide
DYGGMDV

SEQ ID NO: 23885 - DNA, 27 bp, synthetic construct
  misc_feature 1..27: note = Description of Artificial Sequence: Synthetic oligonucleotide
  source 1..27: mol_type = other DNA
accagtggctggaacttctttgactac

SEQ ID NO: 23886 - protein, 9 aa, synthetic construct
  REGION 1..9: note = Description of Artificial Sequence: Synthetic peptide
TSGWNFFDY

SEQ ID NO: 23887 - DNA, 27 bp, synthetic construct
  misc_feature 1..27: note = Description of Artificial Sequence: Synthetic oligonucleotide
  source 1..27: mol_type = other DNA
tccagtggctggtactggttcgacccc

SEQ ID NO: 23888 - protein, 9 aa, synthetic construct
  REGION 1..9: note = Description of Artificial Sequence: Synthetic peptide
SSGWYWFDP

SEQ ID NO: 23889 - DNA, 27 bp, synthetic construct
  misc_feature 1..27: note = Description of Artificial Sequence: Synthetic oligonucleotide
  source 1..27: mol_type = other DNA
agcagtggctggtactggttcgacccc

SEQ ID NO: 23890 - protein, 9 aa, synthetic construct
  REGION 1..9: note = Description of Artificial Sequence: Synthetic peptide
SSGWYWFDP

SEQ ID NO: 23891 - DNA, 21 bp, synthetic construct
  misc_feature 1..21: note = Description of Artificial Sequence: Synthetic oligonucleotide
  source 1..21: mol_type = other DNA
gactacggcggtatggacgtc

SEQ ID NO: 23892 - protein, 7 aa, synthetic construct
  REGION 1..7: note = Description of Artificial Sequence: Synthetic peptide
DYGGMDV

SEQ ID NO: 23893 - DNA, 51 bp, synthetic construct; identical to SEQ ID NO: 21773
  misc_feature 1..51: note = Description of Artificial Sequence: Synthetic oligonucleotide
  source 1..51: mol_type = other DNA

SEQ ID NO: 23894 - protein, 17 aa, synthetic construct
  REGION 1..17: note = Description of Artificial Sequence: Synthetic peptide
VLDYGDSLGYYYYGMDV

SEQ ID NO: 23895 - DNA, 24 bp, synthetic construct
  misc_feature 1..24: note = Description of Artificial Sequence: Synthetic oligonucleotide
  source 1..24: mol_type = other DNA
cttatagcagtggcctttgactac

SEQ ID NO: 23896 - protein, 8 aa, synthetic construct
  REGION 1..8: note = Description of Artificial Sequence: Synthetic peptide
LIAVAFDY

SEQ ID NO: 23897 - DNA, 27 bp, synthetic construct
  misc_feature 1..27: note = Description of Artificial Sequence: Synthetic oligonucleotide
  source 1..27: mol_type = other DNA
tccagtggctggtactggttcgacccc

SEQ ID NO: 23898 - protein, 9 aa, synthetic construct
  REGION 1..9: note = Description of Artificial Sequence: Synthetic peptide
SSGWYWFDP

SEQ ID NO: 23899 - DNA, 21 bp, synthetic construct
  misc_feature 1..21: note = Description of Artificial Sequence: Synthetic oligonucleotide
  source 1..21: mol_type = other DNA
gtgggagctactacggactac

SEQ ID NO: 23900 - protein, 7 aa, synthetic construct
  REGION 1..7: note = Description of Artificial Sequence: Synthetic peptide
VGATTDY

SEQ ID NO: 23901 - DNA, 30 bp, synthetic construct; identical to SEQ ID NO: 23709
  misc_feature 1..30: note = Description of Artificial Sequence: Synthetic oligonucleotide
  source 1..30: mol_type = other DNA

SEQ ID NO: 23902 - protein, 10 aa, synthetic construct
  REGION 1..10: note = Description of Artificial Sequence: Synthetic peptide
GDWNPEGMDV

SEQ ID NO: 23903 - DNA, 27 bp, synthetic construct
  misc_feature 1..27: note = Description of Artificial Sequence: Synthetic oligonucleotide
  source 1..27: mol_type = other DNA
agcagtggctggtactactttgactac

SEQ ID NO: 23904 - protein, 9 aa, synthetic construct
  REGION 1..9: note = Description of Artificial Sequence: Synthetic peptide
SSGWYYFDY

SEQ ID NO: 23905 - DNA, 27 bp, synthetic construct
  misc_feature 1..27: note = Description of Artificial Sequence: Synthetic oligonucleotide
  source 1..27: mol_type = other DNA
agcagtggctggtactactttgactac

SEQ ID NO: 23906 - protein, 9 aa, synthetic construct
  REGION 1..9: note = Description of Artificial Sequence: Synthetic peptide
SSGWYYFDY

SEQ ID NO: 23907 - DNA, 27 bp, synthetic construct
  misc_feature 1..27: note = Description of Artificial Sequence: Synthetic oligonucleotide
  source 1..27: mol_type = other DNA
agcagtggctggtactactttgactac

SEQ ID NO: 23908 - protein, 9 aa, synthetic construct
  REGION 1..9: note = Description of Artificial Sequence: Synthetic peptide
SSGWYYFDY

SEQ ID NO: 23909 - DNA, 27 bp, synthetic construct
  misc_feature 1..27: note = Description of Artificial Sequence: Synthetic oligonucleotide
  source 1..27: mol_type = other DNA
agcagtggctggtactactttgactac

SEQ ID NO: 23910 - protein, 9 aa, synthetic construct
  REGION 1..9: note = Description of Artificial Sequence: Synthetic peptide
SSGWYYFDY

SEQ ID NO: 23911 - DNA, 27 bp, synthetic construct
  misc_feature 1..27: note = Description of Artificial Sequence: Synthetic oligonucleotide
  source 1..27: mol_type = other DNA
agcagtggctggtactactttgactac

SEQ ID NO: 23912 - protein, 9 aa, synthetic construct
  REGION 1..9: note = Description of Artificial Sequence: Synthetic peptide
SSGWYYFDY

SEQ ID NO: 23913 - DNA, 27 bp, synthetic construct
  misc_feature 1..27: note = Description of Artificial Sequence: Synthetic oligonucleotide
  source 1..27: mol_type = other DNA
agcagtggctggtactactttgactac

SEQ ID NO: 23914 - protein, 9 aa, synthetic construct
  REGION 1..9: note = Description of Artificial Sequence: Synthetic peptide
SSGWYYFDY

SEQ ID NO: 23915 - DNA, 27 bp, synthetic construct
  misc_feature 1..27: note = Description of Artificial Sequence: Synthetic oligonucleotide
  source 1..27: mol_type = other DNA
agcagtggctggtactactttgactac

SEQ ID NO: 23916 - protein, 9 aa, synthetic construct
  REGION 1..9: note = Description of Artificial Sequence: Synthetic peptide
SSGWYYFDY

SEQ ID NO: 23917 - DNA, 27 bp, synthetic construct
  misc_feature 1..27: note = Description of Artificial Sequence: Synthetic oligonucleotide
  source 1..27: mol_type = other DNA
agcagtggctggtactactttgactac

SEQ ID NO: 23918 - protein, 9 aa, synthetic construct
  REGION 1..9: note = Description of Artificial Sequence: Synthetic peptide
SSGWYYFDY

SEQ ID NO: 23919 - DNA, 27 bp, synthetic construct
  misc_feature 1..27: note = Description of Artificial Sequence: Synthetic oligonucleotide
  source 1..27: mol_type = other DNA
agcagtggctggtactactttgactac

SEQ ID NO: 23920 - protein, 9 aa, synthetic construct
  REGION 1..9: note = Description of Artificial Sequence: Synthetic peptide
SSGWYYFDY

SEQ ID NO: 23921 - DNA, 27 bp, synthetic construct
  misc_feature 1..27: note = Description of Artificial Sequence: Synthetic oligonucleotide
  source 1..27: mol_type = other DNA
agcagtggctggtactactttgactac

SEQ ID NO: 23922 - protein, 9 aa, synthetic construct
  REGION 1..9: note = Description of Artificial Sequence: Synthetic peptide
SSGWYYFDY

SEQ ID NO: 23923 - DNA, 27 bp, synthetic construct
  misc_feature 1..27: note = Description of Artificial Sequence: Synthetic oligonucleotide
  source 1..27: mol_type = other DNA
agcagtggctggtactactttgactac

SEQ ID NO: 23924 - protein, 9 aa, synthetic construct
  REGION 1..9: note = Description of Artificial Sequence: Synthetic peptide
SSGWYYFDY

SEQ ID NO: 23925 - DNA, 27 bp, synthetic construct
  misc_feature 1..27: note = Description of Artificial Sequence: Synthetic oligonucleotide
  source 1..27: mol_type = other DNA
agcagtggctggtactactttgactac

SEQ ID NO: 23926 - protein, 9 aa, synthetic construct
  REGION 1..9: note = Description of Artificial Sequence: Synthetic peptide
SSGWYYFDY

SEQ ID NO: 23927 - DNA, 27 bp, synthetic construct
  misc_feature 1..27: note = Description of Artificial Sequence: Synthetic oligonucleotide
  source 1..27: mol_type = other DNA
agcagtggctggtactactttgactac

SEQ ID NO: 23928 - protein, 9 aa, synthetic construct
  REGION 1..9: note = Description of Artificial Sequence: Synthetic peptide
SSGWYYFDY

SEQ ID NO: 23929 - DNA, 27 bp, synthetic construct
  misc_feature 1..27: note = Description of Artificial Sequence: Synthetic oligonucleotide
  source 1..27: mol_type = other DNA
agcagtggctggtactactttgactac

SEQ ID NO: 23930 - protein, 9 aa, synthetic construct
  REGION 1..9: note = Description of Artificial Sequence: Synthetic peptide
SSGWYYFDY

SEQ ID NO: 23931 - DNA, 27 bp, synthetic construct
  misc_feature 1..27: note = Description of Artificial Sequence: Synthetic oligonucleotide
  source 1..27: mol_type = other DNA
agcagtggctggtactactttgactac

SEQ ID NO: 23932 - protein, 9 aa, synthetic construct
  REGION 1..9: note = Description of Artificial Sequence: Synthetic peptide
SSGWYYFDY

SEQ ID NO: 23933 - DNA, 27 bp, synthetic construct
  misc_feature 1..27: note = Description of Artificial Sequence: Synthetic oligonucleotide
  source 1..27: mol_type = other DNA
agcagtggctggtactactttgactac

SEQ ID NO: 23934 - protein, 9 aa, synthetic construct
  REGION 1..9: note = Description of Artificial Sequence: Synthetic peptide
SSGWYYFDY

SEQ ID NO: 23935 - DNA, 27 bp, synthetic construct
  misc_feature 1..27: note = Description of Artificial Sequence: Synthetic oligonucleotide
  source 1..27: mol_type = other DNA
agcagtggctggtactactttgactac

SEQ ID NO: 23936 - protein, 9 aa, synthetic construct
  REGION 1..9: note = Description of Artificial Sequence: Synthetic peptide
SSGWYYFDY

SEQ ID NO: 23937 - DNA, 27 bp, synthetic construct
  misc_feature 1..27: note = Description of Artificial Sequence: Synthetic oligonucleotide
  source 1..27: mol_type = other DNA
agcagtggctggtactactttgactac

SEQ ID NO: 23938 - protein, 9 aa, synthetic construct
  REGION 1..9: note = Description of Artificial Sequence: Synthetic peptide
SSGWYYFDY

SEQ ID NO: 23939 - DNA, 27 bp, synthetic construct
  misc_feature 1..27: note = Description of Artificial Sequence: Synthetic oligonucleotide
  source 1..27: mol_type = other DNA
agcagtggctggtactactttgactac

SEQ ID NO: 23940 - protein, 9 aa, synthetic construct
  REGION 1..9: note = Description of Artificial Sequence: Synthetic peptide
SSGWYYFDY

SEQ ID NO: 23941 - DNA, 27 bp, synthetic construct
  misc_feature 1..27: note = Description of Artificial Sequence: Synthetic oligonucleotide
  source 1..27: mol_type = other DNA
agcagtggctggtactactttgactac

SEQ ID NO: 23942 - protein, 9 aa, synthetic construct
  REGION 1..9: note = Description of Artificial Sequence: Synthetic peptide
SSGWYYFDY

SEQ ID NO: 23943 - DNA, 27 bp, synthetic construct
  misc_feature 1..27: note = Description of Artificial Sequence: Synthetic oligonucleotide
  source 1..27: mol_type = other DNA
agcagtggctggtactactttgactac

SEQ ID NO: 23944 - protein, 9 aa, synthetic construct
  REGION 1..9: note = Description of Artificial Sequence: Synthetic peptide
SSGWYYFDY

SEQ ID NO: 23945 - DNA, 27 bp, synthetic construct
  misc_feature 1..27: note = Description of Artificial Sequence: Synthetic oligonucleotide
  source 1..27: mol_type = other DNA
agcagtggctggtactactttgactac

SEQ ID NO: 23946 - protein, 9 aa, synthetic construct
  REGION 1..9: note = Description of Artificial Sequence: Synthetic peptide
SSGWYYFDY

SEQ ID NO: 23947 - DNA, 27 bp, synthetic construct
  misc_feature 1..27: note = Description of Artificial Sequence: Synthetic oligonucleotide
  source 1..27: mol_type = other DNA
agcagtggctggtactactttgactac

SEQ ID NO: 23948 - protein, 9 aa, synthetic construct
  REGION 1..9: note = Description of Artificial Sequence: Synthetic peptide
SSGWYYFDY

SEQ ID NO: 23949 - DNA, 27 bp, synthetic construct
  misc_feature 1..27: note = Description of Artificial Sequence: Synthetic oligonucleotide
  source 1..27: mol_type = other DNA
agcagtggctggtactactttgactac

SEQ ID NO: 23950 - protein, 9 aa, synthetic construct
  REGION 1..9: note = Description of Artificial Sequence: Synthetic peptide
SSGWYYFDY

SEQ ID NO: 23951 - DNA, 27 bp, synthetic construct
  misc_feature 1..27: note = Description of Artificial Sequence: Synthetic oligonucleotide
  source 1..27: mol_type = other DNA
agcagtggctggtactactttgactac

SEQ ID NO: 23952 - protein, 9 aa, synthetic construct
  REGION 1..9: note = Description of Artificial Sequence: Synthetic peptide
SSGWYYFDY

SEQ ID NO: 23953 - DNA, 27 bp, synthetic construct
  misc_feature 1..27: note = Description of Artificial Sequence: Synthetic oligonucleotide
  source 1..27: mol_type = other DNA
agcagtggctggtactactttgactac

SEQ ID NO: 23954 - protein, 9 aa, synthetic construct
  REGION 1..9: note = Description of Artificial Sequence: Synthetic peptide
SSGWYYFDY

SEQ ID NO: 23955 - DNA, 27 bp, synthetic construct
  misc_feature 1..27: note = Description of Artificial Sequence: Synthetic oligonucleotide
  source 1..27: mol_type = other DNA
agcagtggctggtactactttgactac

SEQ ID NO: 23956 - protein, 9 aa, synthetic construct
  REGION 1..9: note = Description of Artificial Sequence: Synthetic peptide
SSGWYYFDY

SEQ ID NO: 23957 - DNA, 27 bp, synthetic construct
  misc_feature 1..27: note = Description of Artificial Sequence: Synthetic oligonucleotide
  source 1..27: mol_type = other DNA
agcagtggctggtactactttgactac

SEQ ID NO: 23958 - protein, 9 aa, synthetic construct
  REGION 1..9: note = Description of Artificial Sequence: Synthetic peptide
SSGWYYFDY

SEQ ID NO: 23959 - DNA, 27 bp, synthetic construct
  misc_feature 1..27: note = Description of Artificial Sequence: Synthetic oligonucleotide
  source 1..27: mol_type = other DNA
agcagtggctggtactactttgactac

SEQ ID NO: 23960 - protein, 9 aa, synthetic construct
  REGION 1..9: note = Description of Artificial Sequence: Synthetic peptide
SSGWYYFDY

SEQ ID NO: 23961 - DNA, 27 bp, synthetic construct
  misc_feature 1..27: note = Description of Artificial Sequence: Synthetic oligonucleotide
  source 1..27: mol_type = other DNA
agcagtggctggtactactttgactac

SEQ ID NO: 23962 - protein, 9 aa, synthetic construct
  REGION 1..9: note = Description of Artificial Sequence: Synthetic peptide
SSGWYYFDY

SEQ ID NO: 23963 - DNA, 24 bp, synthetic construct
  misc_feature 1..24: note = Description of Artificial Sequence: Synthetic oligonucleotide
  source 1..24: mol_type = other DNA
gatggtaccagctcgtttgactac

SEQ ID NO: 23964 - protein, 8 aa, synthetic construct
  REGION 1..8: note = Description of Artificial Sequence: Synthetic peptide
DGTSSFDY

SEQ ID NO: 23965 - DNA, 24 bp, synthetic construct
  misc_feature 1..24: note = Description of Artificial Sequence: Synthetic oligonucleotide
  source 1..24: mol_type = other DNA
gatggtaccagctcgtttgactac

SEQ ID NO: 23966 - protein, 8 aa, synthetic construct
  REGION 1..8: note = Description of Artificial Sequence: Synthetic peptide
DGTSSFDY

SEQ ID NO: 23967 - DNA, 24 bp, synthetic construct
  misc_feature 1..24: note = Description of Artificial Sequence: Synthetic oligonucleotide
  source 1..24: mol_type = other DNA
gatggtaccagctcgtttgactac

SEQ ID NO: 23968 - protein, 8 aa, synthetic construct
  REGION 1..8: note = Description of Artificial Sequence: Synthetic peptide
DGTSSFDY

SEQ ID NO: 23969 - DNA, 24 bp, synthetic construct
  misc_feature 1..24: note = Description of Artificial Sequence: Synthetic oligonucleotide
  source 1..24: mol_type = other DNA
gatgctaccagctcgtttgactac

SEQ ID NO: 23970 - protein, 8 aa, synthetic construct
  REGION 1..8: note = Description of Artificial Sequence: Synthetic peptide
DATSSFDY

SEQ ID NO: 23971 - DNA, 24 bp, synthetic construct
  misc_feature 1..24: note = Description of Artificial Sequence: Synthetic oligonucleotide
  source 1..24: mol_type = other DNA
agtggtaccagctcgtttgactac

SEQ ID NO: 23972 - protein, 8 aa, synthetic construct
  REGION 1..8: note = Description of Artificial Sequence: Synthetic peptide
SGTSSFDY

SEQ ID NO: 23973 - DNA, 24 bp, synthetic construct
  misc_feature 1..24: note = Description of Artificial Sequence: Synthetic oligonucleotide
  source 1..24: mol_type = other DNA
agtggtaccagctcgtttgactac

SEQ ID NO: 23974 - protein, 8 aa, synthetic construct
  REGION 1..8: note = Description of Artificial Sequence: Synthetic peptide
SGTSSFDY

SEQ ID NO: 23975 - DNA, 24 bp, synthetic construct
  misc_feature 1..24: note = Description of Artificial Sequence: Synthetic oligonucleotide
  source 1..24: mol_type = other DNA
gatgctaccagctcgtttgactac

SEQ ID NO: 23976 - protein, 8 aa, synthetic construct
  REGION 1..8: note = Description of Artificial Sequence: Synthetic peptide
DATSSFDY

SEQ ID NO: 23977 - DNA, 24 bp, synthetic construct
  misc_feature 1..24: note = Description of Artificial Sequence: Synthetic oligonucleotide
  source 1..24: mol_type = other DNA
gatgctaccagctcgtttgactac

SEQ ID NO: 23978 - protein, 8 aa, synthetic construct
  REGION 1..8: note = Description of Artificial Sequence: Synthetic peptide
DATSSFDY

SEQ ID NO: 23979 - DNA, 42 bp, synthetic construct; identical to SEQ ID NO: 21005
  misc_feature 1..42: note = Description of Artificial Sequence: Synthetic oligonucleotide
  source 1..42: mol_type = other DNA

SEQ ID NO: 23980 - protein, 14 aa, synthetic construct
  REGION 1..14: note = Description of Artificial Sequence: Synthetic peptide
EVYSSGWYDYGMDV

SEQ ID NO: 23981 - DNA, 42 bp, synthetic construct; identical to SEQ ID NO: 21005
  misc_feature 1..42: note = Description of Artificial Sequence: Synthetic oligonucleotide
  source 1..42: mol_type = other DNA

SEQ ID NO: 23982 - protein, 14 aa, synthetic construct
  REGION 1..14: note = Description of Artificial Sequence: Synthetic peptide
EVYSSGWYDYGMDV

SEQ ID NO: 23983 - DNA, 42 bp, synthetic construct; identical to SEQ ID NO: 21005
  misc_feature 1..42: note = Description of Artificial Sequence: Synthetic oligonucleotide
  source 1..42: mol_type = other DNA

SEQ ID NO: 23984 - protein, 14 aa, synthetic construct
  REGION 1..14: note = Description of Artificial Sequence: Synthetic peptide
EVYSSGWYDYGMDV

SEQ ID NO: 23985 - DNA, 42 bp, synthetic construct; identical to SEQ ID NO: 21005
  misc_feature 1..42: note = Description of Artificial Sequence: Synthetic oligonucleotide
  source 1..42: mol_type = other DNA

SEQ ID NO: 23986 - protein, 14 aa, synthetic construct
  REGION 1..14: note = Description of Artificial Sequence: Synthetic peptide
EVYSSGWYDYGMDV

SEQ ID NO: 23987 - DNA, 42 bp, synthetic construct; identical to SEQ ID NO: 21005
  misc_feature 1..42: note = Description of Artificial Sequence: Synthetic oligonucleotide
  source 1..42: mol_type = other DNA

SEQ ID NO: 23988 - protein, 14 aa, synthetic construct
  REGION 1..14: note = Description of Artificial Sequence: Synthetic peptide
EVYSSGWYDYGMDV

SEQ ID NO: 23989 - DNA, 42 bp, synthetic construct; identical to SEQ ID NO: 21005
  misc_feature 1..42: note = Description of Artificial Sequence: Synthetic oligonucleotide
  source 1..42: mol_type = other DNA

SEQ ID NO: 23990 - protein, 14 aa, synthetic construct
  REGION 1..14: note = Description of Artificial Sequence: Synthetic peptide
EVYSSGWYDYGMDV

SEQ ID NO: 23991 - DNA, 42 bp, synthetic construct
  misc_feature 1..42: note = Description of Artificial Sequence: Synthetic oligonucleotide
  source 1..42: mol_type = other DNA
gaggtatatagcagtggctattacgactacggtatggacgtc

SEQ ID NO: 23992 - protein, 14 aa, synthetic construct
  REGION 1..14: note = Description of Artificial Sequence: Synthetic peptide
EVYSSGYYDYGMDV

SEQ ID NO: 23993 - DNA, 42 bp, synthetic construct
  misc_feature 1..42: note = Description of Artificial Sequence: Synthetic oligonucleotide
  source 1..42: mol_type = other DNA
gaggtatatagcagtggcttctacgactacggtatggacgtc

SEQ ID NO: 23994 - protein, 14 aa, synthetic construct
  REGION 1..14: note = Description of Artificial Sequence: Synthetic peptide
EVYSSGFYDYGMDV

SEQ ID NO: 23995 - DNA, 42 bp, synthetic construct; identical to SEQ ID NO: 23991
  misc_feature 1..42: note = Description of Artificial Sequence: Synthetic oligonucleotide
  source 1..42: mol_type = other DNA

SEQ ID NO: 23996 - protein, 14 aa, synthetic construct
  REGION 1..14: note = Description of Artificial Sequence: Synthetic peptide
EVYSSGYYDYGMDV

SEQ ID NO: 23997 - DNA, 42 bp, synthetic construct; identical to SEQ ID NO: 23991
  misc_feature 1..42: note = Description of Artificial Sequence: Synthetic oligonucleotide
  source 1..42: mol_type = other DNA

SEQ ID NO: 23998 - protein, 14 aa, synthetic construct
  REGION 1..14: note = Description of Artificial Sequence: Synthetic peptide
EVYSSGYYDYGMDV

SEQ ID NO: 23999 - DNA, 42 bp, synthetic construct; identical to SEQ ID NO: 23993
  misc_feature 1..42: note = Description of Artificial Sequence: Synthetic oligonucleotide
  source 1..42: mol_type = other DNA

SEQ ID NO: 24000 - protein, 14 aa, synthetic construct
  REGION 1..14: note = Description of Artificial Sequence: Synthetic peptide
EVYSSGFYDYGMDV

SEQ ID NO: 24001 - DNA, 42 bp, synthetic construct; identical to SEQ ID NO: 23991
  misc_feature 1..42: note = Description of Artificial Sequence: Synthetic oligonucleotide
  source 1..42: mol_type = other DNA

SEQ ID NO: 24002 - protein, 14 aa, synthetic construct
  REGION 1..14: note = Description of Artificial Sequence: Synthetic peptide
EVYSSGYYDYGMDV

SEQ ID NO: 24003 - DNA, 42 bp, synthetic construct; identical to SEQ ID NO: 23991
  misc_feature 1..42: note = Description of Artificial Sequence: Synthetic oligonucleotide
  source 1..42: mol_type = other DNA

SEQ ID NO: 24004 - protein, 14 aa, synthetic construct
  REGION 1..14: note = Description of Artificial Sequence: Synthetic peptide
EVYSSGYYDYGMDV

SEQ ID NO: 24005 - DNA, 42 bp, synthetic construct; identical to SEQ ID NO: 21005
  misc_feature 1..42: note = Description of Artificial Sequence: Synthetic oligonucleotide
  source 1..42: mol_type = other DNA

SEQ ID NO: 24006 - protein, 14 aa, synthetic construct
  REGION 1..14: note = Description of Artificial Sequence: Synthetic peptide
EVYSSGWYDYGMDV

SEQ ID NO: 24007 - DNA, 27 bp, synthetic construct
  misc_feature 1..27: note = Description of Artificial Sequence: Synthetic oligonucleotide
  source 1..27: mol_type = other DNA
gatctgagtatgggcggtatggacgtc

SEQ ID NO: 24008 - protein, 9 aa, synthetic construct
  REGION 1..9: note = Description of Artificial Sequence: Synthetic peptide
DLSMGGMDV

SEQ ID NO: 24009 - DNA, 27 bp, synthetic construct
  misc_feature 1..27: note = Description of Artificial Sequence: Synthetic oligonucleotide
  source 1..27: mol_type = other DNA
gatctgagtatgggcggtatggacgtc

SEQ ID NO: 24010 - protein, 9 aa, synthetic construct
  REGION 1..9: note = Description of Artificial Sequence: Synthetic peptide
DLSMGGMDV

SEQ ID NO: 24011 - DNA, 27 bp, synthetic construct
  misc_feature 1..27: note = Description of Artificial Sequence: Synthetic oligonucleotide
  source 1..27: mol_type = other DNA
gatctgagtatgggcggtatggacgtc

SEQ ID NO: 24012 - protein, 9 aa, synthetic construct
  REGION 1..9: note = Description of Artificial Sequence: Synthetic peptide
DLSMGGMDV

SEQ ID NO: 24013 - DNA, 27 bp, synthetic construct
  misc_feature 1..27: note = Description of Artificial Sequence: Synthetic oligonucleotide
  source 1..27: mol_type = other DNA
gatctgagtatgggcggtatggacgtc

SEQ ID NO: 24014 - protein, 9 aa, synthetic construct
  REGION 1..9: note = Description of Artificial Sequence: Synthetic peptide
DLSMGGMDV

SEQ ID NO: 24015 - DNA, 27 bp, synthetic construct
  misc_feature 1..27: note = Description of Artificial Sequence: Synthetic oligonucleotide
  source 1..27: mol_type = other DNA
gatctgagtatgggcggtatggacgtc

SEQ ID NO: 24016 - protein, 9 aa, synthetic construct
  REGION 1..9: note = Description of Artificial Sequence: Synthetic peptide
DLSMGGMDV

SEQ ID NO: 24017 - DNA, 27 bp, synthetic construct
  misc_feature 1..27: note = Description of Artificial Sequence: Synthetic oligonucleotide
  source 1..27: mol_type = other DNA
gatctgagtatgggcggtatggacgtc

SEQ ID NO: 24018 - protein, 9 aa, synthetic construct
  REGION 1..9: note = Description of Artificial Sequence: Synthetic peptide
DLSMGGMDV

SEQ ID NO: 24019 - DNA, 27 bp, synthetic construct
  misc_feature 1..27: note = Description of Artificial Sequence: Synthetic oligonucleotide
  source 1..27: mol_type = other DNA
gatctgagtatgggcggtatggacgtc

SEQ ID NO: 24020 - protein, 9 aa, synthetic construct
  REGION 1..9: note = Description of Artificial Sequence: Synthetic peptide
DLSMGGMDV

SEQ ID NO: 24021 - DNA, 27 bp, synthetic construct
  misc_feature 1..27: note = Description of Artificial Sequence: Synthetic oligonucleotide
  source 1..27: mol_type = other DNA
gatctgagtatgggcggtatggacgtc

SEQ ID NO: 24022 - protein, 9 aa, synthetic construct
  REGION 1..9: note = Description of Artificial Sequence: Synthetic peptide
DLSMGGMDV

SEQ ID NO: 24023 - DNA, 27 bp, synthetic construct
  misc_feature 1..27: note = Description of Artificial Sequence: Synthetic oligonucleotide
  source 1..27: mol_type = other DNA
gatctgagtatgggcggtatggacgtc

SEQ ID NO: 24024 - protein, 9 aa, synthetic construct
  REGION 1..9: note = Description of Artificial Sequence: Synthetic peptide
DLSMGGMDV

SEQ ID NO: 24025 - DNA, 27 bp, synthetic construct
  misc_feature 1..27: note = Description of Artificial Sequence: Synthetic oligonucleotide
  source 1..27: mol_type = other DNA
gatctgagtatgggcggtatggacgtc

SEQ ID NO: 24026 - protein, 9 aa, synthetic construct
  REGION 1..9: note = Description of Artificial Sequence: Synthetic peptide
DLSMGGMDV

SEQ ID NO: 24027 - DNA, 27 bp, synthetic construct
  misc_feature 1..27: note = Description of Artificial Sequence: Synthetic oligonucleotide
  source 1..27: mol_type = other DNA
gatctgagtatgggcggtatggacgtc

SEQ ID NO: 24028 - protein, 9 aa, synthetic construct
  REGION 1..9: note = Description of Artificial Sequence: Synthetic peptide
DLSMGGMDV

SEQ ID NO: 24029 - DNA, 27 bp, synthetic construct
  misc_feature 1..27: note = Description of Artificial Sequence: Synthetic oligonucleotide
  source 1..27: mol_type = other DNA
gatctgagtatgggcggtatggacgtc

SEQ ID NO: 24030 - protein, 9 aa, synthetic construct
  REGION 1..9: note = Description of Artificial Sequence: Synthetic peptide
DLSMGGMDV

SEQ ID NO: 24031 - DNA, 27 bp, synthetic construct
  misc_feature 1..27: note = Description of Artificial Sequence: Synthetic oligonucleotide
  source 1..27: mol_type = other DNA
gatctgagtatgggcggtatggacgtc

SEQ ID NO: 24032 - protein, 9 aa, synthetic construct
  REGION 1..9: note = Description of Artificial Sequence: Synthetic peptide
DLSMGGMDV

SEQ ID NO: 24033 - DNA, 27 bp, synthetic construct
  misc_feature 1..27: note = Description of Artificial Sequence: Synthetic oligonucleotide
  source 1..27: mol_type = other DNA
gatctgagtatgggcggtatggacgtc

SEQ ID NO: 24034 - protein, 9 aa, synthetic construct
  REGION 1..9: note = Description of Artificial Sequence: Synthetic peptide
DLSMGGMDV

SEQ ID NO: 24035 - DNA, 27 bp, synthetic construct
  misc_feature 1..27: note = Description of Artificial Sequence: Synthetic oligonucleotide
  source 1..27: mol_type = other DNA
gatctgagtatgggcggtatggacgtc

SEQ ID NO: 24036 - protein, 9 aa, synthetic construct
  REGION 1..9: note = Description of Artificial Sequence: Synthetic peptide
DLSMGGMDV

SEQ ID NO: 24037 - DNA, 27 bp, synthetic construct
  misc_feature 1..27: note = Description of Artificial Sequence: Synthetic oligonucleotide
  source 1..27: mol_type = other DNA
gatctgagtatgggcggtatggacgtc

SEQ ID NO: 24038 - protein, 9 aa, synthetic construct
  REGION 1..9: note = Description of Artificial Sequence: Synthetic peptide
DLSMGGMDV

SEQ ID NO: 24039 - DNA, 27 bp, synthetic construct
  misc_feature 1..27: note = Description of Artificial Sequence: Synthetic oligonucleotide
  source 1..27: mol_type = other DNA
gatctgagtatgggcggtatggacgtc

SEQ ID NO: 24040 - protein, 9 aa, synthetic construct
  REGION 1..9: note = Description of Artificial Sequence: Synthetic peptide
DLSMGGMDV

SEQ ID NO: 24041 - DNA, 27 bp, synthetic construct
  misc_feature 1..27: note = Description of Artificial Sequence: Synthetic oligonucleotide
  source 1..27: mol_type = other DNA
gatctgagtatgggcggtatggacgtc

SEQ ID NO: 24042 - protein, 9 aa, synthetic construct
  REGION 1..9: note = Description of Artificial Sequence: Synthetic peptide
DLSMGGMDV

SEQ ID NO: 24043 - DNA, 27 bp, synthetic construct
  misc_feature 1..27: note = Description of Artificial Sequence: Synthetic oligonucleotide
  source 1..27: mol_type = other DNA
gatctgagtatgggcggtatggacgtc

SEQ ID NO: 24044 - protein, 9 aa, synthetic construct
  REGION 1..9: note = Description of Artificial Sequence: Synthetic peptide
DLSMGGMDV

SEQ ID NO: 24045 - DNA, 27 bp, synthetic construct
  misc_feature 1..27: note = Description of Artificial Sequence: Synthetic oligonucleotide
  source 1..27: mol_type = other DNA
gatctgagtatgggcggtatggacgtc

SEQ ID NO: 24046 - protein, 9 aa, synthetic construct
  REGION 1..9: note = Description of Artificial Sequence: Synthetic peptide
DLSMGGMDV

SEQ ID NO: 24047 - DNA, 27 bp, synthetic construct
  misc_feature 1..27: note = Description of Artificial Sequence: Synthetic oligonucleotide
  source 1..27: mol_type = other DNA
gatctgagtatgggcggtatggacgtc

SEQ ID NO: 24048 - protein, 9 aa, synthetic construct
  REGION 1..9: note = Description of Artificial Sequence: Synthetic peptide
DLSMGGMDV

SEQ ID NO: 24049 - DNA, 33 bp, synthetic construct; identical to SEQ ID NO: 22209
  misc_feature 1..33: note = Description of Artificial Sequence: Synthetic oligonucleotide
  source 1..33: mol_type = other DNA

SEQ ID NO: 24050 - protein, 11 aa, synthetic construct
  REGION 1..11: note = Description of Artificial Sequence: Synthetic peptide
GGYNWNHAFDI

SEQ ID NO: 24051 - DNA, 36 bp, synthetic construct
  misc_feature 1..36: note = Description of Artificial Sequence: Synthetic oligonucleotide
  source 1..36: mol_type = other DNA
ggagggaattacttctacaaccacgttatggacgtc

SEQ ID NO: 24052 - protein, 12 aa, synthetic construct
  REGION 1..12: note = Description of Artificial Sequence: Synthetic peptide
GGNYFYNHVMDV

SEQ ID NO: 24053 - DNA, 36 bp, synthetic construct; identical to SEQ ID NO: 24051
  misc_feature 1..36: note = Description of Artificial Sequence: Synthetic oligonucleotide
  source 1..36: mol_type = other DNA

SEQ ID NO: 24054 - protein, 12 aa, synthetic construct
  REGION 1..12: note = Description of Artificial Sequence: Synthetic peptide
GGNYFYNHVMDV

SEQ ID NO: 24055 - DNA, 27 bp, synthetic construct
  misc_feature 1..27: note = Description of Artificial Sequence: Synthetic oligonucleotide
  source 1..27: mol_type = other DNA
agcagtggctggtactactttgactac

SEQ ID NO: 24056 - protein, 9 aa, synthetic construct
  REGION 1..9: note = Description of Artificial Sequence: Synthetic peptide
SSGWYYFDY

SEQ ID NO: 24057 - DNA, 24 bp, synthetic construct
  misc_feature 1..24: note = Description of Artificial Sequence: Synthetic oligonucleotide
  source 1..24: mol_type = other DNA
gatgctaccagctcgtttgactac

SEQ ID NO: 24058 - protein, 8 aa, synthetic construct
  REGION 1..8: note = Description of Artificial Sequence: Synthetic peptide
DATSSFDY

SEQ ID NO: 24059 - DNA, 27 bp, synthetic construct
  misc_feature 1..27: note = Description of Artificial Sequence: Synthetic oligonucleotide
  source 1..27: mol_type = other DNA
gatctgagtatgggcggtatggacgtc

SEQ ID NO: 24060 - protein, 9 aa, synthetic construct
  REGION 1..9: note = Description of Artificial Sequence: Synthetic peptide
DLSMGGMDV

SEQ ID NO: 24061 - DNA, 27 bp, synthetic construct
  misc_feature 1..27: note = Description of Artificial Sequence: Synthetic oligonucleotide
  source 1..27: mol_type = other DNA
agcagtggctggtacatctttgactac

SEQ ID NO: 24062 - protein, 9 aa, synthetic construct
  REGION 1..9: note = Description of Artificial Sequence: Synthetic peptide
SSGWYIFDY

SEQ ID NO: 24063 - DNA, 27 bp, synthetic construct
  misc_feature 1..27: note = Description of Artificial Sequence: Synthetic oligonucleotide
  source 1..27: mol_type = other DNA
tccagtggctggcactggttcgacccc

SEQ ID NO: 24064 - protein, 9 aa, synthetic construct
  REGION 1..9: note = Description of Artificial Sequence: Synthetic peptide
SSGWHWFDP

SEQ ID NO: 24065 - DNA, 18 bp, synthetic construct
  misc_feature 1..18: note = Description of Artificial Sequence: Synthetic oligonucleotide
  source 1..18: mol_type = other DNA
gatgcgtatagccactac

SEQ ID NO: 24066 - protein, 6 aa, synthetic construct
  REGION 1..6: note = Description of Artificial Sequence: Synthetic peptide
DAYSHY

SEQ ID NO: 24067 - DNA, 24 bp, synthetic construct
  misc_feature 1..24: note = Description of Artificial Sequence: Synthetic oligonucleotide
  source 1..24: mol_type = other DNA
gggggttcgagggggttcgacccc

SEQ ID NO: 24068 - protein, 8 aa, synthetic construct
  REGION 1..8: note = Description of Artificial Sequence: Synthetic peptide
GGSRGFDP

SEQ ID NO: 24069 - DNA, 42 bp, synthetic construct
  misc_feature 1..42: note = Description of Artificial Sequence: Synthetic oligonucleotide
  source 1..42: mol_type = other DNA
gatgtgaagcagtggctggtacggacctacggtatggacgtc

SEQ ID NO: 24070 - protein, 14 aa, synthetic construct
  REGION 1..14: note = Description of Artificial Sequence: Synthetic peptide
DVKQWLVRTYGMDV

SEQ ID NO: 24071 - DNA, 60 bp, synthetic construct
  misc_feature 1..60: note = Description of Artificial Sequence: Synthetic oligonucleotide
  source 1..60: mol_type = other DNA
gaggatcgatattgtagtggtaccagctgcccctactactactactacggtatggacgtc

SEQ ID NO: 24072 - protein, 20 aa, synthetic construct
  REGION 1..20: note = Description of Artificial Sequence: Synthetic peptide
EDRYCSGTSCPYYYYYGMDV

SEQ ID NO: 24073 - DNA, 39 bp, synthetic construct; identical to SEQ ID NO: 22947
  misc_feature 1..39: note = Description of Artificial Sequence: Synthetic oligonucleotide
  source 1..39: mol_type = other DNA

SEQ ID NO: 24074 - protein, 13 aa, synthetic construct
  REGION 1..13: note = Description of Artificial Sequence: Synthetic peptide
HDFWSGYYKGMDV

SEQ ID NO: 24075 - DNA, 39 bp, synthetic construct; identical to SEQ ID NO: 22947
  misc_feature 1..39: note = Description of Artificial Sequence: Synthetic oligonucleotide
  source 1..39: mol_type = other DNA

SEQ ID NO: 24076 - protein, 13 aa, synthetic construct
  REGION 1..13: note = Description of Artificial Sequence: Synthetic peptide
HDFWSGYYKGMDV

SEQ ID NO: 24077 - DNA, 39 bp, synthetic construct; identical to SEQ ID NO: 22947
  misc_feature 1..39: note = Description of Artificial Sequence: Synthetic oligonucleotide
  source 1..39: mol_type = other DNA

SEQ ID NO: 24078 - protein, 13 aa, synthetic construct
  REGION 1..13: note = Description of Artificial Sequence: Synthetic peptide
HDFWSGYYKGMDV

SEQ ID NO: 24079 - DNA, 60 bp, synthetic construct; identical to SEQ ID NO: 23555
  misc_feature 1..60: note = Description of Artificial Sequence: Synthetic oligonucleotide
  source 1..60: mol_type = other DNA

SEQ ID NO: 24080 - protein, 20 aa, synthetic construct
  REGION 1..20: note = Description of Artificial Sequence: Synthetic peptide
DRDYCSSTSCPYYYYYGMDV

SEQ ID NO: 24081 - DNA, 54 bp, synthetic construct
  misc_feature 1..54: note = Description of Artificial Sequence: Synthetic oligonucleotide
  source 1..54: mol_type = other DNA
gaaaacgaaagtctagcaactcgtcctttctacgactactacggtatggacgtc

SEQ ID NO: 24082 - protein, 18 aa, synthetic construct
  REGION 1..18: note = Description of Artificial Sequence: Synthetic peptide
ENESLATRPFYDYYGMDV

SEQ ID NO: 24083 - DNA, 42 bp, synthetic construct; identical to SEQ ID NO: 22371
  misc_feature 1..42: note = Description of Artificial Sequence: Synthetic oligonucleotide
  source 1..42: mol_type = other DNA

SEQ ID NO: 24084 - protein, 14 aa, synthetic construct
  REGION 1..14: note = Description of Artificial Sequence: Synthetic peptide
EPYNSGWYDYGMDV

SEQ ID NO: 24085 - DNA, 27 bp, synthetic construct
  misc_feature 1..27: note = Description of Artificial Sequence: Synthetic oligonucleotide
  source 1..27: mol_type = other DNA
agcagtggctggtacttctttgactac

SEQ ID NO: 24086 - protein, 9 aa, synthetic construct
  REGION 1..9: note = Description of Artificial Sequence: Synthetic peptide
SSGWYFFDY

SEQ ID NO: 24087 - DNA, 42 bp, synthetic construct
  misc_feature 1..42: note = Description of Artificial Sequence: Synthetic oligonucleotide
  source 1..42: mol_type = other DNA
gacacgttttgctttgatggttgtggttatttctttgactcc

SEQ ID NO: 24088 - protein, 14 aa, synthetic construct
  REGION 1..14: note = Description of Artificial Sequence: Synthetic peptide
DTFCFDGCGYFFDS

SEQ ID NO: 24089 - DNA, 33 bp, synthetic construct; identical to SEQ ID NO: 22735
  misc_feature 1..33: note = Description of Artificial Sequence: Synthetic oligonucleotide
  source 1..33: mol_type = other DNA

SEQ ID NO: 24090 - protein, 11 aa, synthetic construct
  REGION 1..11: note = Description of Artificial Sequence: Synthetic peptide
DQGVGYYGMDV

SEQ ID NO: 24091 - DNA, 21 bp, synthetic construct
  misc_feature 1..21: note = Description of Artificial Sequence: Synthetic oligonucleotide
  source 1..21: mol_type = other DNA
gactacggtgtctttgactac

SEQ ID NO: 24092 - protein, 7 aa, synthetic construct
  REGION 1..7: note = Description of Artificial Sequence: Synthetic peptide
DYGVFDY

SEQ ID NO: 24093 - DNA, 27 bp, synthetic construct
  misc_feature 1..27: note = Description of Artificial Sequence: Synthetic oligonucleotide
  source 1..27: mol_type = other DNA
agcagtggctggtacttttttgactac

SEQ ID NO: 24094 - protein, 9 aa, synthetic construct
  REGION 1..9: note = Description of Artificial Sequence: Synthetic peptide
SSGWYFFDY

SEQ ID NO: 24095 - DNA, 27 bp, synthetic construct
  misc_feature 1..27: note = Description of Artificial Sequence: Synthetic oligonucleotide
  source 1..27: mol_type = other DNA
agcagtggctggtacctctttgactac

SEQ ID NO: 24096 - protein, 9 aa, synthetic construct
  REGION 1..9: note = Description of Artificial Sequence: Synthetic peptide
SSGWYLFDY

SEQ ID NO: 24097 - DNA, 27 bp, synthetic construct
  misc_feature 1..27: note = Description of Artificial Sequence: Synthetic oligonucleotide
  source 1..27: mol_type = other DNA
tccagtggctggtactggttcgacccc

SEQ ID NO: 24098 - protein, 9 aa, synthetic construct
  REGION 1..9: note = Description of Artificial Sequence: Synthetic peptide
SSGWYWFDP

SEQ ID NO: 24099 - DNA, 27 bp, synthetic construct
  misc_feature 1..27: note = Description of Artificial Sequence: Synthetic oligonucleotide
  source 1..27: mol_type = other DNA
agcagtggctggtactactttgactac

SEQ ID NO: 24100 - protein, 9 aa, synthetic construct
  REGION 1..9: note = Description of Artificial Sequence: Synthetic peptide
SSGWYYFDY

SEQ ID NO: 24101 - DNA, 27 bp, synthetic construct
  misc_feature 1..27: note = Description of Artificial Sequence: Synthetic oligonucleotide
  source 1..27: mol_type = other DNA
tccagtggctggaactggttcgacccc

SEQ ID NO: 24102 - protein, 9 aa, synthetic construct
  REGION 1..9: note = Description of Artificial Sequence: Synthetic peptide
SSGWNWFDP

SEQ ID NO: 24103 - DNA, 60 bp, synthetic construct
  misc_feature 1..60: note = Description of Artificial Sequence: Synthetic oligonucleotide
  source 1..60: mol_type = other DNA
gggttttacgatattttgactggttattcccccacctactactactacgatatggacgtc

SEQ ID NO: 24104 - protein, 20 aa, synthetic construct
  REGION 1..20: note = Description of Artificial Sequence: Synthetic peptide
GFYDILTGYSPTYYYYDMDV

SEQ ID NO: 24105 - DNA, 60 bp, synthetic construct; identical to SEQ ID NO: 24103
  misc_feature 1..60: note = Description of Artificial Sequence: Synthetic oligonucleotide
  source 1..60: mol_type = other DNA

SEQ ID NO: 24106 - protein, 20 aa, synthetic construct
  REGION 1..20: note = Description of Artificial Sequence: Synthetic peptide
GFYDILTGYSPTYYYYDMDV

SEQ ID NO: 24107 - DNA, 45 bp, synthetic construct
  misc_feature 1..45: note = Description of Artificial Sequence: Synthetic oligonucleotide
  source 1..45: mol_type = other DNA
cacggtatagcagtggctggtactggggctcactactttgactac

SEQ ID NO: 24108 - protein, 15 aa, synthetic construct
  REGION 1..15: note = Description of Artificial Sequence: Synthetic peptide
HGIAVAGTGAHYFDY

SEQ ID NO: 24109 - DNA, 60 bp, synthetic construct; identical to SEQ ID NO: 24103
  misc_feature 1..60: note = Description of Artificial Sequence: Synthetic oligonucleotide
  source 1..60: mol_type = other DNA

SEQ ID NO: 24110 - protein, 20 aa, synthetic construct
  REGION 1..20: note = Description of Artificial Sequence: Synthetic peptide
GFYDILTGYSPTYYYYDMDV

SEQ ID NO: 24111 - DNA, 60 bp, synthetic construct; identical to SEQ ID NO: 24103
  misc_feature 1..60: note = Description of Artificial Sequence: Synthetic oligonucleotide
  source 1..60: mol_type = other DNA

SEQ ID NO: 24112 - protein, 20 aa, synthetic construct
  REGION 1..20: note = Description of Artificial Sequence: Synthetic peptide
GFYDILTGYSPTYYYYDMDV

SEQ ID NO: 24113 - DNA, 45 bp, synthetic construct; identical to SEQ ID NO: 24107
  misc_feature 1..45: note = Description of Artificial Sequence: Synthetic oligonucleotide
  source 1..45: mol_type = other DNA

SEQ ID NO: 24114 - protein, 15 aa, synthetic construct
  REGION 1..15: note = Description of Artificial Sequence: Synthetic peptide
HGIAVAGTGAHYFDY

SEQ ID NO: 24115 - DNA, 321 bp, synthetic construct
  misc_feature 1..321: note = Description of Artificial Sequence: Synthetic polynucleotide
  source 1..321: mol_type = other DNA
gacatccagatgacccagtctccattctccctgtctgcatctgtaggcgacagagtcaccatcacttgccgggcaagtcggagcgttagcagatatttaaattggtatcagcagacactggggaaagcccttaagctcttgatatctgttgcatcccgtttgcaaagtggggtcccatcgaggttcagtggcagtggatctgggacagatttcactctcaccatcagcagtgtgcaacgtgaagattttgcaacttacttctgtcaacagagtgacagtttccctctcactttcggcggagggaccaaggtggagatcaaa

SEQ ID NO: 24116 - protein, 107 aa, synthetic construct
  REGION 1..107: note = Description of Artificial Sequence: Synthetic polypeptide
DIQMTQSPFSLSASVGDRVTITCRASRSVSRYLNWYQQTLGKALKLLISVASRLQSGVPSRFSGSGSGTDFTLTISSVQREDFATYFCQQSDSFPLTFGGGTKVEIK

SEQ ID NO: 24117 - DNA, 339 bp, synthetic construct
  misc_feature 1..339: note = Description of Artificial Sequence: Synthetic polynucleotide
  source 1..339: mol_type = other DNA
gacatcgtgatgacccagtctccagactccctggctgtgtctctgggcgagagggccaccatcaactgcaagtccagccagagtcttttaaagagctccaacaataagagctacttagcttcgtaccagcagaagccaggacagcttcctaaactgctcatttactgggcatcttcccgggaatccggggtccctgaccgattcagtggcagcgggtctgggacagatttcactctcaccatcagcagcctgcaggctgaagatgtggcactttattactgtcagcaatattatagtattcctcccactttcggccatgggaccaatgtggatatcacg

SEQ ID NO: 24118 - protein, 113 aa, synthetic construct
  REGION 1..113: note = Description of Artificial Sequence: Synthetic polypeptide
DIVMTQSPDSLAVSLGERATINCKSSQSLLKSSNNKSYLASYQQKPGQLPKLLIYWASSRESGVPDRFSGSGSGTDFTLTISSLQAEDVALYYCQQYYSIPPTFGHGTNVDIT

SEQ ID NO: 24119 - DNA, 339 bp, synthetic construct
  misc_feature 1..339: note = Description of Artificial Sequence: Synthetic polynucleotide
  source 1..339: mol_type = other DNA
gacatcgttatgacccagtctccagactccctggctgtgtctctgggcgagagggccaccatcaactgcaagtccagccagagtgttttattcagctccaacaattataactacttagcttggtaccagcagagaccaggacagcctcctaacctgctcatttactgggcatctacccgggaatccggggtccctgaccgattcagtggcagcgggtctgggacagatttcactctcaccatcagcagcctgcaggctgctgatgtggcagtttattactgtcagcaatatcatagttctcctccgacgttcggccaagggaccacggtgcaaatcaaa

SEQ ID NO: 24120 - protein, 113 aa, synthetic construct
  REGION 1..113: note = Description of Artificial Sequence: Synthetic polypeptide
DIVMTQSPDSLAVSLGERATINCKSSQSVLFSSNNYNYLAWYQQRPGQPPNLLIYWASTRESGVPDRFSGSGSGTDFTLTISSLQAADVAVYYCQQYHSSPPTFGQGTTVQIK

SEQ ID NO: 24121 - DNA, 336 bp, synthetic construct
  misc_feature 1..336: note = Description of Artificial Sequence: Synthetic polynucleotide
  source 1..336: mol_type = other DNA
gatattgtgatgacccagactccactctctctctctgtcacacctggacagccggcctccatctcctgcaagtctagtcagagcctcctgcgtagtgatggaaagacccatttgtattggtacctgcagaagccaggccagcctccacagctcttaatctatgaagtttccaaccggttctctggagtgtcagataggttcagtggcagcgggtcagggacagatttcacactgaaaatcagccgggtggaggctgaggatgttggggtttattactgcatgcaaagtaaacagcttcctctcactttcggcggagggaccaaggtggagttcaaa

SEQ ID NO: 24122 - protein, 112 aa, synthetic construct
  REGION 1..112: note = Description of Artificial Sequence: Synthetic polypeptide
DIVMTQTPLSLSVTPGQPASISCKSSQSLLRSDGKTHLYWYLQKPGQPPQLLIYEVSNRFSGVSDRFSGSGSGTDFTLKISRVEAEDVGVYYCMQSKQLPLTFGGGTKVEFK

SEQ ID NO: 24123 - DNA, 321 bp, synthetic construct
  misc_feature 1..321: note = Description of Artificial Sequence: Synthetic polynucleotide
  source 1..321: mol_type = other DNA
gacatccagatgacccagtttccatcctcactgtttgcatttgtaggagacagagtcaccatcacttgtccggcgagtcagggcattagcaattatttagcttggtttcagcagaaaccagggaaagcccctaagtcccttatttatggtgcattcaatttgcacagtggggtcccatcaaagttcagcggcagtggatttgggacagatttcactctcaccatcaacagcctgcagcctgaagattttgcaaattattactgccaacagtatagttgttacccattcactttcggccatgggaccaaagtggatatcaaa

SEQ ID NO: 24124 - protein, 107 aa, synthetic construct
  REGION 1..107: note = Description of Artificial Sequence: Synthetic polypeptide
DIQMTQFPSSLFAFVGDRVTITCPASQGISNYLAWFQQKPGKAPKSLIYGAFNLHSGVPSKFSGSGFGTDFTLTINSLQPEDFANYYCQQYSCYPFTFGHGTKVDIK

SEQ ID NO: 24125 - DNA, 321 bp, synthetic construct
  misc_feature 1..321: note = Description of Artificial Sequence: Synthetic polynucleotide
  source 1..321: mol_type = other DNA
tcctatgagctgactcagccaccctcagtgtccgtgtccccaggacagacagccagcatcacctgctctggagataaattgggtaataaatatgtttgttggtatcagcagaggccaggccatgctgctgtgctgatcatctatcaagatagcaagcggccctcagggatccctgagcgattctctggctccaactctgggaacacagccactctgaccatcagcgggacccaggctatggatgaggctgactatttctgtcaggcgtgggacaggaacacttatgtggtgttcggcggagggaccaagctgaccgtccta

SEQ ID NO: 24126 - protein, 107 aa, synthetic construct
  REGION 1..107: note = Description of Artificial Sequence: Synthetic polypeptide
SYELTQPPSVSVSPGQTASITCSGDKLGNKYVCWYQQRPGHAAVLIIYQDSKRPSGIPERFSGSNSGNTATLTISGTQAMDEADYFCQAWDRNTYVVFGGGTKLTVL

SEQ ID NO: 24127 - DNA, 321 bp, synthetic construct
  misc_feature 1..321: note = Description of Artificial Sequence: Synthetic polynucleotide
  source 1..321: mol_type = other DNA
gacatccagatgacccagtctccatcttccgtgtctgcatctgtaggagacagagtcaccatcacttgtcgggggggtcagggtattagcacatggttagcatggtatcagcagaaaccagggaaagcccctaagctcctgatctatgctgcatccattttgcaaagtggggtcccatcaaggttcagaggcaggggatctgggacagatttcactctcaccatcagcagcctgcagcctgaagattttgcaacttattattgtcaacagggtaacattttcccattcactttcggccgagggaccaaagtggatatcaaa

SEQ ID NO: 24128 - protein, 107 aa, synthetic construct
  REGION 1..107: note = Description of Artificial Sequence: Synthetic polypeptide
DIQMTQSPSSVSASVGDRVTITCRGGQGISTWLAWYQQKPGKAPKLLIYAASILQSGVPSRFRGRGSGTDFTLTISSLQPEDFATYYCQQGNIFPFTFGRGTKVDIK

SEQ ID NO: 24129 - DNA, 321 bp, synthetic construct
  misc_feature 1..321: note = Description of Artificial Sequence: Synthetic polynucleotide
  source 1..321: mol_type = other DNA
gacatccagatgacccagtctccatcctccctgtctgcatctgtaggagacagagtcaccatcacttgccggacaagtcagggcattagaaatgatttaggctggtatcagcagcaaccagggaaaacccctaagcgcctgatctatgctgcatccagtttgcttagtggggtcccatcaaggttcagcggcagtagatctgggacagatttcactctcacaatcagcagcctgcagcctgaagattttgcaacttattactgtctacagtataatagttaccctcccaccttcggccaagggacacgactggagattaaa

SEQ ID NO: 24130 - protein, 107 aa, synthetic construct
  REGION 1..107: note = Description of Artificial Sequence: Synthetic polypeptide
DIQMTQSPSSLSASVGDRVTITCRTSQGIRNDLGWYQQQPGKTPKRLIYAASSLLSGVPSRFSGSRSGTDFTLTISSLQPEDFATYYCLQYNSYPPTFGQGTRLEIK

SEQ ID NO: 24131 - DNA, 321 bp, synthetic construct
  misc_feature 1..321: note = Description of Artificial Sequence: Synthetic polynucleotide
  source 1..321: mol_type = other DNA
gacatccagatgacccagtctccatcttccgtgtctgcatctgtaggagacagagtcaccatcacttgtcgggcgagtcagggtattagcaaatggttagcctggtatcagcagaaaccagggaaagcccctaagctcctgctctatgctgcatccagtttgcaaagtggggtcccatcaagattcagcgccagtggatctgggacagatttcactctcaccatcagcagtttgcagcctgaagattttgcaacttactattgtcaacaggctaacagtttcccattcactttcggccctgggaccaaagtggatgtcaaa

SEQ ID NO: 24132 - protein, 107 aa, synthetic construct
  REGION 1..107: note = Description of Artificial Sequence: Synthetic polypeptide
DIQMTQSPSSVSASVGDRVTITCRASQGISKWLAWYQQKPGKAPKLLLYAASSLQSGVPSRFSASGSGTDFTLTISSLQPEDFATYYCQQANSFPFTFGPGTKVDVK

SEQ ID NO: 24133 - DNA, 321 bp, synthetic construct
  misc_feature 1..321: note = Description of Artificial Sequence: Synthetic polynucleotide
  source 1..321: mol_type = other DNA
gacatccagatgacccagtctccatcttccgtgtctgcatctgtaggagacagagtcaccatcacttgtcgggcgagtcagggtattagcaagtggttagcctggtatcagcagaaaccagggaaagcccctaacctccttctctatgctgcatccagtttgcaaagtggggtcccatcaaaattcagcggcagtggatctgggacagatttcactctcaccatcagcagcctgcagcctgaagattttgcaacttactattgtcaacaggctaacagtttcccattcactttcggccctgggaccaaagtggatgtcaaa

SEQ ID NO: 24134 - protein, 107 aa, synthetic construct
  REGION 1..107: note = Description of Artificial Sequence: Synthetic polypeptide
DIQMTQSPSSVSASVGDRVTITCRASQGISKWLAWYQQKPGKAPNLLLYAASSLQSGVPSKFSGSGSGTDFTLTISSLQPEDFATYYCQQANSFPFTFGPGTKVDVK

SEQ ID NO: 24135 - DNA, 324 bp, synthetic construct
  misc_feature 1..324: note = Description of Artificial Sequence: Synthetic polynucleotide
  source 1..324: mol_type = other DNA
gaaattgtgttgacgcagtctccaggcaccctgtctttgtctccaggggagagagccaccctctcctgcagggccagtcagagtgttaacagcaactacttagcctggtaccggcagaaacctggccaggctcccaggctcctcatctatggtgcatccagcagggccactggcatcccagacaggttcagtggcagtgggtctgggacagacttcattctcatcatcagcagactggagcctgaggattttgcagtgtattactgtcagcagtatgaaagctcgccgtggacgttcggccaagggaccaaggtggaaatcaaa

SEQ ID NO: 24136 - protein, 108 aa, synthetic construct
  REGION 1..108: note = Description of Artificial Sequence: Synthetic polypeptide
EIVLTQSPGTLSLSPGERATLSCRASQSVNSNYLAWYRQKPGQAPRLLIYGASSRATGIPDRFSGSGSGTDFILIISRLEPEDFAVYYCQQYESSPWTFGQGTKVEIK

SEQ ID NO: 24137 - DNA, 321 bp, synthetic construct
  misc_feature 1..321: note = Description of Artificial Sequence: Synthetic polynucleotide
  source 1..321: mol_type = other DNA
gacatccagatgacccagtttccatcctccctgtctgcatctgtaggagacagagtcaccatcacttgccgggcaagtcgagacattagaaatgatttaggctggtatcagcagaaaccaggaaaagcccctaagcgcctgatctatgctgcatccagtttgcaaagtggggtcccatcaaggttcagcggcagtggatctgggacagaattcactctcacaatcagcagcctgcagcctgaagattttgcaacttattactgtctacaacattatagttacccgctcactttcggcggagggaccaaggtggagatcaaa

SEQ ID NO: 24138 - protein, 107 aa, synthetic construct
  REGION 1..107: note = Description of Artificial Sequence: Synthetic polypeptide
DIQMTQFPSSLSASVGDRVTITCRASRDIRNDLGWYQQKPGKAPKRLIYAASSLQSGVPSRFSGSGSGTEFTLTISSLQPEDFATYYCLQHYSYPLTFGGGTKVEIK

SEQ ID NO: 24139 - DNA, 336 bp, synthetic construct
  misc_feature 1..336: note = Description of Artificial Sequence: Synthetic polynucleotide
  source 1..336: mol_type = other DNA
gatattgtgatgacccagactccactctctctgtccgtcacccctggacagccggcctccatgtcctgcaagtctagtcagagcctcctgcatagtgaaggaaagacctatttgtattggtacctgcagaagacaggccagcctccacacctcctgatctatgaagtttccaagcggctctctggcgtgccagataggttcagtggcagcgggtcagggacagatttcacactgaaaatcagccggatggaggctgaggatgttggggtttattactgcatgcaaagtatgcagcttccgattatcttcggccaggggacacgactggagattaaa

SEQ ID NO: 24140 - protein, 112 aa, synthetic construct
  REGION 1..112: note = Description of Artificial Sequence: Synthetic polypeptide
DIVMTQTPLSLSVTPGQPASMSCKSSQSLLHSEGKTYLYWYLQKTGQPPHLLIYEVSKRLSGVPDRFSGSGSGTDFTLKISRMEAEDVGVYYCMQSMQLPIIFGQGTRLEIK

SEQ ID NO: 24141 - DNA, 321 bp, synthetic construct
  misc_feature 1..321: note = Description of Artificial Sequence: Synthetic polynucleotide
  source 1..321: mol_type = other DNA
gacatccagatgacccagtctccctcctcactgtctgcatctgtaggagacagagtcaccatcacttgtcgggcgagtcagggcattagcaattatttagcctggtttcagcagaaaccagggaaagcccctaagtccctgatctatgctgcatccactttgcaaagtggggtcccatcaaagttcagcggcagtagatctgggacagattttaatctcaccatcagcaacctgcagcctgaagattttgcaacttattactgccaacagtatagtggttacccattcactttcggccctgggaccaaagtggataccaaa

SEQ ID NO: 24142 - protein, 107 aa, synthetic construct
  REGION 1..107: note = Description of Artificial Sequence: Synthetic polypeptide
DIQMTQSPSSLSASVGDRVTITCRASQGISNYLAWFQQKPGKAPKSLIYAASTLQSGVPSKFSGSRSGTDFNLTISNLQPEDFATYYCQQYSGYPFTFGPGTKVDTK

SEQ ID NO: 24143 - DNA, 336 bp, synthetic construct
  misc_feature 1..336: note = Description of Artificial Sequence: Synthetic polynucleotide
  source 1..336: mol_type = other DNA
gctattgtgatgacccagactccactctctctgtccgtcacccctggacagccggcctccatctcctgcaagtctagtcagcgcctcctgcatggtgatggaaagacctatttgtattggtacctgcagaagccaggccagcctccacacctcctgatctctgaagtttccaaccggttctctggagtgccagataggttcagtggcagcgggtcagggacagatttcacactgaaaatcagccgggtggaggctgaggatgttggggtttattactgcatgcaaagtatacaggttccgtggacgttcggccaagggaccaaggtggaaatcaaa

SEQ ID NO: 24144 - protein, 112 aa, synthetic construct
  REGION 1..112: note = Description of Artificial Sequence: Synthetic polypeptide
AIVMTQTPLSLSVTPGQPASISCKSSQRLLHGDGKTYLYWYLQKPGQPPHLLISEVSNRFSGVPDRFSGSGSGTDFTLKISRVEAEDVGVYYCMQSIQVPWTFGQGTKVEIK

SEQ ID NO: 24145 - DNA, 321 bp, synthetic construct
  misc_feature 1..321: note = Description of Artificial Sequence: Synthetic polynucleotide
  source 1..321: mol_type = other DNA
gacatccagatgacccagtctccatcctccctgtctgcatctgtaggagacagagtcaccatcacttgccgggcaagtcagggcattagaaatgatttaggctggtatcagcagaaaccagggaaagcccctaagcgcctgatctatgctgcatccagtttgcaaagtggggtcccgtcaaggttcagcggcagtggatctgggacagaattcactctcacaatcagcagcctgcagcctgaagattttgcaacttattactgtctacagcataatagttacccgctcactttcggcggagggaccaaggtggagatcaaa

SEQ ID NO: 24146 - protein, 107 aa, synthetic construct
  REGION 1..107: note = Description of Artificial Sequence: Synthetic polypeptide
DIQMTQSPSSLSASVGDRVTITCRASQGIRNDLGWYQQKPGKAPKRLIYAASSLQSGVPSRFSGSGSGTEFTLTISSLQPEDFATYYCLQHNSYPLTFGGGTKVEIK

SEQ ID NO: 24147 - DNA, 321 bp, synthetic construct
  misc_feature 1..321: note = Description of Artificial Sequence: Synthetic polynucleotide
  source 1..321: mol_type = other DNA
gacatccagatgacccagtctccatcctccctgtctgcatctgtaggagacagagtcaccatcacttgccgggcaagtcagggcattagaaatgatttaggctggtatcagcagaaaccagggaaagcccctaagcgcctgatctatgctgcatccagtttgcaaagtggggtcccatcaaggttcagcggcagtggatctgggacagaattcactctcacaatcagcagcctgcagcctgaagattttgaaacttattactgtctacagcataatgattacccgttcactttcggcggagggaccaaggtggagatcaaa

SEQ ID NO: 24148 - protein, 107 aa, synthetic construct
  REGION 1..107: note = Description of Artificial Sequence: Synthetic polypeptide
DIQMTQSPSSLSASVGDRVTITCRASQGIRNDLGWYQQKPGKAPKRLIYAASSLQSGVPSRFSGSGSGTEFTLTISSLQPEDFETYYCLQHNDYPFTFGGGTKVEIK

SEQ ID NO: 24149 - DNA, 321 bp, synthetic construct
  misc_feature 1..321: note = Description of Artificial Sequence: Synthetic polynucleotide
  source 1..321: mol_type = other DNA
gacatccagatgacccagtctccatcctccctgtctgcatctgtaggagacagagtcaccatcacttgccgggcaagtcagggcattagacatgatttaggctggtatcagcagaaaccagggaaagcccctaagcgcctgatctatgctgcatccagtttgcaaagtggggtcccatcaaggttcagcggcagtggatctgggacagaattcactctcacaatcagcagcctgcagcctgaagattttgcaacttattactgtctacagcattatagtttccctcggacgttcggccaagggaccaaggtggaaatcaaa

SEQ ID NO: 24150 - protein, 107 aa, synthetic construct
  REGION 1..107: note = Description of Artificial Sequence: Synthetic polypeptide
DIQMTQSPSSLSASVGDRVTITCRASQGIRHDLGWYQQKPGKAPKRLIYAASSLQSGVPSRFSGSGSGTEFTLTISSLQPEDFATYYCLQHYSFPRTFGQGTKVEIK

SEQ ID NO: 24151 - DNA, 321 bp, synthetic construct
  misc_feature 1..321: note = Description of Artificial Sequence: Synthetic polynucleotide
  source 1..321: mol_type = other DNA
gaaatagtgatgacgcagtctccagccaccctgtctgtgtctccaggggaaagagccaccctctcctgcagggccagtcagactgttaacagcaacttagcctggtaccagcagaaatctggccaggctcccaggctcctcatctttggtgcatccaccagggccactgttatcccagccaggatcaatggcagtgggtctgggacagagttcactctcaccatcagcagcctgcggtctgaagattttgcagtttatttctgtcagcagtataatgactggccgtgcagttttggccaggggaccaagctggagatcaaa

SEQ ID NO: 24152 - protein, 107 aa, synthetic construct
  REGION 1..107: note = Description of Artificial Sequence: Synthetic polypeptide
EIVMTQSPATLSVSPGERATLSCRASQTVNSNLAWYQQKSGQAPRLLIFGASTRATVIPARINGSGSGTEFTLTISSLRSEDFAVYFCQQYNDWPCSFGQGTKLEIK

SEQ ID NO: 24153 - DNA, 321 bp, synthetic construct
  misc_feature 1..321: note = Description of Artificial Sequence: Synthetic polynucleotide
  source 1..321: mol_type = other DNA
gaaatagtgatgacgcagtctccagccaccctgtctgtgtctccaggggaaagagccaacctctcctgcaggaccagtcagagtgtttggattagcgtagcctggtaccaccagaaacctggccaggctcccaggctcctcatctatggtgcagccaccagggccactggtatcccagccaggtttagtggcagtgggtctgggacagagttcactctcaccatcagcagcctgcagtctgaagattttgcagtttattactgtcagcagtataattactggccgctcactttcggcggagggaccaaggtggagatcaaa

SEQ ID NO: 24154 - protein, 107 aa, synthetic construct
  REGION 1..107: note = Description of Artificial Sequence: Synthetic polypeptide
EIVMTQSPATLSVSPGERANLSCRTSQSVWISVAWYHQKPGQAPRLLIYGAATRATGIPARFSGSGSGTEFTLTISSLQSEDFAVYYCQQYNYWPLTFGGGTKVEIK

SEQ ID NO: 24155 - DNA, 321 bp, synthetic construct
  misc_feature 1..321: note = Description of Artificial Sequence: Synthetic polynucleotide
  source 1..321: mol_type = other DNA
gacatccagatgacccagtctccatcctccctgtctgcctctgcaggagacagagtcaccatcacttgccgggcaagtcaggacattagaaattatttaggctggtatcagcagaaaccagggaaagcccctaagcgactgatctatggtgcatccagtttgcaaagtggggtcccatcaaggttcagcggcagtggatctgggacagaattcactctcacaatcagcagcctgcagcctgaagattttgcaactttttactgtctacagtataatagttacccattcactttcggccctgggaccaaagtggatatcaaa

SEQ ID NO: 24156 - protein, 107 aa, synthetic construct
  REGION 1..107: note = Description of Artificial Sequence: Synthetic polypeptide
DIQMTQSPSSLSASAGDRVTITCRASQDIRNYLGWYQQKPGKAPKRLIYGASSLQSGVPSRFSGSGSGTEFTLTISSLQPEDFATFYCLQYNSYPFTFGPGTKVDIK

SEQ ID NO: 24157 - DNA, 324 bp, synthetic construct; identical to SEQ ID NO: 24135
  misc_feature 1..324: note = Description of Artificial Sequence: Synthetic polynucleotide
  source 1..324: mol_type = other DNA

SEQ ID NO: 24158 - protein, 108 aa, synthetic construct; identical to SEQ ID NO: 24136
  REGION 1..108: note = Description of Artificial Sequence: Synthetic polypeptide

SEQ ID NO: 24159 - DNA, 321 bp, synthetic construct
  misc_feature 1..321: note = Description of Artificial Sequence: Synthetic polynucleotide
  source 1..321: mol_type = other DNA
gacatccagatgacccagtctccatcctccctgtctgcatctgtaggagacagagtcaccatcacttgccgggcaagtcagggcataagaaaagatttaggctggtatcagcagaaaccagggaaagcccctaagcgcctgatctatgctgcatccagtttgcaaagtggggtcccatcaaggttcagcggcagtggatctgggacagaattcactctcacaatcagcagcctgcagcctgaagattttgcaacttatgtctgtctacaacattatcgttaccctttcactttcggccctgggaccaaagtggatttcaaa

SEQ ID NO: 24160 - protein, 107 aa, synthetic construct
  REGION 1..107: note = Description of Artificial Sequence: Synthetic polypeptide
DIQMTQSPSSLSASVGDRVTITCRASQGIRKDLGWYQQKPGKAPKRLIYAASSLQSGVPSRFSGSGSGTEFTLTISSLQPEDFATYVCLQHYRYPFTFGPGTKVDFK

SEQ ID NO: 24161 - DNA, 324 bp, synthetic construct
  misc_feature 1..324: note = Description of Artificial Sequence: Synthetic polynucleotide
  source 1..324: mol_type = other DNA
gaaattgtgttgacgcagtgtccaggcaccctgtctttgtctccaggggagagagccaccgtctcctgcagggccagtcagagcgttaacagcaactacttagcctggtaccggcagaaacctgaccaggctcccaggctcctcatctatggtgcatccagcagggccactggcatcccagacaggttcagtggcagtgggtctgggacagacttcattctcatcatcagcagactggagcctgaggattttgcagtgtattactgtcagcagtatgaaagctcgccgtggacgttcggccaagggaccaaggtggaaatcaaa

SEQ ID NO: 24162 - protein, 108 aa, synthetic construct
  REGION 1..108: note = Description of Artificial Sequence: Synthetic polypeptide
EIVLTQCPGTLSLSPGERATVSCRASQSVNSNYLAWYRQKPDQAPRLLIYGASSRATGIPDRFSGSGSGTDFILIISRLEPEDFAVYYCQQYESSPWTFGQGTKVEIK

SEQ ID NO: 24163 - DNA, 321 bp, synthetic construct
  misc_feature 1..321: note = Description of Artificial Sequence: Synthetic polynucleotide
  source 1..321: mol_type = other DNA
gacatccagatgacccagtctccatcctccctgtctgcatctgtaggagacagagtcaccatcacttgccgggcaagtcagggcattagaaatgatttaggctggtatcagcagaaaccagggaaagcccctaagcgcctgatctatgctgcatccagtttgcaaagtgggatcccatcaaggttcagcggcagtggatctgggacagaattcactctcacaatcagcagcctgcagcctgaagattttgcaacttattactgtctacagcataatagttaccctctcactttcggcggagggaccaaggtggagatcaaa

SEQ ID NO: 24164 - protein, 107 aa, synthetic construct
  REGION 1..107: note = Description of Artificial Sequence: Synthetic polypeptide
DIQMTQSPSSLSASVGDRVTITCRASQGIRNDLGWYQQKPGKAPKRLIYAASSLQSGIPSRFSGSGSGTEFTLTISSLQPEDFATYYCLQHNSYPLTFGGGTKVEIK

SEQ ID NO: 24165 - DNA, 324 bp, synthetic construct; identical to SEQ ID NO: 24135
  misc_feature 1..324: note = Description of Artificial Sequence: Synthetic polynucleotide
  source 1..324: mol_type = other DNA

SEQ ID NO: 24166 - protein, 108 aa, synthetic construct; identical to SEQ ID NO: 24136
  REGION 1..108: note = Description of Artificial Sequence: Synthetic polypeptide

SEQ ID NO: 24167 - DNA, 321 bp, synthetic construct
  misc_feature 1..321: note = Description of Artificial Sequence: Synthetic polynucleotide
  source 1..321: mol_type = other DNA
gacatccagatgacccagtctccatcctccctgtctgcatctgttggagacagagtcaccatcacttgccgggcaagtcagggcattagaaatgatttaggctggtatcagcagaaaccagggaaggcccctaagcgcctgatctatgctgcatccagtttgcaaagtggggtcccatcaaggttcagcggcagtggatctgggacagaattcactctcacaatcagcagcctacagcctgaagattttgcaacttattactgtctacaacattatagttaccctcggacgttcggccaagggaccaaggtggaaatcaaa

SEQ ID NO: 24168 - protein, 107 aa, synthetic construct
  REGION 1..107: note = Description of Artificial Sequence: Synthetic polypeptide
DIQMTQSPSSLSASVGDRVTITCRASQGIRNDLGWYQQKPGKAPKRLIYAASSLQSGVPSRFSGSGSGTEFTLTISSLQPEDFATYYCLQHYSYPRTFGQGTKVEIK

SEQ ID NO: 24169 - DNA, 321 bp, synthetic construct
  misc_feature 1..321: note = Description of Artificial Sequence: Synthetic polynucleotide
  source 1..321: mol_type = other DNA
gacatccagatgacccagtctccatcctccctgtctgcatctgtaggagacagagtcaccatcacttgccgggcaagtcagggcattagaagtgatttaggctggtatcagcagaaaccagggaaagcccctaagcgcctgatctatactgcatccagtttgcaaagtggggtcccatcaaggttcagcggcagtggatctgggacagaattcactctcacaatcagcagcctgcagcctgaagattttgcaacttattactgtctacagtataatagttacccattcactttcggccctgggaccaaagtggatatcaaa

SEQ ID NO: 24170 - protein, 107 aa, synthetic construct
  REGION 1..107: note = Description of Artificial Sequence: Synthetic polypeptide
DIQMTQSPSSLSASVGDRVTITCRASQGIRSDLGWYQQKPGKAPKRLIYTASSLQSGVPSRFSGSGSGTEFTLTISSLQPEDFATYYCLQYNSYPFTFGPGTKVDIK

SEQ ID NO: 24171 - DNA, 321 bp, synthetic construct; identical to SEQ ID NO: 24155
  misc_feature 1..321: note = Description of Artificial Sequence: Synthetic polynucleotide
  source 1..321: mol_type = other DNA

SEQ ID NO: 24172 - protein, 107 aa, synthetic construct; identical to SEQ ID NO: 24156
  REGION 1..107: note = Description of Artificial Sequence: Synthetic polypeptide

SEQ ID NO: 24173 - DNA, 324 bp, synthetic construct
  misc_feature 1..324: note = Description of Artificial Sequence: Synthetic polynucleotide
  source 1..324: mol_type = other DNA
gacatccagatgacccagtctccatcctccctgtctgcttctattggagacagagtcaccatcacttgccgggcaagtcagaacattagcagctatttaaattggtatcagcagaaaccagggaaggcccccaagttcctgatctatgctgcatccagtttgcatagtggggtcccaccaaggttcagtggcagtggatctgggacagatttcactctcaccatcagcagtctgcaacctgaagattttgcaatttactactgtcaacagagttacagaacccctctgtggacgttcggccaagggaccaaggtggaaatcaaa

SEQ ID NO: 24174 - protein, 108 aa, synthetic construct
  REGION 1..108: note = Description of Artificial Sequence: Synthetic polypeptide
DIQMTQSPSSLSASIGDRVTITCRASQNISSYLNWYQQKPGKAPKFLIYAASSLHSGVPPRFSGSGSGTDFTLTISSLQPEDFAIYYCQQSYRTPLWTFGQGTKVEIK

SEQ ID NO: 24175 - DNA, 339 bp, synthetic construct
  misc_feature 1..339: note = Description of Artificial Sequence: Synthetic polynucleotide
  source 1..339: mol_type = other DNA
gacatcgtgatgacccaatctccagactccctggctgtgtctctgggcgagagggccaccatcaactgcaagtccagccagagtgttttatccagctccaacaataacaactacttagcttggtaccagcagaaaccaggacagcctcctaagctgctcatttactgggcatctacccgggaatccgggatccctgaccgattcagtggcagcgggtctgggacaggtttcactctcaccatcagcagcctgcaggctgaggatgtggcagtttattactgtcagcaatattatactactccgtgcagttttggccaggggaccaagctggagatcaat

SEQ ID NO: 24176 - protein, 113 aa, synthetic construct
  REGION 1..113: note = Description of Artificial Sequence: Synthetic polypeptide
DIVMTQSPDSLAVSLGERATINCKSSQSVLSSSNNNNYLAWYQQKPGQPPKLLIYWASTRESGIPDRFSGSGSGTGFTLTISSLQAEDVAVYYCQQYYTTPCSFGQGTKLEIN

SEQ ID NO: 24177 - DNA, 339 bp, synthetic construct
  misc_feature 1..339: note = Description of Artificial Sequence: Synthetic polynucleotide
  source 1..339: mol_type = other DNA
gacatcgtgatgacccaatctccagactccctggctgtgtctctgggcgcgagggccaccatcaactgcaagtccagccagagtgttttatccaactccaacaataacaactacttagcttggtaccagcagaaaccaggacagcctcctaagctgctcatttactgggcatctacccgggaatccgggatccctgaccgattcagtggcagcgggtctgggacagatttcactctcaccatcaacagcctgcaggctgaagatgtggcagtttattactgtcagcaatattatactactccgtgcagttttggccaggggaccaagctggagatcaaa

SEQ ID NO: 24178 - protein, 113 aa, synthetic construct
  REGION 1..113: note = Description of Artificial Sequence: Synthetic polypeptide
DIVMTQSPDSLAVSLGARATINCKSSQSVLSNSNNNNYLAWYQQKPGQPPKLLIYWASTRESGIPDRFSGSGSGTDFTLTINSLQAEDVAVYYCQQYYTTPCSFGQGTKLEIK

SEQ ID NO: 24179 - DNA, 336 bp, synthetic construct
  misc_feature 1..336: note = Description of Artificial Sequence: Synthetic polynucleotide
  source 1..336: mol_type = other DNA
gatgttgtaatgactcagtctccgctctccctgcccgtcacccttggacagccggcctccatctcctgcaggtctggtcaaagcctcgtatacagtgatggaaacacctacttgaattggtttcagcagaggccaggccaatctccaaggcgcctaatttatgaggtttctaagtgggactctggggtcccagacagattcagtggcagtgggtcaggcactaatttcacactgaaaatcagcagggtggaggctgaggatgttggggtcttttactgcatgcaaggtacacactggccgctcactttcggcggagggaccaaggtggagatcaaa

SEQ ID NO: 24180 - protein, 112 aa, synthetic construct
  REGION 1..112: note = Description of Artificial Sequence: Synthetic polypeptide
DVVMTQSPLSLPVTLGQPASISCRSGQSLVYSDGNTYLNWFQQRPGQSPRRLIYEVSKWDSGVPDRFSGSGSGTNFTLKISRVEAEDVGVFYCMQGTHWPLTFGGGTKVEIK

SEQ ID NO: 24181 - DNA, 336 bp, synthetic construct
  misc_feature 1..336: note = Description of Artificial Sequence: Synthetic polynucleotide
  source 1..336: mol_type = other DNA
gatgttgtgatgactcagtctccactctccctgcccgtcacccttggacagccggcctccatctcctgcaggtctagtcaaagcctcgtttacagtgttggaaacacctccttgagttggtttcagcagaggccaggccaatctccaaggcgcctaatttataaggtttctaactgggactctggggtcccagacagattcagcggcagtgggtcaggcactgatttcacactgaaaatcagcagggtggaggctgaggatgttggggtttattaccgcatgcaaggtacacactggccattcactttcggccctgggaccaaagtggatatcaaa

SEQ ID NO: 24182 - protein, 112 aa, synthetic construct
  REGION 1..112: note = Description of Artificial Sequence: Synthetic polypeptide
DVVMTQSPLSLPVTLGQPASISCRSSQSLVYSVGNTSLSWFQQRPGQSPRRLIYKVSNWDSGVPDRFSGSGSGTDFTLKISRVEAEDVGVYYRMQGTHWPFTFGPGTKVDIK

SEQ ID NO: 24183 - DNA, 321 bp, synthetic construct
  misc_feature 1..321: note = Description of Artificial Sequence: Synthetic polynucleotide
  source 1..321: mol_type = other DNA
gacatccagatgacccagtctccatcctccctgtctgcatctgtaggagacagagtcaccatcacttgccgggcaagtcggggcattagagatgatttaggctggtatcagcagaaaccagggaaagcccctaagcgcctgatctatgctgcatccagtttgcagagtggggtcccatcaaggttcagcggcagtggatctgggacagaattcactctcacaatcagcagcctgcagcctgaagattttgcaacttattactgtctacagcattatagttatcctcggacgttcggccaagggaccaaggtggaaatcaaa

SEQ ID NO: 24184 - protein, 107 aa, synthetic construct
  REGION 1..107: note = Description of Artificial Sequence: Synthetic polypeptide
DIQMTQSPSSLSASVGDRVTITCRASRGIRDDLGWYQQKPGKAPKRLIYAASSLQSGVPSRFSGSGSGTEFTLTISSLQPEDFATYYCLQHYSYPRTFGQGTKVEIK

SEQ ID NO: 24185 - DNA, 321 bp, synthetic construct
  misc_feature 1..321: note = Description of Artificial Sequence: Synthetic polynucleotide
  source 1..321: mol_type = other DNA
gacatccagatgacccagtctccttcctccctgtctgcatctgtaggagacagagtcaccatcacttgccgggcaagtcagggcattagaaatgatttaggctggtatcagcagaaaccagggaaagcccctacgcgcctgatctatgctgcatccagtttgcaaagtggggtcccatcgaggttcagcggcagtggatctgggacagaattcactctcacaatcagcagcctgcagcctgaagattttgcaacttattactgtctacaacattatagttaccctcggacgttcggccaagggaccaaggtggaaatcaaa

SEQ ID NO: 24186 - protein, 107 aa, synthetic construct
  REGION 1..107: note = Description of Artificial Sequence: Synthetic polypeptide
DIQMTQSPSSLSASVGDRVTITCRASQGIRNDLGWYQQKPGKAPTRLIYAASSLQSGVPSRFSGSGSGTEFTLTISSLQPEDFATYYCLQHYSYPRTFGQGTKVEIK

SEQ ID NO: 24187 - DNA, 330 bp, synthetic construct
  misc_feature 1..330: note = Description of Artificial Sequence: Synthetic polynucleotide
  source 1..330: mol_type = other DNA
cagtctgccctgactcagtctgcctccgtgtcggggtctcctggacagtcgatcaccatctcctgcactggaaccagcagtgacgttggtggttataattttgtctcctggtaccaacagcacccaggcaaagtccccaaattcatgatttatgaggtcagtaatcggccctcaggggttcctaatcgtttttctggctccaagtctggcaacacggcctccctgaccatctctggcctccaggctgaggacgaggctgattattactgcagctcatatacaagcagctacacttgggtgttcggcggagggaccaaactgaccgtccta

SEQ ID NO: 24188 - protein, 110 aa, synthetic construct
  REGION 1..110: note = Description of Artificial Sequence: Synthetic polypeptide
QSALTQSASVSGSPGQSITISCTGTSSDVGGYNFVSWYQQHPGKVPKFMIYEVSNRPSGVPNRFSGSKSGNTASLTISGLQAEDEADYYCSSYTSSYTWVFGGGTKLTVL

SEQ ID NO: 24189 - DNA, 327 bp, synthetic construct
  misc_feature 1..327: note = Description of Artificial Sequence: Synthetic polynucleotide
  source 1..327: mol_type = other DNA
cagtctgtgctgactcagccaccctcagcgtctgggacccccgggcagagggtcaccatctcttgttctggaagcagctccaacatcggaagtaatactgtaaactggtaccagcagctcccaggaacggcccccaaactcctcatctatagtaataatcagcggccctcaggggtccctgaccgattctctggctccaagtctggcacctcagcctccctggccatcagtgggctccagtctgaggatgaggctgattattactgtgcagcatgggatgacagcctgaatggtccggtcggcggagggaccaagctgaccgtccta

SEQ ID NO: 24190 - protein, 109 aa, synthetic construct
  REGION 1..109: note = Description of Artificial Sequence: Synthetic polypeptide
QSVLTQPPSASGTPGQRVTISCSGSSSNIGSNTVNWYQQLPGTAPKLLIYSNNQRPSGVPDRFSGSKSGTSASLAISGLQSEDEADYYCAAWDDSLNGPVGGGTKLTVL

SEQ ID NO: 24191 - DNA, 321 bp, synthetic construct
  misc_feature 1..321: note = Description of Artificial Sequence: Synthetic polynucleotide
  source 1..321: mol_type = other DNA
tcctatgagctgacacagccaccctcggtgtcagtgtccccaggacaaacggccaggatcacctgcactggagatgcaatgccgaaaaaatatgcttattgggaccagcagaagtcaggccaggcccctgtgctggtcatctctgaggacagcaagcgaccctccgggatccctgagagattctctggctccagctcagggacaatggcccccttgactatcagtggggcccaggtggaggatgaaactgactacgactgtaactcaacagacagcagtggtaatcgggtgttcggcggagggaccaagctgaccgtccta

SEQ ID NO: 24192 - protein, 107 aa, synthetic construct
  REGION 1..107: note = Description of Artificial Sequence: Synthetic polypeptide
SYELTQPPSVSVSPGQTARITCTGDAMPKKYAYWDQQKSGQAPVLVISEDSKRPSGIPERFSGSSSGTMAPLTISGAQVEDETDYDCNSTDSSGNRVFGGGTKLTVL

SEQ ID NO: 24193 - DNA, 321 bp, synthetic construct
  misc_feature 1..321: note = Description of Artificial Sequence: Synthetic polynucleotide
  source 1..321: mol_type = other DNA
gacatccagatgacccagtctccatcctccctgtcggcatctgtaggagacagagtcaccatcacttgccgggcaagtcagggcattagaaatgatttaggctggtatcagcagaaaccagggaaagcccctaagcgcctgatctacgctgcatccagtttgcaaagtggggtcccatcaaggttcagcggcagtggatctgggacagaattcactctcacaatcagcagcctgcagcctgaagattttgcaacttattactgtctacagcatgatagttaccctctcactttcggcggaggggccaaggtggagatcaaa

SEQ ID NO: 24194 - protein, 107 aa, synthetic construct
  REGION 1..107: note = Description of Artificial Sequence: Synthetic polypeptide
DIQMTQSPSSLSASVGDRVTITCRASQGIRNDLGWYQQKPGKAPKRLIYAASSLQSGVPSRFSGSGSGTEFTLTISSLQPEDFATYYCLQHDSYPLTFGGGAKVEIK

SEQ ID NO: 24195 - DNA, 339 bp, synthetic construct
  misc_feature 1..339: note = Description of Artificial Sequence: Synthetic polynucleotide
  source 1..339: mol_type = other DNA
gacatcgtgatgacccagtctccagactccctggctgtgtctctgggcgagagggccaccatcaactgcaagtccagccagagtgttttgtacagctccaacagtcacaactacttagcttggtaccagcagaaaccaggacagcctcctaaactgctcatttactgggcatctacccgggaatccggggtccctgaccgattcagtggcagcgggtctgggacagatttcactctcaccatcagcagcctgcaggctgaagatgtggcagtttattactgtcagcaatattatagtactccgtgcagttttggccaggggaccaagctggagatcaaa

SEQ ID NO: 24196 - protein, 113 aa, synthetic construct
  REGION 1..113: note = Description of Artificial Sequence: Synthetic polypeptide
DIVMTQSPDSLAVSLGERATINCKSSQSVLYSSNSHNYLAWYQQKPGQPPKLLIYWASTRESGVPDRFSGSGSGTDFTLTISSLQAEDVAVYYCQQYYSTPCSFGQGTKLEIK

SEQ ID NO: 24197 - DNA, 321 bp, synthetic construct
  misc_feature 1..321: note = Description of Artificial Sequence: Synthetic polynucleotide
  source 1..321: mol_type = other DNA
gacatccagatgacccagtctccatcctacctgtctgcatctgtaggagacagagtcaccatcacttgccgggcaagtcaggacattagagataatttaggctggtatcagcagaaaccagggaaagcccctaaacgcctgatctatactgcatacagtttgcaaagtggggtcccatcaaggttcagcggcagtggatctgggacagaattcactctcacaatcagcagcctgcagcctgaggattttgcaacttattactgtctacaacattataattacccgctcactttcggcggagggaccaaggtggagatcaaa

SEQ ID NO: 24198 - protein, 107 aa, synthetic construct
  REGION 1..107: note = Description of Artificial Sequence: Synthetic polypeptide
DIQMTQSPSYLSASVGDRVTITCRASQDIRDNLGWYQQKPGKAPKRLIYTAYSLQSGVPSRFSGSGSGTEFTLTISSLQPEDFATYYCLQHYNYPLTFGGGTKVEIK

SEQ ID NO: 24199 - DNA, 318 bp, synthetic construct
  misc_feature 1..318: note = Description of Artificial Sequence: Synthetic polynucleotide
  source 1..318: mol_type = other DNA
tcctttgagctgactcagccaccctcagtgtccgtgtccccaggacagacagccagcatcacctgctctggagataaattgggggataaatatgcttactggtatcagcagaagccaggccagtcccctgtgttggtcatctatcaagataggaagcgcccctcagggatccctgagcgattctctggctccaactctgggaacacagccactctgaccatcagcgggacccaggctatggatgaggctgactattactgtcaggcgtgggacaacagcactgtggtgttcggcggagggaccaagctgaccgtccta

SEQ ID NO: 24200 - protein, 106 aa, synthetic construct
  REGION 1..106: note = Description of Artificial Sequence: Synthetic polypeptide
SFELTQPPSVSVSPGQTASITCSGDKLGDKYAYWYQQKPGQSPVLVIYQDRKRPSGIPERFSGSNSGNTATLTISGTQAMDEADYYCQAWDNSTVVFGGGTKLTVL

SEQ ID NO: 24201 - DNA, 336 bp, synthetic construct
  misc_feature 1..336: note = Description of Artificial Sequence: Synthetic polynucleotide
  source 1..336: mol_type = other DNA
gatgttgtgatgactcagtctccactctccctgcccgtcacccttggacagccggcctccatctcctgcaggtctagtcaaagcctcgtatacagtgatggaaacaccttcttgaattggtttcagcagaggccaggccaatctccaaggcgcctaatttataaggtttctaactgggactctggggtcccagacagattcagcggcagtgggtcaggcactggtttcacactgaaaatcagcagggtggaggctgaggatgttggggtttattactgcatacaaggtacgcactggcctttccccttcggccaagggacacgactggagattaaa

SEQ ID NO: 24202 - protein, 112 aa, synthetic construct
  REGION 1..112: note = Description of Artificial Sequence: Synthetic polypeptide
DVVMTQSPLSLPVTLGQPASISCRSSQSLVYSDGNTFLNWFQQRPGQSPRRLIYKVSNWDSGVPDRFSGSGSGTGFTLKISRVEAEDVGVYYCIQGTHWPFPFGQGTRLEIK

SEQ ID NO: 24203 - DNA, 330 bp, synthetic construct
  misc_feature 1..330: note = Description of Artificial Sequence: Synthetic polynucleotide
  source 1..330: mol_type = other DNA
cagtctgccctgactcagcctgcctccgtgtctgggtctcctggacagtcgatcaccatctcctgcactggaaccagcagtgacgttggtggttataattttgtctcctggtaccaacagcacccagacaaagcccccaaactcatgatttatgaggtcagtaatcggccctcaggggtttctaatcgcttctctggctccaagtctggcaacacggcctccctgaccatctctgggctccaggctgaggacgaggctgattattactgcagctcatatacaagcaccggcactgtggtaatcggcggagggaccaaactgaccgtccta

SEQ ID NO: 24204 - protein, 110 aa, synthetic construct
  REGION 1..110: note = Description of Artificial Sequence: Synthetic polypeptide
QSALTQPASVSGSPGQSITISCTGTSSDVGGYNFVSWYQQHPDKAPKLMIYEVSNRPSGVSNRFSGSKSGNTASLTISGLQAEDEADYYCSSYTSTGTVVIGGGTKLTVL

SEQ ID NO: 24205 - DNA, 324 bp, synthetic construct
  misc_feature 1..324: note = Description of Artificial Sequence: Synthetic polynucleotide
  source 1..324: mol_type = other DNA
gacatccagatgacccagtctccatcctccctgtctgcatctgtaggagacagagtcaccatcacttgccgggcaagtcagggcattagaagtgatttaggctggtatcagcagaatccagtcaaagcccctaagcgcctgatctatgctgcatccagtttgcaaagtggggtcccatcgaggttcagcggcagtggatctgggacagaattcactctcacagtcagcagcctgcagcctgaagattttgcattttattactgtctacagcataatagttacctccccatcaccttcggccaagggacacgactggaaattaaa

SEQ ID NO: 24206 - protein, 108 aa, synthetic construct
  REGION 1..108: note = Description of Artificial Sequence: Synthetic polypeptide
DIQMTQSPSSLSASVGDRVTITCRASQGIRSDLGWYQQNPVKAPKRLIYAASSLQSGVPSRFSGSGSGTEFTLTVSSLQPEDFAFYYCLQHNSYLPITFGQGTRLEIK

SEQ ID NO: 24207 - DNA, 321 bp, synthetic construct
  misc_feature 1..321: note = Description of Artificial Sequence: Synthetic polynucleotide
  source 1..321: mol_type = other DNA
gacatccagatgacccagtctccatcttccgtgtctgcatctctaggagacagagtcaccatcacttgtcgggcgagtcagggtattagcagctggttagcctggtatcagcagaaacaagggaaagcccctaagctcctgatctttgctgcatccaggttgcaaagtggggccccatcaaggttcagcggcagtggatctgggacagatttcactctcaccatcagcagcctgcagcctgaagattttgcaacttactattgtcaacaggctaacagtttcccattcactttcggccctgggaccaaagtggatatcaaa

SEQ ID NO: 24208 - protein, 107 aa, synthetic construct
  REGION 1..107: note = Description of Artificial Sequence: Synthetic polypeptide
DIQMTQSPSSVSASLGDRVTITCRASQGISSWLAWYQQKQGKAPKLLIFAASRLQSGAPSRFSGSGSGTDFTLTISSLQPEDFATYYCQQANSFPFTFGPGTKVDIK

SEQ ID NO: 24209 - DNA, 321 bp, synthetic construct
  misc_feature 1..321: note = Description of Artificial Sequence: Synthetic polynucleotide
  source 1..321: mol_type = other DNA
gacatccagatgacccagtctccatcttccgtgtctgcatctgtaggagacagagtcaccatcacttgtcgggcgagtcagggtattagcaggtggttagcctggtatcagcagaaaccagggaaagcccctaagctcctgatctatgctgcatccagattgcaaagtggggtcccatcaaggttcagcggcagtggatctgggacagatttcactctcaccatcagcggcctgctgcctgaagattttgcaatttattattgtcaacaggctaacagtttcccattcactttcggccctgggaccaaagtggatttcaaa

SEQ ID NO: 24210 - protein, 107 aa, synthetic construct
  REGION 1..107: note = Description of Artificial Sequence: Synthetic polypeptide
DIQMTQSPSSVSASVGDRVTITCRASQGISRWLAWYQQKPGKAPKLLIYAASRLQSGVPSRFSGSGSGTDFTLTISGLLPEDFAIYYCQQANSFPFTFGPGTKVDFK

SEQ ID NO: 24211 - DNA, 324 bp, synthetic construct
  misc_feature 1..324: note = Description of Artificial Sequence: Synthetic polynucleotide
  source 1..324: mol_type = other DNA
gacatccagatgacccagtctccatcctccctgtctgcatctgtaggagacagagtcaccatcacttgccgggcaagtcagggcattagaaatgatttaggctggtatcagcagaaaccagtcaaagcccctaagcgccttatctatgctgcatccagtttgcaaagtggggtcccatcaaggttcagcggcagtggatctgggacagaattcactctcacaatcagcagcctgcagcctgaagattttgcaacttattactgtctacagcataatagttacctccccatcaccttcggccaagggacacgactggagattaaa

SEQ ID NO: 24212 - protein, 108 aa, synthetic construct
  REGION 1..108: note = Description of Artificial Sequence: Synthetic polypeptide
DIQMTQSPSSLSASVGDRVTITCRASQGIRNDLGWYQQKPVKAPKRLIYAASSLQSGVPSRFSGSGSGTEFTLTISSLQPEDFATYYCLQHNSYLPITFGQGTRLEIK

SEQ ID NO: 24213 - DNA, 318 bp, synthetic construct
  misc_feature 1..318: note = Description of Artificial Sequence: Synthetic polynucleotide
  source 1..318: mol_type = other DNA
tcctatgagctgactcagccaccctcagtgtccgtgtccccaggacagacagccagcatcacctgctctggagataaattgggggataaatatgtttactggtttcagcagaagccaggccagtcccctgtgctagtcatctatcaagataggaagcggccctcagggatccctgagcgattctctggctccaactctgggaacacagccactctgaccatcagcgggacgcaggctctggatgaggctgactattactgtcaggcgtgggacaacagcactgcggtattcggcggagggaccaagctgaccgtccta

SEQ ID NO: 24214 - protein, 106 aa, synthetic construct
  REGION 1..106: note = Description of Artificial Sequence: Synthetic polypeptide
SYELTQPPSVSVSPGQTASITCSGDKLGDKYVYWFQQKPGQSPVLVIYQDRKRPSGIPERFSGSNSGNTATLTISGTQALDEADYYCQAWDNSTAVFGGGTKLTVL

SEQ ID NO: 24215 - DNA, 336 bp, synthetic construct
  misc_feature 1..336: note = Description of Artificial Sequence: Synthetic polynucleotide
  source 1..336: mol_type = other DNA
gatgtcgtgatgactcagtctccactctccctgcccgtcacccttggacagccggcctccatctcctgcaggtctagtcaaagcctcgtatccagtgatggaaacaccttcttgaattggtttcagcagaggccaggccaatctccaaggcgcctaatttataaggtttctaactgggactctggggtcccagacagattcagcggcagtgggtcaggcactgatttcacactgaaaatcagcaggttggaggctgaggatgttggggtttattactgcttgcaaggtacacactggcctctcaccttcggccaagggacacgactggagattaaa

SEQ ID NO: 24216 - protein, 112 aa, synthetic construct
  REGION 1..112: note = Description of Artificial Sequence: Synthetic polypeptide
DVVMTQSPLSLPVTLGQPASISCRSSQSLVSSDGNTFLNWFQQRPGQSPRRLIYKVSNWDSGVPDRFSGSGSGTDFTLKISRLEAEDVGVYYCLQGTHWPLTFGQGTRLEIK

SEQ ID NO: 24217 - DNA, 318 bp, synthetic construct
  misc_feature 1..318: note = Description of Artificial Sequence: Synthetic polynucleotide
  source 1..318: mol_type = other DNA
tcctatgaggtgactcagccaccctcagtgtccgtgtccccaggacagacagccagcatcacctgctctggagataaattgggggataaatatacttactggtatcagcagaaggcaggccagtcccctttcctggtcatctatcaagataggaagcggccctcagggatccctgaccgattctctggctccaactctgggaacacagccactctgaccatcagcgggacccaggctatggatgcggctgacttttactgtcaggcgtgggacaatagtactgcggtattcggcggagggaccaagctgaccgtccta

SEQ ID NO: 24218 - protein, 106 aa, synthetic construct
  REGION 1..106: note = Description of Artificial Sequence: Synthetic polypeptide
SYEVTQPPSVSVSPGQTASITCSGDKLGDKYTYWYQQKAGQSPFLVIYQDRKRPSGIPDRFSGSNSGNTATLTISGTQAMDAADFYCQAWDNSTAVFGGGTKLTVL

SEQ ID NO: 24219 - DNA, 330 bp, synthetic construct
  misc_feature 1..330: note = Description of Artificial Sequence: Synthetic polynucleotide
  source 1..330: mol_type = other DNA
cagtctgccctgactcagcctgcctccgtgtctgggtctcctggacagtcgatcaccatctcctgcactggaaccagcagtgacgttggtggttataactatgtctcctggtaccaacagcacccaggcaaagcccccaaactcatgatttatgaggtcagtaatcggccctcaggggtttctaatcgcttctctggctccaagtctggcaacacggcctccctgaccatctctgggctccaggctgaggacgaggctgattattactgcacctcatatacaagcaccagcactgtggtcttcggcggagggaccaagctgaccgtccta

SEQ ID NO: 24220 - protein, 110 aa, synthetic construct
  REGION 1..110: note = Description of Artificial Sequence: Synthetic polypeptide
QSALTQPASVSGSPGQSITISCTGTSSDVGGYNYVSWYQQHPGKAPKLMIYEVSNRPSGVSNRFSGSKSGNTASLTISGLQAEDEADYYCTSYTSTSTVVFGGGTKLTVL

SEQ ID NO: 24221 - DNA, 318 bp, synthetic construct
  misc_feature 1..318: note = Description of Artificial Sequence: Synthetic polynucleotide
  source 1..318: mol_type = other DNA
tcctatgagctgactcagccaccctcagtgtccgtgtccccaggacagacagccagcatcacctgctctggagataaattggggaataaatatgcttggtggtatcagcagaagccaggccagtcccctgtgctggtcatctatcaagataggaagcggccctcagggatccctgagcgattctctggctccaactctgggaacacagccactctgaccatcagcgggacccaggctatggatgaggctgactattactgtcaggcgtgggacaacagcactgtggttttcggcggagggaccaaactgaccgtccta

SEQ ID NO: 24222 - protein, 106 aa, synthetic construct
  REGION 1..106: note = Description of Artificial Sequence: Synthetic polypeptide
SYELTQPPSVSVSPGQTASITCSGDKLGNKYAWWYQQKPGQSPVLVIYQDRKRPSGIPERFSGSNSGNTATLTISGTQAMDEADYYCQAWDNSTVVFGGGTKLTVL

SEQ ID NO: 24223 - DNA, 315 bp, synthetic construct
  misc_feature 1..315: note = Description of Artificial Sequence: Synthetic polynucleotide
  source 1..315: mol_type = other DNA
acctatgagctgactcagccatcctcagtgtccgtgtccccaggacagacagccagcatcacctgctctggagataaattgggggaaaaatatgtttgctggtatcagcagaagccaggccagtcccctgtgctggtcatatatcaagataccaagcggccctcagggatccctgagcgattctctggctccaactctgggaacacagccactctgaccatcagcgggacccaggctatggatgaggctgactattactgtcaggcgtgggacagcagcactatattcggcggagggaccaagctgaccgtccta

SEQ ID NO: 24224 - protein, 105 aa, synthetic construct
  REGION 1..105: note = Description of Artificial Sequence: Synthetic polypeptide
TYELTQPSSVSVSPGQTASITCSGDKLGEKYVCWYQQKPGQSPVLVIYQDTKRPSGIPERFSGSNSGNTATLTISGTQAMDEADYYCQAWDSSTIFGGGTKLTVL

SEQ ID NO: 24225 - DNA, 318 bp, synthetic construct
  misc_feature 1..318: note = Description of Artificial Sequence: Synthetic polynucleotide
  source 1..318: mol_type = other DNA
tcctatgagctgactcagccaccctcagtgtccgtgtccccaggacagacagccagcatcacctgctctggagagaaattgggggataaatatgtttgttggtatcagcagaagccaggccagtcccctgtgctggtcatctatcaagatagcaagcggccctcagggatccctgagcgattctctggctccaactctgggaacacagccactctgaccatcagcgggacccaggctatggatgaggctgactattactgtcaggcgtggaacagcagcaatgtggtattcggcggagggaccaagctgaccgtccta

SEQ ID NO: 24226 - protein, 106 aa, synthetic construct
  REGION 1..106: note = Description of Artificial Sequence: Synthetic polypeptide
SYELTQPPSVSVSPGQTASITCSGEKLGDKYVCWYQQKPGQSPVLVIYQDSKRPSGIPERFSGSNSGNTATLTISGTQAMDEADYYCQAWNSSNVVFGGGTKLTVL

SEQ ID NO: 24227 - DNA, 321 bp, synthetic construct
  misc_feature 1..321: note = Description of Artificial Sequence: Synthetic polynucleotide
  source 1..321: mol_type = other DNA
tcctatgagctgactcagccaccctcagtgtccgtatccccaggacagacagccagcatcacctgctctggagataaattgggggataaatatgcttcctggtatcagcagaagccaggccagtcccctgttttggtcatctatcaagatggcaagcggccctcagggatccctgagcgattctctggctccaactctgggaacacagccactctgaccctcagcgggacccaggctatggatgaggctgactattactgtcaggcgtgggacagcagcacttatgtggtattcggcggagggaccaagctgaccgtccta

SEQ ID NO: 24228 - protein, 107 aa, synthetic construct
  REGION 1..107: note = Description of Artificial Sequence: Synthetic polypeptide
SYELTQPPSVSVSPGQTASITCSGDKLGDKYASWYQQKPGQSPVLVIYQDGKRPSGIPERFSGSNSGNTATLTLSGTQAMDEADYYCQAWDSSTYVVFGGGTKLTVL

SEQ ID NO: 24229 - DNA, 324 bp, synthetic construct
  misc_feature 1..324: note = Description of Artificial Sequence: Synthetic polynucleotide
  source 1..324: mol_type = other DNA
tcctatgagctgactcagccacactcagtgtcagtggccacagcacagatggccaggatcacctgtgggggaaacaacattggaagtaaagctgtgcactggtaccagcaaaagccaggccaggaccctgtgctggtcatctatagcgatagcaaccggccctcagggatccctgagcgattctctggctccaacccagggaacaccgccaccctaaccatcagcaggatcgaggctggggatgaggctgactattactgtcaggtgtgggacagtagtagtgatcatgtggtattcggcggagggaccaagctgaccgtccta

SEQ ID NO: 24230 - protein, 108 aa, synthetic construct
  REGION 1..108: note = Description of Artificial Sequence: Synthetic polypeptide
SYELTQPHSVSVATAQMARITCGGNNIGSKAVHWYQQKPGQDPVLVIYSDSNRPSGIPERFSGSNPGNTATLTISRIEAGDEADYYCQVWDSSSDHVVFGGGTKLTVL

SEQ ID NO: 24231 - DNA, 345 bp, synthetic construct
  misc_feature 1..345: note = Description of Artificial Sequence: Synthetic polynucleotide
  source 1..345: mol_type = other DNA
ctgcctgtgctgactcagcccccgtctgcatctgccttgctgggagcctcgatcaagctcacctgcaccctaagcagtgagcacagcacctacaccatcgaatggtatcaacagagaccagggaggtccccccagtatataatgaaggttaagagtgatggcagccacagcaagggggacgggatccccgatcgcttcatgggctccagttctggggctgaccgctacctcaccttctccaacctccagtctgacgatgaggatgagtatcactgtggagagagccacacgattgatggccaagtcggtgtggtattcggcggagggaccaagctgaccgtccta

SEQ ID NO: 24232 - protein, 115 aa, synthetic construct
  REGION 1..115: note = Description of Artificial Sequence: Synthetic polypeptide
LPVLTQPPSASALLGASIKLTCTLSSEHSTYTIEWYQQRPGRSPQYIMKVKSDGSHSKGDGIPDRFMGSSSGADRYLTFSNLQSDDEDEYHCGESHTIDGQVGVVFGGGTKLTVL

SEQ ID NO: 24233 - DNA, 318 bp, synthetic construct
  misc_feature 1..318: note = Description of Artificial Sequence: Synthetic polynucleotide
  source 1..318: mol_type = other DNA
tcctatgaactgacgcagccaccctcagtgtccgtgtccccaggacagacagccagcatcacctgctctggagatagattgggggataaatatgcttggtggtatcagcagaagccaggccagtcccctgtgctggtcatatatcaagatcgcaagcggccctcagggatccctgagcgattctctggctccaattcagggaacacagccactctgaccatcagcgggacccaggctatggatgaggctgactattactgtcaggcgtgggacagcagcacagtggtattcggcggagggaccaagctgaccgtccta

SEQ ID NO: 24234 - protein, 106 aa, synthetic construct
  REGION 1..106: note = Description of Artificial Sequence: Synthetic polypeptide
SYELTQPPSVSVSPGQTASITCSGDRLGDKYAWWYQQKPGQSPVLVIYQDRKRPSGIPERFSGSNSGNTATLTISGTQAMDEADYYCQAWDSSTVVFGGGTKLTVL

SEQ ID NO: 24235 - DNA, 336 bp, synthetic construct
  misc_feature 1..336: note = Description of Artificial Sequence: Synthetic polynucleotide
  source 1..336: mol_type = other DNA
gatattgtgatgacccagactccactctctctgtccgtcattcctggacagccggcctccatctcctgcaagtctagtcagagcctcctgcatagtgatggaaagacccatttgaattggtacctgcagaagccaggccagcctccacagctcctgatctatgaagtttcctaccggttctctggagtgccagataggttcagtggcagcgggtcagggacagttttcacactggagatcagccgggtggaggctgcggatgttggggtttattactgctttcaaagtatacagcttccgctcactttcggcggagggaccaaggtggagatcaaa

SEQ ID NO: 24236 - protein, 112 aa, synthetic construct
  REGION 1..112: note = Description of Artificial Sequence: Synthetic polypeptide
DIVMTQTPLSLSVIPGQPASISCKSSQSLLHSDGKTHLNWYLQKPGQPPQLLIYEVSYRFSGVPDRFSGSGSGTVFTLEISRVEAADVGVYYCFQSIQLPLTFGGGTKVEIK

SEQ ID NO: 24237 - DNA, 321 bp, synthetic construct
  misc_feature 1..321: note = Description of Artificial Sequence: Synthetic polynucleotide
  source 1..321: mol_type = other DNA
gacatccagatgacccagtctccatcctcactgtctgcatctgtaggagacagagtcaccatcacttgtcgggcgagtcagggcattagcaattatttagcctggtttcagcagaaaccagggaaagcccctaagtccctgatcaatgctgcatccagtttacaaagtggggtcccatcaaagttcagcggcagtggatctgggacagatttcactctcaccatcagcagcctgcagcctgaagattttgcaacttattactgccaacagtatcatagttacccattcactttcggccctgggaccaaagtggatatcaaa

SEQ ID NO: 24238 - protein, 107 aa, synthetic construct
  REGION 1..107: note = Description of Artificial Sequence: Synthetic polypeptide
DIQMTQSPSSLSASVGDRVTITCRASQGISNYLAWFQQKPGKAPKSLINAASSLQSGVPSKFSGSGSGTDFTLTISSLQPEDFATYYCQQYHSYPFTFGPGTKVDIK

SEQ ID NO: 24239 - DNA, 321 bp, synthetic construct
  misc_feature 1..321: note = Description of Artificial Sequence: Synthetic polynucleotide
  source 1..321: mol_type = other DNA
gacatccagatgacccagtctccatcctccctgtctgcatctgtaggagacagagtcaccatcacttgccgggcaagtcagggcattagaaatgatttaggctggtatcagcagaaaccagggaaagcccctaagcgcctgatctatggtgcatccagtttgcaaagtggggtcccatcaaggttcagcggcagtggatctgggacagaattcactctcacaatcagcagcctgcagcctgaagattttacaacttattactgtctacagcataatagttacccactcactttcggcggagggaccaaggtggagatcaaa

SEQ ID NO: 24240 - protein, 107 aa, synthetic construct
  REGION 1..107: note = Description of Artificial Sequence: Synthetic polypeptide
DIQMTQSPSSLSASVGDRVTITCRASQGIRNDLGWYQQKPGKAPKRLIYGASSLQSGVPSRFSGSGSGTEFTLTISSLQPEDFTTYYCLQHNSYPLTFGGGTKVEIK

SEQ ID NO: 24241 - DNA, 321 bp, synthetic construct
  misc_feature 1..321: note = Description of Artificial Sequence: Synthetic polynucleotide
  source 1..321: mol_type = other DNA
gacatccagatgacccagtctccatcctccctgtctgcatctgtaggagacagagtcaccatcacttgccgggcaagtcaggacattagaaatgatttaggctggtatcagcagaaagcagggaaagcccctaagcgcctgatcaatgctgcatccagtttgcaaagtggggtcccatcaaggttcagcggcattggctctgggacagaattcactctcacaatcaccggcctgcagcctgaagattttgcaacttattactgtctacagcattatagttatatgttcactttcggcggagggaccaaggtggagatcaaa

SEQ ID NO: 24242 - protein, 107 aa, synthetic construct
  REGION 1..107: note = Description of Artificial Sequence: Synthetic polypeptide
DIQMTQSPSSLSASVGDRVTITCRASQDIRNDLGWYQQKAGKAPKRLINAASSLQSGVPSRFSGIGSGTEFTLTITGLQPEDFATYYCLQHYSYMFTFGGGTKVEIK

SEQ ID NO: 24243 - DNA, 321 bp, synthetic construct
  misc_feature 1..321: note = Description of Artificial Sequence: Synthetic polynucleotide
  source 1..321: mol_type = other DNA
gacatccagatgacccagtctccatcctccctgtctgcatctgtaggagacagagtcaccatcacttgccgggcaagtcagggcattagaaatgatttaggctggtatcagcagaaaccagggaaagcccctaagcgcctgatctatgctgcatccagtttgcaaagtggggtcccatcaaggttcagcggcagtggatctgggacagaattcactctcacaatcagcagcttgcagcctgaagattttgcaacttattactgtctacagcataatagttacccgtggacgttcggccaagggaccaaggtggaaatcaaa

SEQ ID NO: 24244 - protein, 107 aa, synthetic construct
  REGION 1..107: note = Description of Artificial Sequence: Synthetic polypeptide
DIQMTQSPSSLSASVGDRVTITCRASQGIRNDLGWYQQKPGKAPKRLIYAASSLQSGVPSRFSGSGSGTEFTLTISSLQPEDFATYYCLQHNSYPWTFGQGTKVEIK

SEQ ID NO: 24245 - DNA, 321 bp, synthetic construct
  misc_feature 1..321: note = Description of Artificial Sequence: Synthetic polynucleotide
  source 1..321: mol_type = other DNA
gacatccagatgacccagtctccatcctccctgtctgcatctgtacaagacagagtcaccatcacttgccgggcaagtcagggcattagaaatgatttaggctggtatcagcagaaaccagggaaagcccctaagcgcctgatctttgctgcatccagtttgcaaagtggggtcccgtcaaggttcagcggcagtggatctgggacagaattcactctcacaatcagcagcctgcagcctgaagattttgcaacttattactgtcttcaacatgctagttacccgctcactttcggcggagggaccaaggtggagatcgaa

SEQ ID NO: 24246 - protein, 107 aa, synthetic construct
  REGION 1..107: note = Description of Artificial Sequence: Synthetic polypeptide
DIQMTQSPSSLSASVQDRVTITCRASQGIRNDLGWYQQKPGKAPKRLIFAASSLQSGVPSRFSGSGSGTEFTLTISSLQPEDFATYYCLQHASYPLTFGGGTKVEIE

SEQ ID NO: 24247 - DNA, 321 bp, synthetic construct
  misc_feature 1..321: note = Description of Artificial Sequence: Synthetic polynucleotide
  source 1..321: mol_type = other DNA
gacatccagatgacccagtctccatcctccctgtctgcatctgtaggagacagagtcaccatcacttgccgggcaagtcagggcattagaaatgatttaggctggtatcagcagaaaccagggaaagcccctaagcgcctgatctatgctgcatccagtttgcaaagtggggtcccatcaaggttcagcggcagtggatctgggacagaattcactctcacaatcagcagcctgcagcctgaagattttgcaacttattactgtctacagcataatagttacccgctcactttcggcggagggaccaaggtggagatcaaa

SEQ ID NO: 24248 - protein, 107 aa, synthetic construct; identical to SEQ ID NO: 24146
  REGION 1..107: note = Description of Artificial Sequence: Synthetic polypeptide

SEQ ID NO: 24249 - DNA, 321 bp, synthetic construct
  misc_feature 1..321: note = Description of Artificial Sequence: Synthetic polynucleotide
  source 1..321: mol_type = other DNA
gacatccagatgacccagtctccatcctccctgtctgcatctgtcggagacagtgtcaccatctcttgccgggcaagtcaggacattagaaatcatttaggctggtatcagcgtaacccagggaaagcccctaagcgcctgatctatgctgcatccagtttgcaaagtggggtcccatcaaggttcagcggcagtggatctgggacagaattcactctcacaatcagcagcctgcagcctgaagactttgcaacttattactgtctacagtataatagttatccattcactttcggccctgggaccaaagtggacatcaaa

SEQ ID NO: 24250 - protein, 107 aa, synthetic construct
  REGION 1..107: note = Description of Artificial Sequence: Synthetic polypeptide
DIQMTQSPSSLSASVGDSVTISCRASQDIRNHLGWYQRNPGKAPKRLIYAASSLQSGVPSRFSGSGSGTEFTLTISSLQPEDFATYYCLQYNSYPFTFGPGTKVDIK

SEQ ID NO: 24251 - DNA, 321 bp, synthetic construct
  misc_feature 1..321: note = Description of Artificial Sequence: Synthetic polynucleotide
  source 1..321: mol_type = other DNA
gacatccagatgacccagtctccatcctccctgtctgcatctgtaggagacagagtcaccttcacttgccgggcaagtcagggcattagaagtgatttaggctggtatcagcagaaaccagggaaagcccctaagcgcctgatctatgctgcatccagtttgcaaagtggggtcccatcaaggttcagcggcagtggatctgggacagaattcactctcacaatcagcagcctgcagcctgaagattttgcaacttattactgtctacagcaatatagttaccctcggacgttcggccaagggaccaaggtggaaatcaaa

SEQ ID NO: 24252 - protein, 107 aa, synthetic construct
  REGION 1..107: note = Description of Artificial Sequence: Synthetic polypeptide
DIQMTQSPSSLSASVGDRVTFTCRASQGIRSDLGWYQQKPGKAPKRLIYAASSLQSGVPSRFSGSGSGTEFTLTISSLQPEDFATYYCLQQYSYPRTFGQGTKVEIK

SEQ ID NO: 24253 - DNA, 321 bp, synthetic construct
  misc_feature 1..321: note = Description of Artificial Sequence: Synthetic polynucleotide
  source 1..321: mol_type = other DNA
gacatccagatgacccagtctccatcctccctgtctgcatctgtcggagacagagtcaccatcacttgccgggcaagtcagaccattagcaactatttaaattggtatcatcagaaaccagggaaagcccctaagctcctgatctatgctgcttccagtttgcaaagtggggtcccatcaaggttcagtggcagtggatctgggacagatttcactctcaccatcagcagtctgcaacctgaagattttgcaacttactactgtcaacagagtcacacttccccgctcactttcggcggagggaccaaggtggagatcaaa

SEQ ID NO: 24254 - protein, 107 aa, synthetic construct
  REGION 1..107: note = Description of Artificial Sequence: Synthetic polypeptide
DIQMTQSPSSLSASVGDRVTITCRASQTISNYLNWYHQKPGKAPKLLIYAASSLQSGVPSRFSGSGSGTDFTLTISSLQPEDFATYYCQQSHTSPLTFGGGTKVEIK

SEQ ID NO: 24255 - DNA, 321 bp, synthetic construct
  misc_feature 1..321: note = Description of Artificial Sequence: Synthetic polynucleotide
  source 1..321: mol_type = other DNA
gacatccagatgacccagtctccatcctccctgtctgcatctgtaggagacagagtcaccatcacttgccgggcaagtcaggtcattagaaatgatttaggctggtatcagcagaaaccagggaaagcccctaagcgcctgatctatgctgtatccagtttgcaaagtggggtcccatcaaggttcagcggcagtggatctgggacagaattcactctcacaatcaacagcctgcagcctgaagattttgcaacttattactgtctacaacataatacttatccgctcactttcggcggcgggaccaaggtggagttcaaa

SEQ ID NO: 24256 - protein, 107 aa, synthetic construct
  REGION 1..107: note = Description of Artificial Sequence: Synthetic polypeptide
DIQMTQSPSSLSASVGDRVTITCRASQVIRNDLGWYQQKPGKAPKRLIYAVSSLQSGVPSRFSGSGSGTEFTLTINSLQPEDFATYYCLQHNTYPLTFGGGTKVEFK

SEQ ID NO: 24257 - DNA, 321 bp, synthetic construct
  misc_feature 1..321: note = Description of Artificial Sequence: Synthetic polynucleotide
  source 1..321: mol_type = other DNA
gacatccagatgacccagtctccatcctccctgtctgcatctgtaggagacagagtcaccatcacttgccgggcaagtcagggcattagaaatgatttaggctggtatcagcagaaaccagggaaagcccctaagcgcctgatctatgctgcatccagtttacaaagtggggtcccatcaaggttcagcggcagtggatctgggacagaattcactctcacaatcagcagcctgcagcctgaagattttgcaacttattactgtctacagcataatagttacccgctcactttcggcggagggaccaaggtggagatcaaa

SEQ ID NO: 24258 - protein, 107 aa, synthetic construct; identical to SEQ ID NO: 24146
  REGION 1..107: note = Description of Artificial Sequence: Synthetic polypeptide

SEQ ID NO: 24259 - DNA, 321 bp, synthetic construct
  misc_feature 1..321: note = Description of Artificial Sequence: Synthetic polynucleotide
  source 1..321: mol_type = other DNA
gacatccagatgacccagtctccatcctccctgtctgcatctgtaggagacagagtcaccatcacttgccggacaagtcagggcattagaaatgatttaggctggtatcagcagaaaccggggaaagcccctaagcgcctgatctatgctgcatccagtttgcaaagtggggtcccgtcaaggttcagcggcagtggatctgggacagaattcactctcacaatcagcagcctgcagcctgaagattttgcaacttattactgtctacagcatagttcttacccgctcactttcggcggagggaccaaggtggagatcaaa

SEQ ID NO: 24260 - protein, 107 aa, synthetic construct
  REGION 1..107: note = Description of Artificial Sequence: Synthetic polypeptide
DIQMTQSPSSLSASVGDRVTITCRTSQGIRNDLGWYQQKPGKAPKRLIYAASSLQSGVPSRFSGSGSGTEFTLTISSLQPEDFATYYCLQHSSYPLTFGGGTKVEIK

SEQ ID NO: 24261 - DNA, 321 bp, synthetic construct
  misc_feature 1..321: note = Description of Artificial Sequence: Synthetic polynucleotide
  source 1..321: mol_type = other DNA
gacatccagatgacccagtctccatcctccctgtctgcatctgtaggagacagagtcaccatcacttgccgggcaagtcagggcattagaaatgatttaggctggtatcagcagaaaccagggaaagcccctaagcgcctgatctatgctgcatccaatttacaaagtggggtcccatcaaggttcagcggcagtggatctgggacagaattcactctcacaatcagcagcctgcagcctgaagattttgcaacttattactgtctacagcataatagtttcccgctcactttcggcggagggaccaaggtggagatcaaa

SEQ ID NO: 24262 - protein, 107 aa, synthetic construct
  REGION 1..107: note = Description of Artificial Sequence: Synthetic polypeptide
DIQMTQSPSSLSASVGDRVTITCRASQGIRNDLGWYQQKPGKAPKRLIYAASNLQSGVPSRFSGSGSGTEFTLTISSLQPEDFATYYCLQHNSFPLTFGGGTKVEIK

SEQ ID NO: 24263 - DNA, 321 bp, synthetic construct
  misc_feature 1..321: note = Description of Artificial Sequence: Synthetic polynucleotide
  source 1..321: mol_type = other DNA
gacatccagatgacccagtctccatcctccctgtctgcatctgtaggagacagagtcaccatcacttgccgggcaagtcagggcattagaaatgatttaggctggtatcagcagaaaccagggaaagcccctaagcgcctgatctatgctgcatccagtttccaaagtggggtcccatcaaggttcagcggcagtggatctgggacagaattcactctcacaatcagcagcctgcagcctgaagattttgcaagttattactgtctacagcataatagttacccgctcactttcggcggagggaccaaggtggagatcaaa

SEQ ID NO: 24264 - protein, 107 aa, synthetic construct
  REGION 1..107: note = Description of Artificial Sequence: Synthetic polypeptide
DIQMTQSPSSLSASVGDRVTITCRASQGIRNDLGWYQQKPGKAPKRLIYAASSFQSGVPSRFSGSGSGTEFTLTISSLQPEDFASYYCLQHNSYPLTFGGGTKVEIK

SEQ ID NO: 24265 - DNA, 321 bp, synthetic construct
  misc_feature 1..321: note = Description of Artificial Sequence: Synthetic polynucleotide
  source 1..321: mol_type = other DNA
gacatccagatgacccagtctccatcctccctgtctgcatctgtcggagacagagtcaccatcacttgccgggcaagtcagaccattagcaactatttaaattggtatcatcagaaaccagggaaagcccctaagctcctgatctatgctgcatccagtttgcaaagtggggtcccatcaaggttcagtggcagtggatctgggacagatttcactctcaccatcagcagtctgcaacctgaagattttgcaacttactactgtcaacagagtcacagttccccgctcactttcggcggagggaccaaggtggagatcaaa

SEQ ID NO: 24266 - protein, 107 aa, synthetic construct
  REGION 1..107: note = Description of Artificial Sequence: Synthetic polypeptide
DIQMTQSPSSLSASVGDRVTITCRASQTISNYLNWYHQKPGKAPKLLIYAASSLQSGVPSRFSGSGSGTDFTLTISSLQPEDFATYYCQQSHSSPLTFGGGTKVEIK

SEQ ID NO: 24267 - DNA, 321 bp, synthetic construct
  misc_feature 1..321: note = Description of Artificial Sequence: Synthetic polynucleotide
  source 1..321: mol_type = other DNA
gacatccagatgacccagtctccatcttccgtgtctgcatctgtaggagacagagtcaccatcacttgtcgggcgagtcagggtattggcaactggttagcctggtatcagcagaaaccagggaaagcccctaaactcctgatctttgctgcatccagtttgcaaagtggggtcccatcacggttcagcggcagtggatctgggacagatttcactctcaccatcagcagcctgcagcctgaagattttgtaacttactattgtcaacaggctaacagtttccctcggacgttcggccaagggaccaaggtggaaatcaaa

SEQ ID NO: 24268 - protein, 107 aa, synthetic construct
  REGION 1..107: note = Description of Artificial Sequence: Synthetic polypeptide
DIQMTQSPSSVSASVGDRVTITCRASQGIGNWLAWYQQKPGKAPKLLIFAASSLQSGVPSRFSGSGSGTDFTLTISSLQPEDFVTYYCQQANSFPRTFGQGTKVEIK

SEQ ID NO: 24269 - DNA, 324 bp, synthetic construct
  misc_feature 1..324: note = Description of Artificial Sequence: Synthetic polynucleotide
  source 1..324: mol_type = other DNA
gacatccagatgacccagtctccatcctccctgtctgcatctgtaggagacagagtcaccatcacttgccgggcaagtcagagcattaatacttatttaaattggtatcagcaaaaaccagggaaagcccctaagctcctgatctatgctgcatccagtttgcaaagtggggtcccatcaaggttcagtggcagtggatctgggacagatttcactctcaccatcagcagtctgcaacctgaagattttgcaacttacttctgtcaacagagttacagaaccccctttttcactttcggccctgggaccaaagtggatatcaaa

SEQ ID NO: 24270 - protein, 108 aa, synthetic construct
  REGION 1..108: note = Description of Artificial Sequence: Synthetic polypeptide
DIQMTQSPSSLSASVGDRVTITCRASQSINTYLNWYQQKPGKAPKLLIYAASSLQSGVPSRFSGSGSGTDFTLTISSLQPEDFATYFCQQSYRTPFFTFGPGTKVDIK

SEQ ID NO: 24271 - DNA, 321 bp, synthetic construct; identical to SEQ ID NO: 24257
  misc_feature 1..321: note = Description of Artificial Sequence: Synthetic polynucleotide
  source 1..321: mol_type = other DNA

SEQ ID NO: 24272 - protein, 107 aa, synthetic construct; identical to SEQ ID NO: 24146
  REGION 1..107: note = Description of Artificial Sequence: Synthetic polypeptide

SEQ ID NO: 24273 - DNA, 321 bp, synthetic construct
  misc_feature 1..321: note = Description of Artificial Sequence: Synthetic polynucleotide
  source 1..321: mol_type = other DNA
gacatccagatgacccagtctccatcctccctgtctgcatctgtaggagacagagtcaccatcacttgccgggcaagtcagggcattagaaatgatttaggctggtatcagcagaaaccagggaaagcccctaagcgcctgatctatgctgcatccagtgtgcaaagtggggtcccatcaaggttcagcggcagtggatctgggacagaattcactctcacaatcagcagcctgcagcctgaagattttgcaatttattactgtctacagcataatagttacccgctcactttcggcggagggaccaaggtggagatcaaa

SEQ ID NO: 24274 - protein, 107 aa, synthetic construct
  REGION 1..107: note = Description of Artificial Sequence: Synthetic polypeptide
DIQMTQSPSSLSASVGDRVTITCRASQGIRNDLGWYQQKPGKAPKRLIYAASSVQSGVPSRFSGSGSGTEFTLTISSLQPEDFAIYYCLQHNSYPLTFGGGTKVEIK

SEQ ID NO: 24275 - DNA, 321 bp, synthetic construct
  misc_feature 1..321: note = Description of Artificial Sequence: Synthetic polynucleotide
  source 1..321: mol_type = other DNA
gacatccagatgacccaggctccatcctccctgtctgcatctgtaggagacagagtcaccatcacttgccgggcaagtcagggcattagaaatgatttaggctggtatcagcagaaaccagggaaagcccctaagcgcctgatctatgctgcatccagtttgcaaagtggggtcccatcaaggttcagcggcagtggatctgggacagaattcactctcacaatcagcagcctgcagcctgaagattttgcaacttattactgtctacagcataatagttacccgctcactttcggcggagggaccaaggtggagatcaaa

SEQ ID NO: 24276 - protein, 107 aa, synthetic construct
  REGION 1..107: note = Description of Artificial Sequence: Synthetic polypeptide
DIQMTQAPSSLSASVGDRVTITCRASQGIRNDLGWYQQKPGKAPKRLIYAASSLQSGVPSRFSGSGSGTEFTLTISSLQPEDFATYYCLQHNSYPLTFGGGTKVEIK

SEQ ID NO: 24277 - DNA, 321 bp, synthetic construct
  misc_feature 1..321: note = Description of Artificial Sequence: Synthetic polynucleotide
  source 1..321: mol_type = other DNA
gacatccagatgacccagtctccatcctccctgtctgcttctgtcggagacagaatcaccatcacttgccgggcaggtcagaacattatcaactatttaaattggtatcagcagaaaccagggaaagcccctaacctcctgatatatgttgcatccagtttgcaaagtggggtcccatcaaggttcaatggcagtggatctgggacagatttcactctcaccatcagcagtctgcaacctgaagattttgcaacttactactgtcaacagagttacagtacccctttcactttcggccctgggaccaaagtggatatcaaa

SEQ ID NO: 24278 - protein, 107 aa, synthetic construct
  REGION 1..107: note = Description of Artificial Sequence: Synthetic polypeptide
DIQMTQSPSSLSASVGDRITITCRAGQNIINYLNWYQQKPGKAPNLLIYVASSLQSGVPSRFNGSGSGTDFTLTISSLQPEDFATYYCQQSYSTPFTFGPGTKVDIK

SEQ ID NO: 24279 - DNA, 321 bp, synthetic construct
  misc_feature 1..321: note = Description of Artificial Sequence: Synthetic polynucleotide
  source 1..321: mol_type = other DNA
gacatccagatgacccagtctccatcctccctgtctgcatctgtaggagacagagtcaccatcacttgccgggcaagtcagagcattatcacctatttaaattggtatcagcagaaaccagggaaagcccctaaggtcctgatccatactgcatccagtttgcaaagtggggtcccatcaaggttcagtggcagtggatctgggacagatttcactctcaccatcagcagtctgcaacctgaagattttgcaacttactactgtcaacagacttacagtcccccgctcactttcggcggagggaccaaggtggagatcaaa

SEQ ID NO: 24280 - protein, 107 aa, synthetic construct
  REGION 1..107: note = Description of Artificial Sequence: Synthetic polypeptide
DIQMTQSPSSLSASVGDRVTITCRASQSIITYLNWYQQKPGKAPKVLIHTASSLQSGVPSRFSGSGSGTDFTLTISSLQPEDFATYYCQQTYSPPLTFGGGTKVEIK

SEQ ID NO: 24281 - DNA, 321 bp, synthetic construct
  misc_feature 1..321: note = Description of Artificial Sequence: Synthetic polynucleotide
  source 1..321: mol_type = other DNA
gacatccagatgacccagtctccatcctccctgtctgcatctgtaggagacagagtcaccatcacttgccgggcaagtcagggcattagaaatgatttaggctggtatcagcagaaaccagggaaagcccctaagcgcctgatctatgctgcatccagtgtacaaagtggggtcccatcaaggttcagcggcagtggatctgggacagaattcactctcacaatcagcagcctgcagcctgaagattttgcaacttattactgtctacagcataatagttacccgctcactttcggcggagggaccaaggtggagatcaaa

SEQ ID NO: 24282 - protein, 107 aa, synthetic construct
  REGION 1..107: note = Description of Artificial Sequence: Synthetic polypeptide
DIQMTQSPSSLSASVGDRVTITCRASQGIRNDLGWYQQKPGKAPKRLIYAASSVQSGVPSRFSGSGSGTEFTLTISSLQPEDFATYYCLQHNSYPLTFGGGTKVEIK

SEQ ID NO: 24283 - DNA, 324 bp, synthetic construct
  misc_feature 1..324: note = Description of Artificial Sequence: Synthetic polynucleotide
  source 1..324: mol_type = other DNA
gacatccagatgacccagtctccatcctccctgtctgcatctgtaggcgacagagtcaccatcacttgccgggcaagtcagaacattagtagttatttaaattggtatcagcagaaaccagggaaagcccctaagctcctgatctttggtgcatccagtttgcaaactggggtcccatcaaggttcagtggcagtggatctgggacagatttcactctcaccatcaacagtctgcaacctgaagattttgcaacttacttctgtcaacagagttacagaaccccctttttcactttcggccctgggaccaaagtggatatcaaa

SEQ ID NO: 24284 - protein, 108 aa, synthetic construct
  REGION 1..108: note = Description of Artificial Sequence: Synthetic polypeptide
DIQMTQSPSSLSASVGDRVTITCRASQNISSYLNWYQQKPGKAPKLLIFGASSLQTGVPSRFSGSGSGTDFTLTINSLQPEDFATYFCQQSYRTPFFTFGPGTKVDIK

SEQ ID NO: 24285 - DNA, 321 bp, synthetic construct
  misc_feature 1..321: note = Description of Artificial Sequence: Synthetic polynucleotide
  source 1..321: mol_type = other DNA
gacatccagatgacccagtctccatcctccctgtctgcgtctgtaggagacagagtcaccatcacttgccgggcaagtcagggcattagaaatgatttaggctggtatcagcagaaaccagggaaagcccctaagcgcctgatctatactgcatccagtttgcaaagtggggtcccatcaagattcagcggcagtggatttgggacagaattcactctcacaatcagcagcctgcagcctgaagattttgcaacttattactgtctacaacataatagttacccgtggacgttcggcctggggaccaaggtggtcatcaaa

SEQ ID NO: 24286 - protein, 107 aa, synthetic construct
  REGION 1..107: note = Description of Artificial Sequence: Synthetic polypeptide
DIQMTQSPSSLSASVGDRVTITCRASQGIRNDLGWYQQKPGKAPKRLIYTASSLQSGVPSRFSGSGFGTEFTLTISSLQPEDFATYYCLQHNSYPWTFGLGTKVVIK

SEQ ID NO: 24287 - DNA, 321 bp, synthetic construct
  misc_feature 1..321: note = Description of Artificial Sequence: Synthetic polynucleotide
  source 1..321: mol_type = other DNA
gacatccagatgacccagtctccatcctccctgtctgcatctgtacgagacagagtcaccatcacttgccgggcaagtcagggcataagaaatgatttaggctggtatcagcagaaaccagggaaagcccctaagcgcctgatctatgctgtttccagtttgcaaagtggggtcccatcaaggttcagcggcagtggatctgggacagagttcactctcacaatcagcagcctgcagcctgaagattttgcaacttattactgtctacagcatgccagttacccgctcactttcggcggagggaccaaggtggagatcaaa

SEQ ID NO: 24288 - protein, 107 aa, synthetic construct
  REGION 1..107: note = Description of Artificial Sequence: Synthetic polypeptide
DIQMTQSPSSLSASVRDRVTITCRASQGIRNDLGWYQQKPGKAPKRLIYAVSSLQSGVPSRFSGSGSGTEFTLTISSLQPEDFATYYCLQHASYPLTFGGGTKVEIK

SEQ ID NO: 24289 - DNA, 324 bp, synthetic construct
  misc_feature 1..324: note = Description of Artificial Sequence: Synthetic polynucleotide
  source 1..324: mol_type = other DNA
gacatccagatgacccagtctccatcctccctgtctgcatctgtaggagacagagtcaccatcacttgccgggcaagtcagagcattagtagttatttatattggtatcagcagaaaccagggaaagcccctaagctcctgatctatgctgcatccagtttgcaaagtggggtcccatcaaggttcagtggcagtggatctgggacagatttcactctcaccatcagcagtctgcaacctgaagattttgcaacttactactgtcaacagagttacagtgcccctccattcactttcggccctgggaccaaagtggatatcaaa

SEQ ID NO: 24290 - protein, 108 aa, synthetic construct
  REGION 1..108: note = Description of Artificial Sequence: Synthetic polypeptide
DIQMTQSPSSLSASVGDRVTITCRASQSISSYLYWYQQKPGKAPKLLIYAASSLQSGVPSRFSGSGSGTDFTLTISSLQPEDFATYYCQQSYSAPPFTFGPGTKVDIK

SEQ ID NO: 24291 - DNA, 321 bp, synthetic construct
  misc_feature 1..321: note = Description of Artificial Sequence: Synthetic polynucleotide
  source 1..321: mol_type = other DNA
gacatccagatgacccagtctccatcctccctgtctgcatctgtaggagacagagtcaccatcacttgccgggcaagtcagggcattagaaatgatttaggctggtatcagcaaaaaccagggaaagcccctaagcgcctgatctatgctgcatccagtttgcaaagtggggtcccatcaaggttcagcggcagtggatctgggacagaattctctctcacaatcagcagcctgcagcctgaagattttgcaacttattactgtctacagcataatagttacccgctcactttcggcggagggaccaaggtggagatcaaa

SEQ ID NO: 24292 - protein, 107 aa, synthetic construct
  REGION 1..107: note = Description of Artificial Sequence: Synthetic polypeptide
DIQMTQSPSSLSASVGDRVTITCRASQGIRNDLGWYQQKPGKAPKRLIYAASSLQSGVPSRFSGSGSGTEFSLTISSLQPEDFATYYCLQHNSYPLTFGGGTKVEIK

SEQ ID NO: 24293 - DNA, 321 bp, synthetic construct
  misc_feature 1..321: note = Description of Artificial Sequence: Synthetic polynucleotide
  source 1..321: mol_type = other DNA
gacatccagatgacccagtctccatcctcactgtctgcatctgtaggagacagagtcaccatcacttgtcgggcgagtcaggccattaacacttatttagcctggtttcagcagaaaccagggaaagcccctaagtccctgatttctgctgcatccagtttgcaaagtggggtcccatcaaagttcagcggcagtggatctgggacagaattcactctcaccatcagcagcctgcagcctgaagattttgcaacttattactgccaacagtattatagttatccgctcactttcggcggagggaccaaggtggagatcaaa

SEQ ID NO: 24294 - protein, 107 aa, synthetic construct
  REGION 1..107: note = Description of Artificial Sequence: Synthetic polypeptide
DIQMTQSPSSLSASVGDRVTITCRASQAINTYLAWFQQKPGKAPKSLISAASSLQSGVPSKFSGSGSGTEFTLTISSLQPEDFATYYCQQYYSYPLTFGGGTKVEIK

SEQ ID NO: 24295 - DNA, 321 bp, synthetic construct
  misc_feature 1..321: note = Description of Artificial Sequence: Synthetic polynucleotide
  source 1..321: mol_type = other DNA
gacatccagatgacccagtctccatcctccctgtctgcatctgtaggagacagagtcaccatcacttgccgggcaagtcagggcattagaaatgatttaggctggtatcagcagaaaccagggaaagcccctaagcgcctgatctatgctgcatccagtttgcaaagtggggtcccatcaaggttcagcggcagtggatctgggacagaattcactctcacaatcagcagcctgcagcctgaagattttgcaacttattactgtctacagcataatagttacccattcactttcggccctgggaccaaagtggatatcaaa

SEQ ID NO: 24296 - protein, 107 aa, synthetic construct
  REGION 1..107: note = Description of Artificial Sequence: Synthetic polypeptide
DIQMTQSPSSLSASVGDRVTITCRASQGIRNDLGWYQQKPGKAPKRLIYAASSLQSGVPSRFSGSGSGTEFTLTISSLQPEDFATYYCLQHNSYPFTFGPGTKVDIK

SEQ ID NO: 24297 - DNA, 321 bp, synthetic construct
  misc_feature 1..321: note = Description of Artificial Sequence: Synthetic polynucleotide
  source 1..321: mol_type = other DNA
gacatccagatgacccagtctccatcctccctgtctgcatctgtaggagacagagtcaccatcacttgccgggcaagtcagggcattagaaatgatttaggctggtatcagcagaaaccagggaaagcccctaagcgcctgatctatgctgcatccagtttgcaaagtggggtcccatcaagattcagcggcagtggatctgggacagaattcactctcacaatcagcagcctgcagcctgaagattttgcaacttattactgtctacagcataatagttacccgtggacgttcggccaagggaccaaggtggaaatcaaa

SEQ ID NO: 24298 - protein, 107 aa, synthetic construct; identical to SEQ ID NO: 24244
  REGION 1..107: note = Description of Artificial Sequence: Synthetic polypeptide

SEQ ID NO: 24299 - DNA, 321 bp, synthetic construct
  misc_feature 1..321: note = Description of Artificial Sequence: Synthetic polynucleotide
  source 1..321: mol_type = other DNA
gacatccagatgacccagtctccatcctccctgtctgcatctgtaggagacagagtcaccatcacttgccgggcaagtcagggcattagaaatgatttaggctggtatcagcagaaaccagggaaagcccctaagcgcctgatctatgctgcatccagtttgcaaagtggggtcccatcaaggttcagcggcagtggatctgggacagaattcactctcacaatcagcagcctgcagcctgaagattttgcaacttattactgtctacagcataatagttacccgtggacgttcggccaagggaccaaggtggaaatcaaa

SEQ ID NO: 24300 - protein, 107 aa, synthetic construct; identical to SEQ ID NO: 24244
  REGION 1..107: note = Description of Artificial Sequence: Synthetic polypeptide

SEQ ID NO: 24301 - DNA, 321 bp, synthetic construct
  misc_feature 1..321: note = Description of Artificial Sequence: Synthetic polynucleotide
  source 1..321: mol_type = other DNA
gacatccagatgacccagtctccatcctcactgtctgcatctgtaggagacagagtcaccatcacttgtcgggcgagtcaggacattagctattatttagcctggtttcagcagaaaccagggaaagcccctaagtccctgatttatgttgcatccagtttgcaaagtggggtcccatcaaagttcggcggcagtggatttgggacagatttcactctcaccatcagcagcctgcagcctgaagattttgcaacttattactgcttacagtataatagttacccattcactttcggccctgggaccaaagtggatatcaaa

SEQ ID NO: 24302 - protein, 107 aa, synthetic construct
  REGION 1..107: note = Description of Artificial Sequence: Synthetic polypeptide
DIQMTQSPSSLSASVGDRVTITCRASQDISYYLAWFQQKPGKAPKSLIYVASSLQSGVPSKFGGSGFGTDFTLTISSLQPEDFATYYCLQYNSYPFTFGPGTKVDIK

SEQ ID NO: 24303 - DNA, 321 bp, synthetic construct
  misc_feature 1..321: note = Description of Artificial Sequence: Synthetic polynucleotide
  source 1..321: mol_type = other DNA
gacatccagatgacccagtctccatcctccctgtctgcacctgtaggagacagagtctccatcacttgccgggcaagtcagaacattatcaactatttaaattggtatcagcagaaaccagggaaagcccctaagctcctgatagatgttgcatccaatttacaaggtggggtcccatcaaggttcagtggcagtggatctgggacagatttcactctcaccatcagcagtctgcaacctgaagattttgcaacttactactgtcaacagagttacagtacccctttcactttcggccctgggaccaaagtggatatcaaa

SEQ ID NO: 24304 - protein, 107 aa, synthetic construct
  REGION 1..107: note = Description of Artificial Sequence: Synthetic polypeptide
DIQMTQSPSSLSAPVGDRVSITCRASQNIINYLNWYQQKPGKAPKLLIDVASNLQGGVPSRFSGSGSGTDFTLTISSLQPEDFATYYCQQSYSTPFTFGPGTKVDIK

SEQ ID NO: 24305 - DNA, 324 bp, synthetic construct
  misc_feature 1..324: note = Description of Artificial Sequence: Synthetic polynucleotide
  source 1..324: mol_type = other DNA
gacatccagatgacccagtctccagcctccctgtctgcatctgtaggagacagagtcaccatcacttgccgggcaagtcagagcattatcaactatttaaattggtatcagcagagaccagggaaatcccctaagctcctgatctatgctgcatccagtttgcacagtggggtcccatcaaggttcagtggcagaggatctgggacagatttcactctcaccatcagtagtctgcaacctgaagattttgcaacttacttctgtcaacagagttacagaacccccttattcactttcggccctgggaccaaagtagatttcaaa

SEQ ID NO: 24306 - protein, 108 aa, synthetic construct
  REGION 1..108: note = Description of Artificial Sequence: Synthetic polypeptide
DIQMTQSPASLSASVGDRVTITCRASQSIINYLNWYQQRPGKSPKLLIYAASSLHSGVPSRFSGRGSGTDFTLTISSLQPEDFATYFCQQSYRTPLFTFGPGTKVDFK

SEQ ID NO: 24307 - DNA, 321 bp, synthetic construct; identical to SEQ ID NO: 24257
  misc_feature 1..321: note = Description of Artificial Sequence: Synthetic polynucleotide
  source 1..321: mol_type = other DNA

SEQ ID NO: 24308 - protein, 107 aa, synthetic construct; identical to SEQ ID NO: 24146
  REGION 1..107: note = Description of Artificial Sequence: Synthetic polypeptide

SEQ ID NO: 24309 - DNA, 324 bp, synthetic construct
  misc_feature 1..324: note = Description of Artificial Sequence: Synthetic polynucleotide
  source 1..324: mol_type = other DNA
gacatccagatgacccagtctccatcctccctgtctgcatctgttggagacagagtcaccatcacttgccgggcaagtcagaccattagtagttttttaaattggtatcagcagaaaccagggaaagcccctaaactcctgatctatgctgcttccagtttgcaaagtggggtcccgtcaaggttcagtggcagtggatctgggacagatttcactctcaccatcagcggtctgcaacctgaagattttgcaacttacttctgtcaacagagttacagaaccccctttttcactttcggccctgggaccaaagtggatatcaaa

SEQ ID NO: 24310 - protein, 108 aa, synthetic construct
  REGION 1..108: note = Description of Artificial Sequence: Synthetic polypeptide
DIQMTQSPSSLSASVGDRVTITCRASQTISSFLNWYQQKPGKAPKLLIYAASSLQSGVPSRFSGSGSGTDFTLTISGLQPEDFATYFCQQSYRTPFFTFGPGTKVDIK

SEQ ID NO: 24311 - DNA, 324 bp, synthetic construct
  misc_feature 1..324: note = Description of Artificial Sequence: Synthetic polynucleotide
  source 1..324: mol_type = other DNA
gacatccagatgacccagtctccatcctccctgtctgcatctataggagacagagtctccatcacttgccgggcaagtcggaccattaacaactatttaaattggtatcagcagaaaccagggaaagcccctaaactcctgatctttgctacatccagtttacaaagtggggtcccatcaaggttcagtggcagtggatctgggacagatttcactctcaccatcagcagtctgcaacctgaagattttgcaacttactactgtcaacagacttacagtacccccttattcgctttcggccctgggaccaaagtggatatcaaa

SEQ ID NO: 24312 - protein, 108 aa, synthetic construct
  REGION 1..108: note = Description of Artificial Sequence: Synthetic polypeptide
DIQMTQSPSSLSASIGDRVSITCRASRTINNYLNWYQQKPGKAPKLLIFATSSLQSGVPSRFSGSGSGTDFTLTISSLQPEDFATYYCQQTYSTPLFAFGPGTKVDIK

SEQ ID NO: 24313 - DNA, 321 bp, synthetic construct
  misc_feature 1..321: note = Description of Artificial Sequence: Synthetic polynucleotide
  source 1..321: mol_type = other DNA
gacatccagatgacccagtctccatcctccctgtctgcatctgtaggagacagagtcaccatcacttgccgggcaagtcagggcattagaaatgatttaggctggtatcagcagaaaccagggaaagcccctaagcgcctgatctatgttgcatccagtttgcaaagtggggtcccatcaaggttcaacggcagtggatctgggacagaattcactctcacaatcagcagcctgcagcctgaagattttgcaacttattactgtctacagcatagtagttacccgctcactttcggcggagggaccaaggtggagatcaaa

SEQ ID NO: 24314 - protein, 107 aa, synthetic construct
  REGION 1..107: note = Description of Artificial Sequence: Synthetic polypeptide
DIQMTQSPSSLSASVGDRVTITCRASQGIRNDLGWYQQKPGKAPKRLIYVASSLQSGVPSRFNGSGSGTEFTLTISSLQPEDFATYYCLQHSSYPLTFGGGTKVEIK

SEQ ID NO: 24315 - DNA, 321 bp, synthetic construct
  misc_feature 1..321: note = Description of Artificial Sequence: Synthetic polynucleotide
  source 1..321: mol_type = other DNA
gacatccagatgacccagtctccttcctcactgtttgcatttgtaggagacagagtcaccatcacttgtcgggcgagtcagggcattagctattatttagcctggtttcagcagaaaccagggaaagcccctaagtccctgatttatgttgcatccagtttgcaaagtggggtcccatcaaagttcagcggcagtggatttgggacagatttcactctcaccatcagcagcctgcagcctgaagattttgcaacttattactgccaacagtataatacttacccattcactttcggccctgggaccacagtggatatcaag

SEQ ID NO: 24316 - protein, 107 aa, synthetic construct
  REGION 1..107: note = Description of Artificial Sequence: Synthetic polypeptide
DIQMTQSPSSLFAFVGDRVTITCRASQGISYYLAWFQQKPGKAPKSLIYVASSLQSGVPSKFSGSGFGTDFTLTISSLQPEDFATYYCQQYNTYPFTFGPGTTVDIK

SEQ ID NO: 24317 - DNA, 321 bp, synthetic construct
  misc_feature 1..321: note = Description of Artificial Sequence: Synthetic polynucleotide
  source 1..321: mol_type = other DNA
gacatccagatgacccagtctccatcctccctgtctgcatctgtaggagacagagtcaccatcacttgccgggcaagtcagggcattagaactgatttaggctggtatcagcagagaccagggaaagcccctaagcgcctgatctatactgcatccagtttgcaaagtggggtcccatcaaggttcagcggcagtggatctgggacagaattcactctcacaatcagcaggctgcagcctgaagattttgcaacttattactgtctacagcataatggttacccgtggacgttcggccaagggaccaaggtggaaatcaaa

SEQ ID NO: 24318 - protein, 107 aa, synthetic construct
  REGION 1..107: note = Description of Artificial Sequence: Synthetic polypeptide
DIQMTQSPSSLSASVGDRVTITCRASQGIRTDLGWYQQRPGKAPKRLIYTASSLQSGVPSRFSGSGSGTEFTLTISRLQPEDFATYYCLQHNGYPWTFGQGTKVEIK

SEQ ID NO: 24319 - DNA, 321 bp, synthetic construct
  misc_feature 1..321: note = Description of Artificial Sequence: Synthetic polynucleotide
  source 1..321: mol_type = other DNA
gacatccagatgacccagtctccatcctcactgtctgcatctgttggagacagagtcaccatcacttgtcgggcgagtcaggacattagcaattatttagcctggtttcagcagaaaccagggaaagcccctaagtccctgatctatgctgcatccagtttgcaaagtggggtcccatcaaagttcagaggcagtggatctgggacagatttcactctcaccatcagcaacctgcagcctgaagattttgcatcttattactgccaacagtatcatagtttcccattcactttcggccctgggaccaaagtggatatcaaa

SEQ ID NO: 24320 - protein, 107 aa, synthetic construct
  REGION 1..107: note = Description of Artificial Sequence: Synthetic polypeptide
DIQMTQSPSSLSASVGDRVTITCRASQDISNYLAWFQQKPGKAPKSLIYAASSLQSGVPSKFRGSGSGTDFTLTISNLQPEDFASYYCQQYHSFPFTFGPGTKVDIK

SEQ ID NO: 24321 - DNA, 321 bp, synthetic construct
  misc_feature 1..321: note = Description of Artificial Sequence: Synthetic polynucleotide
  source 1..321: mol_type = other DNA
gacatccagatgacccagtctccatcctccctgtctgcatctgtaggagacagagtcaccatcacttgccgggcaagtcagggcattagaaatgatttaggctggtatcagcagaaaccagggaaagcccctaagcgcctgatctatgctgcatccaatttgcaaagtggggtcccatcaaggttcagcggcagtggatctgggacagaattcagtttcacaatcagcagcctgcagcctgaagattttgcaacttattactgtctacagcataatagttacccgctcactttcggcggagggaccaaggtggagatcaaa

SEQ ID NO: 24322 - protein, 107 aa, synthetic construct
  REGION 1..107: note = Description of Artificial Sequence: Synthetic polypeptide
DIQMTQSPSSLSASVGDRVTITCRASQGIRNDLGWYQQKPGKAPKRLIYAASNLQSGVPSRFSGSGSGTEFSFTISSLQPEDFATYYCLQHNSYPLTFGGGTKVEIK

SEQ ID NO: 24323 - DNA, 339 bp, synthetic construct
  misc_feature 1..339: note = Description of Artificial Sequence: Synthetic polynucleotide
  source 1..339: mol_type = other DNA
gatattgtgatgactcagtctccactctccctgcccgtcacccctggagagccggcctccatctcctgtaggtctagtcagagcctcctgcatagtaatgggaacaactctttggattggtacctgcagaagccagggcagtctccacagctcctgatctatttgggttctcatcgggcctccggggtccctgacaggttcagtgacagtggatcaggcacagattttacactgaaaatcagcagagtggaggctgaggatgttggggtttattactgcatgcaagttctacaaactcctcccctcactttcggcggagggaccaaggtggagatcaaa

SEQ ID NO: 24324 - protein, 113 aa, synthetic construct
  REGION 1..113: note = Description of Artificial Sequence: Synthetic polypeptide
DIVMTQSPLSLPVTPGEPASISCRSSQSLLHSNGNNSLDWYLQKPGQSPQLLIYLGSHRASGVPDRFSDSGSGTDFTLKISRVEAEDVGVYYCMQVLQTPPLTFGGGTKVEIK

SEQ ID NO: 24325 - DNA, 324 bp, synthetic construct
  misc_feature 1..324: note = Description of Artificial Sequence: Synthetic polynucleotide
  source 1..324: mol_type = other DNA
gacatccagatgacccagtctccatcctccctgtctgcatctgtaggagacagagtcaccatcacttgccgggcaagtcagagcattagtagttatttaaattggtatcaccagaaaccagggaaagcccctaagctcctgatctatgctgcatccagtttgcaaagtggggtcccatcaaggttcagtggcagtggatctgggacagatttcactctcaccatcagcaatctgcaacctgaagattttgcaacttactactgtcaacagagttacaatacccccttattcactttcggccctgggaccaaagtggatatcaaa

SEQ ID NO: 24326 - protein, 108 aa, synthetic construct
  REGION 1..108: note = Description of Artificial Sequence: Synthetic polypeptide
DIQMTQSPSSLSASVGDRVTITCRASQSISSYLNWYHQKPGKAPKLLIYAASSLQSGVPSRFSGSGSGTDFTLTISNLQPEDFATYYCQQSYNTPLFTFGPGTKVDIK

SEQ ID NO: 24327 - DNA, 324 bp, synthetic construct
  misc_feature 1..324: note = Description of Artificial Sequence: Synthetic polynucleotide
  source 1..324: mol_type = other DNA
gacatccagatgacccagtctccatcctccctgtctgcatctgtaggagacagagtcaccatcacttgccgggcaagtcagagcattagtagttatttaaattggtatcagcagaaaccagggaaagcccctacgctcctgatctatgctgcatccagtttacaaagtggggtcccatcaaggttcagtggcagtggatctgggacagatttcactctcaccatcaacagtctgcaacctgaagattttgcaacttacttctgtcaacagagttacagaaccccctttttcactttcggccctgggaccaaagtggatatcaaa

SEQ ID NO: 24328 - protein, 108 aa, synthetic construct
  REGION 1..108: note = Description of Artificial Sequence: Synthetic polypeptide
DIQMTQSPSSLSASVGDRVTITCRASQSISSYLNWYQQKPGKAPTLLIYAASSLQSGVPSRFSGSGSGTDFTLTINSLQPEDFATYFCQQSYRTPFFTFGPGTKVDIK

SEQ ID NO: 24329 - DNA, 324 bp, synthetic construct
  misc_feature 1..324: note = Description of Artificial Sequence: Synthetic polynucleotide
  source 1..324: mol_type = other DNA
gacatccagatgacccagtctccatcctccctgtctgcatctgtaggagacagagtcaccatcacttgccgggcgagtcagggcattaacaattatttagcctggtatcagcagaaaccagggaaaattcctaagctcctgatctatgctgcatccactttgcaatcaggggtcccctctcggttcagtggcagtggatctgggacagatttcactctcaccatcagcagcctgcagcctgaagatgttgcaacttattgctgtcaaaagtataacagtgcccctccgatcaccttcggccaagggacacgactggagattaaa

SEQ ID NO: 24330 - protein, 108 aa, synthetic construct
  REGION 1..108: note = Description of Artificial Sequence: Synthetic polypeptide
DIQMTQSPSSLSASVGDRVTITCRASQGINNYLAWYQQKPGKIPKLLIYAASTLQSGVPSRFSGSGSGTDFTLTISSLQPEDVATYCCQKYNSAPPITFGQGTRLEIK

SEQ ID NO: 24331 - DNA, 321 bp, synthetic construct
  misc_feature 1..321: note = Description of Artificial Sequence: Synthetic polynucleotide
  source 1..321: mol_type = other DNA
gacatccagatgacccagtctccatcttccgtgtctgcatctgtaggagacggagtcaccatcacttgtcgggcgagtcagggtattagcagctggttagcctggtatcagcagaaaccagggaaagcccctaaactcttgatttatgctgcatccagtttgcaaagtggggtcccatcaaggttcagcggcagtggatctgggacagatttcactctcaccatcagcagcctgcagcctgaagattttgcaacttactattgtcaacaggctaacagtttccctcggacgttcggccaagggaccaaggtggaaatcaaa

SEQ ID NO: 24332 - protein, 107 aa, synthetic construct
  REGION 1..107: note = Description of Artificial Sequence: Synthetic polypeptide
DIQMTQSPSSVSASVGDGVTITCRASQGISSWLAWYQQKPGKAPKLLIYAASSLQSGVPSRFSGSGSGTDFTLTISSLQPEDFATYYCQQANSFPRTFGQGTKVEIK

SEQ ID NO: 24333 - DNA, 324 bp, synthetic construct
  misc_feature 1..324: note = Description of Artificial Sequence: Synthetic polynucleotide
  source 1..324: mol_type = other DNA
gacatccagatgacccagtctccatcctccctgtctgcatctgtaggagacagagtcaccatcacctgccgggcaagtcagaacattaacaattatttaaattggtatcagcagaaaccagggaaaggccctaaggtcctgatctttactacatctagtttacaaagtggggtcccatcaaggttcagtggcagtggatctgggacagatttcactctcaccatcagcagtctgcaacctgaagattttgcaacttactactgtcaacagagttacactacccccacgtggacgttcggccaagggaccaaggtggaaatcaaa

SEQ ID NO: 24334 - protein, 108 aa, synthetic construct
  REGION 1..108: note = Description of Artificial Sequence: Synthetic polypeptide
DIQMTQSPSSLSASVGDRVTITCRASQNINNYLNWYQQKPGKGPKVLIFTTSSLQSGVPSRFSGSGSGTDFTLTISSLQPEDFATYYCQQSYTTPTWTFGQGTKVEIK

SEQ ID NO: 24335 - DNA, 321 bp, synthetic construct
  misc_feature 1..321: note = Description of Artificial Sequence: Synthetic polynucleotide
  source 1..321: mol_type = other DNA
gacatccagatgacccagtctccatcctccctgtctgcatctgtaggagacagagtcaccatcacttgccgggcaagtcagggcattagaaatgatttaggctggtatcagcagaaaccagggaaagcccctaagcgcctgatctatactgcatccagtttgcaaagtggggtcccatcaaggttcagcggcagtggatctgggacagaattcactctcacaatcagcagcctgcagcctgaagattttgcaacttattactgtctacaacataatagttacccgttgacgttcggcccagggaccaaggtggtcatcaaa

SEQ ID NO: 24336 - protein, 107 aa, synthetic construct
  REGION 1..107: note = Description of Artificial Sequence: Synthetic polypeptide
DIQMTQSPSSLSASVGDRVTITCRASQGIRNDLGWYQQKPGKAPKRLIYTASSLQSGVPSRFSGSGSGTEFTLTISSLQPEDFATYYCLQHNSYPLTFGPGTKVVIK

SEQ ID NO: 24337 - DNA, 321 bp, synthetic construct
  misc_feature 1..321: note = Description of Artificial Sequence: Synthetic polynucleotide
  source 1..321: mol_type = other DNA
gaaatagtgatgacgcagtctccatccaccctgtctgtgtctccaggggaaagagccaccctctcctgcagggccagtcagagtgttagcagcaacttagcctggttccagcagaaacctggccaggctcccaggctcctcatcaatggtgcatccaccagggccagtggtatcccagccaggttcagtggcagtgggtctgggacagagttcactctcaccatcagcagcctgcagtctgaagattttgcagtttattactgtcagcagtataataactggcctctgacgttcggccaagggaccaaggtggaaatcaaa

SEQ ID NO: 24338 - protein, 107 aa, synthetic construct
  REGION 1..107: note = Description of Artificial Sequence: Synthetic polypeptide
EIVMTQSPSTLSVSPGERATLSCRASQSVSSNLAWFQQKPGQAPRLLINGASTRASGIPARFSGSGSGTEFTLTISSLQSEDFAVYYCQQYNNWPLTFGQGTKVEIK

SEQ ID NO: 24339 - DNA, 324 bp, synthetic construct
  misc_feature 1..324: note = Description of Artificial Sequence: Synthetic polynucleotide
  source 1..324: mol_type = other DNA
gacatccagatgacccagtctccatcctccctgtctgcatctgtaggagacagagtctccatcacttgccgggcaagtcagaatattaacaactatttaaattggtatcagcagaaaccagggaaaggccctaaggtcctgatccttactgcatccagtttgcaaagtggggtcccatcaaggttcagtggcagtggatctgggacagatttcactctcaccatcagcagtctacaacctgaagattttgcaacttactactgtcaacagacttacactacccccacgtggacgttcggccaagggaccaaggtggaaatcaaa

SEQ ID NO: 24340 - protein, 108 aa, synthetic construct
  REGION 1..108: note = Description of Artificial Sequence: Synthetic polypeptide
DIQMTQSPSSLSASVGDRVSITCRASQNINNYLNWYQQKPGKGPKVLILTASSLQSGVPSRFSGSGSGTDFTLTISSLQPEDFATYYCQQTYTTPTWTFGQGTKVEIK

SEQ ID NO: 24341 - DNA, 321 bp, synthetic construct
  misc_feature 1..321: note = Description of Artificial Sequence: Synthetic polynucleotide
  source 1..321: mol_type = other DNA
gacatccacatgacccagtctccatcctccctgtctgcatctgtaggagacagagtcaccatcacttgccgggcaagtcagagcattatcagctatttaaattggtatcagcagaaaccagggaaagcccctaaggtcctgatctatactgcatccagtttgcaaactggggtcccatcagggttcagtggcagtggatctgggacagatttcactctcaccatcagcagtctgcaacctgaagattttgcaacttactactgtcaacagacttacagtcccccgctcactttcggcggtgggaccaaggtggagatcaaa

SEQ ID NO: 24342 - protein, 107 aa, synthetic construct
  REGION 1..107: note = Description of Artificial Sequence: Synthetic polypeptide
DIHMTQSPSSLSASVGDRVTITCRASQSIISYLNWYQQKPGKAPKVLIYTASSLQTGVPSGFSGSGSGTDFTLTISSLQPEDFATYYCQQTYSPPLTFGGGTKVEIK

SEQ ID NO: 24343 - DNA, 321 bp, synthetic construct
  misc_feature 1..321: note = Description of Artificial Sequence: Synthetic polynucleotide
  source 1..321: mol_type = other DNA
gacatccagatgacccagtctccatcctccctgtctgcgtctgtaggagacagagtcaccatcacttgccgggcaagtcagggcattagaaatgatttaggctggtatcagcagaaaccagggaaagcccctaagcgcctgatctatactgcatccaatttgcaaagtggggtcccatcaaggttcagcggcagtggatctgggacagaattcactctcacaatcagcagcctgcagcctgaagattttgcaacttattactgtctacaacataataattacccgtggacgttcggcctagggaccaaggtggtcatcaaa

SEQ ID NO: 24344 - protein, 107 aa, synthetic construct
  REGION 1..107: note = Description of Artificial Sequence: Synthetic polypeptide
DIQMTQSPSSLSASVGDRVTITCRASQGIRNDLGWYQQKPGKAPKRLIYTASNLQSGVPSRFSGSGSGTEFTLTISSLQPEDFATYYCLQHNNYPWTFGLGTKVVIK

SEQ ID NO: 24345 - DNA, 321 bp, synthetic construct
  misc_feature 1..321: note = Description of Artificial Sequence: Synthetic polynucleotide
  source 1..321: mol_type = other DNA
gacatccagatgacccagtctccatcctccctgtctgcctctgtaggagacagagtcaatatcacttgccgggcaagtcaggacattagaaatgatttaggctggtatcagcagaaaccagggaaagcccctaagcgcctgatctatgctgcatccagtttgcaaagtggggtcccatcaaggttcagcggcagtggatctgggacagaattcactctcacgatcagcagcctgcagcctgaagattttgcaacttattactgtctacagcattataattaccctcgggcgttcggccaggggaccaaggtggatatcaaa

SEQ ID NO: 24346 - protein, 107 aa, synthetic construct
  REGION 1..107: note = Description of Artificial Sequence: Synthetic polypeptide
DIQMTQSPSSLSASVGDRVNITCRASQDIRNDLGWYQQKPGKAPKRLIYAASSLQSGVPSRFSGSGSGTEFTLTISSLQPEDFATYYCLQHYNYPRAFGQGTKVDIK

SEQ ID NO: 24347 - DNA, 321 bp, synthetic construct
  misc_feature 1..321: note = Description of Artificial Sequence: Synthetic polynucleotide
  source 1..321: mol_type = other DNA
gacatccagatgacccagtctccatcctccctgtctgcatctgtaggagacagagtcaccatcacttgccgggcaagtcagggcattagaaatgatttaggctggtatcagcagaaaccagggaaagcccctaagcgcctgatctatgctgcatccagtttgcaaagtggggtcccatcaaggttcagcggcagtggatctgggacagaattcactctcacaatcagcagcctgcagcctgaagattttgcaacttattactgtctacagcataatagttacccgttcactttcggcggagggaccaaggtggagatcaaa

SEQ ID NO: 24348 - protein, 107 aa, synthetic construct
  REGION 1..107: note = Description of Artificial Sequence: Synthetic polypeptide
DIQMTQSPSSLSASVGDRVTITCRASQGIRNDLGWYQQKPGKAPKRLIYAASSLQSGVPSRFSGSGSGTEFTLTISSLQPEDFATYYCLQHNSYPFTFGGGTKVEIK

SEQ ID NO: 24349 - DNA, 321 bp, synthetic construct
  misc_feature 1..321: note = Description of Artificial Sequence: Synthetic polynucleotide
  source 1..321: mol_type = other DNA
gacatccagatgacccagtctccatcctcactgtctgcatctgtaggagacagagtcaccatcacttgtcggacgagtcagggcattaacaattatttagtctggtttcagcagaaaccagggaaagcccctaagcgcctgatctatgctgcatccagtttgcaaagtggggtcccatcaaagttcagcggcagtggatctgggacagatttcactctcaccatcagcagcctgcagcctgaagattttgcaacttattactgccaacagtattatagttacccattcactttcggccctgggaccaaaatggatttcaaa

SEQ ID NO: 24350 - protein, 107 aa, synthetic construct
  REGION 1..107: note = Description of Artificial Sequence: Synthetic polypeptide
DIQMTQSPSSLSASVGDRVTITCRTSQGINNYLVWFQQKPGKAPKRLIYAASSLQSGVPSKFSGSGSGTDFTLTISSLQPEDFATYYCQQYYSYPFTFGPGTKMDFK

SEQ ID NO: 24351 - DNA, 321 bp, synthetic construct
  misc_feature 1..321: note = Description of Artificial Sequence: Synthetic polynucleotide
  source 1..321: mol_type = other DNA
gacatccagatgacccagtctccatcctcactgtctgcatctgtaggagacagagtcaccatcacttgtcgggcgagtcagggcattaataattatttagtctggtttcagcagaaaccagggaaagcccctaagtccctgatctatgctgcatccagtttgctgagtggggtcccatcaaagttcagcggcagtggatctgggacagatttcactctcaccatcagcagcctgcagcctgaagattttgcaacttattactgccaacagtataatagttacccgatcaccttcggccaagggacacgactggagattaaa

SEQ ID NO: 24352 - protein, 107 aa, synthetic construct
  REGION 1..107: note = Description of Artificial Sequence: Synthetic polypeptide
DIQMTQSPSSLSASVGDRVTITCRASQGINNYLVWFQQKPGKAPKSLIYAASSLLSGVPSKFSGSGSGTDFTLTISSLQPEDFATYYCQQYNSYPITFGQGTRLEIK

SEQ ID NO: 24353 - DNA, 321 bp, synthetic construct
  misc_feature 1..321: note = Description of Artificial Sequence: Synthetic polynucleotide
  source 1..321: mol_type = other DNA
gacatccagatgacccagtctccatcctccctgtctgcatctgtaggagacagagtcaccatcacttgccgggcaagtcagggcattagaaatgatttaggctggtatcagcagaaacaagggaaagcccctaagcgcctgatctatgctgcatccagtttgcaaagtggggtcccatcaaggttcagcggcagtggatctgggacagaattcactctcaccatcagcagcctgcagcctgaagattttgcaacttattactgtctacagcataatagatacccgctcactttcggcggagggaccaaggtggagatcaaa

SEQ ID NO: 24354 - protein, 107 aa, synthetic construct
  REGION 1..107: note = Description of Artificial Sequence: Synthetic polypeptide
DIQMTQSPSSLSASVGDRVTITCRASQGIRNDLGWYQQKQGKAPKRLIYAASSLQSGVPSRFSGSGSGTEFTLTISSLQPEDFATYYCLQHNRYPLTFGGGTKVEIK

SEQ ID NO: 24355 - DNA, 321 bp, synthetic construct
  misc_feature 1..321: note = Description of Artificial Sequence: Synthetic polynucleotide
  source 1..321: mol_type = other DNA
gacatccagatgacccagtctccatcctccctgtctgcatctgtaggagacagagtcaccatcacttgccgggcaagtcagagcattactggttattcaaattggtatcagcagaagccagggaaaacccctaaactcctgatctttgctacatacagtttggaaagtggggtcccatcaaggttcagtggcagtggatttgggacaaatttcactctcaccatcaccagtctgcaacctgaagattttgcaacttactactgtcaacagagttacagtacctcgatcaccttcggccaagggacacgactggagattaaa

SEQ ID NO: 24356 - protein, 107 aa, synthetic construct
  REGION 1..107: note = Description of Artificial Sequence: Synthetic polypeptide
DIQMTQSPSSLSASVGDRVTITCRASQSITGYSNWYQQKPGKTPKLLIFATYSLESGVPSRFSGSGFGTNFTLTITSLQPEDFATYYCQQSYSTSITFGQGTRLEIK

SEQ ID NO: 24357 - DNA, 321 bp, synthetic construct
  misc_feature 1..321: note = Description of Artificial Sequence: Synthetic polynucleotide
  source 1..321: mol_type = other DNA
gacatccagatgacccagtctccatcctccctgtctgcgtctgtaggagacagagtcaccatcacttgccgggcaagtcagggcattagaaatgatttaggctggtatcagcagaaaccagggaaagcccctaagcgcctgatctatactgcatccagtttgcaaagtggggtcccatcaaggttcagcggcagtggatctgggacagaattcactctcacaatcagcagcctgcagcctgaagattttgcaacttattactgtctacaacataataattacccgtggacgttcggcctagggaccaaggtggtcatcaaa

SEQ ID NO: 24358 - protein, 107 aa, synthetic construct
  REGION 1..107: note = Description of Artificial Sequence: Synthetic polypeptide
DIQMTQSPSSLSASVGDRVTITCRASQGIRNDLGWYQQKPGKAPKRLIYTASSLQSGVPSRFSGSGSGTEFTLTISSLQPEDFATYYCLQHNNYPWTFGLGTKVVIK

SEQ ID NO: 24359 - DNA, 324 bp, synthetic construct
  misc_feature 1..324: note = Description of Artificial Sequence: Synthetic polynucleotide
  source 1..324: mol_type = other DNA
gacatccagatgacccagtctccatcctccctgtctgcatctgtaggagacagagtcaccatcacttgccgggcaagtcagagcattagtaattatttaaattggtatcagcagaaaccagggaaagcccctaagctcctgatctttgctgcttccagtttgcaaagtggggtcccatcaaggttcagtggcagtggatctgggacagatttcactctcaccatcagcggtctacaacctgaagattttgcaacttacttctgtcaacagagtttcagaaccccctttttcactttcggccctgggaccaaagtggatatcaaa

SEQ ID NO: 24360 - protein, 108 aa, synthetic construct
  REGION 1..108: note = Description of Artificial Sequence: Synthetic polypeptide
DIQMTQSPSSLSASVGDRVTITCRASQSISNYLNWYQQKPGKAPKLLIFAASSLQSGVPSRFSGSGSGTDFTLTISGLQPEDFATYFCQQSFRTPFFTFGPGTKVDIK

SEQ ID NO: 24361 - DNA, 324 bp, synthetic construct
  misc_feature 1..324: note = Description of Artificial Sequence: Synthetic polynucleotide
  source 1..324: mol_type = other DNA
gacatccagatgacccagtctccatcctccctgtctgcatctgtaggagacagagtcaccatcacttgccgggcaagtcagaacattagcagctatttaaattggtatcagcagaaacaagggaaagcccctaagctcctgatctatgctgcatccagtttgcaaaatggggtcccatcaaggttcagtggcagaggatctgggacagatttcactctcaccatcagtagtctgcaacctgaagattttgcaacttactactgtcaacagagttacagaacccccttattcactttcggccctgggaccaaggttgatttcaaa

SEQ ID NO: 24362 - protein, 108 aa, synthetic construct
  REGION 1..108: note = Description of Artificial Sequence: Synthetic polypeptide
DIQMTQSPSSLSASVGDRVTITCRASQNISSYLNWYQQKQGKAPKLLIYAASSLQNGVPSRFSGRGSGTDFTLTISSLQPEDFATYYCQQSYRTPLFTFGPGTKVDFK

SEQ ID NO: 24363 - DNA, 324 bp, synthetic construct
  misc_feature 1..324: note = Description of Artificial Sequence: Synthetic polynucleotide
  source 1..324: mol_type = other DNA
gacatccagatgacccagtctccatcctccctgtctgcatctgtaggagacagagtcaccatcacttgccgggcaagtcagagcattttcagctatttaaattggtatcagcagaaaccagggaaagcccctaaactcctgatctatgctgcatccagtttacaaagtggggtcccatcaaggttcagtggcagtggatctgggacagatttcactctcaccatcagcagtctccaacctgaagattttgcaacttacttctgtcaacagagtttcagaacccccttattcactttcggccctgggaccaaggtggatttcaaa

SEQ ID NO: 24364 - protein, 108 aa, synthetic construct
  REGION 1..108: note = Description of Artificial Sequence: Synthetic polypeptide
DIQMTQSPSSLSASVGDRVTITCRASQSIFSYLNWYQQKPGKAPKLLIYAASSLQSGVPSRFSGSGSGTDFTLTISSLQPEDFATYFCQQSFRTPLFTFGPGTKVDFK

SEQ ID NO: 24365 - DNA, 324 bp, synthetic construct
  misc_feature 1..324: note = Description of Artificial Sequence: Synthetic polynucleotide
  source 1..324: mol_type = other DNA
gacatccagatgacccagtctccatcctccctgtctgcatctgtaggagacagagtcaccatcacttgccgggcaagtcagagcattagcaggtatttaaattggtatcagcagaaaccagggagagcccctaaactcctgatctgttctacatccagtttgcaaagtggggtcccatcaaggttcagtggcagtggatctgggacagatttcactctcaccatcagcagtctgcaacctgaagattttgcaacttattactgtcaacagagttacagtacccccacgtggacgttcggccaagggaccaaggtggaaatcaga

SEQ ID NO: 24366 - protein, 108 aa, synthetic construct
  REGION 1..108: note = Description of Artificial Sequence: Synthetic polypeptide
DIQMTQSPSSLSASVGDRVTITCRASQSISRYLNWYQQKPGRAPKLLICSTSSLQSGVPSRFSGSGSGTDFTLTISSLQPEDFATYYCQQSYSTPTWTFGQGTKVEIR

SEQ ID NO: 24367 - DNA, 321 bp, synthetic construct
  misc_feature 1..321: note = Description of Artificial Sequence: Synthetic polynucleotide
  source 1..321: mol_type = other DNA
gaaatagtgatgacgcagtctccatccaccctgtctgtgtctccaggggaaagagtcaccctctcttgcagggccagtcagagtgttagcagcaacttagcctggtttcagcagaaacctggccaggctcccaggctcctcatcaatggtgcatccaccagggccagtggtatcccagccaggttcagtggcagtgggtctgggacagagttcactctcaccatcagcagcctgcagtctgaagattttgcagtttattactgtcagcagtataataactgtcctctgacgttcggccaagggaccaaggtggaaatcaaa

SEQ ID NO: 24368 - protein, 107 aa, synthetic construct
  REGION 1..107: note = Description of Artificial Sequence: Synthetic polypeptide
EIVMTQSPSTLSVSPGERVTLSCRASQSVSSNLAWFQQKPGQAPRLLINGASTRASGIPARFSGSGSGTEFTLTISSLQSEDFAVYYCQQYNNCPLTFGQGTKVEIK

SEQ ID NO: 24369 - DNA, 324 bp, synthetic construct
  misc_feature 1..324: note = Description of Artificial Sequence: Synthetic polynucleotide
  source 1..324: mol_type = other DNA
gacatccacatgacccagtctccatcctccctgtctgcatctgtgggagacaaagtctccatcacttgccgggcaagtcaccatattagcaactatttaaattggtatcagcagaaaccagggaaaggccctaaggtcctgatccttactgcatccagtttgcaaagtggggtcccatcaaggttcagtggcagtggatctgggacagatttcactctcaccatcagcagtctgcaacctgaagattttgcaacttactactgtcaacagagttacactacccccacgtggacgttcggccaagggaccaaggtggaaatcaaa

SEQ ID NO: 24370 - protein, 108 aa, synthetic construct
  REGION 1..108: note = Description of Artificial Sequence: Synthetic polypeptide
DIHMTQSPSSLSASVGDKVSITCRASHHISNYLNWYQQKPGKGPKVLILTASSLQSGVPSRFSGSGSGTDFTLTISSLQPEDFATYYCQQSYTTPTWTFGQGTKVEIK

SEQ ID NO: 24371 - DNA, 321 bp, synthetic construct
  misc_feature 1..321: note = Description of Artificial Sequence: Synthetic polynucleotide
  source 1..321: mol_type = other DNA
gacatccagatgacccagtctccatcctccctgtctgcatctgtaggagacagagtcaccatcacttgccgggcaagtcagggcattagaaatgatttaggctggtatcagcagaaaccagggaaagcccctaagcgcctgatctttgctgcatccagtttacaaagtggggtcccatcaaggttcagcggcagtggatctgggacagaattcactctcacaatcagcagcctgcagcctgaagattttgcaacttattactgtctacagcataatagttacccgttcactttcggcggagggaccaaggtggagatcaaa

SEQ ID NO: 24372 - protein, 107 aa, synthetic construct
  REGION 1..107: note = Description of Artificial Sequence: Synthetic polypeptide
DIQMTQSPSSLSASVGDRVTITCRASQGIRNDLGWYQQKPGKAPKRLIFAASSLQSGVPSRFSGSGSGTEFTLTISSLQPEDFATYYCLQHNSYPFTFGGGTKVEIK

SEQ ID NO: 24373 - DNA, 321 bp, synthetic construct
  misc_feature 1..321: note = Description of Artificial Sequence: Synthetic polynucleotide
  source 1..321: mol_type = other DNA
gacatccagatgacccagtctccatcctccctgtctgcatctgtaggagacagagtcaccatcacttgccgggcaagtcagggcattagaaatgatttaggctggtatcagcagaaaccagggaaagcccctaagcgcctgatctatgctgcatccagtttgcaaagtggggtcccatcaaggttcagcggcagtggatctgggacagatttcattctcacaatcagcagcctgcagcctgaagattttgcaacttattactgtctacagcatagtagttaccccctcactttcggcggagggaccaaggtggagatcaaa

SEQ ID NO: 24374 - protein, 107 aa, synthetic construct
  REGION 1..107: note = Description of Artificial Sequence: Synthetic polypeptide
DIQMTQSPSSLSASVGDRVTITCRASQGIRNDLGWYQQKPGKAPKRLIYAASSLQSGVPSRFSGSGSGTDFILTISSLQPEDFATYYCLQHSSYPLTFGGGTKVEIK

SEQ ID NO: 24375 - DNA, 321 bp, synthetic construct
  misc_feature 1..321: note = Description of Artificial Sequence: Synthetic polynucleotide
  source 1..321: mol_type = other DNA
gacatccagatgacccagtctccatcctcactgtctgcatctgtgggagacagagtcaccatcacttgtcgggcgagtcaaggcattagcaaatatttagcctggtttcagcagaaaccagggaaagcccctaagtccctgatctatgctgcatccagtttgcaaagtggggtcccatcaaagttcagcggcagtggatctgggacagatttcactctcaccatcagcagcctgcagcctgaagattttgcaacttattactgccaacagtataatagttacccgttcaggtttggccaggggaccaagctggagatcaaa

SEQ ID NO: 24376 - protein, 107 aa, synthetic construct
  REGION 1..107: note = Description of Artificial Sequence: Synthetic polypeptide
DIQMTQSPSSLSASVGDRVTITCRASQGISKYLAWFQQKPGKAPKSLIYAASSLQSGVPSKFSGSGSGTDFTLTISSLQPEDFATYYCQQYNSYPFRFGQGTKLEIK

SEQ ID NO: 24377 - DNA, 321 bp, synthetic construct
  misc_feature 1..321: note = Description of Artificial Sequence: Synthetic polynucleotide
  source 1..321: mol_type = other DNA
gacatccagatgacccagtctccatcctccctgtctgcatctgtaggagacagagtcaccatcacttgccgggcaagtcaggacattagaaataatttaggctggtatcagcagaaaccagggaaagcccctaagcgcctgatctatcctgcatccagtttgcaaactggggtcccatcaaggttcagcggcagtggatctgggacagaattcactctcacaatcagcagcctgcagcctgaagattttgcaacttatttctgtctacaggataatagttacccattcactttcggccctgggaccaaagtggatatcaaa

SEQ ID NO: 24378 - protein, 107 aa, synthetic construct
  REGION 1..107: note = Description of Artificial Sequence: Synthetic polypeptide
DIQMTQSPSSLSASVGDRVTITCRASQDIRNNLGWYQQKPGKAPKRLIYPASSLQTGVPSRFSGSGSGTEFTLTISSLQPEDFATYFCLQDNSYPFTFGPGTKVDIK

SEQ ID NO: 24379 - DNA, 321 bp, synthetic construct
  misc_feature 1..321: note = Description of Artificial Sequence: Synthetic polynucleotide
  source 1..321: mol_type = other DNA
gacatccagatgacccagtctccatcctccctgtctgcatctgtaggagacagagtcaccatcacttgccgggcaagtcagggcattagaaatgatttaggctggtatcagcagaaaccagggaaagcccctaaacgcctgatctatactgcatccagtttgcaaagtggggtcccatcaaggttcagcggcagtggttctgggacagaattcactctcacaatcagcagcctgcagcctgaagattttgcaacttattactgtctacagcataatacttacccgctcactttcggcggagggaccaaggtggagatcaaa

SEQ ID NO: 24380 - protein, 107 aa, synthetic construct
  REGION 1..107: note = Description of Artificial Sequence: Synthetic polypeptide
DIQMTQSPSSLSASVGDRVTITCRASQGIRNDLGWYQQKPGKAPKRLIYTASSLQSGVPSRFSGSGSGTEFTLTISSLQPEDFATYYCLQHNTYPLTFGGGTKVEIK

SEQ ID NO: 24381 - DNA, 321 bp, synthetic construct
  misc_feature 1..321: note = Description of Artificial Sequence: Synthetic polynucleotide
  source 1..321: mol_type = other DNA
gacatccagatgacccagtctccatcctcactgtctgcgtctgtaggagacagagtcaccatcatttgtcgggcgagtcaggacattagcaattatttagcctggtttcaggagaaaccagggaaagcccataagtccctgatctatggtgcatccagtttgcggagtggggtcccatcaaagttcagcggcagtggatctgggacagatttcaatctcaccatcagcagcctgcagcctgaagatcttgcaacttattactgccaacagtatcatagttacccattcactttcggccctgggaccaaagtggatttcaaa

SEQ ID NO: 24382 - protein, 107 aa, synthetic construct
  REGION 1..107: note = Description of Artificial Sequence: Synthetic polypeptide
DIQMTQSPSSLSASVGDRVTIICRASQDISNYLAWFQEKPGKAHKSLIYGASSLRSGVPSKFSGSGSGTDFNLTISSLQPEDLATYYCQQYHSYPFTFGPGTKVDFK

SEQ ID NO: 24383 - DNA, 321 bp, synthetic construct
  misc_feature 1..321: note = Description of Artificial Sequence: Synthetic polynucleotide
  source 1..321: mol_type = other DNA
gacatccagatgacccagtctccatcctcactgtctgcatctgtaggagacagagtcaccatcacttgccgggcgagtcagggcattggcatttatttagcctggtttcagcagaaaccagggaaagcccctaagtccctgatctctgctgcatccagtttgcaaagtggggtcccatcaaagttcagcggcagtggatctgggacagagttcactctcaccatcagcagcctgcagcctgaagattttgcaacttattactgccaacagtataatagttacccattcactttcggccctgggaccaaagtggatatcaaa

SEQ ID NO: 24384 - protein, 107 aa, synthetic construct
  REGION 1..107: note = Description of Artificial Sequence: Synthetic polypeptide
DIQMTQSPSSLSASVGDRVTITCRASQGIGIYLAWFQQKPGKAPKSLISAASSLQSGVPSKFSGSGSGTEFTLTISSLQPEDFATYYCQQYNSYPFTFGPGTKVDIK

SEQ ID NO: 24385 - DNA, 339 bp, synthetic construct
  misc_feature 1..339: note = Description of Artificial Sequence: Synthetic polynucleotide
  source 1..339: mol_type = other DNA
gacatcgtgatgacccagtctccagactccctggctgtgtctctgggcgagagggccaccatcaactgcaagtccagccagagtgttttatacacctccaacaataacaactacttaacttggtaccagcagaaacctggacagcgtcctaacctgctcatttactgggcatctacccgggaatccggggtccctgaccgattcagtggcagcgggtctgggacagatttcactctcaccatcagcagcctgcaggctgaagatgtggcagtttattactgtcagcaattttatagtactcctccgacgttcggccaagggaccaaggtggaaatcaaa

SEQ ID NO: 24386 - protein, 113 aa, synthetic construct
  REGION 1..113: note = Description of Artificial Sequence: Synthetic polypeptide
DIVMTQSPDSLAVSLGERATINCKSSQSVLYTSNNNNYLTWYQQKPGQRPNLLIYWASTRESGVPDRFSGSGSGTDFTLTISSLQAEDVAVYYCQQFYSTPPTFGQGTKVEIK

SEQ ID NO: 24387 - DNA, 321 bp, synthetic construct
  misc_feature 1..321: note = Description of Artificial Sequence: Synthetic polynucleotide
  source 1..321: mol_type = other DNA
gacatccagatgacccagtctccatcctccctgtctgcatctgtaggagacagagtcaccatcacttgccgggcaagtcagggcattagaaatgatttaggctggtatcagaagaaaccagggaaagcccctaagcgcctgatcaatgctgcatccagtttgcaaagtggggtcccatcaaggttcagcggcagtggatctgggacagaattcactctcacaatcagcagcctgcagcctgaagattttgcaacttattactgtctacaagataatagttacccgttcactttcggcggagggaccaaggtggagatcaca

SEQ ID NO: 24388 - protein, 107 aa, synthetic construct
  REGION 1..107: note = Description of Artificial Sequence: Synthetic polypeptide
DIQMTQSPSSLSASVGDRVTITCRASQGIRNDLGWYQKKPGKAPKRLINAASSLQSGVPSRFSGSGSGTEFTLTISSLQPEDFATYYCLQDNSYPFTFGGGTKVEIT

SEQ ID NO: 24389 - DNA, 321 bp, synthetic construct
  misc_feature 1..321: note = Description of Artificial Sequence: Synthetic polynucleotide
  source 1..321: mol_type = other DNA
gacatccagatgacccagtctccatcctccctgtctgcatttgtaggagacagagtcaccatcacttgccgggcaagtcagggcattagaaatgatttaggctggtatcagcagaaaccagggaaagcccgtaagcgcctgatctatgttgcatacagtttgcaaagtggggtcccatcaaggttcagcggcagtggatatgggacagaattcactctcacaatcagcagcttgcagcctgaagattttgcaacttattactgtatacagcaaaatagttacccgtggacgttcggccaagggaccaaggtggaaatcaaa

SEQ ID NO: 24390 - protein, 107 aa, synthetic construct
  REGION 1..107: note = Description of Artificial Sequence: Synthetic polypeptide
DIQMTQSPSSLSAFVGDRVTITCRASQGIRNDLGWYQQKPGKARKRLIYVAYSLQSGVPSRFSGSGYGTEFTLTISSLQPEDFATYYCIQQNSYPWTFGQGTKVEIK

SEQ ID NO: 24391 - DNA, 324 bp, synthetic construct
  misc_feature 1..324: note = Description of Artificial Sequence: Synthetic polynucleotide
  source 1..324: mol_type = other DNA
gacatccagatgacccagtctccatcctccctgtctgcatctgtaggagacagagtcaccatcacttgccgggcgagtcagggcattagcaattatttagcctggtatcagcagaaaccagggaaagttcctaaggtcttgatctatactgcatccactttgcaatcaggggtcccatctcggttcagtggcagtggatctgggacagatttcactctcaccgtcagcagcctgcagcctgaagatgttgcaacttattactgtcaaaagtataacagtgcccctccgatcaccttcggccaagggacacgactggagattaaa

SEQ ID NO: 24392 - protein, 108 aa, synthetic construct
  REGION 1..108: note = Description of Artificial Sequence: Synthetic polypeptide
DIQMTQSPSSLSASVGDRVTITCRASQGISNYLAWYQQKPGKVPKVLIYTASTLQSGVPSRFSGSGSGTDFTLTVSSLQPEDVATYYCQKYNSAPPITFGQGTRLEIK

SEQ ID NO: 24393 - DNA, 321 bp, synthetic construct
  misc_feature 1..321: note = Description of Artificial Sequence: Synthetic polynucleotide
  source 1..321: mol_type = other DNA
gacatccagatgacccagtctccatcctccctgtctgcatctgtaggagacagagtcaccatcacttgccgggcaagtcagggcattagaaatgatttaggctggtatcagcagaaaccagggaaagcccctaagcgcctgatctatgctgcgtccagtgtgcaaactggggtcccatcaaggttcagcggcagtggatctgggacagaattcactctcacaatcagcagcctgcaggctgaagatttggcaatttattactgtctacagcataatagttatccgctcactttcggcggagggaccaaggtggagatcaaa

SEQ ID NO: 24394 - protein, 107 aa, synthetic construct
  REGION 1..107: note = Description of Artificial Sequence: Synthetic polypeptide
DIQMTQSPSSLSASVGDRVTITCRASQGIRNDLGWYQQKPGKAPKRLIYAASSVQTGVPSRFSGSGSGTEFTLTISSLQAEDLAIYYCLQHNSYPLTFGGGTKVEIK

SEQ ID NO: 24395 - DNA, 321 bp, synthetic construct
  misc_feature 1..321: note = Description of Artificial Sequence: Synthetic polynucleotide
  source 1..321: mol_type = other DNA
gacatccagatgacccagtctccatcctccctgtctgcatctgtaggagacagagtcaccatcacttgccgggcaagtcagggcattagaaatgatttaggctggtatcagcagaaaccagggaaagcccctaagcgcctgatctatgctgcatccagtttgcaaagtggggtcccatcaaggttcagcggcagtggatctgggacagaattcactctcacaatcagcagcctgcagcctgaagattttgcaacttattactgtcttcagcataatagttacccgtggacgttcggccaagggaccaaggtggaaatcaaa

SEQ ID NO: 24396 - protein, 107 aa, synthetic construct; identical to SEQ ID NO: 24244
  REGION 1..107: note = Description of Artificial Sequence: Synthetic polypeptide

SEQ ID NO: 24397 - DNA, 321 bp, synthetic construct
  misc_feature 1..321: note = Description of Artificial Sequence: Synthetic polynucleotide
  source 1..321: mol_type = other DNA
gacatccagatgacccagtctccatcctccctgtctgcatctgtaggagacagagtcaccatcacttgccgggcaagtcagaacattatcagctatttaaattggtatcagcagaaaccagagaaagcccctaaactcctgatccatattgcatccagtttgcaaagtggggtcccatcaaggttcagtggcagtggatctgggacagatttcactctcaccatcagcagtctgcaacctgaagattttgcaacttactactgtcaacagacttacagtaccccgctcactttcggcggagggaccaaggtggagatcaaa

SEQ ID NO: 24398 - protein, 107 aa, synthetic construct
  REGION 1..107: note = Description of Artificial Sequence: Synthetic polypeptide
DIQMTQSPSSLSASVGDRVTITCRASQNIISYLNWYQQKPEKAPKLLIHIASSLQSGVPSRFSGSGSGTDFTLTISSLQPEDFATYYCQQTYSTPLTFGGGTKVEIK

SEQ ID NO: 24399 - DNA, 321 bp, synthetic construct
  misc_feature 1..321: note = Description of Artificial Sequence: Synthetic polynucleotide
  source 1..321: mol_type = other DNA
gacatccagatgacccagtctccatcctccctgtctgcatctgtaggagacagagtcaccatcacttgtcgggcaagtcagggcattagaaatgatttaggctggtatcagcagaaaccagggaaagcccctaagcgcctgatctatgctgcatccagtttgcagagtggggtcccatctaggttcagcggcagtggatctgggacagatttcactctcacaatcagcagcctgcagcctgaagattttgcaacttattactgtctacagcatagtacttaccctctcactttcggcggagggaccaaggtggagatcaaa

SEQ ID NO: 24400 - protein, 107 aa, synthetic construct
  REGION 1..107: note = Description of Artificial Sequence: Synthetic polypeptide
DIQMTQSPSSLSASVGDRVTITCRASQGIRNDLGWYQQKPGKAPKRLIYAASSLQSGVPSRFSGSGSGTDFTLTISSLQPEDFATYYCLQHSTYPLTFGGGTKVEIK

SEQ ID NO: 24401 - DNA, 321 bp, synthetic construct
  misc_feature 1..321: note = Description of Artificial Sequence: Synthetic polynucleotide
  source 1..321: mol_type = other DNA
gacatccagatgacccagtctccatcctcactgtctgcatctgtaggagacagagtcaccatcacttgtcgggcgagtcagggcattagcaattatttagcctggtttcagcagataccagggaaagcccctaagtccctgatctatgctgcatccagtttgcaaagtggggtcccatcaaagttcagcggcagtggatctgggacagatttcactctcaccatcagcagcctgcagcctgaagattttgcaacttattactgccaacagttttatagttacccattcactttcggccctgggaccaaagtggatatcaat

SEQ ID NO: 24402 - protein, 107 aa, synthetic construct
  REGION 1..107: note = Description of Artificial Sequence: Synthetic polypeptide
DIQMTQSPSSLSASVGDRVTITCRASQGISNYLAWFQQIPGKAPKSLIYAASSLQSGVPSKFSGSGSGTDFTLTISSLQPEDFATYYCQQFYSYPFTFGPGTKVDIN

SEQ ID NO: 24403 - DNA, 324 bp, synthetic construct
  misc_feature 1..324: note = Description of Artificial Sequence: Synthetic polynucleotide
  source 1..324: mol_type = other DNA
gaaatagtgatgacgcagtctccagccaccctgtctgtgtctccaggggaaagagccaccctctcctgcagggccagtcagagtgttagcagcaacttagcctggtaccagcagaaacctggccaggctcccaggctcctcatctattttgcatccatcagggccactggtatcccagccaggttcagtggcagtgggtctgggacagagttcactctcaccatcagcagcctgcagtctgaagattttgcagtttattactgtcagcagtataataactggcccatgtgcagttttggccaggggaccaagctggagatcaaa

SEQ ID NO: 24404 - protein, 108 aa, synthetic construct
  REGION 1..108: note = Description of Artificial Sequence: Synthetic polypeptide
EIVMTQSPATLSVSPGERATLSCRASQSVSSNLAWYQQKPGQAPRLLIYFASIRATGIPARFSGSGSGTEFTLTISSLQSEDFAVYYCQQYNNWPMCSFGQGTKLEIK

SEQ ID NO: 24405 - DNA, 324 bp, synthetic construct
  misc_feature 1..324: note = Description of Artificial Sequence: Synthetic polynucleotide
  source 1..324: mol_type = other DNA
gacatccagatgacccagtctccatcctccctgtctgcatctgtaggagacagagtcaccatcacttgccgggcaagtcagagcattagcaggtatttaaattggtatcagcagaaaccagggaaagcccctgagctcctgatctatgctgcttccagtttgcaaagtggggtcccatcaaggttcagtggcagtggatctgggacagatttcattctcaccatcagcagtctacaacctgaagattttgcaacttactactgtcaacagagttacaatacccccacgtggacgttcggccaagggaccaaggtggaaatcaaa

SEQ ID NO: 24406 - protein, 108 aa, synthetic construct
  REGION 1..108: note = Description of Artificial Sequence: Synthetic polypeptide
DIQMTQSPSSLSASVGDRVTITCRASQSISRYLNWYQQKPGKAPELLIYAASSLQSGVPSRFSGSGSGTDFILTISSLQPEDFATYYCQQSYNTPTWTFGQGTKVEIK

SEQ ID NO: 24407 - DNA, 321 bp, synthetic construct
  misc_feature 1..321: note = Description of Artificial Sequence: Synthetic polynucleotide
  source 1..321: mol_type = other DNA
gacatccagatgacccagtctccatcctccctgtctgcttctgtaggagacagagtcaccatcacttgccgggcaagtcagggcattagaaatgatttagactggtatcagcagaaaccagggaaagcccctaagcgcctgatctatgctgcatccagtttgcaaagtggggtcccatcaaggttcagcggcagtggatctgggacagaattcactctcacaatcagcagcctgcagcctgaagattttgcaacttattactgtctacagcataatagttacccgctcactttcggcggagggaccaaggtggagatcaaa

SEQ ID NO: 24408 - protein, 107 aa, synthetic construct
  REGION 1..107: note = Description of Artificial Sequence: Synthetic polypeptide
DIQMTQSPSSLSASVGDRVTITCRASQGIRNDLDWYQQKPGKAPKRLIYAASSLQSGVPSRFSGSGSGTEFTLTISSLQPEDFATYYCLQHNSYPLTFGGGTKVEIK

SEQ ID NO: 24409 - DNA, 324 bp, synthetic construct
  misc_feature 1..324: note = Description of Artificial Sequence: Synthetic polynucleotide
  source 1..324: mol_type = other DNA
gacatccagatgacccagtctccatcctccctgtctgcatctgtaggagacagagtcaccatcacttgccgggcaagtcagaacattggtagttatttaaattggtatcagcagaaaccagggaaagcccctaagctcctgatctttgctgcatccagtttgcaaagtggggtcccatcaaggttcagtggcagtggatctgggacagatttcactctcaccatcagcagtctgcaacctgaagattttgcaactttcttctgtcaacagagttacagaaccccctttttcactttcggccctgggaccaaagtggatttcaaa

SEQ ID NO: 24410 - protein, 108 aa, synthetic construct
  REGION 1..108: note = Description of Artificial Sequence: Synthetic polypeptide
DIQMTQSPSSLSASVGDRVTITCRASQNIGSYLNWYQQKPGKAPKLLIFAASSLQSGVPSRFSGSGSGTDFTLTISSLQPEDFATFFCQQSYRTPFFTFGPGTKVDFK

SEQ ID NO: 24411 - DNA, 336 bp, synthetic construct
  misc_feature 1..336: note = Description of Artificial Sequence: Synthetic polynucleotide
  source 1..336: mol_type = other DNA
gatattgtgatgacccagactccactctctctgtccgtcacccctggacagccggcctccatctcctgcaagtctagtcagagcctcctgcatagtggtggaaagacctatttatattggtacctgcagaagccaggccagcctccacagctcctgatctatgaagtttccaaccggttctctggactgccagataggttcagtggcagcgggtcagggacagatttcacactgaaaatcagccgggtggaggctgcggatgttggggtttattactgcatgcaaactttacaccttccgtggacgttcggccaagggaccaaggtggaaatcaaa

SEQ ID NO: 24412 - protein, 112 aa, synthetic construct
  REGION 1..112: note = Description of Artificial Sequence: Synthetic polypeptide
DIVMTQTPLSLSVTPGQPASISCKSSQSLLHSGGKTYLYWYLQKPGQPPQLLIYEVSNRFSGLPDRFSGSGSGTDFTLKISRVEAADVGVYYCMQTLHLPWTFGQGTKVEIK

SEQ ID NO: 24413 - DNA, 324 bp, synthetic construct
  misc_feature 1..324: note = Description of Artificial Sequence: Synthetic polynucleotide
  source 1..324: mol_type = other DNA
gacatccagatgacccagtctccatcctccctgtctgcatctgtaggagacagagtcaccatcacttgccgggcaagtcagaacattagtagttatttaaattggtatcagcagaaaccagggaaagcccctaagctcctgatctatgctgcatccagtttgcaaagtggggtcccatcaaggttcagtggcagtggatctgggacagatttcactctcaccatcagcagtctgcaacctgaagattttgcaacttactactgtcaacagagttacaatacccccttattcactttcggccctgggaccaaagtggatatcaaa

SEQ ID NO: 24414 - protein, 108 aa, synthetic construct
  REGION 1..108: note = Description of Artificial Sequence: Synthetic polypeptide
DIQMTQSPSSLSASVGDRVTITCRASQNISSYLNWYQQKPGKAPKLLIYAASSLQSGVPSRFSGSGSGTDFTLTISSLQPEDFATYYCQQSYNTPLFTFGPGTKVDIK

SEQ ID NO: 24415 - DNA, 321 bp, synthetic construct
  misc_feature 1..321: note = Description of Artificial Sequence: Synthetic polynucleotide
  source 1..321: mol_type = other DNA
gacatccagatgacccagtctccatcctccctgtctgcatctgtaggagacagagtcaccatcacttgccggacaagtcagaacagtaacagttatttaaattggtatcagcagaaaccagggaaagcccctaagctccagatctttgctgcatacagtttggaaagtggggtcccatcaaggttcagtggcaatagatctgggacagagttcactctcaccatcagcagtctgcaacctgaagattttgcaacttactactgtcaacagacttacggtacctcgatcaccttcggccaagggacacgactggagattaaa

SEQ ID NO: 24416 - protein, 107 aa, synthetic construct
  REGION 1..107: note = Description of Artificial Sequence: Synthetic polypeptide
DIQMTQSPSSLSASVGDRVTITCRTSQNSNSYLNWYQQKPGKAPKLQIFAAYSLESGVPSRFSGNRSGTEFTLTISSLQPEDFATYYCQQTYGTSITFGQGTRLEIK

SEQ ID NO: 24417 - DNA, 321 bp, synthetic construct
  misc_feature 1..321: note = Description of Artificial Sequence: Synthetic polynucleotide
  source 1..321: mol_type = other DNA
gacatccagatgacccagtctccatcctccctgtctgcatctgtaggagacagagtcaccatcacttgccgggcaagtcagggcatcagaaatgatttaggctggtatcagcagaaaccagggaaagcccctaagcgcctgatctatgctgcatccagtttacaaagtggggtcccatcaaggttcagcggcagtggttctgggacagaattcactctcacagtcagcagcctgcagcctgaagattttgcaacttattactgtctacagcatagtagttaccctctcactttcggcggagggaccaaggtggagatcaaa

SEQ ID NO: 24418 - protein, 107 aa, synthetic construct
  REGION 1..107: note = Description of Artificial Sequence: Synthetic polypeptide
DIQMTQSPSSLSASVGDRVTITCRASQGIRNDLGWYQQKPGKAPKRLIYAASSLQSGVPSRFSGSGSGTEFTLTVSSLQPEDFATYYCLQHSSYPLTFGGGTKVEIK

SEQ ID NO: 24419 - DNA, 321 bp, synthetic construct
  misc_feature 1..321: note = Description of Artificial Sequence: Synthetic polynucleotide
  source 1..321: mol_type = other DNA
gacatccagatgacccagtctccatcctcccggtctgcatctgtaggggacagagtcaccatcacttgccgggcaagtcaggacattagaaatgatttaggctggtatcagcagaaaccagggagagcccctaagcgcctgatcaatggtgcatccagtgtgcaaagtggggtcccatcaaggttcagcggcagtggatctgggacagaattcactctcacaatcagcagcctgcagcctgaagattttgtaatttattactgtctacagcataatagttacccgctcactttcggcggagggaccaaggtggagatcaaa

SEQ ID NO: 24420 - protein, 107 aa, synthetic construct
  REGION 1..107: note = Description of Artificial Sequence: Synthetic polypeptide
DIQMTQSPSSRSASVGDRVTITCRASQDIRNDLGWYQQKPGRAPKRLINGASSVQSGVPSRFSGSGSGTEFTLTISSLQPEDFVIYYCLQHNSYPLTFGGGTKVEIK

SEQ ID NO: 24421 - DNA, 321 bp, synthetic construct
  misc_feature 1..321: note = Description of Artificial Sequence: Synthetic polynucleotide
  source 1..321: mol_type = other DNA
gacatccagatgacccagtctccatcctccctgtctgcatctgtaggagacagagtcaccatcacttgccgggcaagtcagggcattagaaatgatttaggctggtatcagcagaaaccagggaaagcccctaagcgcctgatctatgctgcatccagtttgcaaagtggggtcccatcaaggttcagcggcagtggatctgggacagaattcactctcacaatcagcagcctgcagcctgaagattttgcaacttattactgtctacagcatagtaattacccgctcactttcggcggagggaccaaggtggagatcaaa

SEQ ID NO: 24422 - protein, 107 aa, synthetic construct
  REGION 1..107: note = Description of Artificial Sequence: Synthetic polypeptide
DIQMTQSPSSLSASVGDRVTITCRASQGIRNDLGWYQQKPGKAPKRLIYAASSLQSGVPSRFSGSGSGTEFTLTISSLQPEDFATYYCLQHSNYPLTFGGGTKVEIK

SEQ ID NO: 24423 - DNA, 321 bp, synthetic construct
  misc_feature 1..321: note = Description of Artificial Sequence: Synthetic polynucleotide
  source 1..321: mol_type = other DNA
gacatccagatgacccagtctccatcctcactgtctgcatctgtaggagacagagtcaccatcacttgtcgggcgagtcagggcattagcaattatttagcctggtttcagcagaaaccagggaaagcccctaagtccctgatctatgttgcatccagtttgcaaagtggggtcccatcaaagttcagcggcagtggatctgggacagatttcactctcaccatcagcagcctgcagcctgaagattttgcaacttattactgccaacagtataatacttatccattcactttcggccctgggaccaaagtggatatcaaa

SEQ ID NO: 24424 - protein, 107 aa, synthetic construct
  REGION 1..107: note = Description of Artificial Sequence: Synthetic polypeptide
DIQMTQSPSSLSASVGDRVTITCRASQGISNYLAWFQQKPGKAPKSLIYVASSLQSGVPSKFSGSGSGTDFTLTISSLQPEDFATYYCQQYNTYPFTFGPGTKVDIK

SEQ ID NO: 24425 - DNA, 321 bp, synthetic construct
  misc_feature 1..321: note = Description of Artificial Sequence: Synthetic polynucleotide
  source 1..321: mol_type = other DNA
gacatccagatgacccagtctccatcctccctgtgtgcatctgtaggagacagagtcaccatcacttgccgggcaagtcagaccattagcagccatttaaattggtatcagcggaaaccagggaaagcccctaaactcctgatctatgctgcatccagtttgcaaagtggggtcccatcacggttcagtggcagtggatctgggacagatttcactctcaccatcagcagtgtgcaacctgaagattttgcaacttattactgtcaacagagttacaatatctcattcactttcggccctgggaccaaagtggatatcaaa

SEQ ID NO: 24426 - protein, 107 aa, synthetic construct
  REGION 1..107: note = Description of Artificial Sequence: Synthetic polypeptide
DIQMTQSPSSLCASVGDRVTITCRASQTISSHLNWYQRKPGKAPKLLIYAASSLQSGVPSRFSGSGSGTDFTLTISSVQPEDFATYYCQQSYNISFTFGPGTKVDIK

SEQ ID NO: 24427 - DNA, 321 bp, synthetic construct
  misc_feature 1..321: note = Description of Artificial Sequence: Synthetic polynucleotide
  source 1..321: mol_type = other DNA
gacatccagatgacccagtctccatcctccctgtctgcatctgtaggagacagagtcaccatcacttgccgggcaagtcagggcattagaaatgatttaggctggtatcagcagaaaccagggaaagcccctaagcgcctgatctatgctgcatccagtttacaaagtggggtcccatcaaggttcagaggcagtggatctgggacagaattcactctcacaatcagcagcctgcagcctgaagattttgcaacttattactgtctacagcataatagttacccgtggacgttcggccaagggaccaaggtggaaatcaaa

SEQ ID NO: 24428 - protein, 107 aa, synthetic construct
  REGION 1..107: note = Description of Artificial Sequence: Synthetic polypeptide
DIQMTQSPSSLSASVGDRVTITCRASQGIRNDLGWYQQKPGKAPKRLIYAASSLQSGVPSRFRGSGSGTEFTLTISSLQPEDFATYYCLQHNSYPWTFGQGTKVEIK

SEQ ID NO: 24429 - DNA, 321 bp, synthetic construct
  misc_feature 1..321: note = Description of Artificial Sequence: Synthetic polynucleotide
  source 1..321: mol_type = other DNA
gacatccagatgacccagtctccatcctccctgtctgcatctgtaggagacagagtcaccatcacttgccggacaagtcagggcattagaaatgatttaggctggtatcagcagaaaccagggaaagcccctaagcgcctgatctatgctgcatccagtttgcaaagtggggtcccatcaaggttcagcggcagtggatctgggacagaattcactctcacaatcagcagcctgcagcctgaagattttgcaacttattactgtctacagcatagtacttacccgctcactttcggcggagggaccaaggtggagatcaaa

SEQ ID NO: 24430 - protein, 107 aa, synthetic construct
  REGION 1..107: note = Description of Artificial Sequence: Synthetic polypeptide
DIQMTQSPSSLSASVGDRVTITCRTSQGIRNDLGWYQQKPGKAPKRLIYAASSLQSGVPSRFSGSGSGTEFTLTISSLQPEDFATYYCLQHSTYPLTFGGGTKVEIK

SEQ ID NO: 24431 - DNA, 321 bp, synthetic construct
  misc_feature 1..321: note = Description of Artificial Sequence: Synthetic polynucleotide
  source 1..321: mol_type = other DNA
gacatccagatgacccagtctccatcctccctgtctgcttctgttggagacagagtcaccatcacttgccgggcaagtcaggtcattagagatgatttaggctggtatcagcagaaaccagggaaagcccctaagcgcctgatctatgctgcatccagtttgcaaagtggggtcccatcgaggttcagcggcagtagatctgggacagacttcactctcacaatcagcagcctgcagcctgaagattttgcaacttattactgtctacaccactatagttatcctcggacgttcggccaagggaccaaggtggaaatcaaa

SEQ ID NO: 24432 - protein, 107 aa, synthetic construct
  REGION 1..107: note = Description of Artificial Sequence: Synthetic polypeptide
DIQMTQSPSSLSASVGDRVTITCRASQVIRDDLGWYQQKPGKAPKRLIYAASSLQSGVPSRFSGSRSGTDFTLTISSLQPEDFATYYCLHHYSYPRTFGQGTKVEIK

SEQ ID NO: 24433 - DNA, 321 bp, synthetic construct
  misc_feature 1..321: note = Description of Artificial Sequence: Synthetic polynucleotide
  source 1..321: mol_type = other DNA
gacatccagatgatccagtctccatcctccctgttcgcatctgtaggagacagagtcaccatcacttgccggacaagtcagggcattagaaatgatttaggctggtatcagcagaaaccagggaaagcccctaagcgcctgatctatgctgcatccagtttgcaaagtggggtcccatcaaaattcagcggcagtggatctgggacagaattcactctctcaatcagcagcctgcagcctgaagattttgcaacttattactgtctacagcataatagttacccgctcactttcggcggagggaccaaggtggagatcaaa

SEQ ID NO: 24434 - protein, 107 aa, synthetic construct
  REGION 1..107: note = Description of Artificial Sequence: Synthetic polypeptide
DIQMIQSPSSLFASVGDRVTITCRTSQGIRNDLGWYQQKPGKAPKRLIYAASSLQSGVPSKFSGSGSGTEFTLSISSLQPEDFATYYCLQHNSYPLTFGGGTKVEIK

SEQ ID NO: 24435 - DNA, 321 bp, synthetic construct
  misc_feature 1..321: note = Description of Artificial Sequence: Synthetic polynucleotide
  source 1..321: mol_type = other DNA
gacatccagatgacccagtctccatcctcactgtctgcatctgtaggagacagagtcaccatcacttgtcgggcgagtcagggcattagcaattatttagcctggtttcagcagaaaccagggaaagcccctaagtccctgatctctgctgcatccagtttacagagtggggtcccatcacagttcagcggcagtggatttgggacagatttcactctcaccatcagcagcctgcagcctgaggattttgcaacttattactgccaacagtataatagttacccattcactttcggccctgggaccaaagtggatatcaaa

SEQ ID NO: 24436 - protein, 107 aa, synthetic construct
  REGION 1..107: note = Description of Artificial Sequence: Synthetic polypeptide
DIQMTQSPSSLSASVGDRVTITCRASQGISNYLAWFQQKPGKAPKSLISAASSLQSGVPSQFSGSGFGTDFTLTISSLQPEDFATYYCQQYNSYPFTFGPGTKVDIK

SEQ ID NO: 24437 - DNA, 321 bp, synthetic construct
  misc_feature 1..321: note = Description of Artificial Sequence: Synthetic polynucleotide
  source 1..321: mol_type = other DNA
gacatccagatgacccagtctccatcctcactgtctgcatctgtaggagacagagtcaccatcacttgtcgggcgagtcagggcattagaaattatttagcctggtttcagcagaaaccagggaaagcccctaagtccctgatctatgctgcatccagtttgcaaagtggggtcccatcaaacttcagcggcagtggatctgggacagatttcactctcaccatcagtagcctgcagcctgaagattttgcaacttattactgccaacagtataatagttaccctttcactatcggccctgggaccaaggtggatatcaaa

SEQ ID NO: 24438 - protein, 107 aa, synthetic construct
  REGION 1..107: note = Description of Artificial Sequence: Synthetic polypeptide
DIQMTQSPSSLSASVGDRVTITCRASQGIRNYLAWFQQKPGKAPKSLIYAASSLQSGVPSNFSGSGSGTDFTLTISSLQPEDFATYYCQQYNSYPFTIGPGTKVDIK

SEQ ID NO: 24439 - DNA, 321 bp, synthetic construct
  misc_feature 1..321: note = Description of Artificial Sequence: Synthetic polynucleotide
  source 1..321: mol_type = other DNA
gacatccagatgacccagtctccatcctccctgtctgcatctgtaggagacagaatcaccatcacttgccgggcaagtcagggcattagaaatgatttaggctggtatcagcagaaaccagggaaagcccctaagcgcctgatctatcctgcatccagtttgcaaagtggggtcccatcaaggttcagcggcagtggatctgggacagaattcactctcacaatcagcagcctgcagcctgaagattttgcaacttattactgtctacagcataatagttacccgtggacgttcggccaagggaccaaggtggaaatcaaa

SEQ ID NO: 24440 - protein, 107 aa, synthetic construct
  REGION 1..107: note = Description of Artificial Sequence: Synthetic polypeptide
DIQMTQSPSSLSASVGDRITITCRASQGIRNDLGWYQQKPGKAPKRLIYPASSLQSGVPSRFSGSGSGTEFTLTISSLQPEDFATYYCLQHNSYPWTFGQGTKVEIK

SEQ ID NO: 24441 - DNA, 321 bp, synthetic construct
  misc_feature 1..321: note = Description of Artificial Sequence: Synthetic polynucleotide
  source 1..321: mol_type = other DNA
gacatccagatgacccagtctccatcctccctgtctgcatctgtcggagacagagtcaccatcacttgccgggcaagtcaggacattagaaatgatttaggctggtatcagcagaagccagggaaagcccctaagcgcctgatctatgctgcatccagtttgcacagtggggtcccatcaaggttcagcggcagtggatctgggacagaattcactctcacaatcagcagcctgcagactgaagattttgcaacttattactgtctacagcattatagttaccctcggacgttcggccaagggaccaaggtggaagtcaag

SEQ ID NO: 24442 - protein, 107 aa, synthetic construct
  REGION 1..107: note = Description of Artificial Sequence: Synthetic polypeptide
DIQMTQSPSSLSASVGDRVTITCRASQDIRNDLGWYQQKPGKAPKRLIYAASSLHSGVPSRFSGSGSGTEFTLTISSLQTEDFATYYCLQHYSYPRTFGQGTKVEVK

SEQ ID NO: 24443 - DNA, 321 bp, synthetic construct
  misc_feature 1..321: note = Description of Artificial Sequence: Synthetic polynucleotide
  source 1..321: mol_type = other DNA
gacatccagatgacccagtctccatcctcactgtctgcatctgtaggagacagaatcaccatcacttgtcgggcgagtcagggcattagcaattatttagcctggtttcagcagaaaccagggaaagcccctaagtccctgatctctgctgcatccagtttgcaaagtggggtcccttcaaagttcagcggcagtggatccgggacagatttcactctcaccatcagcagcctgcagcctgaagattttgcaacttattgctgccaacagtatcatagttacccgtggacgttcggccaagggaccaaggtggaaatcaaa

SEQ ID NO: 24444 - protein, 107 aa, synthetic construct
  REGION 1..107: note = Description of Artificial Sequence: Synthetic polypeptide
DIQMTQSPSSLSASVGDRITITCRASQGISNYLAWFQQKPGKAPKSLISAASSLQSGVPSKFSGSGSGTDFTLTISSLQPEDFATYCCQQYHSYPWTFGQGTKVEIK

SEQ ID NO: 24445 - DNA, 321 bp, synthetic construct
  misc_feature 1..321: note = Description of Artificial Sequence: Synthetic polynucleotide
  source 1..321: mol_type = other DNA
ggcatccagatgacccagtctccatcctccctgtctgcatctgtaggagacagagtcaccatcacttgccgggcaagtcagggcattaaaaataatttaggctggtatcagcagaaaccagggaaaggccctaagtgcctgatctatgctgcatccagtttgcaaagtggggtcccatcaaggttcagcggcagtggatctgggacagaattcactctcacaatcagcagcctgcagcctgaagattttgcaacttattactgtctacagcataatagttacccgctcactttcggcggagggaccaaggtggagatcaaa

SEQ ID NO: 24446 - protein, 107 aa, synthetic construct
  REGION 1..107: note = Description of Artificial Sequence: Synthetic polypeptide
GIQMTQSPSSLSASVGDRVTITCRASQGIKNNLGWYQQKPGKGPKCLIYAASSLQSGVPSRFSGSGSGTEFTLTISSLQPEDFATYYCLQHNSYPLTFGGGTKVEIK

SEQ ID NO: 24447 - DNA, 324 bp, synthetic construct
  misc_feature 1..324: note = Description of Artificial Sequence: Synthetic polynucleotide
  source 1..324: mol_type = other DNA
gacatccagatgacccagtctccatcctccctgtctgcatctgtaggagacagagtcaccatcacttgccgggcaagtcagagtattagtagttatttaaattggtatcagcagaaaccagggaaagcccctaagctcctgatctatgctgcatccagtttgcaaagtggggtcccatcaaggttcagtggcagtggatctgggacagacttcactctcaccatcagtagtctgcaacctgaagattttgcaacttacttctgtcaacagagttacagaaccccctttttcactttcggccctgggaccaaagtggatatcaaa

SEQ ID NO: 24448 - protein, 108 aa, synthetic construct
  REGION 1..108: note = Description of Artificial Sequence: Synthetic polypeptide
DIQMTQSPSSLSASVGDRVTITCRASQSISSYLNWYQQKPGKAPKLLIYAASSLQSGVPSRFSGSGSGTDFTLTISSLQPEDFATYFCQQSYRTPFFTFGPGTKVDIK

SEQ ID NO: 24449 - DNA, 321 bp, synthetic construct
  misc_feature 1..321: note = Description of Artificial Sequence: Synthetic polynucleotide
  source 1..321: mol_type = other DNA
gacatccagatgacccagtctccatcctccctgtctgcatctgtaggagacagagtcaccatcacttgccgggcaagtcagggcattagaaatgatttaggctggtatcagcagaaaccagggaaagcccctaagcgcctgatctatgctacatccagtttgcaaagtggggtcccatcaaggttcagcggcagtggatctgggacagaattcactctcacaatcagcagcctgcagcctgaagattttgcaacttattactgtctacagcataatagttaccccctcactttcggcggagggaccaaggtggagatcaaa

SEQ ID NO: 24450 - protein, 107 aa, synthetic construct
  REGION 1..107: note = Description of Artificial Sequence: Synthetic polypeptide
DIQMTQSPSSLSASVGDRVTITCRASQGIRNDLGWYQQKPGKAPKRLIYATSSLQSGVPSRFSGSGSGTEFTLTISSLQPEDFATYYCLQHNSYPLTFGGGTKVEIK

SEQ ID NO: 24451 - DNA, 321 bp, synthetic construct
  misc_feature 1..321: note = Description of Artificial Sequence: Synthetic polynucleotide
  source 1..321: mol_type = other DNA
gacatccagatgacccagtctccatcctcactgtctgcatctgtcggagacagagtcaccatcacttgtcgggcgagtcaggacattagcaattatttagcctgggttcagcagaaaccagggaaagcccctaagtccctgatctacgctgcatccagtttgcaaagtggggtcccatcaaagttcagcggcagtggatctgggacagatttcactctcaccatcagcagcctgcagcctgaagattttgcaagttattactgccaacagtataatagtttcccgctcactttcggcggagggaccaaggtggagatcaaa

SEQ ID NO: 24452 - protein, 107 aa, synthetic construct
  REGION 1..107: note = Description of Artificial Sequence: Synthetic polypeptide
DIQMTQSPSSLSASVGDRVTITCRASQDISNYLAWVQQKPGKAPKSLIYAASSLQSGVPSKFSGSGSGTDFTLTISSLQPEDFASYYCQQYNSFPLTFGGGTKVEIK

SEQ ID NO: 24453 - DNA, 321 bp, synthetic construct
  misc_feature 1..321: note = Description of Artificial Sequence: Synthetic polynucleotide
  source 1..321: mol_type = other DNA
gacatccagatgacccagtctccatcctccctgtctgcatctgtaggagacagagtcaccatcacttgccgggcaagtcagggcattagaaatgatttaggctggtatcagcagaaaccagggaaagcccctaagcgcctgatctatgctgcatccagtgtgcaaagtggggtcccatcaaggttcagcggcagtggatctgggacagaattcactctcacaatcagcagcctgcagcctgaagattttgcactttattactgtctacagcataatagttacccgctcactttcggcggagggaccaaggtggagatcaaa

SEQ ID NO: 24454 - protein, 107 aa, synthetic construct
  REGION 1..107: note = Description of Artificial Sequence: Synthetic polypeptide
DIQMTQSPSSLSASVGDRVTITCRASQGIRNDLGWYQQKPGKAPKRLIYAASSVQSGVPSRFSGSGSGTEFTLTISSLQPEDFALYYCLQHNSYPLTFGGGTKVEIK

SEQ ID NO: 24455 - DNA, 336 bp, synthetic construct
  misc_feature 1..336: note = Description of Artificial Sequence: Synthetic polynucleotide
  source 1..336: mol_type = other DNA
gatattgtgatgacccagactccactctctctgtccgtcacccctggacagccggcctccatctcctgcaagtctagtcagagcctcctgcatagtgatggaaagacctttttgtattggtacctgcagaagccaggccatcctccacagctcctgatctatgaagtttccaaccggttctctggagtgccagataggttcagtggcagcgggtcagggacagatttcacactgaaaatcagccgggtggaggctgaggatgttggaatttattactgcatgcaaagtatacagcttccgctctcattcggcggagggaccaaggtggagatcaac

SEQ ID NO: 24456 - protein, 112 aa, synthetic construct
  REGION 1..112: note = Description of Artificial Sequence: Synthetic polypeptide
DIVMTQTPLSLSVTPGQPASISCKSSQSLLHSDGKTFLYWYLQKPGHPPQLLIYEVSNRFSGVPDRFSGSGSGTDFTLKISRVEAEDVGIYYCMQSIQLPLSFGGGTKVEIN

SEQ ID NO: 24457 - DNA, 324 bp, synthetic construct
  misc_feature 1..324: note = Description of Artificial Sequence: Synthetic polynucleotide
  source 1..324: mol_type = other DNA
gaaattgtgttgacgcagtctccaggcaccctgtctttgtctccaggagaaagagccaccctctcctgcagggccagtcagaatgtttacagcagctacttagcctggtaccagcagaaacctggccagactcccaggctcctcatctatggtgcatccagcagggccagtggcatcccagacaggttcagtggcagtgggtctgggacagacttcactctcaccatcagcagactggagcctgaagattttgcagtgtattactgtcagcagtatggtagctcacctcggacgttcggccaagggaccaaggtggaaatcaaa

SEQ ID NO: 24458 - protein, 108 aa, synthetic construct
  REGION 1..108: note = Description of Artificial Sequence: Synthetic polypeptide
EIVLTQSPGTLSLSPGERATLSCRASQNVYSSYLAWYQQKPGQTPRLLIYGASSRASGIPDRFSGSGSGTDFTLTISRLEPEDFAVYYCQQYGSSPRTFGQGTKVEIK

SEQ ID NO: 24459 - DNA, 321 bp, synthetic construct
  misc_feature 1..321: note = Description of Artificial Sequence: Synthetic polynucleotide
  source 1..321: mol_type = other DNA
gacatccagatgacccagtctccatcctccctgtctgcatctgtaggagacagagtcaccatcacttgccgggcaagtcagggcattagaaatgatttagactggtatcagcagaaaccagggaaagcccctaagcgcctgatctatgctgcatccagtttgcaaagtggggtcccatcaaggttcagcggcagtggatctgggacagaattcactctcacaatcagcagcctgcagcctgaagattttgcaacttattactgtctacagcataatcgttacccgctcactttcggcggagggaccaaggtggagatcaaa

SEQ ID NO: 24460 - protein, 107 aa, synthetic construct
  REGION 1..107: note = Description of Artificial Sequence: Synthetic polypeptide
DIQMTQSPSSLSASVGDRVTITCRASQGIRNDLDWYQQKPGKAPKRLIYAASSLQSGVPSRFSGSGSGTEFTLTISSLQPEDFATYYCLQHNRYPLTFGGGTKVEIK

SEQ ID NO: 24461 - DNA, 321 bp, synthetic construct
  misc_feature 1..321: note = Description of Artificial Sequence: Synthetic polynucleotide
  source 1..321: mol_type = other DNA
gacatccagatgacccagtctccatcctccctgtctgcatctgtaggagacagagtcaccatcacttgccaggcgagtcaggacattaacaactatttaaattggtatcagcagaaaccagggaaagcccttaagctcttgatatacgatgcatccgatttggaaacaggggtcccatcaaggttcagtggaagtggatctgggacagattttactttcaccatcagcagtctgcagcctgaagatattgcaatatattactgtcaacagtatgaaaatctcccgatcaccttcggccaagggacacgactggagattaaa

SEQ ID NO: 24462 - protein, 107 aa, synthetic construct
  REGION 1..107: note = Description of Artificial Sequence: Synthetic polypeptide
DIQMTQSPSSLSASVGDRVTITCQASQDINNYLNWYQQKPGKALKLLIYDASDLETGVPSRFSGSGSGTDFTFTISSLQPEDIAIYYCQQYENLPITFGQGTRLEIK

SEQ ID NO: 24463 - DNA, 321 bp, synthetic construct
  misc_feature 1..321: note = Description of Artificial Sequence: Synthetic polynucleotide
  source 1..321: mol_type = other DNA
gacatccagatgacccagtctccatcctccctgtctgcatctgtaggagacagagtcaccatcacttgccgggcaagtcagggcattagaaatgatttaggctggtatcagcagaaaccagggaaagcccctaagcgcctgatctatgctgcatccagtttgcaaagtggggtcccatcaaggttcagcggcagtggatctgggacagaattcactctcacaatcagcagcctgcagcctgaagattttgcaacttattactgtctacagcatagtacttaccctctcactttcggcggagggaccaaggtggagatcaaa

SEQ ID NO: 24464 - protein, 107 aa, synthetic construct
  REGION 1..107: note = Description of Artificial Sequence: Synthetic polypeptide
DIQMTQSPSSLSASVGDRVTITCRASQGIRNDLGWYQQKPGKAPKRLIYAASSLQSGVPSRFSGSGSGTEFTLTISSLQPEDFATYYCLQHSTYPLTFGGGTKVEIK

SEQ ID NO: 24465 - DNA, 321 bp, synthetic construct
  misc_feature 1..321: note = Description of Artificial Sequence: Synthetic polynucleotide
  source 1..321: mol_type = other DNA
gacatccagatgacccagtctccatcctccctgtctgcatctgtaggagacagagtcaccatcacttgccgggcaagtcagggcattggaaatgatttaggctggtatcagcagaaaccagagaaagcccctaagcgcctgatctatgctgcatccagtttgcatagtggggtcccatccaggttcagcggcagtggctctgggacagaattcactctcacaatcagcagcctgcagcctgaagattttgcaacttattactgtctacagcattatagttaccctcggacgtttggccaagggaccaaggtggaaatcaaa

SEQ ID NO: 24466 - protein, 107 aa, synthetic construct
  REGION 1..107: note = Description of Artificial Sequence: Synthetic polypeptide
DIQMTQSPSSLSASVGDRVTITCRASQGIGNDLGWYQQKPEKAPKRLIYAASSLHSGVPSRFSGSGSGTEFTLTISSLQPEDFATYYCLQHYSYPRTFGQGTKVEIK

SEQ ID NO: 24467 - DNA, 327 bp, synthetic construct
  misc_feature 1..327: note = Description of Artificial Sequence: Synthetic polynucleotide
  source 1..327: mol_type = other DNA
gacatccagatgacccagtctccatcctccctgtttgcatctgtaggagacagagtcaccatcacttgccgggcaagtcagagcattagcgactatttaaattggtatcagcagaaaccagggagagcccctaaactcctgatctatgatacatccagtttgcaaagtggggtcccatcaaggttcagtggcagtggatctgggacagatttcactctcaccatcaacagtctgcaacctgaagattttgcaacttactactgtcaacagacttacaatattcttccggagcgcagttttggccgggggaccaagctggagatcaaa

SEQ ID NO: 24468 - protein, 109 aa, synthetic construct
  REGION 1..109: note = Description of Artificial Sequence: Synthetic polypeptide
DIQMTQSPSSLFASVGDRVTITCRASQSISDYLNWYQQKPGRAPKLLIYDTSSLQSGVPSRFSGSGSGTDFTLTINSLQPEDFATYYCQQTYNILPERSFGRGTKLEIK

SEQ ID NO: 24469 - DNA, 321 bp, synthetic construct
  misc_feature 1..321: note = Description of Artificial Sequence: Synthetic polynucleotide
  source 1..321: mol_type = other DNA
gacatccagatgacccagtctccatcctccctgtctgcatctgtaggagacagagtcaccatcacttgccgggcaagtcaggacattagaaatgatttaggctggtatcagcagaaaccagggaaagcccctaagcgcctgatctatgctgcatccaattttcaaagtggggtcccatcaaggttcagcggcagtggatctgggacagaattcactctcacaatcagcagcctgcagcctgaagattttgcaacttattactgtctacagcataataattacccgtggacgttcggccaagggaccaaggtggaaatcaaa

SEQ ID NO: 24470 - protein, 107 aa, synthetic construct
  REGION 1..107: note = Description of Artificial Sequence: Synthetic polypeptide
DIQMTQSPSSLSASVGDRVTITCRASQDIRNDLGWYQQKPGKAPKRLIYAASNFQSGVPSRFSGSGSGTEFTLTISSLQPEDFATYYCLQHNNYPWTFGQGTKVEIK

SEQ ID NO: 24471 - DNA, 324 bp, synthetic construct
  misc_feature 1..324: note = Description of Artificial Sequence: Synthetic polynucleotide
  source 1..324: mol_type = other DNA
gacatccagatgacccagtctccagcctccctgtctgcgtctgttggagacagagtcaccatcacttgccgggcaagtcagaacattagcagctatttaaattggtatcagcagaaaccagggaaggcccctaaactcctgatctatgctgcatccgttttgcaacatgggatcccatcaaggttcagtggcaggggatctgggacagatttcactctcatcatcagtagtctgcaacctgaagattttgcaacttactactgtcaacagagttacagaacccccttattcactttcggccctgggaccaaagtagatttcaaa

SEQ ID NO: 24472 - protein, 108 aa, synthetic construct
  REGION 1..108: note = Description of Artificial Sequence: Synthetic polypeptide
DIQMTQSPASLSASVGDRVTITCRASQNISSYLNWYQQKPGKAPKLLIYAASVLQHGIPSRFSGRGSGTDFTLIISSLQPEDFATYYCQQSYRTPLFTFGPGTKVDFK

SEQ ID NO: 24473 - DNA, 321 bp, synthetic construct; identical to SEQ ID NO: 24257
  misc_feature 1..321: note = Description of Artificial Sequence: Synthetic polynucleotide
  source 1..321: mol_type = other DNA

SEQ ID NO: 24474 - protein, 107 aa, synthetic construct; identical to SEQ ID NO: 24146
  REGION 1..107: note = Description of Artificial Sequence: Synthetic polypeptide

SEQ ID NO: 24475 - DNA, 321 bp, synthetic construct
  misc_feature 1..321: note = Description of Artificial Sequence: Synthetic polynucleotide
  source 1..321: mol_type = other DNA
gacatccagatgacccagtctccatcctccctgtctgcatctgtaggagacagagtcaccatcacttgccgggcaagtcagggcattagaaatgatttaggctggtatcagcagaaaccagggaaagcccctaagcgcctgatctatgctgcatccagtgtgcaaagtggggtcccatcaaggttcagcggcagtggatctgggacagaattcactctcacaatcagcagcctgcagcctgaagattttgcaatttatttctgtctacagcataatagttacccgctcactttcggcggagggaccaaggtggagatcaaa

SEQ ID NO: 24476 - protein, 107 aa, synthetic construct
  REGION 1..107: note = Description of Artificial Sequence: Synthetic polypeptide
DIQMTQSPSSLSASVGDRVTITCRASQGIRNDLGWYQQKPGKAPKRLIYAASSVQSGVPSRFSGSGSGTEFTLTISSLQPEDFAIYFCLQHNSYPLTFGGGTKVEIK

SEQ ID NO: 24477 - DNA, 321 bp, synthetic construct
  misc_feature 1..321: note = Description of Artificial Sequence: Synthetic polynucleotide
  source 1..321: mol_type = other DNA
gacatccagatgacccagtctccatcctccctgtctgcatctgtaggagacagagtcaccatcacttgccgggcaagtcagggcattagaaatgatttaggctggtatcagcagaaaccagggaaagcccctaagcgcctgatctatgctgcatccagtttgcaaagtggggtcccatcaaggttcagcggcagtggatctgggacagaattcactctcacaatcggcagcctgcagcctgaagattttgcaacttattactgtctgcaacattatagttaccctcggacgttcggcctagggaccaaggtggaaatcaaa

SEQ ID NO: 24478 - protein, 107 aa, synthetic construct
  REGION 1..107: note = Description of Artificial Sequence: Synthetic polypeptide
DIQMTQSPSSLSASVGDRVTITCRASQGIRNDLGWYQQKPGKAPKRLIYAASSLQSGVPSRFSGSGSGTEFTLTIGSLQPEDFATYYCLQHYSYPRTFGLGTKVEIK

SEQ ID NO: 24479 - DNA, 339 bp, synthetic construct
  misc_feature 1..339: note = Description of Artificial Sequence: Synthetic polynucleotide
  source 1..339: mol_type = other DNA
gacatcgtgatgacccagtctccagactccctggctgtgtctctgggcgagagggccaccatcaactgcaagtccagccagagtgttttatacagctccaacaataacaattatttagcttggtaccagcagaaaccaggacagcctcctaagctgctcatttactggacatctacccgggaatccggggtccctgaccgattcagtggcagcgggtctgggacagatttcactctcaccatcagcagcctgcaggctgaagatgtggccgtttattactgtcagcagtattatgatactcctccgacgttcggccaagggaccaaggtggaaatcaaa

SEQ ID NO: 24480 - protein, 113 aa, synthetic construct
  REGION 1..113: note = Description of Artificial Sequence: Synthetic polypeptide
DIVMTQSPDSLAVSLGERATINCKSSQSVLYSSNNNNYLAWYQQKPGQPPKLLIYWTSTRESGVPDRFSGSGSGTDFTLTISSLQAEDVAVYYCQQYYDTPPTFGQGTKVEIK

SEQ ID NO: 24481 - DNA, 336 bp, synthetic construct
  misc_feature 1..336: note = Description of Artificial Sequence: Synthetic polynucleotide
  source 1..336: mol_type = other DNA
gatattgtgatgaaccagactccactctctctgtccgtcacccctggacagccggcctccatctcctgcaagtctagtcagagcctcctacatagtgaaggaaagacctatttgtattggtatctgcagaagccaggccagcctccacaactcctgatctatgaaatttccaaccggttctctggagtgccagctaggttaagtggcagcgggtcagggacagatttcacactgaaaatcagccgggtggaggctgaggatgttggggtttattactgcatgcaaagtacacagtttccgctcactttcggcggagggaccaaggtggagatcaaa

SEQ ID NO: 24482 - protein, 112 aa, synthetic construct
  REGION 1..112: note = Description of Artificial Sequence: Synthetic polypeptide
DIVMNQTPLSLSVTPGQPASISCKSSQSLLHSEGKTYLYWYLQKPGQPPQLLIYEISNRFSGVPARLSGSGSGTDFTLKISRVEAEDVGVYYCMQSTQFPLTFGGGTKVEIK

SEQ ID NO: 24483 - DNA, 321 bp, synthetic construct
  misc_feature 1..321: note = Description of Artificial Sequence: Synthetic polynucleotide
  source 1..321: mol_type = other DNA
gacatccagatgacccagtctccatcctcactgtctgcatctgtaggagacagagtcaccatcacttgtcgggcgagtcagggcattagcaattatttagcctggtttcagcagaaaccagggaaagcccctaagtccctgatctctgctgcatccagtttgcaaagtggggtcccatcaaagttcagcggcagtggatctgggacagatttcactctcaccatcagcagcctgcagcctgaagattttgcaacttattactgccaacagtataatagttacccattcactttcggccctgggaccaaagtggatatcaaa

SEQ ID NO: 24484 - protein, 107 aa, synthetic construct
  REGION 1..107: note = Description of Artificial Sequence: Synthetic polypeptide
DIQMTQSPSSLSASVGDRVTITCRASQGISNYLAWFQQKPGKAPKSLISAASSLQSGVPSKFSGSGSGTDFTLTISSLQPEDFATYYCQQYNSYPFTFGPGTKVDIK

SEQ ID NO: 24485 - DNA, 321 bp, synthetic construct
  misc_feature 1..321: note = Description of Artificial Sequence: Synthetic polynucleotide
  source 1..321: mol_type = other DNA
gacatccagatgacccagtctccatcctcactgtctgcatctgttggagacagagtcaccatcacttgtcgggcgagtcaggacattagcaattatttagcctggtttcagcagaaaccagggaaagcccctaagtccctgatctatgctgcatccagtttgcaaagtggggtcccatcaaagttcagaggcagtggatctgggacagatttcactctcaccatcagcagcctgcagcctgaagattttgcaacttattactgccaacagtatcatagtttcccattcactttcggccctgggaccaaagtggatgtcaaa

SEQ ID NO: 24486 - protein, 107 aa, synthetic construct
  REGION 1..107: note = Description of Artificial Sequence: Synthetic polypeptide
DIQMTQSPSSLSASVGDRVTITCRASQDISNYLAWFQQKPGKAPKSLIYAASSLQSGVPSKFRGSGSGTDFTLTISSLQPEDFATYYCQQYHSFPFTFGPGTKVDVK

SEQ ID NO: 24487 - DNA, 321 bp, synthetic construct
  misc_feature 1..321: note = Description of Artificial Sequence: Synthetic polynucleotide
  source 1..321: mol_type = other DNA
gacatccagatgacccagtctccatcctccctgtctgcgtctgtaggagacagagtcaccatcacttgccgggcaagtcagggcattagaaatgatttaggctggtatcagcagaaaccagggaaagcccctaagcgcctgatctatacttcatccagtttgcaaagtggggtcccatcaaggttcagcggcagtggatctgggacagaattcactctcacaatcagcagcctgcagcctgaagattttgcaacttattactgtctacaacataatagttacccgtggacgttcggcctagggaccaaggtggtcatcaaa

SEQ ID NO: 24488 - protein, 107 aa, synthetic construct
  REGION 1..107: note = Description of Artificial Sequence: Synthetic polypeptide
DIQMTQSPSSLSASVGDRVTITCRASQGIRNDLGWYQQKPGKAPKRLIYTSSSLQSGVPSRFSGSGSGTEFTLTISSLQPEDFATYYCLQHNSYPWTFGLGTKVVIK

SEQ ID NO: 24489 - DNA, 321 bp, synthetic construct
  misc_feature 1..321: note = Description of Artificial Sequence: Synthetic polynucleotide
  source 1..321: mol_type = other DNA
gacatccagatgacccagtctccatcctccctgtctgcatctgtaggagacagagtcaccatcacttgccgggcaagtcagggcgttagaaatgatttaggctggtatcagcagaaaccagggaaagcccctcagcgcctgatctatgctgcatccagtttgcaaagtggggtcccatcaaggttcaacggcagtggatctgggacagaattcactctcacaatcagcagcctgcagcctgaagattttgcaacttattactgtctacagcatagtagttacccgctcactttcggcggagggaccaaggtggagatcaaa

SEQ ID NO: 24490 - protein, 107 aa, synthetic construct
  REGION 1..107: note = Description of Artificial Sequence: Synthetic polypeptide
DIQMTQSPSSLSASVGDRVTITCRASQGVRNDLGWYQQKPGKAPQRLIYAASSLQSGVPSRFNGSGSGTEFTLTISSLQPEDFATYYCLQHSSYPLTFGGGTKVEIK

SEQ ID NO: 24491 - DNA, 321 bp, synthetic construct
  misc_feature 1..321: note = Description of Artificial Sequence: Synthetic polynucleotide
  source 1..321: mol_type = other DNA
gaaattgtgttgacgcagtctccaggcaccctgtctttgtctccaggggaaagagccaccctctcctgcagggccagtcagagttttagcagcagctacttagcctggtaccagcagaaacctggccaggctcccaggctcctcatctatggtgcatccagcagggccactggcatcccagacaggttcagtggcagtgggtctgggacagacttcactctcaccatcagcagactggagcctgaagattttgcagtgtattactgtcagcagtatggtagctcacgcagttttggccaggggaccaagctggagatcaaa

SEQ ID NO: 24492 - protein, 107 aa, synthetic construct
  REGION 1..107: note = Description of Artificial Sequence: Synthetic polypeptide
EIVLTQSPGTLSLSPGERATLSCRASQSFSSSYLAWYQQKPGQAPRLLIYGASSRATGIPDRFSGSGSGTDFTLTISRLEPEDFAVYYCQQYGSSRSFGQGTKLEIK

SEQ ID NO: 24493 - DNA, 321 bp, synthetic construct; identical to SEQ ID NO: 24257
  misc_feature 1..321: note = Description of Artificial Sequence: Synthetic polynucleotide
  source 1..321: mol_type = other DNA

SEQ ID NO: 24494 - protein, 107 aa, synthetic construct; identical to SEQ ID NO: 24146
  REGION 1..107: note = Description of Artificial Sequence: Synthetic polypeptide

SEQ ID NO: 24495 - DNA, 324 bp, synthetic construct
  misc_feature 1..324: note = Description of Artificial Sequence: Synthetic polynucleotide
  source 1..324: mol_type = other DNA
gacatccagatgacccagtctccatcctccctgtctgcatctgtaggagacagagtcaccatcacttgccgggcaagtcagaacatttttagttatttaaattggtatcatcagaaaccagggaaagcccctaagctcctgatctatgctgcatccagtttgcaaagtggggtcccatcaaggttcagtggcagtggatctgggacagatttcactctcaccatcagcagtctacaacctgaagattttgcaacttactactgtcaacagagttacagtacccccttattcactttcggccctgggaccaaagtggatatcaaa

SEQ ID NO: 24496 - protein, 108 aa, synthetic construct
  REGION 1..108: note = Description of Artificial Sequence: Synthetic polypeptide
DIQMTQSPSSLSASVGDRVTITCRASQNIFSYLNWYHQKPGKAPKLLIYAASSLQSGVPSRFSGSGSGTDFTLTISSLQPEDFATYYCQQSYSTPLFTFGPGTKVDIK

SEQ ID NO: 24497 - DNA, 321 bp, synthetic construct
  misc_feature 1..321: note = Description of Artificial Sequence: Synthetic polynucleotide
  source 1..321: mol_type = other DNA
gacatccagatgacccagtctccatcctccctgtctgcatctgtaggagacagagtcaccatcacttgccgggcaagtcagggcattagaaatgatttaggctggtatcagcagaaaccaggaaaagcccctaagcgcctgatctatgctgcttccagtttgcaaagtggggtcccatcaaggttcagcggcagtggatctgggacagagttcactctcacaatcagcagcctgcagcctgaagattttgcaacttattactgtctacagcatgccagttacccgctcactttcggcggagggaccaaggtggagatcaaa

SEQ ID NO: 24498 - protein, 107 aa, synthetic construct
  REGION 1..107: note = Description of Artificial Sequence: Synthetic polypeptide
DIQMTQSPSSLSASVGDRVTITCRASQGIRNDLGWYQQKPGKAPKRLIYAASSLQSGVPSRFSGSGSGTEFTLTISSLQPEDFATYYCLQHASYPLTFGGGTKVEIK

SEQ ID NO: 24499 - DNA, 321 bp, synthetic construct
  misc_feature 1..321: note = Description of Artificial Sequence: Synthetic polynucleotide
  source 1..321: mol_type = other DNA
gacatccagatgacccagtctccatcctccctgtctgcatctgtaggagacagagtcaccatcacttgccgggcaagtcagggcattagaaatgatttaggctggtatcagcagaaaccagggaaagcccctaagcgcctgatctatgttgcatccagtttgcaaagtggggtcccatcaaggttcagcggcagtggatctgggacagaattcactctcacaatcagcagcctgcagcctgaagattttgcaagttattactgtctacagcataatagttacccgtggacgttcggccaagggaccaaggtggaaatcaaa

SEQ ID NO: 24500 - protein, 107 aa, synthetic construct
  REGION 1..107: note = Description of Artificial Sequence: Synthetic polypeptide
DIQMTQSPSSLSASVGDRVTITCRASQGIRNDLGWYQQKPGKAPKRLIYVASSLQSGVPSRFSGSGSGTEFTLTISSLQPEDFASYYCLQHNSYPWTFGQGTKVEIK

SEQ ID NO: 24501 - DNA, 321 bp, synthetic construct
  misc_feature 1..321: note = Description of Artificial Sequence: Synthetic polynucleotide
  source 1..321: mol_type = other DNA
gacatccagatgacccagtctccatcctccctgtctgcatctgtaggagacagagtcaccatcacttgccgggcaagtcagggcattagaaatgatttaggctggtatcagcagaaaccagggaaagcccctaagcgcctgatctatgctgcatccagtttgcaaagtggggtcccatcaaggttcagtggcagtggatctgggacagaattcactctcacaatcagcagcctgcagcctgaagattttgcaacttattactgtctacagcataatagttacccattcactttcggccctgggaccaaagtggatatcaaa

SEQ ID NO: 24502 - protein, 107 aa, synthetic construct; identical to SEQ ID NO: 24296
  REGION 1..107: note = Description of Artificial Sequence: Synthetic polypeptide

SEQ ID NO: 24503 - DNA, 321 bp, synthetic construct
  misc_feature 1..321: note = Description of Artificial Sequence: Synthetic polynucleotide
  source 1..321: mol_type = other DNA
gacatccagatgacccagtctccatcctccctgtctgcatctgtaggagacagagtcaccatcacttgccggacaagtcagggcattagaaatgatttaggctggtatcagcagaaaccagggaaagcccctaagcgcctgatctatgctgcatccagtttacaaagtggggtcccatcaaggttcagcggcagtggatctgggacagaattcactctcacaatcagcagcctgcagcctgaagattttgcaacttattactgtctacagcattatagtttccctcggacgttcggccaagggaccaaagtggaaatcaaa

SEQ ID NO: 24504 - protein, 107 aa, synthetic construct
  REGION 1..107: note = Description of Artificial Sequence: Synthetic polypeptide
DIQMTQSPSSLSASVGDRVTITCRTSQGIRNDLGWYQQKPGKAPKRLIYAASSLQSGVPSRFSGSGSGTEFTLTISSLQPEDFATYYCLQHYSFPRTFGQGTKVEIK

SEQ ID NO: 24505 - DNA, 321 bp, synthetic construct
  misc_feature 1..321: note = Description of Artificial Sequence: Synthetic polynucleotide
  source 1..321: mol_type = other DNA
gacatccagatgacccagtctccctcttccgtgtctgcatctgtaggagacagagtcaccatcacttgtcgggcgagtcagggtattagcagctggttagcctggtatcagcagaaaccagggaaagcccctaagttcctgatctatggtgcatccagtttgcaaagtggggtcccatcaaggttcagcgccagtggatctgggacagagttcactctcaccatcagcagcctgcagcctgaagattttgcaacttactgttgtcaacagtatgacagtttccctcggacgttcggccaagggaccaaggtggaaatcaaa

SEQ ID NO: 24506 - protein, 107 aa, synthetic construct
  REGION 1..107: note = Description of Artificial Sequence: Synthetic polypeptide
DIQMTQSPSSVSASVGDRVTITCRASQGISSWLAWYQQKPGKAPKFLIYGASSLQSGVPSRFSASGSGTEFTLTISSLQPEDFATYCCQQYDSFPRTFGQGTKVEIK

SEQ ID NO: 24507 - DNA, 321 bp, synthetic construct
  misc_feature 1..321: note = Description of Artificial Sequence: Synthetic polynucleotide
  source 1..321: mol_type = other DNA
gacatccagatgacccagtctccatcctccctgtctgcatctgtaggagacagagtcaccatcacttgccgggcaagtcagggcattagaaatgatttaggctggtatcagcagaaaccagggaaagcccctaagcgcctgatctatactgcatccagtttgcaaagtggggtcccatcaaggttcagcggcagtggatctgggacagaattcactctcacaatcagcagcctgcagcctgaagattttgcaacttattactgtctacagcataatacttacccgtggacgttcggccaagggaccaaggtggaagtcaaa

SEQ ID NO: 24508 - protein, 107 aa, synthetic construct
  REGION 1..107: note = Description of Artificial Sequence: Synthetic polypeptide
DIQMTQSPSSLSASVGDRVTITCRASQGIRNDLGWYQQKPGKAPKRLIYTASSLQSGVPSRFSGSGSGTEFTLTISSLQPEDFATYYCLQHNTYPWTFGQGTKVEVK

SEQ ID NO: 24509 - DNA, 321 bp, synthetic construct
  misc_feature 1..321: note = Description of Artificial Sequence: Synthetic polynucleotide
  source 1..321: mol_type = other DNA
gacatccagatgacccagtctccatcctccctgtctgcatctgtaggagacagagtcaccatcacttgccgggcaagtcagggcattagaaatgatttaggctggtatcagcagaaaccagggaaagcccctaagcgcctgatctatgctgcatccagtttgcaaagtggggtcccatcaaggttcagcggcagtggatctgggacagaattcactctcacaatcagcagcctgcagcctgaagattttgcaacttattactgtctacagcataatagttacccgctcactttcggcggagggaccaaggtggagatcaca

SEQ ID NO: 24510 - protein, 107 aa, synthetic construct
  REGION 1..107: note = Description of Artificial Sequence: Synthetic polypeptide
DIQMTQSPSSLSASVGDRVTITCRASQGIRNDLGWYQQKPGKAPKRLIYAASSLQSGVPSRFSGSGSGTEFTLTISSLQPEDFATYYCLQHNSYPLTFGGGTKVEIT

SEQ ID NO: 24511 - DNA, 321 bp, synthetic construct
  misc_feature 1..321: note = Description of Artificial Sequence: Synthetic polynucleotide
  source 1..321: mol_type = other DNA
gacatccagatgacccagtctccaccctccctgtctacatctgtaggagacagagtcaccatcacttgccgggcaactcagaacattttcagctatttaaattggcatcagcagaaaccagggaaagcccctaagctcctgatccatactgcatccagtttgcaaggtggggtcccatcaaggttcagtggcagtggatctgggacagatttcactctcaccatcatcagtatgcaacctgaagatttttccacttactactgtcaactcagctacagtcccccgtacacttttggcggagggaccaaggtggagatcaaa

SEQ ID NO: 24512 - protein, 107 aa, synthetic construct
  REGION 1..107: note = Description of Artificial Sequence: Synthetic polypeptide
DIQMTQSPPSLSTSVGDRVTITCRATQNIFSYLNWHQQKPGKAPKLLIHTASSLQGGVPSRFSGSGSGTDFTLTIISMQPEDFSTYYCQLSYSPPYTFGGGTKVEIK

SEQ ID NO: 24513 - DNA, 336 bp, synthetic construct
  misc_feature 1..336: note = Description of Artificial Sequence: Synthetic polynucleotide
  source 1..336: mol_type = other DNA
gatattgtgatgacccagactccactctctctgtccgtcacccctggacagccggcctccatctcctgcaggtctagtcagagcctcctccatagtgatggaaggacctatttgtattggtacctgcagaagccaggccagcctccacagctcctgatctatgaactttccaaccggttctctggagtgccagataggttcagtggcagcgggtcagggacagatttcacactgaaaatcagccgggtggaggctgaggatgttgggatttattcctgcttgcaaagtatacaatatcccatcaccttcggccaagggacacgactggagattaaa

SEQ ID NO: 24514 - protein, 112 aa, synthetic construct
  REGION 1..112: note = Description of Artificial Sequence: Synthetic polypeptide
DIVMTQTPLSLSVTPGQPASISCRSSQSLLHSDGRTYLYWYLQKPGQPPQLLIYELSNRFSGVPDRFSGSGSGTDFTLKISRVEAEDVGIYSCLQSIQYPITFGQGTRLEIK

SEQ ID NO: 24515 - DNA, 339 bp, synthetic construct
  misc_feature 1..339: note = Description of Artificial Sequence: Synthetic polynucleotide
  source 1..339: mol_type = other DNA
gacatcgtgatgacccagtttccagactccctggctgtgtctctgggcgagagggccaccatcaagtgtaagtccagccagagtgttttatacagctcccacaataacaactacttagcttggtaccagcagaaaccaggacagcctcctaagttgctcctttactgggcatctacccgggaatccggggtccctgaccgattcagtggcagcgggtctgggacagaattcactctcaccatcagcagcctggaggctgaagatgtggcagtttattactgtcagcagtattatagtactcctccgacgttcggccaagggaccaaggtggaaatcaaa

SEQ ID NO: 24516 - protein, 113 aa, synthetic construct
  REGION 1..113: note = Description of Artificial Sequence: Synthetic polypeptide
DIVMTQFPDSLAVSLGERATIKCKSSQSVLYSSHNNNYLAWYQQKPGQPPKLLLYWASTRESGVPDRFSGSGSGTEFTLTISSLEAEDVAVYYCQQYYSTPPTFGQGTKVEIK

SEQ ID NO: 24517 - DNA, 336 bp, synthetic construct
  misc_feature 1..336: note = Description of Artificial Sequence: Synthetic polynucleotide
  source 1..336: mol_type = other DNA
gatattgtgatgacccagactccactctctctgtccgtcacccctggacagccggcctccatctcctgcaagtctagtcagagcctcctgcatggtgatggaaagacctatttgttttggtacctgcagaagccaggccagcctccacagctcctgatctatgaagtttccaatcggttctctggagtgccagataggttcagtggcagcgggtcagggacagatttcacactgaaaatcagccgggtggaggctgaggatgttggggtttattactgcatgcaaagtatacagcttccgtggacgttcggccaagggaccaaggtggaaatcaaa

SEQ ID NO: 24518 - protein, 112 aa, synthetic construct
  REGION 1..112: note = Description of Artificial Sequence: Synthetic polypeptide
DIVMTQTPLSLSVTPGQPASISCKSSQSLLHGDGKTYLFWYLQKPGQPPQLLIYEVSNRFSGVPDRFSGSGSGTDFTLKISRVEAEDVGVYYCMQSIQLPWTFGQGTKVEIK

SEQ ID NO: 24519 - DNA, 321 bp, synthetic construct
  misc_feature 1..321: note = Description of Artificial Sequence: Synthetic polynucleotide
  source 1..321: mol_type = other DNA
gacatccagatgacccagtctccatcctccctgtctgcatctgtaggagacagagtcaccatcacttgccgggcaagtcagggcattagaaatgatttaggctggtatcaacagaaaccagggaaagcccctaagcgcctgatctatgctgcatccagtttgcaaagtggggtcccatcaaggttcagcggcagtggatctgggacagaattcactctcacaatcagcagcctgcagcctgaagattttgcaacttattactgtctacagcataatagttacccattcactttcggccctgggaccaaagtggatatcaaa

SEQ ID NO: 24520 - protein, 107 aa, synthetic construct; identical to SEQ ID NO: 24296
  REGION 1..107: note = Description of Artificial Sequence: Synthetic polypeptide

SEQ ID NO: 24521 - DNA, 333 bp, synthetic construct
  misc_feature 1..333: note = Description of Artificial Sequence: Synthetic polynucleotide
  source 1..333: mol_type = other DNA
gatgttgtgatgactcagtctccactctccctgcccgtcacccttggacagccggcctccatctcctgccggtctagtcaaagcctcgtatatagtgatggagacacctacttgaattggtttcagcagaggccaggccaatctccaaggcgccaaatttataaggtttctaactgggactctggggtcccagacagattcagcggcagtgggtcaggcactgatttcacactgaacatcagcagggtggaggctgaggatgttgggatttatttctgcatgcattgtacacactggctccttttcggccctgggaccaaagtggatatcaaa

SEQ ID NO: 24522 - protein, 111 aa, synthetic construct
  REGION 1..111: note = Description of Artificial Sequence: Synthetic polypeptide
DVVMTQSPLSLPVTLGQPASISCRSSQSLVYSDGDTYLNWFQQRPGQSPRRQIYKVSNWDSGVPDRFSGSGSGTDFTLNISRVEAEDVGIYFCMHCTHWLLFGPGTKVDIK

SEQ ID NO: 24523 - DNA, 336 bp, synthetic construct
  misc_feature 1..336: note = Description of Artificial Sequence: Synthetic polynucleotide
  source 1..336: mol_type = other DNA
gatattgtgatgacccagactccactctctctgtccgtcacccctggacagccggcctccttctcctgcaagtctagtcagagcctcctgcatagtgatggaaagacctatttgtattggtacctgcagaagccaggccagcctccacagctcctgatctttgaggtttcccaccggttctctggactgccagataggttcagtggcagcgggtcagggacagatttcacactgaaaatcagccgggtggaggctgaggatgttggggtttattactgcatgcaaagtatacagcatccgttcactttcggcggagggaccagggtggagatcaaa

SEQ ID NO: 24524 - protein, 112 aa, synthetic construct
  REGION 1..112: note = Description of Artificial Sequence: Synthetic polypeptide
DIVMTQTPLSLSVTPGQPASFSCKSSQSLLHSDGKTYLYWYLQKPGQPPQLLIFEVSHRFSGLPDRFSGSGSGTDFTLKISRVEAEDVGVYYCMQSIQHPFTFGGGTRVEIK

SEQ ID NO: 24525 - DNA, 321 bp, synthetic construct
  misc_feature 1..321: note = Description of Artificial Sequence: Synthetic polynucleotide
  source 1..321: mol_type = other DNA
gacatccagatgacccagtctccatcctccctgtctgcatctgtaggagacagagtcaccatcacttgccgggcaagtcagggcattagaaatgatttaggctggtttcagcagaaaccggggaaagcccctaagcgcctgatctatgctgcatccagtttgcaaagtggggtcccatcaaggttcagcggcagtggatctgggacagaattcactctcacaatcagcagcctgcagcctgaagattttgcaacttattactgtctacagcataatacttacccattcactttcggccctgggaccaaagtggatttcaaa

SEQ ID NO: 24526 - protein, 107 aa, synthetic construct
  REGION 1..107: note = Description of Artificial Sequence: Synthetic polypeptide
DIQMTQSPSSLSASVGDRVTITCRASQGIRNDLGWFQQKPGKAPKRLIYAASSLQSGVPSRFSGSGSGTEFTLTISSLQPEDFATYYCLQHNTYPFTFGPGTKVDFK

SEQ ID NO: 24527 - DNA, 321 bp, synthetic construct
  misc_feature 1..321: note = Description of Artificial Sequence: Synthetic polynucleotide
  source 1..321: mol_type = other DNA
gacatccagatgacccagtctccatcctccctgtctgcatctgtaggagacagagtcaccatcacttgccgggcaagtcaggacattagagatgatttaggctggtatcagcagaaaccagggaaagcccctaggcgcctgatctatggtgcattcagcttgcaaagtggggtcccatcaaggttcagcggcagtggatctgggacagaattcactctcacaatcagcagcctgcagcctgaagattttgcaacttattactgtctacagcatactagttaccctcctactttcggcggagggaccaaggtggagatcaaa

SEQ ID NO: 24528 - protein, 107 aa, synthetic construct
  REGION 1..107: note = Description of Artificial Sequence: Synthetic polypeptide
DIQMTQSPSSLSASVGDRVTITCRASQDIRDDLGWYQQKPGKAPRRLIYGAFSLQSGVPSRFSGSGSGTEFTLTISSLQPEDFATYYCLQHTSYPPTFGGGTKVEIK

SEQ ID NO: 24529 - DNA, 321 bp, synthetic construct
  misc_feature 1..321: note = Description of Artificial Sequence: Synthetic polynucleotide
  source 1..321: mol_type = other DNA
gacatccagatgacccagtctccatcctccctgtctgcatctgtaggagacagattcaccatctctttccgggcaagtcaggacattagaagtgatttaggctggtatcagcagaaaccagggaaagcccataagcgcatcatctatgctgcatccagtttgcaaagtggggtcccatcaaggttcagcgtcagtggatctgggacagaattcactttcacaatcagcagcatgcagcctgacgatttttcaaattattactgtatacaacatattatttaccctcctactttcggcggagggaccaaggtggagatcaaa

SEQ ID NO: 24530 - protein, 107 aa, synthetic construct
  REGION 1..107: note = Description of Artificial Sequence: Synthetic polypeptide
DIQMTQSPSSLSASVGDRFTISFRASQDIRSDLGWYQQKPGKAHKRIIYAASSLQSGVPSRFSVSGSGTEFTFTISSMQPDDFSNYYCIQHIIYPPTFGGGTKVEIK

SEQ ID NO: 24531 - DNA, 321 bp, synthetic construct
  misc_feature 1..321: note = Description of Artificial Sequence: Synthetic polynucleotide
  source 1..321: mol_type = other DNA
gacatccagatgacccagtctccatcctcactgtctgcatctgttggagacagagtcaccatcacttgccgggcaagtcaggacattagaaatgatttaggctggtatcagcagaaaccagggaaagcccctaagcgcctgatctatgctgcatccagtttgcaaagtggggtcccatcaaggttcagcggcagtggatctgggacagaattcactctcacagtcagcagcctgcagcctgaagattttgcaacttattactgtctacagcataatagttaccccttcactttcggccctgggaccaaagtggatatcaaa

SEQ ID NO: 24532 - protein, 107 aa, synthetic construct
  REGION 1..107: note = Description of Artificial Sequence: Synthetic polypeptide
DIQMTQSPSSLSASVGDRVTITCRASQDIRNDLGWYQQKPGKAPKRLIYAASSLQSGVPSRFSGSGSGTEFTLTVSSLQPEDFATYYCLQHNSYPFTFGPGTKVDIK

SEQ ID NO: 24533 - DNA, 321 bp, synthetic construct
  misc_feature 1..321: note = Description of Artificial Sequence: Synthetic polynucleotide
  source 1..321: mol_type = other DNA
gacatccagatgacccagtctccatcctcactgtctgcatctgtaggagacagagtcaccatcacttgtcgggcgagtcagggcattagcaattatttagcctggtttcagcagaaaccagggaaagcccctaagtccctgatctatgctgcatccagtttgcaaagtgggttcccatcaaagttcagcggcagtggatctgggacagatttcactctcaccatcagcagcctgcagcctgaagattttgcaacttattactgccaacagtatcatagttacccattcactttcggccctgggaccaaagtggatatcaaa

SEQ ID NO: 24534 - protein, 107 aa, synthetic construct
  REGION 1..107: note = Description of Artificial Sequence: Synthetic polypeptide
DIQMTQSPSSLSASVGDRVTITCRASQGISNYLAWFQQKPGKAPKSLIYAASSLQSGFPSKFSGSGSGTDFTLTISSLQPEDFATYYCQQYHSYPFTFGPGTKVDIK

SEQ ID NO: 24535 - DNA, 321 bp, synthetic construct
  misc_feature 1..321: note = Description of Artificial Sequence: Synthetic polynucleotide
  source 1..321: mol_type = other DNA
gacatccagatgacccagtctccatcctcactgtctgcatctgtaggagacagagtcaccatcacttgtcgggcgagtcaggacattagcaattatttagcctggtttcagcagaaaccagggaaagcccctaagtccctgatctatgctgcatccagtttgcgaagtggggtcccatcaaacttcagcggcagtggatctgggacagatttcactctcaccatcagcagcctgcagcctgaaaattttgcaacttattactgccaacagtatcatagttacccattcactttcggccctgggaccaaagtggatatcaaa

SEQ ID NO: 24536 - protein, 107 aa, synthetic construct
  REGION 1..107: note = Description of Artificial Sequence: Synthetic polypeptide
DIQMTQSPSSLSASVGDRVTITCRASQDISNYLAWFQQKPGKAPKSLIYAASSLRSGVPSNFSGSGSGTDFTLTISSLQPENFATYYCQQYHSYPFTFGPGTKVDIK

SEQ ID NO: 24537 - DNA, 324 bp, synthetic construct
  misc_feature 1..324: note = Description of Artificial Sequence: Synthetic polynucleotide
  source 1..324: mol_type = other DNA
gacatccagatgacccagtctccatcctccctgtctgcatctgtaggagacagaatcaccatcacttgccgggcaagtcagagcattagcagctatttaaattggtatcagcagaaaccagggaaagcccctaaggtcctgatctatgctgcatccagcttgcaaagtggggtcccatcaagattcagtggcagtggatctgggacagatttcactctcaccatcagcagtctgcaacctgaagattttgcaacttactactgtcaacagagttacagtacccctacgtggacgttcggccaagggaccaaggtggaaatcaaa

SEQ ID NO: 24538 - protein, 108 aa, synthetic construct
  REGION 1..108: note = Description of Artificial Sequence: Synthetic polypeptide
DIQMTQSPSSLSASVGDRITITCRASQSISSYLNWYQQKPGKAPKVLIYAASSLQSGVPSRFSGSGSGTDFTLTISSLQPEDFATYYCQQSYSTPTWTFGQGTKVEIK

SEQ ID NO: 24539 - DNA, 321 bp, synthetic construct
  misc_feature 1..321: note = Description of Artificial Sequence: Synthetic polynucleotide
  source 1..321: mol_type = other DNA
gacatccagatgacccagtctccctcttccgtgtctgcatctgtaggagacagagtcaccatcacttgtcgggcgagtcagggtattagtagttggttagcctggtatcagcagaaaccagggaaagcccctaagctcctgatctatggtgcatccagtttgcaaagtggggtcccatcaaggttcagcgccagtggatctgggacagatttcactctcaccatcagcagcctgcagcctgaagattttgcaacttactgttgtcaacagtctgacagtttccctcggacgttcggccaagggaccaaggtggaaatcaaa

SEQ ID NO: 24540 - protein, 107 aa, synthetic construct
  REGION 1..107: note = Description of Artificial Sequence: Synthetic polypeptide
DIQMTQSPSSVSASVGDRVTITCRASQGISSWLAWYQQKPGKAPKLLIYGASSLQSGVPSRFSASGSGTDFTLTISSLQPEDFATYCCQQSDSFPRTFGQGTKVEIK

SEQ ID NO: 24541 - DNA, 321 bp, synthetic construct
  misc_feature 1..321: note = Description of Artificial Sequence: Synthetic polynucleotide
  source 1..321: mol_type = other DNA
gacatccagatgacccagtctccatcctccctgtctgcatctgtaggagacagagtcaccatcacttgccgggcaagtcagggcattagaaatgatttaggctggtatcagcagaaaccagggaaagcccctaagcgcctgatctatattgcatccagtttgcaaagtggggtcccatcaaggttcagcggcagtggatctgggacagaattcactctcacaatcagcagcctgcagcctgaagattttgcaacttattactgtctacagcataatacttacccgtggacgttcggccaagggaccaaggtggaaatcaaa

SEQ ID NO: 24542 - protein, 107 aa, synthetic construct
  REGION 1..107: note = Description of Artificial Sequence: Synthetic polypeptide
DIQMTQSPSSLSASVGDRVTITCRASQGIRNDLGWYQQKPGKAPKRLIYIASSLQSGVPSRFSGSGSGTEFTLTISSLQPEDFATYYCLQHNTYPWTFGQGTKVEIK

SEQ ID NO: 24543 - DNA, 339 bp, synthetic construct
  misc_feature 1..339: note = Description of Artificial Sequence: Synthetic polynucleotide
  source 1..339: mol_type = other DNA
gacatcgtgatgacccagtttccagactccctggctgtgtctctgggcgagagggccaccatcaactgtaagtccagccagagtgttttatacagctcccacaataactactacttaacttggtaccagcagaaaccaggacagcctcataagttgctcctttactgggcatcttcccgggaatccggggtccctgaccgattcagtggcagcgggtctgggacagaattcactctcaccatcagcagcctgcaggctgaagatgtggcagtttattactgtcagcagtattatagtactcctccgacgttcggccaagggaccaaggtggaaatcaaa

SEQ ID NO: 24544 - protein, 113 aa, synthetic construct
  REGION 1..113: note = Description of Artificial Sequence: Synthetic polypeptide
DIVMTQFPDSLAVSLGERATINCKSSQSVLYSSHNNYYLTWYQQKPGQPHKLLLYWASSRESGVPDRFSGSGSGTEFTLTISSLQAEDVAVYYCQQYYSTPPTFGQGTKVEIK

SEQ ID NO: 24545 - DNA, 321 bp, synthetic construct
  misc_feature 1..321: note = Description of Artificial Sequence: Synthetic polynucleotide
  source 1..321: mol_type = other DNA
gacatccagatgacccagtctccatcctcactgtctgcatctgtaggagacagagtcaccatcacttgtcgggcgagtcagggcattagcaattatttagcctggtttcagcagaaaccagggaaagcccctaagtccctgatctctgctgcatccagtttgcaaactggggtcccatcaaagttcagcggcagtggatctgggacagatttcactctcaccatcagcagcctgcagcctgaagattttgcaacttattactgccaacagtataatagttacccattcactttcggccctgggaccaaagtggatatcaaa

SEQ ID NO: 24546 - protein, 107 aa, synthetic construct
  REGION 1..107: note = Description of Artificial Sequence: Synthetic polypeptide
DIQMTQSPSSLSASVGDRVTITCRASQGISNYLAWFQQKPGKAPKSLISAASSLQTGVPSKFSGSGSGTDFTLTISSLQPEDFATYYCQQYNSYPFTFGPGTKVDIK

SEQ ID NO: 24547 - DNA, 321 bp, synthetic construct
  misc_feature 1..321: note = Description of Artificial Sequence: Synthetic polynucleotide
  source 1..321: mol_type = other DNA
gacatccagatgacccagtctccatcctccctgtctgcatctgtaggagacagagtcaccatcacttgccgggcaagtcaggacattagaagtgatttaggctggtatcagcagaaaccagggaaagcccctaagcgcctgatctatgctgtatccagtttgcaaagtggggtcccatcaaggttcagcggcagtggctctgggacagaattcactctcacaatcagcagcctgcagcctgaagattttgccacttattactgtctacagcatactatttaccctcctactttcggcggagggaccaaggtggagatcaaa

SEQ ID NO: 24548 - protein, 107 aa, synthetic construct
  REGION 1..107: note = Description of Artificial Sequence: Synthetic polypeptide
DIQMTQSPSSLSASVGDRVTITCRASQDIRSDLGWYQQKPGKAPKRLIYAVSSLQSGVPSRFSGSGSGTEFTLTISSLQPEDFATYYCLQHTIYPPTFGGGTKVEIK

SEQ ID NO: 24549 - DNA, 321 bp, synthetic construct
  misc_feature 1..321: note = Description of Artificial Sequence: Synthetic polynucleotide
  source 1..321: mol_type = other DNA
gacatccagatgacccagtctccaacctcactgtctgcatctgtcggagacagagtcaccatcacttgtcgggcgagtcaggccattagcaattatttagcctggtttcagcagaaaccagggaaagcccctaagtccctgatctatgatacatccagtttgcaaagtggggtcccatcaaaattcagcggcagtgggtctgggacagatttcactctcaccatcagcaccctacagcctgaagattttgcaacttattactgccaacagtatcatagttacccgctcactttcggcggagggaccaaggtggagatcaag

SEQ ID NO: 24550 - protein, 107 aa, synthetic construct
  REGION 1..107: note = Description of Artificial Sequence: Synthetic polypeptide
DIQMTQSPTSLSASVGDRVTITCRASQAISNYLAWFQQKPGKAPKSLIYDTSSLQSGVPSKFSGSGSGTDFTLTISTLQPEDFATYYCQQYHSYPLTFGGGTKVEIK

SEQ ID NO: 24551 - DNA, 321 bp, synthetic construct
  misc_feature 1..321: note = Description of Artificial Sequence: Synthetic polynucleotide
  source 1..321: mol_type = other DNA
gacatccagatgacccagtctccatcctccctgtctgcatctgtaggagacagagtcaccatcacttgccgggcaagtcagggcattagaaatgatttaggctggtatcagcagaaaccaggaaaagcccctaagcgcctgatctatcgtgcatccagtttgcaaagtggggtcccatcaaggttcagcggcagtggatctgggacagaattcactctcacaatcagcagcctgcagcctgaagattttgcaacttattactgtctacagcataatagttacccattcactttcggccctgggaccaaagtggatatcaaa

SEQ ID NO: 24552 - protein, 107 aa, synthetic construct
  REGION 1..107: note = Description of Artificial Sequence: Synthetic polypeptide
DIQMTQSPSSLSASVGDRVTITCRASQGIRNDLGWYQQKPGKAPKRLIYRASSLQSGVPSRFSGSGSGTEFTLTISSLQPEDFATYYCLQHNSYPFTFGPGTKVDIK

SEQ ID NO: 24553 - DNA, 321 bp, synthetic construct
  misc_feature 1..321: note = Description of Artificial Sequence: Synthetic polynucleotide
  source 1..321: mol_type = other DNA
gacatccagatgacccagtctccatcctccctgtctgcatctgtaggagacagagtcaccatcacttgccgggcaagtcagggcattagaagtgatttaggctggtatcagcagaaaccagggaaagcccctaagcgcctgatctatactgcatccagtttgcagagtggggtcccatcaagattcagcggcagtggatctgggacagaattcactctcacattcagcagcctgcagcctgaagattttgcaacgtattactgtctacagcataatcgttacccgtggacgttcggccaagggaccaaggtggaaatcaaa

SEQ ID NO: 24554 - protein, 107 aa, synthetic construct
  REGION 1..107: note = Description of Artificial Sequence: Synthetic polypeptide
DIQMTQSPSSLSASVGDRVTITCRASQGIRSDLGWYQQKPGKAPKRLIYTASSLQSGVPSRFSGSGSGTEFTLTFSSLQPEDFATYYCLQHNRYPWTFGQGTKVEIK

SEQ ID NO: 24555 - DNA, 321 bp, synthetic construct
  misc_feature 1..321: note = Description of Artificial Sequence: Synthetic polynucleotide
  source 1..321: mol_type = other DNA
gacatccagatgacccagtctccaatttccctgtctgcatctgtaggagacagagtcaccatcacttgccgggcaagtcaggccattagaaatgatttaggctggtatcagcagagaccagggaaagcccctaagcgcctgatctatgctgcatccagtttgcaaagtggggtcccatcaaggttcagcggcagtggatctgggacagaatttattctcacaatcagcagcctgcagcctgaagattttgcaacttattactgtctacagcattataattaccctcgcagttttggccaggggaccaagctggagatcaga

SEQ ID NO: 24556 - protein, 107 aa, synthetic construct
  REGION 1..107: note = Description of Artificial Sequence: Synthetic polypeptide
DIQMTQSPISLSASVGDRVTITCRASQAIRNDLGWYQQRPGKAPKRLIYAASSLQSGVPSRFSGSGSGTEFILTISSLQPEDFATYYCLQHYNYPRSFGQGTKLEIR

SEQ ID NO: 24557 - DNA, 321 bp, synthetic construct
  misc_feature 1..321: note = Description of Artificial Sequence: Synthetic polynucleotide
  source 1..321: mol_type = other DNA
gacatccagatgacccagtctccatcctcactgtctgcatctgtaggagacagagtcaccatcacttgtcgggcgagtcagggcattagcaattatttagcctggtttcagcagaaaccagggaaagcccctaagtccctgatcaatggtgcatccagtttgcaaagtggggtcccatcaaagttcagcggcagtggatctgggacagatttcactctcaccatcagcagcctgcagcctgaagattttgcaacttattactgccaacagtattatagttacccattcactttcggccctgggaccaaagtgaatatcaat

SEQ ID NO: 24558 - protein, 107 aa, synthetic construct
  REGION 1..107: note = Description of Artificial Sequence: Synthetic polypeptide
DIQMTQSPSSLSASVGDRVTITCRASQGISNYLAWFQQKPGKAPKSLINGASSLQSGVPSKFSGSGSGTDFTLTISSLQPEDFATYYCQQYYSYPFTFGPGTKVNIN

SEQ ID NO: 24559 - DNA, 321 bp, synthetic construct
  misc_feature 1..321: note = Description of Artificial Sequence: Synthetic polynucleotide
  source 1..321: mol_type = other DNA
gacatccagatgacccagtctccatcctccctgtctgcatctgtaggagacagagtcaccatcacttgccgggcaagtcagggcattagaaatgatttaggctggtatcagcacaaaccagggaaagcccctaagcgcctgatctatgctgcatccagtttgcaaagtggggtcccatcaaggttcagcggcagtggatctgggacagaattcactctcacaatcagcagcctgcagcctgaagattttgcaacttattactgtctacagcataatagttacccattcactttcggccctgggaccaaagtggatatcaat

SEQ ID NO: 24560 - protein, 107 aa, synthetic construct
  REGION 1..107: note = Description of Artificial Sequence: Synthetic polypeptide
DIQMTQSPSSLSASVGDRVTITCRASQGIRNDLGWYQHKPGKAPKRLIYAASSLQSGVPSRFSGSGSGTEFTLTISSLQPEDFATYYCLQHNSYPFTFGPGTKVDIN

SEQ ID NO: 24561 - DNA, 321 bp, synthetic construct
  misc_feature 1..321: note = Description of Artificial Sequence: Synthetic polynucleotide
  source 1..321: mol_type = other DNA
gacatccagatgacccagtctccatcctccctgtctgcatctgtaggagacagagtcaccatcacttgccgggcaagtcagggcattagaaatgatttaggctggtatcagcagaaatcagggaaaacccctaagcgcctgatctatgctgcatccagtttgcaaagtggggtcccatcaaggttcagcggcagtggatctgggacagaattcactctcacaatcagcagtctgcagcctgaagattttgcaacctattactgtctacagcataatagttacccgctcactttcggcggagggaccaaggtggagatcaaa

SEQ ID NO: 24562 - protein, 107 aa, synthetic construct
  REGION 1..107: note = Description of Artificial Sequence: Synthetic polypeptide
DIQMTQSPSSLSASVGDRVTITCRASQGIRNDLGWYQQKSGKTPKRLIYAASSLQSGVPSRFSGSGSGTEFTLTISSLQPEDFATYYCLQHNSYPLTFGGGTKVEIK

SEQ ID NO: 24563 - DNA, 321 bp, synthetic construct
  misc_feature 1..321: note = Description of Artificial Sequence: Synthetic polynucleotide
  source 1..321: mol_type = other DNA
gacatccagatgacccagtctccatcctccctgtctgcatctgtaggagacagagtcaccatcacttgccgggcaagtcaggacattagaagtgatttaggctggtatcaacagaaaccagggaaagcccctgagcgcctgatctatgctgcatccagtttgcaaagtggggtcccatcaaggttcagcggcagtggatctgggacagaattcactctcacaatcagcagcctgcagcctgaagattttacaacttattactgtctacagcatactatttaccctcctactttcggcggagggaccaaggtggagatcaaa

SEQ ID NO: 24564 - protein, 107 aa, synthetic construct
  REGION 1..107: note = Description of Artificial Sequence: Synthetic polypeptide
DIQMTQSPSSLSASVGDRVTITCRASQDIRSDLGWYQQKPGKAPERLIYAASSLQSGVPSRFSGSGSGTEFTLTISSLQPEDFTTYYCLQHTIYPPTFGGGTKVEIK

SEQ ID NO: 24565 - DNA, 321 bp, synthetic construct
  misc_feature 1..321: note = Description of Artificial Sequence: Synthetic polynucleotide
  source 1..321: mol_type = other DNA
gacatccagatgacccagtctccatcctccctgtctgcatctgtaggagacagagtcaccatcacttgccgggcaagtcagagcattagcaactatttaaattggtatcaacagcaaacagggaaagcccctaagttcctgatctatgctgcatccagtttgcaaagtggggtcccatcaaggttcagtggcagtggatctgggacagatttcactctcaccatcagcagtctgcaacctgaagattttgcaacttactactgtcaacagagttacagtaccccattcactttcggccctgggaccaaagtggatatcaaa

SEQ ID NO: 24566 - protein, 107 aa, synthetic construct
  REGION 1..107: note = Description of Artificial Sequence: Synthetic polypeptide
DIQMTQSPSSLSASVGDRVTITCRASQSISNYLNWYQQQTGKAPKFLIYAASSLQSGVPSRFSGSGSGTDFTLTISSLQPEDFATYYCQQSYSTPFTFGPGTKVDIK

SEQ ID NO: 24567 - DNA, 321 bp, synthetic construct
  misc_feature 1..321: note = Description of Artificial Sequence: Synthetic polynucleotide
  source 1..321: mol_type = other DNA
gacatccagatgatccagtctccatcctccctgtctgcatctgtaggagacagagtcaccatcacttgccgggcaagtcaggacattagaagtgatttaggctggtatcagcagaaaccagggaaagcccctaagcgcctgatctatggtgcatccagtttgcaaagtggggtcccatcaaggttcagcggcagtggatctgggacagaattcactctcacaatcagcagcctgcagcctgaagattttgcaacttattactgtctacagcatattatttaccctcctactttcggcggagggaccaaggtggagatcaaa

SEQ ID NO: 24568 - protein, 107 aa, synthetic construct
  REGION 1..107: note = Description of Artificial Sequence: Synthetic polypeptide
DIQMIQSPSSLSASVGDRVTITCRASQDIRSDLGWYQQKPGKAPKRLIYGASSLQSGVPSRFSGSGSGTEFTLTISSLQPEDFATYYCLQHIIYPPTFGGGTKVEIK

SEQ ID NO: 24569 - DNA, 321 bp, synthetic construct
  misc_feature 1..321: note = Description of Artificial Sequence: Synthetic polynucleotide
  source 1..321: mol_type = other DNA
gacatccagatgacccagtctccatcctccctgtctgcatctgtaggagacagagtcaccatcacttgccgggcaagtcagggcattagaaatgatttaggctggtatcagcggaaaccagggaaagcccctaagcgcctgatctatgctgcatccagtttgcaaagtggggtcccatcaaggttccgcggcagtggatctgggacagaattcactctcacaatcaacagtctgcagcctgaagattttgcaacctattactgtctacagcataatagttacccgctcactttcggcggagggaccaaggtggagatcaaa

SEQ ID NO: 24570 - protein, 107 aa, synthetic construct
  REGION 1..107: note = Description of Artificial Sequence: Synthetic polypeptide
DIQMTQSPSSLSASVGDRVTITCRASQGIRNDLGWYQRKPGKAPKRLIYAASSLQSGVPSRFRGSGSGTEFTLTINSLQPEDFATYYCLQHNSYPLTFGGGTKVEIK

SEQ ID NO: 24571 - DNA, 321 bp, synthetic construct
  misc_feature 1..321: note = Description of Artificial Sequence: Synthetic polynucleotide
  source 1..321: mol_type = other DNA
gacatccagatgacccagtctccatcctccctgtctgcatctgtaggagacagagtcaccatcacttgccgggcaagtcggggcattagaaatgatttaggctggtatcagcagaaaccagggaaagcccctaagcgcctgatctatgctgcattcagtttgcaaagtggggtcccatcaaggttcagcggcagtggatctgggacagaattcactctcacaatcagcagcctgcagcctgaagattttgcaacttattactgtctacagcataatagttacccgctcactttcggcggagggaccaaggtggagatcaaa

SEQ ID NO: 24572 - protein, 107 aa, synthetic construct
  REGION 1..107: note = Description of Artificial Sequence: Synthetic polypeptide
DIQMTQSPSSLSASVGDRVTITCRASRGIRNDLGWYQQKPGKAPKRLIYAAFSLQSGVPSRFSGSGSGTEFTLTISSLQPEDFATYYCLQHNSYPLTFGGGTKVEIK

SEQ ID NO: 24573 - DNA, 339 bp, synthetic construct
  misc_feature 1..339: note = Description of Artificial Sequence: Synthetic polynucleotide
  source 1..339: mol_type = other DNA
gacatcgtgatgacccagtctccagactccctggctgtgtctctgggcgagagggccaccatcaactgcaagtccagccagagtgttttataccgctccaacaattacaactacttagcttggtaccagcacaaaccaggacagcctcctaagctgctcatttactgggcatctacccgggaatccggggtccctgaccgcttcagtggcagcgggtctgggacagatttcactctcaccatcagcagcctgcaggctgaagatgtggcagtttattactgtcagcaatattatagtactcctccgacgttcggccaagggaccaaggtggaattcaaa

SEQ ID NO: 24574 - protein, 113 aa, synthetic construct
  REGION 1..113: note = Description of Artificial Sequence: Synthetic polypeptide
DIVMTQSPDSLAVSLGERATINCKSSQSVLYRSNNYNYLAWYQHKPGQPPKLLIYWASTRESGVPDRFSGSGSGTDFTLTISSLQAEDVAVYYCQQYYSTPPTFGQGTKVEFK

SEQ ID NO: 24575 - DNA, 336 bp, synthetic construct
  misc_feature 1..336: note = Description of Artificial Sequence: Synthetic polynucleotide
  source 1..336: mol_type = other DNA
gatattgtgatgacccagactccactctctctgtccgtcacccctggacagccggcctccatctcctgcaagtctagtcagaccctcctgcatggtgaaggaaagacctatttgtattggtacctgcagaagccaggccagcctccacacctcctgatctatgaagtttccaaccggttctctggagtgccagataggttcagtggcagcgggtcagggacagatttcacactgaaaatcagccgggtggaggctgaggatgttgggatttattactgcatgcaaagtataaagcttccgctcactttcggcggagggaccaaggtggagatcaaa

SEQ ID NO: 24576 - protein, 112 aa, synthetic construct
  REGION 1..112: note = Description of Artificial Sequence: Synthetic polypeptide
DIVMTQTPLSLSVTPGQPASISCKSSQTLLHGEGKTYLYWYLQKPGQPPHLLIYEVSNRFSGVPDRFSGSGSGTDFTLKISRVEAEDVGIYYCMQSIKLPLTFGGGTKVEIK

SEQ ID NO: 24577 - DNA, 321 bp, synthetic construct
  misc_feature 1..321: note = Description of Artificial Sequence: Synthetic polynucleotide
  source 1..321: mol_type = other DNA
gacatccagatgacccagtctccatcttccgtgtctgcatctgtaggagacagagtcaccatcacttgtcgggcgagtcaggctatcaatgactggttagcctggtatcagcagaaaccagggaaagcccctaagctcctgatctatgctgcatccagtttccaaagtggggtcccatcaaggttcagcggcagtggatctgggacagatttcactctcaccatcaccagcctgcagcctgaagattttgcaacttactattgtcaacaggctagcagtttcccattcactttcggccctgggaccaaagtggatatcaaa

SEQ ID NO: 24578 - protein, 107 aa, synthetic construct
  REGION 1..107: note = Description of Artificial Sequence: Synthetic polypeptide
DIQMTQSPSSVSASVGDRVTITCRASQAINDWLAWYQQKPGKAPKLLIYAASSFQSGVPSRFSGSGSGTDFTLTITSLQPEDFATYYCQQASSFPFTFGPGTKVDIK

SEQ ID NO: 24579 - DNA, 321 bp, synthetic construct
  misc_feature 1..321: note = Description of Artificial Sequence: Synthetic polynucleotide
  source 1..321: mol_type = other DNA
gacatccagatgacccagtctccatcctccctgtctgcatctgtaggagacagagtcaccatcacttgccgggcaagtcagggcattagaaatgatttaggctggtatcagcagaaaccagggaaagcccctaagcgcctgatctatgctgcttctagtttgcaaaatggagtcccatcaaggttcagcggcagtggatctgggacagaattcactctcacaatcagcagcctgcagcctgaagattttgcaacttattactgtctacagcataatcgttacccattcactttcggccctgggaccaaagtggatatcaaa

SEQ ID NO: 24580 - protein, 107 aa, synthetic construct
  REGION 1..107: note = Description of Artificial Sequence: Synthetic polypeptide
DIQMTQSPSSLSASVGDRVTITCRASQGIRNDLGWYQQKPGKAPKRLIYAASSLQNGVPSRFSGSGSGTEFTLTISSLQPEDFATYYCLQHNRYPFTFGPGTKVDIK

SEQ ID NO: 24581 - DNA, 321 bp, synthetic construct
  misc_feature 1..321: note = Description of Artificial Sequence: Synthetic polynucleotide
  source 1..321: mol_type = other DNA
gacatccagatgacccagtctccatcctccctgtctgcatctgtaggagacagagtcaccatcacttgccgggcaagtcagggcattagaaatgatttaggctggtatcaacagaaaccagggaaagcccctaagcgcctgatctatgctgcatccagtttacaaagtggggtcccatcaaggttcagcggcagtggatctgggacagaattcactctcacaatcagcagcctgcagcctgaagattttgcaacttattactgtctacagcataatagttacccattcactttcggccctgggaccaaagtggatatcaaa

SEQ ID NO: 24582 - protein, 107 aa, synthetic construct; identical to SEQ ID NO: 24296
  REGION 1..107: note = Description of Artificial Sequence: Synthetic polypeptide

SEQ ID NO: 24583 - DNA, 321 bp, synthetic construct
  misc_feature 1..321: note = Description of Artificial Sequence: Synthetic polynucleotide
  source 1..321: mol_type = other DNA
gacatccagatgacccagtctccatcctccctgtctgcatctgtaggagacagagtcaccatcacttgccgggcaagtcagaacatttacagctatttaaattggtatcagcagaaaccagggaaagaccctaagctcctgatctatgctgcatccagtttgcatagtggggtcccgtcacggttcagtggcagtggttctgggacagatttcactctcaccatcagcagtctgcaacctgaagattttgcaacttactactgtcaacagagttacagtactccgctcactttcggcggagggaccaaggtggagatcaaa

SEQ ID NO: 24584 - protein, 107 aa, synthetic construct
  REGION 1..107: note = Description of Artificial Sequence: Synthetic polypeptide
DIQMTQSPSSLSASVGDRVTITCRASQNIYSYLNWYQQKPGKDPKLLIYAASSLHSGVPSRFSGSGSGTDFTLTISSLQPEDFATYYCQQSYSTPLTFGGGTKVEIK

SEQ ID NO: 24585 - DNA, 321 bp, synthetic construct
  misc_feature 1..321: note = Description of Artificial Sequence: Synthetic polynucleotide
  source 1..321: mol_type = other DNA
gacatccagatgacccagtctccatcctccctgtctgcatctgtaggagacagagtcaccatcacttgccgggcaagtcaggacattagaagtgatttaggctggtatcagcagaaaccagggaaagcccctaagcgcctgatctatgctgcatccagtttgcaaagtggggtcccatcaaggttcagcggcagtggatctgggacagaattcactctcacaatcggcagcctgcagcctgaagattttgcaacttatttctgtctacagcatactatttaccctcctactttcggcggagggaccaaggtggagatcaaa

SEQ ID NO: 24586 - protein, 107 aa, synthetic construct
  REGION 1..107: note = Description of Artificial Sequence: Synthetic polypeptide
DIQMTQSPSSLSASVGDRVTITCRASQDIRSDLGWYQQKPGKAPKRLIYAASSLQSGVPSRFSGSGSGTEFTLTIGSLQPEDFATYFCLQHTIYPPTFGGGTKVEIK

SEQ ID NO: 24587 - DNA, 321 bp, synthetic construct
  misc_feature 1..321: note = Description of Artificial Sequence: Synthetic polynucleotide
  source 1..321: mol_type = other DNA
gacatccagatgacccagtctccatcctccctgtctgcatctataggagacagagtcaccatcacttgccgggcaagtcagggcattagaaatgatttaggctggtatcagcagaaaccagggaaagcccctaagcgcctgatctatcctgcatccagtttgcaaagtggggtcccatcaaggttcagcggcagtggatctgggacagagttcactctcacaatcagcagcctgcagcctgaagattttgcaacttattactgtctacaggataatagttaccctttcactttcggccctgggaccaaagtggatatcaaa

SEQ ID NO: 24588 - protein, 107 aa, synthetic construct
  REGION 1..107: note = Description of Artificial Sequence: Synthetic polypeptide
DIQMTQSPSSLSASIGDRVTITCRASQGIRNDLGWYQQKPGKAPKRLIYPASSLQSGVPSRFSGSGSGTEFTLTISSLQPEDFATYYCLQDNSYPFTFGPGTKVDIK

SEQ ID NO: 24589 - DNA, 321 bp, synthetic construct
  misc_feature 1..321: note = Description of Artificial Sequence: Synthetic polynucleotide
  source 1..321: mol_type = other DNA
gacatccagatgacccagtctccatcttccgtgtctgcatctgtaggagacagagtcaccatcacttgtcgggcgagtcagggtattagcaactggttagcctggtatcagcagaaaccagggaaagcccctaagctcctgatctatactgcatccagtttgcaaggtggggtcccatcaaggttcagcggcagtggatctgggacagatttcactatcagcatcagcagcctgcagcctgaagattttgcaacttactattgtcaacaggctaacagtttcccaatcactttcggccctgggaccaaagtggatatcaaa

SEQ ID NO: 24590 - protein, 107 aa, synthetic construct
  REGION 1..107: note = Description of Artificial Sequence: Synthetic polypeptide
DIQMTQSPSSVSASVGDRVTITCRASQGISNWLAWYQQKPGKAPKLLIYTASSLQGGVPSRFSGSGSGTDFTISISSLQPEDFATYYCQQANSFPITFGPGTKVDIK

SEQ ID NO: 24591 - DNA, 336 bp, synthetic construct
  misc_feature 1..336: note = Description of Artificial Sequence: Synthetic polynucleotide
  source 1..336: mol_type = other DNA
gatatcttgatgacccagactccactctctctgtccgtcacccctggacagccggcctccatctcctgcaagtctagtcagagcctcctgcatagtgagggaaagacctatttgtattggtacctgcagaagccaggccagcctccacagttcctgatctatgaagtttcccaccggctctctggagtgccagataggttcagtggcagcgggtcagggacagatttcacactgaaaatcagccgggttgaggctgaggatgttggggtttattactgcatgcaaagtatacagcttccgctcactttcggcggagggaccaaggtggagatcaaa

SEQ ID NO: 24592 - protein, 112 aa, synthetic construct
  REGION 1..112: note = Description of Artificial Sequence: Synthetic polypeptide
DILMTQTPLSLSVTPGQPASISCKSSQSLLHSEGKTYLYWYLQKPGQPPQFLIYEVSHRLSGVPDRFSGSGSGTDFTLKISRVEAEDVGVYYCMQSIQLPLTFGGGTKVEIK

SEQ ID NO: 24593 - DNA, 321 bp, synthetic construct; identical to SEQ ID NO: 24539
  misc_feature 1..321: note = Description of Artificial Sequence: Synthetic polynucleotide
  source 1..321: mol_type = other DNA

SEQ ID NO: 24594 - protein, 107 aa, synthetic construct; identical to SEQ ID NO: 24540
  REGION 1..107: note = Description of Artificial Sequence: Synthetic polypeptide

SEQ ID NO: 24595 - DNA, 321 bp, synthetic construct
  misc_feature 1..321: note = Description of Artificial Sequence: Synthetic polynucleotide
  source 1..321: mol_type = other DNA
gacatccagatgacccagtctccatcttccgtgtctgcatctgtaggagacagagtcaccatcacttgtcgggcgagtcagggtattagcaactggttagcctggtatcagcagaaaccagggaaagcccctaagctcctgatctctgctgcatccaatttgcaaagtggggtcccatcaaggttcagaggcagtggatctgggacagatttcactctcaccatcaccagcctgcagcctgaagattttgcaacttactgttgtcaacaggctaacagtctcccattcactttcggccctgggaccaaagtggatatcaaa

SEQ ID NO: 24596 - protein, 107 aa, synthetic construct
  REGION 1..107: note = Description of Artificial Sequence: Synthetic polypeptide
DIQMTQSPSSVSASVGDRVTITCRASQGISNWLAWYQQKPGKAPKLLISAASNLQSGVPSRFRGSGSGTDFTLTITSLQPEDFATYCCQQANSLPFTFGPGTKVDIK

SEQ ID NO: 24597 - DNA, 321 bp, synthetic construct
  misc_feature 1..321: note = Description of Artificial Sequence: Synthetic polynucleotide
  source 1..321: mol_type = other DNA
gacatccagatgacccagtctccatcctccctgtctgcatctgtaggagacagagtcaccatcacttgccgggcaagtcagggcattagaaatgatttaggctggtatcagcagaaaccagggaaagcccctaagcgcctgatctatgctgcatccagtttgcaaagtggggtcccatcaaggttcagcggcagtagatctgggacagaattcactctcacaatcagcagtctgcagcctgaagattttgcaacctattactgtctacagcataatagttacccgctcactttcggcggagggaccaaggtggagatcaaa

SEQ ID NO: 24598 - protein, 107 aa, synthetic construct
  REGION 1..107: note = Description of Artificial Sequence: Synthetic polypeptide
DIQMTQSPSSLSASVGDRVTITCRASQGIRNDLGWYQQKPGKAPKRLIYAASSLQSGVPSRFSGSRSGTEFTLTISSLQPEDFATYYCLQHNSYPLTFGGGTKVEIK

SEQ ID NO: 24599 - DNA, 321 bp, synthetic construct
  misc_feature 1..321: note = Description of Artificial Sequence: Synthetic polynucleotide
  source 1..321: mol_type = other DNA
gacatccagatgacccagtctccacattccctgtctgcatctgtaggagacagagtcaccatcacttgccaggcgagtcagtacattagcaactatttaaattggtatcagcagaaatcaggaaaagcccctaagctcctgatctacgatggatccagtttggaaacaggggtcccatcaaggttcagtggaagtggatctgggacagattttactttcaccatcagcagcctgcagcctgaagatcttgcaacatattactgtcaacagtatgataatctcccgatcaccttcggccaagggacacgactggagattaaa

SEQ ID NO: 24600 - protein, 107 aa, synthetic construct
  REGION 1..107: note = Description of Artificial Sequence: Synthetic polypeptide
DIQMTQSPHSLSASVGDRVTITCQASQYISNYLNWYQQKSGKAPKLLIYDGSSLETGVPSRFSGSGSGTDFTFTISSLQPEDLATYYCQQYDNLPITFGQGTRLEIK

SEQ ID NO: 24601 - DNA, 321 bp, synthetic construct
  misc_feature 1..321: note = Description of Artificial Sequence: Synthetic polynucleotide
  source 1..321: mol_type = other DNA
gacatccagatgacccagtctccatcctccctgtctgcatctgtaggagacagagtcaccatcacttgccgggcaagtcagggcattagaaatgatttaggctggtatcagcagaaaccagggaaagcccctaagcgcctggtctatcctgcatccagtttgcaaagtggggtcccatcaaggttcagcggcagtggatctgggacagaattcactctcacaatcagcagcctgcagcctgaagattttgcaacttattactgtctacaggataatagtcatccattcactttcggccctgggaccaaagtggatatcaca

SEQ ID NO: 24602 - protein, 107 aa, synthetic construct
  REGION 1..107: note = Description of Artificial Sequence: Synthetic polypeptide
DIQMTQSPSSLSASVGDRVTITCRASQGIRNDLGWYQQKPGKAPKRLVYPASSLQSGVPSRFSGSGSGTEFTLTISSLQPEDFATYYCLQDNSHPFTFGPGTKVDIT

SEQ ID NO: 24603 - DNA, 321 bp, synthetic construct
  misc_feature 1..321: note = Description of Artificial Sequence: Synthetic polynucleotide
  source 1..321: mol_type = other DNA
gacatccagatgacccagtctccatcttccgtgtctgcatctgtaggagacagagtcaccatcacttgtcgggcgagtcagggtattaccagctggttaacttggtatcagcagagaccagggaaagcccctaaactcctgatctatgatacatccagtttgcaaagtggggtcccatcaaggttcagcggcagtggatctgggacagatttcattttcaccatcagcagcctgcagcctgaagattttgccacttattattgtcaacagggtaacagtttcccattcactttcggccaagggaccaaagtggatatcaaa

SEQ ID NO: 24604 - protein, 107 aa, synthetic construct
  REGION 1..107: note = Description of Artificial Sequence: Synthetic polypeptide
DIQMTQSPSSVSASVGDRVTITCRASQGITSWLTWYQQRPGKAPKLLIYDTSSLQSGVPSRFSGSGSGTDFIFTISSLQPEDFATYYCQQGNSFPFTFGQGTKVDIK

SEQ ID NO: 24605 - DNA, 321 bp, synthetic construct
  misc_feature 1..321: note = Description of Artificial Sequence: Synthetic polynucleotide
  source 1..321: mol_type = other DNA
gacatccagatgacccagtctccatcctccctgtctgcatctgtaggagacagagtcaccatcacttgccgggcaagtcagggcattagaaatgatttaggctggtatcagcagaaaccagggaaagcccctaagcgcctgatctatattgcatccagtttgcaaagtggggtcccatcaaggttcagcggcagtggatctgggacagaattcactctcacaatcagcagcctgcagcctgaagattttgcaacttattactgtctacagcataatagttacccgtggacgttcggccaagggaccaaggtggaaatcaaa

SEQ ID NO: 24606 - protein, 107 aa, synthetic construct
  REGION 1..107: note = Description of Artificial Sequence: Synthetic polypeptide
DIQMTQSPSSLSASVGDRVTITCRASQGIRNDLGWYQQKPGKAPKRLIYIASSLQSGVPSRFSGSGSGTEFTLTISSLQPEDFATYYCLQHNSYPWTFGQGTKVEIK

SEQ ID NO: 24607 - DNA, 321 bp, synthetic construct
  misc_feature 1..321: note = Description of Artificial Sequence: Synthetic polynucleotide
  source 1..321: mol_type = other DNA
gacatccagatgacccagtctccatcttccgtgtctgcatctgtaggagacagagtcaccttcacttgtcgggcgagtcaggatattttcgactggttagcctggtatcagcagaaacccgggacagcccctaagctcctgatctatgctgcatccagtttgcaaagtggggtcccatcaaggttcagcggcagtggatctgggacaaatttcactctcaccgtcagcggcctgcagcctgaagattttgctacttactattgtcaacaggcttacagtttcccgtggacgttcggccaagggaccaaagtggaaatcaaa

SEQ ID NO: 24608 - protein, 107 aa, synthetic construct
  REGION 1..107: note = Description of Artificial Sequence: Synthetic polypeptide
DIQMTQSPSSVSASVGDRVTFTCRASQDIFDWLAWYQQKPGTAPKLLIYAASSLQSGVPSRFSGSGSGTNFTLTVSGLQPEDFATYYCQQAYSFPWTFGQGTKVEIK

SEQ ID NO: 24609 - DNA, 321 bp, synthetic construct
  misc_feature 1..321: note = Description of Artificial Sequence: Synthetic polynucleotide
  source 1..321: mol_type = other DNA
gacatccagatgacccagtctccatcctccctgtctgcgtctgtaggagacagagtcaccatcacttgccgggcaagtcagggcattagaactgatttaggctggtatcagcagaaaccagggaaagcccctaagcgcctgatctatgctgcatccagtttacaaagtggggtcccatcaaggttcagcggcagtggatctgggacagaattcactctcacaatcagtagtctgcagcctgaagattttgcaacctattactgtctacagcataatagttacccgctcactttcggcggagggaccaaggtggagatcaaa

SEQ ID NO: 24610 - protein, 107 aa, synthetic construct
  REGION 1..107: note = Description of Artificial Sequence: Synthetic polypeptide
DIQMTQSPSSLSASVGDRVTITCRASQGIRTDLGWYQQKPGKAPKRLIYAASSLQSGVPSRFSGSGSGTEFTLTISSLQPEDFATYYCLQHNSYPLTFGGGTKVEIK

SEQ ID NO: 24611 - DNA, 336 bp, synthetic construct
  misc_feature 1..336: note = Description of Artificial Sequence: Synthetic polynucleotide
  source 1..336: mol_type = other DNA
gatattgtgatgacccagactccactctctctgtccgtcacccctggacagccggcctccatctcctgcaagtctagtcagagcctcctgcatggtgatggaaagacctatttgtattggtacctgcagaagccaggccagcctccacagctcctgatctatgaagtttccaaccggttctctggagtgccagataggttcagtggcagcgggtcagggacagatttcacactgaaaatcagccgggtggaggctgaggatgttggggtttattactgcatgcaaagtatacagcttccgtggacgttcggccaggggaccaaggtggaaatcaaa

SEQ ID NO: 24612 - protein, 112 aa, synthetic construct
  REGION 1..112: note = Description of Artificial Sequence: Synthetic polypeptide
DIVMTQTPLSLSVTPGQPASISCKSSQSLLHGDGKTYLYWYLQKPGQPPQLLIYEVSNRFSGVPDRFSGSGSGTDFTLKISRVEAEDVGVYYCMQSIQLPWTFGQGTKVEIK

SEQ ID NO: 24613 - DNA, 321 bp, synthetic construct
  misc_feature 1..321: note = Description of Artificial Sequence: Synthetic polynucleotide
  source 1..321: mol_type = other DNA
gacatccagatgacccagtctccatcctccctgtctgcatctgtaggagacagagtcaccatcacttgccgggcaagtcagggcattagaaatgatttaggctggtatcagcagaaaccagggaaagcccctaagcgcctgatctatgttgcatccagtttgcaaagtggggtcccatcaaggttcagcggcagtggatctgggacagaattcactctcacaatcagcagtctgcagcctgaagattttgcaacctattactgtctacagcataatagttacccgctcactttcggcggagggaccaaggtggagatcaaa

SEQ ID NO: 24614 - protein, 107 aa, synthetic construct
  REGION 1..107: note = Description of Artificial Sequence: Synthetic polypeptide
DIQMTQSPSSLSASVGDRVTITCRASQGIRNDLGWYQQKPGKAPKRLIYVASSLQSGVPSRFSGSGSGTEFTLTISSLQPEDFATYYCLQHNSYPLTFGGGTKVEIK

SEQ ID NO: 24615 - DNA, 336 bp, synthetic construct
  misc_feature 1..336: note = Description of Artificial Sequence: Synthetic polynucleotide
  source 1..336: mol_type = other DNA
gaaattgtgatgacccagactccactctctctgtccgtcacccctggacagccggcctccatctcctgcaagtctagtcagagcctcctacatggtgatggaaagacctatttgtattggtacctgcagaagccaggccagcctccacagctcctgatctatgaagtttccaaccggttctctggagtgccagaaaggttcagtggtagcgggtcagggacagatttcacactgaaaatcagccgggtggaggctgaggatgttggggtttattactgtatgcaaagtatacagattccgtggacgttcggccaagggaccaaggtggaaatcaaa

SEQ ID NO: 24616 - protein, 112 aa, synthetic construct
  REGION 1..112: note = Description of Artificial Sequence: Synthetic polypeptide
EIVMTQTPLSLSVTPGQPASISCKSSQSLLHGDGKTYLYWYLQKPGQPPQLLIYEVSNRFSGVPERFSGSGSGTDFTLKISRVEAEDVGVYYCMQSIQIPWTFGQGTKVEIK

SEQ ID NO: 24617 - DNA, 321 bp, synthetic construct
  misc_feature 1..321: note = Description of Artificial Sequence: Synthetic polynucleotide
  source 1..321: mol_type = other DNA
gacatccagatgacccagtctccatcctccctgtctgcatctgtaggagacagagtcaccatcacttgccgggcaagtcagggcattagaaatgatttaggctggtatcagcagaaaccagggaaagcccctaagcgcctgatctatactgcatccagtttgcaaagtggggtcccatcaaggttcagcggcagtggatctgggacagaattcactctcacaatcagcagcctgcagcctgaagattttgcaacttattactgtctacagcataatagttacccattcactttcggccctgggaccaaagtggatatcaaa

SEQ ID NO: 24618 - protein, 107 aa, synthetic construct
  REGION 1..107: note = Description of Artificial Sequence: Synthetic polypeptide
DIQMTQSPSSLSASVGDRVTITCRASQGIRNDLGWYQQKPGKAPKRLIYTASSLQSGVPSRFSGSGSGTEFTLTISSLQPEDFATYYCLQHNSYPFTFGPGTKVDIK

SEQ ID NO: 24619 - DNA, 321 bp, synthetic construct
  misc_feature 1..321: note = Description of Artificial Sequence: Synthetic polynucleotide
  source 1..321: mol_type = other DNA
gacatccagatgacccagtctccatcctccctgtctgcatctgtaggagacagagtcaccatcacttgccgggcaagtcaggacattagagatgatttaggctggtatcagcagaaaccagggaaagcccctaggcgcctgatctatgctgcattcagcttgcaaagtggggtcccatcaaggttcagcggcagtggatctgggacagaattcactctcacaatcagcagcctgcagcctgaagattttgcaacttattactgtctacagcatactagttaccctcctactttcggcggagggaccaaggtggagatcaaa

SEQ ID NO: 24620 - protein, 107 aa, synthetic construct
  REGION 1..107: note = Description of Artificial Sequence: Synthetic polypeptide
DIQMTQSPSSLSASVGDRVTITCRASQDIRDDLGWYQQKPGKAPRRLIYAAFSLQSGVPSRFSGSGSGTEFTLTISSLQPEDFATYYCLQHTSYPPTFGGGTKVEIK

SEQ ID NO: 24621 - DNA, 321 bp, synthetic construct
  misc_feature 1..321: note = Description of Artificial Sequence: Synthetic polynucleotide
  source 1..321: mol_type = other DNA
gacatccagatgacccagtctccatcctccctgtctgcatctgtaggagacagagtcaccatcacttgccgggcaagtcagaggattagcagctatttaaattggtatcagcagaaaccagggaaagcccctaagctcctgatctttgctgcatccagttcgcaaagtggggtcccatcaaggttcagtggcagtggatctgggacagatttcactctcaccatcagcagtctgcaacctgaagattttgcaacttactactgtcaacagagttacattaccccgctcactttcggcggagggaccacggtggagatcaga

SEQ ID NO: 24622 - protein, 107 aa, synthetic construct
  REGION 1..107: note = Description of Artificial Sequence: Synthetic polypeptide
DIQMTQSPSSLSASVGDRVTITCRASQRISSYLNWYQQKPGKAPKLLIFAASSSQSGVPSRFSGSGSGTDFTLTISSLQPEDFATYYCQQSYITPLTFGGGTTVEIR

SEQ ID NO: 24623 - DNA, 324 bp, synthetic construct
  misc_feature 1..324: note = Description of Artificial Sequence: Synthetic polynucleotide
  source 1..324: mol_type = other DNA
gaaatagtgatgacgcagtctccagccaccctgtctgtgtctccaggggaaagagccaccctctcctgcagggccagtcagagtgttagaagtaatttagcctggtaccagcagaaacctggccaggctcccaggctcctcatctatggtgcatccaccagggccactggtatcccagccaggttcagtggcagtgggtctgggacagagttcactctcaccatcagcagcctgcagtctgaagattttgcactttattactgtcagcagtataataattggcctccgtggccgttcggccaagggaccaaggtggaaatcaaa

SEQ ID NO: 24624 - protein, 108 aa, synthetic construct
  REGION 1..108: note = Description of Artificial Sequence: Synthetic polypeptide
EIVMTQSPATLSVSPGERATLSCRASQSVRSNLAWYQQKPGQAPRLLIYGASTRATGIPARFSGSGSGTEFTLTISSLQSEDFALYYCQQYNNWPPWPFGQGTKVEIK

SEQ ID NO: 24625 - DNA, 321 bp, synthetic construct
  misc_feature 1..321: note = Description of Artificial Sequence: Synthetic polynucleotide
  source 1..321: mol_type = other DNA
gacatccagatgacccagtctccatcctccctgtctgcatctgtaggagacagagtcaccgtcacttgccgggcaagtcaggccattagagatgatttaggctggtatcagcagagaccagggaaagcccctaagcgcctgatctatgctgcatccagtttgcaaagtggggtcccatcaaggttcagcggcagtggatctgggacagaatttattctcacaatcagcagcctgcagcctgaagattttgcaacttattactgtctacagcattataattaccctcgcagttttggccaggggaccaagctggagatcaaa

SEQ ID NO: 24626 - protein, 107 aa, synthetic construct
  REGION 1..107: note = Description of Artificial Sequence: Synthetic polypeptide
DIQMTQSPSSLSASVGDRVTVTCRASQAIRDDLGWYQQRPGKAPKRLIYAASSLQSGVPSRFSGSGSGTEFILTISSLQPEDFATYYCLQHYNYPRSFGQGTKLEIK

SEQ ID NO: 24627 - DNA, 321 bp, synthetic construct
  misc_feature 1..321: note = Description of Artificial Sequence: Synthetic polynucleotide
  source 1..321: mol_type = other DNA
gacatccagatgacccagtctccatcctccctgtctgcatctgtaggagacagagtcaccatcacttgccgggcaagtcagggcattagaaatgatttaggctggtatcagcagaaaccagggaaagcccctaagcgcctgatctatgctgcatccagtttgcaaagtggggtcccatcaaggttcagcggcagtggatctgggacagaattcactctcacaatcagcagtctgcagcctgaagattttgcaacctattactgtctacagcataatcgttacccgctcactttcggcggagggaccaaggtggagatcaaa

SEQ ID NO: 24628 - protein, 107 aa, synthetic construct
  REGION 1..107: note = Description of Artificial Sequence: Synthetic polypeptide
DIQMTQSPSSLSASVGDRVTITCRASQGIRNDLGWYQQKPGKAPKRLIYAASSLQSGVPSRFSGSGSGTEFTLTISSLQPEDFATYYCLQHNRYPLTFGGGTKVEIK

SEQ ID NO: 24629 - DNA, 324 bp, synthetic construct
  misc_feature 1..324: note = Description of Artificial Sequence: Synthetic polynucleotide
  source 1..324: mol_type = other DNA
gaaatagtgatgacgcagtctccagccaccctgtctgtgtctccaggggaaagagccaccctctcctgcagggccagtcagagtgttagcagcaacttagcctggtaccatcagaaacctggccaggctcccaggctcctcatctatggtgcatccaccagggccactggtatcccagccaggttcagtggcagtgggtctgggacagagttcactctcaccatcagcagcctgcagtctgaagattttgcactttattactgtcagcagtataataattggcctccgtggccgttcggccaagggaccaaggtggaaatcaaa

SEQ ID NO: 24630 - protein, 108 aa, synthetic construct
  REGION 1..108: note = Description of Artificial Sequence: Synthetic polypeptide
EIVMTQSPATLSVSPGERATLSCRASQSVSSNLAWYHQKPGQAPRLLIYGASTRATGIPARFSGSGSGTEFTLTISSLQSEDFALYYCQQYNNWPPWPFGQGTKVEIK

SEQ ID NO: 24631 - DNA, 321 bp, synthetic construct
  misc_feature 1..321: note = Description of Artificial Sequence: Synthetic polynucleotide
  source 1..321: mol_type = other DNA
gacatccagatgacccagtctccatcctccctgtctgcatctgtaggagacagagtcaccatcacttgccgggcaagtcagggcattagaaatgatttaggctggtatcagctgaaaccagggaaagcccctaagcgcctgatctatgctgcatccagtttgcaaagtggggtcccatcaaggttcagcggcagtggatctgggacagaattcactctcacaatcagcagcctgcagcctgaagattttgcaacttataactgtctacagcataatagttatccgctcactttcggcggagggaccaaggtggagatcaaa

SEQ ID NO: 24632 - protein, 107 aa, synthetic construct
  REGION 1..107: note = Description of Artificial Sequence: Synthetic polypeptide
DIQMTQSPSSLSASVGDRVTITCRASQGIRNDLGWYQLKPGKAPKRLIYAASSLQSGVPSRFSGSGSGTEFTLTISSLQPEDFATYNCLQHNSYPLTFGGGTKVEIK

SEQ ID NO: 24633 - DNA, 321 bp, synthetic construct
  misc_feature 1..321: note = Description of Artificial Sequence: Synthetic polynucleotide
  source 1..321: mol_type = other DNA
gacatccagatgacccagtctccatcctccctgtctgcatctgtaggagacagagtcaccatcacttgccgggcaagtcagggcattagaaatgatttaggctggtatcagcagaaaccagggaaagcccctaagcgcctgatctatactgcatccagtttacaaagtggggtcccatcaaggttcagcggcagtggatctgggacagatttcactctcacaatcagcagcctgcagcctgaagattttgcaagttattactgtctacagcataatagttacccgttcactttcggcggagggaccaaggtggagatcaaa

SEQ ID NO: 24634 - protein, 107 aa, synthetic construct
  REGION 1..107: note = Description of Artificial Sequence: Synthetic polypeptide
DIQMTQSPSSLSASVGDRVTITCRASQGIRNDLGWYQQKPGKAPKRLIYTASSLQSGVPSRFSGSGSGTDFTLTISSLQPEDFASYYCLQHNSYPFTFGGGTKVEIK

SEQ ID NO: 24635 - DNA, 321 bp, synthetic construct
  misc_feature 1..321: note = Description of Artificial Sequence: Synthetic polynucleotide
  source 1..321: mol_type = other DNA
gacatccagatgacacagtctccatcctccctgtctgcatctgtaggagacagagtcaccatcacttgccgggcaagtcaggacattagagatgatttaggctggtatcagcagaaaccagggaaagcccctaggcgcctgatctatgctgcattcagcttgcaaagtggggtcccatcaaggttcagcggcagtggatctgggacagaattcactctcacaatcagcagcctgcagcctgaagattttgcaacttattactgtctacagcatactagttaccctcctactttcggcggagggaccaaggtggagatcaaa

SEQ ID NO: 24636 - protein, 107 aa, synthetic construct; identical to SEQ ID NO: 24620
  REGION 1..107: note = Description of Artificial Sequence: Synthetic polypeptide

SEQ ID NO: 24637 - DNA, 321 bp, synthetic construct
  misc_feature 1..321: note = Description of Artificial Sequence: Synthetic polynucleotide
  source 1..321: mol_type = other DNA
gacatccagatgacccagtctccatcctccctgtctgcatctgtaggagacagagtcaccatcacttgccgggcaagtcaggacattagaagtgatttaggctggtatcagcagagaccaggaaaagcccctaagcgcctgatctatgctgcatccagtttgcaaagtggggtcccatcaaggttcagcggcagtggatctgggacagaattcactctcacaatcagcagcctacagcctgaagattttgcaacttattactgtctgcagcatactatttaccctcctactttcggcggagggaccaaggtggagatcaaa

SEQ ID NO: 24638 - protein, 107 aa, synthetic construct
  REGION 1..107: note = Description of Artificial Sequence: Synthetic polypeptide
DIQMTQSPSSLSASVGDRVTITCRASQDIRSDLGWYQQRPGKAPKRLIYAASSLQSGVPSRFSGSGSGTEFTLTISSLQPEDFATYYCLQHTIYPPTFGGGTKVEIK

SEQ ID NO: 24639 - DNA, 321 bp, synthetic construct
  misc_feature 1..321: note = Description of Artificial Sequence: Synthetic polynucleotide
  source 1..321: mol_type = other DNA
gacatccagatgacccagtctccatcctccctgtctgcatctgttggagacagagtcaccatcacttgccaggcgagtcaggacatttccaactttttaaattggtttcggcagaaaccaggaaaagcccctaactccctgatctacgatgcatccaatttggtaacaggggtcccatcaaggttcagtggacgtggatctgggacagattttactttcaccatcagcagcctgcagcctgaagattttgcaacatattactgtcaacagtatgataatctcccgatcaccttcggccaagggacacggctggagattaaa

SEQ ID NO: 24640 - protein, 107 aa, synthetic construct
  REGION 1..107: note = Description of Artificial Sequence: Synthetic polypeptide
DIQMTQSPSSLSASVGDRVTITCQASQDISNFLNWFRQKPGKAPNSLIYDASNLVTGVPSRFSGRGSGTDFTFTISSLQPEDFATYYCQQYDNLPITFGQGTRLEIK

SEQ ID NO: 24641 - DNA, 321 bp, synthetic construct
  misc_feature 1..321: note = Description of Artificial Sequence: Synthetic polynucleotide
  source 1..321: mol_type = other DNA
gacatccagatgacccagtctccatcctccctgtctgcatctgtaggagacagagtcaccatcacttgccgggcaagtcagagcattagcaggtatttaagttggtatcagcagaaaccagggagagcccctaacctccagatctatgctgcatccagtttgcaaagtggggtcccatcaaggttcagtggcagtggatctgggacagatttcactctcaccatcagcagtctgcaacctgaagattttgcaacttactactgtcaacagagttacaatatcccgatcaccttcggccaagggacacgactggagattaaa

SEQ ID NO: 24642 - protein, 107 aa, synthetic construct
  REGION 1..107: note = Description of Artificial Sequence: Synthetic polypeptide
DIQMTQSPSSLSASVGDRVTITCRASQSISRYLSWYQQKPGRAPNLQIYAASSLQSGVPSRFSGSGSGTDFTLTISSLQPEDFATYYCQQSYNIPITFGQGTRLEIK

SEQ ID NO: 24643 - DNA, 321 bp, synthetic construct
  misc_feature 1..321: note = Description of Artificial Sequence: Synthetic polynucleotide
  source 1..321: mol_type = other DNA
gacatccagatgacccagtctccatcctccctgtctgcatctgttggagacagagtcaccatcacttgccgggcaagtcagaacatttacagctatttaaattggtatcagcagaaaccagggaaagaccctaaactcctgatctatgctgcatccagtttgcatagtggggtcccgtcacggttcagtggcagtggttctgggacagatttcactctcaccatcagcagtctgcaacctgaagattttgcaactttctactgtcaacagagttacagtactccgctcactttcggcggagggaccaaggtggagatcaaa

SEQ ID NO: 24644 - protein, 107 aa, synthetic construct
  REGION 1..107: note = Description of Artificial Sequence: Synthetic polypeptide
DIQMTQSPSSLSASVGDRVTITCRASQNIYSYLNWYQQKPGKDPKLLIYAASSLHSGVPSRFSGSGSGTDFTLTISSLQPEDFATFYCQQSYSTPLTFGGGTKVEIK

SEQ ID NO: 24645 - DNA, 321 bp, synthetic construct
  misc_feature 1..321: note = Description of Artificial Sequence: Synthetic polynucleotide
  source 1..321: mol_type = other DNA
gacatccagatgacccagtctccatcctccctgtctgcatctgtaggagacagagtcaccatcacttgccgggcaagtcaggacattagaagtgatttaggctggtatcagcagaaaccagggaaagcccctaagcgcctgatctatgctgcatccagtttgcaaagtggggtcccatcaaggttcaccggcagtggctctgggacagaattcactctcacaatcagcagcctgcagcctgaagcttttgcaatttattactgtctccagcatactatttaccctcctactttcggcggagggaccaaggtgtggatcaaa

SEQ ID NO: 24646 - protein, 107 aa, synthetic construct
  REGION 1..107: note = Description of Artificial Sequence: Synthetic polypeptide
DIQMTQSPSSLSASVGDRVTITCRASQDIRSDLGWYQQKPGKAPKRLIYAASSLQSGVPSRFTGSGSGTEFTLTISSLQPEAFAIYYCLQHTIYPPTFGGGTKVWIK

SEQ ID NO: 24647 - DNA, 321 bp, synthetic construct
  misc_feature 1..321: note = Description of Artificial Sequence: Synthetic polynucleotide
  source 1..321: mol_type = other DNA
gacatccagatgacccagtctccatcctccctgtctgcatctgtaggagacagagtcaccatcacttgccgggcaagtcaggacattagaagtgatttaggctggtatcagcagaaaccagggaaagcccctaagcgcctgatctatgctgcatccagtttgcaaagtggggtcccatcaaggttcaccggcagtggatctgggacagaattcactctcacaatcagcagcgtgcagcctgaagattttgcaacttattactgtctccatcatcctatttaccctcctactttcggcggagggaccaaggtgtggatcaaa

SEQ ID NO: 24648 - protein, 107 aa, synthetic construct
  REGION 1..107: note = Description of Artificial Sequence: Synthetic polypeptide
DIQMTQSPSSLSASVGDRVTITCRASQDIRSDLGWYQQKPGKAPKRLIYAASSLQSGVPSRFTGSGSGTEFTLTISSVQPEDFATYYCLHHPIYPPTFGGGTKVWIK

SEQ ID NO: 24649 - DNA, 321 bp, synthetic construct
  misc_feature 1..321: note = Description of Artificial Sequence: Synthetic polynucleotide
  source 1..321: mol_type = other DNA
gacatccagatgacccagtctccatcctccctgtctgcatctgtaggagacagagtcaccatcacttgccggacaagtcagggcattagaaatgatttaggctggtttcagcagaaaccagggaaagcccctaagcgcctgatctatactgcatccagtttgcaaagtggggtcccatcaaggttcagcggcagtggatctgggacagaattcactctcacaattagcagcctgcagcctgaagattttgcaacttattactgtctacagcataatagttacccgctcactttcggcggagggaccaaggtggaggtcaaa

SEQ ID NO: 24650 - protein, 107 aa, synthetic construct
  REGION 1..107: note = Description of Artificial Sequence: Synthetic polypeptide
DIQMTQSPSSLSASVGDRVTITCRTSQGIRNDLGWFQQKPGKAPKRLIYTASSLQSGVPSRFSGSGSGTEFTLTISSLQPEDFATYYCLQHNSYPLTFGGGTKVEVK

SEQ ID NO: 24651 - DNA, 321 bp, synthetic construct
  misc_feature 1..321: note = Description of Artificial Sequence: Synthetic polynucleotide
  source 1..321: mol_type = other DNA
gacatccagatgacccagtctccatcctccctgtctgcatctgtaggagacagagtcaccatcacttgccgggcaagtcaggacattagaaatgatgtaggctggtatcagcagaaaccagggaaagcccctgagcgcctgatctatgctgcatccagtttgcaacgtggggtcccatcaaggttcagcggcagtggatctgggacagaattcactctcacaatcagcagcctgcagcctgaagattttgcaagatattactgtctacagcattatagttaccctcctactttcggcggagggaccaaggtggagatcaaa

SEQ ID NO: 24652 - protein, 107 aa, synthetic construct
  REGION 1..107: note = Description of Artificial Sequence: Synthetic polypeptide
DIQMTQSPSSLSASVGDRVTITCRASQDIRNDVGWYQQKPGKAPERLIYAASSLQRGVPSRFSGSGSGTEFTLTISSLQPEDFARYYCLQHYSYPPTFGGGTKVEIK

SEQ ID NO: 24653 - DNA, 321 bp, synthetic construct
  misc_feature 1..321: note = Description of Artificial Sequence: Synthetic polynucleotide
  source 1..321: mol_type = other DNA
gacatccagatgacccagtctccatcctcactgtctgcatttgtaggagacagagtcaccatcacttgttgggcgagtcagggcattaacagttatttagcctggtttcagcagagaccagggaaagcccataagtccttgatctatgctgcatccagtttgcaaggtggggtcccatcaaagttcagcggcagtggatctgggacagatttcattctcaccatcagcagcctgcagcgtgaagattttgcaacttattactgccaacagtttaatagttaccctctgacgttcggccaagggaccaaggtggaaatcaaa

SEQ ID NO: 24654 - protein, 107 aa, synthetic construct
  REGION 1..107: note = Description of Artificial Sequence: Synthetic polypeptide
DIQMTQSPSSLSAFVGDRVTITCWASQGINSYLAWFQQRPGKAHKSLIYAASSLQGGVPSKFSGSGSGTDFILTISSLQREDFATYYCQQFNSYPLTFGQGTKVEIK

SEQ ID NO: 24655 - DNA, 321 bp, synthetic construct
  misc_feature 1..321: note = Description of Artificial Sequence: Synthetic polynucleotide
  source 1..321: mol_type = other DNA
gacatccagatgacccagtctccgtcttccgtgtctgcaactgtaggagacagagtcaccagcacttgtcgggcgagtcagggtattagtaagtggttagcctggtatcagcagaagccagggaaagcccctaaactcctgatctatgctgcatccagtttgcaaagtggggtcccatcaaggttcagcggcagtggatctgggacagatttcactctcaccatcagcagcctgcagcctgaagactctgcaacttactattgtcaacaggctaacagtttccctttcactttcggccctgggaccaaagtggatatcaaa

SEQ ID NO: 24656 - protein, 107 aa, synthetic construct
  REGION 1..107: note = Description of Artificial Sequence: Synthetic polypeptide
DIQMTQSPSSVSATVGDRVTSTCRASQGISKWLAWYQQKPGKAPKLLIYAASSLQSGVPSRFSGSGSGTDFTLTISSLQPEDSATYYCQQANSFPFTFGPGTKVDIK

SEQ ID NO: 24657 - DNA, 321 bp, synthetic construct
  misc_feature 1..321: note = Description of Artificial Sequence: Synthetic polynucleotide
  source 1..321: mol_type = other DNA
gacatccagatgacccagtttccatcttccctgtctacatctgtaggagacagagtcaccagcacttgccgggcaagtcagaacattaggaactttttaaattggtatcagcagaaacctgagaaagaccctaagctccagatctatggtgcatccactttgcaaagtggggtcccatcaaggttcagtggcagtggatttgggacagatttcactctcaccatcagtagtctgcaacctaaagattttgcaacttactactgtcaacagacttgcagtaccccgctcactttcggcggagggaccaaggtggagatcaaa

SEQ ID NO: 24658 - protein, 107 aa, synthetic construct
  REGION 1..107: note = Description of Artificial Sequence: Synthetic polypeptide
DIQMTQFPSSLSTSVGDRVTSTCRASQNIRNFLNWYQQKPEKDPKLQIYGASTLQSGVPSRFSGSGFGTDFTLTISSLQPKDFATYYCQQTCSTPLTFGGGTKVEIK

SEQ ID NO: 24659 - DNA, 321 bp, synthetic construct
  misc_feature 1..321: note = Description of Artificial Sequence: Synthetic polynucleotide
  source 1..321: mol_type = other DNA
gacatccagatgacccagtctccatcttccgtgtctgcatctgtaggagacagagtcaccatcacttgtcgggcgagtcagggtattagcaaatggttagcctggtatcagcagaaaccagggaaagcccctaaacccctgatctatgctgcatccagtttgcagagtggggtcccaacaaggttcagcggcagtggatctgggacagatttcactctcaccatcagcagcctgcagcctgaagattttgcaatttactattgtcaacaggctaacagtttcccattcactttcggccctgggaccaaagtggatatcaaa

SEQ ID NO: 24660 - protein, 107 aa, synthetic construct
  REGION 1..107: note = Description of Artificial Sequence: Synthetic polypeptide
DIQMTQSPSSVSASVGDRVTITCRASQGISKWLAWYQQKPGKAPKPLIYAASSLQSGVPTRFSGSGSGTDFTLTISSLQPEDFAIYYCQQANSFPFTFGPGTKVDIK

SEQ ID NO: 24661 - DNA, 321 bp, synthetic construct
  misc_feature 1..321: note = Description of Artificial Sequence: Synthetic polynucleotide
  source 1..321: mol_type = other DNA
gacatccagatgacccagtctccatcttccgtgtctgcatctgtaggagacagagtcaccatcacttgtcgggcgagtcagggtattagcagatggttagcctggtatcagcagaaaccagggaaagcccctgaactcctgatctatgctgcatcccgtttgcaaagtgggatcccatccaggttcagcggcagtggatctgggacagacttcactctcaccatcagcagcctgcagcctgaagattttgcaacttactattgtcaacaggctaacagtttccctttcactttcggccctgggaccaaagtggatatcaaa

SEQ ID NO: 24662 - protein, 107 aa, synthetic construct
  REGION 1..107: note = Description of Artificial Sequence: Synthetic polypeptide
DIQMTQSPSSVSASVGDRVTITCRASQGISRWLAWYQQKPGKAPELLIYAASRLQSGIPSRFSGSGSGTDFTLTISSLQPEDFATYYCQQANSFPFTFGPGTKVDIK

SEQ ID NO: 24663 - DNA, 339 bp, synthetic construct
  misc_feature 1..339: note = Description of Artificial Sequence: Synthetic polynucleotide
  source 1..339: mol_type = other DNA
gacatcgtgatgacccagtctccagactccctgtctgtgtctttgggcgagagggccaccatcaactgcaagtccatccagagtgttttatacagatccaacaataagaactacttaacttggtatcagcagaaaccaggacagcctcgtaaactgttcatttattgggcatctacccgggaatccggggtccttgaccgattcagtggcagcgggtgtgggacagatttcactctcaccatcatcagcctgcaggctgaagatgtggcactttattactgtcagcaatattatagttctccgtgcagttttggccaggggaccaagctggagatcaaa

SEQ ID NO: 24664 - protein, 113 aa, synthetic construct
  REGION 1..113: note = Description of Artificial Sequence: Synthetic polypeptide
DIVMTQSPDSLSVSLGERATINCKSIQSVLYRSNNKNYLTWYQQKPGQPRKLFIYWASTRESGVLDRFSGSGCGTDFTLTIISLQAEDVALYYCQQYYSSPCSFGQGTKLEIK

SEQ ID NO: 24665 - DNA, 321 bp, synthetic construct
  misc_feature 1..321: note = Description of Artificial Sequence: Synthetic polynucleotide
  source 1..321: mol_type = other DNA
gacatccagatgacccagtctccatcctcactgtctgcatctgtaggagacagagtcaccatcacttgtcgggcgagtcagggcattagcaattacttagcctggtttcagcagaaaccagggaaagcccctaagtccctgatctctgctgcatccagtttgcaaagtggggtcccatcaaagttcagcggcagtggatctgggacagatttcactctcaccatcagcagcctgcagcctgaagattttgcaacttattactgccaacagtataatagttacccattcactttcggccctgggaccaacgtggatatcaaa

SEQ ID NO: 24666 - protein, 107 aa, synthetic construct
  REGION 1..107: note = Description of Artificial Sequence: Synthetic polypeptide
DIQMTQSPSSLSASVGDRVTITCRASQGISNYLAWFQQKPGKAPKSLISAASSLQSGVPSKFSGSGSGTDFTLTISSLQPEDFATYYCQQYNSYPFTFGPGTNVDIK

SEQ ID NO: 24667 - DNA, 321 bp, synthetic construct
  misc_feature 1..321: note = Description of Artificial Sequence: Synthetic polynucleotide
  source 1..321: mol_type = other DNA
gacatccagatgacccagtctccatcctccctgtctacatctgtaggagacagagtcaccatcacttgccgggcaagtcagagcattatcagctatttaaattggtatcagcagaaaccagggaaagcccctaaactcctgatctatgttgcatccagtttgcaaggtggggtcccatcaaggttcaatggcagtggatctgggacagatttcactctcaccatcagcagtctgcaacctgaagattttgcaacttactactgtcaacagagttacagtaccccgtacactttcggcggggggaccaaggtggagatcaaa

SEQ ID NO: 24668 - protein, 107 aa, synthetic construct
  REGION 1..107: note = Description of Artificial Sequence: Synthetic polypeptide
DIQMTQSPSSLSTSVGDRVTITCRASQSIISYLNWYQQKPGKAPKLLIYVASSLQGGVPSRFNGSGSGTDFTLTISSLQPEDFATYYCQQSYSTPYTFGGGTKVEIK

SEQ ID NO: 24669 - DNA, 321 bp, synthetic construct
  misc_feature 1..321: note = Description of Artificial Sequence: Synthetic polynucleotide
  source 1..321: mol_type = other DNA
gacatccagatgacccagtctccatcctccctgtctgcatctgtaggagacagagtcaccatcacttgccgggcaagtcagggcattagaaatgatttaggctggtatcaacagaaaccagggaaagcccctaagcgcctgatctatactgcatccaatttgcaaagtggggtcccatcaaggttcagcggcagtggatctgggacagaattcactctcacaatcagcagcctgcagcctgaagattttgcaacttattactgtctacaacatagttcttaccccatcaccttcggccaagggacacgactggagattaaa

SEQ ID NO: 24670 - protein, 107 aa, synthetic construct
  REGION 1..107: note = Description of Artificial Sequence: Synthetic polypeptide
DIQMTQSPSSLSASVGDRVTITCRASQGIRNDLGWYQQKPGKAPKRLIYTASNLQSGVPSRFSGSGSGTEFTLTISSLQPEDFATYYCLQHSSYPITFGQGTRLEIK

SEQ ID NO: 24671 - DNA, 321 bp, synthetic construct
  misc_feature 1..321: note = Description of Artificial Sequence: Synthetic polynucleotide
  source 1..321: mol_type = other DNA
gacatccagatgacccagtctccatcctccctgtctgcatctgtaggagacagagtcaccatcacttgccgggcaagtcaggacattagaagtgatttaggctggtatcagcagaaaccagggaaagcccctaagcgcctgatctatgctgcatccagtttgcaaagtggggtcccatccaggttcagcggcagtggatctgggacagaattcactctcacagtcatcagcctgcagcctgaagattttgcaacttattactgtctacagcatactatttaccctcctactttcggcggagggaccaaggtggggatcaaa

SEQ ID NO: 24672 - protein, 107 aa, synthetic construct
  REGION 1..107: note = Description of Artificial Sequence: Synthetic polypeptide
DIQMTQSPSSLSASVGDRVTITCRASQDIRSDLGWYQQKPGKAPKRLIYAASSLQSGVPSRFSGSGSGTEFTLTVISLQPEDFATYYCLQHTIYPPTFGGGTKVGIK

SEQ ID NO: 24673 - DNA, 321 bp, synthetic construct
  misc_feature 1..321: note = Description of Artificial Sequence: Synthetic polynucleotide
  source 1..321: mol_type = other DNA
gacatccagatgacccagtctccatcttccgtgtctgcatctgtaggcgacagactcaccatcacttgtcgggcgagtcagggtattagccggtggttagcctggtatcagcagaaagtggggaaagtccccaaactcctgatctatgctgcatccaggttgcaaagtggggtcccatcaaggttcagcggcagtggatctgggacagctttcactctcaccatcggcagcctgcagcctgaagattttgcaacttactattgtcaacaggctaacagtttcccgttcactttcggccctgggaccaaagtggatctcaaa

SEQ ID NO: 24674 - protein, 107 aa, synthetic construct
  REGION 1..107: note = Description of Artificial Sequence: Synthetic polypeptide
DIQMTQSPSSVSASVGDRLTITCRASQGISRWLAWYQQKVGKVPKLLIYAASRLQSGVPSRFSGSGSGTAFTLTIGSLQPEDFATYYCQQANSFPFTFGPGTKVDLK

SEQ ID NO: 24675 - DNA, 321 bp, synthetic construct
  misc_feature 1..321: note = Description of Artificial Sequence: Synthetic polynucleotide
  source 1..321: mol_type = other DNA
gacatccagatgacccagtctccatcctccctgtctacttctgtaggagacagagtcaccatcacttgccgggcaagtcagagcattatcagctatttaaattggtatcagcagaaaccagggaaagcccctaaactcctgatctatgttgcatccagtttgcaaagtggggtcccatcaaggttcagtggcagtggatctgggacagatttcactctcaccatcagcagtctgcaacctgaagattttgcgacttactactgtcaacagagttacagtaccccgtacactttcggcggagggaccaagatggagatcaaa

SEQ ID NO: 24676 - protein, 107 aa, synthetic construct
  REGION 1..107: note = Description of Artificial Sequence: Synthetic polypeptide
DIQMTQSPSSLSTSVGDRVTITCRASQSIISYLNWYQQKPGKAPKLLIYVASSLQSGVPSRFSGSGSGTDFTLTISSLQPEDFATYYCQQSYSTPYTFGGGTKMEIK

SEQ ID NO: 24677 - DNA, 321 bp, synthetic construct
  misc_feature 1..321: note = Description of Artificial Sequence: Synthetic polynucleotide
  source 1..321: mol_type = other DNA
gacatccagatgacccagtctccatcctccctgtctgcatctgtaggagacagagtcaccatcacttgccggacaagtcaggacattagaagtgatttaggctggtatcagcagaaaccagggaaagcccctaagcgcctgatctatgctgcatccagtttgcaaagtggggtcccatcaaggttcagcggcagtggatctgggacagaattcactctcacaatcagcagcctgcagcctgaagattttgcaatttattactgtctacagcatactatttaccctcctactttcggcggagggaccaaggtggagatcaaa

SEQ ID NO: 24678 - protein, 107 aa, synthetic construct
  REGION 1..107: note = Description of Artificial Sequence: Synthetic polypeptide
DIQMTQSPSSLSASVGDRVTITCRTSQDIRSDLGWYQQKPGKAPKRLIYAASSLQSGVPSRFSGSGSGTEFTLTISSLQPEDFAIYYCLQHTIYPPTFGGGTKVEIK

SEQ ID NO: 24679 - DNA, 321 bp, synthetic construct
  misc_feature 1..321: note = Description of Artificial Sequence: Synthetic polynucleotide
  source 1..321: mol_type = other DNA
gacatccagatgacccagtctccatcctccctgtctgcatctgtaggagacagagtcaccatcacttgccgggcaagtcaggacattagaagtgatttaggctggtatcagcagaaaccagggaaagcccctaagcgcctgatctatgttgcatccagtttgcaaagtggggtcccatcaaggttcagcggcagtggatctgggacagaattcactctcacaatcagcagcctgcagcctgaagattttgcagcatattactgtctacagcatactatttaccctcctactttcggcggagggaccaaggtggagatcaaa

SEQ ID NO: 24680 - protein, 107 aa, synthetic construct
  REGION 1..107: note = Description of Artificial Sequence: Synthetic polypeptide
DIQMTQSPSSLSASVGDRVTITCRASQDIRSDLGWYQQKPGKAPKRLIYVASSLQSGVPSRFSGSGSGTEFTLTISSLQPEDFAAYYCLQHTIYPPTFGGGTKVEIK

SEQ ID NO: 24681 - DNA, 321 bp, synthetic construct
  misc_feature 1..321: note = Description of Artificial Sequence: Synthetic polynucleotide
  source 1..321: mol_type = other DNA
gacatccagatgacccagtctccatcctccctgtctgcatctgtaggagacagagtcaccatcacttgccggacaagtcaggacatcagaaatgatttaggctggtatcagcagaaaccagggaaagcccctaagcgcctgatctttgctgcatccagtttgcaaagtggggtcccatcaagattcagcggcagtggatctgggacagaattcactctcacagtcagcagcctgcagcctgaagattttgcaacttattactgtctacagcataatagttaccctcctactttcggcggagggaccaaggtggagatcaaa

SEQ ID NO: 24682 - protein, 107 aa, synthetic construct
  REGION 1..107: note = Description of Artificial Sequence: Synthetic polypeptide
DIQMTQSPSSLSASVGDRVTITCRTSQDIRNDLGWYQQKPGKAPKRLIFAASSLQSGVPSRFSGSGSGTEFTLTVSSLQPEDFATYYCLQHNSYPPTFGGGTKVEIK

SEQ ID NO: 24683 - DNA, 321 bp, synthetic construct
  misc_feature 1..321: note = Description of Artificial Sequence: Synthetic polynucleotide
  source 1..321: mol_type = other DNA
gacatccagatgacccagtctccatcctccctgtctgcatctgtgggagacagagtcaccatcacttgccgggcaagtcagaacattaacaggtatttaaattggtatcagcagaaaccagggaaagcccctaagctcctgatctatggtgcatccagtttgcaaagtggggtcccatcaaggttcagtggcagtggatctgggacagatttcactctcaccatcagcactctgcaacctgaagattttgcaacttactactgtcaacagacttacattaccccgctcactttcggcggagggaccaaggtggagatcaaa

SEQ ID NO: 24684 - protein, 107 aa, synthetic construct
  REGION 1..107: note = Description of Artificial Sequence: Synthetic polypeptide
DIQMTQSPSSLSASVGDRVTITCRASQNINRYLNWYQQKPGKAPKLLIYGASSLQSGVPSRFSGSGSGTDFTLTISTLQPEDFATYYCQQTYITPLTFGGGTKVEIK

SEQ ID NO: 24685 - DNA, 321 bp, synthetic construct
  misc_feature 1..321: note = Description of Artificial Sequence: Synthetic polynucleotide
  source 1..321: mol_type = other DNA
gacatccagatgacccagtctccatcctccctgtctgcatctgtaggagacagaatcaccatcacttgccgggcaagtcaggacattagaagtgatttaggctggtatcagcagaaaccagggaaagcccctgagcgcctgatctatgctgcatccagtttgcaaagtggggtcccatcaaggttcagcggcagtggatctgggacagaattcactctcacaatcagcagcctgcagcctgaagattttgcaacttattactgtctacagcatactatttaccctcctactttcggcggagggaccaaggtggagatcaaa

SEQ ID NO: 24686 - protein, 107 aa, synthetic construct
  REGION 1..107: note = Description of Artificial Sequence: Synthetic polypeptide
DIQMTQSPSSLSASVGDRITITCRASQDIRSDLGWYQQKPGKAPERLIYAASSLQSGVPSRFSGSGSGTEFTLTISSLQPEDFATYYCLQHTIYPPTFGGGTKVEIK

SEQ ID NO: 24687 - DNA, 321 bp, synthetic construct
  misc_feature 1..321: note = Description of Artificial Sequence: Synthetic polynucleotide
  source 1..321: mol_type = other DNA
gacatccagatgacccagtctccatcttccgtgtctgtgtctgtcggagacagagtcaccatcacttgtcgggcgagtcagggtattagcaggtggttagcctggtatcagcagaaacctgggaaagccccaaagctcctgatctatggtgcatacagtctgcaaagtggggtcccatcaaggttcagcggcagtggatctgggacagatttcactctcaccatcagcagcctgcagcctgaagattttgcaacttactattgtcaacaggctaacagtttcccattcactttcggccctgggaccaaagtggatatcaaa

SEQ ID NO: 24688 - protein, 107 aa, synthetic construct
  REGION 1..107: note = Description of Artificial Sequence: Synthetic polypeptide
DIQMTQSPSSVSVSVGDRVTITCRASQGISRWLAWYQQKPGKAPKLLIYGAYSLQSGVPSRFSGSGSGTDFTLTISSLQPEDFATYYCQQANSFPFTFGPGTKVDIK

SEQ ID NO: 24689 - DNA, 321 bp, synthetic construct
  misc_feature 1..321: note = Description of Artificial Sequence: Synthetic polynucleotide
  source 1..321: mol_type = other DNA
gacatccagatgacccagtctccatcctccctgtctgcatctgtaggagacagagtcaccatcacttgccgggcaagtcagagcattagcaactatttaaattggtatcaacagcaaacagggaaagcccctaagttcctgatttatgctgcatccagtttgcaaagtggggtcccatcaaggttcagtggcagtggatctgggacagatttcactctcaccatcagcagtctgcaacctgaagattttgcaacttactactgtcaacagagttacagtaccccattcactttcggccctgggaccaaagtggatatcaaa

SEQ ID NO: 24690 - protein, 107 aa, synthetic construct; identical to SEQ ID NO: 24566
  REGION 1..107: note = Description of Artificial Sequence: Synthetic polypeptide

SEQ ID NO: 24691 - DNA, 321 bp, synthetic construct
  misc_feature 1..321: note = Description of Artificial Sequence: Synthetic polynucleotide
  source 1..321: mol_type = other DNA
gacatccagatgacccagtctccatcttccgtgtctgcatctgtaggagacagagtcaccatcacttgtcgggcgagtcagcttattagcaagtggttagcctggtatcagcagaaaccagggaaagcccctaaactcctgatctatgctgcatccagtttgcaaagtggggtcccattaaggttcagcggcagtggatctgggacagatttcactctcaccatcagcagcctgcagcctgaagattttgcaacttactattgtcaacaggctaacagtttcccattcactttcggccctgggaccaaagtggatatcaaa

SEQ ID NO: 24692 - protein, 107 aa, synthetic construct
  REGION 1..107: note = Description of Artificial Sequence: Synthetic polypeptide
DIQMTQSPSSVSASVGDRVTITCRASQLISKWLAWYQQKPGKAPKLLIYAASSLQSGVPLRFSGSGSGTDFTLTISSLQPEDFATYYCQQANSFPFTFGPGTKVDIK

SEQ ID NO: 24693 - DNA, 321 bp, synthetic construct
  misc_feature 1..321: note = Description of Artificial Sequence: Synthetic polynucleotide
  source 1..321: mol_type = other DNA
gacatccagatgacccagtctccatcctccctgtctgcatctgtcggagacagagtcaccatcacttgccgggcaagtcaggacattagaaatgatttaggctggtatcagcagaaaccagggaaagcccctaagcgcctgatctatgctacatccagtttgcaaagtggggtcccatcaaggttcagcggcagtggatctgggacagaattcactctcacaatcagcagcctgcagcctgaagattttgcaacttattactgtctacagcataatagttaccctcctactttcggcggagggaccaaggtggagatcaaa

SEQ ID NO: 24694 - protein, 107 aa, synthetic construct
  REGION 1..107: note = Description of Artificial Sequence: Synthetic polypeptide
DIQMTQSPSSLSASVGDRVTITCRASQDIRNDLGWYQQKPGKAPKRLIYATSSLQSGVPSRFSGSGSGTEFTLTISSLQPEDFATYYCLQHNSYPPTFGGGTKVEIK

SEQ ID NO: 24695 - DNA, 321 bp, synthetic construct
  misc_feature 1..321: note = Description of Artificial Sequence: Synthetic polynucleotide
  source 1..321: mol_type = other DNA
gacatccagatgacccagtctccatcctcactgtctgcatctgtaggagacagagtcaccatcacttgtcgggcgagtcaggccattagtaattatttagcctggtttcagcagaaaccagggaaagcccctaagtccctgatctatggtgcgtccggtttgcaaagtggggtcccatcaaagttcagcggcagtggatctgggacagatttcactctcaccatcagcagcctgcagcctgaagattttgcaacttattactgccaacagtataatagttacccattcactttcggccctgggaccaaagtggatttcaaa

SEQ ID NO: 24696 - protein, 107 aa, synthetic construct
  REGION 1..107: note = Description of Artificial Sequence: Synthetic polypeptide
DIQMTQSPSSLSASVGDRVTITCRASQAISNYLAWFQQKPGKAPKSLIYGASGLQSGVPSKFSGSGSGTDFTLTISSLQPEDFATYYCQQYNSYPFTFGPGTKVDFK

SEQ ID NO: 24697 - DNA, 321 bp, synthetic construct
  misc_feature 1..321: note = Description of Artificial Sequence: Synthetic polynucleotide
  source 1..321: mol_type = other DNA
gacatccagatgacccagtctccatcctccctgtctacatctgtcggagacaaagtcaccatcacttgccgggcaagtcagagcattatcagctatttaaattggtatcagcagaaaccagggaaagcccctaaactcctgatctatgttgcatccagtttgcaaagtggggtcccatcaaggttcagtggcagtggatctgggacagatttcactctcaccatcagcagtctgcaacctgaagattttgcaacttactactgtcaacagagttacagtaccccgtacactttcggcggggggactaaggtggagatcaaa

SEQ ID NO: 24698 - protein, 107 aa, synthetic construct
  REGION 1..107: note = Description of Artificial Sequence: Synthetic polypeptide
DIQMTQSPSSLSTSVGDKVTITCRASQSIISYLNWYQQKPGKAPKLLIYVASSLQSGVPSRFSGSGSGTDFTLTISSLQPEDFATYYCQQSYSTPYTFGGGTKVEIK

SEQ ID NO: 24699 - DNA, 321 bp, synthetic construct
  misc_feature 1..321: note = Description of Artificial Sequence: Synthetic polynucleotide
  source 1..321: mol_type = other DNA
gacatccagatgacccagtctccatcctccctgtctgcatctgtaggagacagagtcaccatcacttgccgggcaagtcagggcattagaaatgatttaggctggtatcagcagaaaccagggaaagcccctaagcgcctgatctatgctgcatccagtttgcaaagtggggtcccatcaaggttcagcggcagtggatctgggacagaattcaccctcacaatcagcagcctgcagcctgaagattttgcaacatattactgtctacagcattatagttaccctcctactttcggcggagggaccaaggtggagatcaaa

SEQ ID NO: 24700 - protein, 107 aa, synthetic construct
  REGION 1..107: note = Description of Artificial Sequence: Synthetic polypeptide
DIQMTQSPSSLSASVGDRVTITCRASQGIRNDLGWYQQKPGKAPKRLIYAASSLQSGVPSRFSGSGSGTEFTLTISSLQPEDFATYYCLQHYSYPPTFGGGTKVEIK

SEQ ID NO: 24701 - DNA, 321 bp, synthetic construct
  misc_feature 1..321: note = Description of Artificial Sequence: Synthetic polynucleotide
  source 1..321: mol_type = other DNA
gacatccagatgacccagtctccatcctccctgtctgcatctgtaggagacagagtcaccatcacttgccgggcaagtcaggacattagaagtgatttaggctggtatcagcagaaaccagggaaagcccctaagcgcctgatctatgctgcatccagtttgcaaagtggggtcccatcaaggttcagcggcagtggatctgggacagaattcactctcacaatcagcagcctgcagcctgaagattttgcaacttattactgtctacagcatactatttaccctcccactttcggcggggggaccaaggtggagatcaaa

SEQ ID NO: 24702 - protein, 107 aa, synthetic construct
  REGION 1..107: note = Description of Artificial Sequence: Synthetic polypeptide
DIQMTQSPSSLSASVGDRVTITCRASQDIRSDLGWYQQKPGKAPKRLIYAASSLQSGVPSRFSGSGSGTEFTLTISSLQPEDFATYYCLQHTIYPPTFGGGTKVEIK

SEQ ID NO: 24703 - DNA, 321 bp, synthetic construct
  misc_feature 1..321: note = Description of Artificial Sequence: Synthetic polynucleotide
  source 1..321: mol_type = other DNA
gacatccagatgacccagtctccatcctccctgtctgcatctgtaggagacagagtcaccatcacttgccgggcaagtcaggacattagaagtgatttaggctggtatcagcagaaaccagggaaagcccctaagcgcctgatctatgctgcatccagtttgcaaagtggggtcccatcaaggttcagcggcagtggatctgggacagaattcactctcacaatcagcagcctgcagcctgaagattttgcaacttattactgtctacagcatactgtttaccctcctactttcggcggagggaccaaggtggagatcaaa

SEQ ID NO: 24704 - protein, 107 aa, synthetic construct
  REGION 1..107: note = Description of Artificial Sequence: Synthetic polypeptide
DIQMTQSPSSLSASVGDRVTITCRASQDIRSDLGWYQQKPGKAPKRLIYAASSLQSGVPSRFSGSGSGTEFTLTISSLQPEDFATYYCLQHTVYPPTFGGGTKVEIK

SEQ ID NO: 24705 - DNA, 321 bp, synthetic construct
  misc_feature 1..321: note = Description of Artificial Sequence: Synthetic polynucleotide
  source 1..321: mol_type = other DNA
gacatccagatgacccagtctccatcctccctgtctgcatctgtaggagacagagtcaccatcacttgccgggcaagtcagggcattagaaatgatttaggctggtatcagcagaaaccagtgaaagcccctaagcgcctgatctatgctgcacccagtttgcaaagtggggtcccatcaaggttcagcggcagtggatctgggacagaattcactctcacaatcagcagcctgcagcctgaacattttgcaacttattactgtctacagcataatagttacccgtggacgttcggccaggggaccaaggtggaaatcaaa

SEQ ID NO: 24706 - protein, 107 aa, synthetic construct
  REGION 1..107: note = Description of Artificial Sequence: Synthetic polypeptide
DIQMTQSPSSLSASVGDRVTITCRASQGIRNDLGWYQQKPVKAPKRLIYAAPSLQSGVPSRFSGSGSGTEFTLTISSLQPEHFATYYCLQHNSYPWTFGQGTKVEIK

SEQ ID NO: 24707 - DNA, 321 bp, synthetic construct
  misc_feature 1..321: note = Description of Artificial Sequence: Synthetic polynucleotide
  source 1..321: mol_type = other DNA
gacatccagatgacccagtctccatcttccgtgtctgcatctgtaggcgacagagtcaccatcacttgtcgggcgagtcagggtattagccggtggttagcctggtatcagcagaaagtggggaaagtccccaaactcctgatctatgctgcatccaggttgcaaagtggggtcccatcaaggttcagcggcagtggatctgggacagatttcactctcaccatcggcagcctgcagcctgaagattttgcaacttactattgtcaacaggctaacattttcccgttcactttcggccctgggaccaaagtggatctcaaa

SEQ ID NO: 24708 - protein, 107 aa, synthetic construct
  REGION 1..107: note = Description of Artificial Sequence: Synthetic polypeptide
DIQMTQSPSSVSASVGDRVTITCRASQGISRWLAWYQQKVGKVPKLLIYAASRLQSGVPSRFSGSGSGTDFTLTIGSLQPEDFATYYCQQANIFPFTFGPGTKVDLK

SEQ ID NO: 24709 - DNA, 321 bp, synthetic construct
  misc_feature 1..321: note = Description of Artificial Sequence: Synthetic polynucleotide
  source 1..321: mol_type = other DNA
gacatccagatgacccagtctccatcctccctgtctacatttgtaggagacagagtcaccattacttgtcgggcaagtcagagaattatcagctatttaaattggtttcagcagaaaccagggaaagcccctaaactcctgatctatgttgcatccagtttgcaaagtggggtcccgtcaaggttcagtggcagtggatctgggacatatttcactctcaccatcagcagtctgcaacctgaagattttgcgacttactactgtcaacagagttacagtaccccgtacactttcggcggagggaccaagatggagatcaaa

SEQ ID NO: 24710 - protein, 107 aa, synthetic construct
  REGION 1..107: note = Description of Artificial Sequence: Synthetic polypeptide
DIQMTQSPSSLSTFVGDRVTITCRASQRIISYLNWFQQKPGKAPKLLIYVASSLQSGVPSRFSGSGSGTYFTLTISSLQPEDFATYYCQQSYSTPYTFGGGTKMEIK

SEQ ID NO: 24711 - DNA, 321 bp, synthetic construct
  misc_feature 1..321: note = Description of Artificial Sequence: Synthetic polynucleotide
  source 1..321: mol_type = other DNA
gacatccagatgacccagtctccatcctccctgtctacatctgtaggagacagagtcaccatcacttgccgggcaagtcagatcattatcagctatttaaattggtatcagcagaaaccagggaaagcccctaaactcctgatctttgttgcatccagtttgcaaagtggggtcccatcaaggttcagtggcagtggatctgggacagatttcactctcaccatcagcagtctgcaacctgaagattttgcaacttactactgtcaacagagttacagtaccccgtacactttcggcggggggaccaaggtggagatcaaa

SEQ ID NO: 24712 - protein, 107 aa, synthetic construct
  REGION 1..107: note = Description of Artificial Sequence: Synthetic polypeptide
DIQMTQSPSSLSTSVGDRVTITCRASQIIISYLNWYQQKPGKAPKLLIFVASSLQSGVPSRFSGSGSGTDFTLTISSLQPEDFATYYCQQSYSTPYTFGGGTKVEIK

SEQ ID NO: 24713 - DNA, 321 bp, synthetic construct
  misc_feature 1..321: note = Description of Artificial Sequence: Synthetic polynucleotide
  source 1..321: mol_type = other DNA
gacatccagatgacccagtctccatcctccctgtctgcatctgtaggagacagagtcaccatcacttgccaggcgagtcaggacattttcaactatttaaattggtatcagcagaaaccaggaaaagcccctaacctcctgatctacgatgcctccaatttggaaacaggggtcccatcaaggttcagtggaagtggatctgggacagattttactttcaccatcagcagcctgcagcctgaagatattgcgacatatttctgtcaacagtatgataatctcccgatcaccttcggccaagggacacgactggatattaga

SEQ ID NO: 24714 - protein, 107 aa, synthetic construct
  REGION 1..107: note = Description of Artificial Sequence: Synthetic polypeptide
DIQMTQSPSSLSASVGDRVTITCQASQDIFNYLNWYQQKPGKAPNLLIYDASNLETGVPSRFSGSGSGTDFTFTISSLQPEDIATYFCQQYDNLPITFGQGTRLDIR

SEQ ID NO: 24715 - DNA, 321 bp, synthetic construct
  misc_feature 1..321: note = Description of Artificial Sequence: Synthetic polynucleotide
  source 1..321: mol_type = other DNA
gacatccagatgacccagtctccatcttccgtgtctgcatctgtaggagacagagtcaccatcacttgtcgggcgagtcagggtattagcagatggttagcctggtatcagcagaaaccagggaaagcccctgaactcctgatctatgctgcatcccgtttgcaaagtgggatcccatccaggttcagcggcagtggatctgggacagacttcactctcaccatcagcagcctgcagcctgaagattttgcaacttactattgtcaacaggctaacagtttcccattcactttcggccctgggaccaaagtggatatcaaa

SEQ ID NO: 24716 - protein, 107 aa, synthetic construct; identical to SEQ ID NO: 24662
  REGION 1..107: note = Description of Artificial Sequence: Synthetic polypeptide

SEQ ID NO: 24717 - DNA, 321 bp, synthetic construct
  misc_feature 1..321: note = Description of Artificial Sequence: Synthetic polynucleotide
  source 1..321: mol_type = other DNA
gacatccagatgacccagtctccatcctcactgtctgcatctgtaggagacagagtcaccatcacttgtcgggcgagtcagggcattaacaattatttagcctggtttcaacagaaaccagggaaagcccctaagtccctgatctacgctgcatccagtttgcaaagtggggtcccatcaaagttcagcggcagtggatctgggacagatttcactctcaccatcagcagcctgcagcctgaagattttgcaacttattactgccaacagtttaatagttaccctccgacgttcggccaagggaccaaggtggaaatcaaa

SEQ ID NO: 24718 - protein, 107 aa, synthetic construct
  REGION 1..107: note = Description of Artificial Sequence: Synthetic polypeptide
DIQMTQSPSSLSASVGDRVTITCRASQGINNYLAWFQQKPGKAPKSLIYAASSLQSGVPSKFSGSGSGTDFTLTISSLQPEDFATYYCQQFNSYPPTFGQGTKVEIK

SEQ ID NO: 24719 - DNA, 333 bp, synthetic construct
  misc_feature 1..333: note = Description of Artificial Sequence: Synthetic polynucleotide
  source 1..333: mol_type = other DNA
gatattgtgatgacccagactccactctctctgtccgtcacccctggacagccggcctccatctcctgcaagtctagtcagagcctcctgcatagtgatggaaagacctatttgtattggtacctgcagaagccaggccagcctccacagctcctgatctatgaagtttccaaccggttctctggagtgccagataggttcagtggcagcgggtcagggacagatttcacactaaaaatcagccgggtggaggctgaggatgttggggtttattactgcatgcaaagtaaacagcttcctcctttcggcggagggaccaaggtggagatcaga

SEQ ID NO: 24720 - protein, 111 aa, synthetic construct
  REGION 1..111: note = Description of Artificial Sequence: Synthetic polypeptide
DIVMTQTPLSLSVTPGQPASISCKSSQSLLHSDGKTYLYWYLQKPGQPPQLLIYEVSNRFSGVPDRFSGSGSGTDFTLKISRVEAEDVGVYYCMQSKQLPPFGGGTKVEIR

SEQ ID NO: 24721 - DNA, 321 bp, synthetic construct
  misc_feature 1..321: note = Description of Artificial Sequence: Synthetic polynucleotide
  source 1..321: mol_type = other DNA
gacatccagatgacccagtctccatcctccctgtctgcatctgtaggagacagagtcaccatcacttgccgggcaagtcaggacattagaagtgatttaggctggtatcagcagaaaccagggaaagcccctaagcgcctgatctatgctgcatccagtttgcaaagtggggtcccatcaaggttcagcggcagtggatctgggacagaattcactctcacaatcagcagcctgcagcctgaagattttgcaacttattactgtctacagcatactatttaccctcctactttcggcggagggaccaaggtggagatcaaa

SEQ ID NO: 24722 - protein, 107 aa, synthetic construct; identical to SEQ ID NO: 24702
  REGION 1..107: note = Description of Artificial Sequence: Synthetic polypeptide

SEQ ID NO: 24723 - DNA, 321 bp, synthetic construct
  misc_feature 1..321: note = Description of Artificial Sequence: Synthetic polynucleotide
  source 1..321: mol_type = other DNA
gacatccagatgatccagtctccatcctccctgtctgcatctgtaggagacagagtcaccatcacttaccgggcaagtcagagcattagcagctatttaaattggtatcagcagaaaccagcgaaagcccctaagctccacatctatggtgcatccagtttccaaagttgggtcccatcaaggttcagtggcagtggatcttcgacagatttcacgctcaccatcatcagtatgcaacctggagattatgcaacttactactgtcaccagagttacaatctcccgatcaccttcggccaagggacccgactggagattaaa

SEQ ID NO: 24724 - protein, 107 aa, synthetic construct
  REGION 1..107: note = Description of Artificial Sequence: Synthetic polypeptide
DIQMIQSPSSLSASVGDRVTITYRASQSISSYLNWYQQKPAKAPKLHIYGASSFQSWVPSRFSGSGSSTDFTLTIISMQPGDYATYYCHQSYNLPITFGQGTRLEIK

SEQ ID NO: 24725 - DNA, 321 bp, synthetic construct
  misc_feature 1..321: note = Description of Artificial Sequence: Synthetic polynucleotide
  source 1..321: mol_type = other DNA
gacatccagatgacccagtctccatcctccctgtctgcatctgtaggagacagagtcaccatcacttgccggacaagtcaggacattagaaatgatttaggctggtatcagcagaaaccagggaaagcccctaagcgcctgatctttgctgcatccagtttgcaaagtggggtcccatcaagattcagcggcagtggatctgggacagaattcactctcacaatcagcagcctgcagcctgaagattttgcaacttattactgtctacaccacaatagttaccctcctaagtttggcggagggatcaaggtggagatcaca

SEQ ID NO: 24726 - protein, 107 aa, synthetic construct
  REGION 1..107: note = Description of Artificial Sequence: Synthetic polypeptide
DIQMTQSPSSLSASVGDRVTITCRTSQDIRNDLGWYQQKPGKAPKRLIFAASSLQSGVPSRFSGSGSGTEFTLTISSLQPEDFATYYCLHHNSYPPKFGGGIKVEIT

SEQ ID NO: 24727 - DNA, 321 bp, synthetic construct
  misc_feature 1..321: note = Description of Artificial Sequence: Synthetic polynucleotide
  source 1..321: mol_type = other DNA
gacatccagatgacccagtctccctcttccgtgtctgcatctgtaggagacagagtcaccatcacttgtcgggcgagtcagggtattagcagctggttagcctggtatcagcagaaaccagggaaagcccctaagctcctgatctatggtgcatccagtttgcaaagtggggtcccatcaaggttcagcgccagtggatctgggacagatttcactctcaccatcagcagcctgcagcctgaagattttgcgacttactgttgtcaacagtctgacagtttccctcggacgttcggccaagggaccaaggtggaaatcaaa

SEQ ID NO: 24728 - protein, 107 aa, synthetic construct; identical to SEQ ID NO: 24540
  REGION 1..107: note = Description of Artificial Sequence: Synthetic polypeptide

SEQ ID NO: 24729 - DNA, 321 bp, synthetic construct
  misc_feature 1..321: note = Description of Artificial Sequence: Synthetic polynucleotide
  source 1..321: mol_type = other DNA
tcctatgagctgactcagccaccctcagtgtccgtgtccccaggacagacagccagcatcacctgctctggagataaattgggggataaatatgcttgctggtatcagcagaagccaggccagtcccctgtgttggtcatctatcaagataggaagcggccctcagggatccctgagcgattctctggctccaactctgggaacacagccactctgaccatcagcgggacccagactatggatgaggctgactattactgtcaggcgtgggacagcagctcttatgtggtattcggcggagggaccaagctgaccgtccta

SEQ ID NO: 24730 - protein, 107 aa, synthetic construct
  REGION 1..107: note = Description of Artificial Sequence: Synthetic polypeptide
SYELTQPPSVSVSPGQTASITCSGDKLGDKYACWYQQKPGQSPVLVIYQDRKRPSGIPERFSGSNSGNTATLTISGTQTMDEADYYCQAWDSSSYVVFGGGTKLTVL

SEQ ID NO: 24731 - DNA, 318 bp, synthetic construct
  misc_feature 1..318: note = Description of Artificial Sequence: Synthetic polynucleotide
  source 1..318: mol_type = other DNA
tcctatgaactgactcagccaccctcagtgtccgtgtccccaggacagacagccagcatcacctgctctggagataaattgggggataaatatgcttactggtatcagcagaagccaggccagtcccctgtgttggtcatctatcaagatagtaagcggtcctcagggatccctgagcgattctctggctccaactctgggaacacagccactctgaccatcagcgggacccaggctatggatgaggctgactattactgtcaggcgtgggacaacagcactgtggtattcggcggagggaccaagctgaccgtccta

SEQ ID NO: 24732 - protein, 106 aa, synthetic construct
  REGION 1..106: note = Description of Artificial Sequence: Synthetic polypeptide
SYELTQPPSVSVSPGQTASITCSGDKLGDKYAYWYQQKPGQSPVLVIYQDSKRSSGIPERFSGSNSGNTATLTISGTQAMDEADYYCQAWDNSTVVFGGGTKLTVL

SEQ ID NO: 24733 - DNA, 318 bp, synthetic construct
  misc_feature 1..318: note = Description of Artificial Sequence: Synthetic polynucleotide
  source 1..318: mol_type = other DNA
tcctatgagctgagtcagccaccctcagtgtccgtgtccccaggacagacagccagcatcacctgctctggagataaattgggggaaaaatatgcttgctggtatcagcagaagccaggccagtcccctgtgctggtcatctatcaagataggaagcggccctcagggatccctgagcgattctctggctccaactctgggaacaaagccactctgaccatcagcgggacccaggctatggatgaggctgactattactgtcaggcgtgggtcaacaacactatgatattcggcggagggaccaagctgaccgtccta

SEQ ID NO: 24734 - protein, 106 aa, synthetic construct
  REGION 1..106: note = Description of Artificial Sequence: Synthetic polypeptide
SYELSQPPSVSVSPGQTASITCSGDKLGEKYACWYQQKPGQSPVLVIYQDRKRPSGIPERFSGSNSGNKATLTISGTQAMDEADYYCQAWVNNTMIFGGGTKLTVL

SEQ ID NO: 24735 - DNA, 345 bp, synthetic construct
  misc_feature 1..345: note = Description of Artificial Sequence: Synthetic polynucleotide
  source 1..345: mol_type = other DNA
ctgcctgtgctgactcagcccccgtctgcatctgccttgctgggagcctcgatcaagctcacctgcaccctaagcagtgagcacagcacctacaccatcgaatggtatcaacagagaccagggaggtccccccagtatataatgaaggttaagagtgatggcagccacagcaagggggacgggatccccgatcgcttcatgggctccagttctggggctgaccgctacatcaccttctccaacctccagtctgacgatgaggaggagtatcactgtggagagagccacacgatcgatggccaagtcggtgtggtattcggcggagggaccaagctgaccgtccta

SEQ ID NO: 24736 - protein, 115 aa, synthetic construct
  REGION 1..115: note = Description of Artificial Sequence: Synthetic polypeptide
LPVLTQPPSASALLGASIKLTCTLSSEHSTYTIEWYQQRPGRSPQYIMKVKSDGSHSKGDGIPDRFMGSSSGADRYITFSNLQSDDEEEYHCGESHTIDGQVGVVFGGGTKLTVL

SEQ ID NO: 24737 - DNA, 318 bp, synthetic construct
  misc_feature 1..318: note = Description of Artificial Sequence: Synthetic polynucleotide
  source 1..318: mol_type = other DNA
tcctatgagctgactcagccaccctcagtgtccgtgtccccaggacagacagccagcatcacctgctctggagataaattggggaataaatatgcttgctggtatcagcagaagccaggccagtcccctgtggaggtcatctatcaagatagcaagcggcccttagggatccctgagcgattctctggctccaactctgggaacacagccactctgaccatcagcgggacccaggctatggatgaggctgactattactgtcaggcgtgggacagtagtactgtggtattcggcggagggaccaagctgaccgtccta

SEQ ID NO: 24738 - protein, 106 aa, synthetic construct
  REGION 1..106: note = Description of Artificial Sequence: Synthetic polypeptide
SYELTQPPSVSVSPGQTASITCSGDKLGNKYACWYQQKPGQSPVEVIYQDSKRPLGIPERFSGSNSGNTATLTISGTQAMDEADYYCQAWDSSTVVFGGGTKLTVL

SEQ ID NO: 24739 - DNA, 318 bp, synthetic construct
  misc_feature 1..318: note = Description of Artificial Sequence: Synthetic polynucleotide
  source 1..318: mol_type = other DNA
tcctatgagctgactcagccaccctcagtgtccgtgtccccaggacagacagccagcatcacctgctctggagataaattgggggagaaatatgcttactggtatcagcagaagccaggccagtcccctgtgctggtcctctatcaagatagcaagcggccctcagggatccctgagcgattctctggctccaactctgggaacacagccactctgaccatcagcgggacccagactatggatgaggctgacttttactgtcaggcgtgggacaacaccactgtggtattcggcggagggaccaagctgaccgtccta

SEQ ID NO: 24740 - protein, 106 aa, synthetic construct
  REGION 1..106: note = Description of Artificial Sequence: Synthetic polypeptide
SYELTQPPSVSVSPGQTASITCSGDKLGEKYAYWYQQKPGQSPVLVLYQDSKRPSGIPERFSGSNSGNTATLTISGTQTMDEADFYCQAWDNTTVVFGGGTKLTVL

SEQ ID NO: 24741 - DNA, 333 bp, synthetic construct
  misc_feature 1..333: note = Description of Artificial Sequence: Synthetic polynucleotide
  source 1..333: mol_type = other DNA
cagtctgtgctgactcagccaccctcagcgtctgggacccccgggcagagggtcaacatgtcttgttctggaaccaactccaacatcggaagttatactgtaaactggtaccagcagctcccaggaacggcccccaaactcctcatctatattaataatcagcggccctcaggggtccctgaccgattctctggctccaagtctggcacctcagcctccctggccatcagtgggctccagtctgaggatgaggctgattattactgtgcagcatgggatgacagcctgaatggtcatgtggtattcggcggaaggaccaagctgaccgtccta

SEQ ID NO: 24742 - protein, 111 aa, synthetic construct
  REGION 1..111: note = Description of Artificial Sequence: Synthetic polypeptide
QSVLTQPPSASGTPGQRVNMSCSGTNSNIGSYTVNWYQQLPGTAPKLLIYINNQRPSGVPDRFSGSKSGTSASLAISGLQSEDEADYYCAAWDDSLNGHVVFGGRTKLTVL

SEQ ID NO: 24743 - DNA, 318 bp, synthetic construct
  misc_feature 1..318: note = Description of Artificial Sequence: Synthetic polynucleotide
  source 1..318: mol_type = other DNA
tcctatgagctgactcagccaccctcagtgtccgtgtccccaagacagacagtcagcatcacctgctctggagataaattgggggataaatatgcttgctggtatcagcagaagccaggccagtcccctgtgctggtcatctatcaagatcgcaagcggccctcagggatccctgagcgattctctggctccaactctgggaacacagccactctgaccatcagcgggacccaggctatggatgaggctgactattactgtcaggcgtgggacaacaacactgtgatattcggcggagggaccaagctgaccgtccta

SEQ ID NO: 24744 - protein, 106 aa, synthetic construct
  REGION 1..106: note = Description of Artificial Sequence: Synthetic polypeptide
SYELTQPPSVSVSPRQTVSITCSGDKLGDKYACWYQQKPGQSPVLVIYQDRKRPSGIPERFSGSNSGNTATLTISGTQAMDEADYYCQAWDNNTVIFGGGTKLTVL

SEQ ID NO: 24745 - DNA, 318 bp, synthetic construct
  misc_feature 1..318: note = Description of Artificial Sequence: Synthetic polynucleotide
  source 1..318: mol_type = other DNA
tcctatgagctgactcagccaccctcagtgtccgtgtccccaggacagacagccagcatcacctgctctggagataaattgggggagaaatatgcttgctggtatcagcagaagccaggccagtcccctgtggtggtcatctatcaagataggaagcggccctcagggatccctgagcgattctctggctccaactctgggaacacagccactctgaccatcagcgggacccaggctatagatgaggctgactattactgtcaggcgtgggacagcagcactgcggtattcggcggagggaccaagttgaccgtccta

SEQ ID NO: 24746 - protein, 106 aa, synthetic construct
  REGION 1..106: note = Description of Artificial Sequence: Synthetic polypeptide
SYELTQPPSVSVSPGQTASITCSGDKLGEKYACWYQQKPGQSPVVVIYQDRKRPSGIPERFSGSNSGNTATLTISGTQAIDEADYYCQAWDSSTAVFGGGTKLTVL

SEQ ID NO: 24747 - DNA, 315 bp, synthetic construct
  misc_feature 1..315: note = Description of Artificial Sequence: Synthetic polynucleotide
  source 1..315: mol_type = other DNA
tcctatgagctgactcagccaccctcaatgtccgtgtccccaggacagacagccagcatcacctgctctggatataaattgggggataaatatgcttgctggtttcagcagaagccaggccagtcccctgtgctggtcatctatcaagatagcaagcggccctcagggatccctgagcgattctctggctccaactctgggaacacagccactctgaccatcagcgggacccaggctatggatgaggctgactattactgtcaggcgtgggtcaacaacactgtattcggcggagggaccaagctgaccgtccta

SEQ ID NO: 24748 - protein, 105 aa, synthetic construct
  REGION 1..105: note = Description of Artificial Sequence: Synthetic polypeptide
SYELTQPPSMSVSPGQTASITCSGYKLGDKYACWFQQKPGQSPVLVIYQDSKRPSGIPERFSGSNSGNTATLTISGTQAMDEADYYCQAWVNNTVFGGGTKLTVL

SEQ ID NO: 24749 - DNA, 315 bp, synthetic construct
  misc_feature 1..315: note = Description of Artificial Sequence: Synthetic polynucleotide
  source 1..315: mol_type = other DNA
tcctatgagctgactcaggcaccctcagtgtccgtgtccccaggacagacagccagcatcacctgctctggagataaattgggggagaaatatgtttcctggtatcaggagaagccaggccagtcccctgtgctggtcatctatcaagatagtaagcggccctcagggatccctgagcgattctctggctccaactctgggaacacagccactctgaccatcagcgggacccaggctatggatgaggctgactattactgtcaggcgtgggacagcagcactgtattcggcggagggaccaagctgaccgtccta

SEQ ID NO: 24750 - protein, 105 aa, synthetic construct
  REGION 1..105: note = Description of Artificial Sequence: Synthetic polypeptide
SYELTQAPSVSVSPGQTASITCSGDKLGEKYVSWYQEKPGQSPVLVIYQDSKRPSGIPERFSGSNSGNTATLTISGTQAMDEADYYCQAWDSSTVFGGGTKLTVL

SEQ ID NO: 24751 - DNA, 318 bp, synthetic construct; identical to SEQ ID NO: 24743
  misc_feature 1..318: note = Description of Artificial Sequence: Synthetic polynucleotide
  source 1..318: mol_type = other DNA

SEQ ID NO: 24752 - protein, 106 aa, synthetic construct; identical to SEQ ID NO: 24744
  REGION 1..106: note = Description of Artificial Sequence: Synthetic polypeptide

SEQ ID NO: 24753 - DNA, 321 bp, synthetic construct
  misc_feature 1..321: note = Description of Artificial Sequence: Synthetic polynucleotide
  source 1..321: mol_type = other DNA
tcctatgagctgactcagccaccctcagtgtccgtgtccccaggacagacagccagcatcacctgctctggagataaattgggggataaatatgcttgctggtatcagcagaagccaggccagtcccctgtgctggtcatctatcaagatagcaagcggccctcagggatccctgagcgattctctggctccaactctgggaacacagccactctgaccatcagcgggacccaggctatggatgaggctgactattactgtcaggcgtgggacagcagcacttatgtggtattcggcggagggaccaagctgaccgtccta

SEQ ID NO: 24754 - protein, 107 aa, synthetic construct
  REGION 1..107: note = Description of Artificial Sequence: Synthetic polypeptide
SYELTQPPSVSVSPGQTASITCSGDKLGDKYACWYQQKPGQSPVLVIYQDSKRPSGIPERFSGSNSGNTATLTISGTQAMDEADYYCQAWDSSTYVVFGGGTKLTVL

SEQ ID NO: 24755 - DNA, 318 bp, synthetic construct
  misc_feature 1..318: note = Description of Artificial Sequence: Synthetic polynucleotide
  source 1..318: mol_type = other DNA
tcctatgagctgagtcagccaccctcagtgtccgtgtccccaggacagacagccagcatcacctgctctggagataaattgggggaaaaatatgcttgctggtatcagcagaagccaggccagtcccctgtgctggtcatctatcaagataggaagcggccctcagggatccctgagcgattctctggctccaactctgggaacaaagccactctgaccatcagcgggacccaggctatggatgaggctgactattactgtcaggcgtgggtcaataacactatgatattcggcggagggaccaagctgaccgtccta

SEQ ID NO: 24756 - protein, 106 aa, synthetic construct; identical to SEQ ID NO: 24734
  REGION 1..106: note = Description of Artificial Sequence: Synthetic polypeptide

SEQ ID NO: 24757 - DNA, 321 bp, synthetic construct
  misc_feature 1..321: note = Description of Artificial Sequence: Synthetic polynucleotide
  source 1..321: mol_type = other DNA
tcctatgagttgactcagccaccctcagtgtccgtgtccccaggacagacagccagcatcacctgctctggagataaattgggggataaatatgcttgctggtatcagcagaagccaggccagtcccctgtgctggtcatctatcaagatagcaagcggccctcagggatccctgagcgattctctggctccaactctgggaacacagccactctgaccatcagcgggacccaggctatggatgaggctgactattactgtcaggcgtgggacagtagcacttatgtggtattcggcggagggaccaagctgaccgtccta

SEQ ID NO: 24758 - protein, 107 aa, synthetic construct; identical to SEQ ID NO: 24754
  REGION 1..107: note = Description of Artificial Sequence: Synthetic polypeptide

SEQ ID NO: 24759 - DNA, 318 bp, synthetic construct
  misc_feature 1..318: note = Description of Artificial Sequence: Synthetic polynucleotide
  source 1..318: mol_type = other DNA
tcctatgagctgactcagccaccctcagtgtccgtgtccccaggacagacagccagcatcacctgctctggagataaattgggggaaaaatatgcttactggtttcagcagaagccaggccagtcccctgtgatagtcatctatcaagataggaagcggccctcagggatccctgagcgattctctggctccaactctgggaacacagccactctgaccatcagcgggacgcaggctatggatgaggctgactattactgtcaggcgtgggacaacagcactgcggtattcggcggagggaccaagctgaccgtccta

SEQ ID NO: 24760 - protein, 106 aa, synthetic construct
  REGION 1..106: note = Description of Artificial Sequence: Synthetic polypeptide
SYELTQPPSVSVSPGQTASITCSGDKLGEKYAYWFQQKPGQSPVIVIYQDRKRPSGIPERFSGSNSGNTATLTISGTQAMDEADYYCQAWDNSTAVFGGGTKLTVL

SEQ ID NO: 24761 - DNA, 318 bp, synthetic construct; identical to SEQ ID NO: 24743
  misc_feature 1..318: note = Description of Artificial Sequence: Synthetic polynucleotide
  source 1..318: mol_type = other DNA

SEQ ID NO: 24762 - protein, 106 aa, synthetic construct; identical to SEQ ID NO: 24744
  REGION 1..106: note = Description of Artificial Sequence: Synthetic polypeptide

SEQ ID NO: 24763 - DNA, 324 bp, synthetic construct; identical to SEQ ID NO: 24229
  misc_feature 1..324: note = Description of Artificial Sequence: Synthetic polynucleotide
  source 1..324: mol_type = other DNA

SEQ ID NO: 24764 - protein, 108 aa, synthetic construct; identical to SEQ ID NO: 24230
  REGION 1..108: note = Description of Artificial Sequence: Synthetic polypeptide

SEQ ID NO: 24765 - DNA, 321 bp, synthetic construct
  misc_feature 1..321: note = Description of Artificial Sequence: Synthetic polynucleotide
  source 1..321: mol_type = other DNA
tcctatgagctgactcagccaccctcagtgtccgtgtccccaggacagacagccagcatcacctgctctggagataaattgggggataaatatgcttgctggtatcagcagaagccaggccagtcccctgtgctggtcatctatcaagatagcaagcggccctcagggatccctgagcgattctctggctccaactctgggaacacagccactctgaccatcagcgggacccaggctatggatgaggctgactattactgtcaggcgtggggcaacagcactgctgtggtattcggcggagggaccaagctgaccgtcctg

SEQ ID NO: 24766 - protein, 107 aa, synthetic construct
  REGION 1..107: note = Description of Artificial Sequence: Synthetic polypeptide
SYELTQPPSVSVSPGQTASITCSGDKLGDKYACWYQQKPGQSPVLVIYQDSKRPSGIPERFSGSNSGNTATLTISGTQAMDEADYYCQAWGNSTAVVFGGGTKLTVL

SEQ ID NO: 24767 - DNA, 324 bp, synthetic construct
  misc_feature 1..324: note = Description of Artificial Sequence: Synthetic polynucleotide
  source 1..324: mol_type = other DNA
tcctatgtgctgactcagccaccctcggtgtcagtggccccaggacagacggccaggattacctgtgggggaaacaacattggaagtaaaagtgtgcactggtaccagcagaagccaggccaggcccctgtgctggtcgtctatgatgataccgaccggccctcagggatccctgagcgattctctggctccaactctgggaacacggccaccctgaccatcagcagggtcgaagccggggatgaggccgactattactgtcaggtgtgggatagtagcagtgatcatgtggtattcggcggagggaccaagctgaccgtccta

SEQ ID NO: 24768 - protein, 108 aa, synthetic construct
  REGION 1..108: note = Description of Artificial Sequence: Synthetic polypeptide
SYVLTQPPSVSVAPGQTARITCGGNNIGSKSVHWYQQKPGQAPVLVVYDDTDRPSGIPERFSGSNSGNTATLTISRVEAGDEADYYCQVWDSSSDHVVFGGGTKLTVL

SEQ ID NO: 24769 - DNA, 318 bp, synthetic construct
  misc_feature 1..318: note = Description of Artificial Sequence: Synthetic polynucleotide
  source 1..318: mol_type = other DNA
tcctatgagctgacgcagtcaccctcagtgtccgtgtccccaggacagacagccagcatcacctgctctggagataaattgggggataaatatgtttactggtatcagcagaagccaggccagtcccctgtggtggtcatctatcaagataggaagcggccctcagggatccctgagcgattctctggctccaactctgggaacacagccactctgaccatcagcgggacccaggctatggatgaggctgactattactgtcaggcgtgggacagcatcactgcagtattcggcggagggaccaagctgaccgtccga

SEQ ID NO: 24770 - protein, 106 aa, synthetic construct
  REGION 1..106: note = Description of Artificial Sequence: Synthetic polypeptide
SYELTQSPSVSVSPGQTASITCSGDKLGDKYVYWYQQKPGQSPVVVIYQDRKRPSGIPERFSGSNSGNTATLTISGTQAMDEADYYCQAWDSITAVFGGGTKLTVR

SEQ ID NO: 24771 - DNA, 315 bp, synthetic construct
  misc_feature 1..315: note = Description of Artificial Sequence: Synthetic polynucleotide
  source 1..315: mol_type = other DNA
tcctatgagctgactcagccaccctcagtgtccgtgtccccaggacagacagccagcatcacctgctctggagataaattgggtaataaatatgcttgctggtatcagcagaagccaggccagtcccctgtgttggtcatctatcaagatagcaagcggccctcagggatccctgagcgattctctggctccaactctgggaacacagccactctgaccatcagcgggacccaggctatggatgaggctgactattactgtcaggcgtgggacagcagcactgttttcggcggagggaccaagctgaccgtccta

SEQ ID NO: 24772 - protein, 105 aa, synthetic construct
  REGION 1..105: note = Description of Artificial Sequence: Synthetic polypeptide
SYELTQPPSVSVSPGQTASITCSGDKLGNKYACWYQQKPGQSPVLVIYQDSKRPSGIPERFSGSNSGNTATLTISGTQAMDEADYYCQAWDSSTVFGGGTKLTVL

SEQ ID NO: 24773 - DNA, 318 bp, synthetic construct
  misc_feature 1..318: note = Description of Artificial Sequence: Synthetic polynucleotide
  source 1..318: mol_type = other DNA
tcctatgagctgactcagccaccctcagtgtccgtgtccccaggacagacagccagcatcacctgctctggagataaattgggggataaatttgtttattggtatcagcagaagccaggccagtcccctgtgctggtcatctatcaagatagcaagcggccctcagggatccctgagcgattctctggctccaactctgggaacacagccactctgaccatcagcgggacccaggctatggatgaggctgactattactgtcaggcgtgggacagcaccaccgtggtattcggcggagggaccaagctgaccgtccta

SEQ ID NO: 24774 - protein, 106 aa, synthetic construct
  REGION 1..106: note = Description of Artificial Sequence: Synthetic polypeptide
SYELTQPPSVSVSPGQTASITCSGDKLGDKFVYWYQQKPGQSPVLVIYQDSKRPSGIPERFSGSNSGNTATLTISGTQAMDEADYYCQAWDSTTVVFGGGTKLTVL

SEQ ID NO: 24775 - DNA, 321 bp, synthetic construct
  misc_feature 1..321: note = Description of Artificial Sequence: Synthetic polynucleotide
  source 1..321: mol_type = other DNA
tcctatgagctgactcagccaccctcagtgtccgtgtccccaggacagacagccagcatcacctgctctggagataaattgggggataaatatgtttgctggtatcagcagaagccaggccagtcccctgtgctggtcatctatcaagatcgcaagcggccctcagggatccctgagcgattctctggctccaactctgggaacacagccactctgaccatcagcgggacccaggctatggatgaggctgattattactgtcaggcgtggggcaacagcactgctgtggtattcggcggagggaccaagctgaccgtcctg

SEQ ID NO: 24776 - protein, 107 aa, synthetic construct
  REGION 1..107: note = Description of Artificial Sequence: Synthetic polypeptide
SYELTQPPSVSVSPGQTASITCSGDKLGDKYVCWYQQKPGQSPVLVIYQDRKRPSGIPERFSGSNSGNTATLTISGTQAMDEADYYCQAWGNSTAVVFGGGTKLTVL

SEQ ID NO: 24777 - DNA, 315 bp, synthetic construct
  misc_feature 1..315: note = Description of Artificial Sequence: Synthetic polynucleotide
  source 1..315: mol_type = other DNA
tcctatgagctgactcagccaccctcagtgtccgtgtccccaggacagacagccagcatcacctgctctggagataaattgggggaaaaatatgcttgctggtatcagcagaagccaggccagtcccctgtgctggtcatctatcaagatagaaagcggccctcagggatccctgagcgattctctggctccaactctgggaacacagccactctgaccatcagcgggacccaggctatggatgaggctgactattactgtcaggcgtgggacagcagcacggtattcggcggagggaccaaactgaccgtccta

SEQ ID NO: 24778 - protein, 105 aa, synthetic construct
  REGION 1..105: note = Description of Artificial Sequence: Synthetic polypeptide
SYELTQPPSVSVSPGQTASITCSGDKLGEKYACWYQQKPGQSPVLVIYQDRKRPSGIPERFSGSNSGNTATLTISGTQAMDEADYYCQAWDSSTVFGGGTKLTVL

SEQ ID NO: 24779 - DNA, 315 bp, synthetic construct
  misc_feature 1..315: note = Description of Artificial Sequence: Synthetic polynucleotide
  source 1..315: mol_type = other DNA
tcctatgagctgactcagccaccctcagtgtccgtgtccccagggcagacagccagcatcacctgctctggagataaattgggaaataaatatgcttgctggtatcagcagaagccaggccagtcccctgtgctggtcatctatcaagattccaagcggccctcagggatccctgagcgattctctggctccaactctgggaacacagccactctgaccatcagcgggacccaggctatggatgaggctgactattactgtcaggcgtgggacagcagcactgtattcggcggagggaccaaactgaccgtccta

SEQ ID NO: 24780 - protein, 105 aa, synthetic construct; identical to SEQ ID NO: 24772
  REGION 1..105: note = Description of Artificial Sequence: Synthetic polypeptide

SEQ ID NO: 24781 - DNA, 318 bp, synthetic construct
  misc_feature 1..318: note = Description of Artificial Sequence: Synthetic polynucleotide
  source 1..318: mol_type = other DNA
tcctatgagctgactcagccaccctcagtgtccgtgtccccaggacagacagccagcatcacctgctctggagataaattgggggataaatatgcttactggtttcagcagaagccaggccagtcccctgtgatagtcatctatcaagataggaagcggccctcagggatccctgagcgattctctggctccaactctgggaacacagccactctgaccatcagcgggacgcaggctatggatgaggctgactattactgtcaggcgtgggacaacagcactgcggtattcggcggagggaccaagctgaccgtccta

SEQ ID NO: 24782 - protein, 106 aa, synthetic construct
  REGION 1..106: note = Description of Artificial Sequence: Synthetic polypeptide
SYELTQPPSVSVSPGQTASITCSGDKLGDKYAYWFQQKPGQSPVIVIYQDRKRPSGIPERFSGSNSGNTATLTISGTQAMDEADYYCQAWDNSTAVFGGGTKLTVL

SEQ ID NO: 24783 - DNA, 333 bp, synthetic construct; identical to SEQ ID NO: 24741
  misc_feature 1..333: note = Description of Artificial Sequence: Synthetic polynucleotide
  source 1..333: mol_type = other DNA

SEQ ID NO: 24784 - protein, 111 aa, synthetic construct; identical to SEQ ID NO: 24742
  REGION 1..111: note = Description of Artificial Sequence: Synthetic polypeptide

SEQ ID NO: 24785 - DNA, 330 bp, synthetic construct
  misc_feature 1..330: note = Description of Artificial Sequence: Synthetic polynucleotide
  source 1..330: mol_type = other DNA
cagtctgccctgactcagcctgcctccgtgtctgggtctcctggacagtcgatcaccatctcctgcactggagccagcagtgacgttggtgattataactctgtctcctggtaccaacagcacccaggcaaagcccccaaactcatgatttatgaggtcagtaatcggccctcaggggtttctaatcgcttctctggctccaagtctggcaacacggcctccctgaccatctctgggctccaggctgaggacgaggctgattattactgcagctcatatacaagcagcatcactgtggtattcggcggagggaccaaactgaccgtccta

SEQ ID NO: 24786 - protein, 110 aa, synthetic construct
  REGION 1..110: note = Description of Artificial Sequence: Synthetic polypeptide
QSALTQPASVSGSPGQSITISCTGASSDVGDYNSVSWYQQHPGKAPKLMIYEVSNRPSGVSNRFSGSKSGNTASLTISGLQAEDEADYYCSSYTSSITVVFGGGTKLTVL

SEQ ID NO: 24787 - DNA, 315 bp, synthetic construct
  misc_feature 1..315: note = Description of Artificial Sequence: Synthetic polynucleotide
  source 1..315: mol_type = other DNA
tcctatgaagtgactcagccaccctcaatgtccgtgtccccaggacagacagccagcatcacctgctctggagataaattgggggataaatatgtttgctggtttcagcagaagccaggccagtcccctgtgttggtcatctatcaagatagcaagcggccctcagggatccctgagcgattctctggctccaactctgggaacacagccactctgaccatcagcgggacccaggctatggatgaggctgactattactgtcaggcgtgggtcaacaacactgtattcggcggagggaccaagctgaccgtccta

SEQ ID NO: 24788 - protein, 105 aa, synthetic construct
  REGION 1..105: note = Description of Artificial Sequence: Synthetic polypeptide
SYEVTQPPSMSVSPGQTASITCSGDKLGDKYVCWFQQKPGQSPVLVIYQDSKRPSGIPERFSGSNSGNTATLTISGTQAMDEADYYCQAWVNNTVFGGGTKLTVL

SEQ ID NO: 24789 - DNA, 318 bp, synthetic construct; identical to SEQ ID NO: 24221
  misc_feature 1..318: note = Description of Artificial Sequence: Synthetic polynucleotide
  source 1..318: mol_type = other DNA

SEQ ID NO: 24790 - protein, 106 aa, synthetic construct; identical to SEQ ID NO: 24222
  REGION 1..106: note = Description of Artificial Sequence: Synthetic polypeptide

SEQ ID NO: 24791 - DNA, 339 bp, synthetic construct
  misc_feature 1..339: note = Description of Artificial Sequence: Synthetic polynucleotide
  source 1..339: mol_type = other DNA
gacatcgtgatgacccagtctccagactccctggctgtgtctctgggcgagagggccaccatcaactgcaggtccagccagactattttacacagctccaacaattacaactacttagcttggtaccagcagaaaccaggacagcctcctaagctgctcatttactgggcatctacccgggaatccggggtccctgaccgattcagtggcagcgggtctgggacagatttcactctcaccatcagcagcctgcaggctgaagatgtggcagtttattactgtcagcaatattattgtactcctccgacgttcggccaagggaccaaggtggaaatcaaa

SEQ ID NO: 24792 - protein, 113 aa, synthetic construct
  REGION 1..113: note = Description of Artificial Sequence: Synthetic polypeptide
DIVMTQSPDSLAVSLGERATINCRSSQTILHSSNNYNYLAWYQQKPGQPPKLLIYWASTRESGVPDRFSGSGSGTDFTLTISSLQAEDVAVYYCQQYYCTPPTFGQGTKVEIK

SEQ ID NO: 24793 - DNA, 318 bp, synthetic construct
  misc_feature 1..318: note = Description of Artificial Sequence: Synthetic polynucleotide
  source 1..318: mol_type = other DNA
tcctatgagctgactcagccaccctcagtgtccgtgtccccaggacagacagccagcatcacctgctctggagataaattgggggataaatatgcttgctggtatcagcagaagccaggccagtcccctgtggtggtcatctatcaagatatgaagcggccctcagggatccctgagcgattctctggctccaactctgggaacacagccactctgaccatcagcgggacgcaggctatggatgaggctgactattactgtcaggcgtgggacaacagcactgcggtattcggcggagggaccaagctgaccgtccta

SEQ ID NO: 24794 - protein, 106 aa, synthetic construct
  REGION 1..106: note = Description of Artificial Sequence: Synthetic polypeptide
SYELTQPPSVSVSPGQTASITCSGDKLGDKYACWYQQKPGQSPVVVIYQDMKRPSGIPERFSGSNSGNTATLTISGTQAMDEADYYCQAWDNSTAVFGGGTKLTVL

SEQ ID NO: 24795 - DNA, 321 bp, synthetic construct
  misc_feature 1..321: note = Description of Artificial Sequence: Synthetic polynucleotide
  source 1..321: mol_type = other DNA
gaaattgtgttgacgcagtctccaggcaccctgtctttgtctccaggggaaagagccaccctctcctgcagggccagtcagagtgttagcagcagctacttagcctggtaccagcagaaacctggccaggctcccaggctcctcatctatggtacatccagcagggccactggcatcccagacaggttcagtggcagtgggtctgggacagacttcactctcaccatcagcagactggagcctgaagattttgcagtgtattactgtcagcagtatggtagttcacgcagttttggccaggggaccaagctggagatcaaa

SEQ ID NO: 24796 - protein, 107 aa, synthetic construct
  REGION 1..107: note = Description of Artificial Sequence: Synthetic polypeptide
EIVLTQSPGTLSLSPGERATLSCRASQSVSSSYLAWYQQKPGQAPRLLIYGTSSRATGIPDRFSGSGSGTDFTLTISRLEPEDFAVYYCQQYGSSRSFGQGTKLEIK

SEQ ID NO: 24797 - DNA, 321 bp, synthetic construct
  misc_feature 1..321: note = Description of Artificial Sequence: Synthetic polynucleotide
  source 1..321: mol_type = other DNA
gacatccagatgacccagtctccatcctccctgtctgcatctgttggagacagagtcaccatcacttgccgggcaagtcagggcattagaaatgatttaggctggtatcagcagaaaccagggaaagcccctaagcgcctgatctatgttacatccagtttgcaaggtggggtcccatcaaggttcagcggcagtggatctgggacagaattcactctcacaatcagcagcctgcagcctgaagattttgcaacttattactgtctacaacataatagttacccgctcactttcggcggagggaccaaggtggagatcaaa

SEQ ID NO: 24798 - protein, 107 aa, synthetic construct
  REGION 1..107: note = Description of Artificial Sequence: Synthetic polypeptide
DIQMTQSPSSLSASVGDRVTITCRASQGIRNDLGWYQQKPGKAPKRLIYVTSSLQGGVPSRFSGSGSGTEFTLTISSLQPEDFATYYCLQHNSYPLTFGGGTKVEIK

SEQ ID NO: 24799 - DNA, 321 bp, synthetic construct
  misc_feature 1..321: note = Description of Artificial Sequence: Synthetic polynucleotide
  source 1..321: mol_type = other DNA
gacatccagatgacccagtctccatcctccctgtctgcatctgtaggagacagagtcaccatcacttgccgggcaagtcagggcattagaaatgatttaggctggtatcagcagaaaccagggaaagcccctaagcgcctgatctatgctgcatccagtttgcaaagtggggtcccatcaaggttcagcggcagtggatctgggacagaattcactctcacaatcagcagcctgcagcctgaagattttgcaacttattactgtctacagcatagtagttacccgctcactttcggcggagggaccaaggtggagatcaaa

SEQ ID NO: 24800 - protein, 107 aa, synthetic construct
  REGION 1..107: note = Description of Artificial Sequence: Synthetic polypeptide
DIQMTQSPSSLSASVGDRVTITCRASQGIRNDLGWYQQKPGKAPKRLIYAASSLQSGVPSRFSGSGSGTEFTLTISSLQPEDFATYYCLQHSSYPLTFGGGTKVEIK

SEQ ID NO: 24801 - DNA, 321 bp, synthetic construct
  misc_feature 1..321: note = Description of Artificial Sequence: Synthetic polynucleotide
  source 1..321: mol_type = other DNA
gacatccagatgacccagtctccatcctccctgtctgcatctgtaggagacagagtcaccatcacttgccgggcaagtcagggcattagaaatgatttaggctggtatcagcagaaaccagggaaagcccctaagcgcctgatctatgctgcatccagtttgcaaagtggggtcccatcaaggttcagcggcagtggatctgggacagaattcactctcacaatcagcagcctgcagcctgaagattttgcaacttattactgtctacagcataatagtcaccctctcactttcggcggagggaccaaggtggagatcaaa

SEQ ID NO: 24802 - protein, 107 aa, synthetic construct
  REGION 1..107: note = Description of Artificial Sequence: Synthetic polypeptide
DIQMTQSPSSLSASVGDRVTITCRASQGIRNDLGWYQQKPGKAPKRLIYAASSLQSGVPSRFSGSGSGTEFTLTISSLQPEDFATYYCLQHNSHPLTFGGGTKVEIK

SEQ ID NO: 24803 - DNA, 321 bp, synthetic construct
  misc_feature 1..321: note = Description of Artificial Sequence: Synthetic polynucleotide
  source 1..321: mol_type = other DNA
gacatccagatgacccagtctccatcttccgtgtctgcatctgtaggagacagagtcaccatcacttgtcgggcgagtcagggtattagcacctggttagcctggtatcaacagaaaccagggaaagcccctaaactcctgatctatgatgcatccagtttgcaaagtggggtcccatcaaggttcagcggcagtggatctgggacagatttcactctcaccatcagcagcctgcagcctgaagattttgcaacttactattgtcaacaggctaacagtttcccgtggacgttcggccaagggaccaaggtggaaatcaaa

SEQ ID NO: 24804 - protein, 107 aa, synthetic construct
  REGION 1..107: note = Description of Artificial Sequence: Synthetic polypeptide
DIQMTQSPSSVSASVGDRVTITCRASQGISTWLAWYQQKPGKAPKLLIYDASSLQSGVPSRFSGSGSGTDFTLTISSLQPEDFATYYCQQANSFPWTFGQGTKVEIK

SEQ ID NO: 24805 - DNA, 321 bp, synthetic construct; identical to SEQ ID NO: 24299
  misc_feature 1..321: note = Description of Artificial Sequence: Synthetic polynucleotide
  source 1..321: mol_type = other DNA

SEQ ID NO: 24806 - protein, 107 aa, synthetic construct; identical to SEQ ID NO: 24244
  REGION 1..107: note = Description of Artificial Sequence: Synthetic polypeptide

SEQ ID NO: 24807 - DNA, 321 bp, synthetic construct
  misc_feature 1..321: note = Description of Artificial Sequence: Synthetic polynucleotide
  source 1..321: mol_type = other DNA
gacatccagatgacccagtctccatcctccctgtctgcatctgtaggagacagagtcaccatcacttgccggacaagtcagggcattagaaatgatttaggctggtatcagcagaaaccagggaaagcccctaagcgcctgatttatgctgcatccaatttgcaaagtggggtcccatcaaggttcagcggcagtggatctgggacagaattcactctcacaatcagcagcctgcagcctgaagattttgcaacttattactgtctacagcatagtgcttacccgctcactttcggcggagggaccaaggtggagatcaaa

SEQ ID NO: 24808 - protein, 107 aa, synthetic construct
  REGION 1..107: note = Description of Artificial Sequence: Synthetic polypeptide
DIQMTQSPSSLSASVGDRVTITCRTSQGIRNDLGWYQQKPGKAPKRLIYAASNLQSGVPSRFSGSGSGTEFTLTISSLQPEDFATYYCLQHSAYPLTFGGGTKVEIK

SEQ ID NO: 24809 - DNA, 321 bp, synthetic construct
  misc_feature 1..321: note = Description of Artificial Sequence: Synthetic polynucleotide
  source 1..321: mol_type = other DNA
gacatccagatgacccagtctccatcctccctgtctgcttctgtaggagacagagtcaccatcacttgccgggcaagtcaggccattagaaatgatttaggctggtatcagcagaaaccagggaaagcccctaagcgtctgatctatgctgcatccagtttgcaaagtggggtcccatcaaggttcagcggcagtggatctgggacagaattcactctcacaatcagcagcctgcagcctgaagattttgcaacttattactgtctacagcatagtagttacccgctcactttcggcggagggaccaaggtggagatcaaa

SEQ ID NO: 24810 - protein, 107 aa, synthetic construct
  REGION 1..107: note = Description of Artificial Sequence: Synthetic polypeptide
DIQMTQSPSSLSASVGDRVTITCRASQAIRNDLGWYQQKPGKAPKRLIYAASSLQSGVPSRFSGSGSGTEFTLTISSLQPEDFATYYCLQHSSYPLTFGGGTKVEIK

SEQ ID NO: 24811 - DNA, 321 bp, synthetic construct
  misc_feature 1..321: note = Description of Artificial Sequence: Synthetic polynucleotide
  source 1..321: mol_type = other DNA
gacatccagatgacccagtctccatcctccctgtctgcatctgtaggagacagagtcaccatcacttgccgggcaagtcagggcattagaaatgatttaggctggtatcagcagaaaccagggaaagcccctaagcgcctgatctatgctgcatccactttgcaaagtggggtcccatcaaggttcagcggcagtggatctgggacagaattcactctcacaatcagcagcctgcagcctgaagattttgcaacttattactgtctacagcataatagttacccgctcactttcggcggagggaccaaggtggagatcaaa

SEQ ID NO: 24812 - protein, 107 aa, synthetic construct
  REGION 1..107: note = Description of Artificial Sequence: Synthetic polypeptide
DIQMTQSPSSLSASVGDRVTITCRASQGIRNDLGWYQQKPGKAPKRLIYAASTLQSGVPSRFSGSGSGTEFTLTISSLQPEDFATYYCLQHNSYPLTFGGGTKVEIK

SEQ ID NO: 24813 - DNA, 321 bp, synthetic construct
  misc_feature 1..321: note = Description of Artificial Sequence: Synthetic polynucleotide
  source 1..321: mol_type = other DNA
gacatccagatgacccagtctccatcctccctgtctgcatctgtaggagacagagtcaccatcacttgccgggcaagtcagggcattagaaatgatttaggctggtatcagcagaaaccagggaaagcccctaagcgcctgatttatgctgcatccagtttgcaaagtggggtcccatcaaggttcagcggcagtggatctgggacagaattcactctcacaatcagcagcctgcagcctgaagattttgcaacttattactgtctacagcataatagttacccgttcactttcggcggagggaccaaggtggagatcaaa

SEQ ID NO: 24814 - protein, 107 aa, synthetic construct; identical to SEQ ID NO: 24348
  REGION 1..107: note = Description of Artificial Sequence: Synthetic polypeptide

SEQ ID NO: 24815 - DNA, 321 bp, synthetic construct; identical to SEQ ID NO: 24295
  misc_feature 1..321: note = Description of Artificial Sequence: Synthetic polynucleotide
  source 1..321: mol_type = other DNA

SEQ ID NO: 24816 - protein, 107 aa, synthetic construct; identical to SEQ ID NO: 24296
  REGION 1..107: note = Description of Artificial Sequence: Synthetic polypeptide

SEQ ID NO: 24817 - DNA, 324 bp, synthetic construct
  misc_feature 1..324: note = Description of Artificial Sequence: Synthetic polynucleotide
  source 1..324: mol_type = other DNA
gacatccagatgacccagtctccatcctccctgtctgcatctgtaggagacagagtcaccatcacttgccgggcaagtcagaacattagtagttatttaaattggtatcagcagaaaccagggaaagcccctaaactcctgatctatgctgcatccagtttgcaaagtggggtcccatcaaggttcagtggcagtggatctgggacagatttcactctcaccatcagcagtctgcaacctgaagattttgcaacttactactgtcaacagagttacaatacccccttcttcactttcggccctgggaccaaagtggatatcaaa

SEQ ID NO: 24818 - protein, 108 aa, synthetic construct
  REGION 1..108: note = Description of Artificial Sequence: Synthetic polypeptide
DIQMTQSPSSLSASVGDRVTITCRASQNISSYLNWYQQKPGKAPKLLIYAASSLQSGVPSRFSGSGSGTDFTLTISSLQPEDFATYYCQQSYNTPFFTFGPGTKVDIK

SEQ ID NO: 24819 - DNA, 321 bp, synthetic construct; identical to SEQ ID NO: 24247
  misc_feature 1..321: note = Description of Artificial Sequence: Synthetic polynucleotide
  source 1..321: mol_type = other DNA

SEQ ID NO: 24820 - protein, 107 aa, synthetic construct; identical to SEQ ID NO: 24146
  REGION 1..107: note = Description of Artificial Sequence: Synthetic polypeptide

SEQ ID NO: 24821 - DNA, 321 bp, synthetic construct
  misc_feature 1..321: note = Description of Artificial Sequence: Synthetic polynucleotide
  source 1..321: mol_type = other DNA
gacatccagatgacccagtctccatcctccctgtctgcatctgtaggagacagagtcaccatcacttgccgggcaagtcagggcattagaaatgatttaggctggtatcagcagaaaccagggaaagcccctaagcgcctgatctatggtgcatccagtttgcaaagtggggtcccatcaaggttcagcggcagtggatctgggacagaattcactctcacaatcagcagcctgcagcctgaagattttgcaacttattactgtctacagcataatagttacccgctcactttcggcggagggaccaaggtggagatcaaa

SEQ ID NO: 24822 - protein, 107 aa, synthetic construct
  REGION 1..107: note = Description of Artificial Sequence: Synthetic polypeptide
DIQMTQSPSSLSASVGDRVTITCRASQGIRNDLGWYQQKPGKAPKRLIYGASSLQSGVPSRFSGSGSGTEFTLTISSLQPEDFATYYCLQHNSYPLTFGGGTKVEIK

SEQ ID NO: 24823 - DNA, 321 bp, synthetic construct; identical to SEQ ID NO: 24247
  misc_feature 1..321: note = Description of Artificial Sequence: Synthetic polynucleotide
  source 1..321: mol_type = other DNA

SEQ ID NO: 24824 - protein, 107 aa, synthetic construct; identical to SEQ ID NO: 24146
  REGION 1..107: note = Description of Artificial Sequence: Synthetic polypeptide

SEQ ID NO: 24825 - DNA, 321 bp, synthetic construct; identical to SEQ ID NO: 24797
  misc_feature 1..321: note = Description of Artificial Sequence: Synthetic polynucleotide
  source 1..321: mol_type = other DNA

SEQ ID NO: 24826 - protein, 107 aa, synthetic construct; identical to SEQ ID NO: 24798
  REGION 1..107: note = Description of Artificial Sequence: Synthetic polypeptide

SEQ ID NO: 24827 - DNA, 321 bp, synthetic construct
  misc_feature 1..321: note = Description of Artificial Sequence: Synthetic polynucleotide
  source 1..321: mol_type = other DNA
gacatccagatgacccagtctccatcctcactgtttgcatttataggagacagagtcaccatcacttgtcgggcgagtcagggcattagcaattatttagcctggtttcagcagaaacctggaaaagcccctaagtccctgatttttgctgcatccagtttgcaaagtggggtcccatcaaagtttagcggcagtggatttgggacagatttcacttttcccatcagcagcctgcagcctgaagattttgcaaattattactgccaacagtattatagttacccattcactttcggccctgggacccaagtggatgtcaaa

SEQ ID NO: 24828 - protein, 107 aa, synthetic construct
  REGION 1..107: note = Description of Artificial Sequence: Synthetic polypeptide
DIQMTQSPSSLFAFIGDRVTITCRASQGISNYLAWFQQKPGKAPKSLIFAASSLQSGVPSKFSGSGFGTDFTFPISSLQPEDFANYYCQQYYSYPFTFGPGTQVDVK

SEQ ID NO: 24829 - DNA, 321 bp, synthetic construct
  misc_feature 1..321: note = Description of Artificial Sequence: Synthetic polynucleotide
  source 1..321: mol_type = other DNA
gacatccagatgacccagtctccatcctcccggtctgcatttgttggagacagagtcaccatcacttaccgggcaagtcagggcattagaaatgatttaggctggtatcagcagaaaccagggaaagcccctcagcgcctgatctatgctgcatccagtctgcaaagtggggtcccatcaaggttcagcggcagtggatatgggactgaattcaatatcacaatcagcagcttgcagcctgaagattttgcaatttattactgtatacagcataatagttacctgtggacgttcggccaagggaccaaggtggaaatcaca

SEQ ID NO: 24830 - protein, 107 aa, synthetic construct
  REGION 1..107: note = Description of Artificial Sequence: Synthetic polypeptide
DIQMTQSPSSRSAFVGDRVTITYRASQGIRNDLGWYQQKPGKAPQRLIYAASSLQSGVPSRFSGSGYGTEFNITISSLQPEDFAIYYCIQHNSYLWTFGQGTKVEIT

SEQ ID NO: 24831 - DNA, 321 bp, synthetic construct
  misc_feature 1..321: note = Description of Artificial Sequence: Synthetic polynucleotide
  source 1..321: mol_type = other DNA
gacttccagatgacccagtctccatcctccctgtctgcatctgtaggagacagagtcaccatcacttgccgggcaagtcagagtattctcagctatttaaattggtatcggcagaaaccagggagagcccctcaggtcctgatccatactacatccagtttgcaaagtggggtcccatcaaggttcagtggcagtggatctgggacagttttcactctcaccatcagcagtctgcaacctgaagattttgcaacttactactgtcaacagacttacagtaccccgctcactttcggcggagggaccagggtggagatcaac

SEQ ID NO: 24832 - protein, 107 aa, synthetic construct
  REGION 1..107: note = Description of Artificial Sequence: Synthetic polypeptide
DFQMTQSPSSLSASVGDRVTITCRASQSILSYLNWYRQKPGRAPQVLIHTTSSLQSGVPSRFSGSGSGTVFTLTISSLQPEDFATYYCQQTYSTPLTFGGGTRVEIN

SEQ ID NO: 24833 - DNA, 321 bp, synthetic construct
  misc_feature 1..321: note = Description of Artificial Sequence: Synthetic polynucleotide
  source 1..321: mol_type = other DNA
gacatccagatgacccagtctccatcctccctgtctgcatctgtcggagacagagtcaccgtcacttgccgggcaagtcagaacatttacaggtatttaaattggtatcaggggagaccagggagagcccctaaactcatgatctatgctgcatccagttcgcaaagtggggtcccatcaagattcagtggcagtggatctgggacagatttcactgtcaccatcagtagtcttcaacctgaagattttgcaacttattactgtcaacagagttacagtccccctttcactttcggcggaggggccaaggtggagatcgac

SEQ ID NO: 24834 - protein, 107 aa, synthetic construct
  REGION 1..107: note = Description of Artificial Sequence: Synthetic polypeptide
DIQMTQSPSSLSASVGDRVTVTCRASQNIYRYLNWYQGRPGRAPKLMIYAASSSQSGVPSRFSGSGSGTDFTVTISSLQPEDFATYYCQQSYSPPFTFGGGAKVEID

SEQ ID NO: 24835 - DNA, 324 bp, synthetic construct
  misc_feature 1..324: note = Description of Artificial Sequence: Synthetic polynucleotide
  source 1..324: mol_type = other DNA
gacatccagatgaccctgtctccatcctccctgtctgcatctgtaggagacagagtcaccatcacttgccgggcaattcagaacattagcagctatttaaattggtatcagcagaaaccagggaaagcccctaaactcgtgatctatgctgcatccagcttgcaaagtggggtcccatcaaggttcagtggcagaggatctgggacagatttcactctcaccatcggttgtgtgcaacgtgaagattttgcaacttactactgtcaacagagttacagaacccccttattcactttcggccctgggaccaaggttgatatcaaa

SEQ ID NO: 24836 - protein, 108 aa, synthetic construct
  REGION 1..108: note = Description of Artificial Sequence: Synthetic polypeptide
DIQMTLSPSSLSASVGDRVTITCRAIQNISSYLNWYQQKPGKAPKLVIYAASSLQSGVPSRFSGRGSGTDFTLTIGCVQREDFATYYCQQSYRTPLFTFGPGTKVDIK

SEQ ID NO: 24837 - DNA, 321 bp, synthetic construct
  misc_feature 1..321: note = Description of Artificial Sequence: Synthetic polynucleotide
  source 1..321: mol_type = other DNA
gacgtccagatgacccagtctccatcctccctgtctgcatctgcaggagacagagtcaccatcacttgccgggcaagtcagaacatttacagctatttaaattggtatcagcagaaaccagggagagcccctaaggtcctgatccatactgcatccagtttgcaaagtggggtcccatcaaggttcagtggcagtggatctggggcagatttcactctcaccatcaacagtctgcaacctgaagattttgcaacttactactgtcagcagagttacagtccccctctcactttcggcggagggaccaaggtagagatcaaa

SEQ ID NO: 24838 - protein, 107 aa, synthetic construct
  REGION 1..107: note = Description of Artificial Sequence: Synthetic polypeptide
DVQMTQSPSSLSASAGDRVTITCRASQNIYSYLNWYQQKPGRAPKVLIHTASSLQSGVPSRFSGSGSGADFTLTINSLQPEDFATYYCQQSYSPPLTFGGGTKVEIK

SEQ ID NO: 24839 - DNA, 321 bp, synthetic construct
  misc_feature 1..321: note = Description of Artificial Sequence: Synthetic polynucleotide
  source 1..321: mol_type = other DNA
gacatccagatgacccagtctccatcctccgcatctgcatctgtaggagtcagagtcaccatcatttgcctggcaagtcagggcattagaaatgatttaggctggtatcagcagaaaccagggaaagcccctaagcgcataatctatgttgcatgtagtttccaaagtggggtcccatcaaggttcagcggcagtggatatgggacagaattcactctcacaatcagcatcatgcagcctgaagatttcgcaacttattactgtctacaacataatctttacccgctcactttcggcggagggaccaaggtggagatcaaa

SEQ ID NO: 24840 - protein, 107 aa, synthetic construct
  REGION 1..107: note = Description of Artificial Sequence: Synthetic polypeptide
DIQMTQSPSSASASVGVRVTIICLASQGIRNDLGWYQQKPGKAPKRIIYVACSFQSGVPSRFSGSGYGTEFTLTISIMQPEDFATYYCLQHNLYPLTFGGGTKVEIK

SEQ ID NO: 24841 - DNA, 321 bp, synthetic construct
  misc_feature 1..321: note = Description of Artificial Sequence: Synthetic polynucleotide
  source 1..321: mol_type = other DNA
gacatccagatgatccagtctccatcctccctgtttgcatgtgtaggagacagagtcatcatcacttgccgggcaagtcagggcattagaaatgatttagactggtatcagcagaaaccagggaaagcccctaagcgcctgatctatgctgcatccagtttgcaaagtggggtcccatcaaggttcagcggcagtggatctgggacagaattcactctcacaatcagcagcgtgcagcgtgaagattttgcaacttattactgtgtacagcataatagttacccgctcactttcggcggagggaccaaggtggagatcaga

SEQ ID NO: 24842 - protein, 107 aa, synthetic construct
  REGION 1..107: note = Description of Artificial Sequence: Synthetic polypeptide
DIQMIQSPSSLFACVGDRVIITCRASQGIRNDLDWYQQKPGKAPKRLIYAASSLQSGVPSRFSGSGSGTEFTLTISSVQREDFATYYCVQHNSYPLTFGGGTKVEIR

SEQ ID NO: 24843 - DNA, 324 bp, synthetic construct
  misc_feature 1..324: note = Description of Artificial Sequence: Synthetic polynucleotide
  source 1..324: mol_type = other DNA
gacatccagatgacccagtctccatcctccccgtctgcatctgtaggagacagagtcaccatcactttccgggcaagtcagaacattattagttatttaaattggtatcagcagaaaccagggaaagcccgtaagctcgtgatctatggtgcatccagtttgcaaagtggggtcccatcaaggttcagtggcagtggatctgggacagatttcactctcaacatcagaagtctgcaacctgaagattttgcaacttactactgtcaacagagttacagtactcccttattcactttcggccctgggaccaaagtggatatcaaa

SEQ ID NO: 24844 - protein, 108 aa, synthetic construct
  REGION 1..108: note = Description of Artificial Sequence: Synthetic polypeptide
DIQMTQSPSSPSASVGDRVTITFRASQNIISYLNWYQQKPGKARKLVIYGASSLQSGVPSRFSGSGSGTDFTLNIRSLQPEDFATYYCQQSYSTPLFTFGPGTKVDIK

SEQ ID NO: 24845 - DNA, 321 bp, synthetic construct
  misc_feature 1..321: note = Description of Artificial Sequence: Synthetic polynucleotide
  source 1..321: mol_type = other DNA
gacatccagatgacccagtctccatcctccctgtctgcatctgtaggacacagagtccacctcacttgccgggcaagtcggggcatcagaggtgatttaggttggtatcgccagaaaccagggaaagcccctaagcgcttgatctatgctgcatccaatttgcaaagtggggtcccatcaaggttcagcggcagtggatatgggacagaattcactctcacaatcggcagcctgcagcctgaagattttgcaacttattactgtctacagcattatagttaccctcggacgttcggccaagggaccaaggtggaaatcaaa

SEQ ID NO: 24846 - protein, 107 aa, synthetic construct
  REGION 1..107: note = Description of Artificial Sequence: Synthetic polypeptide
DIQMTQSPSSLSASVGHRVHLTCRASRGIRGDLGWYRQKPGKAPKRLIYAASNLQSGVPSRFSGSGYGTEFTLTIGSLQPEDFATYYCLQHYSYPRTFGQGTKVEIK

SEQ ID NO: 24847 - DNA, 321 bp, synthetic construct
  misc_feature 1..321: note = Description of Artificial Sequence: Synthetic polynucleotide
  source 1..321: mol_type = other DNA
gacatccagatgacccagtctccatcctccctgtctgcatctgtaggagacagagtcaccatcacttgccgggcaagtcagggcattagaaatgatttaggctggtatcaacaaaaaccagggaaagcccctaagcgcattatttattctgcatccagtttgcaaagtggggtcccatcaaggttcatcggcagtggatgtgggactgaattcactctcacaatcagcagcctgcagcgtgaagattttgcagcttattacagtgtacagcattatagttacccgttcactttcggcggagggaccaaggtggagatcaaa

SEQ ID NO: 24848 - protein, 107 aa, synthetic construct
  REGION 1..107: note = Description of Artificial Sequence: Synthetic polypeptide
DIQMTQSPSSLSASVGDRVTITCRASQGIRNDLGWYQQKPGKAPKRIIYSASSLQSGVPSRFIGSGCGTEFTLTISSLQREDFAAYYSVQHYSYPFTFGGGTKVEIK

SEQ ID NO: 24849 - DNA, 321 bp, synthetic construct
  misc_feature 1..321: note = Description of Artificial Sequence: Synthetic polynucleotide
  source 1..321: mol_type = other DNA
gacatccagatgacccagtctccatcctccctgtctgcatctgtaggagacagagtcaccatcacttgccgggcaagtcagaacattagaaattatttaaattggtatcagcagaaatcagggagagcccctaagctcctgatctatgttgcatccagtttgcaaagtggggtcccatcaaggttcagtggcagtggatctgggacagaattcactctcaccatcaacagtctgcaacctgaagattttgcaatttatcactgtcatcagagtaacagtactcctctcacgttcggccaagggaccaaggtggaaatcaaa

SEQ ID NO: 24850 - protein, 107 aa, synthetic construct
  REGION 1..107: note = Description of Artificial Sequence: Synthetic polypeptide
DIQMTQSPSSLSASVGDRVTITCRASQNIRNYLNWYQQKSGRAPKLLIYVASSLQSGVPSRFSGSGSGTEFTLTINSLQPEDFAIYHCHQSNSTPLTFGQGTKVEIK

SEQ ID NO: 24851 - DNA, 321 bp, synthetic construct
  misc_feature 1..321: note = Description of Artificial Sequence: Synthetic polynucleotide
  source 1..321: mol_type = other DNA
gatatccagatgacccaggctccatcctcactgtctgcttctgtaggagacagagtcaccatcacttgtcgggcgagtcaggacattagcaatcatttagtctggtttcagcagaaaccagggaaagcccctaagtccctgatctttgctgcatccagtttacaaagtggggtcccatcacagttcagcggcagtggatctggaacagatttcactctcaccatcagcatcctgcagcctgaggattttgcaacttattactgccaccagtataatagttaccccttcactttcggccctgggaccaaagtggatttcaaa

SEQ ID NO: 24852 - protein, 107 aa, synthetic construct
  REGION 1..107: note = Description of Artificial Sequence: Synthetic polypeptide
DIQMTQAPSSLSASVGDRVTITCRASQDISNHLVWFQQKPGKAPKSLIFAASSLQSGVPSQFSGSGSGTDFTLTISILQPEDFATYYCHQYNSYPFTFGPGTKVDFK

SEQ ID NO: 24853 - DNA, 321 bp, synthetic construct
  misc_feature 1..321: note = Description of Artificial Sequence: Synthetic polynucleotide
  source 1..321: mol_type = other DNA
gacatccagatgacccagtctccatcctccctgtctccatctgtaggagacagagtcaccatcacttgccgggcaagtcagggcattagaaatgatttaggctggtatcagcagaaaccagggaaagcccctcagcgcctgatctctgctgcatccagtttgcaaagtggggtcccatcaaggttcagcggcagtggatctgggacagatttcactctcacaatcagcagtttgcagcctgaagattttgcaacttattactgtctacagcataatagttacccgctcactttcggcggagggaccaagatggagatcaaa

SEQ ID NO: 24854 - protein, 107 aa, synthetic construct
  REGION 1..107: note = Description of Artificial Sequence: Synthetic polypeptide
DIQMTQSPSSLSPSVGDRVTITCRASQGIRNDLGWYQQKPGKAPQRLISAASSLQSGVPSRFSGSGSGTDFTLTISSLQPEDFATYYCLQHNSYPLTFGGGTKMEIK

SEQ ID NO: 24855 - DNA, 321 bp, synthetic construct
  misc_feature 1..321: note = Description of Artificial Sequence: Synthetic polynucleotide
  source 1..321: mol_type = other DNA
gacatccagatgatccagtctccatccttcctgtttgcatgtgtaggagacagagtcaccatcacttgccgggcaagtcagggcattagaaatgatttaggctggtatcagcagaaaccagggaaagcccctaagcgcctgatatatgctgcatccagtttgcaaagtggggtcccatcaaggttcagcggcagtgtatctgggacagaattcactctcacaatcagcagcctgcagcctgaagatttcgcaacttattactgtctacagcataatagttacccgctcactttcggcggagggaccaaggtggagatcaaa

SEQ ID NO: 24856 - protein, 107 aa, synthetic construct
  REGION 1..107: note = Description of Artificial Sequence: Synthetic polypeptide
DIQMIQSPSFLFACVGDRVTITCRASQGIRNDLGWYQQKPGKAPKRLIYAASSLQSGVPSRFSGSVSGTEFTLTISSLQPEDFATYYCLQHNSYPLTFGGGTKVEIK

SEQ ID NO: 24857 - DNA, 321 bp, synthetic construct
  misc_feature 1..321: note = Description of Artificial Sequence: Synthetic polynucleotide
  source 1..321: mol_type = other DNA
gacatccagatgacccagtctccatcctcccggtctgcatttgttggagacagagtcaccatcacttgccgggcaagtcagggcattagaaatgatttagggtggtatcagcagaaaccagggaaagcccgtaagcgcctgatctatactgcatccagtttgcaaagtggggtcccatcaaggttcagcggcagtggatatgggactgaattcactatcacaatcagcagcttgcagcctgaagattttgcaacttattactgtatacagcataatagttacctgtggacgttcggccaagggaccaaggtggaaatcaaa

SEQ ID NO: 24858 - protein, 107 aa, synthetic construct
  REGION 1..107: note = Description of Artificial Sequence: Synthetic polypeptide
DIQMTQSPSSRSAFVGDRVTITCRASQGIRNDLGWYQQKPGKARKRLIYTASSLQSGVPSRFSGSGYGTEFTITISSLQPEDFATYYCIQHNSYLWTFGQGTKVEIK

SEQ ID NO: 24859 - DNA, 324 bp, synthetic construct
  misc_feature 1..324: note = Description of Artificial Sequence: Synthetic polynucleotide
  source 1..324: mol_type = other DNA
gacatccagatgacccagtctccatcctccctgtctgcatctgtaggagacagagtctccatcacttgccgggcaagtcagaatattaacaactatttaaattggtatcagcagaaaccagggaaaggccctaaggtcctgatccttactgcatccagtttgcaaagtggggtcccatcaaggttcagtggcagtggatctgggacagatttcactctcaccatcaacagtctgcaacctgaagattttgcaacttactactgtcaacagagttacactacccccacgtggacgttcggccaagggaccaaggtggaaatcaaa

SEQ ID NO: 24860 - protein, 108 aa, synthetic construct
  REGION 1..108: note = Description of Artificial Sequence: Synthetic polypeptide
DIQMTQSPSSLSASVGDRVSITCRASQNINNYLNWYQQKPGKGPKVLILTASSLQSGVPSRFSGSGSGTDFTLTINSLQPEDFATYYCQQSYTTPTWTFGQGTKVEIK

SEQ ID NO: 24861 - DNA, 321 bp, synthetic construct
  misc_feature 1..321: note = Description of Artificial Sequence: Synthetic polynucleotide
  source 1..321: mol_type = other DNA
gacatccagatgacccagtctccatcctccctgtctgcatctgtaggagacagagtcaccatcacttgccgggcaagtcagggcattagaaatgatttaggctggtatcagcagaaaccagggaaagcccctaagcgcctgatctatgctgcatccagtttacaaagtggggtcccatcaaggttcagcggcagtggttctgggacagaattcactctcacagtcagcagcctgcagcctgaagattttgcaagttattactgtctacacaacagtagttaccctgttaagtttgggggagggataaaggtggagatcaca

SEQ ID NO: 24862 - protein, 107 aa, synthetic construct
  REGION 1..107: note = Description of Artificial Sequence: Synthetic polypeptide
DIQMTQSPSSLSASVGDRVTITCRASQGIRNDLGWYQQKPGKAPKRLIYAASSLQSGVPSRFSGSGSGTEFTLTVSSLQPEDFASYYCLHNSSYPVKFGGGIKVEIT

SEQ ID NO: 24863 - DNA, 321 bp, synthetic construct
  misc_feature 1..321: note = Description of Artificial Sequence: Synthetic polynucleotide
  source 1..321: mol_type = other DNA
gacatccagatgacccagtctccatcctccctgtctgcatctgtaggagacagagtcaccatcacttgccgggcaagtcagggcattagaaatgatttaggctggtatcagcagaaaccagggaaagcccctaagcgcctgatctatgctgcatccagttcgcaaagtggtgtcccatcaaggttcagcggcagtcgatctgggacagaattcactctcacaatcagcagcctgcagcctgaagatcttgcagcttattactgtctacagcatcatagttacccgctcactttcggcggagggaccgaggtggagatctac

SEQ ID NO: 24864 - protein, 107 aa, synthetic construct
  REGION 1..107: note = Description of Artificial Sequence: Synthetic polypeptide
DIQMTQSPSSLSASVGDRVTITCRASQGIRNDLGWYQQKPGKAPKRLIYAASSSQSGVPSRFSGSRSGTEFTLTISSLQPEDLAAYYCLQHHSYPLTFGGGTEVEIY

SEQ ID NO: 24865 - DNA, 321 bp, synthetic construct
  misc_feature 1..321: note = Description of Artificial Sequence: Synthetic polynucleotide
  source 1..321: mol_type = other DNA
gacatccagatgatccagtctccatcctccccgtctgcatctgtaggagacagagtcaccatcacttgccgggcaagtcagggcattagaaatgatttaggctggtatcagcagaaatcagggaaagcccctaagcgcctgatatatgttgcatccagtttgcaaagtggggtcccatcaaggttcagcggcagtggatctgggacagaattcactatcacaatcagcagcgtgcagcctgaagattttgcaacttattactgtatacagcataatagttatccgttcactttcggcggagggaccaaggtggagatcaaa

SEQ ID NO: 24866 - protein, 107 aa, synthetic construct
  REGION 1..107: note = Description of Artificial Sequence: Synthetic polypeptide
DIQMIQSPSSPSASVGDRVTITCRASQGIRNDLGWYQQKSGKAPKRLIYVASSLQSGVPSRFSGSGSGTEFTITISSVQPEDFATYYCIQHNSYPFTFGGGTKVEIK

SEQ ID NO: 24867 - DNA, 321 bp, synthetic construct
  misc_feature 1..321: note = Description of Artificial Sequence: Synthetic polynucleotide
  source 1..321: mol_type = other DNA
gacatccagatgacccagtctccatcctccctgtttgcatctgtcggagacagagtcaccatcacttgccgggcaagtcagggcattagaaatgatttaggttggtatcagcagaaaccagggaaagcccctcagcgcctgatctatgctgcatccagtttgcaaagtggagtcccatcaaggttcagcggcagtggatttgggacagaattcactctcacaatcagcagcctgcagcttgaagattttgcaacttattactgtttacagcatgaaagttaccctctcactttcggcggagggaccaaggtggaaatcaaa

SEQ ID NO: 24868 - protein, 107 aa, synthetic construct
  REGION 1..107: note = Description of Artificial Sequence: Synthetic polypeptide
DIQMTQSPSSLFASVGDRVTITCRASQGIRNDLGWYQQKPGKAPQRLIYAASSLQSGVPSRFSGSGFGTEFTLTISSLQLEDFATYYCLQHESYPLTFGGGTKVEIK

SEQ ID NO: 24869 - DNA, 324 bp, synthetic construct
  misc_feature 1..324: note = Description of Artificial Sequence: Synthetic polynucleotide
  source 1..324: mol_type = other DNA
gacatccagatgacccagtctccatcctccccgtctgcatctgtaggagacagagtcaccatcactttccgggcaagtcagagcattagaagttatttaaattggtatcagcagaaaccagggaaagcccataaactcgtgatctatggtacatccagtttgcaaagtggggtcccatcaaggttcagtggcagtggatctgggacagacttcactctcaccatcagcagtctgcaacctgaagattttgcaacttactactgtcaacagagttacagtacccccttgttcactttcggccctgggaccaaagtggatatcaaa

SEQ ID NO: 24870 - protein, 108 aa, synthetic construct
  REGION 1..108: note = Description of Artificial Sequence: Synthetic polypeptide
DIQMTQSPSSPSASVGDRVTITFRASQSIRSYLNWYQQKPGKAHKLVIYGTSSLQSGVPSRFSGSGSGTDFTLTISSLQPEDFATYYCQQSYSTPLFTFGPGTKVDIK

SEQ ID NO: 24871 - DNA, 321 bp, synthetic construct
  misc_feature 1..321: note = Description of Artificial Sequence: Synthetic polynucleotide
  source 1..321: mol_type = other DNA
gacatccagatgacccagtctccatcctccctgtctgcatctgtaggcgacagagtcaccatcacttgccgggcaagtcataccattagaacctatttaaactggtatcagcagaaaccagggaaagcccctaagctcctgatctatgctgcatccagtttgcaaagtggggtcccatcaaggatcaatggcagtggatctgggacagatttcactctcaccatcaccaatctacagcctgaagattttgcaacttactactgtcaacagagttacaatatctcattcactttcggccctgggaccaaagtggatatcaaa

SEQ ID NO: 24872 - protein, 107 aa, synthetic construct
  REGION 1..107: note = Description of Artificial Sequence: Synthetic polypeptide
DIQMTQSPSSLSASVGDRVTITCRASHTIRTYLNWYQQKPGKAPKLLIYAASSLQSGVPSRINGSGSGTDFTLTITNLQPEDFATYYCQQSYNISFTFGPGTKVDIK

SEQ ID NO: 24873 - DNA, 321 bp, synthetic construct
  misc_feature 1..321: note = Description of Artificial Sequence: Synthetic polynucleotide
  source 1..321: mol_type = other DNA
gacatccagatgacccagtctccatcctcccggtctgcatctgtaggagacagagtcaccatcacttgccaggcgagtcaggacattagcaactatttaaattggtgtcaacagaaaccagggaaagcccttaagctcttgatatacgatgcatccactttggaaacaggggtcccctcaaggttcagtggaagtggatctgggacagattttactttcaccatcagcagcgtgcagcctgaagatattgcaacatattactgccaacagtatgataatgtcccgatcaccttcggccaagggacacgactggagattaaa

SEQ ID NO: 24874 - protein, 107 aa, synthetic construct
  REGION 1..107: note = Description of Artificial Sequence: Synthetic polypeptide
DIQMTQSPSSRSASVGDRVTITCQASQDISNYLNWCQQKPGKALKLLIYDASTLETGVPSRFSGSGSGTDFTFTISSVQPEDIATYYCQQYDNVPITFGQGTRLEIK

SEQ ID NO: 24875 - DNA, 321 bp, synthetic construct
  misc_feature 1..321: note = Description of Artificial Sequence: Synthetic polynucleotide
  source 1..321: mol_type = other DNA
gtcatccagatgacccagtctccatcctcactgtctgcctctgtaggagacagagtcaccatcacttgtcgggcgagtcagggcattagcaattatttagcctggtttcagcagaaaccagggaaagcccctaagtccctgatcaatgctgcatccagtgtgcagagtggggtcccatcaaaattcagcggcaatggatctgggacagacttcactctcaccatcagcagcctgcagcctgaggattttgcaacttattactgccaccagtatcacagttacccattcactttcggccctgggaccaaagtggatatcaaa

SEQ ID NO: 24876 - protein, 107 aa, synthetic construct
  REGION 1..107: note = Description of Artificial Sequence: Synthetic polypeptide
VIQMTQSPSSLSASVGDRVTITCRASQGISNYLAWFQQKPGKAPKSLINAASSVQSGVPSKFSGNGSGTDFTLTISSLQPEDFATYYCHQYHSYPFTFGPGTKVDIK

SEQ ID NO: 24877 - DNA, 321 bp, synthetic construct
  misc_feature 1..321: note = Description of Artificial Sequence: Synthetic polynucleotide
  source 1..321: mol_type = other DNA
gacatccagatgacccagtctccatcctcactgtttgcatctgtaggagacagagtcaccatcacttgtcgggcgagtcagggcattagcaattatttagcctggtttcagcagaaaccagggaaagcccctaagcgcctgatctatactgcatccagtttgcaaagtggggtcccatcaaagttcagcggcagtggatttgggacagatttcactctcaccatcagcagcctgcagcctgaagattttgcaacttattactgccaacagtataatagttacccattcactttcggccctgggaccaaagtggatatcaaa

SEQ ID NO: 24878 - protein, 107 aa, synthetic construct
  REGION 1..107: note = Description of Artificial Sequence: Synthetic polypeptide
DIQMTQSPSSLFASVGDRVTITCRASQGISNYLAWFQQKPGKAPKRLIYTASSLQSGVPSKFSGSGFGTDFTLTISSLQPEDFATYYCQQYNSYPFTFGPGTKVDIK

SEQ ID NO: 24879 - DNA, 324 bp, synthetic construct
  misc_feature 1..324: note = Description of Artificial Sequence: Synthetic polynucleotide
  source 1..324: mol_type = other DNA
gacattcagatgacccagtctccatcctccccgtctgcatctgtaggagacagagtcaccatcactttccgggcaagtcagaccattagtagttatttaaattggtatcagcagaaaccagggaaagcccctaaactcctgatctctgctgcatccagtttgcaaagtggggtcccatcaaggttcagtggcagtggatctgggacagatttcactctcaccatcagcagtctgcaacctgaagattttgcaacttactactgtcaacagagttacaatacccccttattcactttcggccctgggaccaaagtggttatcaaa

SEQ ID NO: 24880 - protein, 108 aa, synthetic construct
  REGION 1..108: note = Description of Artificial Sequence: Synthetic polypeptide
DIQMTQSPSSPSASVGDRVTITFRASQTISSYLNWYQQKPGKAPKLLISAASSLQSGVPSRFSGSGSGTDFTLTISSLQPEDFATYYCQQSYNTPLFTFGPGTKVVIK

SEQ ID NO: 24881 - DNA, 321 bp, synthetic construct
  misc_feature 1..321: note = Description of Artificial Sequence: Synthetic polynucleotide
  source 1..321: mol_type = other DNA
gacatccagatgacccagtctccatcctccctgtctgcatctgtaggagacagagtcaccatcacttgccgggcaagtcagaacatttacagttatttaaattggtatcaggagaaaccagggagagcccctaagctcctgatctatgctacatccagtttgcaaagtggggtcccatcaaggttcggtggcagtggatctgggacagatttcactctcaccatcagcagtctacaacctgaagattttgcaacttactactgtcaacagaattacagtccccctctcactttcggcggagggaccaaggtggagatcgaa

SEQ ID NO: 24882 - protein, 107 aa, synthetic construct
  REGION 1..107: note = Description of Artificial Sequence: Synthetic polypeptide
DIQMTQSPSSLSASVGDRVTITCRASQNIYSYLNWYQEKPGRAPKLLIYATSSLQSGVPSRFGGSGSGTDFTLTISSLQPEDFATYYCQQNYSPPLTFGGGTKVEIE

SEQ ID NO: 24883 - DNA, 321 bp, synthetic construct
  misc_feature 1..321: note = Description of Artificial Sequence: Synthetic polynucleotide
  source 1..321: mol_type = other DNA
gacatccagatgacccagtctccatcctccctgtctgcatctgtaggagaccgagtcaccatcacttgccggacaagtcagggcattagaaatgatttaggctggtatcagcacaaaccagggcaagcccctaagcgcctgatctatgctgcatccagtttacaaagtggggtcccatcaaggttcagcggcagtggatctgggacagaattcactctcacaatcagcagcctgcagcctgaagattttacagcttattactgtctgcagcattatagttaccctcggacgttcggccaagggaccaaggtggaaatcaag

SEQ ID NO: 24884 - protein, 107 aa, synthetic construct
  REGION 1..107: note = Description of Artificial Sequence: Synthetic polypeptide
DIQMTQSPSSLSASVGDRVTITCRTSQGIRNDLGWYQHKPGQAPKRLIYAASSLQSGVPSRFSGSGSGTEFTLTISSLQPEDFTAYYCLQHYSYPRTFGQGTKVEIK

SEQ ID NO: 24885 - DNA, 321 bp, synthetic construct
  misc_feature 1..321: note = Description of Artificial Sequence: Synthetic polynucleotide
  source 1..321: mol_type = other DNA
gacatccagatgacccagtctccatcctccctgtctgcatttgtaggagacagagtcaccatcacttgccgggcaagtcagaacattatcagctatttaaattggtatcaacagaaaccagggaaagcccctaacctcatgatatatgttacatccagtttgcacagtggggtcccatcaaggttcagtggcagtggatctgggacagatttctctctcaccatcagcagtctccaacctgaggattttgcaacttactactgtcaacagagttacagtacccctttcactttcggccctgggaccaaagtggatatcaaa

SEQ ID NO: 24886 - protein, 107 aa, synthetic construct
  REGION 1..107: note = Description of Artificial Sequence: Synthetic polypeptide
DIQMTQSPSSLSAFVGDRVTITCRASQNIISYLNWYQQKPGKAPNLMIYVTSSLHSGVPSRFSGSGSGTDFSLTISSLQPEDFATYYCQQSYSTPFTFGPGTKVDIK

SEQ ID NO: 24887 - DNA, 321 bp, synthetic construct
  misc_feature 1..321: note = Description of Artificial Sequence: Synthetic polynucleotide
  source 1..321: mol_type = other DNA
gaaatagtgatgacgcagtctccagccaccctgtctgtgtctccaggggaaagcgccaccctctcctgcagggccagtcagactgttagcagcaacttagcctggttccagcagaagcctggccaggctcccaggctcctcatcaatggtgcatccaccagggccactggtatcccagccaggttcagtggcagtgggtctgggacagagttcactctcaccatcagcagcctgcagtctgaagattttgcagtttatttctgtcagcagtatcatgactggcctccgacgttcggccaagggaccaaggtggaaatcaaa

SEQ ID NO: 24888 - protein, 107 aa, synthetic construct
  REGION 1..107: note = Description of Artificial Sequence: Synthetic polypeptide
EIVMTQSPATLSVSPGESATLSCRASQTVSSNLAWFQQKPGQAPRLLINGASTRATGIPARFSGSGSGTEFTLTISSLQSEDFAVYFCQQYHDWPPTFGQGTKVEIK

SEQ ID NO: 24889 - DNA, 321 bp, synthetic construct
  misc_feature 1..321: note = Description of Artificial Sequence: Synthetic polynucleotide
  source 1..321: mol_type = other DNA
gacatccagatgacccagtctccatcctccctgtctgcatctgtaggagacagagtcaccttcacttgccgggcaagtcaggacattagaagtgatttaggctggtatcagcagaaaccagggaaagcccctacgcgcctgatctttgctgcatccagtttgcaaagtggggtcccatcaaggttcagcggcagtggatctgggacagaattcactctcacaatcaacagcctgcagcctgaagattttgcaacttattactgtctacagcattatagttaccctcggacgttcggccaagggaccaaggtggaaatcaaa

SEQ ID NO: 24890 - protein, 107 aa, synthetic construct
  REGION 1..107: note = Description of Artificial Sequence: Synthetic polypeptide
DIQMTQSPSSLSASVGDRVTFTCRASQDIRSDLGWYQQKPGKAPTRLIFAASSLQSGVPSRFSGSGSGTEFTLTINSLQPEDFATYYCLQHYSYPRTFGQGTKVEIK

SEQ ID NO: 24891 - DNA, 321 bp, synthetic construct
  misc_feature 1..321: note = Description of Artificial Sequence: Synthetic polynucleotide
  source 1..321: mol_type = other DNA
gacatccagatgacccagtctccatcctccctgtctgcttctgtaggagacagagtcaccatcacttgccaggcgaatcaggacattaccaactttttaaattggtatcagctgaaaccagggaaagcccctaacctcctgatctccgatgcatccaatttggaaacaggggtcccatcaaggttcagtggaagtggatctgggacagattttactttcaccatcagcagcctgcagcctgaagatgttgcgacatattactgtcaacagtatgataatctcccgatcaccttcggccaagggacacgactggagattaaa

SEQ ID NO: 24892 - protein, 107 aa, synthetic construct
  REGION 1..107: note = Description of Artificial Sequence: Synthetic polypeptide
DIQMTQSPSSLSASVGDRVTITCQANQDITNFLNWYQLKPGKAPNLLISDASNLETGVPSRFSGSGSGTDFTFTISSLQPEDVATYYCQQYDNLPITFGQGTRLEIK

SEQ ID NO: 24893 - DNA, 321 bp, synthetic construct; identical to SEQ ID NO: 24891
  misc_feature 1..321: note = Description of Artificial Sequence: Synthetic polynucleotide
  source 1..321: mol_type = other DNA

SEQ ID NO: 24894 - protein, 107 aa, synthetic construct; identical to SEQ ID NO: 24892
  REGION 1..107: note = Description of Artificial Sequence: Synthetic polypeptide

SEQ ID NO: 24895 - DNA, 321 bp, synthetic construct
  misc_feature 1..321: note = Description of Artificial Sequence: Synthetic polynucleotide
  source 1..321: mol_type = other DNA
gacatccagatgacccagtctccatcctcactgtctgcctctgtaggagacagagtcaccatcacttgtcgggcgagtcagggcattaacaattatttagcctggtttcagcagaaaccagggaaagcccttaagtccctgatcaatgctgcatccagtgtgcagagtggggtcccatcaaagttcagcggcagtggatctgggacagacttcactctcaccatcagcagcctgcagcctgaagattttgcaacttattactgccaccagtatcacagttacccattcactttcggccctgggaccaaagtggatatcgta

SEQ ID NO: 24896 - protein, 107 aa, synthetic construct
  REGION 1..107: note = Description of Artificial Sequence: Synthetic polypeptide
DIQMTQSPSSLSASVGDRVTITCRASQGINNYLAWFQQKPGKALKSLINAASSVQSGVPSKFSGSGSGTDFTLTISSLQPEDFATYYCHQYHSYPFTFGPGTKVDIV

SEQ ID NO: 24897 - DNA, 321 bp, synthetic construct
  misc_feature 1..321: note = Description of Artificial Sequence: Synthetic polynucleotide
  source 1..321: mol_type = other DNA
gacatccagatgacccagtctccatcctccctgtctgcttctgtaggcgacagagtcaccatcacttgccgggcaagtcagggcattagaaatgatttaggctggtatcagcagaaaccagggaaagcccctacgcgcctgatctatgctgcatccagtttgcacagtggggtcccatcacggttcagcggcagtggatctgggacagaattcactctcacaatcagcagcctgcagcctgaagatcttgcaacttattactgtctacaacattatagtttccctcggacgttcggccgagggaccaaggtggaaatcaaa

SEQ ID NO: 24898 - protein, 107 aa, synthetic construct
  REGION 1..107: note = Description of Artificial Sequence: Synthetic polypeptide
DIQMTQSPSSLSASVGDRVTITCRASQGIRNDLGWYQQKPGKAPTRLIYAASSLHSGVPSRFSGSGSGTEFTLTISSLQPEDLATYYCLQHYSFPRTFGRGTKVEIK

SEQ ID NO: 24899 - DNA, 321 bp, synthetic construct
  misc_feature 1..321: note = Description of Artificial Sequence: Synthetic polynucleotide
  source 1..321: mol_type = other DNA
gacatccagatgacccagtctccatcctccctgtctgcatctgttggagacagagtcaccatcacttgccgggcaagtcagaacatttacaggtatttaaattggtatcaggagaaaccagggagagcccctaagctcctgatctatactgcatccagtttacaaagtggggtcccatcaaggttcagtggcagtgactctgggacagatttcactctcaccatcagcagtctgcaacctgaagattttgcaacttactactgtcaacagagttacagtccccctctcactttcggcggagggaccaaggtggagatcaaa

SEQ ID NO: 24900 - protein, 107 aa, synthetic construct
  REGION 1..107: note = Description of Artificial Sequence: Synthetic polypeptide
DIQMTQSPSSLSASVGDRVTITCRASQNIYRYLNWYQEKPGRAPKLLIYTASSLQSGVPSRFSGSDSGTDFTLTISSLQPEDFATYYCQQSYSPPLTFGGGTKVEIK

SEQ ID NO: 24901 - DNA, 321 bp, synthetic construct
  misc_feature 1..321: note = Description of Artificial Sequence: Synthetic polynucleotide
  source 1..321: mol_type = other DNA
gacatccagatgacccagtctccatcctccctgtctgcatctgtaggagacagagtcaccatcacttgccgggcaagtcagggcattagaaatgatttaggctggtatcagcagaaaccagggcaagcccctaagcgcctgatctatgctgcatccagtttacaaagtggggtcccatcaaggttcagcggcagtggatctgggacagaattcactctcacaatcagcagcctgcagcctgaagatcttgcaacttatcactgtctacagcataatagttacccgctcactttcggcggagggaccaaggtggagatcaaa

SEQ ID NO: 24902 - protein, 107 aa, synthetic construct
  REGION 1..107: note = Description of Artificial Sequence: Synthetic polypeptide
DIQMTQSPSSLSASVGDRVTITCRASQGIRNDLGWYQQKPGQAPKRLIYAASSLQSGVPSRFSGSGSGTEFTLTISSLQPEDLATYHCLQHNSYPLTFGGGTKVEIK

SEQ ID NO: 24903 - DNA, 321 bp, synthetic construct
  misc_feature 1..321: note = Description of Artificial Sequence: Synthetic polynucleotide
  source 1..321: mol_type = other DNA
gacatccagatgacccagtctccatcctccctggctgcatctgtaggagacagagtcaccatcacttgccgggcaagtcagaccattatcagctatttaaattggtatcagcagaaaccagggaaagcccctaaacttctgatccatactgcatccagtttgcaaagtggggtcccatcaaggttcagtggcagtggatctgggacagatttcactctctccatcagcagtctgcaacctgaagattttgcaacttactactgtcaacagacttacagtactccgctcactttcggcggagggaccaaggtggagatcaaa

SEQ ID NO: 24904 - protein, 107 aa, synthetic construct
  REGION 1..107: note = Description of Artificial Sequence: Synthetic polypeptide
DIQMTQSPSSLAASVGDRVTITCRASQTIISYLNWYQQKPGKAPKLLIHTASSLQSGVPSRFSGSGSGTDFTLSISSLQPEDFATYYCQQTYSTPLTFGGGTKVEIK

SEQ ID NO: 24905 - DNA, 321 bp, synthetic construct
  misc_feature 1..321: note = Description of Artificial Sequence: Synthetic polynucleotide
  source 1..321: mol_type = other DNA
gacatccagatgacccagtctccatcctccctgtttgcatctgtaggagacagagtcaccatcacttgccgggcaagtcagggcattagaaatgatttaggctggtatcagcagaaaccagggaaagcccctaagcgcctgatctatgctgcatccagtttgcaaagtggggtcccatcaaggttcagcggcagtggatttgggacagaattcactctcacaatcagcagcctgcagcttgaagattttgcaacttattactgtttacagcatgataattaccctctcactttcggcggagggaccaaggtggagatcaaa

SEQ ID NO: 24906 - protein, 107 aa, synthetic construct
  REGION 1..107: note = Description of Artificial Sequence: Synthetic polypeptide
DIQMTQSPSSLFASVGDRVTITCRASQGIRNDLGWYQQKPGKAPKRLIYAASSLQSGVPSRFSGSGFGTEFTLTISSLQLEDFATYYCLQHDNYPLTFGGGTKVEIK

SEQ ID NO: 24907 - DNA, 321 bp, synthetic construct
  misc_feature 1..321: note = Description of Artificial Sequence: Synthetic polynucleotide
  source 1..321: mol_type = other DNA
gacatccagatgacccagtctccatcctccctgtctgcatctgtaggagacagagtcaccatcgcttgccgggcaagtcaaaacattatcagctatttaaattggtatcaacagaaaccagggaaagcccctaaattcctgatctatactgcatccagtttgcaaagtggggtcccatcaaggttcagtggcagtggatctgggacagatttcactctcaccatcagcagtctgcaacctgaagattttgcaatttactactgtcaacagacttacagtaccccgctcactttcggcggcgggaccaaggtggagatcaaa

SEQ ID NO: 24908 - protein, 107 aa, synthetic construct
  REGION 1..107: note = Description of Artificial Sequence: Synthetic polypeptide
DIQMTQSPSSLSASVGDRVTIACRASQNIISYLNWYQQKPGKAPKFLIYTASSLQSGVPSRFSGSGSGTDFTLTISSLQPEDFAIYYCQQTYSTPLTFGGGTKVEIK

SEQ ID NO: 24909 - DNA, 321 bp, synthetic construct
  misc_feature 1..321: note = Description of Artificial Sequence: Synthetic polynucleotide
  source 1..321: mol_type = other DNA
gacatccagatgacccagtctccatcctccctgtctgcatctgttggagacagagtcaccatcacttgccgggcaagtcagaacatttacaggtatttaaattggtatcaggagaaaccagggagagcccctaaactcctgatctatactgcatccagtttgcaaagtggggtcccatcaaggttcagtggcagtgactctgggacagatttcactctcaccatcagcagtctgcaacctgaagattttgcaacttactactgtcaacagagttacagtccccctctcactttcggcggagggaccaaggtggagatcaaa

SEQ ID NO: 24910 - protein, 107 aa, synthetic construct; identical to SEQ ID NO: 24900
  REGION 1..107: note = Description of Artificial Sequence: Synthetic polypeptide

SEQ ID NO: 24911 - DNA, 321 bp, synthetic construct
  misc_feature 1..321: note = Description of Artificial Sequence: Synthetic polynucleotide
  source 1..321: mol_type = other DNA
gacatccaggtgacccagtctccatcttccctgtctgcatctgtaggagacagagtcaccatcactagccgggcaagtcagggcattagaaatgatttaggctggtatcagcagaaaccagggaaagcccctaagcgcctgatctatgctgcatccagtttgcaaagtggggtcccatcaaggttcagcggcagtggatctgggacagaattcactctcacaatcagcagcctgcagcctgaagattttgcaacttattactgtgtacagcataatagttacccgctcactttcggcggagggaccaaggtggcgatcaaa

SEQ ID NO: 24912 - protein, 107 aa, synthetic construct
  REGION 1..107: note = Description of Artificial Sequence: Synthetic polypeptide
DIQVTQSPSSLSASVGDRVTITSRASQGIRNDLGWYQQKPGKAPKRLIYAASSLQSGVPSRFSGSGSGTEFTLTISSLQPEDFATYYCVQHNSYPLTFGGGTKVAIK

SEQ ID NO: 24913 - DNA, 324 bp, synthetic construct
  misc_feature 1..324: note = Description of Artificial Sequence: Synthetic polynucleotide
  source 1..324: mol_type = other DNA
gacatccagatgacccagtctccatcctccctgtctgcatctataggagacagagtcaccatcacttgccgggcaagtcagagcattagcagttatttaaattggtatcagcagaaaccagggaaagcccctaagctcctgatctttgctgcatccagtttgcaaaatggggtcccatcaaggttcagtggcagtggatctgggacagatttcactctcaccatcagcagtctgcaacctgaagattttgcaacttactactgtcaacagacttacagtagccctccattcactttcgcccctgggaccaaagtggatatcaaa

SEQ ID NO: 24914 - protein, 108 aa, synthetic construct
  REGION 1..108: note = Description of Artificial Sequence: Synthetic polypeptide
DIQMTQSPSSLSASIGDRVTITCRASQSISSYLNWYQQKPGKAPKLLIFAASSLQNGVPSRFSGSGSGTDFTLTISSLQPEDFATYYCQQTYSSPPFTFAPGTKVDIK

SEQ ID NO: 24915 - DNA, 327 bp, synthetic construct
  misc_feature 1..327: note = Description of Artificial Sequence: Synthetic polynucleotide
  source 1..327: mol_type = other DNA
ggcgtccagatgacccagtctccatcctccctgtctgcatctgtaggagacagagtcaccatcacttgccgggcaagtcagagcattagcggctatttaaattggtatcagcagaaaccagggaaagcccctaagctcctgatctatgctgcatccagtttgcaaagtggggtcccatcaaggttcagtggcggtggatctgggacagatttcactctcaccatcagcagtctacaacctgaagattttgcaacttactactgtcaacagacttacaatacccctccggagcgcagttttggccaggggaccaagctggagatcaaa

SEQ ID NO: 24916 - protein, 109 aa, synthetic construct
  REGION 1..109: note = Description of Artificial Sequence: Synthetic polypeptide
GVQMTQSPSSLSASVGDRVTITCRASQSISGYLNWYQQKPGKAPKLLIYAASSLQSGVPSRFSGGGSGTDFTLTISSLQPEDFATYYCQQTYNTPPERSFGQGTKLEIK

SEQ ID NO: 24917 - DNA, 339 bp, synthetic construct
  misc_feature 1..339: note = Description of Artificial Sequence: Synthetic polynucleotide
  source 1..339: mol_type = other DNA
gacatcgtgatgacccagtctccagactccctggctgtgtctctgggcgagagggccaccctcaactgcaagtccagccagagtgttttatacagctccaacaataacaactacttaacttggtaccagcagaaacctggacagcgacctaagttgctcatttactgggcatctacccgggaatccggggtccctgaccgattcagtggcagcgggtctgggacaaatttcactctcaccatcagcagcctgcaggctgaagatgtggcagtttattactgtcagcaatattatagtactcctccgacgttcggccaagggaccaaggtggaaatcaaa

SEQ ID NO: 24918 - protein, 113 aa, synthetic construct
  REGION 1..113: note = Description of Artificial Sequence: Synthetic polypeptide
DIVMTQSPDSLAVSLGERATLNCKSSQSVLYSSNNNNYLTWYQQKPGQRPKLLIYWASTRESGVPDRFSGSGSGTNFTLTISSLQAEDVAVYYCQQYYSTPPTFGQGTKVEIK

SEQ ID NO: 24919 - DNA, 321 bp, synthetic construct
  misc_feature 1..321: note = Description of Artificial Sequence: Synthetic polynucleotide
  source 1..321: mol_type = other DNA
gacatccaaatgacccagtctccatcctccctgtctgcatctgtcggagacagtgtcaccatcacttgccgggcaagtcaggacattagaaatcatttaggctggtatcagcataaaccagggaaagcccctaagcgcctgatctatgctgcatccagtttgcaaagtggggtcccatctaggttcagcggcagtggatctgggacagaattcactctcacaatcagcagcctgcagcctgaagattttgcaacttattactgtctacagtataatagttacccattcactttcggccctgggaccaaagtggatatcaac

SEQ ID NO: 24920 - protein, 107 aa, synthetic construct
  REGION 1..107: note = Description of Artificial Sequence: Synthetic polypeptide
DIQMTQSPSSLSASVGDSVTITCRASQDIRNHLGWYQHKPGKAPKRLIYAASSLQSGVPSRFSGSGSGTEFTLTISSLQPEDFATYYCLQYNSYPFTFGPGTKVDIN

SEQ ID NO: 24921 - DNA, 321 bp, synthetic construct
  misc_feature 1..321: note = Description of Artificial Sequence: Synthetic polynucleotide
  source 1..321: mol_type = other DNA
gacatccagatgacccagtctccatcctcactgtctgcatctgtaggagacagagtcaccatcacttgtcgggcgagtcaggacattagtaattatttagcctggtttcagcagaaaccagggaaagcccctaagtccctgatctctgctgcatccagtttgcaaagtggggtcccatcaaaattcagcggcagtggatctgggacagatttcactctcaccatcagcagcctgcagcctgaagattttgcaacttattactgccaacagtatcatagttacccgtggacgttcggccaagggaccaaggtggaaatcaat

SEQ ID NO: 24922 - protein, 107 aa, synthetic construct
  REGION 1..107: note = Description of Artificial Sequence: Synthetic polypeptide
DIQMTQSPSSLSASVGDRVTITCRASQDISNYLAWFQQKPGKAPKSLISAASSLQSGVPSKFSGSGSGTDFTLTISSLQPEDFATYYCQQYHSYPWTFGQGTKVEIN

SEQ ID NO: 24923 - DNA, 321 bp, synthetic construct
  misc_feature 1..321: note = Description of Artificial Sequence: Synthetic polynucleotide
  source 1..321: mol_type = other DNA
gacatccagatgacccagtctccttcctccctgtctgcatctgtaggagacagagtcaccatcacttgccgggcaagtcagggcattagaaatgatttaggctgctatcagcagaaaccagggaaagcccctaagcgcctgatctatgctgcatccagtttgcaaagtggggtcccatcaaggttcagcggcaatggatatgggacagaattcactctcacaatcagcagcctgcagcctgaagattttgcaacttattactgtctacagcataatagttacccgtggacgttcggccaagggaccaaggtggaaatcaaa

SEQ ID NO: 24924 - protein, 107 aa, synthetic construct
  REGION 1..107: note = Description of Artificial Sequence: Synthetic polypeptide
DIQMTQSPSSLSASVGDRVTITCRASQGIRNDLGCYQQKPGKAPKRLIYAASSLQSGVPSRFSGNGYGTEFTLTISSLQPEDFATYYCLQHNSYPWTFGQGTKVEIK

SEQ ID NO: 24925 - DNA, 318 bp, synthetic construct; identical to SEQ ID NO: 24733
  misc_feature 1..318: note = Description of Artificial Sequence: Synthetic polynucleotide
  source 1..318: mol_type = other DNA

SEQ ID NO: 24926 - protein, 106 aa, synthetic construct; identical to SEQ ID NO: 24734
  REGION 1..106: note = Description of Artificial Sequence: Synthetic polypeptide

SEQ ID NO: 24927 - DNA, 321 bp, synthetic construct
  misc_feature 1..321: note = Description of Artificial Sequence: Synthetic polynucleotide
  source 1..321: mol_type = other DNA
gacatccagatgacccagtctccatcctcactgtctgcatctgtaggagacagagtcaccatcacttgtcgggcgagtcagggcattaacaattatttagcctggtttcagcagaaatcagggaaagcccctaagtccctgatctctgttgcatccagtttgcaaactggggtcccatcaaggttcagcggcagtggatctgggacagatttcactctcaccatcagcagcctgcagcctgaagattttgcaacttattactgccaacagtataatagttaccctctcactttcggcggagggaccaaggtggagatcaaa

SEQ ID NO: 24928 - protein, 107 aa, synthetic construct
  REGION 1..107: note = Description of Artificial Sequence: Synthetic polypeptide
DIQMTQSPSSLSASVGDRVTITCRASQGINNYLAWFQQKSGKAPKSLISVASSLQTGVPSRFSGSGSGTDFTLTISSLQPEDFATYYCQQYNSYPLTFGGGTKVEIK

SEQ ID NO: 24929 - DNA, 321 bp, synthetic construct
  misc_feature 1..321: note = Description of Artificial Sequence: Synthetic polynucleotide
  source 1..321: mol_type = other DNA
gacatccagatgacccagtctccatcttccgtgtctgcatctgtaggagacagagtcaccatcacttgtcgggcgagtcagggtattagcaggtggttagcctggtatcagcagaaaccagggaaagcccctaagctcctgatctatggtgcatccagtttgcaaagtggggtcccatcaaggttcagcggcagtggatctgggacagatttcactctcaccatcagcagcctgcagcctgaagattttgcaatttattattgtcaacaggctaacagtttcccattcactttcggccctgggaccaaagtggatatcaaa

SEQ ID NO: 24930 - protein, 107 aa, synthetic construct
  REGION 1..107: note = Description of Artificial Sequence: Synthetic polypeptide
DIQMTQSPSSVSASVGDRVTITCRASQGISRWLAWYQQKPGKAPKLLIYGASSLQSGVPSRFSGSGSGTDFTLTISSLQPEDFAIYYCQQANSFPFTFGPGTKVDIK

SEQ ID NO: 24931 - DNA, 327 bp, synthetic construct
  misc_feature 1..327: note = Description of Artificial Sequence: Synthetic polynucleotide
  source 1..327: mol_type = other DNA
gacatccagatgacccagtctccatcctccctgtctgcatctgtaggagacagagtcaccatcacttgccgggcaagtcagagcattagcgactatttaaattggtatcagcagaaaccagggaaagcccctaaactcctgatctttgatacaaccagtttgcaaagtggggtcccatcaaggttcagtggcagtggatctgggacagatttcactctcaccatcaacagtctgcaacctgaagattttgcaacttactactgtcaacagacttacaatacccctccggagcgcagttttggccaggggaccaagctggagatcaaa

SEQ ID NO: 24932 - protein, 109 aa, synthetic construct
  REGION 1..109: note = Description of Artificial Sequence: Synthetic polypeptide
DIQMTQSPSSLSASVGDRVTITCRASQSISDYLNWYQQKPGKAPKLLIFDTTSLQSGVPSRFSGSGSGTDFTLTINSLQPEDFATYYCQQTYNTPPERSFGQGTKLEIK

SEQ ID NO: 24933 - DNA, 321 bp, synthetic construct
  misc_feature 1..321: note = Description of Artificial Sequence: Synthetic polynucleotide
  source 1..321: mol_type = other DNA
gacatccagatgacccagtctccatcctccctgtctgcatctgtaacagacagagtcaccatcacttgccgggcaagtcagggcattagaaatgatttaggctggtatcagcagaaaccagggaaagcccctaagcgcctgatctatgctgcatccagtttgcaaagtggggtcccatcaaggttcagcggcagtggatctgggacagaattcagtctcacaatcagcagcctgcagcctgaagattttgcaacttattactgtctacagcataatagttaccctctcactttcggcggagggaccaaggtggagatcaaa

SEQ ID NO: 24934 - protein, 107 aa, synthetic construct
  REGION 1..107: note = Description of Artificial Sequence: Synthetic polypeptide
DIQMTQSPSSLSASVTDRVTITCRASQGIRNDLGWYQQKPGKAPKRLIYAASSLQSGVPSRFSGSGSGTEFSLTISSLQPEDFATYYCLQHNSYPLTFGGGTKVEIK

SEQ ID NO: 24935 - DNA, 321 bp, synthetic construct
  misc_feature 1..321: note = Description of Artificial Sequence: Synthetic polynucleotide
  source 1..321: mol_type = other DNA
gacatccagatgacccagtctccatcctccctgtctgcgtctgtaggagacagagtcaccatcacttgccgggcaagtcagggcattagaaatgatttaggctggtatcagcagaaaccagggaaagcccctaagcgcctgatctatactgcatccagtttgcaaagtggggtcccatcaaggttcagcggcagtggatctgggacagaattcactctcacaatcagcagcctgcagcctgaagattttgcaacttattactgtctacaacataatagttacccgtggacgttcggcctagggaccaaggtggtcatcaaa

SEQ ID NO: 24936 - protein, 107 aa, synthetic construct
  REGION 1..107: note = Description of Artificial Sequence: Synthetic polypeptide
DIQMTQSPSSLSASVGDRVTITCRASQGIRNDLGWYQQKPGKAPKRLIYTASSLQSGVPSRFSGSGSGTEFTLTISSLQPEDFATYYCLQHNSYPWTFGLGTKVVIK

SEQ ID NO: 24937 - DNA, 321 bp, synthetic construct
  misc_feature 1..321: note = Description of Artificial Sequence: Synthetic polynucleotide
  source 1..321: mol_type = other DNA
gacatccagatgacccagtctccatcctccctgtctgcatctgtaggagacagagtcaccatcacttgccgggcaagtcagggcattagaaatgatttaggctggtatcagcagaaaccagggaaagcccctaagcgcctgatctatgctgcatccagtttgcaaagtggggtcacatcaaggttcagcggcagtggatctgggacagaattcactctcacaatcagcagcctgcagcctgaagattttgcaacttattactgtctacagcatagtagttacccgttcactttcgtcggagggaccaaagtggagatcaaa

SEQ ID NO: 24938 - protein, 107 aa, synthetic construct
  REGION 1..107: note = Description of Artificial Sequence: Synthetic polypeptide
DIQMTQSPSSLSASVGDRVTITCRASQGIRNDLGWYQQKPGKAPKRLIYAASSLQSGVTSRFSGSGSGTEFTLTISSLQPEDFATYYCLQHSSYPFTFVGGTKVEIK

SEQ ID NO: 24939 - DNA, 321 bp, synthetic construct
  misc_feature 1..321: note = Description of Artificial Sequence: Synthetic polynucleotide
  source 1..321: mol_type = other DNA
gacatccagatgacccagtctccatcctccctgtctgcatctgtaggagacagagtcaccatcacttgccggacaagtcagaacattatcagctatttaaattggtatcagcagaaaccagggaaagcccctaaggtcctgatctatactgcatccaatttgcaaactggggtcccatcagggttcagtggcagtggatctgggacagatttcactctcaccatcagcagtctgcaacctgaagattttgcaacttactactgtcaacagcctcacagtcccccgctcactttcggcggagggaccaaggtggagatcaaa

SEQ ID NO: 24940 - protein, 107 aa, synthetic construct
  REGION 1..107: note = Description of Artificial Sequence: Synthetic polypeptide
DIQMTQSPSSLSASVGDRVTITCRTSQNIISYLNWYQQKPGKAPKVLIYTASNLQTGVPSGFSGSGSGTDFTLTISSLQPEDFATYYCQQPHSPPLTFGGGTKVEIK

SEQ ID NO: 24941 - DNA, 321 bp, synthetic construct
  misc_feature 1..321: note = Description of Artificial Sequence: Synthetic polynucleotide
  source 1..321: mol_type = other DNA
gacatccagatgacccagtctccatcctccctgtctgcatctgtgggagacagagtcaccatcacttgccgggcaagtcagggcattggaaatgatttaggctggtatcagcagaaaccagggaaagcccctaagcgcctgatctatgctgcatccagtttgcaaagtggggtcccatcacggttcagcggcagtgtatctgggacagaattcactctcccaatcagcagcctgcagcctgaagattttgcaacttattactgtctacaacattatacttaccctcggacgttcggccaagggaccaaggtggaaatcaaa

SEQ ID NO: 24942 - protein, 107 aa, synthetic construct
  REGION 1..107: note = Description of Artificial Sequence: Synthetic polypeptide
DIQMTQSPSSLSASVGDRVTITCRASQGIGNDLGWYQQKPGKAPKRLIYAASSLQSGVPSRFSGSVSGTEFTLPISSLQPEDFATYYCLQHYTYPRTFGQGTKVEIK

SEQ ID NO: 24943 - DNA, 321 bp, synthetic construct; identical to SEQ ID NO: 24483
  misc_feature 1..321: note = Description of Artificial Sequence: Synthetic polynucleotide
  source 1..321: mol_type = other DNA

SEQ ID NO: 24944 - protein, 107 aa, synthetic construct; identical to SEQ ID NO: 24484
  REGION 1..107: note = Description of Artificial Sequence: Synthetic polypeptide

SEQ ID NO: 24945 - DNA, 321 bp, synthetic construct
  misc_feature 1..321: note = Description of Artificial Sequence: Synthetic polynucleotide
  source 1..321: mol_type = other DNA
gacatccagatgacccagtctccatcctccctgtctgcatctggaggagacagagtcaccatcacttgccgggcaagtcagggcattagaaacgatttaggctggtatcagcagaaaccagggaaagcccctaagcgcctgatctatgctgcatccagtttgcaaagtggggtcccatcaaggttcagcggcagtggatctgggacagaattcactctcacaatcagcagcctgcagcctgaagattttgcaacttattactgtctacagctttatagttaccctcggacgttcggccaggggaccaaggtggatatcaaa

SEQ ID NO: 24946 - protein, 107 aa, synthetic construct
  REGION 1..107: note = Description of Artificial Sequence: Synthetic polypeptide
DIQMTQSPSSLSASGGDRVTITCRASQGIRNDLGWYQQKPGKAPKRLIYAASSLQSGVPSRFSGSGSGTEFTLTISSLQPEDFATYYCLQLYSYPRTFGQGTKVDIK

SEQ ID NO: 24947 - DNA, 321 bp, synthetic construct
  misc_feature 1..321: note = Description of Artificial Sequence: Synthetic polynucleotide
  source 1..321: mol_type = other DNA
gacatccagatgacccagtctccatcctccctgtttgcatctgtaggagacagagtcaccatcacttgccgggcaagtcagggcattagaaatgatttaggctggtatcagcagaaaccagggaaagcccataagcgccttatatatgctgcatccagtttgcaaagtggggtcccatcaaggttcagcggcagtggatctgggacagaattcactctcacaatcagcagcctgcagcctgaagattttgcaacttattactgtctacagcataatagttacccgctcactttcggcggagggaccaaggtggagatcaaa

SEQ ID NO: 24948 - protein, 107 aa, synthetic construct
  REGION 1..107: note = Description of Artificial Sequence: Synthetic polypeptide
DIQMTQSPSSLFASVGDRVTITCRASQGIRNDLGWYQQKPGKAHKRLIYAASSLQSGVPSRFSGSGSGTEFTLTISSLQPEDFATYYCLQHNSYPLTFGGGTKVEIK

SEQ ID NO: 24949 - DNA, 321 bp, synthetic construct
  misc_feature 1..321: note = Description of Artificial Sequence: Synthetic polynucleotide
  source 1..321: mol_type = other DNA
gacatccagatgacccagtctccatcctccctgtttgcatctgtaggagacagagtcaccatcacttgccgggcaagtcagggcattagaaatgatttaggctggtatgagcagaaaccagggaaagcccctaagcgcctgatctatactgcatccagtttgcaaagtggggtcccatcaaggttcagcggcagtggatctgggacagaattcactctcacaatcagcagcctgcagcctgaagattttgcaacttattactgtctacagcataatagttacccgctcactttcggcggagggaccaaggtggagatcaaa

SEQ ID NO: 24950 - protein, 107 aa, synthetic construct
  REGION 1..107: note = Description of Artificial Sequence: Synthetic polypeptide
DIQMTQSPSSLFASVGDRVTITCRASQGIRNDLGWYEQKPGKAPKRLIYTASSLQSGVPSRFSGSGSGTEFTLTISSLQPEDFATYYCLQHNSYPLTFGGGTKVEIK

SEQ ID NO: 24951 - DNA, 321 bp, synthetic construct
  misc_feature 1..321: note = Description of Artificial Sequence: Synthetic polynucleotide
  source 1..321: mol_type = other DNA
gacatccagatgacccagtctccatcctccctgtctgcttctgtaggcgacagagtcaccatcacttgccgggcaagtcagggcattagaaatgatttaggctggtatcagcagaaaccagggaaagcccctacgcgcctgatctatgctgcatccagtttgcacagtggggtcccatcacggttcagcggcagtggatctgggacagaattcactctcacaatcagcagcctgcagcctgaagatcttgcaacttattactgtctacaacattatagtttccctcggacgttcggccaagggaccaaggtggaaatcaaa

SEQ ID NO: 24952 - protein, 107 aa, synthetic construct
  REGION 1..107: note = Description of Artificial Sequence: Synthetic polypeptide
DIQMTQSPSSLSASVGDRVTITCRASQGIRNDLGWYQQKPGKAPTRLIYAASSLHSGVPSRFSGSGSGTEFTLTISSLQPEDLATYYCLQHYSFPRTFGQGTKVEIK

SEQ ID NO: 24953 - DNA, 324 bp, synthetic construct
  misc_feature 1..324: note = Description of Artificial Sequence: Synthetic polynucleotide
  source 1..324: mol_type = other DNA
gacatccagatgacccagtctccatcctccctgtctgcatctgtaggagacagagtcaccatcacttgccggacaagtcagagcattagtacttatttaaattggtatcagcagaaaccagggaaagcccctaagctcctgatctttgctgcatccagtttgcaaagtggggtcccatcaaggttcagtggcagtggatctgggacagatttcactctcaccatcagcagtctgcaacctgaagattttgcaacttacttctgtcaacagagttacagaaccccctttttcactttcggccctgggaccaaagtggatatcaaa

SEQ ID NO: 24954 - protein, 108 aa, synthetic construct
  REGION 1..108: note = Description of Artificial Sequence: Synthetic polypeptide
DIQMTQSPSSLSASVGDRVTITCRTSQSISTYLNWYQQKPGKAPKLLIFAASSLQSGVPSRFSGSGSGTDFTLTISSLQPEDFATYFCQQSYRTPFFTFGPGTKVDIK

SEQ ID NO: 24955 - DNA, 321 bp, synthetic construct
  misc_feature 1..321: note = Description of Artificial Sequence: Synthetic polynucleotide
  source 1..321: mol_type = other DNA
gacatccagatgacccagtctccatcctccctgtctgcatctgtaggagacagaggcaccatcacttgccgggcaagtcagggcattagaagtaatttaggctggtatcagcagaaaccagggaaagcccctaagcgcctgatctatgctgcatccagtttggaaagtggggtcccatcaaggttcagcggcagtggatctgggacagaattcactctcacaatcagcagcctgcagcctgaagattttgcaacttatttctgtctacaggataatagttatccgttcactttcggcggagggaccaaggtggagatcaaa

SEQ ID NO: 24956 - protein, 107 aa, synthetic construct
  REGION 1..107: note = Description of Artificial Sequence: Synthetic polypeptide
DIQMTQSPSSLSASVGDRGTITCRASQGIRSNLGWYQQKPGKAPKRLIYAASSLESGVPSRFSGSGSGTEFTLTISSLQPEDFATYFCLQDNSYPFTFGGGTKVEIK

SEQ ID NO: 24957 - DNA, 321 bp, synthetic construct
  misc_feature 1..321: note = Description of Artificial Sequence: Synthetic polynucleotide
  source 1..321: mol_type = other DNA
gacatccagatgacccagtctccatcctccctgtctgcatctgtaggagacagagtcaccatcacttgccgggcaagtcagggcattagaaatgatttaggctggtatcagcagaaaccagggaaagcccctaagcgcctgatctatgctgcatccagtttgcaaagtggggtcccatcaaggttcagcggcggtggatctgggacaatattcactctcacaatcagcagcctgcagcctgaagattttgcaacttattactgtctacagcataatagttacgcgctcactttcggcggagggaccaaggtggagatcaaa

SEQ ID NO: 24958 - protein, 107 aa, synthetic construct
  REGION 1..107: note = Description of Artificial Sequence: Synthetic polypeptide
DIQMTQSPSSLSASVGDRVTITCRASQGIRNDLGWYQQKPGKAPKRLIYAASSLQSGVPSRFSGGGSGTIFTLTISSLQPEDFATYYCLQHNSYALTFGGGTKVEIK

SEQ ID NO: 24959 - DNA, 321 bp, synthetic construct
  misc_feature 1..321: note = Description of Artificial Sequence: Synthetic polynucleotide
  source 1..321: mol_type = other DNA
gacatccagatgacccagtctccatcctccctgtctgcatctgtaggagacagagtcaccatcacttgccgggcaagtcagggcattagaaatgatttaggctggtatcagcagagaccagggaaagcccctaagcgcctgatctatgctgcatccagtttgcaaagtggggtcccatcaaggttcagcggcagtggatctgggacagaattcactctcacaatcagcagcctgcagcctgaagattctgcaacttattactgtctacatcaatatagttaccctcggacgttcggccaagggaccaaggtggaaatcaaa

SEQ ID NO: 24960 - protein, 107 aa, synthetic construct
  REGION 1..107: note = Description of Artificial Sequence: Synthetic polypeptide
DIQMTQSPSSLSASVGDRVTITCRASQGIRNDLGWYQQRPGKAPKRLIYAASSLQSGVPSRFSGSGSGTEFTLTISSLQPEDSATYYCLHQYSYPRTFGQGTKVEIK

SEQ ID NO: 24961 - DNA, 321 bp, synthetic construct
  misc_feature 1..321: note = Description of Artificial Sequence: Synthetic polynucleotide
  source 1..321: mol_type = other DNA
gacatccagatgacccagtcgccatccgcactgtctgcatctgtaggagacagagtcaccatcacttgtcgggcgagtcaggacattaggaattatttagcctggtttcagcagaaaccagggaaagcccctaagtccctgatctctgttgcatccagtttgcaaagtggggtcccatcaaggttcagcgggagtggatctgggacagatttcactctcaccatcagcagcctgcagcctgaagattttgcaacttattattgccaacagtataatagttaccctctcactttcggcggagggaccaaggtggagatcaaa

SEQ ID NO: 24962 - protein, 107 aa, synthetic construct
  REGION 1..107: note = Description of Artificial Sequence: Synthetic polypeptide
DIQMTQSPSALSASVGDRVTITCRASQDIRNYLAWFQQKPGKAPKSLISVASSLQSGVPSRFSGSGSGTDFTLTISSLQPEDFATYYCQQYNSYPLTFGGGTKVEIK

SEQ ID NO: 24963 - DNA, 321 bp, synthetic construct
  misc_feature 1..321: note = Description of Artificial Sequence: Synthetic polynucleotide
  source 1..321: mol_type = other DNA
gacatccagatgacccagtctccatcctccctgtctgcatctgtaggagacagagtcaccatcacttgccgggcaagtcagggcattagaaatgatttaggctggtatcagcagaaaccagggaaagcccctaagcgcctgatctatgctgcatccagtttgcaaagtggggtcccatcaaggttcagcggcagtggatctgggacagaattcactctcacaatcagcagcctgcagcctgaagattttgcaacttattactgtctacagcatagtaattaccctctcactttcggcggagggaccatggtggagatcaga

SEQ ID NO: 24964 - protein, 107 aa, synthetic construct
  REGION 1..107: note = Description of Artificial Sequence: Synthetic polypeptide
DIQMTQSPSSLSASVGDRVTITCRASQGIRNDLGWYQQKPGKAPKRLIYAASSLQSGVPSRFSGSGSGTEFTLTISSLQPEDFATYYCLQHSNYPLTFGGGTMVEIR

SEQ ID NO: 24965 - DNA, 321 bp, synthetic construct
  misc_feature 1..321: note = Description of Artificial Sequence: Synthetic polynucleotide
  source 1..321: mol_type = other DNA
gacatccagatgacccagtctccatcctcactgtctgcatctgtaggagacagagtcaccatcacttgtcgggcgagtcagggcattagctattatttagcctggtttcagcagaaaccagggaaagcccctaagtccctgatctatgttgcatccagtttgcaaagtggggtcccatcaaagttcagcggcagtggatctgggacagatttcactctcaccatcagcagcctgcagcctgaagattttgcaacttattactgccaacagtataatagttacccattcactttcggccctgggaccaaagtggatatcaat

SEQ ID NO: 24966 - protein, 107 aa, synthetic construct
  REGION 1..107: note = Description of Artificial Sequence: Synthetic polypeptide
DIQMTQSPSSLSASVGDRVTITCRASQGISYYLAWFQQKPGKAPKSLIYVASSLQSGVPSKFSGSGSGTDFTLTISSLQPEDFATYYCQQYNSYPFTFGPGTKVDIN

SEQ ID NO: 24967 - DNA, 321 bp, synthetic construct
  misc_feature 1..321: note = Description of Artificial Sequence: Synthetic polynucleotide
  source 1..321: mol_type = other DNA
gacatccagatgacccagtctccatcctccctgtctgcatctataggagacagagtcaccatcacttgccgggcaagtcaggccattagaaatgatttagactggtatcagcagaaaccagggaaagcccctaagcgccttatctatgctgcatccagtttgcaaagtggggtcccatcaaggttcagcggcagtggatctgggacagaattcactctcacaatcagcagcctgcagactgaagattttgcaacttattactgtctacagcataatagttatccgctcactttcggcggagggaccaaggtggagatcaaa

SEQ ID NO: 24968 - protein, 107 aa, synthetic construct
  REGION 1..107: note = Description of Artificial Sequence: Synthetic polypeptide
DIQMTQSPSSLSASIGDRVTITCRASQAIRNDLDWYQQKPGKAPKRLIYAASSLQSGVPSRFSGSGSGTEFTLTISSLQTEDFATYYCLQHNSYPLTFGGGTKVEIK

SEQ ID NO: 24969 - DNA, 321 bp, synthetic construct
  misc_feature 1..321: note = Description of Artificial Sequence: Synthetic polynucleotide
  source 1..321: mol_type = other DNA
gacatccagatgacccagtctccatcctccctgtctgcatctgtaggagacagagtcaccatcacttgccgggcaagtcagggcattagaaatgatttaggctggtatcagcagaagccagggaaagtccctaagcgcctgatctatgctgcatccagtttgcaaagtggggtcccatcaaggttcagcggcagtggatctgggacagaattcactctcacaatcagcagcctgcagcctgaagattttgcaacttattactgtctactgcattatagttaccctcggacgttcggccgagggaccaaggtggaaatcaaa

SEQ ID NO: 24970 - protein, 107 aa, synthetic construct
  REGION 1..107: note = Description of Artificial Sequence: Synthetic polypeptide
DIQMTQSPSSLSASVGDRVTITCRASQGIRNDLGWYQQKPGKVPKRLIYAASSLQSGVPSRFSGSGSGTEFTLTISSLQPEDFATYYCLLHYSYPRTFGRGTKVEIK

SEQ ID NO: 24971 - DNA, 321 bp, synthetic construct; identical to SEQ ID NO: 24935
  misc_feature 1..321: note = Description of Artificial Sequence: Synthetic polynucleotide
  source 1..321: mol_type = other DNA

SEQ ID NO: 24972 - protein, 107 aa, synthetic construct; identical to SEQ ID NO: 24936
  REGION 1..107: note = Description of Artificial Sequence: Synthetic polypeptide

SEQ ID NO: 24973 - DNA, 321 bp, synthetic construct
  misc_feature 1..321: note = Description of Artificial Sequence: Synthetic polynucleotide
  source 1..321: mol_type = other DNA
gacatccagatgacccagtctccatcctccctgtctgcatctgtaggagacagagtcaccatcacttgccaggcgagtcaggacattagcaactatttaaattggtatcagcagaaaccagggaaagcccctaagctcctgatctacgatgcatccaatttggaaacaggggtcccctcaagattcagtggaagtggatctgggacagattttactttcaccatcagcagcctgcaacctgaggatgttgcaacatattactgtcaacagtatgataatctcccgatcaccttcggccaagggacacgactggacattaaa

SEQ ID NO: 24974 - protein, 107 aa, synthetic construct
  REGION 1..107: note = Description of Artificial Sequence: Synthetic polypeptide
DIQMTQSPSSLSASVGDRVTITCQASQDISNYLNWYQQKPGKAPKLLIYDASNLETGVPSRFSGSGSGTDFTFTISSLQPEDVATYYCQQYDNLPITFGQGTRLDIK

SEQ ID NO: 24975 - DNA, 321 bp, synthetic construct
  misc_feature 1..321: note = Description of Artificial Sequence: Synthetic polynucleotide
  source 1..321: mol_type = other DNA
gacatccagatgacccagtctccatcctccctgtctgcatctgtaggagacagagtcaccatcacttgccgggcaagtcagggcattagaaatgatttaggctggtatcagcagaaaccagggaaagcccctaagcgcctgatctatgctgcatccagtttgcaaagtgggatcccatcaaggttcagcggcagtggatttgggacagaattcactctcacaatcagcagcctgcagcctgaagattttgcaacttattactgtctacagcatagtaattaccctctcactttcggcggagggaccaaggtggagatcaaa

SEQ ID NO: 24976 - protein, 107 aa, synthetic construct
  REGION 1..107: note = Description of Artificial Sequence: Synthetic polypeptide
DIQMTQSPSSLSASVGDRVTITCRASQGIRNDLGWYQQKPGKAPKRLIYAASSLQSGIPSRFSGSGFGTEFTLTISSLQPEDFATYYCLQHSNYPLTFGGGTKVEIK

SEQ ID NO: 24977 - DNA, 321 bp, synthetic construct
  misc_feature 1..321: note = Description of Artificial Sequence: Synthetic polynucleotide
  source 1..321: mol_type = other DNA
gacatccagatgacccagtctccatcctccctgtctgcatctgtaggagacagagtcaccatcacttgccaggcgagtcaggacattaacaactatttaaattggtatcagcagaaactagggacagcccctaagctcctgatctacgatggatccaatttggaaacaggggtcccatcaaggttcagtggaagtggatctgggacagattttactttcaccatcagcagcctgcagcctgaagatattgcaacatattactgtcaacagtatgaaaatctcccgatcactttcggccaagggacacgactggagattaaa

SEQ ID NO: 24978 - protein, 107 aa, synthetic construct
  REGION 1..107: note = Description of Artificial Sequence: Synthetic polypeptide
DIQMTQSPSSLSASVGDRVTITCQASQDINNYLNWYQQKLGTAPKLLIYDGSNLETGVPSRFSGSGSGTDFTFTISSLQPEDIATYYCQQYENLPITFGQGTRLEIK

SEQ ID NO: 24979 - DNA, 321 bp, synthetic construct
  misc_feature 1..321: note = Description of Artificial Sequence: Synthetic polynucleotide
  source 1..321: mol_type = other DNA
gacatccagatgacccagtctccatcctccctgtctgcatctgtaggagacagagtcaccatcacttgccaggcgagtcaggacattaccaactatttaaattggtatcagcagaaaccagggaaagcccctaacctcctgatctacgatgcatccaatttggaaacaggggtcccatcaaggttcagtggaagtggatctgggacagattttactttcaccatcagcagcctgcagcctgaagatattgcgacatattactgtcaacagtatgataatctcccgatcaccttcgcccaagggacacgactggagattaaa

SEQ ID NO: 24980 - protein, 107 aa, synthetic construct
  REGION 1..107: note = Description of Artificial Sequence: Synthetic polypeptide
DIQMTQSPSSLSASVGDRVTITCQASQDITNYLNWYQQKPGKAPNLLIYDASNLETGVPSRFSGSGSGTDFTFTISSLQPEDIATYYCQQYDNLPITFAQGTRLEIK

SEQ ID NO: 24981 - DNA, 321 bp, synthetic construct
  misc_feature 1..321: note = Description of Artificial Sequence: Synthetic polynucleotide
  source 1..321: mol_type = other DNA
gacatccagatgacccagtctccatcctccctgtctgcatctgtaggagacagagtcaccatcacttgccgggcaagtcagggcattagaaatgatttaggctggtatcagcagaaaccagggaaagcccctaagcgcctgatctttgctgcatccagtttgcaaagtggcgtcccatcacggttcagcggcagtggatctgggacagaattcactctcacaatcagcagcctgcagcctgaagattttgcaacttattactgtctacagcataatagttacccgctcactttcggcggagggaccaaggtggagatcaga

SEQ ID NO: 24982 - protein, 107 aa, synthetic construct
  REGION 1..107: note = Description of Artificial Sequence: Synthetic polypeptide
DIQMTQSPSSLSASVGDRVTITCRASQGIRNDLGWYQQKPGKAPKRLIFAASSLQSGVPSRFSGSGSGTEFTLTISSLQPEDFATYYCLQHNSYPLTFGGGTKVEIR

SEQ ID NO: 24983 - DNA, 321 bp, synthetic construct
  misc_feature 1..321: note = Description of Artificial Sequence: Synthetic polynucleotide
  source 1..321: mol_type = other DNA
gacatccagatgacccagtctccatcctccctgtctgcctctgtaggagacagagtcaccatcccttgccgggcgagtcaggacattagcaattatttagcctggtatcagcagaaaccagggaaagttcctaagctcctgatctatgctgcatacattttgcaatcaggggtcccatctcggttcagtggcagtggatctgggacagatttcactctcaccatcagcagcctgcagcctgaagatgttgcagcttattactgtcaaaagtatgacagtgccccattcactttcggccctgggaccaaagtggatatcaaa

SEQ ID NO: 24984 - protein, 107 aa, synthetic construct
  REGION 1..107: note = Description of Artificial Sequence: Synthetic polypeptide
DIQMTQSPSSLSASVGDRVTIPCRASQDISNYLAWYQQKPGKVPKLLIYAAYILQSGVPSRFSGSGSGTDFTLTISSLQPEDVAAYYCQKYDSAPFTFGPGTKVDIK

SEQ ID NO: 24985 - DNA, 321 bp, synthetic construct
  misc_feature 1..321: note = Description of Artificial Sequence: Synthetic polynucleotide
  source 1..321: mol_type = other DNA
gacatccagatgacccagtctccatcctccctgtctgcatctgtaggagacagagtcaccatcacttgccgggcaagtcagagcattatcagctatttaaattggtatctgcagaaaccagggaaagcccctaagttcctgatctatactgcatccagtttgcaaagtggggtcccatcaaggttcagtggcagtggatctgggacagatttcactctcaccatcagcagtctgcaacctgaagattttgcaacttactactgtcaacagacttacagtaccccgctcactttcggcggagggaccaaggtggagatcaag

SEQ ID NO: 24986 - protein, 107 aa, synthetic construct
  REGION 1..107: note = Description of Artificial Sequence: Synthetic polypeptide
DIQMTQSPSSLSASVGDRVTITCRASQSIISYLNWYLQKPGKAPKFLIYTASSLQSGVPSRFSGSGSGTDFTLTISSLQPEDFATYYCQQTYSTPLTFGGGTKVEIK

SEQ ID NO: 24987 - DNA, 324 bp, synthetic construct
  misc_feature 1..324: note = Description of Artificial Sequence: Synthetic polynucleotide
  source 1..324: mol_type = other DNA
gacatccagatgacccagtctccatcctccctgtctgcatctgtaggagacagagtcaccatcacttgccgggcaagtcagagcattagtagttatttaaattggtatcagcagaaaccagggaaagcccccaagctcctgatctttgctgcatccagtttgcaaagtggggtcccatcaaggttcagtggcagtggatctgggacagatttcactctcaccatcagcagtctgcaacctgaagattttgcaacttacttctgtcaacagagttacagaaccccctttttcactttcggccctgggaccaaagtggatatcaaa

SEQ ID NO: 24988 - protein, 108 aa, synthetic construct
  REGION 1..108: note = Description of Artificial Sequence: Synthetic polypeptide
DIQMTQSPSSLSASVGDRVTITCRASQSISSYLNWYQQKPGKAPKLLIFAASSLQSGVPSRFSGSGSGTDFTLTISSLQPEDFATYFCQQSYRTPFFTFGPGTKVDIK

SEQ ID NO: 24989 - DNA, 321 bp, synthetic construct
  misc_feature 1..321: note = Description of Artificial Sequence: Synthetic polynucleotide
  source 1..321: mol_type = other DNA
gacctccagatgacccagtctccatcctccctgtctgcatctgtaggagaccgagtcaccatcacttgccgggcaagtcagagcattttcagctacttaaattggtatcagcagaaaccagggaaagcccctaagctcctgatctgtactgcatccagtttgcaaaatggggtcccatcaaggttcagtggcagtggatctgggacagatttcactctcaccatcagcagtctacagcctgaggattttgcaacttactactgtcaacagacttacagtcttccgctcactttcggcggagggaccaaggtggagatcaaa

SEQ ID NO: 24990 - protein, 107 aa, synthetic construct
  REGION 1..107: note = Description of Artificial Sequence: Synthetic polypeptide
DLQMTQSPSSLSASVGDRVTITCRASQSIFSYLNWYQQKPGKAPKLLICTASSLQNGVPSRFSGSGSGTDFTLTISSLQPEDFATYYCQQTYSLPLTFGGGTKVEIK

SEQ ID NO: 24991 - DNA, 321 bp, synthetic construct
  misc_feature 1..321: note = Description of Artificial Sequence: Synthetic polynucleotide
  source 1..321: mol_type = other DNA
gacatccagatgacccagtctccatcctcactgtctgcatctgtaggagacagagtcaccatcacttgtcgggcgagtcagggcattagcaattatttagcctggtttcagcagaaaccagggaaagcccctaagtccctaatctctgctgcatccagtttgcaaagtggggtcccatcaaacttcagcggcagtggatctgggacagatttcactctcaccatcagcagcctgcagcctgaagattttgcaacttattactgccaacagtatcatagttacccattcactttcggccctgggaccaaagtggatatcaaa

SEQ ID NO: 24992 - protein, 107 aa, synthetic construct
  REGION 1..107: note = Description of Artificial Sequence: Synthetic polypeptide
DIQMTQSPSSLSASVGDRVTITCRASQGISNYLAWFQQKPGKAPKSLISAASSLQSGVPSNFSGSGSGTDFTLTISSLQPEDFATYYCQQYHSYPFTFGPGTKVDIK

SEQ ID NO: 24993 - DNA, 321 bp, synthetic construct
  misc_feature 1..321: note = Description of Artificial Sequence: Synthetic polynucleotide
  source 1..321: mol_type = other DNA
gacatccagatgacccagtctccatcctccctgtctgcatctgtaggagacagagtcaccatcacttgccgggcaagtcagggcattagaaatgatttaggctggtatcagcagaaaccagggaaagcccctaagcgcctgatctatgctgcatccagtttgcaaagtggggtcccatcaaggttcagcggcagtggatctgggacagaattcactctcacaatcagcagcctgcagcctgaagattttgcaagttattactgtctacagcataatagttacccgctcactttcggcggagggaccaaggtggagatcaat

SEQ ID NO: 24994 - protein, 107 aa, synthetic construct
  REGION 1..107: note = Description of Artificial Sequence: Synthetic polypeptide
DIQMTQSPSSLSASVGDRVTITCRASQGIRNDLGWYQQKPGKAPKRLIYAASSLQSGVPSRFSGSGSGTEFTLTISSLQPEDFASYYCLQHNSYPLTFGGGTKVEIN

SEQ ID NO: 24995 - DNA, 324 bp, synthetic construct
  misc_feature 1..324: note = Description of Artificial Sequence: Synthetic polynucleotide
  source 1..324: mol_type = other DNA
gacatccagatgacccagtctccatcctccctgtctgcatctgtaggagacagagtcaccatcacttgccgggcaagtcagaacattagcagctatttaaattggtatcagcagaaaccagggaaagcccctaagctcctgatctatgctgcatccagtttgcaaagtggggtcccatcaaggttcagtggcagaggatctgggacagatttcactctcaccatcagtagtctgcaacctgaagattttgcaacttactactgtcaacagagttacagaacccccttattcactttcggccctgggaccaaggttgatttcaaa

SEQ ID NO: 24996 - protein, 108 aa, synthetic construct
  REGION 1..108: note = Description of Artificial Sequence: Synthetic polypeptide
DIQMTQSPSSLSASVGDRVTITCRASQNISSYLNWYQQKPGKAPKLLIYAASSLQSGVPSRFSGRGSGTDFTLTISSLQPEDFATYYCQQSYRTPLFTFGPGTKVDFK

SEQ ID NO: 24997 - DNA, 321 bp, synthetic construct
  misc_feature 1..321: note = Description of Artificial Sequence: Synthetic polynucleotide
  source 1..321: mol_type = other DNA
gacatccagatgacccagtctccatcctccctgtctgcatctgtaggagacagagtcaccatcacttgccgggcaagtcagggcattagaaatgatttaggctggtatcagcagaaaccagggaaagcccctaagcgcctgatctatgctgcatccagtttgcaaagtggggtcccatcaaggttcagcggcagtggatctgggacagaattcactctcacaatcagcagcctgcagcctgaagattttgcaacttattactgtctacagcataatagttacccgctcactttcggcggagggaccaaggtggagttcaat

SEQ ID NO: 24998 - protein, 107 aa, synthetic construct
  REGION 1..107: note = Description of Artificial Sequence: Synthetic polypeptide
DIQMTQSPSSLSASVGDRVTITCRASQGIRNDLGWYQQKPGKAPKRLIYAASSLQSGVPSRFSGSGSGTEFTLTISSLQPEDFATYYCLQHNSYPLTFGGGTKVEFN

SEQ ID NO: 24999 - DNA, 321 bp, synthetic construct
  misc_feature 1..321: note = Description of Artificial Sequence: Synthetic polynucleotide
  source 1..321: mol_type = other DNA
gacatccagatgacccagtctccatcctcactgtctgcttctgtaggagacagagtcaccatcacttgtcgggcgagtcagggcattagcaattatttagcctggtttcagcagaaaccagggaaagcccctaagtccctgatctctgctgcatccagtttgcaaagtggggtcccatcaaagttcagcggcagtggatctgggacagatttcactctcaccatcagcagcctgcagcctgaagattttgcaacttattactgccaacagtataatagttacccattcactttcggccctgggaccaaagtggatatcaaa

SEQ ID NO: 25000 - protein, 107 aa, synthetic construct; identical to SEQ ID NO: 24484
  REGION 1..107: note = Description of Artificial Sequence: Synthetic polypeptide

SEQ ID NO: 25001 - DNA, 321 bp, synthetic construct
  misc_feature 1..321: note = Description of Artificial Sequence: Synthetic polynucleotide
  source 1..321: mol_type = other DNA
gacatccagatgacccagtctccatcctccctgtctgcatctgtaggagacagagtcaccatcacttgccaggcgagtcaggacattaacaactatttaaattggtatcaacagaaaccagggaaagcccctaagctcctgatatacgatgcatccaatttggaaacaggggtcccatcaaggttcagtggaagtggatctgggacagattttactttcaccatcagcagtctgcagcctgaagatattacaacatattactgtcaacagtatgaaaatctcccgatcaccttcggccaagggacacgactggagattaaa

SEQ ID NO: 25002 - protein, 107 aa, synthetic construct
  REGION 1..107: note = Description of Artificial Sequence: Synthetic polypeptide
DIQMTQSPSSLSASVGDRVTITCQASQDINNYLNWYQQKPGKAPKLLIYDASNLETGVPSRFSGSGSGTDFTFTISSLQPEDITTYYCQQYENLPITFGQGTRLEIK

SEQ ID NO: 25003 - DNA, 321 bp, synthetic construct
  misc_feature 1..321: note = Description of Artificial Sequence: Synthetic polynucleotide
  source 1..321: mol_type = other DNA
gacatccagatgacccagtctccatcctccctgtctgcatctgtaggagacagagtcaccatcacttgccgggcaagtcagggcattcgaaatcatttaggctggtatcagcagaaaccagggaaagcccctaagcgcctgatctatgctgcctccagtttgcaaagtggggtcccatcaaggttcagcggcagtggatctgggacagaattcactctcacagtcagcagcctgcagcctgaagattttgcaacttattactgtctacagtataatggttacccattcactttcggccctgggaccaaagtggatatcaaa

SEQ ID NO: 25004 - protein, 107 aa, synthetic construct
  REGION 1..107: note = Description of Artificial Sequence: Synthetic polypeptide
DIQMTQSPSSLSASVGDRVTITCRASQGIRNHLGWYQQKPGKAPKRLIYAASSLQSGVPSRFSGSGSGTEFTLTVSSLQPEDFATYYCLQYNGYPFTFGPGTKVDIK

SEQ ID NO: 25005 - DNA, 321 bp, synthetic construct
  misc_feature 1..321: note = Description of Artificial Sequence: Synthetic polynucleotide
  source 1..321: mol_type = other DNA
gacatccagatgacccagtctccatcctccctgtctgcatctgtaggagacagagtcaccatcacttgccaggcgagtcagggcattagcaactctttaaattggtatcagcagaaaccaggaaaagcccctaaactcctgatctacgatgcatccaatttggaaacaggggtcccatcaaggttcagtggaagtggagctgggacagattttactttcaccatcagcagcctgcagcctgaagatattgcaacatattactgtcaacaatatgataatctcccgctcactttcggcggagggaccaaggtggagatcaaa

SEQ ID NO: 25006 - protein, 107 aa, synthetic construct
  REGION 1..107: note = Description of Artificial Sequence: Synthetic polypeptide
DIQMTQSPSSLSASVGDRVTITCQASQGISNSLNWYQQKPGKAPKLLIYDASNLETGVPSRFSGSGAGTDFTFTISSLQPEDIATYYCQQYDNLPLTFGGGTKVEIK

SEQ ID NO: 25007 - DNA, 321 bp, synthetic construct
  misc_feature 1..321: note = Description of Artificial Sequence: Synthetic polynucleotide
  source 1..321: mol_type = other DNA
gacatccagatgacccagtctccatcctccctgtctgcatctgtaggagacagagtcaccatcacttgccgggcaagtcagggcattagaaatgatttaggctggtatcagcagaaaccagggaaagcccctaagcgcctgatctatgctgcgtccagtgtgcaaactggggtcccatcaaggttcagcggcagtggatctgggacagaattcactctcacaatcagcagcctgcagcctgaagattttgcaatttattactgtctacagcataatagttacccgctcactttcggcggagggaccaaggtggagatcaaa

SEQ ID NO: 25008 - protein, 107 aa, synthetic construct
  REGION 1..107: note = Description of Artificial Sequence: Synthetic polypeptide
DIQMTQSPSSLSASVGDRVTITCRASQGIRNDLGWYQQKPGKAPKRLIYAASSVQTGVPSRFSGSGSGTEFTLTISSLQPEDFAIYYCLQHNSYPLTFGGGTKVEIK

SEQ ID NO: 25009 - DNA, 321 bp, synthetic construct
  misc_feature 1..321: note = Description of Artificial Sequence: Synthetic polynucleotide
  source 1..321: mol_type = other DNA
gacatccagatgacccagtctccatcctccctgtctgcatctgtaggagacagagtcaccatcacttgccgggcaagtcagggcattagaaatgatttaggctggtatcagcagaaaccagggaaagcccctaagcgcctgatctatgctgcatccagtttgcaaagtggggtcccatcaaggttcagcggcagtggatctgggacagaattcactctcacaatcagcagcctgcagcctgaagattttgcaacttattactgtctacagcattatagttaccctcggacgttcggccaagggaccaaggtggaagtcaaa

SEQ ID NO: 25010 - protein, 107 aa, synthetic construct
  REGION 1..107: note = Description of Artificial Sequence: Synthetic polypeptide
DIQMTQSPSSLSASVGDRVTITCRASQGIRNDLGWYQQKPGKAPKRLIYAASSLQSGVPSRFSGSGSGTEFTLTISSLQPEDFATYYCLQHYSYPRTFGQGTKVEVK

SEQ ID NO: 25011 - DNA, 324 bp, synthetic construct
  misc_feature 1..324: note = Description of Artificial Sequence: Synthetic polynucleotide
  source 1..324: mol_type = other DNA
gacatccagatgacccagtctccatcctccctgtctgcatctgtaggagacagagtcaccatcacttgccgggcaagtcagagtattaataattatttaaattggtatcagcagaaaccagggaaagcccctaagctcctgatctatgctacatccagtttgcaaaatggggtcccatcaaggttcagtggcagtggatctgggacagatttcactctcaccatcagcagtctgcaacctgaagattttgcaacttactactgtcaacagagttacagtacccccttattcactttcggccctgggaccaaagtggatatcaat

SEQ ID NO: 25012 - protein, 108 aa, synthetic construct
  REGION 1..108: note = Description of Artificial Sequence: Synthetic polypeptide
DIQMTQSPSSLSASVGDRVTITCRASQSINNYLNWYQQKPGKAPKLLIYATSSLQNGVPSRFSGSGSGTDFTLTISSLQPEDFATYYCQQSYSTPLFTFGPGTKVDIN

SEQ ID NO: 25013 - DNA, 321 bp, synthetic construct
  misc_feature 1..321: note = Description of Artificial Sequence: Synthetic polynucleotide
  source 1..321: mol_type = other DNA
gacatccagatgacccagtctccatcctccctgtctgcatctgtaggagacagagtcaccatcacttgccgggcaagtcagggcattagaaatgatttaggctggtatcagcagaaaccggggaaagcccctaagcgcctgatctatgctgcatccagtgtgcaaagtggggtcccatcaaggttcagcggcagtggatctgggacagaattcactctcacaatcagcagcctgcagcctgaagattttgcaatttattactgtctacagcataatagttacccgctcactttcggcggagggaccaaggtggagatcaaa

SEQ ID NO: 25014 - protein, 107 aa, synthetic construct; identical to SEQ ID NO: 24274
  REGION 1..107: note = Description of Artificial Sequence: Synthetic polypeptide

SEQ ID NO: 25015 - DNA, 321 bp, synthetic construct
  misc_feature 1..321: note = Description of Artificial Sequence: Synthetic polynucleotide
  source 1..321: mol_type = other DNA
gacatccagatgacccagtctccatcctccctgtctgcatctgtaggagacagagtcaccatcacttgccaggcgagtcaggacattaacaactatttaaattggtgtcaacagaaaccagggaaagcccctaagctcttgatatacgatgcatccaatttggaaacaggggtcccatcaaggttcagtggaagtggatctgggacagattttactttcaccatcagcagcctgcagcctgaagatattgcaacatattactgtcaacagtatgataatctcccgatcaccttcggccaagggacacgactggagattaaa

SEQ ID NO: 25016 - protein, 107 aa, synthetic construct
  REGION 1..107: note = Description of Artificial Sequence: Synthetic polypeptide
DIQMTQSPSSLSASVGDRVTITCQASQDINNYLNWCQQKPGKAPKLLIYDASNLETGVPSRFSGSGSGTDFTFTISSLQPEDIATYYCQQYDNLPITFGQGTRLEIK

SEQ ID NO: 25017 - DNA, 321 bp, synthetic construct
  misc_feature 1..321: note = Description of Artificial Sequence: Synthetic polynucleotide
  source 1..321: mol_type = other DNA
gacatccagatgacccagtctccatcctccctgtctgcatctgtaggagacagagtcaccatcacttgccgggcaagtcagggcattagaaatgatttaggctggtatcagcagaaaccagggaaagcccctaagcgcctgatctatgctgcatccagtttgcaaactggggtcccatcaagattcagcggcagtggatctgggacagaattcattctcacaatcagcagcctgcagcctgaagattttgcaacttattactgtctacagcataatagttaccctctcactttcggcggagggaccaaggtggagatcaaa

SEQ ID NO: 25018 - protein, 107 aa, synthetic construct
  REGION 1..107: note = Description of Artificial Sequence: Synthetic polypeptide
DIQMTQSPSSLSASVGDRVTITCRASQGIRNDLGWYQQKPGKAPKRLIYAASSLQTGVPSRFSGSGSGTEFILTISSLQPEDFATYYCLQHNSYPLTFGGGTKVEIK

SEQ ID NO: 25019 - DNA, 324 bp, synthetic construct
  misc_feature 1..324: note = Description of Artificial Sequence: Synthetic polynucleotide
  source 1..324: mol_type = other DNA
gacatccagatgacccagtctcaatcctccctgtctgcatctgtaggagacagagtcaccatcacttgccgggcaagtcagagcattgccagttatttaaattggtatcagcagaaaccagggaaagcccctaaactcctgatctatggtgcatccagtttgcaaagtggggtcccatcaaggttcagtggcagtggatctgggacagatttcactctcaccatcagcagtctccaacctgaagattttgcaacttactactgtcaacagagttacagtacccccttattcagtttcggccctgggaccaaagtggatatcaaa

SEQ ID NO: 25020 - protein, 108 aa, synthetic construct
  REGION 1..108: note = Description of Artificial Sequence: Synthetic polypeptide
DIQMTQSQSSLSASVGDRVTITCRASQSIASYLNWYQQKPGKAPKLLIYGASSLQSGVPSRFSGSGSGTDFTLTISSLQPEDFATYYCQQSYSTPLFSFGPGTKVDIK

SEQ ID NO: 25021 - DNA, 321 bp, synthetic construct
  misc_feature 1..321: note = Description of Artificial Sequence: Synthetic polynucleotide
  source 1..321: mol_type = other DNA
gacatccagatgacccagtctccatcctccctgtctgcatctgtaggagacagagtcaccatcacttgccgggcaagtcagggcattagaaatgatttaggctggtatcagcagaaaccagggaaagcccctaagcgcctgatctatgctgcatccagtttacaaagtggggtcccatcaaggttcagcggcagtggttctgggacagaattcactctcacagtcagcagcctgcagcctgaagattttgcaacttattactgtctacagcatagtagttaccctctcactttcggcggagggaccaaggtggagatcaaa

SEQ ID NO: 25022 - protein, 107 aa, synthetic construct; identical to SEQ ID NO: 24418
  REGION 1..107: note = Description of Artificial Sequence: Synthetic polypeptide

SEQ ID NO: 25023 - DNA, 321 bp, synthetic construct
  misc_feature 1..321: note = Description of Artificial Sequence: Synthetic polynucleotide
  source 1..321: mol_type = other DNA
gacatccagatgacccagtctccatcctcactgtctgcatctgtaggagacagagtcaccatcacttgtcgggcgagtcagggcattagctattatttagcctggtttcagcagaaaccagggaaagcccctaagtccctgatctatgttgcatccagtttgcaaagtggggtcccatcaaagttcagcggcagtggatctgggacagatttcactctcaccatcagcagcctgcagcctgaagattttgcaacttattactgccaacagtatgatagttacccattcactttcggccctgggaccaaagtggatatcaaa

SEQ ID NO: 25024 - protein, 107 aa, synthetic construct
  REGION 1..107: note = Description of Artificial Sequence: Synthetic polypeptide
DIQMTQSPSSLSASVGDRVTITCRASQGISYYLAWFQQKPGKAPKSLIYVASSLQSGVPSKFSGSGSGTDFTLTISSLQPEDFATYYCQQYDSYPFTFGPGTKVDIK

SEQ ID NO: 25025 - DNA, 321 bp, synthetic construct
  misc_feature 1..321: note = Description of Artificial Sequence: Synthetic polynucleotide
  source 1..321: mol_type = other DNA
gacatccagatgacccagtctccatcctccctgtctgcatctgtaggagacagagtcaccatcacttgccgggcaagtcagggcattagaaatgatttaggctggtatcagcagaaaccagggaaagcccctaagcgcctgatctatactgcatccagtttgcaaagtggggtcccatcaaggttcaacggcagtggatctgggacagaattcactctcacaatcagcagcctgcagcctgaagattttgcaacttattactgtctacagcatagtagttacccgctcactttcggcggagggaccaaggtggagatcaaa

SEQ ID NO: 25026 - protein, 107 aa, synthetic construct
  REGION 1..107: note = Description of Artificial Sequence: Synthetic polypeptide
DIQMTQSPSSLSASVGDRVTITCRASQGIRNDLGWYQQKPGKAPKRLIYTASSLQSGVPSRFNGSGSGTEFTLTISSLQPEDFATYYCLQHSSYPLTFGGGTKVEIK

SEQ ID NO: 25027 - DNA, 321 bp, synthetic construct
  misc_feature 1..321: note = Description of Artificial Sequence: Synthetic polynucleotide
  source 1..321: mol_type = other DNA
gacatccagatgacccagtctccatcctccctgtttgcatctgtaggagacagagtcaccatcacttgccgggcaagtcagggcattagaaatgatttaggctggtatcagcagaaaccagggaaagcccctaagcgccttatctatgctgcatccagtttgcaaagtggggtcccatcaaggttcagcggcagtggatctgggacagaattcactctcacaatcagcagcctgcagcctgaagattttgcaacttattactgtctacagcataatagttacccgctcactttcggcggagggaccaaggtggagatcaaa

SEQ ID NO: 25028 - protein, 107 aa, synthetic construct
  REGION 1..107: note = Description of Artificial Sequence: Synthetic polypeptide
DIQMTQSPSSLFASVGDRVTITCRASQGIRNDLGWYQQKPGKAPKRLIYAASSLQSGVPSRFSGSGSGTEFTLTISSLQPEDFATYYCLQHNSYPLTFGGGTKVEIK

SEQ ID NO: 25029 - DNA, 336 bp, synthetic construct
  misc_feature 1..336: note = Description of Artificial Sequence: Synthetic polynucleotide
  source 1..336: mol_type = other DNA
gatattgtgatgactcagtctccactctccctgcccgtcacccctggtgagccggcctccatctcctgcaggtctagtcagagcctcctccatagtaatggatacaactatttggattggtacctgcagaagccagggcagtctccacaggtcctgatctatttgggttctaatcgggcctccggggtccctgacaggttcagtggcagtggatcaggcacagattttactctgaaaatcagcagagtggaggctgaggatgttggggtttattactgcatgcaagctctacaaactcctatcaccttcggccaagggacacgactggagattaaa

SEQ ID NO: 25030 - protein, 112 aa, synthetic construct
  REGION 1..112: note = Description of Artificial Sequence: Synthetic polypeptide
DIVMTQSPLSLPVTPGEPASISCRSSQSLLHSNGYNYLDWYLQKPGQSPQVLIYLGSNRASGVPDRFSGSGSGTDFTLKISRVEAEDVGVYYCMQALQTPITFGQGTRLEIK

SEQ ID NO: 25031 - DNA, 321 bp, synthetic construct
  misc_feature 1..321: note = Description of Artificial Sequence: Synthetic polynucleotide
  source 1..321: mol_type = other DNA
gacatccagatgacccagtctccatcctccctgtctgcatctgtaggagacagagtcaccatcacttgccgggcaagtcagggcattagaaatgatttaggctggtatcagcagaaaccagggaaagcccctaagcgcctgatctatgctgcgtccagtttgcaaagtggggtcccatcaaggttcagcggcagtggatctgggacagaattcactctcacaatcagcagcctgcagcctgaagattttgcaacttattactgtctacaccatagtaattaccctctcactttcggcggagggaccaaggtggagatcgaa

SEQ ID NO: 25032 - protein, 107 aa, synthetic construct
  REGION 1..107: note = Description of Artificial Sequence: Synthetic polypeptide
DIQMTQSPSSLSASVGDRVTITCRASQGIRNDLGWYQQKPGKAPKRLIYAASSLQSGVPSRFSGSGSGTEFTLTISSLQPEDFATYYCLHHSNYPLTFGGGTKVEIE

SEQ ID NO: 25033 - DNA, 339 bp, synthetic construct
  misc_feature 1..339: note = Description of Artificial Sequence: Synthetic polynucleotide
  source 1..339: mol_type = other DNA
gacatcgtgatgacccagtctccagactccctggctgtgtctctgggcgagagggccaccatcaactgcaagtccaaccagagagttttatccagctccaacaatcacaactacttagcttggtaccagcagagaccaggacagcctcctaagctgctcatttactgggcatctacccgggaatccggggtccctgaccgattcagtggcagcgggtctgggacagatttcactctcaccatcagcagcctgcaggctgaagatgtggcagtttattactgtcagcaatattttagtactccattcactttcggccctgggaccaaagtggatatcaaa

SEQ ID NO: 25034 - protein, 113 aa, synthetic construct
  REGION 1..113: note = Description of Artificial Sequence: Synthetic polypeptide
DIVMTQSPDSLAVSLGERATINCKSNQRVLSSSNNHNYLAWYQQRPGQPPKLLIYWASTRESGVPDRFSGSGSGTDFTLTISSLQAEDVAVYYCQQYFSTPFTFGPGTKVDIK

SEQ ID NO: 25035 - DNA, 321 bp, synthetic construct
  misc_feature 1..321: note = Description of Artificial Sequence: Synthetic polynucleotide
  source 1..321: mol_type = other DNA
gacatccagatgacccagtctccatcctccctgtctgcatctgtaggagacagagtcaccatcacttgccgggcaagtcagggcattagaaatgatttaggctggtaccagcagaaaccagggaaagcccctaagcgcctgatctatgctgcatccagtttgcaaagtggggtcccatcaaggttcagcggcagtggatctgggacagaattcactctcacaatcagcagcctgcagcctgaagattttgtaacttattactgtctacagcataatagttatccgtggacgttcggccaagggaccaaggtggaaatcaaa

SEQ ID NO: 25036 - protein, 107 aa, synthetic construct
  REGION 1..107: note = Description of Artificial Sequence: Synthetic polypeptide
DIQMTQSPSSLSASVGDRVTITCRASQGIRNDLGWYQQKPGKAPKRLIYAASSLQSGVPSRFSGSGSGTEFTLTISSLQPEDFVTYYCLQHNSYPWTFGQGTKVEIK

SEQ ID NO: 25037 - DNA, 321 bp, synthetic construct
  misc_feature 1..321: note = Description of Artificial Sequence: Synthetic polynucleotide
  source 1..321: mol_type = other DNA
gacatccagatgacccagtctccatcctccctgtctgcatctgtaggagacagagtcaccatcacttgccgggcaagtcagggcattagagatattttaggctggtatcagcagaaaccagggaaagcccctaagcgcctgatctatgctgcatccagtttgcaaaatggggtcccatcaaggttcagcggcagtggatctgggacagaattcactctcacaatcagcagcctgcagcctgaagattttgcaacttattactgtctacagtatcatagttacccattcactttcggccctgggaccaaagtggatgtcaaa

SEQ ID NO: 25038 - protein, 107 aa, synthetic construct
  REGION 1..107: note = Description of Artificial Sequence: Synthetic polypeptide
DIQMTQSPSSLSASVGDRVTITCRASQGIRDILGWYQQKPGKAPKRLIYAASSLQNGVPSRFSGSGSGTEFTLTISSLQPEDFATYYCLQYHSYPFTFGPGTKVDVK

SEQ ID NO: 25039 - DNA, 336 bp, synthetic construct
  misc_feature 1..336: note = Description of Artificial Sequence: Synthetic polynucleotide
  source 1..336: mol_type = other DNA
gatattgtgatgactcagtctccactctccctgcccgtcacccctggagagccggcctccatctcctgcaggtctagtcagagcctcctgcatagtaagggatacaactatttggattggtacctgcagaagccagggcagtctccacaggtcctgatctatttgggttctaatcgggcctccggggtccctgacaggttcagtggcagtggatcaggcacagattttacactgaaaatcagcagagtggaggctgaggatgttggggtttattactgcatgcaagctctacaaactcctctcaccttcggccaagggacacgactggagattaaa

SEQ ID NO: 25040 - protein, 112 aa, synthetic construct
  REGION 1..112: note = Description of Artificial Sequence: Synthetic polypeptide
DIVMTQSPLSLPVTPGEPASISCRSSQSLLHSKGYNYLDWYLQKPGQSPQVLIYLGSNRASGVPDRFSGSGSGTDFTLKISRVEAEDVGVYYCMQALQTPLTFGQGTRLEIK

SEQ ID NO: 25041 - DNA, 321 bp, synthetic construct
  misc_feature 1..321: note = Description of Artificial Sequence: Synthetic polynucleotide
  source 1..321: mol_type = other DNA
gacatccagatgacccagtctccatcctccctgtctgcatctgtaggagacagagtcaccatcacttgccgggcaagtcagggcattagaaatgatttaggctggtatcaacagaaaccagggaaagcccctaagcgcctgatctatgctgcatccagtttgcaaagtggggtcccatcaaggttcagcggcagtggatctgggacagaattcactctcacagtcagcagcctgcagcctgaagattttgctacttattactgtctacaacatactagttacccgctcactttcggcggagggaccaaggtggagatcaaa

SEQ ID NO: 25042 - protein, 107 aa, synthetic construct
  REGION 1..107: note = Description of Artificial Sequence: Synthetic polypeptide
DIQMTQSPSSLSASVGDRVTITCRASQGIRNDLGWYQQKPGKAPKRLIYAASSLQSGVPSRFSGSGSGTEFTLTVSSLQPEDFATYYCLQHTSYPLTFGGGTKVEIK

SEQ ID NO: 25043 - DNA, 321 bp, synthetic construct
  misc_feature 1..321: note = Description of Artificial Sequence: Synthetic polynucleotide
  source 1..321: mol_type = other DNA
gacatccagatgacccagtctccatcctccctgtctgcatctgtaggagacagagtcaccatcacttgccgggcaagtcagggcattagaaatgatttaggctggtatcaacagaaaccagggaaagcccctaagcgcctgatctatgctgcatccagtttgcaaagtggggtcccatcaaggttcaacggcagtggatctgggacagaattcactctcacaatcagcagcctgcagcctgaagattttgcaacttattactgtctacagcatagtagttacccgctcactttcggcggagggaccaaggtggagatcaaa

SEQ ID NO: 25044 - protein, 107 aa, synthetic construct
  REGION 1..107: note = Description of Artificial Sequence: Synthetic polypeptide
DIQMTQSPSSLSASVGDRVTITCRASQGIRNDLGWYQQKPGKAPKRLIYAASSLQSGVPSRFNGSGSGTEFTLTISSLQPEDFATYYCLQHSSYPLTFGGGTKVEIK

SEQ ID NO: 25045 - DNA, 324 bp, synthetic construct
  misc_feature 1..324: note = Description of Artificial Sequence: Synthetic polynucleotide
  source 1..324: mol_type = other DNA
gacatccagatgacccagtctccatcctccctgtctgcatctgtaggagacagagtcaccatcacttgccgggcaagtcagagcattagtaattatttaaattggtatcagcagaaaccagggaaagcccctaagctcctgatctatgctgcatccagtttacaaagtggggtcccatcaaggttcagtggcagtggatctgggacagatttcactctcaccatcagcagtctgcaacctgaagattttgcaacttacttctgtcaacagagttacagaaccccctttttcactttcggccctgggaccaaagtggatatcaaa

SEQ ID NO: 25046 - protein, 108 aa, synthetic construct
  REGION 1..108: note = Description of Artificial Sequence: Synthetic polypeptide
DIQMTQSPSSLSASVGDRVTITCRASQSISNYLNWYQQKPGKAPKLLIYAASSLQSGVPSRFSGSGSGTDFTLTISSLQPEDFATYFCQQSYRTPFFTFGPGTKVDIK

SEQ ID NO: 25047 - DNA, 321 bp, synthetic construct
  misc_feature 1..321: note = Description of Artificial Sequence: Synthetic polynucleotide
  source 1..321: mol_type = other DNA
gacatccagatgacccagtctccatcctccctgtctgcatctgtaggagacagagtcaccatcacttgccgggcaagtcagggcattagaaatgatttaggctggtatcagcagaaaccagggaaagcccctaagcgtctgatctatgctgcatccagtgtgcaaagtggggtcccatcaaggttcagcggcagtggatctgggacagaattcactctcacaatcagcagcctgcagcctgaagattttgcaatttattactgtctacagcataatagttacccgctcactttcggcggagggaccaaggtggagatcaaa

SEQ ID NO: 25048 - protein, 107 aa, synthetic construct; identical to SEQ ID NO: 24274
  REGION 1..107: note = Description of Artificial Sequence: Synthetic polypeptide

SEQ ID NO: 25049 - DNA, 321 bp, synthetic construct
  misc_feature 1..321: note = Description of Artificial Sequence: Synthetic polynucleotide
  source 1..321: mol_type = other DNA
gacatccagatgacccagtctccatcctccctgtctgcatctgtaggagacagagtcaccatcacttgccaggcgagtcaggacattaacaactatttaaattggtatcagcagaaaccagggagagcccctaagctcctgatctacgatgcatccaatttggaaacaggggtcccatcaaggttcagtggaagtggctctgggacagattttactttcaccatcagcagtctgcagcctgaagatattgcaacatattactgtcaacagtttgataatctcccgatcaccttcggccaagggacacgactggagattaaa

SEQ ID NO: 25050 - protein, 107 aa, synthetic construct
  REGION 1..107: note = Description of Artificial Sequence: Synthetic polypeptide
DIQMTQSPSSLSASVGDRVTITCQASQDINNYLNWYQQKPGRAPKLLIYDASNLETGVPSRFSGSGSGTDFTFTISSLQPEDIATYYCQQFDNLPITFGQGTRLEIK

SEQ ID NO: 25051 - DNA, 321 bp, synthetic construct
  misc_feature 1..321: note = Description of Artificial Sequence: Synthetic polynucleotide
  source 1..321: mol_type = other DNA
gacatccagatgacccagtctccatcctccctgtctgcatctgtaggagacagagtcaccatcacttgccgggcaagtcagagcattatcagctatttaaattggtatcagcagaaaccagggaaagcccctaagttcctgatctatactacatccagtttgcaaagtggggtcccatcaaggttcagtggcagtggatctgggacagatttcactctcaccatcagtagtctgcaacctgaagattttgcaacttactactgtcagcagacttacagtaccccgctcactttcggcggagggaccaaggtggagatcaaa

SEQ ID NO: 25052 - protein, 107 aa, synthetic construct
  REGION 1..107: note = Description of Artificial Sequence: Synthetic polypeptide
DIQMTQSPSSLSASVGDRVTITCRASQSIISYLNWYQQKPGKAPKFLIYTTSSLQSGVPSRFSGSGSGTDFTLTISSLQPEDFATYYCQQTYSTPLTFGGGTKVEIK

SEQ ID NO: 25053 - DNA, 339 bp, synthetic construct
  misc_feature 1..339: note = Description of Artificial Sequence: Synthetic polynucleotide
  source 1..339: mol_type = other DNA
gacatcgtgatgacccagtctccagactccctggctgtgtctctgggcgagagggccaccatcaactgcaagtccagccagaatgttttatacaactccaacaataacaactacttagcttggtaccagcagaaaccaggacagcctcctaagctgctcatttactgggcatctacccggaaatccggggtccctgaccgattcagtggcagcgggtctgggacagatttcactctcaccatcagcagcctgcaggctgaagatgtggcagtttattactgtcagcaatattatactactccgtgcagttttggccaggggaccaagctggagatcaaa

SEQ ID NO: 25054 - protein, 113 aa, synthetic construct
  REGION 1..113: note = Description of Artificial Sequence: Synthetic polypeptide
DIVMTQSPDSLAVSLGERATINCKSSQNVLYNSNNNNYLAWYQQKPGQPPKLLIYWASTRKSGVPDRFSGSGSGTDFTLTISSLQAEDVAVYYCQQYYTTPCSFGQGTKLEIK

SEQ ID NO: 25055 - DNA, 324 bp, synthetic construct
  misc_feature 1..324: note = Description of Artificial Sequence: Synthetic polynucleotide
  source 1..324: mol_type = other DNA
gacatccagatgacccagtctccatcctccctgtctgcatctgtaggagacagagtcaccatcacttgccgggcaagtcagaacatttatagttatttaaattggtatcagcagaaaccagggaaagcccctaagctcctgatctatgctgcatccagtttgcaaagtggggtcccatcaaggttcagtggcagtggatctgggacagatttcactctcaccatcagcagtctacaacctgaagattttgcaacttactactgtcaacagagttacaatacccccttattcactttcggccctgggaccaaagtggatatcaaa

SEQ ID NO: 25056 - protein, 108 aa, synthetic construct
  REGION 1..108: note = Description of Artificial Sequence: Synthetic polypeptide
DIQMTQSPSSLSASVGDRVTITCRASQNIYSYLNWYQQKPGKAPKLLIYAASSLQSGVPSRFSGSGSGTDFTLTISSLQPEDFATYYCQQSYNTPLFTFGPGTKVDIK

SEQ ID NO: 25057 - DNA, 321 bp, synthetic construct
  misc_feature 1..321: note = Description of Artificial Sequence: Synthetic polynucleotide
  source 1..321: mol_type = other DNA
gacatccagatgacccagtctccatcctccctgtctgcatctgtaggagacagagtcaccatcacttgccgggcaagtcagggcattagaagtgatttaggctggtatcagcagaaaccagggaaagcccctaagcgcctgatctatgctgcatccagtttgcaaagtggggtcccatcaaggttcagcggcagtggatctgggacagaattcactctcacaatcagcagcctgcagcctgaagattttgcaacttattactgtctacagcataatagttacccgtggacgttcggccaagggaccaaggtggaaatcaaa

SEQ ID NO: 25058 - protein, 107 aa, synthetic construct
  REGION 1..107: note = Description of Artificial Sequence: Synthetic polypeptide
DIQMTQSPSSLSASVGDRVTITCRASQGIRSDLGWYQQKPGKAPKRLIYAASSLQSGVPSRFSGSGSGTEFTLTISSLQPEDFATYYCLQHNSYPWTFGQGTKVEIK

SEQ ID NO: 25059 - DNA, 321 bp, synthetic construct; identical to SEQ ID NO: 24257
  misc_feature 1..321: note = Description of Artificial Sequence: Synthetic polynucleotide
  source 1..321: mol_type = other DNA

SEQ ID NO: 25060 - protein, 107 aa, synthetic construct; identical to SEQ ID NO: 24146
  REGION 1..107: note = Description of Artificial Sequence: Synthetic polypeptide

SEQ ID NO: 25061 - DNA, 321 bp, synthetic construct; identical to SEQ ID NO: 24299
  misc_feature 1..321: note = Description of Artificial Sequence: Synthetic polynucleotide
  source 1..321: mol_type = other DNA

SEQ ID NO: 25062 - protein, 107 aa, synthetic construct; identical to SEQ ID NO: 24244
  REGION 1..107: note = Description of Artificial Sequence: Synthetic polypeptide

SEQ ID NO: 25063 - DNA, 321 bp, synthetic construct
  misc_feature 1..321: note = Description of Artificial Sequence: Synthetic polynucleotide
  source 1..321: mol_type = other DNA
gacatccagatgacccagtctccatcctccctgtctgcatctgtaggagacagagtcaccatcacttgccgggcaagtcagggcattagaaatgatttaggctggtatcagcagaaaccagggaaagcccctaagcgccttatctatactgcatccagtttgcaaagtggggtcccatcaaggttcagcggcagtggatctgggacagaattcactctcacaatcagcagcctgcagcctgaagattttgcaacttattactgtctacagcataatagttacccgtggacgttcggccaagggaccaaggtggaaatcaaa

SEQ ID NO: 25064 - protein, 107 aa, synthetic construct
  REGION 1..107: note = Description of Artificial Sequence: Synthetic polypeptide
DIQMTQSPSSLSASVGDRVTITCRASQGIRNDLGWYQQKPGKAPKRLIYTASSLQSGVPSRFSGSGSGTEFTLTISSLQPEDFATYYCLQHNSYPWTFGQGTKVEIK

SEQ ID NO: 25065 - DNA, 321 bp, synthetic construct
  misc_feature 1..321: note = Description of Artificial Sequence: Synthetic polynucleotide
  source 1..321: mol_type = other DNA
gacatccagatgacccagtctccatcctccctgtctgcatctgtaggagacagagtcaccatcacttgccgggcaagtcagggcattagaaatgatttaggctggtatcagcagaaaccagggaaagcccctaagcgcctgatctatgctgcatccagtttgcaaagtggggtcccatcaaggttcagcggcagtggatctgggacagaattcactctcacaatcagcagcctgcagcctgaagattttgcaacttattactgtctacaacataatagttacccgtggacgttcggccaagggaccaaggtggaaatcaaa

SEQ ID NO: 25066 - protein, 107 aa, synthetic construct; identical to SEQ ID NO: 24244
  REGION 1..107: note = Description of Artificial Sequence: Synthetic polypeptide

SEQ ID NO: 25067 - DNA, 318 bp, synthetic construct
  misc_feature 1..318: note = Description of Artificial Sequence: Synthetic polynucleotide
  source 1..318: mol_type = other DNA
tcctatgagctgactcagccaccctcagtgtccgtgtccccaggacggacagccagcatcacctgctctggagataaattggggaataaatatgcttactggtatcagcagaagccaggccagtcccctgtgctggtcatctatcaagatagaaagcggccctcagggatccctgagcgattctctggctccaactctgggaacacagccactctgaccatcagcgggacccagactatggatgaggctgactattactgtcaggcgtggaacaacagcactgtggtattcggcggagggaccaagctgaccgtccta

SEQ ID NO: 25068 - protein, 106 aa, synthetic construct
  REGION 1..106: note = Description of Artificial Sequence: Synthetic polypeptide
SYELTQPPSVSVSPGRTASITCSGDKLGNKYAYWYQQKPGQSPVLVIYQDRKRPSGIPERFSGSNSGNTATLTISGTQTMDEADYYCQAWNNSTVVFGGGTKLTVL

SEQ ID NO: 25069 - DNA, 318 bp, synthetic construct
  misc_feature 1..318: note = Description of Artificial Sequence: Synthetic polynucleotide
  source 1..318: mol_type = other DNA
ccctatgagctgactcagccaccctcagtgtccgtgtccccaggacagacagccagcatcacctgctctggagataaattgggggataaatatgtttactggtatcagcagaagtcaggccagtcccctgtgctggtcatctatcaagatagcaagcggccctcagggatccctgagcgattctctggctccaactctggaaacacagccgctctgaccatcagcgggacccaggctatggatgaggctgactattactgtcaggcgtgggacagcagcactgtggttttcggcggagggaccaagctgaccgtccta

SEQ ID NO: 25070 - protein, 106 aa, synthetic construct
  REGION 1..106: note = Description of Artificial Sequence: Synthetic polypeptide
PYELTQPPSVSVSPGQTASITCSGDKLGDKYVYWYQQKSGQSPVLVIYQDSKRPSGIPERFSGSNSGNTAALTISGTQAMDEADYYCQAWDSSTVVFGGGTKLTVL

SEQ ID NO: 25071 - DNA, 324 bp, synthetic construct
  misc_feature 1..324: note = Description of Artificial Sequence: Synthetic polynucleotide
  source 1..324: mol_type = other DNA
gacatccagatgacccagtctccatcctccctatctgcatctgtaggagacagagtcaccatcacttgccggtcaagtcagagcattaacagctatttaaattggtatcagcagaaacctgggaaagcccctaagctcctgatctttgctgcatccagtttgcacagtggggtcccatcaaggttcagtggcagtggatctgggacggatttcactctcaccatcagcagtctgcaacctgaagattttgcaacttactactgtcaacagggttacaatacccccacgtggacgttcggccaagggaccaaggtggaaatcaat

SEQ ID NO: 25072 - protein, 108 aa, synthetic construct
  REGION 1..108: note = Description of Artificial Sequence: Synthetic polypeptide
DIQMTQSPSSLSASVGDRVTITCRSSQSINSYLNWYQQKPGKAPKLLIFAASSLHSGVPSRFSGSGSGTDFTLTISSLQPEDFATYYCQQGYNTPTWTFGQGTKVEIN

SEQ ID NO: 25073 - DNA, 327 bp, synthetic construct
  misc_feature 1..327: note = Description of Artificial Sequence: Synthetic polynucleotide
  source 1..327: mol_type = other DNA
gacatccagatgacccagtctccatcctccctgtctgcatctgtaggagacagagtcaccatcacttgccgggcaagtcagaacattaacgactatttaaattggtatcagcagaaaccagggaaagcccctaagctcctgatctatgctgcatccaatttgcaaagtggggtcccagcaaggttcagtggcagtcgatctgggacagatttcactctcaccatcagcagtctgcaacctgaagattttgcaacttactactgtcaacagacttacaatacccctccggagcgcagttttggccaggggaccaagctggagatcaaa

SEQ ID NO: 25074 - protein, 109 aa, synthetic construct
  REGION 1..109: note = Description of Artificial Sequence: Synthetic polypeptide
DIQMTQSPSSLSASVGDRVTITCRASQNINDYLNWYQQKPGKAPKLLIYAASNLQSGVPARFSGSRSGTDFTLTISSLQPEDFATYYCQQTYNTPPERSFGQGTKLEIK

SEQ ID NO: 25075 - DNA, 324 bp, synthetic construct
  misc_feature 1..324: note = Description of Artificial Sequence: Synthetic polynucleotide
  source 1..324: mol_type = other DNA
gacatccagatgacccagtctccatcctcccagtctgcatctgtaggagacagagtcaccatcacttgccgggcgagtcagggcattagcaattatttagcctggtatcagcagaaaccagggagagttcctaagctcctgatctatgctgcatccactttgcaatcaggggtcccatctcggttcagtggcagtggatctgggacagatttcactctcaccatcagcagcctgcagcctgacgatgttgcaacttattactgtcaaaagtataacagtgcccctccgctcaccttcggccaagggacacgactggagattaaa

SEQ ID NO: 25076 - protein, 108 aa, synthetic construct
  REGION 1..108: note = Description of Artificial Sequence: Synthetic polypeptide
DIQMTQSPSSQSASVGDRVTITCRASQGISNYLAWYQQKPGRVPKLLIYAASTLQSGVPSRFSGSGSGTDFTLTISSLQPDDVATYYCQKYNSAPPLTFGQGTRLEIK

SEQ ID NO: 25077 - DNA, 321 bp, synthetic construct
  misc_feature 1..321: note = Description of Artificial Sequence: Synthetic polynucleotide
  source 1..321: mol_type = other DNA
gacatccagatgacccagtctccatcctccctgtctgcatctgcaggagacagagtcaccatcacttgccggacaagtcagaatattagcaactatttaaattggtatcagcagaaaccaggaaaagcccctaagctcctgatctatgttgcgtccagtttcccaagtggggtcccatcaaggttcagtggcagtggatctgggacagagttcactctcaccatcagcagtctgcaacctgaagattttgcaacttactactgtcaacagagtaactttttcccgctcactttcggcggagggaccaaggtggagatcata

SEQ ID NO: 25078 - protein, 107 aa, synthetic construct
  REGION 1..107: note = Description of Artificial Sequence: Synthetic polypeptide
DIQMTQSPSSLSASAGDRVTITCRTSQNISNYLNWYQQKPGKAPKLLIYVASSFPSGVPSRFSGSGSGTEFTLTISSLQPEDFATYYCQQSNFFPLTFGGGTKVEII

SEQ ID NO: 25079 - DNA, 321 bp, synthetic construct
  misc_feature 1..321: note = Description of Artificial Sequence: Synthetic polynucleotide
  source 1..321: mol_type = other DNA
gacatccagatgacccagtctccatcctcactgtctgcatctgtaggagacagagtcaccatcacttgtcgggcgagtcgggacattagcaattatttagcctggtttcagcagaaaccagggaaagcccctaagtccctgatctctactgcatccagtttgcaaagtggggtcccatcaaagttcagtggcagtggatctgggacagatttcactctcaccatcagcagcctgcagcctgaagattttgcaatttattactgccaacagtatcatagttacccattcactttcggccctgggaccaaagtggatatccaa

SEQ ID NO: 25080 - protein, 107 aa, synthetic construct
  REGION 1..107: note = Description of Artificial Sequence: Synthetic polypeptide
DIQMTQSPSSLSASVGDRVTITCRASRDISNYLAWFQQKPGKAPKSLISTASSLQSGVPSKFSGSGSGTDFTLTISSLQPEDFAIYYCQQYHSYPFTFGPGTKVDIQ

SEQ ID NO: 25081 - DNA, 324 bp, synthetic construct
  misc_feature 1..324: note = Description of Artificial Sequence: Synthetic polynucleotide
  source 1..324: mol_type = other DNA
gacatccagatgacccagtctccatcctccctgtctgcatctgtaggagacagagtcaccatcacttgccgggcaagtcagggcattagaaatgatttaggctggtatcagcagaaaccagggaaagcccctaagcgcctgatctatgctgcatccagtttggaaagtggggtcccatcaaggttcagcggcagtggatctgggacagaattcactctcacagtcagcagcctgcagcctgaagattttgcaacttattactgtctacatcataataattacctccccatcaccttcggccaagggacacgactggagattaaa

SEQ ID NO: 25082 - protein, 108 aa, synthetic construct
  REGION 1..108: note = Description of Artificial Sequence: Synthetic polypeptide
DIQMTQSPSSLSASVGDRVTITCRASQGIRNDLGWYQQKPGKAPKRLIYAASSLESGVPSRFSGSGSGTEFTLTVSSLQPEDFATYYCLHHNNYLPITFGQGTRLEIK

SEQ ID NO: 25083 - DNA, 321 bp, synthetic construct
  misc_feature 1..321: note = Description of Artificial Sequence: Synthetic polynucleotide
  source 1..321: mol_type = other DNA
gacatccagatgacccagtctccatcctccctgtctgcatctgtaggagacagagtcaccatcacttgccgggcaagtcataccattaccagctatttaaattggtatcagcagaaaccagggaaagcccctaagttcctgatctatgctacatccaatctccaaagtggggtcccatcaaggttcagtggcagtggatctgggacagatttcacttttaccatcagcagtctgcaacctgaagattttgcaatttactactgtcaacagagttacaacttcccgctcactttcggcggagggaccaaggtggagatcaaa

SEQ ID NO: 25084 - protein, 107 aa, synthetic construct
  REGION 1..107: note = Description of Artificial Sequence: Synthetic polypeptide
DIQMTQSPSSLSASVGDRVTITCRASHTITSYLNWYQQKPGKAPKFLIYATSNLQSGVPSRFSGSGSGTDFTFTISSLQPEDFAIYYCQQSYNFPLTFGGGTKVEIK

SEQ ID NO: 25085 - DNA, 318 bp, synthetic construct
  misc_feature 1..318: note = Description of Artificial Sequence: Synthetic polynucleotide
  source 1..318: mol_type = other DNA
tcctatgagctgactcagccaccctcagtgtccgtgtccccaggacagacagtcagcatcacctgctctggagataaattgggggataaatatgcttgctggtatcagcagaagccaggccagtcccctgtgctggtcatctatcaagatagcaagcggccctcagggacccctgagcgattctctggctccaactctgggaacacagccactctgaccatcagcgggacccaggctatggatgaggctgactattactgtcaggcgtgggacaacaacactgtggtattcggcggagggaccaagctgaccgtccta

SEQ ID NO: 25086 - protein, 106 aa, synthetic construct
  REGION 1..106: note = Description of Artificial Sequence: Synthetic polypeptide
SYELTQPPSVSVSPGQTVSITCSGDKLGDKYACWYQQKPGQSPVLVIYQDSKRPSGTPERFSGSNSGNTATLTISGTQAMDEADYYCQAWDNNTVVFGGGTKLTVL

SEQ ID NO: 25087 - DNA, 318 bp, synthetic construct
  misc_feature 1..318: note = Description of Artificial Sequence: Synthetic polynucleotide
  source 1..318: mol_type = other DNA
tcctatgagctgactcagccaccctcagtgtccgtgtccccaggacagacagccagcatcacctgctctggagataaattggggaataaatatgcttactggtatcagcagaagccaggccagtcccctgtgttggtcatctatcaagatagaaagaggccctcagggatccctgagcgattctctggctccaactctgggaacacagccactctgaccatcagcgggacccaggctatggatgaggctgacttttactgtcaggcgtgggacaacagcactgtggtattcggcggagggaccaggctgaccgtccta

SEQ ID NO: 25088 - protein, 106 aa, synthetic construct
  REGION 1..106: note = Description of Artificial Sequence: Synthetic polypeptide
SYELTQPPSVSVSPGQTASITCSGDKLGNKYAYWYQQKPGQSPVLVIYQDRKRPSGIPERFSGSNSGNTATLTISGTQAMDEADFYCQAWDNSTVVFGGGTRLTVL

SEQ ID NO: 25089 - DNA, 330 bp, synthetic construct
  misc_feature 1..330: note = Description of Artificial Sequence: Synthetic polynucleotide
  source 1..330: mol_type = other DNA
cagtctgccctgactcagcctgcctccgtgtctgggtctcctggacagtcgatcaccatctcctgcactggaaccagcagtgacgttggtggttataactctgtctcctggtaccaacagcacccagacaaagcccccaaactcatgatttatgaggtcagtaatcggccctcaggggtttctaatcgcttctctggctccaagtctggcaacacggcctccctgaccatctctgggctccaggctgaggacgaggctgattattactgcagctcatatacaaggagcagcactgtggtattcggcggagggaccaagctgaccgtccta

SEQ ID NO: 25090 - protein, 110 aa, synthetic construct
  REGION 1..110: note = Description of Artificial Sequence: Synthetic polypeptide
QSALTQPASVSGSPGQSITISCTGTSSDVGGYNSVSWYQQHPDKAPKLMIYEVSNRPSGVSNRFSGSKSGNTASLTISGLQAEDEADYYCSSYTRSSTVVFGGGTKLTVL

SEQ ID NO: 25091 - DNA, 339 bp, synthetic construct
  misc_feature 1..339: note = Description of Artificial Sequence: Synthetic polynucleotide
  source 1..339: mol_type = other DNA
gacatcgtgatgacccagtctccagactccctggctgtgtctctgggcgagagggccaccatcacctgcaagtccagccagagtgttttacacagctccaacaataacaactacttagcttggtaccagcagaaaccaggacagcctcctaagctactcatttactgggcatctacccggaaatccggggtccctgaccgattcagtggcagcgggtctgggacagatttcactctcaccatcagcagcctgcaggctgaagatgtggcagtttatttctgtcagcaatattatagtactccgtgcagttttggccaggggaccaagctggagatcaaa

SEQ ID NO: 25092 - protein, 113 aa, synthetic construct
  REGION 1..113: note = Description of Artificial Sequence: Synthetic polypeptide
DIVMTQSPDSLAVSLGERATITCKSSQSVLHSSNNNNYLAWYQQKPGQPPKLLIYWASTRKSGVPDRFSGSGSGTDFTLTISSLQAEDVAVYFCQQYYSTPCSFGQGTKLEIK

SEQ ID NO: 25093 - DNA, 318 bp, synthetic construct
  misc_feature 1..318: note = Description of Artificial Sequence: Synthetic polynucleotide
  source 1..318: mol_type = other DNA
tcctatgagctgactcagccaccctcagtgtccgtgtccccaggacagacagccagcatcacctgctctggagataaattgggggagaaatatgcttgctggtatcagcagaagccaggccagtcccctgtgttggtcatctatcaagatagaaagcggccctcagggatccctgagcgatactctggctccaacactgggaacacagccactctgaccatcagcgggacccaggctatggatgaggctgactattactgtcaggcgtgggacagcagcactgcggtattcggcggagggaccaagctgaccgtccta

SEQ ID NO: 25094 - protein, 106 aa, synthetic construct
  REGION 1..106: note = Description of Artificial Sequence: Synthetic polypeptide
SYELTQPPSVSVSPGQTASITCSGDKLGEKYACWYQQKPGQSPVLVIYQDRKRPSGIPERYSGSNTGNTATLTISGTQAMDEADYYCQAWDSSTAVFGGGTKLTVL

SEQ ID NO: 25095 - DNA, 321 bp, synthetic construct
  misc_feature 1..321: note = Description of Artificial Sequence: Synthetic polynucleotide
  source 1..321: mol_type = other DNA
gacatccagatgacccagtctccatcctcactgtctacatctgtaggagacagagtcaccatcacttgtcgggcgagtcaggacattagcaattatttagcctggtttcagcagaaaccagggaaagcccctaagcgcctgatctatgctgcatccactttgcaaagtggggtcccatcaaagttcagcggcagtggatctgggacagatttcactctcaccatcagcagcctgcagcctgaagattttgcaacttattactgccaacagtataatagttacccattcactttcggccctgggaccaaagtggatctcaag

SEQ ID NO: 25096 - protein, 107 aa, synthetic construct
  REGION 1..107: note = Description of Artificial Sequence: Synthetic polypeptide
DIQMTQSPSSLSTSVGDRVTITCRASQDISNYLAWFQQKPGKAPKRLIYAASTLQSGVPSKFSGSGSGTDFTLTISSLQPEDFATYYCQQYNSYPFTFGPGTKVDLK

SEQ ID NO: 25097 - DNA, 321 bp, synthetic construct
  misc_feature 1..321: note = Description of Artificial Sequence: Synthetic polynucleotide
  source 1..321: mol_type = other DNA
gacatccagatgacccagtctccatcttccgtgtctgcatctgtaggagacagagtcaccatcacttgtcgggcgagtcagggtattaccaagtggttagcctggtatcagcagaaaccagggaaagcccctaaagtcctgatctatgctgcatccagtttgcaaagtcgggtcccatcaaggttcagcggcagtagatctgggacagatttcactctcaccatcagcagcctgcagcctgaagattttgcaacttactattgtcaacaggctaacagtttcccattcactttcggccctgggaccaaagtggatatcaaa

SEQ ID NO: 25098 - protein, 107 aa, synthetic construct
  REGION 1..107: note = Description of Artificial Sequence: Synthetic polypeptide
DIQMTQSPSSVSASVGDRVTITCRASQGITKWLAWYQQKPGKAPKVLIYAASSLQSRVPSRFSGSRSGTDFTLTISSLQPEDFATYYCQQANSFPFTFGPGTKVDIK

SEQ ID NO: 25099 - DNA, 318 bp, synthetic construct
  misc_feature 1..318: note = Description of Artificial Sequence: Synthetic polynucleotide
  source 1..318: mol_type = other DNA
tcctatgaactgactcagccaccctcagtgtccgtgtccccaggacagacagccagcatcacctgctctggagaaaaattgggggataaatatgtttgttggtatcagcagaagccaggccagtcccctgtggtggtcatctatcaagatagcaagcggccctcagggatccctgagcgattctctggctccaactctgggaacacagccactctgaccatcagcgggacccaggctatggatgaggctgactattactgtcaggcgtggaacagcagcaatgtggtattcggcggagggaccaagctgaccgtccta

SEQ ID NO: 25100 - protein, 106 aa, synthetic construct
  REGION 1..106: note = Description of Artificial Sequence: Synthetic polypeptide
SYELTQPPSVSVSPGQTASITCSGEKLGDKYVCWYQQKPGQSPVVVIYQDSKRPSGIPERFSGSNSGNTATLTISGTQAMDEADYYCQAWNSSNVVFGGGTKLTVL

SEQ ID NO: 25101 - DNA, 339 bp, synthetic construct
  misc_feature 1..339: note = Description of Artificial Sequence: Synthetic polynucleotide
  source 1..339: mol_type = other DNA
gacatcgtgatgacccagtctccagactccctggctgtgtctctgggcgagagggccaccatcaactgcaagtccagccagagtattttattcagctccaacaataacaactacttagcttggtaccagcagaaaccaggacaacctcctaagttgctcatttactgggcatctacccgggaatccggggtccctgaccgattcagtggcagcgggtctgggacagatttcactctcaccatcagcagcctgcaggctgaagatgtggcagtttatttctgtcagcaatattctagtactccgtggacgttcggccaagggaccaaggtggaaatcaaa

SEQ ID NO: 25102 - protein, 113 aa, synthetic construct
  REGION 1..113: note = Description of Artificial Sequence: Synthetic polypeptide
DIVMTQSPDSLAVSLGERATINCKSSQSILFSSNNNNYLAWYQQKPGQPPKLLIYWASTRESGVPDRFSGSGSGTDFTLTISSLQAEDVAVYFCQQYSSTPWTFGQGTKVEIK

SEQ ID NO: 25103 - DNA, 339 bp, synthetic construct
  misc_feature 1..339: note = Description of Artificial Sequence: Synthetic polynucleotide
  source 1..339: mol_type = other DNA
gatgttgtgatgactcagtctccactctccctgcccgtcacccttggacagccggcctccatctcctgcaggtctagtcaaagcctcgtatacagtgatggaaacacctacttgaattggtttcagcagaggccaggccaatctccaaggcgcctaatttataaggtttctaactgggactctggggtcccagacagattcagcggcagtgggtcaggcactgatttcacactgaaaatcagctgggtggaggctgaggatgttggggtttgttactgcatgcaaggtgcacactggcctccgatcaccttcggccaagggacacgactggagattaaa

SEQ ID NO: 25104 - protein, 113 aa, synthetic construct
  REGION 1..113: note = Description of Artificial Sequence: Synthetic polypeptide
DVVMTQSPLSLPVTLGQPASISCRSSQSLVYSDGNTYLNWFQQRPGQSPRRLIYKVSNWDSGVPDRFSGSGSGTDFTLKISWVEAEDVGVCYCMQGAHWPPITFGQGTRLEIK

SEQ ID NO: 25105 - DNA, 339 bp, synthetic construct
  misc_feature 1..339: note = Description of Artificial Sequence: Synthetic polynucleotide
  source 1..339: mol_type = other DNA
gacatcgtgatgacccagtctccagactccctgactgtgtctctgggcgagagggccaccatcaactgcaagtccagccagagtgttttatacagctccaacaataagaactacttagcttggtaccagcagaaacctggacagcctcctaagctgctcatttactgggcatctacccgggaatccggggtccctgaccgattcagtggcagcgggtctgggacagatttcactctcaccatcagcagcctgcaggctgaagatgtggcagtttattactgtcagcaatattatagtactccgtgcagttttggccaggggaccaggctggagatcaaa

SEQ ID NO: 25106 - protein, 113 aa, synthetic construct
  REGION 1..113: note = Description of Artificial Sequence: Synthetic polypeptide
DIVMTQSPDSLTVSLGERATINCKSSQSVLYSSNNKNYLAWYQQKPGQPPKLLIYWASTRESGVPDRFSGSGSGTDFTLTISSLQAEDVAVYYCQQYYSTPCSFGQGTRLEIK

SEQ ID NO: 25107 - DNA, 339 bp, synthetic construct
  misc_feature 1..339: note = Description of Artificial Sequence: Synthetic polynucleotide
  source 1..339: mol_type = other DNA
gacatcgtgctgacccagtctccagacttcctggctatgtctctgggcgagagggccaccatcaactgcaagtccagccagagtgttttataccactccaacaattacaactacttagcttggtaccagcagaaaccaaaacagcctcctaagctgctcatttactgggcatctacccgggagtccggggtccctgaccgattcagtggcagcgggtctgggacatatttcactctcaccatcagcagcctccaggctgaagatgtggcagtttattactgtcagcaatattacagtactccgtgcagttttggccaggggaccaacctggagatcaaa

SEQ ID NO: 25108 - protein, 113 aa, synthetic construct
  REGION 1..113: note = Description of Artificial Sequence: Synthetic polypeptide
DIVLTQSPDFLAMSLGERATINCKSSQSVLYHSNNYNYLAWYQQKPKQPPKLLIYWASTRESGVPDRFSGSGSGTYFTLTISSLQAEDVAVYYCQQYYSTPCSFGQGTNLEIK

SEQ ID NO: 25109 - DNA, 339 bp, synthetic construct
  misc_feature 1..339: note = Description of Artificial Sequence: Synthetic polynucleotide
  source 1..339: mol_type = other DNA
gacatcgtgatgacccagtctccagactccctggctgtgtctctgggcgagagggccaccatcaactgcaagtccagccagagtgttttatacagctccaacaataagaactacttagcttggtaccagcagaaaccaggacagcctcctaagctgctcatttactgggcatctacccgggaatccggggtccctgaccgattcagtggcagcgggtctgggacagacttcactctcactatcagcagcctgcaggctgaagatgtggcagtttattactgtcagcaatattatagtagtccgtgcagttttggccaggggaccaggctggagatcaaa

SEQ ID NO: 25110 - protein, 113 aa, synthetic construct
  REGION 1..113: note = Description of Artificial Sequence: Synthetic polypeptide
DIVMTQSPDSLAVSLGERATINCKSSQSVLYSSNNKNYLAWYQQKPGQPPKLLIYWASTRESGVPDRFSGSGSGTDFTLTISSLQAEDVAVYYCQQYYSSPCSFGQGTRLEIK

SEQ ID NO: 25111 - DNA, 321 bp, synthetic construct; identical to SEQ ID NO: 24659
  misc_feature 1..321: note = Description of Artificial Sequence: Synthetic polynucleotide
  source 1..321: mol_type = other DNA

SEQ ID NO: 25112 - protein, 107 aa, synthetic construct; identical to SEQ ID NO: 24660
  REGION 1..107: note = Description of Artificial Sequence: Synthetic polypeptide

SEQ ID NO: 25113 - DNA, 339 bp, synthetic construct
  misc_feature 1..339: note = Description of Artificial Sequence: Synthetic polynucleotide
  source 1..339: mol_type = other DNA
gacatcgtgatgacccagtctccagactccctggctgtgtctctgggcgagagggccaccatcaactgcaagtccagccagagtgttttatacagctccaacaattacaactacttagcttggtaccagctgaaaccaggacagcctcctaagctgctcatttactgggcatctacccggaaatccggggtccctgaccgattcagtggcagcgggtctgggacagatttcactctcaccatcagcagcctgcagactgaagatgtggcactttattactgtcaacaatattatacttctccgtgcagttttggccaggggaccaagctggagatcaaa

SEQ ID NO: 25114 - protein, 113 aa, synthetic construct
  REGION 1..113: note = Description of Artificial Sequence: Synthetic polypeptide
DIVMTQSPDSLAVSLGERATINCKSSQSVLYSSNNYNYLAWYQLKPGQPPKLLIYWASTRKSGVPDRFSGSGSGTDFTLTISSLQTEDVALYYCQQYYTSPCSFGQGTKLEIK

SEQ ID NO: 25115 - DNA, 339 bp, synthetic construct
  misc_feature 1..339: note = Description of Artificial Sequence: Synthetic polynucleotide
  source 1..339: mol_type = other DNA
gacatcgtgatgacccagtcgccagactccctggctgtgtctctgggcgagagggccaccatcaactgcaagtccagccagagtgttttacacagctccaacaataagaactacttagcttggtatcagcagaaaccaggacagcctcctaagctgctcatttactgggcatctacccgggaatccggggtccctgaccgcttcagtggcagcgggtctgggacagatttcactctcgccatcagcagcctgcaggctgaagatgtggcactttatcactgtcagcaatattatagttctccgtgcagttttggccaggggaccgggctggagatcaaa

SEQ ID NO: 25116 - protein, 113 aa, synthetic construct
  REGION 1..113: note = Description of Artificial Sequence: Synthetic polypeptide
DIVMTQSPDSLAVSLGERATINCKSSQSVLHSSNNKNYLAWYQQKPGQPPKLLIYWASTRESGVPDRFSGSGSGTDFTLAISSLQAEDVALYHCQQYYSSPCSFGQGTGLEIK

SEQ ID NO: 25117 - DNA, 321 bp, synthetic construct
  misc_feature 1..321: note = Description of Artificial Sequence: Synthetic polynucleotide
  source 1..321: mol_type = other DNA
gacatccagatgacccagtctccatcctcactgtctgcatctataggagacagagtcaccatcacttgtcgggcgagtcagggcattagcaattatttagcctggtttcagcagaaaccagggaaagcccctaggtccctgatctatgctgcatccagtttacaaagtggggtcccatcaacgttcagcggcagtggatctgggacagatttcactctcaccatcagcagcctgcagcctgaagattttgcaacttattactgccaacagtataatagttatccattcactttcggccctgggaccaaagtggatatcaaa

SEQ ID NO: 25118 - protein, 107 aa, synthetic construct
  REGION 1..107: note = Description of Artificial Sequence: Synthetic polypeptide
DIQMTQSPSSLSASIGDRVTITCRASQGISNYLAWFQQKPGKAPRSLIYAASSLQSGVPSTFSGSGSGTDFTLTISSLQPEDFATYYCQQYNSYPFTFGPGTKVDIK

SEQ ID NO: 25119 - DNA, 321 bp, synthetic construct
  misc_feature 1..321: note = Description of Artificial Sequence: Synthetic polynucleotide
  source 1..321: mol_type = other DNA
gacatccagatgacccagtctccatcctccctgtctgcatctgtaggagacagagtcaccatcacttgccgggcaagtcaggacatgagaagtgatttaggctggtatcagcagaaaccagggaaagcccctaagcgcctgatctatgctgcatccagtttgcaaagtggggtcccatcaaggttcagcggcagtggatctgggacagaattcactctcacaatcagcagcctgcagcctgaagattttgcaacttattactgtctacagcatactatttcccctcctactttcggcggagggaccaaggtggagatcaaa

SEQ ID NO: 25120 - protein, 107 aa, synthetic construct
  REGION 1..107: note = Description of Artificial Sequence: Synthetic polypeptide
DIQMTQSPSSLSASVGDRVTITCRASQDMRSDLGWYQQKPGKAPKRLIYAASSLQSGVPSRFSGSGSGTEFTLTISSLQPEDFATYYCLQHTISPPTFGGGTKVEIK

SEQ ID NO: 25121 - DNA, 333 bp, synthetic construct
  misc_feature 1..333: note = Description of Artificial Sequence: Synthetic polynucleotide
  source 1..333: mol_type = other DNA
gatgttgtgatgactcagtctccactctccctgtccgtcacccttggacagccggcctccatctcctgcaggtcaagtcaaagcctcgtatacagtgatggaaacacctacttgaattggtttcagcagaggccaggccaatctccaaggcgcctaatttataaggtttctaactgggactctggggtcccagacagattcagcggcagtgggtcaggcacagatttcacactgaaaatcagcagggtggaggctgaggatgttggggtttattactgcatgcaaggtatacactggctcactttcggcggagggaccaaggtggagatcaaa

SEQ ID NO: 25122 - protein, 111 aa, synthetic construct
  REGION 1..111: note = Description of Artificial Sequence: Synthetic polypeptide
DVVMTQSPLSLSVTLGQPASISCRSSQSLVYSDGNTYLNWFQQRPGQSPRRLIYKVSNWDSGVPDRFSGSGSGTDFTLKISRVEAEDVGVYYCMQGIHWLTFGGGTKVEIK

SEQ ID NO: 25123 - DNA, 321 bp, synthetic construct
  misc_feature 1..321: note = Description of Artificial Sequence: Synthetic polynucleotide
  source 1..321: mol_type = other DNA
gacatccagatgacccagtctccatcctcactgtctgcatctgtaggagacagagtcaccatcacttgtcgggcgagtcaggacattagcaattatttggcctggtttcagcagaaaccagggaaagcccctacgtccctgatctatgctgcatctagtttgcaaagtggggtcccatcaaagttcagcggcagtggatctgggacagatttcactctcaccatcagcagcctgcagcctgaagattttgcaactttttactgccaacagtatcatagttacccgctcaccttcggccaagggacacgactggaaattaaa

SEQ ID NO: 25124 - protein, 107 aa, synthetic construct
  REGION 1..107: note = Description of Artificial Sequence: Synthetic polypeptide
DIQMTQSPSSLSASVGDRVTITCRASQDISNYLAWFQQKPGKAPTSLIYAASSLQSGVPSKFSGSGSGTDFTLTISSLQPEDFATFYCQQYHSYPLTFGQGTRLEIK

SEQ ID NO: 25125 - DNA, 321 bp, synthetic construct
  misc_feature 1..321: note = Description of Artificial Sequence: Synthetic polynucleotide
  source 1..321: mol_type = other DNA
gacatccagatgacccagtctccatcctccctgtctgcatctgtaggagacagagtcaccatcacttgccgggcaagtcaggacattagaagtgatttaggctggtatcagcagaaaccagggaaagcccctaagcgcctgatctatgctgcatccagtttgcaaagtggggtcccatcaaggttcagcggcagtggatctgggacagaattcactctcacaatcagcagcctgcagcctgaagattttgcaacttatttctgtctacagcatactatttaccctcctactttcggcggagggaccaaggtggagatcaaa

SEQ ID NO: 25126 - protein, 107 aa, synthetic construct
  REGION 1..107: note = Description of Artificial Sequence: Synthetic polypeptide
DIQMTQSPSSLSASVGDRVTITCRASQDIRSDLGWYQQKPGKAPKRLIYAASSLQSGVPSRFSGSGSGTEFTLTISSLQPEDFATYFCLQHTIYPPTFGGGTKVEIK

SEQ ID NO: 25127 - DNA, 321 bp, synthetic construct
  misc_feature 1..321: note = Description of Artificial Sequence: Synthetic polynucleotide
  source 1..321: mol_type = other DNA
gacgtccagatgacccagtctccatcctccctgtctgcatctttaggagacagagtcaccatcacttgccgggcaagtcagagcattagaagctatttaaattggtatcagcagaaaccagggaaagcccctaacctcctgatctatagtgcatccagtttgcaaagtggggtcccatcaaggttcagtggcagtggatctgggacagatttcactctcaccatcagcagtctgcaacctgaagattttgcaaattactactgtcaacagagttacagtatcccgatcaccttcggccaagggacacgactggagattaaa

SEQ ID NO: 25128 - protein, 107 aa, synthetic construct
  REGION 1..107: note = Description of Artificial Sequence: Synthetic polypeptide
DVQMTQSPSSLSASLGDRVTITCRASQSIRSYLNWYQQKPGKAPNLLIYSASSLQSGVPSRFSGSGSGTDFTLTISSLQPEDFANYYCQQSYSIPITFGQGTRLEIK

SEQ ID NO: 25129 - DNA, 339 bp, synthetic construct
  misc_feature 1..339: note = Description of Artificial Sequence: Synthetic polynucleotide
  source 1..339: mol_type = other DNA
gacatcgtgatgacccagtctccagactccctggctgtgtctctgggcgagagggccaccatcaactgcaagtccagccagagtgttttatacagctccaacaattacaactacttagcttggtaccagctgaaaccaggacagcctcctaagctgctcatttactgggcatctacccggaaatccggggtccctgaccgattcagtggcagcgggtctgggacagatttcactctcaccatcagcagcctgcagactgaagatgtggcactttattactgtcagcaatattatacttctccgtgcagttttggccaggggaccaagctggagatcaaa

SEQ ID NO: 25130 - protein, 113 aa, synthetic construct; identical to SEQ ID NO: 25114
  REGION 1..113: note = Description of Artificial Sequence: Synthetic polypeptide

SEQ ID NO: 25131 - DNA, 321 bp, synthetic construct
  misc_feature 1..321: note = Description of Artificial Sequence: Synthetic polynucleotide
  source 1..321: mol_type = other DNA
gacatccagatgacccagtctccatcctccctgtccgcatctgtaggagacagagtcaccatcacttgccgggcaagtcaggacattagaagtgatttaggctggtatcagcagaaaccagggaaagcccctaagcgcctgatctatgctacatccagtttgcaaagtggggtcccatcaaggttcagcggcagtggatctgggacagaattcactctcacaatcagcagcctgcagcctgaagattttgcaacttattactgtctacagcatactatttaccctcctactttcggcggagggaccaaggtggagatcaaa

SEQ ID NO: 25132 - protein, 107 aa, synthetic construct
  REGION 1..107: note = Description of Artificial Sequence: Synthetic polypeptide
DIQMTQSPSSLSASVGDRVTITCRASQDIRSDLGWYQQKPGKAPKRLIYATSSLQSGVPSRFSGSGSGTEFTLTISSLQPEDFATYYCLQHTIYPPTFGGGTKVEIK

SEQ ID NO: 25133 - DNA, 345 bp, synthetic construct
  misc_feature 1..345: note = Description of Artificial Sequence: Synthetic polynucleotide
  source 1..345: mol_type = other DNA
ctgcctgtgctgactcagcccccgtctgcatctgccttgctgggagcctcgatcaagctcacctgcaccctaagcagtgagcacagcacctacaccatcgaatggtatcaacagagaccagggaggtccccccagtatataatgaaggttaagagtgatggcagccacagcaagggggacgggatccccgatcgcttcatgggctccagttctgggggtgaccgctacctcaccttctccaacctccagtctgacgatgaggatgagtatcactgtggagagagccacccgattgatggccaagtcggtgtggtattcggcggagggaccaagctgaccgtccta

SEQ ID NO: 25134 - protein, 115 aa, synthetic construct
  REGION 1..115: note = Description of Artificial Sequence: Synthetic polypeptide
LPVLTQPPSASALLGASIKLTCTLSSEHSTYTIEWYQQRPGRSPQYIMKVKSDGSHSKGDGIPDRFMGSSSGGDRYLTFSNLQSDDEDEYHCGESHPIDGQVGVVFGGGTKLTVL

SEQ ID NO: 25135 - DNA, 321 bp, synthetic construct; identical to SEQ ID NO: 24753
  misc_feature 1..321: note = Description of Artificial Sequence: Synthetic polynucleotide
  source 1..321: mol_type = other DNA

SEQ ID NO: 25136 - protein, 107 aa, synthetic construct; identical to SEQ ID NO: 24754
  REGION 1..107: note = Description of Artificial Sequence: Synthetic polypeptide

SEQ ID NO: 25137 - DNA, 321 bp, synthetic construct
  misc_feature 1..321: note = Description of Artificial Sequence: Synthetic polynucleotide
  source 1..321: mol_type = other DNA
gacatccagatgacccagtctccatcctccctgtctgcatctgtaggagacagagtcaccatcacttgccgggcaagtcagggcattagaaatgatttaggctggtatcagcagaaaccagggaaagcccctaagcgcctgatctatgctgcatccagtttgcaaagtggggtcccatcaaggttcagcggcagtggatctgggacagaattcactctcacaatcagcagcctgcagcctgaagattttgcaacttattactgtctacaacataatagttacccgctcactttcggcggagggaccaaggtggcgatcaaa

SEQ ID NO: 25138 - protein, 107 aa, synthetic construct
  REGION 1..107: note = Description of Artificial Sequence: Synthetic polypeptide
DIQMTQSPSSLSASVGDRVTITCRASQGIRNDLGWYQQKPGKAPKRLIYAASSLQSGVPSRFSGSGSGTEFTLTISSLQPEDFATYYCLQHNSYPLTFGGGTKVAIK

SEQ ID NO: 25139 - DNA, 321 bp, synthetic construct
  misc_feature 1..321: note = Description of Artificial Sequence: Synthetic polynucleotide
  source 1..321: mol_type = other DNA
gacatccagatgacccagtctccatcctcactgtctgcatctgtaggagacagagtcaccatcacttgtcgggcgagtcagggcattagcaattatttagcctggtttcagcagaaatcagggaaagcccctaagtctctgatctctgctgcaaccagtttgcaaagtggggtcccatcacagttcagcggcagtggatctgggacagatttcactctcaccatcagcagcctgcagcctgaagattttgcaacttattactgccaacagtattatagttacccgatcaccttcggccaagggacacgactggagattaaa

SEQ ID NO: 25140 - protein, 107 aa, synthetic construct
  REGION 1..107: note = Description of Artificial Sequence: Synthetic polypeptide
DIQMTQSPSSLSASVGDRVTITCRASQGISNYLAWFQQKSGKAPKSLISAATSLQSGVPSQFSGSGSGTDFTLTISSLQPEDFATYYCQQYYSYPITFGQGTRLEIK

SEQ ID NO: 25141 - DNA, 321 bp, synthetic construct
  misc_feature 1..321: note = Description of Artificial Sequence: Synthetic polynucleotide
  source 1..321: mol_type = other DNA
gacatccagatgacccagtctccatcttccgtgtctgcatctgtaggagacagagtcaccatcacttgtcgggcgagtcagggtattagcagatggttagcctggtatcagcagaaaccagggagagcccctgaactcctgatctatgctgcatcccgtttgcaaagtgggatcccatccaggttcagcggcagtggatctgggacagacttcactctcaccatcagcagcctgcagcctgaagattttgcaacttactattgtcaacaggctaacagtttcccattcactttcggccctgggaccaaagtggataacaaa

SEQ ID NO: 25142 - protein, 107 aa, synthetic construct
  REGION 1..107: note = Description of Artificial Sequence: Synthetic polypeptide
DIQMTQSPSSVSASVGDRVTITCRASQGISRWLAWYQQKPGRAPELLIYAASRLQSGIPSRFSGSGSGTDFTLTISSLQPEDFATYYCQQANSFPFTFGPGTKVDNK

SEQ ID NO: 25143 - DNA, 318 bp, synthetic construct
  misc_feature 1..318: note = Description of Artificial Sequence: Synthetic polynucleotide
  source 1..318: mol_type = other DNA
tcctatgagctgactcagccaccctcagtgtccgtgtccccaggacagacagtcagcatcacctgctctggagataaattgggggataaatatgcttgctggtatcagcagaagccaggccagtcccctgtgctggtcatctatcaagatcgcaagcggccctcagggatccctgagcgattctctggctccaactctgggaacacagccactctgaccatcagcgggacccaggctatggatgaggctgactattactgtcaggcgtgggacaacaacactgtggtattcggcggagggaccaagctgaccgtccta

SEQ ID NO: 25144 - protein, 106 aa, synthetic construct
  REGION 1..106: note = Description of Artificial Sequence: Synthetic polypeptide
SYELTQPPSVSVSPGQTVSITCSGDKLGDKYACWYQQKPGQSPVLVIYQDRKRPSGIPERFSGSNSGNTATLTISGTQAMDEADYYCQAWDNNTVVFGGGTKLTVL

SEQ ID NO: 25145 - DNA, 321 bp, synthetic construct
  misc_feature 1..321: note = Description of Artificial Sequence: Synthetic polynucleotide
  source 1..321: mol_type = other DNA
gacatccagatgacccagtctccatcctccctgtctgcatctgtaggagacagagtcaccatcacttgccgggcaagtcagggcattagaaattatttaggctggtttcagcagaaaccagggaaagcccctaagcgcctgatctatggtgcatccagtttgcaaagtggggtcccatcaaggatcagcggcagtggatctgggacagaattcactctcacaatcagcagcctgcagcctgaagattttgcaacttattactgtctacagtatcatagttatctattcactttcggccctgggaccaaagtggatatcaaa

SEQ ID NO: 25146 - protein, 107 aa, synthetic construct
  REGION 1..107: note = Description of Artificial Sequence: Synthetic polypeptide
DIQMTQSPSSLSASVGDRVTITCRASQGIRNYLGWFQQKPGKAPKRLIYGASSLQSGVPSRISGSGSGTEFTLTISSLQPEDFATYYCLQYHSYLFTFGPGTKVDIK

SEQ ID NO: 25147 - DNA, 315 bp, synthetic construct
  misc_feature 1..315: note = Description of Artificial Sequence: Synthetic polynucleotide
  source 1..315: mol_type = other DNA
tcctatgagctgactcagccaccctcagtgtccgtgtccccaggacagacagccagcatcacctgctctggagataaattgggggaaaaatatgcttgctggtatcagcagaagccaggccagtcccctgtactggtcatctatcaagataagaagcggccctcagggatccctgagcgattctctggctccaactctgggaacacagccactctgaccatcagcgggacccaggctatggatgaggctgactattactgtcaggcgtgggacagcagcactgtattcggcggagggaccaaactgaccgtccta

SEQ ID NO: 25148 - protein, 105 aa, synthetic construct
  REGION 1..105: note = Description of Artificial Sequence: Synthetic polypeptide
SYELTQPPSVSVSPGQTASITCSGDKLGEKYACWYQQKPGQSPVLVIYQDKKRPSGIPERFSGSNSGNTATLTISGTQAMDEADYYCQAWDSSTVFGGGTKLTVL

SEQ ID NO: 25149 - DNA, 321 bp, synthetic construct
  misc_feature 1..321: note = Description of Artificial Sequence: Synthetic polynucleotide
  source 1..321: mol_type = other DNA
gacatccagatgacccagtctccatcctcactgtctgcatctgtaggagacagagtcaccatcacttgtcgggcgagtcaggacataagtaattatttagcctggtttcagcagaaaccagggaaagcccctaagtccctgatctatgctacacccagtttgcagagtggggtcccatcaaagttcagcggcagtggatctgggacagagttcactctcaccatcagcagcctgcagcctgaagattttgcaacttattactgccaacagtataatagttacccgctcactttcggcggagggaccaaggtggagatcaaa

SEQ ID NO: 25150 - protein, 107 aa, synthetic construct
  REGION 1..107: note = Description of Artificial Sequence: Synthetic polypeptide
DIQMTQSPSSLSASVGDRVTITCRASQDISNYLAWFQQKPGKAPKSLIYATPSLQSGVPSKFSGSGSGTEFTLTISSLQPEDFATYYCQQYNSYPLTFGGGTKVEIK

SEQ ID NO: 25151 - DNA, 321 bp, synthetic construct
  misc_feature 1..321: note = Description of Artificial Sequence: Synthetic polynucleotide
  source 1..321: mol_type = other DNA
gacatccagttgacccagtctccatcctcactgtctgcatctgtcggagacagagtcaccatcacttgtcgggcgagtcagggcattaacaattatttagcctggtttcagcagaaaccagggaaagcccctaagtccctgatttatgctgcatccagtttgcaaagtggggtcccatcaaggttcagcggcagtggatttgggacagatttcactctcaccatcagcagcctgcagcctgaagattttgcaactttttactgccagcaatataatagttacccattcacttttggccctgggaccaaagtggataacaaa

SEQ ID NO: 25152 - protein, 107 aa, synthetic construct
  REGION 1..107: note = Description of Artificial Sequence: Synthetic polypeptide
DIQLTQSPSSLSASVGDRVTITCRASQGINNYLAWFQQKPGKAPKSLIYAASSLQSGVPSRFSGSGFGTDFTLTISSLQPEDFATFYCQQYNSYPFTFGPGTKVDNK

SEQ ID NO: 25153 - DNA, 321 bp, synthetic construct
  misc_feature 1..321: note = Description of Artificial Sequence: Synthetic polynucleotide
  source 1..321: mol_type = other DNA
gacatccagatgacccagtctccatcctcactgtctgcatctgtaggggacagagtcaccatcacttgtcgggcgagtcagggcattgccaattatttagcctggtttcagcagagaccagggaaagcccctaagtccctgatctctgctgcatccagtttgcaaagtggggtcccatcaaagttcagcggcagtggatctgggacagagttcactctcaccatcagcagcctgcagcctgaagattttgcaacttattactgccaacagtatcatagttacccgctcactttcggcggagggtccaaggtggagatcaaa

SEQ ID NO: 25154 - protein, 107 aa, synthetic construct
  REGION 1..107: note = Description of Artificial Sequence: Synthetic polypeptide
DIQMTQSPSSLSASVGDRVTITCRASQGIANYLAWFQQRPGKAPKSLISAASSLQSGVPSKFSGSGSGTEFTLTISSLQPEDFATYYCQQYHSYPLTFGGGSKVEIK

SEQ ID NO: 25155 - DNA, 321 bp, synthetic construct
  misc_feature 1..321: note = Description of Artificial Sequence: Synthetic polynucleotide
  source 1..321: mol_type = other DNA
gacatccagatgacccagtctccatcctccctgtctgcatctgtaggagacagagtcaccatcacttgccgggcaagtcagggcattagaaatgatttaggctggtatcagcagaaaccagggaaagcccctaagcgcctgatctatgctacatccagtttgcaaagtggggtcccatcaaggttcagcggcagtggatctgggacagaattcactctcacaatcagcagcctgcagcctgaggattttgcaacttattactgtctacagtattatagttacccgctcactttcggcggagggaccgaggtggagatcaaa

SEQ ID NO: 25156 - protein, 107 aa, synthetic construct
  REGION 1..107: note = Description of Artificial Sequence: Synthetic polypeptide
DIQMTQSPSSLSASVGDRVTITCRASQGIRNDLGWYQQKPGKAPKRLIYATSSLQSGVPSRFSGSGSGTEFTLTISSLQPEDFATYYCLQYYSYPLTFGGGTEVEIK

SEQ ID NO: 25157 - DNA, 327 bp, synthetic construct
  misc_feature 1..327: note = Description of Artificial Sequence: Synthetic polynucleotide
  source 1..327: mol_type = other DNA
gacatccagatgacccagtctccatcctccctgtctgcatctgtgggagacagagtcaccatcacttgccgggcaagtcagaacatttacagctatttaaattggtatcagcagaaacctgggaaagcccctaagctcctgatctatgctgcatccagtttgcaaagtggggttccatcaaggttcagtggcagtggatctgggacagaattcactctcaccatcagcattctgcaacctgaagattttgcaacttactactgtcaacagagttacaatacccctccggagtgcaattttggccaggggaccaagctggagatcaaa

SEQ ID NO: 25158 - protein, 109 aa, synthetic construct
  REGION 1..109: note = Description of Artificial Sequence: Synthetic polypeptide
DIQMTQSPSSLSASVGDRVTITCRASQNIYSYLNWYQQKPGKAPKLLIYAASSLQSGVPSRFSGSGSGTEFTLTISILQPEDFATYYCQQSYNTPPECNFGQGTKLEIK

SEQ ID NO: 25159 - DNA, 321 bp, synthetic construct
  misc_feature 1..321: note = Description of Artificial Sequence: Synthetic polynucleotide
  source 1..321: mol_type = other DNA
gacatccagatgacccagtctccatcctccctgtctgcatctgtaggagacagagtcaccatcacttgccgggcaagtcagggcattaggagtgatttaggctggtttcagcagaaaccagggaaagcccctaagcgcctgatctttgatgcatccagtgtgcaaagtggggtcccatcaaggttcagcggcagtggatctgggacagaattcactctcacaatcagcagcctgcagcctgaagattttgcaatttattactgtctacaacattatacttacccgctcactttcggcggagggaccaaggtggagatcaag

SEQ ID NO: 25160 - protein, 107 aa, synthetic construct
  REGION 1..107: note = Description of Artificial Sequence: Synthetic polypeptide
DIQMTQSPSSLSASVGDRVTITCRASQGIRSDLGWFQQKPGKAPKRLIFDASSVQSGVPSRFSGSGSGTEFTLTISSLQPEDFAIYYCLQHYTYPLTFGGGTKVEIK

SEQ ID NO: 25161 - DNA, 318 bp, synthetic construct; identical to SEQ ID NO: 24745
  misc_feature 1..318: note = Description of Artificial Sequence: Synthetic polynucleotide
  source 1..318: mol_type = other DNA

SEQ ID NO: 25162 - protein, 106 aa, synthetic construct; identical to SEQ ID NO: 24746
  REGION 1..106: note = Description of Artificial Sequence: Synthetic polypeptide

SEQ ID NO: 25163 - DNA, 339 bp, synthetic construct
  misc_feature 1..339: note = Description of Artificial Sequence: Synthetic polynucleotide
  source 1..339: mol_type = other DNA
gacatcgtgatgacccagtctccagactccctggctgtgtctctgggcgagagggccaccatcaactgcaagtccagccagagtattttacacagctccaacaataacaactacttagcttggttccagcagaaaccaggacagcctcctaaactgctcctttactgggcatctacccgggaatccggggtccctgaccgattcagtggcagcgggtctgggacagatttcactctcaccatcagcagcctgcagcctgaagatgtggcagtttattactgtcagcaatattataatactccagtcactttcggccctgggaccaaagtgggtatcaaa

SEQ ID NO: 25164 - protein, 113 aa, synthetic construct
  REGION 1..113: note = Description of Artificial Sequence: Synthetic polypeptide
DIVMTQSPDSLAVSLGERATINCKSSQSILHSSNNNNYLAWFQQKPGQPPKLLLYWASTRESGVPDRFSGSGSGTDFTLTISSLQPEDVAVYYCQQYYNTPVTFGPGTKVGIK

SEQ ID NO: 25165 - DNA, 339 bp, synthetic construct; identical to SEQ ID NO: 25163
  misc_feature 1..339: note = Description of Artificial Sequence: Synthetic polynucleotide
  source 1..339: mol_type = other DNA

SEQ ID NO: 25166 - protein, 113 aa, synthetic construct; identical to SEQ ID NO: 25164
  REGION 1..113: note = Description of Artificial Sequence: Synthetic polypeptide

SEQ ID NO: 25167 - DNA, 318 bp, synthetic construct; identical to SEQ ID NO: 24781
  misc_feature 1..318: note = Description of Artificial Sequence: Synthetic polynucleotide
  source 1..318: mol_type = other DNA

SEQ ID NO: 25168 - protein, 106 aa, synthetic construct; identical to SEQ ID NO: 24782
  REGION 1..106: note = Description of Artificial Sequence: Synthetic polypeptide

SEQ ID NO: 25169 - DNA, 336 bp, synthetic construct
  misc_feature 1..336: note = Description of Artificial Sequence: Synthetic polynucleotide
  source 1..336: mol_type = other DNA
gatgttgtgatgactcagtctccactctccctgcccgtcacccttggacagccggcctccatctcctgcaggtctagtcaaagcctcatatacagtgatggaaacaccttcttgaattggtttcagcagaggccaggccaatctccaaggcgcctaatttataaggtttctaattgggactctggggtcccagacagattcagcggcagtgggtcaggcactgatttcacactgaaaatcagcaggttggaggctgaggatgttgggatttattactgcatgcaaggtacacactggcctctcaccttcggccaagggacacgactggagattaaa

SEQ ID NO: 25170 - protein, 112 aa, synthetic construct
  REGION 1..112: note = Description of Artificial Sequence: Synthetic polypeptide
DVVMTQSPLSLPVTLGQPASISCRSSQSLIYSDGNTFLNWFQQRPGQSPRRLIYKVSNWDSGVPDRFSGSGSGTDFTLKISRLEAEDVGIYYCMQGTHWPLTFGQGTRLEIK

SEQ ID NO: 25171 - DNA, 339 bp, synthetic construct
  misc_feature 1..339: note = Description of Artificial Sequence: Synthetic polynucleotide
  source 1..339: mol_type = other DNA
gacatcgtgatgacccagtctccagactccctggctgtgtctctgggcgagagggccaccatcaattgcaagtccagccagagtgttttacacagctccaacaattataactacttagcttggtaccagcagaaaccaggacagcctcctaacctgctcattttctgggcatctacccgggaatccggggtccctgaccgattcagtggcagcgggtttgggacagatttcactctcaacatcagcagcctgcaggctgaagatgtggcagtttattactgtcagcaatattatgatactccattcactttcggccctgggaccaaagtggatatcaaa

SEQ ID NO: 25172 - protein, 113 aa, synthetic construct
  REGION 1..113: note = Description of Artificial Sequence: Synthetic polypeptide
DIVMTQSPDSLAVSLGERATINCKSSQSVLHSSNNYNYLAWYQQKPGQPPNLLIFWASTRESGVPDRFSGSGFGTDFTLNISSLQAEDVAVYYCQQYYDTPFTFGPGTKVDIK

SEQ ID NO: 25173 - DNA, 339 bp, synthetic construct; identical to SEQ ID NO: 24515
  misc_feature 1..339: note = Description of Artificial Sequence: Synthetic polynucleotide
  source 1..339: mol_type = other DNA

SEQ ID NO: 25174 - protein, 113 aa, synthetic construct; identical to SEQ ID NO: 24516
  REGION 1..113: note = Description of Artificial Sequence: Synthetic polypeptide

SEQ ID NO: 25175 - DNA, 321 bp, synthetic construct; identical to SEQ ID NO: 24907
  misc_feature 1..321: note = Description of Artificial Sequence: Synthetic polynucleotide
  source 1..321: mol_type = other DNA

SEQ ID NO: 25176 - protein, 107 aa, synthetic construct; identical to SEQ ID NO: 24908
  REGION 1..107: note = Description of Artificial Sequence: Synthetic polypeptide

SEQ ID NO: 25177 - DNA, 321 bp, synthetic construct
  misc_feature 1..321: note = Description of Artificial Sequence: Synthetic polynucleotide
  source 1..321: mol_type = other DNA
gacatccagatgacccagtctccatcttccgtgtctgcatctgtgggagacagagtcaccatcacttgtcgggcgagtcagggtattagcaaatggttagcctggtatcagcagaaaccagggaaagcccctaagatcctgatatatgctgcatatagtttacaaagtggggtcccagcaaggttcagcggcagtggatctgggacagatttcactctcaccatcaggagcctgcagcctgaagattttgcaacttactattgtcaacaggctaacagtttcccattcactttcggccctgggaccaaagtggatatcaaa

SEQ ID NO: 25178 - protein, 107 aa, synthetic construct
  REGION 1..107: note = Description of Artificial Sequence: Synthetic polypeptide
DIQMTQSPSSVSASVGDRVTITCRASQGISKWLAWYQQKPGKAPKILIYAAYSLQSGVPARFSGSGSGTDFTLTIRSLQPEDFATYYCQQANSFPFTFGPGTKVDIK

SEQ ID NO: 25179 - DNA, 321 bp, synthetic construct
  misc_feature 1..321: note = Description of Artificial Sequence: Synthetic polynucleotide
  source 1..321: mol_type = other DNA
gacatccagatgacccagtctccatcttccgtgtctgcatctgtaagagacagagtcaccatcacttgtcgggcgagtcagggtattagcagctggttagcctggtatcagcagaaaccaggggaagcccctaagctcctgatctatgctgcatccaggttgcaaagtggggtcccatcaaggttcagcggcagtggatctgggacagatttcactctcaccatcagcagcctgcagcctgaagattttgcaacttactattgtcaacaggctaacagtttcccattcactttcggccctgggaccaaagtggatatcaaa

SEQ ID NO: 25180 - protein, 107 aa, synthetic construct
  REGION 1..107: note = Description of Artificial Sequence: Synthetic polypeptide
DIQMTQSPSSVSASVRDRVTITCRASQGISSWLAWYQQKPGEAPKLLIYAASRLQSGVPSRFSGSGSGTDFTLTISSLQPEDFATYYCQQANSFPFTFGPGTKVDIK

SEQ ID NO: 25181 - DNA, 339 bp, synthetic construct
  misc_feature 1..339: note = Description of Artificial Sequence: Synthetic polynucleotide
  source 1..339: mol_type = other DNA
gacatcgtgatgacccagtctccagactccctggctgtgtctctgggcgagagggccaccatcaactgcaagtccagccagactgttttattcagctccaacaataaccactacttagcatggtaccagcagaaaccaggacaacctcctaacctcctcatttactgggcatctacccgggcatccggggtccctgaccgattcagtggcagcgggtctgggacagatttcactctcaccatcagcagcctgcaggctgaagatgtggcagtttattactgtcagcaatattatagtagtccgtggacgttcggccaagggaccaaggtggaaatcaaa

SEQ ID NO: 25182 - protein, 113 aa, synthetic construct
  REGION 1..113: note = Description of Artificial Sequence: Synthetic polypeptide
DIVMTQSPDSLAVSLGERATINCKSSQTVLFSSNNNHYLAWYQQKPGQPPNLLIYWASTRASGVPDRFSGSGSGTDFTLTISSLQAEDVAVYYCQQYYSSPWTFGQGTKVEIK

SEQ ID NO: 25183 - DNA, 321 bp, synthetic construct
  misc_feature 1..321: note = Description of Artificial Sequence: Synthetic polynucleotide
  source 1..321: mol_type = other DNA
gacatccagatgacccagtctccttcctccctgtctgcatctataggagacagagtcaccatcacttgccgggcaagtcagggcattagaaatgatttaggctggtatcagcagaaaccagggaaagcccctaagcgcctgatttatgctgcatccagtttgcaaagtggggtcccatcaaggttcagcggcagtggatctgggacagaattcactctcacaatcagcagcctgcagcctgaagattttgcaacttattactgtctacaacattatagttaccctcgcagttttggccaggggaccaagctggagatcaaa

SEQ ID NO: 25184 - protein, 107 aa, synthetic construct
  REGION 1..107: note = Description of Artificial Sequence: Synthetic polypeptide
DIQMTQSPSSLSASIGDRVTITCRASQGIRNDLGWYQQKPGKAPKRLIYAASSLQSGVPSRFSGSGSGTEFTLTISSLQPEDFATYYCLQHYSYPRSFGQGTKLEIK

SEQ ID NO: 25185 - DNA, 321 bp, synthetic construct
  misc_feature 1..321: note = Description of Artificial Sequence: Synthetic polynucleotide
  source 1..321: mol_type = other DNA
gacatccagatgacccagtctccatcctccctgtctgcatctgtaggagacagagtcaccatcacttgccgggcaagtcaggccattagaaatgatttaggctggtatcagcagagaccagggaaagcccctaagcgcctgatctatgctgcatccagtttgcaaagtggggtcccatcaaggttcagcggcagtggatctgggacagaatttattctcacaatcagcagcctgcagcctgaagattttgcaacttattactgtttacagcattataattaccctcgcagttttggccaggggaccaagctggagatcaaa

SEQ ID NO: 25186 - protein, 107 aa, synthetic construct
  REGION 1..107: note = Description of Artificial Sequence: Synthetic polypeptide
DIQMTQSPSSLSASVGDRVTITCRASQAIRNDLGWYQQRPGKAPKRLIYAASSLQSGVPSRFSGSGSGTEFILTISSLQPEDFATYYCLQHYNYPRSFGQGTKLEIK

SEQ ID NO: 25187 - DNA, 321 bp, synthetic construct
  misc_feature 1..321: note = Description of Artificial Sequence: Synthetic polynucleotide
  source 1..321: mol_type = other DNA
gacatccagatgacccagtctccatcctccctgtctgcatctgtaggagacagagtcaccatcacttgccgggcaagtcagaacatttacagctatttaaattggtatcagcagaaaccagggagagcccctaaactcgtgatctattctacatccagtttgcaaagtggggtcccatcaaggttcagtggcagtggatctgggacagatttcagtctcaccatcagcaatctgcaacctgaagatttttcaacttactactgtcaacagagttacagtccccctctcactttcggcggagggaccaaggtggagatcaga

SEQ ID NO: 25188 - protein, 107 aa, synthetic construct
  REGION 1..107: note = Description of Artificial Sequence: Synthetic polypeptide
DIQMTQSPSSLSASVGDRVTITCRASQNIYSYLNWYQQKPGRAPKLVIYSTSSLQSGVPSRFSGSGSGTDFSLTISNLQPEDFSTYYCQQSYSPPLTFGGGTKVEIR

SEQ ID NO: 25189 - DNA, 321 bp, synthetic construct
  misc_feature 1..321: note = Description of Artificial Sequence: Synthetic polynucleotide
  source 1..321: mol_type = other DNA
gacatccagatgacccagtctccatcctccctgtctacatctgtaggagacagagtcaccatcacttgccgggcaagtcagaacattatcagctatttaaattggtatcagcagaaaccagggaaagcccctaagctcctgatgtatgttgcatcccgtttgcaaagtggggtcccatcaaggttcagtggcagtggatctgggacagatttcactctcaccatcagcagtctgcaagctgaagattttgcaacttactactgtcaacagagttacagtaccccgtacactttcggcggagggaccaaggtggcgatcaaa

SEQ ID NO: 25190 - protein, 107 aa, synthetic construct
  REGION 1..107: note = Description of Artificial Sequence: Synthetic polypeptide
DIQMTQSPSSLSTSVGDRVTITCRASQNIISYLNWYQQKPGKAPKLLMYVASRLQSGVPSRFSGSGSGTDFTLTISSLQAEDFATYYCQQSYSTPYTFGGGTKVAIK

SEQ ID NO: 25191 - DNA, 339 bp, synthetic construct
  misc_feature 1..339: note = Description of Artificial Sequence: Synthetic polynucleotide
  source 1..339: mol_type = other DNA
gacatcgtgatgacccagtctccagactccctggctgtgtctctgggcgagagggccaccatcaattgcaagtccagccagagtgttttacacaactccaacaattataactatttagcttggtaccagcagaaaccaggacagcctcctaacctgctcattttctgggcatctacccgggaatccggggtccctgaccgattcagtggcagcgggtttgggacagatttcactctcaacatcagcagcctgcaggctgaagatgtggcagtttattactgtcagcaatattatgatactccattcactttcggccatgggaccaaagtggatatcaaa

SEQ ID NO: 25192 - protein, 113 aa, synthetic construct
  REGION 1..113: note = Description of Artificial Sequence: Synthetic polypeptide
DIVMTQSPDSLAVSLGERATINCKSSQSVLHNSNNYNYLAWYQQKPGQPPNLLIFWASTRESGVPDRFSGSGFGTDFTLNISSLQAEDVAVYYCQQYYDTPFTFGHGTKVDIK

SEQ ID NO: 25193 - DNA, 321 bp, synthetic construct
  misc_feature 1..321: note = Description of Artificial Sequence: Synthetic polynucleotide
  source 1..321: mol_type = other DNA
gacatccagatgacccagtctccatcctccctgtctgcatctgtaggagacagagtcaccatcacttgccgggcaagtcagggcattagaaatgatttaggctggtatcagaagaaaccagggaaagcccctaagcgcctgatcaatgctgcatccagtttgcaaagtggggtcccatcaaggttcagcggcagtggatctgggacagaattcactctcacaatcagcagcctgcagcctgaagattttgcaacttattactgtctacagcataatagttacccattcactttcggccctgggaccaaagtggatatcaaa

SEQ ID NO: 25194 - protein, 107 aa, synthetic construct
  REGION 1..107: note = Description of Artificial Sequence: Synthetic polypeptide
DIQMTQSPSSLSASVGDRVTITCRASQGIRNDLGWYQKKPGKAPKRLINAASSLQSGVPSRFSGSGSGTEFTLTISSLQPEDFATYYCLQHNSYPFTFGPGTKVDIK

SEQ ID NO: 25195 - DNA, 321 bp, synthetic construct
  misc_feature 1..321: note = Description of Artificial Sequence: Synthetic polynucleotide
  source 1..321: mol_type = other DNA
gacatccagatgacccagtctccatcttccgtgtctgcatctgtaggagacagagtcaccatcacttgtcgggcgagtcagggtattagcgactggttagcctggtatcagcagaaaccagggaaagcccctaggctcctgatctatgctgcatccagtttgcaaagtggggtcccatcaaggttcagcggcagtggatctgggacagatttcactctcaccatcagcaacctgcagcctgaagattttgcaacttactattgtcaacagactaacagtttcccgtggacgttcggccaagggaccaaggtggaaatcaaa

SEQ ID NO: 25196 - protein, 107 aa, synthetic construct
  REGION 1..107: note = Description of Artificial Sequence: Synthetic polypeptide
DIQMTQSPSSVSASVGDRVTITCRASQGISDWLAWYQQKPGKAPRLLIYAASSLQSGVPSRFSGSGSGTDFTLTISNLQPEDFATYYCQQTNSFPWTFGQGTKVEIK

SEQ ID NO: 25197 - DNA, 321 bp, synthetic construct
  misc_feature 1..321: note = Description of Artificial Sequence: Synthetic polynucleotide
  source 1..321: mol_type = other DNA
gacatccagatgacccagtctccatcctccctgtctgcatctgtaggagacagagtcaccatcacttgccgggcaagtcagggcattagaaatgatttaggctggtatcagcagaaaccagggaaagcccctaagcgcctgatctatgctgcatccagtttgcaaagtggggtcccatcaaggttcagcggcagtggatctgggacagaattcactctcacaatcagcagcctgcagcctgaagattttgcaacttattactgtctacagcataatagttaccctctcactttcggcggagggaccaaggtggggatcaca

SEQ ID NO: 25198 - protein, 107 aa, synthetic construct
  REGION 1..107: note = Description of Artificial Sequence: Synthetic polypeptide
DIQMTQSPSSLSASVGDRVTITCRASQGIRNDLGWYQQKPGKAPKRLIYAASSLQSGVPSRFSGSGSGTEFTLTISSLQPEDFATYYCLQHNSYPLTFGGGTKVGIT

SEQ ID NO: 25199 - DNA, 321 bp, synthetic construct
  misc_feature 1..321: note = Description of Artificial Sequence: Synthetic polynucleotide
  source 1..321: mol_type = other DNA
gacatccagatgacccagtctccatcctcactgtctgcatctgtaggagacagagtcaccatcacttgtcgggcgagtcagggcattaacaattatttagcctggtttcagcagaaaccagggaaagcccctaagtccctgatcaatgctgcatccagtttgcaaagtggggtcccatcaaggttcagcggcagtggatctgggacagatttcactctcgccatcagcagcctacagcctgaagattttgcaacttattactgccaacagtattatagttacccattcactttcggccctgggaccaaagtggatatcaaa

SEQ ID NO: 25200 - protein, 107 aa, synthetic construct
  REGION 1..107: note = Description of Artificial Sequence: Synthetic polypeptide
DIQMTQSPSSLSASVGDRVTITCRASQGINNYLAWFQQKPGKAPKSLINAASSLQSGVPSRFSGSGSGTDFTLAISSLQPEDFATYYCQQYYSYPFTFGPGTKVDIK

SEQ ID NO: 25201 - DNA, 321 bp, synthetic construct
  misc_feature 1..321: note = Description of Artificial Sequence: Synthetic polynucleotide
  source 1..321: mol_type = other DNA
gacatccagatgacccagtctccatcttccgtgtctgcatctgtaggagacagagtcaccatcacttgtcgggcgagtcagggtattatcaactggttagcctggtatcaacagaaaccagggaaagcccctaagctcctgatctatgctgcatccagtttgcaaagtggggtcccatcaaggttcagcggcagtggatctgggacagatttcactctcaccatcagcaacctgcagcctgaagattttgcaacttactattgtcaacagactaacagtttcccgtggacgttcggccaagggaccaaggtggaaatcaaa

SEQ ID NO: 25202 - protein, 107 aa, synthetic construct
  REGION 1..107: note = Description of Artificial Sequence: Synthetic polypeptide
DIQMTQSPSSVSASVGDRVTITCRASQGIINWLAWYQQKPGKAPKLLIYAASSLQSGVPSRFSGSGSGTDFTLTISNLQPEDFATYYCQQTNSFPWTFGQGTKVEIK

SEQ ID NO: 25203 - DNA, 321 bp, synthetic construct
  misc_feature 1..321: note = Description of Artificial Sequence: Synthetic polynucleotide
  source 1..321: mol_type = other DNA
gacatccagatgacccagtctccatcctccctgtctgcatctgtaggagacagagtcaccatcacttgccgggcaagtcagggcattagaaatgatttaggctggtatcagcagaaaccagggaaagcccctaagcgcctgatctatggtgcatccaatttgcaaagtggggtcccatcaaggttcagcggcagtggatctgggacagaattcactctcacagtcagcagcctgcagcctgaagattttgcaacttatttctgtctacagcatactagtttcccattcactttcggccctgggaccaaagtggatatcaaa

SEQ ID NO: 25204 - protein, 107 aa, synthetic construct
  REGION 1..107: note = Description of Artificial Sequence: Synthetic polypeptide
DIQMTQSPSSLSASVGDRVTITCRASQGIRNDLGWYQQKPGKAPKRLIYGASNLQSGVPSRFSGSGSGTEFTLTVSSLQPEDFATYFCLQHTSFPFTFGPGTKVDIK

SEQ ID NO: 25205 - DNA, 339 bp, synthetic construct
  misc_feature 1..339: note = Description of Artificial Sequence: Synthetic polynucleotide
  source 1..339: mol_type = other DNA
gacatcgtgatgacccagtctccagactccctggctgtgtctctgggcgagagggccaccatcaactgcaagtccagccagagtgttttaatgacctccaacgataagaactacttaacttggtaccagcagagaccaggacagcctcctaagctgctcatttactgggcttctacccgggaatccggggtccctgaccgattcagtggcggcgggtctgggacagatttcactctcaccatcagcggcctgcaggctgaagatgtggcagtttattactgtcagcaatattatagtactcctccgacgttcggccaagggaccaaggtggaaatcaag

SEQ ID NO: 25206 - protein, 113 aa, synthetic construct
  REGION 1..113: note = Description of Artificial Sequence: Synthetic polypeptide
DIVMTQSPDSLAVSLGERATINCKSSQSVLMTSNDKNYLTWYQQRPGQPPKLLIYWASTRESGVPDRFSGGGSGTDFTLTISGLQAEDVAVYYCQQYYSTPPTFGQGTKVEIK

SEQ ID NO: 25207 - DNA, 321 bp, synthetic construct
  misc_feature 1..321: note = Description of Artificial Sequence: Synthetic polynucleotide
  source 1..321: mol_type = other DNA
gacatccagatgaaccagtctccatcttccgtgtctgcatctgtaggagacagagtcaccatcacttgtcgggcgagtcagggtattagcaactggttagcctggtatcagcagaaaccagggagagcccctaagctcctgatctatgctgcatccagtttgcaaagtggggtcccttcaaggttcagcggcagtggatctgggacagatttcactctcaccatcagcaacctgcagcctgaagattttgcaacttactattgtcaacagactaacagtttcccgtggacgttcggccaagggaccaaggtggaaatcaaa

SEQ ID NO: 25208 - protein, 107 aa, synthetic construct
  REGION 1..107: note = Description of Artificial Sequence: Synthetic polypeptide
DIQMNQSPSSVSASVGDRVTITCRASQGISNWLAWYQQKPGRAPKLLIYAASSLQSGVPSRFSGSGSGTDFTLTISNLQPEDFATYYCQQTNSFPWTFGQGTKVEIK

SEQ ID NO: 25209 - DNA, 321 bp, synthetic construct
  misc_feature 1..321: note = Description of Artificial Sequence: Synthetic polynucleotide
  source 1..321: mol_type = other DNA
gacatccaaatgacccagtctccatcctccctgtctgcatctgtaggagacagagtcaccatcacttgccgggcaagtcagggcattagaaatgatttaggctggcatcagcagaaaccagggaaagcccctaagcgcctgatctatgctgcatccagtttgcaaagtggggtcccatcaaggttcagcggcagtggatctgggacagaattcactctctcaatcagcagcctgcagcctgaagattttgcaacttattactgtctacagcataatagtttcccattcactttcggccctgggaccaaagtggatatcaaa

SEQ ID NO: 25210 - protein, 107 aa, synthetic construct
  REGION 1..107: note = Description of Artificial Sequence: Synthetic polypeptide
DIQMTQSPSSLSASVGDRVTITCRASQGIRNDLGWHQQKPGKAPKRLIYAASSLQSGVPSRFSGSGSGTEFTLSISSLQPEDFATYYCLQHNSFPFTFGPGTKVDIK

SEQ ID NO: 25211 - DNA, 321 bp, synthetic construct
  misc_feature 1..321: note = Description of Artificial Sequence: Synthetic polynucleotide
  source 1..321: mol_type = other DNA
gacatccagatgacccagtctccatcttccgtgtctgcatctgtaggagacagagtcaccatcacttgtcgggcgagtcaggatattagcagctggttagcctggtatcagaagaaaccagggaaagcccctaaactcctgatctatgatgcatccagtttgcaaagtggggtcccatcaaggttcagcggcagtggatctgggacagatttcattctcaccatcagcagcctgcagcctgaagattttgcaacttacttttgtcaacaggctaacagtctcccattcactttcggccctgggaccaaagtggatatcaaa

SEQ ID NO: 25212 - protein, 107 aa, synthetic construct
  REGION 1..107: note = Description of Artificial Sequence: Synthetic polypeptide
DIQMTQSPSSVSASVGDRVTITCRASQDISSWLAWYQKKPGKAPKLLIYDASSLQSGVPSRFSGSGSGTDFILTISSLQPEDFATYFCQQANSLPFTFGPGTKVDIK

SEQ ID NO: 25213 - DNA, 336 bp, synthetic construct
  misc_feature 1..336: note = Description of Artificial Sequence: Synthetic polynucleotide
  source 1..336: mol_type = other DNA
gatattgtgatgacccagactccactctctctgtccgtcacccctggacagccggcctccatctcctgcaagtctagtcagagcctcctgcacagtgatggaaggacctatttgtattggtaccttcagaagccaggccagcctccgcagctcctgatctatgaagtttccaaccggttctctggagtgccagataggttcagtggcagcgggtcagggacagacttcacactgaaaatcagccgggtggaggctgaggatgttggggtttattactgtatgcaaagtatacagcttccgtggacgttcggccaagggaccaaggtggaaatcaaa

SEQ ID NO: 25214 - protein, 112 aa, synthetic construct
  REGION 1..112: note = Description of Artificial Sequence: Synthetic polypeptide
DIVMTQTPLSLSVTPGQPASISCKSSQSLLHSDGRTYLYWYLQKPGQPPQLLIYEVSNRFSGVPDRFSGSGSGTDFTLKISRVEAEDVGVYYCMQSIQLPWTFGQGTKVEIK

SEQ ID NO: 25215 - DNA, 321 bp, synthetic construct
  misc_feature 1..321: note = Description of Artificial Sequence: Synthetic polynucleotide
  source 1..321: mol_type = other DNA
gacatccagatgacccagtctccttcctccctgtctgcatctgtaggagacagagtcaccatcacttgccgggcaagtcagggcattagaaatgatttaggctggtatcaacagaaaccagggaaagcccctaagcgcctgatctatgctgcatccagtttgcaaagtggggtcccatcaaggttcagcggcagtggatctgggacagaattcactctcacaatcagcagcctgcagcctgaagattttgcaacttattactgtctactgcattataattaccctcggacgttcggccaagggaccaaagtggaaatcaag

SEQ ID NO: 25216 - protein, 107 aa, synthetic construct
  REGION 1..107: note = Description of Artificial Sequence: Synthetic polypeptide
DIQMTQSPSSLSASVGDRVTITCRASQGIRNDLGWYQQKPGKAPKRLIYAASSLQSGVPSRFSGSGSGTEFTLTISSLQPEDFATYYCLLHYNYPRTFGQGTKVEIK

SEQ ID NO: 25217 - DNA, 321 bp, synthetic construct
  misc_feature 1..321: note = Description of Artificial Sequence: Synthetic polynucleotide
  source 1..321: mol_type = other DNA
gacatccagatgacccagtctccatcctccctgtctgcatctgtaggagacagagtcaccatcacttgccgggcaagtcagggcattagaaatgatttaggctggtatcagcagaaaccagggaaagcccctaagcgcctgatctatgctgcatccagtttgcaaagtggggtcccatcaaggttcagcggcggtggatctgggacagaattcactctcacaatcagcagcctgcagcctgaagattttgcgacttattactgtctacagcatagtagttaccctctcactttcggcggagggaccaaggtggagatcaag

SEQ ID NO: 25218 - protein, 107 aa, synthetic construct
  REGION 1..107: note = Description of Artificial Sequence: Synthetic polypeptide
DIQMTQSPSSLSASVGDRVTITCRASQGIRNDLGWYQQKPGKAPKRLIYAASSLQSGVPSRFSGGGSGTEFTLTISSLQPEDFATYYCLQHSSYPLTFGGGTKVEIK

SEQ ID NO: 25219 - DNA, 321 bp, synthetic construct
  misc_feature 1..321: note = Description of Artificial Sequence: Synthetic polynucleotide
  source 1..321: mol_type = other DNA
gacatccagatgacccagtctccatcctccctgtctgcatctgtgggagacagagtcaccttcacttgccgggcaagtcagggcattagagatgatttaggctggtatcagcagaaaccagggaaagcccctaagcgcctgatctatgctgcatccagtttgcaaagtggggtcccatcaaggttcagcggcagtagatctgggagagaattcactctcacaatcagcagcctgcaacctgaagattttgcaacttattactgtctacagcattatagttaccctcggacgttcggccaagggaccaaggtggaaatcaaa

SEQ ID NO: 25220 - protein, 107 aa, synthetic construct
  REGION 1..107: note = Description of Artificial Sequence: Synthetic polypeptide
DIQMTQSPSSLSASVGDRVTFTCRASQGIRDDLGWYQQKPGKAPKRLIYAASSLQSGVPSRFSGSRSGREFTLTISSLQPEDFATYYCLQHYSYPRTFGQGTKVEIK

SEQ ID NO: 25221 - DNA, 321 bp, synthetic construct
  misc_feature 1..321: note = Description of Artificial Sequence: Synthetic polynucleotide
  source 1..321: mol_type = other DNA
gacatccagatgacccagtctccatcttccgtgtctgcatctgtaggagacagagtcaccatcacttgtcgggcgagtcagggtattagcgactggttagcctggtatcagcagaaaccagggaaagcccctaagctcctgatttatgctgcatccagtttacaaagtggagtcccatcaaggttcagcggcagtggatttgggacagatttcactctcaccatcagcagcctgcagcctgaagattttgcaacttactattgtcaacaggctaacagtttcccattcactttcggccctgggaccaaagtggatatcaaa

SEQ ID NO: 25222 - protein, 107 aa, synthetic construct
  REGION 1..107: note = Description of Artificial Sequence: Synthetic polypeptide
DIQMTQSPSSVSASVGDRVTITCRASQGISDWLAWYQQKPGKAPKLLIYAASSLQSGVPSRFSGSGFGTDFTLTISSLQPEDFATYYCQQANSFPFTFGPGTKVDIK

SEQ ID NO: 25223 - DNA, 321 bp, synthetic construct
  misc_feature 1..321: note = Description of Artificial Sequence: Synthetic polynucleotide
  source 1..321: mol_type = other DNA
gacatccagatgacccagtctccatcctccctgtctgcatctgtaggagacagagtcaccatcacttgccgggcaagtcaggacattagaaaagatttaggctggtatcagcagaaaccagggaaagcccctaagcgcctgatctatgctgcatccactttggaaagtggggtcccatcaaggttcagcggcagtggatctgggacagaattcactctcacaatcagcagcctgcagcctgaagattttgcaacttattactgtctacagcattatagtttcccgtggacgttcggccaagggaccaaggtggaaatcaaa

SEQ ID NO: 25224 - protein, 107 aa, synthetic construct
  REGION 1..107: note = Description of Artificial Sequence: Synthetic polypeptide
DIQMTQSPSSLSASVGDRVTITCRASQDIRKDLGWYQQKPGKAPKRLIYAASTLESGVPSRFSGSGSGTEFTLTISSLQPEDFATYYCLQHYSFPWTFGQGTKVEIK

SEQ ID NO: 25225 - DNA, 324 bp, synthetic construct
  misc_feature 1..324: note = Description of Artificial Sequence: Synthetic polynucleotide
  source 1..324: mol_type = other DNA
gaaattgtgttgacgcagtctccaggcaccctgtctttgtctccaggggaaagagccaccctctcctgcagggccagtcagagtgttagtggaagctacttagcctggtaccagcagaaacctggccaggctcccaggctcctcatctatggtgcatccagcagggccactggcatcccagacaggttcagtggcagtgggtctgggacagacttcactctcaccatcagcagactggagcctgaagattttgcagtttattactgtcagcagtatggtagttcaccgtggacgttcggccaagggaccaaggtggaaatcaaa

SEQ ID NO: 25226 - protein, 108 aa, synthetic construct
  REGION 1..108: note = Description of Artificial Sequence: Synthetic polypeptide
EIVLTQSPGTLSLSPGERATLSCRASQSVSGSYLAWYQQKPGQAPRLLIYGASSRATGIPDRFSGSGSGTDFTLTISRLEPEDFAVYYCQQYGSSPWTFGQGTKVEIK

SEQ ID NO: 25227 - DNA, 321 bp, synthetic construct
  misc_feature 1..321: note = Description of Artificial Sequence: Synthetic polynucleotide
  source 1..321: mol_type = other DNA
gacatccagatgacccagtctccatcctccctgtctgcatctgtaggagacagagtcaccatcacttgccgggcaagtcagggcattagaaatgatttaggctggtatcagcagaaaccagggaaagcccctaagcgcctgatctatgctgcatccaatttgcaaagtggggtcccatcaaggttcagcggcagtagatctgggacagaattcactctcacaatcagcagcctgcagcctgaagattttgcaacttattactgtctacagcataatagttacccattcactttcggccctgggaccaaagtggatatcaaa

SEQ ID NO: 25228 - protein, 107 aa, synthetic construct
  REGION 1..107: note = Description of Artificial Sequence: Synthetic polypeptide
DIQMTQSPSSLSASVGDRVTITCRASQGIRNDLGWYQQKPGKAPKRLIYAASNLQSGVPSRFSGSRSGTEFTLTISSLQPEDFATYYCLQHNSYPFTFGPGTKVDIK

SEQ ID NO: 25229 - DNA, 321 bp, synthetic construct
  misc_feature 1..321: note = Description of Artificial Sequence: Synthetic polynucleotide
  source 1..321: mol_type = other DNA
gacgtccagatgacccagtctccatcctccctgtctgcatctgtaggagacagagtcaccatcacttgccgggcaagtcagggcattagaaatgatttaggctggtatcagcagaaaccagggaaagcccctaagcgcctcatctatgctgcatccagtttgcaaagtggggtcccatcaaggttcagcggcagtggatctgggacagaattcactctcacaatcagcagcctgcagcctgaagattttgcaacttattactgtctccaccattataattaccctcggacgttcggccaagggaccaaggtggaaatcaca

SEQ ID NO: 25230 - protein, 107 aa, synthetic construct
  REGION 1..107: note = Description of Artificial Sequence: Synthetic polypeptide
DVQMTQSPSSLSASVGDRVTITCRASQGIRNDLGWYQQKPGKAPKRLIYAASSLQSGVPSRFSGSGSGTEFTLTISSLQPEDFATYYCLHHYNYPRTFGQGTKVEIT

SEQ ID NO: 25231 - DNA, 336 bp, synthetic construct
  misc_feature 1..336: note = Description of Artificial Sequence: Synthetic polynucleotide
  source 1..336: mol_type = other DNA
catattgtgatgacccagactccactctctctgtccgtcacccctggacagccggcctccatctcctgcaagtctagtcagagcctcctgcatagtgagggaaggacctatttgtattggtacctgcagaagccaggccagcctccacagctcctgatctatgaaatttcccaccggttctctggagtgccagatagattcagtggcagcgggtcagggacagatttcacactgaaaatcagccgggtggaggctgaggatgttggggtttattactgcatgcaaagtatccaccttccgttcactttcggcggagggaccaaggtggagatcaaa

SEQ ID NO: 25232 - protein, 112 aa, synthetic construct
  REGION 1..112: note = Description of Artificial Sequence: Synthetic polypeptide
HIVMTQTPLSLSVTPGQPASISCKSSQSLLHSEGRTYLYWYLQKPGQPPQLLIYEISHRFSGVPDRFSGSGSGTDFTLKISRVEAEDVGVYYCMQSIHLPFTFGGGTKVEIK

SEQ ID NO: 25233 - DNA, 321 bp, synthetic construct
  misc_feature 1..321: note = Description of Artificial Sequence: Synthetic polynucleotide
  source 1..321: mol_type = other DNA
gacatccagatgacccagtctccatcctccctgtctgcatctgtaggagacagagtcaccttcacttgccgggcaagtcagggcattagagatgatttaggctggtatcagcagaaaccagggaaagcccctaagcgcctgatctatgctacatccagtttgcaaagtggggtcccatcaaggttcagcggcagtggatctgggacagaattcactctcacaatcagcagcctgcagcctgaagattttgcaacttattactgtctacagcattatagttaccctcggacgttcggccaagggaccaaggtggaaatcaaa

SEQ ID NO: 25234 - protein, 107 aa, synthetic construct
  REGION 1..107: note = Description of Artificial Sequence: Synthetic polypeptide
DIQMTQSPSSLSASVGDRVTFTCRASQGIRDDLGWYQQKPGKAPKRLIYATSSLQSGVPSRFSGSGSGTEFTLTISSLQPEDFATYYCLQHYSYPRTFGQGTKVEIK

SEQ ID NO: 25235 - DNA, 321 bp, synthetic construct
  misc_feature 1..321: note = Description of Artificial Sequence: Synthetic polynucleotide
  source 1..321: mol_type = other DNA
gacatccagatgacccagtctccatcttccgtgtctgcatctgtaggagacagagtcaccatcacttgtcgggcgagtcagggtattagcgactggttagcctggtatcaacagaaaccagggaaagcccctaggctcctgatctatgctgcatccagtttgcaaagtggggtcccatcaaaattcagcggcagtggatctgggacagatttcactctcaccatcagcaacctgcagcctgaagattttgcaacttactattgtcaacagactaacagtttcccgtggacgttcggccaagggaccaaggtggaaatcaaa

SEQ ID NO: 25236 - protein, 107 aa, synthetic construct
  REGION 1..107: note = Description of Artificial Sequence: Synthetic polypeptide
DIQMTQSPSSVSASVGDRVTITCRASQGISDWLAWYQQKPGKAPRLLIYAASSLQSGVPSKFSGSGSGTDFTLTISNLQPEDFATYYCQQTNSFPWTFGQGTKVEIK

SEQ ID NO: 25237 - DNA, 336 bp, synthetic construct
  misc_feature 1..336: note = Description of Artificial Sequence: Synthetic polynucleotide
  source 1..336: mol_type = other DNA
gatattgtgatgactcagtctccactctccctgcccgtcacccctggagagccggcctccatctcctgcaggtctagtcagagcctcctgcatagtaatggatacagctatttggagtggtacctgcagaagccaggacagtctccacaactcctgatctatttgggttctaatcgggcctccggggtccctgacaggttcagtggcagtggatcaggcacagattttacactgaaaatcagcagagtagaggctgaggatgttggggtttattactgcatgcaaactctacaaactccattcactttcggccctgggaccaaagtggatatcaaa

SEQ ID NO: 25238 - protein, 112 aa, synthetic construct
  REGION 1..112: note = Description of Artificial Sequence: Synthetic polypeptide
DIVMTQSPLSLPVTPGEPASISCRSSQSLLHSNGYSYLEWYLQKPGQSPQLLIYLGSNRASGVPDRFSGSGSGTDFTLKISRVEAEDVGVYYCMQTLQTPFTFGPGTKVDIK

SEQ ID NO: 25239 - DNA, 321 bp, synthetic construct
  misc_feature 1..321: note = Description of Artificial Sequence: Synthetic polynucleotide
  source 1..321: mol_type = other DNA
gacatccagatgacccagtctccatcttccgtgtctgcatctgtaggagacagagtcaccatcacttgtcgggcgagtcagggtattagcaactggttagcctggtatcagcagaaaccagggaaagcccctaagctcctgatctctgctgcattcagtttgcaaagtggggtcccatcaaggttcagcggcagtggatctgggacagatttcactctcagcatcagcagcctgcagcctgaagattttgcaacttactattgtcaacagtctaacagtttcccgtggacgttcggccaagggaccaaggtggaaatcaaa

SEQ ID NO: 25240 - protein, 107 aa, synthetic construct
  REGION 1..107: note = Description of Artificial Sequence: Synthetic polypeptide
DIQMTQSPSSVSASVGDRVTITCRASQGISNWLAWYQQKPGKAPKLLISAAFSLQSGVPSRFSGSGSGTDFTLSISSLQPEDFATYYCQQSNSFPWTFGQGTKVEIK

SEQ ID NO: 25241 - DNA, 321 bp, synthetic construct
  misc_feature 1..321: note = Description of Artificial Sequence: Synthetic polynucleotide
  source 1..321: mol_type = other DNA
gacatccagatgacccagtctccatcctccctgtctgcatctgtaggagacagagtcaccatcacttgccggacaagtcagggcattagaaatgatttaggctggtatcagcagaaaccagggaaagcccctaagcgcctgatctatgctgcatccagtttgcaaagtggggtcccatcaaggttcagcggcagtggatctgggacagaattcactctcacaatcagcagcctgcagcctgaagattttgcaacttattactgtctacaacataatagttacccgctcactttcggcggagggaccaaggtggagatcaaa

SEQ ID NO: 25242 - protein, 107 aa, synthetic construct
  REGION 1..107: note = Description of Artificial Sequence: Synthetic polypeptide
DIQMTQSPSSLSASVGDRVTITCRTSQGIRNDLGWYQQKPGKAPKRLIYAASSLQSGVPSRFSGSGSGTEFTLTISSLQPEDFATYYCLQHNSYPLTFGGGTKVEIK

SEQ ID NO: 25243 - DNA, 321 bp, synthetic construct; identical to SEQ ID NO: 25203
  misc_feature 1..321: note = Description of Artificial Sequence: Synthetic polynucleotide
  source 1..321: mol_type = other DNA

SEQ ID NO: 25244 - protein, 107 aa, synthetic construct; identical to SEQ ID NO: 25204
  REGION 1..107: note = Description of Artificial Sequence: Synthetic polypeptide

SEQ ID NO: 25245 - DNA, 321 bp, synthetic construct
  misc_feature 1..321: note = Description of Artificial Sequence: Synthetic polynucleotide
  source 1..321: mol_type = other DNA
gacatccagatgacccagtctccatcctccctgtctgcatctgtaggagacagagtcaccttcacttgccgggcaagtcagggcattagagatgatttaggctggtatcaacagaaaccagggaaagcccctaagcgcctgatctatgctgcatccagtttgcaaagtggggtcccatcaaggttcagcggcagtggatctgggacagaattcactctcacaatcagcagcctgcagcctgaagattttgcaacttattactgtctacagcattatagttaccctcggacgttcggccaagggaccaaggtggaaatcaaa

SEQ ID NO: 25246 - protein, 107 aa, synthetic construct
  REGION 1..107: note = Description of Artificial Sequence: Synthetic polypeptide
DIQMTQSPSSLSASVGDRVTFTCRASQGIRDDLGWYQQKPGKAPKRLIYAASSLQSGVPSRFSGSGSGTEFTLTISSLQPEDFATYYCLQHYSYPRTFGQGTKVEIK

SEQ ID NO: 25247 - DNA, 321 bp, synthetic construct
  misc_feature 1..321: note = Description of Artificial Sequence: Synthetic polynucleotide
  source 1..321: mol_type = other DNA
gacatccagatgacccagtctccatcttccgtgtctgcatctgtaggagacagagtcaccatcacttgtcgggcgagtcaggatattagcagctggttagcctggtatcagaagaaaccagggaaagcccctaagtacctgatctatgatgcatccagtttgcaaagtggggtcccatcaaggttcagcggcagtggatctgggacagatttcattctcaccatcagcagcctgcagcctgaagattttgcaatttacttttgtcaacaggctaacagtctccctttcactttcggccctgggaccaaagtggatatcaaa

SEQ ID NO: 25248 - protein, 107 aa, synthetic construct
  REGION 1..107: note = Description of Artificial Sequence: Synthetic polypeptide
DIQMTQSPSSVSASVGDRVTITCRASQDISSWLAWYQKKPGKAPKYLIYDASSLQSGVPSRFSGSGSGTDFILTISSLQPEDFAIYFCQQANSLPFTFGPGTKVDIK

SEQ ID NO: 25249 - DNA, 321 bp, synthetic construct
  misc_feature 1..321: note = Description of Artificial Sequence: Synthetic polynucleotide
  source 1..321: mol_type = other DNA
gacatccagatgacccagtctccatcctccctgtctgcatctgtaggagacagagtcaccttcacttgccgggcaagtcaggacattagagatgatttaggctggtatcagcagaaaccagggaaagcccctaagcgcctgatctatgctgcatccagtttgcaaagtggggtcccatcaaggttcagcggcagtggatctgggacagaattcactctcacaatcagcagcctgcagcctgaagattttgcaacttattactgtctacagcattataattaccctcggacgttcggccaagggaccaaggtggaaatcaaa

SEQ ID NO: 25250 - protein, 107 aa, synthetic construct
  REGION 1..107: note = Description of Artificial Sequence: Synthetic polypeptide
DIQMTQSPSSLSASVGDRVTFTCRASQDIRDDLGWYQQKPGKAPKRLIYAASSLQSGVPSRFSGSGSGTEFTLTISSLQPEDFATYYCLQHYNYPRTFGQGTKVEIK

SEQ ID NO: 25251 - DNA, 321 bp, synthetic construct
  misc_feature 1..321: note = Description of Artificial Sequence: Synthetic polynucleotide
  source 1..321: mol_type = other DNA
gacatccagatgacccagtctccatcttccgtgtctgcatctgtaggagacagagtcaccatcacttgtcgggcgagtcagggtattagcgactggttagcctggtatcagcagaaaccagggaaagcccctaggctcctgatctatggtgcatccagtttgcaaagtggggtcccatcaaggttcagcggcagtggatctgggacagatttcactctcaccatcagcaacctgcagcctgaagattttgcaacttactattgtcaacagactaacagtttcccgtggacgttcggccaagggaccaaggtggaaatcaaa

SEQ ID NO: 25252 - protein, 107 aa, synthetic construct
  REGION 1..107: note = Description of Artificial Sequence: Synthetic polypeptide
DIQMTQSPSSVSASVGDRVTITCRASQGISDWLAWYQQKPGKAPRLLIYGASSLQSGVPSRFSGSGSGTDFTLTISNLQPEDFATYYCQQTNSFPWTFGQGTKVEIK

SEQ ID NO: 25253 - DNA, 321 bp, synthetic construct
  misc_feature 1..321: note = Description of Artificial Sequence: Synthetic polynucleotide
  source 1..321: mol_type = other DNA
gacatccagatgacccagtctccatcttccgtgtctgtttctgtaggagacagagtcaccatcacttgtcgggcgagtcaggatattagcgactggttagcttggtatcagcagagaccagggaaagcccctaagctcttgatctatgctgcatccagtttggaaagtggggtcccatcaaggttcagcggcagtggatctgggacagatttcactctcaccatcagcagcctgcagcctgaagattttgcaacttactattgtcaacaggctaacagtttcccattcactttcggccctgggaccaaagtggatatcaaa

SEQ ID NO: 25254 - protein, 107 aa, synthetic construct
  REGION 1..107: note = Description of Artificial Sequence: Synthetic polypeptide
DIQMTQSPSSVSVSVGDRVTITCRASQDISDWLAWYQQRPGKAPKLLIYAASSLESGVPSRFSGSGSGTDFTLTISSLQPEDFATYYCQQANSFPFTFGPGTKVDIK

SEQ ID NO: 25255 - DNA, 321 bp, synthetic construct
  misc_feature 1..321: note = Description of Artificial Sequence: Synthetic polynucleotide
  source 1..321: mol_type = other DNA
gacatccagatgacccagtctccatcctcactgtctgcatctgtaggagacagagtcaccatcacttgtcgggcgagtcagggcattaacaattatttagcctggtttcagcagaaaccagggaaagcccctaagtccctgatcaatgctgcatccagtttgcaaagtggggtcccatcaaggttcagcggcagtggatctgggacagatttcactctcgccatcagcagcctacagcctgaagattttgcaacttattactgccaacactattatagttacccattcactttcggccgtgggaccaaagtggatatcaaa

SEQ ID NO: 25256 - protein, 107 aa, synthetic construct
  REGION 1..107: note = Description of Artificial Sequence: Synthetic polypeptide
DIQMTQSPSSLSASVGDRVTITCRASQGINNYLAWFQQKPGKAPKSLINAASSLQSGVPSRFSGSGSGTDFTLAISSLQPEDFATYYCQHYYSYPFTFGRGTKVDIK

SEQ ID NO: 25257 - DNA, 321 bp, synthetic construct
  misc_feature 1..321: note = Description of Artificial Sequence: Synthetic polynucleotide
  source 1..321: mol_type = other DNA
gacatccagatgacccagtctccatcctccctgtctgcatctgtaggagacagagtcaccatcacttgccgggcaagtcagggcattagaaatgatttaggctggtatcagcagaaaccagggaaagcccctaagcgcctgatctatgctgcatccagtttgcaaggtggggtcccatcaaggttcagcggcagtggatctgggacagaattcactctcacaatcagcagcctgcagcctgaagattttgcaacttattactgtctacagcataatagttacccgctcactttcggcggagggaccaaggtggagatcaaa

SEQ ID NO: 25258 - protein, 107 aa, synthetic construct
  REGION 1..107: note = Description of Artificial Sequence: Synthetic polypeptide
DIQMTQSPSSLSASVGDRVTITCRASQGIRNDLGWYQQKPGKAPKRLIYAASSLQGGVPSRFSGSGSGTEFTLTISSLQPEDFATYYCLQHNSYPLTFGGGTKVEIK

SEQ ID NO: 25259 - DNA, 336 bp, synthetic construct
  misc_feature 1..336: note = Description of Artificial Sequence: Synthetic polynucleotide
  source 1..336: mol_type = other DNA
gatatcgtgatgacccagactccactctctctgaccgtcacccctggacagccggcctccatctcctgcaagtctagtcagagcctcctgcatggtgatggaaagacatatttgtattggtacctgcagaagccaggccagcctccacaggtcctgatctatgaagtttccaatcggttctctggagtgccagataggttcagtggcagcgggtcagggacagatttcacactgaaactcagccgggtggaggctgaggatgttggggtttattactgcatgcaaagtatacagcttccgtggacgttcggccaagggaccaaggtggaaatcaaa

SEQ ID NO: 25260 - protein, 112 aa, synthetic construct
  REGION 1..112: note = Description of Artificial Sequence: Synthetic polypeptide
DIVMTQTPLSLTVTPGQPASISCKSSQSLLHGDGKTYLYWYLQKPGQPPQVLIYEVSNRFSGVPDRFSGSGSGTDFTLKLSRVEAEDVGVYYCMQSIQLPWTFGQGTKVEIK

SEQ ID NO: 25261 - DNA, 321 bp, synthetic construct
  misc_feature 1..321: note = Description of Artificial Sequence: Synthetic polynucleotide
  source 1..321: mol_type = other DNA
gacatccagatgacccagtctccatcctccctgtctgcatctgtaggagacagagtcaccttcacttgccgggcaagtcagggcattagagatgatttaggctggtatcagcagaaaccagggaaagcccctaagcgcctgatctatgctgcatccagtttgcaaagtggggtcccatcaaggttcagcggcagtagatctgggacagaattcactctcacaatcagcagcctgcaacctgaagattttgcaacttattactgtctacagcattatagttaccctcggacgttcggccaagggaccaaggtggaaatcaaa

SEQ ID NO: 25262 - protein, 107 aa, synthetic construct
  REGION 1..107: note = Description of Artificial Sequence: Synthetic polypeptide
DIQMTQSPSSLSASVGDRVTFTCRASQGIRDDLGWYQQKPGKAPKRLIYAASSLQSGVPSRFSGSRSGTEFTLTISSLQPEDFATYYCLQHYSYPRTFGQGTKVEIK

SEQ ID NO: 25263 - DNA, 321 bp, synthetic construct
  misc_feature 1..321: note = Description of Artificial Sequence: Synthetic polynucleotide
  source 1..321: mol_type = other DNA
gacatccagatgacccagtctccatcctccctgtctgcatctgtaggagacagagtcaccatcacttgccgggcaagtcagggcattagaaaagatttaggctggtatcagcagaaaccagggaaagcccctaagcgcctgatctatgctgcatccagtttgcaaagtggggtcccatcaaggttcagcggcagtggatctgggacagaattcagtctcacaatcagcagcctgcagcctgaagattttgcaacttattactgtctacagcataatagttaccctctcactttcggcggagggaccaaggtggagatcaag

SEQ ID NO: 25264 - protein, 107 aa, synthetic construct
  REGION 1..107: note = Description of Artificial Sequence: Synthetic polypeptide
DIQMTQSPSSLSASVGDRVTITCRASQGIRKDLGWYQQKPGKAPKRLIYAASSLQSGVPSRFSGSGSGTEFSLTISSLQPEDFATYYCLQHNSYPLTFGGGTKVEIK

SEQ ID NO: 25265 - DNA, 321 bp, synthetic construct
  misc_feature 1..321: note = Description of Artificial Sequence: Synthetic polynucleotide
  source 1..321: mol_type = other DNA
gacatccagatgacccagtctccatcctccctgtctgcatctgtaggagacagagtcaccatcacttgccggacaagtcaggacattagaaaagatttaggctggtatcagcagaaagtagggaaagcccctaagcgcctgatctatgctgcatccagtttggaaagtggggtcccatcaaggttcagcggcagtggatctgggacagaattcactctcacaatcagcagcctgcagcctgaagattttgcaacttattactgtctacagcattatagtttcccgtggacgttcggccaagggaccaaggtggaaatcaaa

SEQ ID NO: 25266 - protein, 107 aa, synthetic construct
  REGION 1..107: note = Description of Artificial Sequence: Synthetic polypeptide
DIQMTQSPSSLSASVGDRVTITCRTSQDIRKDLGWYQQKVGKAPKRLIYAASSLESGVPSRFSGSGSGTEFTLTISSLQPEDFATYYCLQHYSFPWTFGQGTKVEIK

SEQ ID NO: 25267 - DNA, 321 bp, synthetic construct
  misc_feature 1..321: note = Description of Artificial Sequence: Synthetic polynucleotide
  source 1..321: mol_type = other DNA
gacatccagatgaaccagtctccatcttccgtgtctgcatctgtaggagacagagtcaacatcacttgtcgggcgagtcagggtattagcaactggttagcctggtatcagcagaaaccagggaaagtccctaagctcctgatctatgctgcatccagtttgcaaagtggggtcccatcaaggttcagcggcagtggatctgggacagatttcactctcaccatcagcaacctgcagcctgaagattttgcaacttactattgtcaacagactaacagtttcccgtggacgttcggccaagggaccaaggtggaaatcaaa

SEQ ID NO: 25268 - protein, 107 aa, synthetic construct
  REGION 1..107: note = Description of Artificial Sequence: Synthetic polypeptide
DIQMNQSPSSVSASVGDRVNITCRASQGISNWLAWYQQKPGKVPKLLIYAASSLQSGVPSRFSGSGSGTDFTLTISNLQPEDFATYYCQQTNSFPWTFGQGTKVEIK

SEQ ID NO: 25269 - DNA, 321 bp, synthetic construct
  misc_feature 1..321: note = Description of Artificial Sequence: Synthetic polynucleotide
  source 1..321: mol_type = other DNA
gacatccagatgacccagtctccatcctccctgtctgcatctgtaggagacagagtcaccatcacttgccgggcaagtcagggcattagaaatgatttaggctggtatcagcagaaaccagggaaagcccctaagcgcctgatctatgctgcatccagtttgcaaagtggggtcccatcaaggttcagcggcagtggatctgggacagaattcactctcacaatcagcagcctgcagcctgaagattttgcaacttattactgtctacagcataatagttaccctctcactttcggcggagggaccaaggtggagatcaca

SEQ ID NO: 25270 - protein, 107 aa, synthetic construct; identical to SEQ ID NO: 24510
  REGION 1..107: note = Description of Artificial Sequence: Synthetic polypeptide

SEQ ID NO: 25271 - DNA, 321 bp, synthetic construct
  misc_feature 1..321: note = Description of Artificial Sequence: Synthetic polynucleotide
  source 1..321: mol_type = other DNA
gacatccagatgacccagtctccatcctccctgtctgcatctgtaggagacagagtcaccatcacttgccgggcaagtcagggcattagaaaagatttaggctggtatcagcagaaaccagggaaagcccctaagcgcctgatctatgctgcatccagtttgcaaagtggggtcccatcaaggttcagtggcagtggatctgggacagaattcagtctcacaatcagcagcctgcagcctgaagattttgcaacttattactgtctacagcataatagttaccctctcactttcggcggagggaccaaggtggagatcaag

SEQ ID NO: 25272 - protein, 107 aa, synthetic construct; identical to SEQ ID NO: 25264
  REGION 1..107: note = Description of Artificial Sequence: Synthetic polypeptide

SEQ ID NO: 25273 - DNA, 336 bp, synthetic construct
  misc_feature 1..336: note = Description of Artificial Sequence: Synthetic polynucleotide
  source 1..336: mol_type = other DNA
gatattgtgatgacccagactccactctctctgtccgtcacccctggacagccggcctccatctcctgcaagtctagtcagagcctcctgcatagtgagggaaagacctatttgtattggtacctgcagaagccaggccagcctccacagctcctgatctatgaagtttcttaccggttctctggagtgccagataggttcagtggcagcgggtcagggacagatttcacactgaaaatcagccggatggaggctgaggatgttggggtttattactgcatgcacagtatacagtatccgctcacgtttggcggagggaccaaggtggagatccaa

SEQ ID NO: 25274 - protein, 112 aa, synthetic construct
  REGION 1..112: note = Description of Artificial Sequence: Synthetic polypeptide
DIVMTQTPLSLSVTPGQPASISCKSSQSLLHSEGKTYLYWYLQKPGQPPQLLIYEVSYRFSGVPDRFSGSGSGTDFTLKISRMEAEDVGVYYCMHSIQYPLTFGGGTKVEIQ

SEQ ID NO: 25275 - DNA, 321 bp, synthetic construct
  misc_feature 1..321: note = Description of Artificial Sequence: Synthetic polynucleotide
  source 1..321: mol_type = other DNA
gacatccagatgacccagtctccatcctccctgtctgcatctgtaggagacagagtcaccatcacttgccgggcaagtcagggcattagaaatgatttaggctggtatcagcagaaaccagggaaagcccctaagcgcctgatctatgctgcatccagtttgcaaagtggggtcccatcaaggttcagcggcagtggatctgggacagaattcactctcacagtcagcagcctgcagcctgaagattttgcaacttatttctgtcttcagcatactagtttcccattcactttcggccctgggaccaaagtggatatcaaa

SEQ ID NO: 25276 - protein, 107 aa, synthetic construct
  REGION 1..107: note = Description of Artificial Sequence: Synthetic polypeptide
DIQMTQSPSSLSASVGDRVTITCRASQGIRNDLGWYQQKPGKAPKRLIYAASSLQSGVPSRFSGSGSGTEFTLTVSSLQPEDFATYFCLQHTSFPFTFGPGTKVDIK

SEQ ID NO: 25277 - DNA, 321 bp, synthetic construct
  misc_feature 1..321: note = Description of Artificial Sequence: Synthetic polynucleotide
  source 1..321: mol_type = other DNA
gacatccagatgacccagtctccatcctccctgtctgcatctgtaggagacagagtcaccatcacttgccgggcaagtcaggacattagaaatgatttaggctggtatcagcagaaaccagggaaagcccctaagcgcctgatctatgctgcattcagtttgcaaagtggggtcccatcaaggttcagcggcagtagatctgggacagaattcactctcacaatcagcagcctgcagcctgaagattttgcaacttattactgtctgcaacataatagttacccgctcactttcggcggagggaccaaggtggagatcaaa

SEQ ID NO: 25278 - protein, 107 aa, synthetic construct
  REGION 1..107: note = Description of Artificial Sequence: Synthetic polypeptide
DIQMTQSPSSLSASVGDRVTITCRASQDIRNDLGWYQQKPGKAPKRLIYAAFSLQSGVPSRFSGSRSGTEFTLTISSLQPEDFATYYCLQHNSYPLTFGGGTKVEIK

SEQ ID NO: 25279 - DNA, 336 bp, synthetic construct
  misc_feature 1..336: note = Description of Artificial Sequence: Synthetic polynucleotide
  source 1..336: mol_type = other DNA
gatattgtgatgacccagactccactctctctgtccgtcacccctggacagccggcctccatctcctgcacgtctagtcagagcctcctgcatagtgaaggaaagacctatttgtattggtacctccagaagccaggccagcctccacagctcctgatctatgaagtttccaaccggttctctggagtgccagataggttcagtggcagcgggtcagggacagatttcacactaaaaatcagccgggtggaggctgaggatgttggggttttttactgtatgcaaagtatacagcttccgtggacgttcggccaagggaccaaggtggaaatcaaa

SEQ ID NO: 25280 - protein, 112 aa, synthetic construct
  REGION 1..112: note = Description of Artificial Sequence: Synthetic polypeptide
DIVMTQTPLSLSVTPGQPASISCTSSQSLLHSEGKTYLYWYLQKPGQPPQLLIYEVSNRFSGVPDRFSGSGSGTDFTLKISRVEAEDVGVFYCMQSIQLPWTFGQGTKVEIK

SEQ ID NO: 25281 - DNA, 321 bp, synthetic construct; identical to SEQ ID NO: 24247
  misc_feature 1..321: note = Description of Artificial Sequence: Synthetic polynucleotide
  source 1..321: mol_type = other DNA

SEQ ID NO: 25282 - protein, 107 aa, synthetic construct; identical to SEQ ID NO: 24146
  REGION 1..107: note = Description of Artificial Sequence: Synthetic polypeptide

SEQ ID NO: 25283 - DNA, 336 bp, synthetic construct
  misc_feature 1..336: note = Description of Artificial Sequence: Synthetic polynucleotide
  source 1..336: mol_type = other DNA
gatattgtgatgactcagtctccactctccccgcccgtcacccctggagagccggcctccatctcctgcaggtctagtcagagcctcctgcatagtaatggatacaactatttggaatggtacctgcagaagtcagggcagtctccacagttcctgatctatttgggttttaatcgggcctccggggtccctgacaggttcactggcagtggatcaggcacagattttacactgaaaatcagcagagtggaggctgaggatgttggggtttattactgcatgcaagttctacaaactccattcactttcggccctgggaccaaagtggatatcaaa

SEQ ID NO: 25284 - protein, 112 aa, synthetic construct
  REGION 1..112: note = Description of Artificial Sequence: Synthetic polypeptide
DIVMTQSPLSPPVTPGEPASISCRSSQSLLHSNGYNYLEWYLQKSGQSPQFLIYLGFNRASGVPDRFTGSGSGTDFTLKISRVEAEDVGVYYCMQVLQTPFTFGPGTKVDIK

SEQ ID NO: 25285 - DNA, 336 bp, synthetic construct
  misc_feature 1..336: note = Description of Artificial Sequence: Synthetic polynucleotide
  source 1..336: mol_type = other DNA
gatattgtgatgacccaaactccactctctctgtccgtcacccctggacagccggcctccatctcctgcaagtctagtcagagcctcctgcatagtgatggaaggacctatttgtattggtacctgcagaagccaggccagcctccacagctcctgatctatgaagtttccagccggttctctggagtgccagataggttcagtggcagcgggtcagggacagatttcgcactgaaaatcagccgggtggaggctgaggatgttggggtttattactgcatgcaaagtacacaacttccgtggacgttcggccaagggaccaaggcggaaatcaaa

SEQ ID NO: 25286 - protein, 112 aa, synthetic construct
  REGION 1..112: note = Description of Artificial Sequence: Synthetic polypeptide
DIVMTQTPLSLSVTPGQPASISCKSSQSLLHSDGRTYLYWYLQKPGQPPQLLIYEVSSRFSGVPDRFSGSGSGTDFALKISRVEAEDVGVYYCMQSTQLPWTFGQGTKAEIK

SEQ ID NO: 25287 - DNA, 321 bp, synthetic construct
  misc_feature 1..321: note = Description of Artificial Sequence: Synthetic polynucleotide
  source 1..321: mol_type = other DNA
gacatccagatgacccagtctccatcttccgtgtctgcatctgtaggagacagagtcaccatcacttgtcgggcgagtcagggtattagcaactggttagcctggtatcagcagaaaccagggaaagcccctaagctcctgatctttgctgcctccaatttgcaaagtggggtcccatcaaggttcagcggcagtggatctgggacagatttcactctcaccatcagcagtctgcagcctgcagattttgcaacttactgttgtcaacaggttaacagtttcccgtggacgttcggccaagggaccaaggtggaaatcaaa

SEQ ID NO: 25288 - protein, 107 aa, synthetic construct
  REGION 1..107: note = Description of Artificial Sequence: Synthetic polypeptide
DIQMTQSPSSVSASVGDRVTITCRASQGISNWLAWYQQKPGKAPKLLIFAASNLQSGVPSRFSGSGSGTDFTLTISSLQPADFATYCCQQVNSFPWTFGQGTKVEIK

SEQ ID NO: 25289 - DNA, 321 bp, synthetic construct
  misc_feature 1..321: note = Description of Artificial Sequence: Synthetic polynucleotide
  source 1..321: mol_type = other DNA
gacatccagatgacccagtctccatcctccctgtctgcatctgtaggagacagagtcaccatcacttgccggacaagtcagggcattagaaatgatttaggctggtatcagaagaaaccagggaaagcccctaagcgcctgatctatgctgcatccagtttgcaaagtggggtcccatcaaggttcagcggcagtggatctgggacagaattcactctcacagtcagcagcctgcagcctgaagattttgcaacttatttctgtctacaacatactagtttcccattcactttcggccctgggaccaaagtggatatcaaa

SEQ ID NO: 25290 - protein, 107 aa, synthetic construct
  REGION 1..107: note = Description of Artificial Sequence: Synthetic polypeptide
DIQMTQSPSSLSASVGDRVTITCRTSQGIRNDLGWYQKKPGKAPKRLIYAASSLQSGVPSRFSGSGSGTEFTLTVSSLQPEDFATYFCLQHTSFPFTFGPGTKVDIK

SEQ ID NO: 25291 - DNA, 321 bp, synthetic construct
  misc_feature 1..321: note = Description of Artificial Sequence: Synthetic polynucleotide
  source 1..321: mol_type = other DNA
gacatccagatgacccagtctccatcctccctgtctgcatctgtaggagacagagtcaccatcacttgccggacaagtcagggcattagaaatgatttaggctggtatcagcagaaaccagggaaagcccctaagcgcctgatctatagagcatccagtttgcaaagtggggtcccagcaaggttcagcggcagtggatctgggacagaattcactcttacaatcagcagcctgcagcctgaagattttgcaatttattactgtctacagcataatttttacccgtggacgttcggccaagggaccaaggtggaaatcaaa

SEQ ID NO: 25292 - protein, 107 aa, synthetic construct
  REGION 1..107: note = Description of Artificial Sequence: Synthetic polypeptide
DIQMTQSPSSLSASVGDRVTITCRTSQGIRNDLGWYQQKPGKAPKRLIYRASSLQSGVPARFSGSGSGTEFTLTISSLQPEDFAIYYCLQHNFYPWTFGQGTKVEIK

SEQ ID NO: 25293 - DNA, 321 bp, synthetic construct
  misc_feature 1..321: note = Description of Artificial Sequence: Synthetic polynucleotide
  source 1..321: mol_type = other DNA
gacatccagatgacccagtctccatcctccctgtctgcgtctgtaggagacagagtcaacatcacttgccgggcaagtcagagcattagcagctatttaatttggtatcagcagaaaccagggaaagcccctaagctcctgatctatgctgcatccagtttgcaaagtggggtcccatcaaggttcagtgccagtggatctgggacagatttcactctcaccatcagcagtctgcaacctgaagattttgcaagttactactgtcaacagagtaacagtattccattcactttcggccctgggaccaaagtggatatcaaa

SEQ ID NO: 25294 - protein, 107 aa, synthetic construct
  REGION 1..107: note = Description of Artificial Sequence: Synthetic polypeptide
DIQMTQSPSSLSASVGDRVNITCRASQSISSYLIWYQQKPGKAPKLLIYAASSLQSGVPSRFSASGSGTDFTLTISSLQPEDFASYYCQQSNSIPFTFGPGTKVDIK

SEQ ID NO: 25295 - DNA, 321 bp, synthetic construct
  misc_feature 1..321: note = Description of Artificial Sequence: Synthetic polynucleotide
  source 1..321: mol_type = other DNA
gacatccagatgacccagtctccatcctccctgtctgcatctgtaggagacagagtcaccatcacttgccgggcaagtcggggcattagagatgatttaggctggtatcaacagaaaccagggaaaccccctaagcgcctgatctatgctgcatccagtttgcaaagtggggtcccatcaaggttcaacggcagtggatctgggacagaattcactctcacaatcagcagcctgcagtctgaagatcttgcaacttattactgtctacagcaatatagttatcctcggacgttcggccaagggaccaaggtggaaatcaaa

SEQ ID NO: 25296 - protein, 107 aa, synthetic construct
  REGION 1..107: note = Description of Artificial Sequence: Synthetic polypeptide
DIQMTQSPSSLSASVGDRVTITCRASRGIRDDLGWYQQKPGKPPKRLIYAASSLQSGVPSRFNGSGSGTEFTLTISSLQSEDLATYYCLQQYSYPRTFGQGTKVEIK

SEQ ID NO: 25297 - DNA, 321 bp, synthetic construct
  misc_feature 1..321: note = Description of Artificial Sequence: Synthetic polynucleotide
  source 1..321: mol_type = other DNA
gacatccagatgacccagtctccatcctccctgtctgcgtctgtaggagacagagtcaacatcacttgccgggcaagtcagagcattatcagctatttaatttggtatcagcagaaaccagggaaagcccctaggctcctgatctatgctgcatccagtttgcaaagtggggtcccatcaaggttcagtgccagtggatctgggacagatttcactctcaccatcagcagtctgcaacctgaagattttgcaagttactactgtcaacagactaacagtattccattcactttcggccctgggaccaaagtggatatcaaa

SEQ ID NO: 25298 - protein, 107 aa, synthetic construct
  REGION 1..107: note = Description of Artificial Sequence: Synthetic polypeptide
DIQMTQSPSSLSASVGDRVNITCRASQSIISYLIWYQQKPGKAPRLLIYAASSLQSGVPSRFSASGSGTDFTLTISSLQPEDFASYYCQQTNSIPFTFGPGTKVDIK

SEQ ID NO: 25299 - DNA, 321 bp, synthetic construct
  misc_feature 1..321: note = Description of Artificial Sequence: Synthetic polynucleotide
  source 1..321: mol_type = other DNA
gacatccagatgacccagtctccatcttccgtgtctgcatctgtaggagacagagtcaccatcacttgtcgggcgagtcaaaatattaccagctggttagcctggtatcagcagaaaccagggaaagcccctaagctcctgatctatagtgcatccagtttgcaaaatggggtcccatcaaggttcagcggcagtggatctgggacagatttcactctcaccatcagcagcctgcagcctgaagattttgtaacttactgttgtcaacaggctaacagtttcccgtggacgttcggccaagggaccaaggtggaaatcaaa

SEQ ID NO: 25300 - protein, 107 aa, synthetic construct
  REGION 1..107: note = Description of Artificial Sequence: Synthetic polypeptide
DIQMTQSPSSVSASVGDRVTITCRASQNITSWLAWYQQKPGKAPKLLIYSASSLQNGVPSRFSGSGSGTDFTLTISSLQPEDFVTYCCQQANSFPWTFGQGTKVEIK

SEQ ID NO: 25301 - DNA, 321 bp, synthetic construct
  misc_feature 1..321: note = Description of Artificial Sequence: Synthetic polynucleotide
  source 1..321: mol_type = other DNA
gacatccagatgacccagtctccatcctccctgtctgcatctgtaggagacagagtcaccatcacttgccgggcaagtcagggcattagaaatgatttaggctggtatcagcagaaaccagggaaagcccctaagcgcctgatctatattgcatccagtttgcaaagtggggtcccatcaaggttcagcggcagtggatctgggacagaattcactctcactatcagcggcttgcagcctgaagattttgcaatttattactgtctacagcataatcgttacccgtggacgttcggccaagggaccaaggtggaaatcaaa

SEQ ID NO: 25302 - protein, 107 aa, synthetic construct
  REGION 1..107: note = Description of Artificial Sequence: Synthetic polypeptide
DIQMTQSPSSLSASVGDRVTITCRASQGIRNDLGWYQQKPGKAPKRLIYIASSLQSGVPSRFSGSGSGTEFTLTISGLQPEDFAIYYCLQHNRYPWTFGQGTKVEIK

SEQ ID NO: 25303 - DNA, 321 bp, synthetic construct
  misc_feature 1..321: note = Description of Artificial Sequence: Synthetic polynucleotide
  source 1..321: mol_type = other DNA
gacatccagatgacccagtctccatcctccctgtctgcgtctgtaggagacagagtcaccatcacttgccgggcaagtcagagcattaggaagtatttaaattggtatcagaagacaccagggaaagcccctaaactcttgatctatgctgcttccagtttgcaaagtggggtcccatcaaggttcagtggcagtggatctgggacagatttcactctcaccatcagcagtgtgcaacctgaagattttgcaacttactactgtcaacagacttacagtaacccactcactttcggcggagggaccaaggtggagttcaca

SEQ ID NO: 25304 - protein, 107 aa, synthetic construct
  REGION 1..107: note = Description of Artificial Sequence: Synthetic polypeptide
DIQMTQSPSSLSASVGDRVTITCRASQSIRKYLNWYQKTPGKAPKLLIYAASSLQSGVPSRFSGSGSGTDFTLTISSVQPEDFATYYCQQTYSNPLTFGGGTKVEFT

SEQ ID NO: 25305 - DNA, 321 bp, synthetic construct
  misc_feature 1..321: note = Description of Artificial Sequence: Synthetic polynucleotide
  source 1..321: mol_type = other DNA
gacatccagatgacccagtctccatcctccctgtctgcatctgtaggagacagagtcaccatcacttgccgggcaagtcagggcattagaaatgatttaggctggtatcagcagaaaccagggaaagcccctaagcgcctgatctatgctgcatccactttgcaaagtggggtcccatcaaggatcagcggcagtggatctgggacagaattcactctcacaatcagcagcctgcagcctgaagattttgcaacttattactgtctacagcataatagttacccgctcactttcggcggagggaccaaggtggagatcaaa

SEQ ID NO: 25306 - protein, 107 aa, synthetic construct
  REGION 1..107: note = Description of Artificial Sequence: Synthetic polypeptide
DIQMTQSPSSLSASVGDRVTITCRASQGIRNDLGWYQQKPGKAPKRLIYAASTLQSGVPSRISGSGSGTEFTLTISSLQPEDFATYYCLQHNSYPLTFGGGTKVEIK

SEQ ID NO: 25307 - DNA, 321 bp, synthetic construct
  misc_feature 1..321: note = Description of Artificial Sequence: Synthetic polynucleotide
  source 1..321: mol_type = other DNA
gacatccagatgacccagtctccatcctccctgtctgcgtctgtaggagacagagtcaccatcacttgccgggcaagtcagagcattaggaagtatttaaattggtatcagaagacaccagggaaagcccctaaactcttgatctatgctgcttccagtttgcaaagtggggtcccatcaaggttcagtggcagtggatctgggacagatttcactctcaccatcagcagtctgcaacctgaagattttgcaaattattactgtcaacagacttacagtaacccgctcactttcggcggagggaccgaggtggagatcaca

SEQ ID NO: 25308 - protein, 107 aa, synthetic construct
  REGION 1..107: note = Description of Artificial Sequence: Synthetic polypeptide
DIQMTQSPSSLSASVGDRVTITCRASQSIRKYLNWYQKTPGKAPKLLIYAASSLQSGVPSRFSGSGSGTDFTLTISSLQPEDFANYYCQQTYSNPLTFGGGTEVEIT

SEQ ID NO: 25309 - DNA, 321 bp, synthetic construct
  misc_feature 1..321: note = Description of Artificial Sequence: Synthetic polynucleotide
  source 1..321: mol_type = other DNA
gacatccagatgacccagtctccatcctccctgtctgcgtctgtaggagacagagtcaccatcacttgccgggcaagtcagagcattaggaagtatttaaattggtatcagaagacaccagggaaagcccctaaactcttgatatatgctgcttccagtttgcaaagtggggtcccatcaaggttcagtggcagtggatctgggacagatttcactctcaccatcagcagtgtgcaacctgaagattttgcaaattattactgtcaacagacttacagtaacccgctcactttcggcggagggaccgaggtggagatcaca

SEQ ID NO: 25310 - protein, 107 aa, synthetic construct
  REGION 1..107: note = Description of Artificial Sequence: Synthetic polypeptide
DIQMTQSPSSLSASVGDRVTITCRASQSIRKYLNWYQKTPGKAPKLLIYAASSLQSGVPSRFSGSGSGTDFTLTISSVQPEDFANYYCQQTYSNPLTFGGGTEVEIT

SEQ ID NO: 25311 - DNA, 321 bp, synthetic construct
  misc_feature 1..321: note = Description of Artificial Sequence: Synthetic polynucleotide
  source 1..321: mol_type = other DNA
gacatccagatgacccagtctccatcctccctgtctgcatctgtaggagacagagtcaccatcacttgccgggcaagtcagggcattagaaatgatttagactggtatcagcagaaaccagggaaagcccctaagcgcctgatctatgctgcatccagtttgcaaagtggggtcccatcaaggttcagcggcagtggatctgggacagaattcactctcacaatcagtagcctgcagcctgaagattttgcaacttattactgtctacagcataatagttacccgctcactttcggcggagggaccaaggtggagatcaaa

SEQ ID NO: 25312 - protein, 107 aa, synthetic construct; identical to SEQ ID NO: 24408
  REGION 1..107: note = Description of Artificial Sequence: Synthetic polypeptide

SEQ ID NO: 25313 - DNA, 336 bp, synthetic construct
  misc_feature 1..336: note = Description of Artificial Sequence: Synthetic polynucleotide
  source 1..336: mol_type = other DNA
gatattgtgatgacccagactccactctctctgtccgtcacccctggacagccggcctccatctcctgcaagtctagtcagagcctcctgcatagggaaggaaagacctatttgtactggtacctgcagaagccaggccaggctccacagttcctgatctttgaagtttcccaccggttctctggcgtgccagataggttcagtggcagcgggtcagggacagatttcacactgaaaatcagccgggtggaggctgaggatgttggggtttattactgcatgcaaagtatacagattccgatcaccctcggccaagggacacgactggagattaaa

SEQ ID NO: 25314 - protein, 112 aa, synthetic construct
  REGION 1..112: note = Description of Artificial Sequence: Synthetic polypeptide
DIVMTQTPLSLSVTPGQPASISCKSSQSLLHREGKTYLYWYLQKPGQAPQFLIFEVSHRFSGVPDRFSGSGSGTDFTLKISRVEAEDVGVYYCMQSIQIPITLGQGTRLEIK

SEQ ID NO: 25315 - DNA, 321 bp, synthetic construct
  misc_feature 1..321: note = Description of Artificial Sequence: Synthetic polynucleotide
  source 1..321: mol_type = other DNA
gacatccagatgacccagtctccatcttccgtgtctgcatctgtaggagacagagtcaccatcacttgtcgggcgagtcgggatattaacggctggttagcctggtatcagcagaaaccagggaaagcccctaagctcctgatctatactgtctccagtttgcaaagtggggtcccatcaaggttcagcggcagtggatctgggacagatttcactctcaccatcagcagcctgcagcctgaagattttgcaacttactattgtcaacagtctaacagtttcccattcactttcggccctgggaccaaagtggatatcaaa

SEQ ID NO: 25316 - protein, 107 aa, synthetic construct
  REGION 1..107: note = Description of Artificial Sequence: Synthetic polypeptide
DIQMTQSPSSVSASVGDRVTITCRASRDINGWLAWYQQKPGKAPKLLIYTVSSLQSGVPSRFSGSGSGTDFTLTISSLQPEDFATYYCQQSNSFPFTFGPGTKVDIK

SEQ ID NO: 25317 - DNA, 336 bp, synthetic construct
  misc_feature 1..336: note = Description of Artificial Sequence: Synthetic polynucleotide
  source 1..336: mol_type = other DNA
gatattgtgatgacccagactccactctctctgtccgtcacccctggacagccggcctccatgtcctgcaagtctagtcagagcctcctgcatagtgaaggaaagacctatttgtattggtacctgcagaagacaggccagcctccacacctcctgatctatgaagtttccaaccggctctctggcgtgccagataggttcagtggcagcgggtcagggacagatttcacactgaaaatcagccggatggaggctgaggatgttggggtttatttctgcatgcaaagtatgcagcttccgatcaccttcggccaggggacacgactggagattaaa

SEQ ID NO: 25318 - protein, 112 aa, synthetic construct
  REGION 1..112: note = Description of Artificial Sequence: Synthetic polypeptide
DIVMTQTPLSLSVTPGQPASMSCKSSQSLLHSEGKTYLYWYLQKTGQPPHLLIYEVSNRLSGVPDRFSGSGSGTDFTLKISRMEAEDVGVYFCMQSMQLPITFGQGTRLEIK

SEQ ID NO: 25319 - DNA, 321 bp, synthetic construct
  misc_feature 1..321: note = Description of Artificial Sequence: Synthetic polynucleotide
  source 1..321: mol_type = other DNA
gacatccagatgacccagtctccatcttccgtgtctgcatctgtaggagacagagtcaccatcacttgtcgggcgagtcagggttttagcacctggttagcctggtttcagcagaaaccagggaaagcccctaagctcctgatctatgctgcatccagtttgcaagatggggtcccatcaaggttcagcggcagtggatctgggacagatttcactctcaccatcagcagcctgcagcctgaagattttgcaacttactattgtcaacagactaacagtttcccgttcactttcggccctgggaccaaagtggatatcaaa

SEQ ID NO: 25320 - protein, 107 aa, synthetic construct
  REGION 1..107: note = Description of Artificial Sequence: Synthetic polypeptide
DIQMTQSPSSVSASVGDRVTITCRASQGFSTWLAWFQQKPGKAPKLLIYAASSLQDGVPSRFSGSGSGTDFTLTISSLQPEDFATYYCQQTNSFPFTFGPGTKVDIK

SEQ ID NO: 25321 - DNA, 321 bp, synthetic construct
  misc_feature 1..321: note = Description of Artificial Sequence: Synthetic polynucleotide
  source 1..321: mol_type = other DNA
gacatccagatgacccagtctccatcctccctgtctgcatctgtcggagacagagtcaccatcacttgccgggcaagtcagggcattagaaatgatttaggctggtatcagcagaaaccagggaaagcccctaagcgcctgatctatgctgcatccagtttgcaaagtggtttcccatcaaggttcagcggcagtggatctgggacagaattcactctcacaatcagcagcctgcagcctgaagattttgcaacttattactgtctacagcataatagttaccctctcactttcggcggagggaccaaggtggagatcaaa

SEQ ID NO: 25322 - protein, 107 aa, synthetic construct
  REGION 1..107: note = Description of Artificial Sequence: Synthetic polypeptide
DIQMTQSPSSLSASVGDRVTITCRASQGIRNDLGWYQQKPGKAPKRLIYAASSLQSGFPSRFSGSGSGTEFTLTISSLQPEDFATYYCLQHNSYPLTFGGGTKVEIK

SEQ ID NO: 25323 - DNA, 336 bp, synthetic construct
  misc_feature 1..336: note = Description of Artificial Sequence: Synthetic polynucleotide
  source 1..336: mol_type = other DNA
gatattgtgatgacccagactccactctctctgtctgtcacccctggacagccggccttcatgtcctgcaagtctagtcagatcttcttgcatagtgaaggaaagacctatttgtattggtacctgcagaagacaggccagcctccacacctcctgatctatgaagtttccaagcggctctctggcgtgccagataggttcagtggcagcgggtcagggacagatttcacactgaaaatcagccggatggaggctgaggatgtcggggtttattactgcatgcaaagtatgcagcttccgattatcttcggccaggggacacgactggagattaaa

SEQ ID NO: 25324 - protein, 112 aa, synthetic construct
  REGION 1..112: note = Description of Artificial Sequence: Synthetic polypeptide
DIVMTQTPLSLSVTPGQPAFMSCKSSQIFLHSEGKTYLYWYLQKTGQPPHLLIYEVSKRLSGVPDRFSGSGSGTDFTLKISRMEAEDVGVYYCMQSMQLPIIFGQGTRLEIK

SEQ ID NO: 25325 - DNA, 336 bp, synthetic construct
  misc_feature 1..336: note = Description of Artificial Sequence: Synthetic polynucleotide
  source 1..336: mol_type = other DNA
gatattgtgatgacccagactccactctctctgtccgtcacccctggacagccggcctccatctcctgcaagtctaatcagagcctcgtgcataatgaaggaaagacctatttgtattggtatttgcagaagccaggccagcctccacagctcctgatctttgaagtttccaaccggttctctggagtgccagataggttcagtggcagcgggtcagggacagatttcacactgaaaatcagtcgggtggaggctgaggatgttggggtttattactgcatgcaaagtatacagtatccgatcaccttcggccaagggacacgactggagattaaa

SEQ ID NO: 25326 - protein, 112 aa, synthetic construct
  REGION 1..112: note = Description of Artificial Sequence: Synthetic polypeptide
DIVMTQTPLSLSVTPGQPASISCKSNQSLVHNEGKTYLYWYLQKPGQPPQLLIFEVSNRFSGVPDRFSGSGSGTDFTLKISRVEAEDVGVYYCMQSIQYPITFGQGTRLEIK

SEQ ID NO: 25327 - DNA, 321 bp, synthetic construct
  misc_feature 1..321: note = Description of Artificial Sequence: Synthetic polynucleotide
  source 1..321: mol_type = other DNA
gacatccagatgacccagtctccatcttccgtgtctgcatctgtaggagacagagtcaccatcacttgtcgggcgagtcagggtattagcaggtggttagcctggtatcagcagaaaccagggaaagcccctaaggtcctgatctatgctgcatccactttgcaaagtggggtcccatcaaggttcagcggcagtggatctgggacagatttcactctcaccatcagcagcctgcaacctgaagattttgcaacttactattgtcaacaggctaacagtttcccattcactttcggccctgggaccaaagtggatatcaaa

SEQ ID NO: 25328 - protein, 107 aa, synthetic construct
  REGION 1..107: note = Description of Artificial Sequence: Synthetic polypeptide
DIQMTQSPSSVSASVGDRVTITCRASQGISRWLAWYQQKPGKAPKVLIYAASTLQSGVPSRFSGSGSGTDFTLTISSLQPEDFATYYCQQANSFPFTFGPGTKVDIK

SEQ ID NO: 25329 - DNA, 321 bp, synthetic construct
  misc_feature 1..321: note = Description of Artificial Sequence: Synthetic polynucleotide
  source 1..321: mol_type = other DNA
gacatccagatgacccagtctccatcctccctgtctgcgtctgtaggagacagagtcaccatcacttgccggtcaagtcagagcattagtacctatttaatgtggtatcagcagaaaccagggaaagcccctaagctcttgatctatgctgcatccagtttgcaaattggggtcccatcagagttcagtgccagtggatctgggacagatttcactctcaccatcagcagtctgcaacctgaagattttgcaacttactactgtcaacagagttacagtatcccattcactttcggccctgggaccaaagtggatatcaaa

SEQ ID NO: 25330 - protein, 107 aa, synthetic construct
  REGION 1..107: note = Description of Artificial Sequence: Synthetic polypeptide
DIQMTQSPSSLSASVGDRVTITCRSSQSISTYLMWYQQKPGKAPKLLIYAASSLQIGVPSEFSASGSGTDFTLTISSLQPEDFATYYCQQSYSIPFTFGPGTKVDIK

SEQ ID NO: 25331 - DNA, 321 bp, synthetic construct
  misc_feature 1..321: note = Description of Artificial Sequence: Synthetic polynucleotide
  source 1..321: mol_type = other DNA
gacatccagatgacccagtctccatcctccctgtctgcatctgtaggagacagagtcaccatcacttgccgggcaagtcagggcattagaaatgatttaggctggtatcagcagaaaccagggaaagcccctaagcgcctgatctatgctgcatccagtttgcaaagtggggtcccatcaaggttcagcggcagtggatctgggacagaattcactctcacagtcagcagcctgcagcctgaagattttgcaacttatttctgtctacagcatactagtttcccattcactttcggccctgggaccaaagtggatatcaaa

SEQ ID NO: 25332 - protein, 107 aa, synthetic construct; identical to SEQ ID NO: 25276
  REGION 1..107: note = Description of Artificial Sequence: Synthetic polypeptide

SEQ ID NO: 25333 - DNA, 321 bp, synthetic construct
  misc_feature 1..321: note = Description of Artificial Sequence: Synthetic polynucleotide
  source 1..321: mol_type = other DNA
gacatccagatgacccagtctccatcctccctgtctgcgtctgtaggagacagagtcaacatcacttgccgggcaagtcagagcattagcagctatttaatttggtatcagcagaaaccagggaaagcccctaagctcctgatctatgctgcatccagtctgcaaagtggggtcccatcaaggttcagtgccagtggatctgggacagatttcactctcaccatcagcagtctgcaacctgaagattttgcaagttactactgtcaacagagtaacagtcttccattcactttcggccctgggaccaaagtggatatcaaa

SEQ ID NO: 25334 - protein, 107 aa, synthetic construct
  REGION 1..107: note = Description of Artificial Sequence: Synthetic polypeptide
DIQMTQSPSSLSASVGDRVNITCRASQSISSYLIWYQQKPGKAPKLLIYAASSLQSGVPSRFSASGSGTDFTLTISSLQPEDFASYYCQQSNSLPFTFGPGTKVDIK

SEQ ID NO: 25335 - DNA, 321 bp, synthetic construct
  misc_feature 1..321: note = Description of Artificial Sequence: Synthetic polynucleotide
  source 1..321: mol_type = other DNA
gacatccagatgacccagtctccatcctccctgtctgcatctgtaggagacagagtcaccatcacttgccgggcaagtcagggcattagaaataatttaggctggtatcagcagaaaccagggaaagtccctaagcgcctgatctatgctgcatccagtttgcaaagtggggtcccatcaaggttcagcggcagtggatctgggacagaattcactctcacaatcagcagcctgcagcctgaagattttgcaacttattactgtctacagtataatagttacccgttcactttcggcggagggaccaaggtggagagcaaa

SEQ ID NO: 25336 - protein, 107 aa, synthetic construct
  REGION 1..107: note = Description of Artificial Sequence: Synthetic polypeptide
DIQMTQSPSSLSASVGDRVTITCRASQGIRNNLGWYQQKPGKVPKRLIYAASSLQSGVPSRFSGSGSGTEFTLTISSLQPEDFATYYCLQYNSYPFTFGGGTKVESK

SEQ ID NO: 25337 - DNA, 321 bp, synthetic construct
  misc_feature 1..321: note = Description of Artificial Sequence: Synthetic polynucleotide
  source 1..321: mol_type = other DNA
gacatccagatgacccagtctccatcctccctgtctgcgtctgtaggagacagagtcaacatcacttgccgggcaagtcagagcatttacagctatttaatttggtatcagcagaaaccagggaaagcccctaagctcctgatctatgctgcatccagtttgcaaagtggggtcccatcaaggttcagtgccagtggatctgggacagatttcactctcaccatcagcagtctgcaacctgaagattttgcaagttactactgtcaacagagtaacagtattccattcactttcggccctgggaccaaagtggatatcaaa

SEQ ID NO: 25338 - protein, 107 aa, synthetic construct
  REGION 1..107: note = Description of Artificial Sequence: Synthetic polypeptide
DIQMTQSPSSLSASVGDRVNITCRASQSIYSYLIWYQQKPGKAPKLLIYAASSLQSGVPSRFSASGSGTDFTLTISSLQPEDFASYYCQQSNSIPFTFGPGTKVDIK

SEQ ID NO: 25339 - DNA, 321 bp, synthetic construct
  misc_feature 1..321: note = Description of Artificial Sequence: Synthetic polynucleotide
  source 1..321: mol_type = other DNA
gacatccagatgacccagtctccatcctccctgtctgcatctgtaggagacagagtcaccatcacttgccgggcaagtcagggcattagaaatgatttaggctggtatcagcagaaaccagggaaagcccctaagcgcctgatctatactgcatccaatttacaaagtggggtcccatcaaggttcagcggcagtggatctgggacagaattcactctcacaatcagcagcctgcagcctgaagattttgcaacttattactgtctacagcataatagttacccgtggacgttcggccaagggaccaaggtggaaatcaaa

SEQ ID NO: 25340 - protein, 107 aa, synthetic construct
  REGION 1..107: note = Description of Artificial Sequence: Synthetic polypeptide
DIQMTQSPSSLSASVGDRVTITCRASQGIRNDLGWYQQKPGKAPKRLIYTASNLQSGVPSRFSGSGSGTEFTLTISSLQPEDFATYYCLQHNSYPWTFGQGTKVEIK

SEQ ID NO: 25341 - DNA, 321 bp, synthetic construct
  misc_feature 1..321: note = Description of Artificial Sequence: Synthetic polynucleotide
  source 1..321: mol_type = other DNA
gacatccagatgacccagtctccatcctccctgtctgcatctgtgggagacagagtcaccatcacttgtcgggcaagtcagagcattagtagttatttaaattggtatcagcataaaccagggaaagcccctaggctcctgatctatgctgcatccagtttgcaaagtggggtcccatcaaggttcagtggcagtgaatctgggacagatttcattctcactatcagcagtctgcaacctgaagattttacaacttattactgtcaacagagttacattgccccattcactttcggccctgggaccaaagtggatatcaaa

SEQ ID NO: 25342 - protein, 107 aa, synthetic construct
  REGION 1..107: note = Description of Artificial Sequence: Synthetic polypeptide
DIQMTQSPSSLSASVGDRVTITCRASQSISSYLNWYQHKPGKAPRLLIYAASSLQSGVPSRFSGSESGTDFILTISSLQPEDFTTYYCQQSYIAPFTFGPGTKVDIK

SEQ ID NO: 25343 - DNA, 336 bp, synthetic construct
  misc_feature 1..336: note = Description of Artificial Sequence: Synthetic polynucleotide
  source 1..336: mol_type = other DNA
gatattgtgatgacccagactccactctctctgtccgtcacccctggacagccggcctccatgtcctgcaagtctagtcagagcctcctgcatagtgagggaaagacctatttgtattggtacctgcggaagccaggccagcctccacagttcctgatctttgaagtttccaaccggttctctggagtgccagataggttcagtggcagcgggtcagggacagaattcacactgaaaatcagccgggtggaggctgaggatgttggggtttattactgcatgcaaagtatacagcttccattcactttcggccctgggaccaaagtggatatcaaa

SEQ ID NO: 25344 - protein, 112 aa, synthetic construct
  REGION 1..112: note = Description of Artificial Sequence: Synthetic polypeptide
DIVMTQTPLSLSVTPGQPASMSCKSSQSLLHSEGKTYLYWYLRKPGQPPQFLIFEVSNRFSGVPDRFSGSGSGTEFTLKISRVEAEDVGVYYCMQSIQLPFTFGPGTKVDIK

SEQ ID NO: 25345 - DNA, 321 bp, synthetic construct
  misc_feature 1..321: note = Description of Artificial Sequence: Synthetic polynucleotide
  source 1..321: mol_type = other DNA
gacatccagatgacccagtctccatcctccctgtctgcatctgtaggagacagagtcaccatcacttgccaggcgagtcgggacattaccttctatttaaattggtatcagcagaaaccagggaaagcccctaagctcctgatctacgatgcatccaatttggaaacaggggtcccatcaaggttcagtggcagtggatctgggacagattttactttcaccatcagctgcgtgcatcctgaagatattgcaacatatttatgtcaacagtatgataatcttccattcactttcggcccagggaccacagtggatatcaaa

SEQ ID NO: 25346 - protein, 107 aa, synthetic construct
  REGION 1..107: note = Description of Artificial Sequence: Synthetic polypeptide
DIQMTQSPSSLSASVGDRVTITCQASRDITFYLNWYQQKPGKAPKLLIYDASNLETGVPSRFSGSGSGTDFTFTISCVHPEDIATYLCQQYDNLPFTFGPGTTVDIK

SEQ ID NO: 25347 - DNA, 321 bp, synthetic construct
  misc_feature 1..321: note = Description of Artificial Sequence: Synthetic polynucleotide
  source 1..321: mol_type = other DNA
gacatccagatgacccagtctccatcctccctgtctgcatctgtgggagacagagtcaccatcacttgccgggcaagtcagggcattagaaatgatttaggctggtatcagcagaaaccagggaaagcccctcagcgcctgatctatgctgcatccagtttgcaaagtggggtcccatcaaggttcagcggcagtggatctgggacagaattcactctcacaatcagcagcctgcagcctgaggattttgcagcttattattgtctacagcataatagttacccattcactttcggccctgggaccaaagtggatatcaaa

SEQ ID NO: 25348 - protein, 107 aa, synthetic construct
  REGION 1..107: note = Description of Artificial Sequence: Synthetic polypeptide
DIQMTQSPSSLSASVGDRVTITCRASQGIRNDLGWYQQKPGKAPQRLIYAASSLQSGVPSRFSGSGSGTEFTLTISSLQPEDFAAYYCLQHNSYPFTFGPGTKVDIK

SEQ ID NO: 25349 - DNA, 321 bp, synthetic construct
  misc_feature 1..321: note = Description of Artificial Sequence: Synthetic polynucleotide
  source 1..321: mol_type = other DNA
gacatccagatgacccagtctccatcctcactgtctgcatctgtaggagacagagtcaccatcacttgtcgggcgagtcagggcattagcaattatttagcctggtttcagcagaaaccaggggaagcccctaagtcccttatctatgctgcatccagtttgcgaagtggggtcccatcacagttcagcggcagtggatctggaacagatttcattctcaccatcagcagcctgcagcctgaagattttgcaacttattactgccaacagtattatagttacccattcactttcggccctgggaccaaagtggatatcaaa

SEQ ID NO: 25350 - protein, 107 aa, synthetic construct
  REGION 1..107: note = Description of Artificial Sequence: Synthetic polypeptide
DIQMTQSPSSLSASVGDRVTITCRASQGISNYLAWFQQKPGEAPKSLIYAASSLRSGVPSQFSGSGSGTDFILTISSLQPEDFATYYCQQYYSYPFTFGPGTKVDIK

SEQ ID NO: 25351 - DNA, 321 bp, synthetic construct
  misc_feature 1..321: note = Description of Artificial Sequence: Synthetic polynucleotide
  source 1..321: mol_type = other DNA
gacatccagatgacccagtctccatcttccgtgtctgcatctgtaggagacagagtcaccatcacttgtcgggcgagtcaggatgttaacaactacttagcctggtttcagcagaaaccagggaaagcccctaagctcctgatctatgctgcatccagtttgcaaaatggggtcccatcaaggttcagcggcagtggatctgggacagatttcactctcaccatcagcagcctgctgcctgaagattttgcaacttactattgtcaacaaactaacagtttcccattcactttcggccctgggaccaaagtggatatcaaa

SEQ ID NO: 25352 - protein, 107 aa, synthetic construct
  REGION 1..107: note = Description of Artificial Sequence: Synthetic polypeptide
DIQMTQSPSSVSASVGDRVTITCRASQDVNNYLAWFQQKPGKAPKLLIYAASSLQNGVPSRFSGSGSGTDFTLTISSLLPEDFATYYCQQTNSFPFTFGPGTKVDIK

SEQ ID NO: 25353 - DNA, 321 bp, synthetic construct
  misc_feature 1..321: note = Description of Artificial Sequence: Synthetic polynucleotide
  source 1..321: mol_type = other DNA
gacatccagatgacccagtctccatcttccgtgtctgcatctgtaggagacagagtcaccatcacttgtcgggcgagtcaggatattagcagttggttagcctggtatcagcagaaaccagggaaagcccctaaggtcctgatctatgctccatccaatttgcaaagtgcggtcccatcaaggttcagcggcagtggatctgggacagatttcactctcaccatcagcagcctgcagcctgaagattttgcaacttactattgtcaacaggctcacagtttcccgtggacgttcggccaagggaccaaggtggaaatcaaa

SEQ ID NO: 25354 - protein, 107 aa, synthetic construct
  REGION 1..107: note = Description of Artificial Sequence: Synthetic polypeptide
DIQMTQSPSSVSASVGDRVTITCRASQDISSWLAWYQQKPGKAPKVLIYAPSNLQSAVPSRFSGSGSGTDFTLTISSLQPEDFATYYCQQAHSFPWTFGQGTKVEIK

SEQ ID NO: 25355 - DNA, 321 bp, synthetic construct
  misc_feature 1..321: note = Description of Artificial Sequence: Synthetic polynucleotide
  source 1..321: mol_type = other DNA
gacatccagatgacccagtctccatcttccgtgtctgcatctgtgggagacagactcaccatcacttgtcgggcgagtcagggtattagcaggtggttagcctggtatcagcagaaaccagggaaagcccctaaggtcctgatctatgctgcatccactttgcaaagtggggtcccatcaaggttcagcggcagtggatctgggacagatttcactctcaccatcagcagcctgcagcctgaagattttgcaacttactattgtcaacaggctaacagtttcccattcactttcggccctgggaccaaagtggatatcaga

SEQ ID NO: 25356 - protein, 107 aa, synthetic construct
  REGION 1..107: note = Description of Artificial Sequence: Synthetic polypeptide
DIQMTQSPSSVSASVGDRLTITCRASQGISRWLAWYQQKPGKAPKVLIYAASTLQSGVPSRFSGSGSGTDFTLTISSLQPEDFATYYCQQANSFPFTFGPGTKVDIR

SEQ ID NO: 25357 - DNA, 321 bp, synthetic construct
  misc_feature 1..321: note = Description of Artificial Sequence: Synthetic polynucleotide
  source 1..321: mol_type = other DNA
gacatccagatgacccagtctccatcctccctgtctgcatctgtaggagacagagtcaccatcacttgccgggcaagtcagggcattagaaatgatttgggctggtatcagcagaaaccagggaaagcccctaagcgcctgatctatgctgcttccagtttgcaaagtggggtcccatcaaggttcagcggcggtggatctgggacacacttcactctcacaatcagcagcctgcagcctgaagattttgcaacttattactgtctacagcataatagttacccgtggacgttcggccaagggaccaaggtggaaatcaaa

SEQ ID NO: 25358 - protein, 107 aa, synthetic construct
  REGION 1..107: note = Description of Artificial Sequence: Synthetic polypeptide
DIQMTQSPSSLSASVGDRVTITCRASQGIRNDLGWYQQKPGKAPKRLIYAASSLQSGVPSRFSGGGSGTHFTLTISSLQPEDFATYYCLQHNSYPWTFGQGTKVEIK

SEQ ID NO: 25359 - DNA, 321 bp, synthetic construct
  misc_feature 1..321: note = Description of Artificial Sequence: Synthetic polynucleotide
  source 1..321: mol_type = other DNA
gacatccagatgacccagtctccatcttccgtgtctgcctctgtaggagacagagtcaccatcacttgtcgggcgagtcagggtattagcagttggttagcctggtatcagcagaaaccagggaaagcccctaagctcctgatctatgttgcatccagtttgcaaagtggggtcccatcaaggttcagcggcagtggatctgggacagatttcactctcaccatcaggagcctgcagcctgaagattttgcaacttactattgtcaacaggctaaaagtttcccattcactttcggccctgggaccaaagtggatatcaaa

SEQ ID NO: 25360 - protein, 107 aa, synthetic construct
  REGION 1..107: note = Description of Artificial Sequence: Synthetic polypeptide
DIQMTQSPSSVSASVGDRVTITCRASQGISSWLAWYQQKPGKAPKLLIYVASSLQSGVPSRFSGSGSGTDFTLTIRSLQPEDFATYYCQQAKSFPFTFGPGTKVDIK

SEQ ID NO: 25361 - DNA, 321 bp, synthetic construct
  misc_feature 1..321: note = Description of Artificial Sequence: Synthetic polynucleotide
  source 1..321: mol_type = other DNA
gacatccagatgacccagtctccatcctccctgtctgcatctgtaggagacagagtcaccatcacttgccgggcaagtcagggcattaggactgatttaggctggtatcagcagaaaccaaggaaagcccctcagcgcctgatctatgctgcatccagtttgcaacgtggagtcccatcaagattcagcggcagtggatctgggacagacttcactctcacaatcagcagcctgcagcctgaagattttgcatcttattactgtctacagcataatagttacccattcactttcggccctgggaccaaagtggatatcaaa

SEQ ID NO: 25362 - protein, 107 aa, synthetic construct
  REGION 1..107: note = Description of Artificial Sequence: Synthetic polypeptide
DIQMTQSPSSLSASVGDRVTITCRASQGIRTDLGWYQQKPRKAPQRLIYAASSLQRGVPSRFSGSGSGTDFTLTISSLQPEDFASYYCLQHNSYPFTFGPGTKVDIK

SEQ ID NO: 25363 - DNA, 321 bp, synthetic construct
  misc_feature 1..321: note = Description of Artificial Sequence: Synthetic polynucleotide
  source 1..321: mol_type = other DNA
gacatccagatgacccagtctccatcctccctgtctgcgtctgtaggagacagagtcaccatcacttgccgggcaagtcagagcattagtacctatttaatgtggtatcagcagaaaccagggaaagcccctaagctcttgatatatgctgcatccagtttgcaaagtggggtcccatcagagttcagtgccagtggatctgggacagatttcactctcaccatcagcagtctgcaacctgaagattttgcaacttactactgtcaacagagttacagtatcccattcactttcggccctgggaccaaagtggatatcaaa

SEQ ID NO: 25364 - protein, 107 aa, synthetic construct
  REGION 1..107: note = Description of Artificial Sequence: Synthetic polypeptide
DIQMTQSPSSLSASVGDRVTITCRASQSISTYLMWYQQKPGKAPKLLIYAASSLQSGVPSEFSASGSGTDFTLTISSLQPEDFATYYCQQSYSIPFTFGPGTKVDIK

SEQ ID NO: 25365 - DNA, 321 bp, synthetic construct
  misc_feature 1..321: note = Description of Artificial Sequence: Synthetic polynucleotide
  source 1..321: mol_type = other DNA
gccatccagatgacccagtctccatcctccctgtctgcatctgtaggagacagagtcaccatcacttgccggacaagtcagggcattagaaatgatttaggctggtatcagcagaaaccaaggaaagcccctaaacgcctgatctatgctgcatccagtttgcaaagtggggtcccatcaaggttcagcggcagtggatctgggacagaattcactctcacaatcagcagcctgcagcctgaagattttgcaacttattactgtctacagcataatagttacccattcactttcggccctgggaccaaagtggatatcaaa

SEQ ID NO: 25366 - protein, 107 aa, synthetic construct
  REGION 1..107: note = Description of Artificial Sequence: Synthetic polypeptide
AIQMTQSPSSLSASVGDRVTITCRTSQGIRNDLGWYQQKPRKAPKRLIYAASSLQSGVPSRFSGSGSGTEFTLTISSLQPEDFATYYCLQHNSYPFTFGPGTKVDIK

SEQ ID NO: 25367 - DNA, 321 bp, synthetic construct
  misc_feature 1..321: note = Description of Artificial Sequence: Synthetic polynucleotide
  source 1..321: mol_type = other DNA
gacatccagatgacccagtctccatccgccctgtctgcatctgtaggagacagagtcaccatcacttgccgggcaagtcagggcattagaaatgatttaggctggtatcagcagaaaccagggaaagcccctaagcgcctgatctatgctgcatccagtttgcaaagtggggtcccatcaaggttcagcggcagtggatctgggacagaattcactctcacaatcagcagcctgcagcctgaagattttgcaacttattactgtctacagcataatagttacccgttcactttcggcggagggaccaaggtggagatcaaa

SEQ ID NO: 25368 - protein, 107 aa, synthetic construct
  REGION 1..107: note = Description of Artificial Sequence: Synthetic polypeptide
DIQMTQSPSALSASVGDRVTITCRASQGIRNDLGWYQQKPGKAPKRLIYAASSLQSGVPSRFSGSGSGTEFTLTISSLQPEDFATYYCLQHNSYPFTFGGGTKVEIK

SEQ ID NO: 25369 - DNA, 321 bp, synthetic construct
  misc_feature 1..321: note = Description of Artificial Sequence: Synthetic polynucleotide
  source 1..321: mol_type = other DNA
gacatccagatgacccagtctccatcttccgtgtctacatttgtaggagacagaatcaccatcacttgtcgggcgagtcaggatattcgcacctggttagcctggtatcagcagaaacctgggaaagcccctaagctcctgatctatgctgcatccagtttgcaaaatggggtcccatcaaggttcagcggcagtggatctgggacagatttcactctcaccatcagtagcctgcagcctgaagattttgcaacttacttttgtcaacaggctaaaagtttcccattcactttcggccctgggaccaaagtggatatcaaa

SEQ ID NO: 25370 - protein, 107 aa, synthetic construct
  REGION 1..107: note = Description of Artificial Sequence: Synthetic polypeptide
DIQMTQSPSSVSTFVGDRITITCRASQDIRTWLAWYQQKPGKAPKLLIYAASSLQNGVPSRFSGSGSGTDFTLTISSLQPEDFATYFCQQAKSFPFTFGPGTKVDIK

SEQ ID NO: 25371 - DNA, 321 bp, synthetic construct
  misc_feature 1..321: note = Description of Artificial Sequence: Synthetic polynucleotide
  source 1..321: mol_type = other DNA
gacatccagatgacccagtctccatcgtcactgtctgcatctgtaggagacagagtcaccatcacttgccgggcaagtcagggcattagaaatgatttaggctggtatcagcagaaaccagggaaagcccctaggcgcctgatctatgctgcatcctttttgcaaagtggggtcccatcgacattcagcggcagtggatctgggacagaattcactctcacaatcagcagcctgcagcctgaagattttgcaacttattactgtctgcagcataatagctaccctctcactttcggcggagggaccaaggtggagatcaaa

SEQ ID NO: 25372 - protein, 107 aa, synthetic construct
  REGION 1..107: note = Description of Artificial Sequence: Synthetic polypeptide
DIQMTQSPSSLSASVGDRVTITCRASQGIRNDLGWYQQKPGKAPRRLIYAASFLQSGVPSTFSGSGSGTEFTLTISSLQPEDFATYYCLQHNSYPLTFGGGTKVEIK

SEQ ID NO: 25373 - DNA, 321 bp, synthetic construct
  misc_feature 1..321: note = Description of Artificial Sequence: Synthetic polynucleotide
  source 1..321: mol_type = other DNA
gacatccagatgacccagtctccatcttccgtgtctgcatctgtaggagacagagtcaccatcacttgtcgggcgagtcagaatattaccaactggttagcctggtttcagcagaaaccagggagagcccctaagctcctgatctatactacatccagtttgcaaagtggggtcccatcaaggttcagcggcagtggatctgggacagatttcactctcaccatcagcagcctgcagcctgaagattttgcaacttactgttgtcaacagactaacagtttcccgtggacgttcggccatgggaccaaggtagaagtcaaa

SEQ ID NO: 25374 - protein, 107 aa, synthetic construct
  REGION 1..107: note = Description of Artificial Sequence: Synthetic polypeptide
DIQMTQSPSSVSASVGDRVTITCRASQNITNWLAWFQQKPGRAPKLLIYTTSSLQSGVPSRFSGSGSGTDFTLTISSLQPEDFATYCCQQTNSFPWTFGHGTKVEVK

SEQ ID NO: 25375 - DNA, 321 bp, synthetic construct
  misc_feature 1..321: note = Description of Artificial Sequence: Synthetic polynucleotide
  source 1..321: mol_type = other DNA
gacatccagatgacccaatctccatcctcactgtctgcatctgtaggagacagagtcaccatcacttgtcgggcgagtcagggcattagcaattatttagcctggtttcagcagaaaccagggaaagcccctaagtccctgatcaatgctgcatccagtttacaaagtggggtcccatcaaagttcagcggcagtggatctgggacagatttcactctcactatcagcagcctgcagcctgaagattttgcaacttattactgccaacagtataatagtttccctttcactttcggccctgggaccaaagtggatatcaaa

SEQ ID NO: 25376 - protein, 107 aa, synthetic construct
  REGION 1..107: note = Description of Artificial Sequence: Synthetic polypeptide
DIQMTQSPSSLSASVGDRVTITCRASQGISNYLAWFQQKPGKAPKSLINAASSLQSGVPSKFSGSGSGTDFTLTISSLQPEDFATYYCQQYNSFPFTFGPGTKVDIK

SEQ ID NO: 25377 - DNA, 321 bp, synthetic construct
  misc_feature 1..321: note = Description of Artificial Sequence: Synthetic polynucleotide
  source 1..321: mol_type = other DNA
gacatccagatgacccagtctccatcctccctgtctgcatctgtaggagacagagtcaccatcacttgccaggcgagtcaggacattagtaactatttacattggtatcagcagaaaccagggaaagcccctaaactcctgatctacgatgcatccactttgggaacaggggtcccattaaggttcagtggaagtggatctgggacagaatttactttcaccattaacagcctgcagcctgaagatattgcaacatattcctgtcaacagtgtgataatctcccgctcactttcggcggggggaccaaggtggagatcaaa

SEQ ID NO: 25378 - protein, 107 aa, synthetic construct
  REGION 1..107: note = Description of Artificial Sequence: Synthetic polypeptide
DIQMTQSPSSLSASVGDRVTITCQASQDISNYLHWYQQKPGKAPKLLIYDASTLGTGVPLRFSGSGSGTEFTFTINSLQPEDIATYSCQQCDNLPLTFGGGTKVEIK

SEQ ID NO: 25379 - DNA, 321 bp, synthetic construct
  misc_feature 1..321: note = Description of Artificial Sequence: Synthetic polynucleotide
  source 1..321: mol_type = other DNA
gccatccagatgacccagtctccatcctccctgtctgcatctgtaggagacagagtcaccatcacttgccgggcaagtcagggcattagaaatgatttaggctggtatcagcagaaaccaaggaaagcccctaagcgcctgatctatgctgcatccagtttgcaaagtggggtcccattaaggttcagcggcagtggatctgggacagaattcactctcacaatcagaagcctgcagcctgaagattttgcaacttattactgtctacagcataatagttacccattcactttcggccctgggaccaaagtggatatcaaa

SEQ ID NO: 25380 - protein, 107 aa, synthetic construct
  REGION 1..107: note = Description of Artificial Sequence: Synthetic polypeptide
AIQMTQSPSSLSASVGDRVTITCRASQGIRNDLGWYQQKPRKAPKRLIYAASSLQSGVPLRFSGSGSGTEFTLTIRSLQPEDFATYYCLQHNSYPFTFGPGTKVDIK

SEQ ID NO: 25381 - DNA, 336 bp, synthetic construct
  misc_feature 1..336: note = Description of Artificial Sequence: Synthetic polynucleotide
  source 1..336: mol_type = other DNA
gatgttatgatgacccagattccactctctctgtccgtcacccctggacagccggcctccatctcctgcaagtctagtcagagcctcctgcatagtgaaggaaagacctatttgtattggtacttgcagaagccaggccagcctccacagctcctgatctttgaagtttccaaccgggtctctggagtgccagataggttcagtggcagagggtcagggacagatttcacactgaaaatcagccgggtggaggctgaggatgttggggtttattactgcatgcaaagtatacagtatccgatcaccttcggccaagggacacgactggagattaaa

SEQ ID NO: 25382 - protein, 112 aa, synthetic construct
  REGION 1..112: note = Description of Artificial Sequence: Synthetic polypeptide
DVMMTQIPLSLSVTPGQPASISCKSSQSLLHSEGKTYLYWYLQKPGQPPQLLIFEVSNRVSGVPDRFSGRGSGTDFTLKISRVEAEDVGVYYCMQSIQYPITFGQGTRLEIK

SEQ ID NO: 25383 - DNA, 321 bp, synthetic construct
  misc_feature 1..321: note = Description of Artificial Sequence: Synthetic polynucleotide
  source 1..321: mol_type = other DNA
gacatccagatgacccagtctccatcctcactgtctgtatctgtaggagacagagtcaccatcacttgtcgggcgagtcagggtattagtaattatttaggctggtttcagcagaaaccagggaaagccccgaagtccctgatttatgctgcatctagtttgcaaagtggggtcccatcaaggttcagcggcagtggatctgggacagatttcactctcaccatcagcagcctacagcctgaagattttgcaacttattactgccaacagtataatagttatcctccgacgttcggccaagggaccaaggtggaaatcaaa

SEQ ID NO: 25384 - protein, 107 aa, synthetic construct
  REGION 1..107: note = Description of Artificial Sequence: Synthetic polypeptide
DIQMTQSPSSLSVSVGDRVTITCRASQGISNYLGWFQQKPGKAPKSLIYAASSLQSGVPSRFSGSGSGTDFTLTISSLQPEDFATYYCQQYNSYPPTFGQGTKVEIK

SEQ ID NO: 25385 - DNA, 321 bp, synthetic construct
  misc_feature 1..321: note = Description of Artificial Sequence: Synthetic polynucleotide
  source 1..321: mol_type = other DNA
gacatccagatgacccagtctccatcttccgtgtctgcatctgtaggagacagagtcaccatcacttgtcgggcgagtcaggatattaacagttggttagcctggtatcagcagaaaccagggaaagcccctaaactcctgatctatgttgcatccagtttgcaaagtggggccccatcaaggttcagcggcagtggatctgggacagatttcactctcaccatcaggagcctgcagcctgaagattttgctacttactattgtcaacaggctaaaagtttcccattcactttcggccctgggaccaaagtggatatcaaa

SEQ ID NO: 25386 - protein, 107 aa, synthetic construct
  REGION 1..107: note = Description of Artificial Sequence: Synthetic polypeptide
DIQMTQSPSSVSASVGDRVTITCRASQDINSWLAWYQQKPGKAPKLLIYVASSLQSGAPSRFSGSGSGTDFTLTIRSLQPEDFATYYCQQAKSFPFTFGPGTKVDIK

SEQ ID NO: 25387 - DNA, 321 bp, synthetic construct
  misc_feature 1..321: note = Description of Artificial Sequence: Synthetic polynucleotide
  source 1..321: mol_type = other DNA
gacatccagatgacccagtctccatcctccctgtctgcatctgtaggagacagagtcaccatcacttgccgggcaagtcagggcataagaaataatttaggctggtatcagcagaaaccagggaaagcccctaagcgcctgatctatggtgcatccagtttgcaaagtggggtcccatcaaggttcagcggcagtggatctgggacagaattcactctcacaatcagcagcctgcagcctgaagattttgcaacttattactgtctacagtataatagttatccattcactttcggccctgggaccaaagtggatatcaaa

SEQ ID NO: 25388 - protein, 107 aa, synthetic construct
  REGION 1..107: note = Description of Artificial Sequence: Synthetic polypeptide
DIQMTQSPSSLSASVGDRVTITCRASQGIRNNLGWYQQKPGKAPKRLIYGASSLQSGVPSRFSGSGSGTEFTLTISSLQPEDFATYYCLQYNSYPFTFGPGTKVDIK

SEQ ID NO: 25389 - DNA, 321 bp, synthetic construct
  misc_feature 1..321: note = Description of Artificial Sequence: Synthetic polynucleotide
  source 1..321: mol_type = other DNA
gacatccagatgacccagtctccatcctccctgtctgcatctgtaggagacagagtcaccatcacttgccgggcaagtcagggcattagaaatgatttaggctggtatcagcagaaaccagggaaagcccctaagcgcctgatctatcctgcatccagtttacaaagtggggtcccatcaaggttcagcggcagcggatctgggacagaattcagtctcacaatcagcagcctgcagcctgaagattttgcaacttattactgtctacaggataatagttacccattcactttcggccctgggaccaaagtggatatcaaa

SEQ ID NO: 25390 - protein, 107 aa, synthetic construct
  REGION 1..107: note = Description of Artificial Sequence: Synthetic polypeptide
DIQMTQSPSSLSASVGDRVTITCRASQGIRNDLGWYQQKPGKAPKRLIYPASSLQSGVPSRFSGSGSGTEFSLTISSLQPEDFATYYCLQDNSYPFTFGPGTKVDIK

SEQ ID NO: 25391 - DNA, 321 bp, synthetic construct
  misc_feature 1..321: note = Description of Artificial Sequence: Synthetic polynucleotide
  source 1..321: mol_type = other DNA
gacatccagatgacccagtctccatcctccctgtctgcatctgtaggagacagagtcaccatcacttgccgggcaagtcagggcattagaaatgatttaggctggtatcagcagaaaccagggaaagcccctaagcgcctgatctatgctgcatccagtttgcaaagtggggtcccatcaaggttcagcggcagtggatctgggacagaattcactctcacaatcagcagcctgcagcctgaagattttgcaacttattactgtctacaacataatagatacccgctcactttcggcggagggaccaaggtggagatcaaa

SEQ ID NO: 25392 - protein, 107 aa, synthetic construct; identical to SEQ ID NO: 24628
  REGION 1..107: note = Description of Artificial Sequence: Synthetic polypeptide

SEQ ID NO: 25393 - DNA, 321 bp, synthetic construct
  misc_feature 1..321: note = Description of Artificial Sequence: Synthetic polynucleotide
  source 1..321: mol_type = other DNA
gacatccagatgacccagtctccatcctccctgtctgcatctgtaggagacagagtcaccatcacttgccgggcaagtcagagttttagccactatttaaattggtatcagcagaaaccagggaaagcccctaacctcctgatctttgctgtatccagtttgcaaagtggggtcccatcacggttcagtggcagtggatctgggtcagatttcactctccccatcagtagtttgcaacctgaagattttgcaatttacttctgtcaacagagtttcagtaccccattcactttcggccctgggaccaaagtggatatcaaa

SEQ ID NO: 25394 - protein, 107 aa, synthetic construct
  REGION 1..107: note = Description of Artificial Sequence: Synthetic polypeptide
DIQMTQSPSSLSASVGDRVTITCRASQSFSHYLNWYQQKPGKAPNLLIFAVSSLQSGVPSRFSGSGSGSDFTLPISSLQPEDFAIYFCQQSFSTPFTFGPGTKVDIK

SEQ ID NO: 25395 - DNA, 321 bp, synthetic construct
  misc_feature 1..321: note = Description of Artificial Sequence: Synthetic polynucleotide
  source 1..321: mol_type = other DNA
gacatccagatgacccagtctccatcctccctgtctgcatctgtaggagacagagtcaccatcacttgccaggcgagtcaggacattagcaactatttacattggtatcagcagaaaccagggaaagcccctcagctcctgatctacgatgcatccaatttggaaacaggggtcccatcaaggttcactggaagtggatctgggacagattttactttcaccatcagcagcctgcagcctgaagatattgcaacatattactgtcatcagtatgataatctcccgctcactttcggcggagggaccaaggtggagatcaaa

SEQ ID NO: 25396 - protein, 107 aa, synthetic construct
  REGION 1..107: note = Description of Artificial Sequence: Synthetic polypeptide
DIQMTQSPSSLSASVGDRVTITCQASQDISNYLHWYQQKPGKAPQLLIYDASNLETGVPSRFTGSGSGTDFTFTISSLQPEDIATYYCHQYDNLPLTFGGGTKVEIK

SEQ ID NO: 25397 - DNA, 321 bp, synthetic construct
  misc_feature 1..321: note = Description of Artificial Sequence: Synthetic polynucleotide
  source 1..321: mol_type = other DNA
gacatccagatgacccagtctccatcctcactgtctgcatctgtaggagacagagtcaccatcacttgtcgggcgagtcaggtcattagcaattatttagcctggtttcagcagaaaccagggaaagcccctaagtccctgatctctgctgcatccagtttgcaaagtggggtcccatcaaagttcagcggcagtggatctgggacagatttcactctcaccatcagcagcctgcagcctgaagattttgcaacttactactgccaacagtatcatagttacccactcactttcggccgtgggaccaaagtggatatcaaa

SEQ ID NO: 25398 - protein, 107 aa, synthetic construct
  REGION 1..107: note = Description of Artificial Sequence: Synthetic polypeptide
DIQMTQSPSSLSASVGDRVTITCRASQVISNYLAWFQQKPGKAPKSLISAASSLQSGVPSKFSGSGSGTDFTLTISSLQPEDFATYYCQQYHSYPLTFGRGTKVDIK

SEQ ID NO: 25399 - DNA, 321 bp, synthetic construct
  misc_feature 1..321: note = Description of Artificial Sequence: Synthetic polynucleotide
  source 1..321: mol_type = other DNA
gacatccagatgacccagtctccatcctccctgtctgcatctgtaggagacagagtcaccatcacttgccgggcaagtcagtacagtagcgactatttaaattggtatcagcagaaaccagggaaagcccctaaggtcctgatctttgctgcatccagtttgaaaagtggggtcccatcaaggttcagtggcagtggatctgggacagatttcactctcaccatcagcagtctggaacctgaggattttgcgacttacttctgtcaacagagttacagtaccccgttcaccttcggccaagggacacgactggagattaaa

SEQ ID NO: 25400 - protein, 107 aa, synthetic construct
  REGION 1..107: note = Description of Artificial Sequence: Synthetic polypeptide
DIQMTQSPSSLSASVGDRVTITCRASQYSSDYLNWYQQKPGKAPKVLIFAASSLKSGVPSRFSGSGSGTDFTLTISSLEPEDFATYFCQQSYSTPFTFGQGTRLEIK

SEQ ID NO: 25401 - DNA, 321 bp, synthetic construct
  misc_feature 1..321: note = Description of Artificial Sequence: Synthetic polynucleotide
  source 1..321: mol_type = other DNA
gacatccagatgacccagtctccatcctccctgtctgcctctgtaggcgccagagtcaccatcacttgccgggcaagtcagggcattagaaatgatttaggctggtatcagcagaatccggggaaagcccctaagcgcctgatctatgctgcatccaatttgcaaagtggggtcccatcaaggttcagcggcagtggatctgggacagaattcactctcactatcagcagcctgcagcctgaagattttgcaacttatttctgtctacaacataatcgttacccgctcactttcggcggagggaccaaggtggagatcaaa

SEQ ID NO: 25402 - protein, 107 aa, synthetic construct
  REGION 1..107: note = Description of Artificial Sequence: Synthetic polypeptide
DIQMTQSPSSLSASVGARVTITCRASQGIRNDLGWYQQNPGKAPKRLIYAASNLQSGVPSRFSGSGSGTEFTLTISSLQPEDFATYFCLQHNRYPLTFGGGTKVEIK

SEQ ID NO: 25403 - DNA, 321 bp, synthetic construct
  misc_feature 1..321: note = Description of Artificial Sequence: Synthetic polynucleotide
  source 1..321: mol_type = other DNA
gacatccagatgacccagtctccatcctccctgtctgcatctgtaggagacagagtcaccatcacttgccaggcgagtcaagacattaccaactatttagattggtatcagcagaaaccggggaaagcccctaaactcctgatctacgatgcatccaatttgggaacaggggtcccatcaaggttcagtggaagtggatctgggacagattttactttcaccatcagcagcctgcagcctgaagatattgcaacatattactgtcaacagtgtgataatctcccgctcactttcggcggagggaccaaggtggagatcaaa

SEQ ID NO: 25404 - protein, 107 aa, synthetic construct
  REGION 1..107: note = Description of Artificial Sequence: Synthetic polypeptide
DIQMTQSPSSLSASVGDRVTITCQASQDITNYLDWYQQKPGKAPKLLIYDASNLGTGVPSRFSGSGSGTDFTFTISSLQPEDIATYYCQQCDNLPLTFGGGTKVEIK

SEQ ID NO: 25405 - DNA, 321 bp, synthetic construct
  misc_feature 1..321: note = Description of Artificial Sequence: Synthetic polynucleotide
  source 1..321: mol_type = other DNA
gacatccagatgtcccagtctccatcttccgtgtctgcatctgtaggagacagagtcaccatcacttgtcgggcgagtcagggtattagcaggtggttagcctggtatcagcagaaaccagggaaagcccctaacctcctgatctatgctgcatccagtttgcaaagtggggtcccatcaaggttcagcggcagtggctctgggacagatttcactctcaccatcagcagcctgcagcctgaagattttgcaatttactattgtcagcaggctaacagtttcccattcactttcggccctgggaccaaagtggatatcaaa

SEQ ID NO: 25406 - protein, 107 aa, synthetic construct
  REGION 1..107: note = Description of Artificial Sequence: Synthetic polypeptide
DIQMSQSPSSVSASVGDRVTITCRASQGISRWLAWYQQKPGKAPNLLIYAASSLQSGVPSRFSGSGSGTDFTLTISSLQPEDFAIYYCQQANSFPFTFGPGTKVDIK

SEQ ID NO: 25407 - DNA, 327 bp, synthetic construct
  misc_feature 1..327: note = Description of Artificial Sequence: Synthetic polynucleotide
  source 1..327: mol_type = other DNA
gaaattgtgttgacgcagtctccaggcaccctgtctttgtctccaggggaaagagccaccctctcctgcagggccagtcagagtattacaagcagctacttagcctggtaccagcagaaacctggccaggctcccaggctcctcatctatggtgcgtccggcagggccactggcatcccagacaggttcagtggcagtgggtctgggacagacttcaccctcaccatcagcagactggagcctgaagattttgcagtgtattactgtcagcagtttgaaagctcacccatgtgcagttttggccaggggaccaacctggagatcaaa

SEQ ID NO: 25408 - protein, 109 aa, synthetic construct
  REGION 1..109: note = Description of Artificial Sequence: Synthetic polypeptide
EIVLTQSPGTLSLSPGERATLSCRASQSITSSYLAWYQQKPGQAPRLLIYGASGRATGIPDRFSGSGSGTDFTLTISRLEPEDFAVYYCQQFESSPMCSFGQGTNLEIK

SEQ ID NO: 25409 - DNA, 321 bp, synthetic construct
  misc_feature 1..321: note = Description of Artificial Sequence: Synthetic polynucleotide
  source 1..321: mol_type = other DNA
gacatccagatgacccagtctccatcctccctgtctgcatctgtaggagacagagtcaccatcacttgtcgggcaagtcagggcattagaaatgatttaggctggtatcagcagaaaccagggaaagcccctaagcgcctgatctatgctgcatccagtttgcaaagtggggtcccatcaaggttcagcggcagtggatctgggacagaattcactctcacaatcagcagcctgcagcctgaagattttgcaacttattactgtctacagcataatagttacccattcactttcggccctgggaccaaagtggatatcaaa

SEQ ID NO: 25410 - protein, 107 aa, synthetic construct; identical to SEQ ID NO: 24296
  REGION 1..107: note = Description of Artificial Sequence: Synthetic polypeptide

SEQ ID NO: 25411 - DNA, 321 bp, synthetic construct
  misc_feature 1..321: note = Description of Artificial Sequence: Synthetic polynucleotide
  source 1..321: mol_type = other DNA
gacatccagatgacccagtctccatcctccctgtctgcatctgtaggagacagagtcaccatcacttgccgggcaagtcagggcattagaaatgatttaggctggtatcagcagaaaccagggaaagcccctaagcgcctgatctatgctgcatccagtttgcaaagtggggtcccatcaagattcagcggcagtggatctgggacagaattcactctcacaatcagcagcctgcagcctgaagattttgcaacttattactgtctacaacataatagttacccattcactttcggccctgggaccaaagtggatatcaaa

SEQ ID NO: 25412 - protein, 107 aa, synthetic construct; identical to SEQ ID NO: 24296
  REGION 1..107: note = Description of Artificial Sequence: Synthetic polypeptide

SEQ ID NO: 25413 - DNA, 321 bp, synthetic construct
  misc_feature 1..321: note = Description of Artificial Sequence: Synthetic polynucleotide
  source 1..321: mol_type = other DNA
gacatccagatgacccagtctccatcttccgtgtctgcatctgtaggagacagagtcaccatcacttgtcgggcgagtcagggtattagcagctggttagcctggtatcagcagaaaccagggaaagcccctaaactcctgatctatgatgcatccagtttgcaaagtggggtcccatcaaggttcagcggcagtggatctgagacagatttcactctcaccatcagcagcctgcagcctgaagattttgcaacttactattgtcaacaggctaacagtttcccgtggacgttcggccaagggaccaaggtggaaatcaaa

SEQ ID NO: 25414 - protein, 107 aa, synthetic construct
  REGION 1..107: note = Description of Artificial Sequence: Synthetic polypeptide
DIQMTQSPSSVSASVGDRVTITCRASQGISSWLAWYQQKPGKAPKLLIYDASSLQSGVPSRFSGSGSETDFTLTISSLQPEDFATYYCQQANSFPWTFGQGTKVEIK

SEQ ID NO: 25415 - DNA, 321 bp, synthetic construct
  misc_feature 1..321: note = Description of Artificial Sequence: Synthetic polynucleotide
  source 1..321: mol_type = other DNA
gacatccagatgacccaatctccatcctccctgtctgcatctgttggagacagagtcaccatcacttgccgggcaagtcaggacattagaaatattttaggctggtatcagcagaaaccagggaaagcccctaagcgcctgatctatgctgcatccaatttgcaaagtggagtcccatcaaggttcagcggcagtggatctgggacagaattcactctcacaatcagcagcctgcagcctgaggatttcgcaacttattactgtctacagtataatagttacccgtggacgttcggccaagggaccaaggtggaaatcaaa

SEQ ID NO: 25416 - protein, 107 aa, synthetic construct
  REGION 1..107: note = Description of Artificial Sequence: Synthetic polypeptide
DIQMTQSPSSLSASVGDRVTITCRASQDIRNILGWYQQKPGKAPKRLIYAASNLQSGVPSRFSGSGSGTEFTLTISSLQPEDFATYYCLQYNSYPWTFGQGTKVEIK

SEQ ID NO: 25417 - DNA, 336 bp, synthetic construct
  misc_feature 1..336: note = Description of Artificial Sequence: Synthetic polynucleotide
  source 1..336: mol_type = other DNA
gatattgtgatgacccagactccactctctctgtccgtcacccctggacagccggcctccatgtcctgcaagtctagtcagagcctcctgcatagtgagggaaagacctatttgtattggtacctgcggaagccaggccagcctccacagttcctgatctttgaagtttccaaccggttctctggagtgccagataggttcagtggcagcgggtcagggacagaattcacactgaaaatcagccgggtggaggctgaggatgttgggatttattactgcatgcaaagtatacagtttccattcactttcggccctgggaccaaagtggatatcaaa

SEQ ID NO: 25418 - protein, 112 aa, synthetic construct
  REGION 1..112: note = Description of Artificial Sequence: Synthetic polypeptide
DIVMTQTPLSLSVTPGQPASMSCKSSQSLLHSEGKTYLYWYLRKPGQPPQFLIFEVSNRFSGVPDRFSGSGSGTEFTLKISRVEAEDVGIYYCMQSIQFPFTFGPGTKVDIK

SEQ ID NO: 25419 - DNA, 321 bp, synthetic construct
  misc_feature 1..321: note = Description of Artificial Sequence: Synthetic polynucleotide
  source 1..321: mol_type = other DNA
gacatccagatgacccagtctccatcctccctgtctgcctctgtaggcgccagagtcaccatcacttgccgggcaagtcagggcattagaaatgatttaggctggtatcagcagaatccggggaaagcccctaagcgcctgatctatgctgcatccaatttgcaaagtggggtcccatcaaggttcagcggcagtggatctgggacagaattcactctcactatcagcagcctgcagcctgaagattttgcaacttatttctgtctacagcataatcgttacccgctcactttcggcggagggaccaaggtggagatcaaa

SEQ ID NO: 25420 - protein, 107 aa, synthetic construct; identical to SEQ ID NO: 25402
  REGION 1..107: note = Description of Artificial Sequence: Synthetic polypeptide

SEQ ID NO: 25421 - DNA, 321 bp, synthetic construct
  misc_feature 1..321: note = Description of Artificial Sequence: Synthetic polynucleotide
  source 1..321: mol_type = other DNA
gacatccagatgacccagtctccatcctccctgtctgcatctgtaggagacagagtcaccatcacttgccgggcaagtcagggcattagaaatgatttaggctggtatcagcagaaaccagggaaagcccctaagcgcctgatctatgctgcatccagtttgcaaagtggggtcccatctaggttcagcggcagtggatctgggacagaattcactctcacaatcagcagcctgcagcctgaagattttgcaacttattactgtctacatcataatacttacccattcactttcggccctgggaccaaagtggatatcaaa

SEQ ID NO: 25422 - protein, 107 aa, synthetic construct
  REGION 1..107: note = Description of Artificial Sequence: Synthetic polypeptide
DIQMTQSPSSLSASVGDRVTITCRASQGIRNDLGWYQQKPGKAPKRLIYAASSLQSGVPSRFSGSGSGTEFTLTISSLQPEDFATYYCLHHNTYPFTFGPGTKVDIK

SEQ ID NO: 25423 - DNA, 321 bp, synthetic construct
  misc_feature 1..321: note = Description of Artificial Sequence: Synthetic polynucleotide
  source 1..321: mol_type = other DNA
gacatccagatgacccagtctccatcttccgtgtctgcatctgtaggggacagagtcaccatcacttgtcgggcgagtcaggttattagccgctggttagcctggtatcagcagaaaccagggaaagcccctaacctcctgatctatgctgcatccagtttgcaaagtggggtcccatcaaggttcagcggcagtggatctgggacagatttcactctgaccatcagcagcctgcagcctgaagattttgcaacttactattgtcaacaggctaacagtttcccattcactttcggccctgggaccaaagtggatctcaaa

SEQ ID NO: 25424 - protein, 107 aa, synthetic construct
  REGION 1..107: note = Description of Artificial Sequence: Synthetic polypeptide
DIQMTQSPSSVSASVGDRVTITCRASQVISRWLAWYQQKPGKAPNLLIYAASSLQSGVPSRFSGSGSGTDFTLTISSLQPEDFATYYCQQANSFPFTFGPGTKVDLK

SEQ ID NO: 25425 - DNA, 321 bp, synthetic construct
  misc_feature 1..321: note = Description of Artificial Sequence: Synthetic polynucleotide
  source 1..321: mol_type = other DNA
gaaatagtgatgacgcagtctccagccaccctgtctgtgtctccaggggaaagagccaccctctcctgcagggccagtcagagtgttagcagcgacttagcctggtaccagctgaaacctggccaggctcccaggctcctcatctatgatgcatccgccagggccactggtatcccagccaggttcagtggcagtgggtctgggacagagttcactctcaccatcagcagcctgcagtctgaagattttgcattttattactgtcagcagtattataactggcctctcactttcggcggagggaccaaggtggagatcaaa

SEQ ID NO: 25426 - protein, 107 aa, synthetic construct
  REGION 1..107: note = Description of Artificial Sequence: Synthetic polypeptide
EIVMTQSPATLSVSPGERATLSCRASQSVSSDLAWYQLKPGQAPRLLIYDASARATGIPARFSGSGSGTEFTLTISSLQSEDFAFYYCQQYYNWPLTFGGGTKVEIK

SEQ ID NO: 25427 - DNA, 336 bp, synthetic construct
  misc_feature 1..336: note = Description of Artificial Sequence: Synthetic polynucleotide
  source 1..336: mol_type = other DNA
gatattgtgatgacccagactccactctctctgtccgtcacccctggacagccggcctccatctcctgcaaatctagtcagagcctcctgcatagtgaaggaaagacctatttgtattggtacctgcagaagccaggccagcctccacagttcctgatctttgaagtttcccaccggttctctggagtgccagataggttcagtggcagcgggtcagggacagatttcactctgaaaatcagccgggtggaggctgaggatgttggggtttattactgcatgcaaagtatacagcttccattcactttcggccctgggaccaaagtggatatcaaa

SEQ ID NO: 25428 - protein, 112 aa, synthetic construct
  REGION 1..112: note = Description of Artificial Sequence: Synthetic polypeptide
DIVMTQTPLSLSVTPGQPASISCKSSQSLLHSEGKTYLYWYLQKPGQPPQFLIFEVSHRFSGVPDRFSGSGSGTDFTLKISRVEAEDVGVYYCMQSIQLPFTFGPGTKVDIK

SEQ ID NO: 25429 - DNA, 336 bp, synthetic construct
  misc_feature 1..336: note = Description of Artificial Sequence: Synthetic polynucleotide
  source 1..336: mol_type = other DNA
gatgttatgatgacccagattccactctctctgtccgtcacccctggacagccggcctccatctcctgcaagtctagtcagagcctcgtgcatagtgaaggaaagacctatttgtattggtatttgcagaagccaggccagcctccacagctcctgatctttgaagtttccaaccgggtctctggagtgccagataggttcagtggcagagggtcagggacagatttcacactgaaaatcagccgggtggaggctgaggatgttggggtttattactgcatgcaaagtatactgtatccgatcaccttcggccaagggacacgactggagattaaa

SEQ ID NO: 25430 - protein, 112 aa, synthetic construct
  REGION 1..112: note = Description of Artificial Sequence: Synthetic polypeptide
DVMMTQIPLSLSVTPGQPASISCKSSQSLVHSEGKTYLYWYLQKPGQPPQLLIFEVSNRVSGVPDRFSGRGSGTDFTLKISRVEAEDVGVYYCMQSILYPITFGQGTRLEIK

SEQ ID NO: 25431 - DNA, 321 bp, synthetic construct
  misc_feature 1..321: note = Description of Artificial Sequence: Synthetic polynucleotide
  source 1..321: mol_type = other DNA
gacatccagatgacccagtctccatcctccctgtctgcatctgtaggagacagagtcaccatcacttgccgggcaagtcagggcattagaaatgatttaggctggtatcagcagaaaccagggaaagcccctaagcgcctgatctatgctgcatccagtttgcaaagtggggtcccatcaaggttcagcggcagtagatctgggacagaattcactctcacaatcagcagcctgcagcctgaagattttgcatcttattactgtctacaacataatagttacccattcactttcggccctgggaccaaagtggatatcaaa

SEQ ID NO: 25432 - protein, 107 aa, synthetic construct
  REGION 1..107: note = Description of Artificial Sequence: Synthetic polypeptide
DIQMTQSPSSLSASVGDRVTITCRASQGIRNDLGWYQQKPGKAPKRLIYAASSLQSGVPSRFSGSRSGTEFTLTISSLQPEDFASYYCLQHNSYPFTFGPGTKVDIK

SEQ ID NO: 25433 - DNA, 321 bp, synthetic construct
  misc_feature 1..321: note = Description of Artificial Sequence: Synthetic polynucleotide
  source 1..321: mol_type = other DNA
gacatccagatgacccagtctccatcctctctgtttgcatctgtaggagacagagtcaccatcacttgtcgggcgagtcaggacattagcaattatttaatctggtttcagcagaaaccagggaaagcccctaagtccctgatttatactgcatccagtttgcaaagtggggtcccctcaaagttcagcggcagtggatttgggacagatttcactctcaccatcagcaacctgcagcctgaagattttgcgacttattactgccaacagtatcatagtttccctctcactttcggcggagggaccagggtggagatcaga

SEQ ID NO: 25434 - protein, 107 aa, synthetic construct
  REGION 1..107: note = Description of Artificial Sequence: Synthetic polypeptide
DIQMTQSPSSLFASVGDRVTITCRASQDISNYLIWFQQKPGKAPKSLIYTASSLQSGVPSKFSGSGFGTDFTLTISNLQPEDFATYYCQQYHSFPLTFGGGTRVEIR

SEQ ID NO: 25435 - DNA, 321 bp, synthetic construct
  misc_feature 1..321: note = Description of Artificial Sequence: Synthetic polynucleotide
  source 1..321: mol_type = other DNA
gacatccagatgacccagtctccatcctccctgtcttcatctgtaggagacagagtcaccatcacttgccgggcaagtcaggccattagaaatgatttaggctggtatcagcagaaaccagggaaagcccctaagcgcctgatccatgctgcattcaggttgcaaagtggggtcccatcaaggttcagcggcagtggatctgggacagaattcactctcacaatcagcagcctgcagcctgaagattttgcaacttattactgtctacagcataatagttaccctctcactttcggcggagggaccaaggtggggatcaaa

SEQ ID NO: 25436 - protein, 107 aa, synthetic construct
  REGION 1..107: note = Description of Artificial Sequence: Synthetic polypeptide
DIQMTQSPSSLSSSVGDRVTITCRASQAIRNDLGWYQQKPGKAPKRLIHAAFRLQSGVPSRFSGSGSGTEFTLTISSLQPEDFATYYCLQHNSYPLTFGGGTKVGIK

SEQ ID NO: 25437 - DNA, 336 bp, synthetic construct
  misc_feature 1..336: note = Description of Artificial Sequence: Synthetic polynucleotide
  source 1..336: mol_type = other DNA
gatattgtgatgacccagactccactctctctgtccgtcacccctggacagtcggcctccatctcctgcaagtctagtcaaagcctcctgcatagtgaaggaaagacctatttgtattggtacttgcagaagccaggccagcctccacagctcctgatctatgaagtttccaaccggttctctggagtgccagataggttcagcggcagcgggtcagggacagattttacactgaaaatcagccgggtggaggctgaggatgttggggtttattactgcatacaaagtatacaacttccgatcaccttcggccaagggacacgactggagattaaa

SEQ ID NO: 25438 - protein, 112 aa, synthetic construct
  REGION 1..112: note = Description of Artificial Sequence: Synthetic polypeptide
DIVMTQTPLSLSVTPGQSASISCKSSQSLLHSEGKTYLYWYLQKPGQPPQLLIYEVSNRFSGVPDRFSGSGSGTDFTLKISRVEAEDVGVYYCIQSIQLPITFGQGTRLEIK

SEQ ID NO: 25439 - DNA, 321 bp, synthetic construct
  misc_feature 1..321: note = Description of Artificial Sequence: Synthetic polynucleotide
  source 1..321: mol_type = other DNA
gacatccagatgacccagtctccatcctccccgtctgcttctgtaggagacagagtcaccatcacttgccaggcgagtcaagacattagcaactatttagattggtatcagcagaaaccagggaaagcccctaaactcctgatatacgatgcatccaatttggaaacaggggtcccatcaaggttcagtggaagtggatctgggacagattttgctttcaccatcagcagcctgcagcctgaagatattgcaacatattactgtcaacagtgtgataatctcccgctcactttcggcggagggaccaaggtggagatcaaa

SEQ ID NO: 25440 - protein, 107 aa, synthetic construct
  REGION 1..107: note = Description of Artificial Sequence: Synthetic polypeptide
DIQMTQSPSSPSASVGDRVTITCQASQDISNYLDWYQQKPGKAPKLLIYDASNLETGVPSRFSGSGSGTDFAFTISSLQPEDIATYYCQQCDNLPLTFGGGTKVEIK

SEQ ID NO: 25441 - DNA, 321 bp, synthetic construct
  misc_feature 1..321: note = Description of Artificial Sequence: Synthetic polynucleotide
  source 1..321: mol_type = other DNA
gacatccagatgacccagtctccatcctccctgtctgcatctgtaggagacagaatcaccatcacttgccgggcaagtcagagcattctcagctatttgaattggtatcagcagaaaccaggaaaggcccctaaactcctgatctatgttgcatccagtttccaaagtggggtcccatcaaggttcagtggcagtggatctgggacagatttcactctcaccatcagcagtctgcaacctgatgattttgcaacttactactgtcaacagagttacagtccccctctcactttcggcggagggaccaaggtggagatcaaa

SEQ ID NO: 25442 - protein, 107 aa, synthetic construct
  REGION 1..107: note = Description of Artificial Sequence: Synthetic polypeptide
DIQMTQSPSSLSASVGDRITITCRASQSILSYLNWYQQKPGKAPKLLIYVASSFQSGVPSRFSGSGSGTDFTLTISSLQPDDFATYYCQQSYSPPLTFGGGTKVEIK

SEQ ID NO: 25443 - DNA, 321 bp, synthetic construct
  misc_feature 1..321: note = Description of Artificial Sequence: Synthetic polynucleotide
  source 1..321: mol_type = other DNA
gacatccagatgacccagtctccatcttccgtgtctgcatctgtaggagacagagtcaccatcacttgtcgggcgagtcaggatattagcagctggttggcctggtttcagcagaaaccagggaaagcccctaagctcctgatctatgctgcatccagtttgcaaaatggggtcccgtcaaggttcagcggcagtggatctgggacagatttcactctcaccatcagcagcctgcagcctgaagattttgcaacttactattgccaacagactaacagtttcccattcactttcggccctgggaccaaagtggatatcaaa

SEQ ID NO: 25444 - protein, 107 aa, synthetic construct
  REGION 1..107: note = Description of Artificial Sequence: Synthetic polypeptide
DIQMTQSPSSVSASVGDRVTITCRASQDISSWLAWFQQKPGKAPKLLIYAASSLQNGVPSRFSGSGSGTDFTLTISSLQPEDFATYYCQQTNSFPFTFGPGTKVDIK

SEQ ID NO: 25445 - DNA, 321 bp, synthetic construct
  misc_feature 1..321: note = Description of Artificial Sequence: Synthetic polynucleotide
  source 1..321: mol_type = other DNA
gacatccagatgacccagtctccatcctccctgtctgcatctgtaggagacagagtcaccctcacttgccgggcaagtcagggcattagaaatgatttaggctggtatcagcagaaaccagggatagcccctaagcgcctgatctatgctgcatccagtttgcaaagtggggtcccatcaaggttcagcggcagtggatctgggacagaattcactctcacaatcagcagcctgcagcctgaagattttgcaacttattactgtctacagcataatcgttacccattcactttcggccctgggaccaaagtggatatcaaa

SEQ ID NO: 25446 - protein, 107 aa, synthetic construct
  REGION 1..107: note = Description of Artificial Sequence: Synthetic polypeptide
DIQMTQSPSSLSASVGDRVTLTCRASQGIRNDLGWYQQKPGIAPKRLIYAASSLQSGVPSRFSGSGSGTEFTLTISSLQPEDFATYYCLQHNRYPFTFGPGTKVDIK

SEQ ID NO: 25447 - DNA, 318 bp, synthetic construct
  misc_feature 1..318: note = Description of Artificial Sequence: Synthetic polynucleotide
  source 1..318: mol_type = other DNA
gacatccagatgacccagtctccaacctccctgtctgcatctgtgggagacagagtcaccatcacttgccaggcgagtcaggacattaccaactttttaaattggtatcagcagaaaccagggaaagcccctaagctcctgatctacgatgcctccaatttggaaacaggggtcccatcaaggttcagtggaagtggatctgggacagattttactttcaccatcagcagccttcagcctgaagatattgcaacatattactgtcaacagtatgataatctgatcaccttcggccaagggacacgactggagattaaa

SEQ ID NO: 25448 - protein, 106 aa, synthetic construct
  REGION 1..106: note = Description of Artificial Sequence: Synthetic polypeptide
DIQMTQSPTSLSASVGDRVTITCQASQDITNFLNWYQQKPGKAPKLLIYDASNLETGVPSRFSGSGSGTDFTFTISSLQPEDIATYYCQQYDNLITFGQGTRLEIK

SEQ ID NO: 25449 - DNA, 321 bp, synthetic construct
  misc_feature 1..321: note = Description of Artificial Sequence: Synthetic polynucleotide
  source 1..321: mol_type = other DNA
gacatccagatgacccagtctccatcctcactgtctgcatctgtaggagacagagtcaccatcacttgtcgggcgagtcaggacattaacatttatttagcctggtttcagcagaaaccagggaaagcccctaagtccctgatctatgctgcatccagtttgcaaagtggggtcccatcgaagttcagcggcagtggatctgggacagatttcactctcaccatcagcagtctgcagcctgaagattttgcaacttattactgccaacagtataatagttatcctctcactttcggcggagggaccaaggtggagatcaaa

SEQ ID NO: 25450 - protein, 107 aa, synthetic construct
  REGION 1..107: note = Description of Artificial Sequence: Synthetic polypeptide
DIQMTQSPSSLSASVGDRVTITCRASQDINIYLAWFQQKPGKAPKSLIYAASSLQSGVPSKFSGSGSGTDFTLTISSLQPEDFATYYCQQYNSYPLTFGGGTKVEIK

SEQ ID NO: 25451 - DNA, 339 bp, synthetic construct
  misc_feature 1..339: note = Description of Artificial Sequence: Synthetic polynucleotide
  source 1..339: mol_type = other DNA
gacatcgtcatgacccagtctccagactccctggctgtgtctctgggcgagagggccaccatcaactgcaagtccagccagagtgttttacatagttccaacaataagaactacttagtttggtaccagcagagaccaggacagcctcctaacctgctcatttactgggcatctacccgggaatccggggtccctgaccgattcagtggcagcgggtctgggacagatttcactctcaccatcagcagcctgcaggctgaagatgtggcagtttattactgtcagcaatattatagtactcctccgacgttcggccaagggaccaaggtggaaatcaaa

SEQ ID NO: 25452 - protein, 113 aa, synthetic construct
  REGION 1..113: note = Description of Artificial Sequence: Synthetic polypeptide
DIVMTQSPDSLAVSLGERATINCKSSQSVLHSSNNKNYLVWYQQRPGQPPNLLIYWASTRESGVPDRFSGSGSGTDFTLTISSLQAEDVAVYYCQQYYSTPPTFGQGTKVEIK

SEQ ID NO: 25453 - DNA, 321 bp, synthetic construct
  misc_feature 1..321: note = Description of Artificial Sequence: Synthetic polynucleotide
  source 1..321: mol_type = other DNA
gacatccagatgacccagtctccatcctccctgtctgcatctgtaggagacagagtcaccatcacttgccgggcaagtcaggacattagaaataatttaggctggtatcagcagaaaccagggaaagcccctaagcgcctgatcaatgctgcatccagtttacaaagtggggtcccatcaaggttcagcggcagtggatctgggacagaattcactctcacaatcagcagcctgcagcctgaagattttgcaacttattactgtctacaggataatagtcacccgttcactttcggcggagggaccaaggtggagatcaaa

SEQ ID NO: 25454 - protein, 107 aa, synthetic construct
  REGION 1..107: note = Description of Artificial Sequence: Synthetic polypeptide
DIQMTQSPSSLSASVGDRVTITCRASQDIRNNLGWYQQKPGKAPKRLINAASSLQSGVPSRFSGSGSGTEFTLTISSLQPEDFATYYCLQDNSHPFTFGGGTKVEIK

SEQ ID NO: 25455 - DNA, 321 bp, synthetic construct
  misc_feature 1..321: note = Description of Artificial Sequence: Synthetic polynucleotide
  source 1..321: mol_type = other DNA
gacatccagatgacccagtctccatcctccctgtctgcatctgtaggagacagagtcaccatcacttgccgggcaagtcagagttttagccactatttaaattggtatcagcagaaaccagggaaagcccctaacctcctgatctttgctgtatccagtttgcaaagtggggtcccatcaaggttcagtggcagtggatctgggacagatttcactctcaccatcagtagtctgcaacctgaagattttgcaatttacttctgtcaacagagttacagtaccccattcactttcggccctgggaccaaagtggatatcaaa

SEQ ID NO: 25456 - protein, 107 aa, synthetic construct
  REGION 1..107: note = Description of Artificial Sequence: Synthetic polypeptide
DIQMTQSPSSLSASVGDRVTITCRASQSFSHYLNWYQQKPGKAPNLLIFAVSSLQSGVPSRFSGSGSGTDFTLTISSLQPEDFAIYFCQQSYSTPFTFGPGTKVDIK

SEQ ID NO: 25457 - DNA, 321 bp, synthetic construct
  misc_feature 1..321: note = Description of Artificial Sequence: Synthetic polynucleotide
  source 1..321: mol_type = other DNA
gacatccagatgacccagtctccatcctccctgtctgcatctgtaggagacagagtcaccatcacttgccgggcaagtcaggacattagaaatcttttaggctggtatcagcagaaaccagggaaagcccctaagcgcttgatctatgctgcatccagtttgcaaagtggggtcccatcaaggttcagcggcagtggatctgggacagagttcactctcacaatcagcagcctgcagcctgaagattttgcaacttattactgtctacagtataatagttacccattcactttcggccctgggaccaaagtggatatcaga

SEQ ID NO: 25458 - protein, 107 aa, synthetic construct
  REGION 1..107: note = Description of Artificial Sequence: Synthetic polypeptide
DIQMTQSPSSLSASVGDRVTITCRASQDIRNLLGWYQQKPGKAPKRLIYAASSLQSGVPSRFSGSGSGTEFTLTISSLQPEDFATYYCLQYNSYPFTFGPGTKVDIR

SEQ ID NO: 25459 - DNA, 321 bp, synthetic construct
  misc_feature 1..321: note = Description of Artificial Sequence: Synthetic polynucleotide
  source 1..321: mol_type = other DNA
gacatccagatgacccagtctccatcttccgtgtctgcatctgtaggcgacagagtcaccatcacttgtcgggcgagtcagggtattaggaagtggttagcctggtatcagcagaaaccagggaaagcccctaagctcctgatctatgctgcatccagtttgcaaagtggggtcccgtcaaggttcagcggcagtggatctgggacagatttcactctcaccatcagcagcctgcagcctgaagattttgcaacttactattgtcaacaggctaacagtttcccattcactttcggccctgggaccaaagtggatatcaaa

SEQ ID NO: 25460 - protein, 107 aa, synthetic construct
  REGION 1..107: note = Description of Artificial Sequence: Synthetic polypeptide
DIQMTQSPSSVSASVGDRVTITCRASQGIRKWLAWYQQKPGKAPKLLIYAASSLQSGVPSRFSGSGSGTDFTLTISSLQPEDFATYYCQQANSFPFTFGPGTKVDIK

SEQ ID NO: 25461 - DNA, 321 bp, synthetic construct
  misc_feature 1..321: note = Description of Artificial Sequence: Synthetic polynucleotide
  source 1..321: mol_type = other DNA
gacatccagatgacccagtctccatcctccctgtctgtatctgtaggagacagagtcaccatcacttgccgggcaagtcagagcattttcagatatttaaattggtatcagcagaaaccaggaagagcccctaagctcctgatctttgctgcatccagtttccaaagtggggtcccatcaaggttcagtggcagtggatctgggacagacttcactctcaccatcagcagcctacaacctgaagattttgcaacttactactgtcaacagacttacagtccccctctcactttcggcggagggaccaaggtggagatcaaa

SEQ ID NO: 25462 - protein, 107 aa, synthetic construct
  REGION 1..107: note = Description of Artificial Sequence: Synthetic polypeptide
DIQMTQSPSSLSVSVGDRVTITCRASQSIFRYLNWYQQKPGRAPKLLIFAASSFQSGVPSRFSGSGSGTDFTLTISSLQPEDFATYYCQQTYSPPLTFGGGTKVEIK

SEQ ID NO: 25463 - DNA, 321 bp, synthetic construct
  misc_feature 1..321: note = Description of Artificial Sequence: Synthetic polynucleotide
  source 1..321: mol_type = other DNA
gacatccagatgacccagtctccatcttccgtgtctgcatctgtgggagacagagtcaccatcacttgtcgggcgagtcagggtattagcagctggttagcctggtatcagcagaaatcagggaatgcccctaagctcctgatctatgctgcatccagattgcaaagtggggtcccatcaaggttcagcggcagtggatctggtacatatttcactctcattatcagcagcctgcagtctgaagattttgcaacttactattgtcaacaggctaacagtttcccattcactttcggccctgggaccaaagtggatatcaaa

SEQ ID NO: 25464 - protein, 107 aa, synthetic construct
  REGION 1..107: note = Description of Artificial Sequence: Synthetic polypeptide
DIQMTQSPSSVSASVGDRVTITCRASQGISSWLAWYQQKSGNAPKLLIYAASRLQSGVPSRFSGSGSGTYFTLIISSLQSEDFATYYCQQANSFPFTFGPGTKVDIK

SEQ ID NO: 25465 - DNA, 321 bp, synthetic construct
  misc_feature 1..321: note = Description of Artificial Sequence: Synthetic polynucleotide
  source 1..321: mol_type = other DNA
gacatccagatgacccagtctccatcttctgtgtgtgcatatgtaggagacagagtcaccatcacttgtcgggtgagtcaggatattagcaaatggttagcctggtttcagcagaaaccagggaaagcccctaaattcttgatatatgttgcatccggtttgcaaagtggggtcccatcaaggttcagcggcagtggatctgggacagatttcactttcaccatcagcagcctgcagcctgaagattttgcaacttactattgtcaacaggctaacagtttcccattcactttcggccctgggaccaaagtggatatcaaa

SEQ ID NO: 25466 - protein, 107 aa, synthetic construct
  REGION 1..107: note = Description of Artificial Sequence: Synthetic polypeptide
DIQMTQSPSSVCAYVGDRVTITCRVSQDISKWLAWFQQKPGKAPKFLIYVASGLQSGVPSRFSGSGSGTDFTFTISSLQPEDFATYYCQQANSFPFTFGPGTKVDIK

SEQ ID NO: 25467 - DNA, 321 bp, synthetic construct
  misc_feature 1..321: note = Description of Artificial Sequence: Synthetic polynucleotide
  source 1..321: mol_type = other DNA
gacatccagatgacccagtctccatcctccctgtctgcatctgtaggagacagagtcaccatcacttgccgggcaagtcagggcattagaaatgatttaggctggtatcagcagaaaccagggaaagcccctaagcgcctgatctatactgcatccaatttacaaagtggggtcccatcaaggttcagcggcagtggatctgggacagaattcactctcacaatcagcagcctgcagcctgaagattttgcaacttattactgtctacagcataatagttatccgtggacgttcggccaagggaccaaggtggaaatcaaa

SEQ ID NO: 25468 - protein, 107 aa, synthetic construct; identical to SEQ ID NO: 25340
  REGION 1..107: note = Description of Artificial Sequence: Synthetic polypeptide

SEQ ID NO: 25469 - DNA, 321 bp, synthetic construct
  misc_feature 1..321: note = Description of Artificial Sequence: Synthetic polynucleotide
  source 1..321: mol_type = other DNA
gacatccagatgacccagtctccatcctccctgtctgcatctgtaggagacagagtcaccatcacttgccgggcaagtcagggcattagaaatgatttaggctggtatcagcagaaaccagggaaagcccctaagcgcctgatctatgctgcatccagtttgcaaagtggggtcccatcaaggttcagcggcagtggatctgggacagaattcactctcacaatcagcagcctgcagcctgaagattttgcaacttattactgtctacagcataatcgttaccctttcactttcggccctgggaccaaagtggatttcaaa

SEQ ID NO: 25470 - protein, 107 aa, synthetic construct
  REGION 1..107: note = Description of Artificial Sequence: Synthetic polypeptide
DIQMTQSPSSLSASVGDRVTITCRASQGIRNDLGWYQQKPGKAPKRLIYAASSLQSGVPSRFSGSGSGTEFTLTISSLQPEDFATYYCLQHNRYPFTFGPGTKVDFK

SEQ ID NO: 25471 - DNA, 336 bp, synthetic construct
  misc_feature 1..336: note = Description of Artificial Sequence: Synthetic polynucleotide
  source 1..336: mol_type = other DNA
gatattgtgatgacccagactccactctctctgtccgtcacccctggacagccggcctccatctcctgcaagtctagtcagagcctccagcatggtgaaggaaagacctatttgtattggtacgtgcagaagccaggccagcctccacagctcctgatctatgaagtttcctatcggttttctggagtgccagataggttcagtggtagtgggtcagggacagatttcacactgaaaatcagccgggtggaggttgaggatgttggggtttattactgcatgcaaagtacacagcttccgctcaccttcggcggagggaccaaggtggagatcaaa

SEQ ID NO: 25472 - protein, 112 aa, synthetic construct
  REGION 1..112: note = Description of Artificial Sequence: Synthetic polypeptide
DIVMTQTPLSLSVTPGQPASISCKSSQSLQHGEGKTYLYWYVQKPGQPPQLLIYEVSYRFSGVPDRFSGSGSGTDFTLKISRVEVEDVGVYYCMQSTQLPLTFGGGTKVEIK

SEQ ID NO: 25473 - DNA, 321 bp, synthetic construct
  misc_feature 1..321: note = Description of Artificial Sequence: Synthetic polynucleotide
  source 1..321: mol_type = other DNA
gacatccagatgacccagtctccatcctccctgtctgcatctgtaggagacagagtcaccatcacttgccgggcaagtcagggcattagaaaagatttaggctggtatcagcagaaaccagggaaagcccctaagcgcctgatctatgctgcatccagtttgcaaagtggggtcccatcaaggttcagcggcagtggatctgggacagaattcactctcacaatcagcagcctgcagcctgaagattttgcaacttattactgtctacagcataatagttacccgtggacgttcggccaagggaccaaggtggaaatcaaa

SEQ ID NO: 25474 - protein, 107 aa, synthetic construct
  REGION 1..107: note = Description of Artificial Sequence: Synthetic polypeptide
DIQMTQSPSSLSASVGDRVTITCRASQGIRKDLGWYQQKPGKAPKRLIYAASSLQSGVPSRFSGSGSGTEFTLTISSLQPEDFATYYCLQHNSYPWTFGQGTKVEIK

SEQ ID NO: 25475 - DNA, 336 bp, synthetic construct
  misc_feature 1..336: note = Description of Artificial Sequence: Synthetic polynucleotide
  source 1..336: mol_type = other DNA
gatattgtgatgacccagactccactctctctgtccgtcacacctggacagtcggcctccatctcctgcaagtctagtcagagcctcctgcatagtgaaggaaagacctatttgtattggtacctgcagaagccaggccagcctccacagctcctgatctatgaagtttccaaccggatctctggagtgccagataggttcagtggcagcgggtcagggacagatttcacactgaaaatcagccgggtggaggctgaggatgttggggtttattactgcatgcaaagtatacagcttccgctcactttcggcggagggaccaaggtggagatcaaa

SEQ ID NO: 25476 - protein, 112 aa, synthetic construct
  REGION 1..112: note = Description of Artificial Sequence: Synthetic polypeptide
DIVMTQTPLSLSVTPGQSASISCKSSQSLLHSEGKTYLYWYLQKPGQPPQLLIYEVSNRISGVPDRFSGSGSGTDFTLKISRVEAEDVGVYYCMQSIQLPLTFGGGTKVEIK

SEQ ID NO: 25477 - DNA, 321 bp, synthetic construct
  misc_feature 1..321: note = Description of Artificial Sequence: Synthetic polynucleotide
  source 1..321: mol_type = other DNA
gacatccagatgacccagtctccatcctccctgtctgcatctgtaggagacagagtcaccatcacttgccgggcaagtcagggcattagaaatgatttaggctggtatcagcagaaaccagggaaagcccctaagcgcctgatctatgctgcatttagtttgcaaagtggggtcccatcaaggttcagcggcagtggatctgggacagaattcactctcacaatcagcagcctgcagcctgaagattttgcaacttattactgtctacagcataatagttaccctttcactttcggccctgggaccaaagtggatatcaaa

SEQ ID NO: 25478 - protein, 107 aa, synthetic construct
  REGION 1..107: note = Description of Artificial Sequence: Synthetic polypeptide
DIQMTQSPSSLSASVGDRVTITCRASQGIRNDLGWYQQKPGKAPKRLIYAAFSLQSGVPSRFSGSGSGTEFTLTISSLQPEDFATYYCLQHNSYPFTFGPGTKVDIK

SEQ ID NO: 25479 - DNA, 321 bp, synthetic construct
  misc_feature 1..321: note = Description of Artificial Sequence: Synthetic polynucleotide
  source 1..321: mol_type = other DNA
gacatccagatgacccagtctccatcctccctgtctgcatctgtaggagacagagtcaccatcacttgccgggcaagtcagggcattagaaatgatttaggctggtatcagcagaaaccagggaaagcccctaagcgcctgatctattctgcatccagtttacaaagtggggtcccatcaaggttcagcggcagtggatctgggacagaattcactctcacaatcagcagcctgcagcctgaagattttgcaacttattactgtctacagcataatagttacccgtggacgttcggcctagggaccaaggtggaaatcaaa

SEQ ID NO: 25480 - protein, 107 aa, synthetic construct
  REGION 1..107: note = Description of Artificial Sequence: Synthetic polypeptide
DIQMTQSPSSLSASVGDRVTITCRASQGIRNDLGWYQQKPGKAPKRLIYSASSLQSGVPSRFSGSGSGTEFTLTISSLQPEDFATYYCLQHNSYPWTFGLGTKVEIK

SEQ ID NO: 25481 - DNA, 339 bp, synthetic construct
  misc_feature 1..339: note = Description of Artificial Sequence: Synthetic polynucleotide
  source 1..339: mol_type = other DNA
gacatcgtgatgacccagtctccagactccctgactgtgtctctgggcgagagggccaccatcaactgcaagtccagccagagtgttttatacagctccaacaataagaactacttagcttggtaccagcagaaaccaggacagcctcctaagctgctcatttactgggcatctacccgggaatccggggtccctgaccgattcagtggcagcgggtctgggacagatttcactctcaccatcagcagcctgcaggctgaagatgtggcaatttattactgtcagcaatattatagtactccgtgcagttttggccaggggaccaagctggagatcaac

SEQ ID NO: 25482 - protein, 113 aa, synthetic construct
  REGION 1..113: note = Description of Artificial Sequence: Synthetic polypeptide
DIVMTQSPDSLTVSLGERATINCKSSQSVLYSSNNKNYLAWYQQKPGQPPKLLIYWASTRESGVPDRFSGSGSGTDFTLTISSLQAEDVAIYYCQQYYSTPCSFGQGTKLEIN

SEQ ID NO: 25483 - DNA, 321 bp, synthetic construct
  misc_feature 1..321: note = Description of Artificial Sequence: Synthetic polynucleotide
  source 1..321: mol_type = other DNA
gacatccagatgacccagtctccatcctcactgtctgcatctgtaggagacagagtcaccatcacatgtcgggcgagtcagggcattagcaattacttagcctggtttcagcagaaaccagggaaagcccctaagtccctgatctatgctgcatccagtttgcaaagtggggtcccatcaaagttcagcggcagtggatctgggacagatttcactctcaccatcagcagcctgcagtctgaagattttgcaacgtactactgccaacaatataaaagtcacccattcactttcggccctgggaccaaagtggatatcaaa

SEQ ID NO: 25484 - protein, 107 aa, synthetic construct
  REGION 1..107: note = Description of Artificial Sequence: Synthetic polypeptide
DIQMTQSPSSLSASVGDRVTITCRASQGISNYLAWFQQKPGKAPKSLIYAASSLQSGVPSKFSGSGSGTDFTLTISSLQSEDFATYYCQQYKSHPFTFGPGTKVDIK

SEQ ID NO: 25485 - DNA, 321 bp, synthetic construct
  misc_feature 1..321: note = Description of Artificial Sequence: Synthetic polynucleotide
  source 1..321: mol_type = other DNA
gacatccagatgacccagtctccatcctcactgtctgcatctgtaggagacagagtcaccatctcttgtcgggcgagtcaggtcattaagaattatttagtctgggttcagcagaaaccagggaaagcccctaagtccctgatctatgctgcgtccagtttgcaaagtggggtcccatcaacgttcagcggcagtggatctgggacagatttcactctcaccatcagcagcctgcagcctgaagattttgcaacttattactgcctacagtttcatagttacccattcactttcggccctgggaccaaaatggatatcaaa

SEQ ID NO: 25486 - protein, 107 aa, synthetic construct
  REGION 1..107: note = Description of Artificial Sequence: Synthetic polypeptide
DIQMTQSPSSLSASVGDRVTISCRASQVIKNYLVWVQQKPGKAPKSLIYAASSLQSGVPSTFSGSGSGTDFTLTISSLQPEDFATYYCLQFHSYPFTFGPGTKMDIK

SEQ ID NO: 25487 - DNA, 321 bp, synthetic construct
  misc_feature 1..321: note = Description of Artificial Sequence: Synthetic polynucleotide
  source 1..321: mol_type = other DNA
gacatccagatgacccagtctccatcctccctgtctgcatctgtaggagacagagtcaccttcacttgccgggcaagtcagggcattagaaatgatttaggctggtttcagcagaaaccagggaaagcccctaagcgcctgatctatgctgcatccagtttgcaaagtggggtcccatcaaggttcagcggcagtggatctgggacagaattcactctcacaatcagcagcctgcagcctgaagattttgcaacttattactgtctacagcatagtagttacccgctcactttcggcggagggaccaaggtggagatcaaa

SEQ ID NO: 25488 - protein, 107 aa, synthetic construct
  REGION 1..107: note = Description of Artificial Sequence: Synthetic polypeptide
DIQMTQSPSSLSASVGDRVTFTCRASQGIRNDLGWFQQKPGKAPKRLIYAASSLQSGVPSRFSGSGSGTEFTLTISSLQPEDFATYYCLQHSSYPLTFGGGTKVEIK

SEQ ID NO: 25489 - DNA, 321 bp, synthetic construct
  misc_feature 1..321: note = Description of Artificial Sequence: Synthetic polynucleotide
  source 1..321: mol_type = other DNA
gaaatagtgatgacgcagtctccagccaccctgtctgtgtctccaggggaaagagccaccctctcctgtagggccagtcagagtgttagcagttccttagcctggtaccggcagaaacctggccaggctcccaggctcctcatctatggtgcatccaccagggccactggtatcccggccaggttcagtggcagtgggtctgggacagagttcactctcaccatcagcagcctgcagtctgaagattttgcagtttattgctgtcagcagtataataactggccattcactttcggccctgggaccaaaatagatatcaaa

SEQ ID NO: 25490 - protein, 107 aa, synthetic construct
  REGION 1..107: note = Description of Artificial Sequence: Synthetic polypeptide
EIVMTQSPATLSVSPGERATLSCRASQSVSSSLAWYRQKPGQAPRLLIYGASTRATGIPARFSGSGSGTEFTLTISSLQSEDFAVYCCQQYNNWPFTFGPGTKIDIK

SEQ ID NO: 25491 - DNA, 321 bp, synthetic construct
  misc_feature 1..321: note = Description of Artificial Sequence: Synthetic polynucleotide
  source 1..321: mol_type = other DNA
gacatccagatgacccagtctccatcttccgtgtctgcatctgtaggagacagagtcaccatcacttgtcgggcgagtcaggttattagcaactggttagcctggtatcagctgaaaccagggaaagcccctaagctcctgatctatactgcatccagtttgcaaagtggggtcccatcaaggttcagcggcaatgaatctgggacagatttcactctcaccatcagcagcctgcagcctgaagattttgcaacttactattgtcaacaggctaacagtttcccgtggacgttcggccaagggaccaaggtggaaatcaaa

SEQ ID NO: 25492 - protein, 107 aa, synthetic construct
  REGION 1..107: note = Description of Artificial Sequence: Synthetic polypeptide
DIQMTQSPSSVSASVGDRVTITCRASQVISNWLAWYQLKPGKAPKLLIYTASSLQSGVPSRFSGNESGTDFTLTISSLQPEDFATYYCQQANSFPWTFGQGTKVEIK

SEQ ID NO: 25493 - DNA, 336 bp, synthetic construct
  misc_feature 1..336: note = Description of Artificial Sequence: Synthetic polynucleotide
  source 1..336: mol_type = other DNA
gacattgtgatgacccagactccactctctctgtccgtcacccctggacagccggcctccatctcctgcaagtctagtcagagcctcctgcatagtgagggaaagacctatttgtattggtacctgcagaagccaggccagcctccacagttcctgatctatgaagtttccaaccggttctctggagtgccagataggttcagtggcagcgggtcagggacagatttcacactgaaaatcagccgggtggaggctgaggatgttgggatttattactgcatgcaaagtataaagtatccgctcactttcggcggagggaccaaggtggagatcaaa

SEQ ID NO: 25494 - protein, 112 aa, synthetic construct
  REGION 1..112: note = Description of Artificial Sequence: Synthetic polypeptide
DIVMTQTPLSLSVTPGQPASISCKSSQSLLHSEGKTYLYWYLQKPGQPPQFLIYEVSNRFSGVPDRFSGSGSGTDFTLKISRVEAEDVGIYYCMQSIKYPLTFGGGTKVEIK

SEQ ID NO: 25495 - DNA, 321 bp, synthetic construct
  misc_feature 1..321: note = Description of Artificial Sequence: Synthetic polynucleotide
  source 1..321: mol_type = other DNA
gacatccagatgacccagtctccatcctccctgtctgcatctgtaggagacagagtcaccatcacttgccgggcaagtcagagcattagcagctatttaaattggtatcagcagaaaccagggaaagcccctaagctcctgatctatgctgcatccagtttgcaaagtggggtcccatcaaggttcagtggcagtggatctgggacagatttcactctcaccatcagcagtctgcaacctgaagattttgcaccttactactgtcaacagagttacaatatttcattcactttcggccctgggaccaaagtggatatcaaa

SEQ ID NO: 25496 - protein, 107 aa, synthetic construct
  REGION 1..107: note = Description of Artificial Sequence: Synthetic polypeptide
DIQMTQSPSSLSASVGDRVTITCRASQSISSYLNWYQQKPGKAPKLLIYAASSLQSGVPSRFSGSGSGTDFTLTISSLQPEDFAPYYCQQSYNISFTFGPGTKVDIK

SEQ ID NO: 25497 - DNA, 321 bp, synthetic construct; identical to SEQ ID NO: 25495
  misc_feature 1..321: note = Description of Artificial Sequence: Synthetic polynucleotide
  source 1..321: mol_type = other DNA

SEQ ID NO: 25498 - protein, 107 aa, synthetic construct; identical to SEQ ID NO: 25496
  REGION 1..107: note = Description of Artificial Sequence: Synthetic polypeptide

SEQ ID NO: 25499 - DNA, 321 bp, synthetic construct
  misc_feature 1..321: note = Description of Artificial Sequence: Synthetic polynucleotide
  source 1..321: mol_type = other DNA
gacatccagatgacccagtctccatcctccctgtctgcatctgtaggagacagagtcaccatcacttgccgggcaagtcagggcattagaaaagatttaggctggtatcagcagaaaccagggaaagcccctaagcgcctgatctttgctgcatccagtttgcaaagtggggtcccatcaaggttcagcggcagtggatctgggacagaattcactctcacaatcagcagcctgcagcctgaagattttgcaacttattactgtctacagcataatagttacccgtggacgttcggccaagggaccaaggtggaaatcaaa

SEQ ID NO: 25500 - protein, 107 aa, synthetic construct
  REGION 1..107: note = Description of Artificial Sequence: Synthetic polypeptide
DIQMTQSPSSLSASVGDRVTITCRASQGIRKDLGWYQQKPGKAPKRLIFAASSLQSGVPSRFSGSGSGTEFTLTISSLQPEDFATYYCLQHNSYPWTFGQGTKVEIK

SEQ ID NO: 25501 - DNA, 321 bp, synthetic construct
  misc_feature 1..321: note = Description of Artificial Sequence: Synthetic polynucleotide
  source 1..321: mol_type = other DNA
gacatccagatgacccagtctccatcctccctgtctgcatctgtaggagacagagtcaccgtcacttgccgggcaagtcagggcattagagatgatttaggctggtatcagcagaaaccagggaaagcccctgagcgcctgatctatgctgcatccagtttgcaaagtggggtcccatcaaggttcagcggcagtggatctgggacagagttcactctcacaatcagcagcctgcagcctgaagattttgcaacttattactgtctacagcattatagttaccctcgcagttttggccaggggaccaagctggagatcaaa

SEQ ID NO: 25502 - protein, 107 aa, synthetic construct
  REGION 1..107: note = Description of Artificial Sequence: Synthetic polypeptide
DIQMTQSPSSLSASVGDRVTVTCRASQGIRDDLGWYQQKPGKAPERLIYAASSLQSGVPSRFSGSGSGTEFTLTISSLQPEDFATYYCLQHYSYPRSFGQGTKLEIK

SEQ ID NO: 25503 - DNA, 336 bp, synthetic construct
  misc_feature 1..336: note = Description of Artificial Sequence: Synthetic polynucleotide
  source 1..336: mol_type = other DNA
gatattgtgatgacccagactccactctctctgtccgtcacacctggacagccggcctccatctcctgcaagtctagtcagagcctcctgcatagtgaaggaaagacctatttgtattggtacctgcagaagccaggccagcctccacagctcctgatctatgaagtttccaaccggatctctggagtgccagataggttcagtggcagcgggtcagggacagatttcacactgaaaatcagccgggtggaggctgaggatgttggggtttattactgcatgcaaagtatacagcttccgctcactttcggcggagggaccaaggtggagatcaaa

SEQ ID NO: 25504 - protein, 112 aa, synthetic construct
  REGION 1..112: note = Description of Artificial Sequence: Synthetic polypeptide
DIVMTQTPLSLSVTPGQPASISCKSSQSLLHSEGKTYLYWYLQKPGQPPQLLIYEVSNRISGVPDRFSGSGSGTDFTLKISRVEAEDVGVYYCMQSIQLPLTFGGGTKVEIK

SEQ ID NO: 25505 - DNA, 339 bp, synthetic construct
  misc_feature 1..339: note = Description of Artificial Sequence: Synthetic polynucleotide
  source 1..339: mol_type = other DNA
gacatcgtgatgacccagtctccagactccctggctgtgtctctgggcgagagggccaccatcaactgcaagtccagccagagtgttttacacatctccaacaataacaattacttagcttggtaccagcagcaaccaggacagcctcctaaactgctcatttactgggcatctatccgggaatccggggtccctgaccgattcagtggcagcgggtctgggacagatttcactctcaccatcagcagcctgcaggctgaagatgtggcagtttattactgtcagcaatattatagtattccgtgcagttttggccaggggaccaagctggagatcaaa

SEQ ID NO: 25506 - protein, 113 aa, synthetic construct
  REGION 1..113: note = Description of Artificial Sequence: Synthetic polypeptide
DIVMTQSPDSLAVSLGERATINCKSSQSVLHISNNNNYLAWYQQQPGQPPKLLIYWASIRESGVPDRFSGSGSGTDFTLTISSLQAEDVAVYYCQQYYSIPCSFGQGTKLEIK

SEQ ID NO: 25507 - DNA, 339 bp, synthetic construct
  misc_feature 1..339: note = Description of Artificial Sequence: Synthetic polynucleotide
  source 1..339: mol_type = other DNA
gacatcgtgatgacccagtctccagactccctggctgtgtctctgggcgagagggccaccatcaactgcaagtccagccagagtgttttatacagctccaacaataacaactccttaacttggtaccagctgaaaccaggacagcctcctaagaagctcatttactgggcatctacccgggaatccggggtccctgaccgattcagtggcagcgggtctgggacagatttcactctcaccatcagcagcctgcaggctgaagatgtggcagtttattactgtcagcaatattatagtactcctccgacgttcggccaagggtccaaggtggaaatcaaa

SEQ ID NO: 25508 - protein, 113 aa, synthetic construct
  REGION 1..113: note = Description of Artificial Sequence: Synthetic polypeptide
DIVMTQSPDSLAVSLGERATINCKSSQSVLYSSNNNNSLTWYQLKPGQPPKKLIYWASTRESGVPDRFSGSGSGTDFTLTISSLQAEDVAVYYCQQYYSTPPTFGQGSKVEIK

SEQ ID NO: 25509 - DNA, 321 bp, synthetic construct
  misc_feature 1..321: note = Description of Artificial Sequence: Synthetic polynucleotide
  source 1..321: mol_type = other DNA
gacatccagatgacccagtctccatcctccctgtctgcatctgtaggagacagagtcaccatcacttgccgggcaagtcagagcattaccaactttttaaattggtatcagcagaaaccagggaaagcgcctaaactcctgatcttcgctgcatccagtttgcaaagtggaatcccatcaaggttcagtggcagtggatctgggacagatttcactctcaccatcagcagtctgcaacctgaagattttgcaacttactactgtcaacagagttacagtatcccgtggacgttcggccaagggaccaaggtggaaatcaaa

SEQ ID NO: 25510 - protein, 107 aa, synthetic construct
  REGION 1..107: note = Description of Artificial Sequence: Synthetic polypeptide
DIQMTQSPSSLSASVGDRVTITCRASQSITNFLNWYQQKPGKAPKLLIFAASSLQSGIPSRFSGSGSGTDFTLTISSLQPEDFATYYCQQSYSIPWTFGQGTKVEIK

SEQ ID NO: 25511 - DNA, 324 bp, synthetic construct
  misc_feature 1..324: note = Description of Artificial Sequence: Synthetic polynucleotide
  source 1..324: mol_type = other DNA
gacatccagatgacccagtctccatcctccctgtctgcatctgtaggagacagaatcaccatcacttgccgggcaagtcagggcattggaaatgatttaggctggtatcagcagaaaccagggaaagcccctgagcgcctgatctatgctgcatccagtttgcaaagtggggtcccatcaaggttcagcggcagtggatctgggacagaattcactctcacaatcagcagcctgcagcctgaagattttgcaacttattactgtctacaacataatagtttccctccgtggacgttcggccaagggaccaaggtggaaatcaaa

SEQ ID NO: 25512 - protein, 108 aa, synthetic construct
  REGION 1..108: note = Description of Artificial Sequence: Synthetic polypeptide
DIQMTQSPSSLSASVGDRITITCRASQGIGNDLGWYQQKPGKAPERLIYAASSLQSGVPSRFSGSGSGTEFTLTISSLQPEDFATYYCLQHNSFPPWTFGQGTKVEIK

SEQ ID NO: 25513 - DNA, 336 bp, synthetic construct
  misc_feature 1..336: note = Description of Artificial Sequence: Synthetic polynucleotide
  source 1..336: mol_type = other DNA
gatattgtgatgactcagtctccactctccctgcccgtcacccctggagagccggcctccatctcctgcaggtctagtcagagcctcctacatagtaatggatacaactatttggattggtacctgcagaagccagggcagtctccacagctcctgatctatttggtttctaatcgggcctccggggtccctgacaggttcagtggcagtggatcaggcacagattttacactgaaaatcagcagagtgggggctgaggatgttggggtttatttctgcctgcaagctctacaaactcctctcaccttcggccaagggacacgactggagattaaa

SEQ ID NO: 25514 - protein, 112 aa, synthetic construct
  REGION 1..112: note = Description of Artificial Sequence: Synthetic polypeptide
DIVMTQSPLSLPVTPGEPASISCRSSQSLLHSNGYNYLDWYLQKPGQSPQLLIYLVSNRASGVPDRFSGSGSGTDFTLKISRVGAEDVGVYFCLQALQTPLTFGQGTRLEIK

SEQ ID NO: 25515 - DNA, 321 bp, synthetic construct
  misc_feature 1..321: note = Description of Artificial Sequence: Synthetic polynucleotide
  source 1..321: mol_type = other DNA
gacatccagatgacccagtctccatcctccctgtctgcatatgtaggagacagagtcaccatcacttgccgggcaagtcagaacattttcagctatttaaattggtatcagcagaaaccagggaaagcccctaaggtcctgatctatgctgtatttagtttgcaaagtggggtcccatcaaggttcagtggcagtggatctgggacagatttcactctcaccatcagcagtctgcaacctgaagattttgcaacttactactgtcaacagagttacagtaccccattcactttcggccctgggaccaaagtggatatcaaa

SEQ ID NO: 25516 - protein, 107 aa, synthetic construct
  REGION 1..107: note = Description of Artificial Sequence: Synthetic polypeptide
DIQMTQSPSSLSAYVGDRVTITCRASQNIFSYLNWYQQKPGKAPKVLIYAVFSLQSGVPSRFSGSGSGTDFTLTISSLQPEDFATYYCQQSYSTPFTFGPGTKVDIK

SEQ ID NO: 25517 - DNA, 321 bp, synthetic construct
  misc_feature 1..321: note = Description of Artificial Sequence: Synthetic polynucleotide
  source 1..321: mol_type = other DNA
gacatccagatgacccagtctccatcctccctgtctgcatctgtaggagacagagtcaccatcatttgccgggcaagtcagagcattatcagttatttaaattggtatcagcagaaaccagggaaagcccctaagctcctgatctatgctacatccagtttgcaaagtggggtcccatcaaggttcagtggcagtggatctgggacagatttcactctcaccatcagcagtctgcaacctgaagattttgcaacttactactgtcaacagacttacagtcccccgctcactttcggcggagggaccaaggtggagatcaaa

SEQ ID NO: 25518 - protein, 107 aa, synthetic construct
  REGION 1..107: note = Description of Artificial Sequence: Synthetic polypeptide
DIQMTQSPSSLSASVGDRVTIICRASQSIISYLNWYQQKPGKAPKLLIYATSSLQSGVPSRFSGSGSGTDFTLTISSLQPEDFATYYCQQTYSPPLTFGGGTKVEIK

SEQ ID NO: 25519 - DNA, 321 bp, synthetic construct
  misc_feature 1..321: note = Description of Artificial Sequence: Synthetic polynucleotide
  source 1..321: mol_type = other DNA
gacatccagatgacccagtctccatcctccctgtctgcatctgtaggagacagagtcaccatcacttgccgggcaagtcagggcattagaaatgatttaggctggtatcagcagaaaccagggaaagcccctaagcgcctgatctatgctgcatcccgtttgcaaagtggggtcccatcaaggttcagcggcagtggatctgggacagaattcactctcacaatcagcagcctgcagcctgaagattttgcaacttattactgtctacagcatagtaattaccctctcactttcggcggagggaccagggttgagatcaaa

SEQ ID NO: 25520 - protein, 107 aa, synthetic construct
  REGION 1..107: note = Description of Artificial Sequence: Synthetic polypeptide
DIQMTQSPSSLSASVGDRVTITCRASQGIRNDLGWYQQKPGKAPKRLIYAASRLQSGVPSRFSGSGSGTEFTLTISSLQPEDFATYYCLQHSNYPLTFGGGTRVEIK

SEQ ID NO: 25521 - DNA, 321 bp, synthetic construct
  misc_feature 1..321: note = Description of Artificial Sequence: Synthetic polynucleotide
  source 1..321: mol_type = other DNA
gacatccatatgacccagtctccatcctccctgtctgcatctgtaggagacagagtcaccatcacttgccgggcaagtcaggacattagaaataatttaggctggtatcagcagaaaccagggaaagcccctaagcgcctgatctatactgcatccagtttgcaaagtggggtcccatcaaggttcagcggcagtggatctgggacagaattcactctcacaatcagcagcctgcagcctgaagattttgcgacttattactgtctacagtataatagttacccattcactttcggccctgggaccaaagtggatatcaaa

SEQ ID NO: 25522 - protein, 107 aa, synthetic construct
  REGION 1..107: note = Description of Artificial Sequence: Synthetic polypeptide
DIHMTQSPSSLSASVGDRVTITCRASQDIRNNLGWYQQKPGKAPKRLIYTASSLQSGVPSRFSGSGSGTEFTLTISSLQPEDFATYYCLQYNSYPFTFGPGTKVDIK

SEQ ID NO: 25523 - DNA, 321 bp, synthetic construct
  misc_feature 1..321: note = Description of Artificial Sequence: Synthetic polynucleotide
  source 1..321: mol_type = other DNA
gacatccagatgacccagtctccatcctccctgtctgcatctgtaggagacagagtcaccatcacttgccgggcaagtcagggcattagaaatgatttaggctggtatcagcagaaaccagggaaagcccctaagcgcctaatctatgctgcattcagtttgcaaagtggggtcccatcaaggttcagcggcagtggatctgggacagaattcactctcacaatcagcagcctgcagcctgaagattttgcaacttattactgtctacagcataatagttatccgctcactttcggcggagggaccaaggtggagatcaaa

SEQ ID NO: 25524 - protein, 107 aa, synthetic construct
  REGION 1..107: note = Description of Artificial Sequence: Synthetic polypeptide
DIQMTQSPSSLSASVGDRVTITCRASQGIRNDLGWYQQKPGKAPKRLIYAAFSLQSGVPSRFSGSGSGTEFTLTISSLQPEDFATYYCLQHNSYPLTFGGGTKVEIK

SEQ ID NO: 25525 - DNA, 321 bp, synthetic construct
  misc_feature 1..321: note = Description of Artificial Sequence: Synthetic polynucleotide
  source 1..321: mol_type = other DNA
gaaatagtgatgacgcagtctccagccaccctgtctgtgtctccaggggaaagagccaccctctcctgcagggccagtcagagtgttaacagcaacttagcctggtaccagcagaaacctggccaggctcccaggctcctcatctctgttgcatccaccagggccactggtatcccagccaggttcaatggcagtgggtctgggacagagttcactctcaccatcagcagcctgcagtctgaagattttgcagtttattactgtcagcagtataatgactggccgtgtagttttggccaggggaccaagctggagatcaaa

SEQ ID NO: 25526 - protein, 107 aa, synthetic construct
  REGION 1..107: note = Description of Artificial Sequence: Synthetic polypeptide
EIVMTQSPATLSVSPGERATLSCRASQSVNSNLAWYQQKPGQAPRLLISVASTRATGIPARFNGSGSGTEFTLTISSLQSEDFAVYYCQQYNDWPCSFGQGTKLEIK

SEQ ID NO: 25527 - DNA, 324 bp, synthetic construct
  misc_feature 1..324: note = Description of Artificial Sequence: Synthetic polynucleotide
  source 1..324: mol_type = other DNA
gacatccagatgacccagtctccatcctccctgtctgcatctgtaggagacagagtcaccatcacttgccgggcaagtcaggccattagaaatgatttaggctggtatcagcagaaaccagggaaagcccctaagcgcctgatctatcctgcatcccgtttgcaaagtggggtcccatcaaggttcagcggcagtggatctgggacagaattcactctcacaatcagcagcctgcagcctgaagattttgcaacttattactgtctacagtataatagttaccctccgtggacgttcggccaagggtccaaggtggaaatcaaa

SEQ ID NO: 25528 - protein, 108 aa, synthetic construct
  REGION 1..108: note = Description of Artificial Sequence: Synthetic polypeptide
DIQMTQSPSSLSASVGDRVTITCRASQAIRNDLGWYQQKPGKAPKRLIYPASRLQSGVPSRFSGSGSGTEFTLTISSLQPEDFATYYCLQYNSYPPWTFGQGSKVEIK

SEQ ID NO: 25529 - DNA, 321 bp, synthetic construct
  misc_feature 1..321: note = Description of Artificial Sequence: Synthetic polynucleotide
  source 1..321: mol_type = other DNA
gacatccagatgacccagtctccatcttccgtgtctgcatctgtaggagacagagtcaccttcacttgtcgggcgagtcaggatattagcagctggttagcctggtatcagcagaatccagggaaggcccctaaactcctgatctatgctgcatccagtttgcaaagtggggtcccatcaaggttcagcggcagtggatctgggacaaatttcactctcaccatcagcagcctccagcctgaagattttgcaacttactattgtcaacagactaacagtttccctctcactttcggcggagggaccaaggtggagatcaaa

SEQ ID NO: 25530 - protein, 107 aa, synthetic construct
  REGION 1..107: note = Description of Artificial Sequence: Synthetic polypeptide
DIQMTQSPSSVSASVGDRVTFTCRASQDISSWLAWYQQNPGKAPKLLIYAASSLQSGVPSRFSGSGSGTNFTLTISSLQPEDFATYYCQQTNSFPLTFGGGTKVEIK

SEQ ID NO: 25531 - DNA, 321 bp, synthetic construct
  misc_feature 1..321: note = Description of Artificial Sequence: Synthetic polynucleotide
  source 1..321: mol_type = other DNA
gacatcctgatgacccagtctccatcctcactgtctgcatctgtaggagacagagtcaccatcacttgtcgggcgagtcagggcattagcacttatttagcctggtttcagcagacaccagggacagcccctaagtccctgatctatgctgcatccagtttgcaaggtggggtcccatcaaagttcagcggcagtggatctgggacagatttcactctcaccatcagcagcctgcagcctgaagattttgcaacttattactgccatcagtataatagtttcccatttaagttcgggcgtgggaccaaagtggatatcaca

SEQ ID NO: 25532 - protein, 107 aa, synthetic construct
  REGION 1..107: note = Description of Artificial Sequence: Synthetic polypeptide
DILMTQSPSSLSASVGDRVTITCRASQGISTYLAWFQQTPGTAPKSLIYAASSLQGGVPSKFSGSGSGTDFTLTISSLQPEDFATYYCHQYNSFPFKFGRGTKVDIT

SEQ ID NO: 25533 - DNA, 321 bp, synthetic construct
  misc_feature 1..321: note = Description of Artificial Sequence: Synthetic polynucleotide
  source 1..321: mol_type = other DNA
gacatccagctgacccagtctccatcctccctgtctgcatctgtaggagacagagtcaccatcacttgccgggcaagtcaggacattagaaatgatttaggctggtatcagcagaggccagggaaagcccctaagcgcctgatctatcctgcatccagtttgctaagtggggtcccatcaaggttcagcggcagtggatctgggacagaattcactctcacaatcagcagcctgcagcctgaagattttgcaacttactactgtctacaggataatagttacccattcactttcggccctgggaccaaagtggatagcaaa

SEQ ID NO: 25534 - protein, 107 aa, synthetic construct
  REGION 1..107: note = Description of Artificial Sequence: Synthetic polypeptide
DIQLTQSPSSLSASVGDRVTITCRASQDIRNDLGWYQQRPGKAPKRLIYPASSLLSGVPSRFSGSGSGTEFTLTISSLQPEDFATYYCLQDNSYPFTFGPGTKVDSK

SEQ ID NO: 25535 - DNA, 321 bp, synthetic construct
  misc_feature 1..321: note = Description of Artificial Sequence: Synthetic polynucleotide
  source 1..321: mol_type = other DNA
gacatccagatgacccagtctccatcctccctgtctgtatctgtaggagacagagtcaccatcacttgccgggcaagtcagggcattagaaatgctttaggctggtatcagcagaaaccagggaaagcccctaagcgcctgatctatgctgcatccagtttgcaaagtggggtcccatcaaggttcagcggcagtggatctgggacagaattcactctcacaatcagcagcctgcagcctgaagattttgcaacttattactgtctacagcataatagttacccattcactttcggccctgggaccaaagtggatatcaaa

SEQ ID NO: 25536 - protein, 107 aa, synthetic construct
  REGION 1..107: note = Description of Artificial Sequence: Synthetic polypeptide
DIQMTQSPSSLSVSVGDRVTITCRASQGIRNALGWYQQKPGKAPKRLIYAASSLQSGVPSRFSGSGSGTEFTLTISSLQPEDFATYYCLQHNSYPFTFGPGTKVDIK

SEQ ID NO: 25537 - DNA, 321 bp, synthetic construct; identical to SEQ ID NO: 25495
  misc_feature 1..321: note = Description of Artificial Sequence: Synthetic polynucleotide
  source 1..321: mol_type = other DNA

SEQ ID NO: 25538 - protein, 107 aa, synthetic construct; identical to SEQ ID NO: 25496
  REGION 1..107: note = Description of Artificial Sequence: Synthetic polypeptide

SEQ ID NO: 25539 - DNA, 321 bp, synthetic construct
  misc_feature 1..321: note = Description of Artificial Sequence: Synthetic polynucleotide
  source 1..321: mol_type = other DNA
gaaatagtgatgacgcagtctccagccaccctgtctgtgtctccaggggaaagagccaccctctcctgcagggccagtcagagtgttagcagcagcttagcctggtaccagcagaaacctggccaggctcccaggctcctcatctatggtgcatccaccagggccactggtttcccagccaggttcaatggcagtgggtcttggacagaattcactctcaccatcagcagcctgcagtctgaagattttgcaatttattactgtcagcagtataatgactggccgtgcagttttggccaggggaccaagctggagatcaaa

SEQ ID NO: 25540 - protein, 107 aa, synthetic construct
  REGION 1..107: note = Description of Artificial Sequence: Synthetic polypeptide
EIVMTQSPATLSVSPGERATLSCRASQSVSSSLAWYQQKPGQAPRLLIYGASTRATGFPARFNGSGSWTEFTLTISSLQSEDFAIYYCQQYNDWPCSFGQGTKLEIK

SEQ ID NO: 25541 - DNA, 321 bp, synthetic construct
  misc_feature 1..321: note = Description of Artificial Sequence: Synthetic polynucleotide
  source 1..321: mol_type = other DNA
gacatccagatgacccagtctccatcctccctgtctgcatctgtaggagacagagtcaccatcacttgccgggcaagtcagggcattagaaatgatttaggctggtatctgcagaaaccagggaaagcccctaagcgcctgatctatgctgcatccagtttgctaagtggggtcccatcaaggttcagcggcagtggatctgggacagaattcactctcacaatcagcagcctgcagcctgaagattttgcaacttattactgtctacagcataatagttacccattcactttcggccctgggaccaaagtggatatcaaa

SEQ ID NO: 25542 - protein, 107 aa, synthetic construct
  REGION 1..107: note = Description of Artificial Sequence: Synthetic polypeptide
DIQMTQSPSSLSASVGDRVTITCRASQGIRNDLGWYLQKPGKAPKRLIYAASSLLSGVPSRFSGSGSGTEFTLTISSLQPEDFATYYCLQHNSYPFTFGPGTKVDIK

SEQ ID NO: 25543 - DNA, 321 bp, synthetic construct
  misc_feature 1..321: note = Description of Artificial Sequence: Synthetic polynucleotide
  source 1..321: mol_type = other DNA
gacatccagatgacccagtctccatcttccgtgtctgcatctgtaggagacagagtctccatcacttgtcgggcgagtcaggatattagcaactggttagcctggtatcagcagaaaccagggaaagcccctaagctcctgatctatgctgcatccagtttgcaaagtggggtcccatcaaggttcagcggcagtggttctgggacagatttcactctcaccatcagcagcctgcagcctgaagattttgcaacttactcttgtcaacagggtaacagtttcccattcactttcggccctgggaccaaagtggatatcaaa

SEQ ID NO: 25544 - protein, 107 aa, synthetic construct
  REGION 1..107: note = Description of Artificial Sequence: Synthetic polypeptide
DIQMTQSPSSVSASVGDRVSITCRASQDISNWLAWYQQKPGKAPKLLIYAASSLQSGVPSRFSGSGSGTDFTLTISSLQPEDFATYSCQQGNSFPFTFGPGTKVDIK

SEQ ID NO: 25545 - DNA, 321 bp, synthetic construct
  misc_feature 1..321: note = Description of Artificial Sequence: Synthetic polynucleotide
  source 1..321: mol_type = other DNA
gacatccagatgacccagtctccatcctccctgtctgcatctgtaggagacagagtcaccatcacttgccgggcaagtcaggtcattagaaatgatttaggctggtatcagcagaagccagggaaagcccctaagcgcttgatctatgctgcatccagtttgcaaagtggggtcccatcaaggttcagcggcagtggatctgggacagaattcactctcacaatcagcagcctgcagcctgaagattttgcaacttatcactgtctacagtatggtagtttcccattcactttcggccctgggaccaaagtggatatcaaa

SEQ ID NO: 25546 - protein, 107 aa, synthetic construct
  REGION 1..107: note = Description of Artificial Sequence: Synthetic polypeptide
DIQMTQSPSSLSASVGDRVTITCRASQVIRNDLGWYQQKPGKAPKRLIYAASSLQSGVPSRFSGSGSGTEFTLTISSLQPEDFATYHCLQYGSFPFTFGPGTKVDIK

SEQ ID NO: 25547 - DNA, 321 bp, synthetic construct
  misc_feature 1..321: note = Description of Artificial Sequence: Synthetic polynucleotide
  source 1..321: mol_type = other DNA
gacatccagatgacccagtctccatcttccgtgtctgcatctgtaggagacagagtcaccatcacttgtcgggcgagtcagggtattagcaggtggttagcctggtatcagcagaaaccagggaaagcccctaacctcctgatctatgctgcatccaatttgcaaagtggggtcccatcaaggttcagcggcagtggatctgggacagatttcactctcaccatcagcagcctgcagcctgaagattttgcaacttactattgtcaacaggctaacagtttcccattcactttcggccctgggaccaaagtagatatcaaa

SEQ ID NO: 25548 - protein, 107 aa, synthetic construct
  REGION 1..107: note = Description of Artificial Sequence: Synthetic polypeptide
DIQMTQSPSSVSASVGDRVTITCRASQGISRWLAWYQQKPGKAPNLLIYAASNLQSGVPSRFSGSGSGTDFTLTISSLQPEDFATYYCQQANSFPFTFGPGTKVDIK

SEQ ID NO: 25549 - DNA, 321 bp, synthetic construct
  misc_feature 1..321: note = Description of Artificial Sequence: Synthetic polynucleotide
  source 1..321: mol_type = other DNA
gaaatagtgatgacgcagtctccagccatcctgtctgtgtttccaggggaaagagccaccctctcctgcagggccagtcagagtgttagcagcgacttagcctggtaccagcagaaacctggccaggctcccaggctcctcatctatggtgcatccaccagggccactggtatgccagccaggttcagtggcggtgggtctgggacagagttcactctcaccatcagcagcctgcagtctgaacattttgcagtttattactgtcagcagtatagtaactggccattcactttcggccctgggaccaaagtggatatcaaa

SEQ ID NO: 25550 - protein, 107 aa, synthetic construct
  REGION 1..107: note = Description of Artificial Sequence: Synthetic polypeptide
EIVMTQSPAILSVFPGERATLSCRASQSVSSDLAWYQQKPGQAPRLLIYGASTRATGMPARFSGGGSGTEFTLTISSLQSEHFAVYYCQQYSNWPFTFGPGTKVDIK

SEQ ID NO: 25551 - DNA, 324 bp, synthetic construct; identical to SEQ ID NO: 25511
  misc_feature 1..324: note = Description of Artificial Sequence: Synthetic polynucleotide
  source 1..324: mol_type = other DNA

SEQ ID NO: 25552 - protein, 108 aa, synthetic construct; identical to SEQ ID NO: 25512
  REGION 1..108: note = Description of Artificial Sequence: Synthetic polypeptide

SEQ ID NO: 25553 - DNA, 321 bp, synthetic construct
  misc_feature 1..321: note = Description of Artificial Sequence: Synthetic polynucleotide
  source 1..321: mol_type = other DNA
gacatccagatgacccagtctccatcttccgtgtctgcatctgtaggagacagagtcaccatcacttgtcgggcgagtcagggtattagcaactggttagcctggtatcagcagaaaccagggaaagcccctaagctcctgatctatactgcatccagtttgcaaagtggggtcccatcaaggttcagcggcaatgaatctgggacagatttcactctcaccatcagcagcctgcagcctgaagattttgcaacttactattgtcaacaggctaacagtttcccgtggacgttcggccaagggaccaaggtggaaatcaaa

SEQ ID NO: 25554 - protein, 107 aa, synthetic construct
  REGION 1..107: note = Description of Artificial Sequence: Synthetic polypeptide
DIQMTQSPSSVSASVGDRVTITCRASQGISNWLAWYQQKPGKAPKLLIYTASSLQSGVPSRFSGNESGTDFTLTISSLQPEDFATYYCQQANSFPWTFGQGTKVEIK

SEQ ID NO: 25555 - DNA, 339 bp, synthetic construct
  misc_feature 1..339: note = Description of Artificial Sequence: Synthetic polynucleotide
  source 1..339: mol_type = other DNA
gacatcgtgatgacccagtctccagactccctgactgtgtctctgggcgagagggccaccatcaactgcaagtccagccaaagtgttttacacagctccaacaattataactacttagcttggtaccagcagagaccaggacagcctcctaagctggtcatttactgggcatctacccgggcatccggggtccctgaccgattcagtggcagcgggtctgggacagatttcactctcaccatcagcagcctgcaggctgaagatatggcagtttattactgtcagcaatattatagtactccgtggacgttcggccaagggaccaaggtggaattcaaa

SEQ ID NO: 25556 - protein, 113 aa, synthetic construct
  REGION 1..113: note = Description of Artificial Sequence: Synthetic polypeptide
DIVMTQSPDSLTVSLGERATINCKSSQSVLHSSNNYNYLAWYQQRPGQPPKLVIYWASTRASGVPDRFSGSGSGTDFTLTISSLQAEDMAVYYCQQYYSTPWTFGQGTKVEFK

SEQ ID NO: 25557 - DNA, 339 bp, synthetic construct
  misc_feature 1..339: note = Description of Artificial Sequence: Synthetic polynucleotide
  source 1..339: mol_type = other DNA
gacatcgtgatgacccagtctccagactccctggctgtgtctctgggcgagagggccaccatcaactgcaagtccagccagagtgttttattcagctccaacaattacaattacttagcttggtaccagcagaaaacaggacagcctcccaagctgatcatttactgggcatctacccgggaatccggggtccctgaccgattcagtggcagcgggtctgggacagatttcactctcaccatcagcagcctgcaggctgaagatgtggcaatttattactgtcagcaatattatagtaatccgtgtagttttggccaggggaccaagctggagatcaaa

SEQ ID NO: 25558 - protein, 113 aa, synthetic construct
  REGION 1..113: note = Description of Artificial Sequence: Synthetic polypeptide
DIVMTQSPDSLAVSLGERATINCKSSQSVLFSSNNYNYLAWYQQKTGQPPKLIIYWASTRESGVPDRFSGSGSGTDFTLTISSLQAEDVAIYYCQQYYSNPCSFGQGTKLEIK

SEQ ID NO: 25559 - DNA, 321 bp, synthetic construct
  misc_feature 1..321: note = Description of Artificial Sequence: Synthetic polynucleotide
  source 1..321: mol_type = other DNA
gaaatagtgatgacgcagtctccagccaccctgtctgtgtctccaggggaaagagccaccctctcctgcagggccagtcagagtgttagcagcgacttagcctggtaccagcagaaacctggccaggctcccaggctcctcatctatgctgcatctaccagggccactggtatcccagccaggttcagtggcagtgggtctgggacagagttcactctcaccatcagcagcctgcagtctgaagattttgcagtttattactgtcagcagtatgataactggccattcactttcggccctgggaccaaagtggataacaag

SEQ ID NO: 25560 - protein, 107 aa, synthetic construct
  REGION 1..107: note = Description of Artificial Sequence: Synthetic polypeptide
EIVMTQSPATLSVSPGERATLSCRASQSVSSDLAWYQQKPGQAPRLLIYAASTRATGIPARFSGSGSGTEFTLTISSLQSEDFAVYYCQQYDNWPFTFGPGTKVDNK

SEQ ID NO: 25561 - DNA, 321 bp, synthetic construct
  misc_feature 1..321: note = Description of Artificial Sequence: Synthetic polynucleotide
  source 1..321: mol_type = other DNA
gaaatagtgatgacgcagtctccagccaccctgtctgtgtctccaggggaaagagccaccctctcctgcagggccagtcagagtgttagcagcgacttagcctggtaccagcagagacctggccaggctcccaggctcctcatctatgctgcatctaccagggccactggtatcccagccaggttcagtggcagtgggtctgggacagagttcactctcaccatcagcagcctgcagtctgaggattttgcagtttattactgtcagcagtttaataactggccattcactttcggccctgggaccaaagtggatatcaaa

SEQ ID NO: 25562 - protein, 107 aa, synthetic construct
  REGION 1..107: note = Description of Artificial Sequence: Synthetic polypeptide
EIVMTQSPATLSVSPGERATLSCRASQSVSSDLAWYQQRPGQAPRLLIYAASTRATGIPARFSGSGSGTEFTLTISSLQSEDFAVYYCQQFNNWPFTFGPGTKVDIK

SEQ ID NO: 25563 - DNA, 321 bp, synthetic construct
  misc_feature 1..321: note = Description of Artificial Sequence: Synthetic polynucleotide
  source 1..321: mol_type = other DNA
gacatccagatgacccagtctccatcctccctgtctgcatctgtaggggacagagtcaccatcacttgccgggcaagtcagggcattagaaatgatttaggctggtttctgcagacaccagggaaagcccctaagcgcctgatctatgctgcatccagtttgctaagtggggtcccatcacggttcggcggcagtggatctgggacagaattcactctcacaatcagcagcctgcagcctgaagattttgcaacttattactgtctacagcataatagttacccattcactttcggccctgggaccaaagtggagatcaaa

SEQ ID NO: 25564 - protein, 107 aa, synthetic construct
  REGION 1..107: note = Description of Artificial Sequence: Synthetic polypeptide
DIQMTQSPSSLSASVGDRVTITCRASQGIRNDLGWFLQTPGKAPKRLIYAASSLLSGVPSRFGGSGSGTEFTLTISSLQPEDFATYYCLQHNSYPFTFGPGTKVEIK

SEQ ID NO: 25565 - DNA, 339 bp, synthetic construct
  misc_feature 1..339: note = Description of Artificial Sequence: Synthetic polynucleotide
  source 1..339: mol_type = other DNA
gacatcgtgatgacccagtctccagactccctggctgtgtctctgggcgagagggccaccatcaactgcaagtccggccagagtattttatacagctccaacaataacaactacttagcttggtaccagcagaaaccaggacagcctcctaagaaactcatttactgggcatctacccgggattccggggtccctgcccgattcagtggcagcgggtctgggacagatttcactctcaccatcagcagcctgcaggctgaagatgtggcagtttattactgtcagcaatattatagtactcctccgacgttcggccaagggtccaaggtggaaatcaaa

SEQ ID NO: 25566 - protein, 113 aa, synthetic construct
  REGION 1..113: note = Description of Artificial Sequence: Synthetic polypeptide
DIVMTQSPDSLAVSLGERATINCKSGQSILYSSNNNNYLAWYQQKPGQPPKKLIYWASTRDSGVPARFSGSGSGTDFTLTISSLQAEDVAVYYCQQYYSTPPTFGQGSKVEIK

SEQ ID NO: 25567 - DNA, 321 bp, synthetic construct
  misc_feature 1..321: note = Description of Artificial Sequence: Synthetic polynucleotide
  source 1..321: mol_type = other DNA
gaaatagtgatgacgcagtctccagccaccctgtctgtgtgtccaggggaaagagccaccctctcctgcagggccagtcagagtgttagcagctccttagcctggtaccagcagaaacctggccaggctcccaggctcctcatctatggtgcatccaccagggccactggtatcccagccaggttcagtggcagtgggtctgggacagaattcactctcaccatcagcagcctgcagtctgaagattttgcagtttattactgtcagcagtataataactggccattcactttcggccctgggaccaaagtggatatcaaa

SEQ ID NO: 25568 - protein, 107 aa, synthetic construct
  REGION 1..107: note = Description of Artificial Sequence: Synthetic polypeptide
EIVMTQSPATLSVCPGERATLSCRASQSVSSSLAWYQQKPGQAPRLLIYGASTRATGIPARFSGSGSGTEFTLTISSLQSEDFAVYYCQQYNNWPFTFGPGTKVDIK

SEQ ID NO: 25569 - DNA, 321 bp, synthetic construct
  misc_feature 1..321: note = Description of Artificial Sequence: Synthetic polynucleotide
  source 1..321: mol_type = other DNA
gacatccagatgacccagtctccatcctccctgtctgcatctgtaggagacagagtcaccatcacttgccgggcaagtcagggcattagaagtgatttagactggtatcagcagaaaccagggaaagcccctaagcgcctgatctatgctgcatccagtttgcaaagtggggtcccatcaaggttcagcggcagtggatctgggacagaattcactctcgcaatcagcagcctgcggcctgaagattttgcaacttattactgtctccagcataataatttcccattcactttcggccctgggaccaaggtggatatcaaa

SEQ ID NO: 25570 - protein, 107 aa, synthetic construct
  REGION 1..107: note = Description of Artificial Sequence: Synthetic polypeptide
DIQMTQSPSSLSASVGDRVTITCRASQGIRSDLDWYQQKPGKAPKRLIYAASSLQSGVPSRFSGSGSGTEFTLAISSLRPEDFATYYCLQHNNFPFTFGPGTKVDIK

SEQ ID NO: 25571 - DNA, 321 bp, synthetic construct
  misc_feature 1..321: note = Description of Artificial Sequence: Synthetic polynucleotide
  source 1..321: mol_type = other DNA
gaaatagtgatgacgcagtctccagccaccctgtctgtgtctccaggggaaagagccaccctctcctgcagggccagtcagagtgttagcagcgacttagtctggtaccagcagaaacctggccaggctcccaggctcctcatctatggtgtatccaccagggccactggtatcccagccaggttcagtggcagtgggtctgggacagagttcactctcaccatcagcagcctgcagtctgaagattttgcagtttattactgtcagcagtataataactggccattcactttcggccctgggaccaaagtggatatcaaa

SEQ ID NO: 25572 - protein, 107 aa, synthetic construct
  REGION 1..107: note = Description of Artificial Sequence: Synthetic polypeptide
EIVMTQSPATLSVSPGERATLSCRASQSVSSDLVWYQQKPGQAPRLLIYGVSTRATGIPARFSGSGSGTEFTLTISSLQSEDFAVYYCQQYNNWPFTFGPGTKVDIK

SEQ ID NO: 25573 - DNA, 336 bp, synthetic construct
  misc_feature 1..336: note = Description of Artificial Sequence: Synthetic polynucleotide
  source 1..336: mol_type = other DNA
gatattgtgatgacccagactccactctctctgtccgtcacccctggacagccggcctccatctcctgcaagtctagtcagagcctcctgcatagtgagggaaagacctatttgtattggtacgtgcagaagccaggccagcctccacaactcctgatctatgaagtttcctatcggttttctggagtgccagataggttcagtggcagcgggtcagggacagatttcacactgaaaatcagccgggtggaggctgaggatgttggggtttattactgcatgcaaagtatacagcttccgctcactttcggcggagggaccaaggtggagatcaaa

SEQ ID NO: 25574 - protein, 112 aa, synthetic construct
  REGION 1..112: note = Description of Artificial Sequence: Synthetic polypeptide
DIVMTQTPLSLSVTPGQPASISCKSSQSLLHSEGKTYLYWYVQKPGQPPQLLIYEVSYRFSGVPDRFSGSGSGTDFTLKISRVEAEDVGVYYCMQSIQLPLTFGGGTKVEIK

SEQ ID NO: 25575 - DNA, 339 bp, synthetic construct
  misc_feature 1..339: note = Description of Artificial Sequence: Synthetic polynucleotide
  source 1..339: mol_type = other DNA
gacatcgtgatgacccagtctccagactccctggctgtgtctctgggcgagagggccaccatcaactgcaagtccagccagagtgttttatacagctccaacaataacaactacttagcttggtaccagcagagaccaggacagcctcctaagttgctcatttactggtcatctacccgggaatccggggtccctgaccgattcagtggcagcgggtctgggacagatttcactctcaccatcagcagcctgcaggctgaagatgtggcagtttattactgtcagcaatattttagtattccgtgcagttttggccaggggaccaagctggagatcaaa

SEQ ID NO: 25576 - protein, 113 aa, synthetic construct
  REGION 1..113: note = Description of Artificial Sequence: Synthetic polypeptide
DIVMTQSPDSLAVSLGERATINCKSSQSVLYSSNNNNYLAWYQQRPGQPPKLLIYWSSTRESGVPDRFSGSGSGTDFTLTISSLQAEDVAVYYCQQYFSIPCSFGQGTKLEIK

SEQ ID NO: 25577 - DNA, 324 bp, synthetic construct
  misc_feature 1..324: note = Description of Artificial Sequence: Synthetic polynucleotide
  source 1..324: mol_type = other DNA
gaaattgtgttgacgcagtctccaggcaccctgtctttgtctccaggggaaagagccaccctctcctgctgggccagtcagagtgtttacagcagcttcttagcctggttccagcagaaatctggccaggctcccaggctcctcatctatggtgcatccagcagggccactggcatcccagacaggttcagtggcagtgggtctgggacagacttcactctcaccatcagcagactggagcctgaagattttgcagtgttttactgtcagcaatatggtacctcaccgtggacgttcggccaagggaccaaggtggaaatcaaa

SEQ ID NO: 25578 - protein, 108 aa, synthetic construct
  REGION 1..108: note = Description of Artificial Sequence: Synthetic polypeptide
EIVLTQSPGTLSLSPGERATLSCWASQSVYSSFLAWFQQKSGQAPRLLIYGASSRATGIPDRFSGSGSGTDFTLTISRLEPEDFAVFYCQQYGTSPWTFGQGTKVEIK

SEQ ID NO: 25579 - DNA, 324 bp, synthetic construct
  misc_feature 1..324: note = Description of Artificial Sequence: Synthetic polynucleotide
  source 1..324: mol_type = other DNA
gacatccagatgacccagtctccatcctccctgtctgcatctgtaggagacagagtcaccatcacttgccgggcaagtcagagcattatcagctatttaaattggtatcagcagaaaccagggaaagcccctaaactcctgatctatggtgcatccagtttgcagagtggggtcccatcaaggttcagtggcagtggatccgggacagatttcactctcaccatcagcagtctgcaacctgaagattttgcaacttactactgtcaacagagttacagtacccctatgttcagttttggccaggggaccaagctggagatcaaa

SEQ ID NO: 25580 - protein, 108 aa, synthetic construct
  REGION 1..108: note = Description of Artificial Sequence: Synthetic polypeptide
DIQMTQSPSSLSASVGDRVTITCRASQSIISYLNWYQQKPGKAPKLLIYGASSLQSGVPSRFSGSGSGTDFTLTISSLQPEDFATYYCQQSYSTPMFSFGQGTKLEIK

SEQ ID NO: 25581 - DNA, 324 bp, synthetic construct
  misc_feature 1..324: note = Description of Artificial Sequence: Synthetic polynucleotide
  source 1..324: mol_type = other DNA
gaaattgtgttgacgcagtctccaggcaccctgtctttgtctccaggggaaagagccaccctctcctgcagggccagtcagagtgttagcagcatctacttagcctggttcctgcagaaacctggccaggctcccaggctcctcatctatggtgcatccagcagggccactggcatcccagacaggttcagtggcagtgggtctgggacagacttcactctgaccatcagcagactggagcctgaagattttgcagtgtattactgtcaccagtatggtaactcaccattcactttcggccctgggaccaaagtggatttcaaa

SEQ ID NO: 25582 - protein, 108 aa, synthetic construct
  REGION 1..108: note = Description of Artificial Sequence: Synthetic polypeptide
EIVLTQSPGTLSLSPGERATLSCRASQSVSSIYLAWFLQKPGQAPRLLIYGASSRATGIPDRFSGSGSGTDFTLTISRLEPEDFAVYYCHQYGNSPFTFGPGTKVDFK

SEQ ID NO: 25583 - DNA, 321 bp, synthetic construct
  misc_feature 1..321: note = Description of Artificial Sequence: Synthetic polynucleotide
  source 1..321: mol_type = other DNA
gacatccagatgacccagtctccatcctccctgtctgcatctgtaggagacagagtcaccatcacttgccgggcaagtcagggcattagaaatgatttaggctggtatcagcagaaaccagggaaagcccctaagcgcctgatctatgctgcatccagtttgcaaagtggggtcccatcaaggttcagcggcagtggatctgggacagaattcactctcacaatcagcagcctgcagcctgaagattttgcaacttattactgtctacagcataatagttacccgctcactttcggcggagggaccagggtggagatcaaa

SEQ ID NO: 25584 - protein, 107 aa, synthetic construct
  REGION 1..107: note = Description of Artificial Sequence: Synthetic polypeptide
DIQMTQSPSSLSASVGDRVTITCRASQGIRNDLGWYQQKPGKAPKRLIYAASSLQSGVPSRFSGSGSGTEFTLTISSLQPEDFATYYCLQHNSYPLTFGGGTRVEIK

SEQ ID NO: 25585 - DNA, 321 bp, synthetic construct
  misc_feature 1..321: note = Description of Artificial Sequence: Synthetic polynucleotide
  source 1..321: mol_type = other DNA
gacatccagatgacccagtctccatcctccctgtctgcatctgtaggagacagagtcaccatcacttgccgggcaagtcagggcattagaaatgatttaggctggtatcagcagaaaccagggaaagcccctaagcgcctgatctattctgcatccagtttacaaagtggggtcccatcaaggttcagcggcagtggatctgggacagaattcactctcacaatcagcagcctgcagcctgaagattttgcaacttattactgtctacagcataatagttacccgtggacgttcggccaagggaccaaggtggaaatcaaa

SEQ ID NO: 25586 - protein, 107 aa, synthetic construct
  REGION 1..107: note = Description of Artificial Sequence: Synthetic polypeptide
DIQMTQSPSSLSASVGDRVTITCRASQGIRNDLGWYQQKPGKAPKRLIYSASSLQSGVPSRFSGSGSGTEFTLTISSLQPEDFATYYCLQHNSYPWTFGQGTKVEIK

SEQ ID NO: 25587 - DNA, 321 bp, synthetic construct
  misc_feature 1..321: note = Description of Artificial Sequence: Synthetic polynucleotide
  source 1..321: mol_type = other DNA
gacatccagatgacccagtctccatcctccctgtctgcatctgtaggagacagagtcaccatcacttgccgggcaagtcagagcattagcagctatttaaattggtatcagcagaaaccagggaaagcccctaagctcctgatctatgctgcatccagtttgcaaagtggggtcccatcaaggttcagtggcagtggatctgggacagatttcactctcaccatcagcagtctgcaacctgaagattttgcaacttacttctgtcaacagagtttcagtaattcgatcaccttcggccaagggacacgactggagattaaa

SEQ ID NO: 25588 - protein, 107 aa, synthetic construct
  REGION 1..107: note = Description of Artificial Sequence: Synthetic polypeptide
DIQMTQSPSSLSASVGDRVTITCRASQSISSYLNWYQQKPGKAPKLLIYAASSLQSGVPSRFSGSGSGTDFTLTISSLQPEDFATYFCQQSFSNSITFGQGTRLEIK

SEQ ID NO: 25589 - DNA, 321 bp, synthetic construct
  misc_feature 1..321: note = Description of Artificial Sequence: Synthetic polynucleotide
  source 1..321: mol_type = other DNA
gacatccagatgacccagtctccatcctccctgtctgcatctgtaggagacagagtcaccatcacttgccgggcaagtcaggacattagaaatgatttaggctggtatcagcagcacccagggaaagcccctaagcgcctgatctatgctgcatccagtttacaaagtggggtcccatcaaggttcagcggcactagatctgggacagaattcactctcacaatcagcagcctgcagcctgaagattttgcaacttattactgtctacagcataatagttacccgtggacgttcggccaagggaccaaggtggaaatcaaa

SEQ ID NO: 25590 - protein, 107 aa, synthetic construct
  REGION 1..107: note = Description of Artificial Sequence: Synthetic polypeptide
DIQMTQSPSSLSASVGDRVTITCRASQDIRNDLGWYQQHPGKAPKRLIYAASSLQSGVPSRFSGTRSGTEFTLTISSLQPEDFATYYCLQHNSYPWTFGQGTKVEIK

SEQ ID NO: 25591 - DNA, 339 bp, synthetic construct
  misc_feature 1..339: note = Description of Artificial Sequence: Synthetic polynucleotide
  source 1..339: mol_type = other DNA
gacatcgtgatgacccagtttccagactccctggctgtgtctctgggcgagagggccaccatcaactgcaagtccagccagactgttttatacaggtccaacaattacaactacttagcttggtaccagcagaaaccaggacagcctcctaagctgctcatttactgggcatctacccgggaatccggggtccctgaccgattcagtggcagcgggtctgggacagatttcactctcaccatcagcagcctgcaggctgaagatgtggcagtttattactgtcagcaatattttagtactcctccgacgttcggccaagggaccaaggtggaaatcaaa

SEQ ID NO: 25592 - protein, 113 aa, synthetic construct
  REGION 1..113: note = Description of Artificial Sequence: Synthetic polypeptide
DIVMTQFPDSLAVSLGERATINCKSSQTVLYRSNNYNYLAWYQQKPGQPPKLLIYWASTRESGVPDRFSGSGSGTDFTLTISSLQAEDVAVYYCQQYFSTPPTFGQGTKVEIK

SEQ ID NO: 25593 - DNA, 321 bp, synthetic construct
  misc_feature 1..321: note = Description of Artificial Sequence: Synthetic polynucleotide
  source 1..321: mol_type = other DNA
gacatccagatgacccagtctccatcctccctgtctgcatctgtaggagacagagtcaccatcacttgccgggcaagtcagagcattttcagctatttaaattggtatcagcagaatccggggaaagcccctaagctcctgatctatgcgtcatccagtttgcaaagtggggtcccatcaaggttaagtggcaatggatctgggacagatttcattctcaccatcagcagtctgcaacctgaagattttgcaacttactactgtcaacagagttacagtaccccattcactttcggccctgggaccagagtggatatcaaa

SEQ ID NO: 25594 - protein, 107 aa, synthetic construct
  REGION 1..107: note = Description of Artificial Sequence: Synthetic polypeptide
DIQMTQSPSSLSASVGDRVTITCRASQSIFSYLNWYQQNPGKAPKLLIYASSSLQSGVPSRLSGNGSGTDFILTISSLQPEDFATYYCQQSYSTPFTFGPGTRVDIK

SEQ ID NO: 25595 - DNA, 321 bp, synthetic construct
  misc_feature 1..321: note = Description of Artificial Sequence: Synthetic polynucleotide
  source 1..321: mol_type = other DNA
gacatccagatgacccagtctccatcctccctgtctgcatctgtaggagacagagtcatcatctcttgccgggcaagtcagagcattttcagctatttaaattggtatcaggtgaaaccagggaaagcccctaagctcctgatctatgatacatccactttgcaaactggggtcccatcaaggttcagtggcagtggatctgggacagatttcactctcaccatcaacagtctgcaacctgaagattttgcaacttactactgtcaacagagttacggtatccccatcaccttcggccaagggacacgactggagattcaa

SEQ ID NO: 25596 - protein, 107 aa, synthetic construct
  REGION 1..107: note = Description of Artificial Sequence: Synthetic polypeptide
DIQMTQSPSSLSASVGDRVIISCRASQSIFSYLNWYQVKPGKAPKLLIYDTSTLQTGVPSRFSGSGSGTDFTLTINSLQPEDFATYYCQQSYGIPITFGQGTRLEIQ

SEQ ID NO: 25597 - DNA, 321 bp, synthetic construct
  misc_feature 1..321: note = Description of Artificial Sequence: Synthetic polynucleotide
  source 1..321: mol_type = other DNA
gacatccagatgacccagtctccatcctcactgtctgcatctgtaggagacagagtcaccatcacttgtcgggcgagtcagggcattagcaattatttagcctggtttcagcagaaaccagggaaagcccataagtccctgatctatgctgcatccagtttgcaaagtggggtcccatcaaagttcagcggcagtggatctgggacagatttcactctcaccatcagcagcctgcagcctgaagattttgcaacttattactgccaacaatatcatagttacccattcactttcggccctgggaccaaagtggatatcaga

SEQ ID NO: 25598 - protein, 107 aa, synthetic construct
  REGION 1..107: note = Description of Artificial Sequence: Synthetic polypeptide
DIQMTQSPSSLSASVGDRVTITCRASQGISNYLAWFQQKPGKAHKSLIYAASSLQSGVPSKFSGSGSGTDFTLTISSLQPEDFATYYCQQYHSYPFTFGPGTKVDIR

SEQ ID NO: 25599 - DNA, 321 bp, synthetic construct
  misc_feature 1..321: note = Description of Artificial Sequence: Synthetic polynucleotide
  source 1..321: mol_type = other DNA
gacatccagatgacccagtctccatcttccgtgtctgcatctgtcggagacagagtcaccatcacttgtcgggcgagtcagggtattagcagctggttagcctggtatcagcagaaaccagggaaagcccctaacctcctgatctatgctgcatccagtttgcaaagtggggtcccatcaaggttcagcggcagtggatctgggacagatttcacgctcaccatcagcggcctgcagcctgaagattttgcaacttacttttgtcaacagattaacagtttccctctcactttcggcggagggaccaaggtggcgatcaaa

SEQ ID NO: 25600 - protein, 107 aa, synthetic construct
  REGION 1..107: note = Description of Artificial Sequence: Synthetic polypeptide
DIQMTQSPSSVSASVGDRVTITCRASQGISSWLAWYQQKPGKAPNLLIYAASSLQSGVPSRFSGSGSGTDFTLTISGLQPEDFATYFCQQINSFPLTFGGGTKVAIK

SEQ ID NO: 25601 - DNA, 321 bp, synthetic construct
  misc_feature 1..321: note = Description of Artificial Sequence: Synthetic polynucleotide
  source 1..321: mol_type = other DNA
gacatccagatgacccagtctccgtcctccctgtctacatctgtaggagacagagtcaccatcacttgccgggcaagtcagagcattttcagctatttacattggtatcagcagaaaccagggaaagcccctaagctcctgatctctgctgcatccagtttacaaagtggggtcccatcaaggttcagtggcagtggatctgggacagatttcactctcaccatcagtagtctgcaacctgaagattttgcaactttctactgtcaacagacttacagtcccccgctcactttcggcggagggaccaaggtggagatcaaa

SEQ ID NO: 25602 - protein, 107 aa, synthetic construct
  REGION 1..107: note = Description of Artificial Sequence: Synthetic polypeptide
DIQMTQSPSSLSTSVGDRVTITCRASQSIFSYLHWYQQKPGKAPKLLISAASSLQSGVPSRFSGSGSGTDFTLTISSLQPEDFATFYCQQTYSPPLTFGGGTKVEIK

SEQ ID NO: 25603 - DNA, 321 bp, synthetic construct
  misc_feature 1..321: note = Description of Artificial Sequence: Synthetic polynucleotide
  source 1..321: mol_type = other DNA
gacatccagatgacccagtctccatcctccctgtctgcatctgtaggagacagagtcaccatcacttgccgggcaagtcagggcattagaaatgatttaggctggtatcagcagaaaccagggaaagcccctaagcgcctgatctatgctgcatccagtttgcaaagtggggtcccatcacggttcagcggcagtaaatctgggacagaattcactctcacaatcagcagcttgcagcctgaagatcttgcaacttattactgtctacagcataatagttacccgctcactttcggcggagggaccaaggtggagatcaaa

SEQ ID NO: 25604 - protein, 107 aa, synthetic construct
  REGION 1..107: note = Description of Artificial Sequence: Synthetic polypeptide
DIQMTQSPSSLSASVGDRVTITCRASQGIRNDLGWYQQKPGKAPKRLIYAASSLQSGVPSRFSGSKSGTEFTLTISSLQPEDLATYYCLQHNSYPLTFGGGTKVEIK

SEQ ID NO: 25605 - DNA, 321 bp, synthetic construct
  misc_feature 1..321: note = Description of Artificial Sequence: Synthetic polynucleotide
  source 1..321: mol_type = other DNA
gacatccagatgacccagtctccatcctccctgtctgcatctgtaggagacagagtcaccatcacttgccgggcaagtcagggcattagaaatgatttaggctggtatcagcagaaaccagggaaagcccctaaacgcctgatctatgctgcatccagtttgcaaagtggggtcccatcaaggttcagcggcagtggatctgggacagaattcactctcacaatcagcagcctacagcctgaagatcttgcaacttattactgtctacagcattatagttaccctcggacgttcggccaagggaccaaggtggaaatcaaa

SEQ ID NO: 25606 - protein, 107 aa, synthetic construct
  REGION 1..107: note = Description of Artificial Sequence: Synthetic polypeptide
DIQMTQSPSSLSASVGDRVTITCRASQGIRNDLGWYQQKPGKAPKRLIYAASSLQSGVPSRFSGSGSGTEFTLTISSLQPEDLATYYCLQHYSYPRTFGQGTKVEIK

SEQ ID NO: 25607 - DNA, 321 bp, synthetic construct
  misc_feature 1..321: note = Description of Artificial Sequence: Synthetic polynucleotide
  source 1..321: mol_type = other DNA
gacatccagatgacccagtctccatcctccctgtctgcatctgtaggagacagagtcaccatcacttgccgggcaagtcagaacattaagaaatatttaaattggtatcagcagaaaccagggaaagcccctaagttcctgatctatggtgcatccagtttgcaaagtggggtcccatcaaggttcagtggcagtggatctgggacagatttcactctcaccatcagtagtctgcaacctgaagattttgcagcttactactgtcaacagagttacaatatttcgttcactttcggcggagggaccaaggtggagctcaaa

SEQ ID NO: 25608 - protein, 107 aa, synthetic construct
  REGION 1..107: note = Description of Artificial Sequence: Synthetic polypeptide
DIQMTQSPSSLSASVGDRVTITCRASQNIKKYLNWYQQKPGKAPKFLIYGASSLQSGVPSRFSGSGSGTDFTLTISSLQPEDFAAYYCQQSYNISFTFGGGTKVELK

SEQ ID NO: 25609 - DNA, 321 bp, synthetic construct
  misc_feature 1..321: note = Description of Artificial Sequence: Synthetic polynucleotide
  source 1..321: mol_type = other DNA
gacatccagatgacccagtctccatcctccctgtctgcagctgtaggagacagagtcaccatcacttgccgggcaagtcagggcattagaaatgatttaggctggtatcagcagaaaccagggaaagcccctaagtgcctgatctatgctgcatccagtttgcaaagtggggtcccatcaaggttcagcggcagtggatctgggacagaattcactctcacaatcagcagcctgcagcctgaagattttgcaacttattattgtctacaccattatagttaccctcggacgttcggccaagggaccaaggtggaaatcaaa

SEQ ID NO: 25610 - protein, 107 aa, synthetic construct
  REGION 1..107: note = Description of Artificial Sequence: Synthetic polypeptide
DIQMTQSPSSLSAAVGDRVTITCRASQGIRNDLGWYQQKPGKAPKCLIYAASSLQSGVPSRFSGSGSGTEFTLTISSLQPEDFATYYCLHHYSYPRTFGQGTKVEIK

SEQ ID NO: 25611 - DNA, 336 bp, synthetic construct
  misc_feature 1..336: note = Description of Artificial Sequence: Synthetic polynucleotide
  source 1..336: mol_type = other DNA
gaaattgtgatgacccagactccactctctctgtccgtcacccctggacagccggcctccatctcctgcaagtctagtcagagcctccttcatggtgatggaaagacctatttgttttggtacctgcagaagccaggccagcctccacaggtcctgatctatgaagtttccaaccggttgtgtggagtgccagacaggttcagtggcagcgggtcagggacagatttctcattgaaaatcagccgggtggaggctgaggacgttggggtttattactgcatgcaaagtatacaggttccgtggacgttcggccaagggaccaaggtggaaatcaca

SEQ ID NO: 25612 - protein, 112 aa, synthetic construct
  REGION 1..112: note = Description of Artificial Sequence: Synthetic polypeptide
EIVMTQTPLSLSVTPGQPASISCKSSQSLLHGDGKTYLFWYLQKPGQPPQVLIYEVSNRLCGVPDRFSGSGSGTDFSLKISRVEAEDVGVYYCMQSIQVPWTFGQGTKVEIT

SEQ ID NO: 25613 - DNA, 321 bp, synthetic construct
  misc_feature 1..321: note = Description of Artificial Sequence: Synthetic polynucleotide
  source 1..321: mol_type = other DNA
gacatccagatgacccagtctccatcttccgtgtctgcatctgtaggagacagagtcaccatcacttgtcgggcgagtcagggtattagcagctggttagcctggtatcagcagaaaccagggaaagcccttaagctcttgatctatgctgcatccagtttgcaaagtggggtcccatcaaggttcagcggcagtggatctgggacagatttcactctcaccatcagcagcctgcagcctgaagattttgcaacttactattgtcaacagattaacagtttccctctcactttcggcggagggaccaaggtggagatcaaa

SEQ ID NO: 25614 - protein, 107 aa, synthetic construct
  REGION 1..107: note = Description of Artificial Sequence: Synthetic polypeptide
DIQMTQSPSSVSASVGDRVTITCRASQGISSWLAWYQQKPGKALKLLIYAASSLQSGVPSRFSGSGSGTDFTLTISSLQPEDFATYYCQQINSFPLTFGGGTKVEIK

SEQ ID NO: 25615 - DNA, 321 bp, synthetic construct
  misc_feature 1..321: note = Description of Artificial Sequence: Synthetic polynucleotide
  source 1..321: mol_type = other DNA
gacatccagatgacccagtctccatcctccctgtctgcatctgtaggagacagagtcaccatcacttgccgggcaagtcagggcattagaaatgatttaggctggtatcagcagaaaccagggaaagcccctacacgcctgatctatactgcatccactttgcaaagtggggtcccatcaaggttcagcggcagtggatctgggacagaattcactctcacaatcagcagcctgcagcctgaagattttgcaacttattactgtctacagcataatggttacccattcactttcggccctgggaccaaagtggatatcaaa

SEQ ID NO: 25616 - protein, 107 aa, synthetic construct
  REGION 1..107: note = Description of Artificial Sequence: Synthetic polypeptide
DIQMTQSPSSLSASVGDRVTITCRASQGIRNDLGWYQQKPGKAPTRLIYTASTLQSGVPSRFSGSGSGTEFTLTISSLQPEDFATYYCLQHNGYPFTFGPGTKVDIK

SEQ ID NO: 25617 - DNA, 321 bp, synthetic construct
  misc_feature 1..321: note = Description of Artificial Sequence: Synthetic polynucleotide
  source 1..321: mol_type = other DNA
gacatccagatgacccagtctccatcctccctgtctgcatctgtaggagacagagtcaccatcacttgccgggcgagtcaggacattagcaattatttaaattggtatcagcagaaaccagggacagcccctaacctcctgatctctgatgcatccattttggaaacaggggtcccatcaacgttcagtggaagtggatctgggacagattttactttcaccatcagcagcctgcagcctgaagatattgcaacatattactgtcaacagagtgataatctcccgtgcagttttggccaggggaccaaggtggagatcaaa

SEQ ID NO: 25618 - protein, 107 aa, synthetic construct
  REGION 1..107: note = Description of Artificial Sequence: Synthetic polypeptide
DIQMTQSPSSLSASVGDRVTITCRASQDISNYLNWYQQKPGTAPNLLISDASILETGVPSTFSGSGSGTDFTFTISSLQPEDIATYYCQQSDNLPCSFGQGTKVEIK

SEQ ID NO: 25619 - DNA, 321 bp, synthetic construct
  misc_feature 1..321: note = Description of Artificial Sequence: Synthetic polynucleotide
  source 1..321: mol_type = other DNA
gacatccagatgacccagtctccctcttccgtgtctgcatctgtaggagacagagtcaccatcacttgtcgggcgagtcagaatattaccacctggttagcctggtatcagcagaaaccagggaaagcccctaaactcctgatctctgctgcatccagtttgcaaagtggggtcccatcaaggttcagcggcagtggatctgggacagatttcactctcaccatcagcagcctgcagcctgaagattttgcaacttatatttgtcaacaggctaacagttttccattcactttcggccctgggaccaaactggatatcaaa

SEQ ID NO: 25620 - protein, 107 aa, synthetic construct
  REGION 1..107: note = Description of Artificial Sequence: Synthetic polypeptide
DIQMTQSPSSVSASVGDRVTITCRASQNITTWLAWYQQKPGKAPKLLISAASSLQSGVPSRFSGSGSGTDFTLTISSLQPEDFATYICQQANSFPFTFGPGTKLDIK

SEQ ID NO: 25621 - DNA, 321 bp, synthetic construct
  misc_feature 1..321: note = Description of Artificial Sequence: Synthetic polynucleotide
  source 1..321: mol_type = other DNA
gacatccagttgacccagtctccatcctccctgtctgcatctgtaggagacagagtcaccatcacttgccgggcgagtcaggtcattagcagttatttacattggtatcagcagaaaccagggaaagttcctaaggtcctgatctatagtgcatccaatttgcaatgtggagtcccatctcggttcagcggcagtggatctgggacagatttcactctcaccttcagcagcctgcagcctgaagatgttgcaacttattacggtcaacggccttacaatgccccgctcactttcggcggagggaccaaggtggagatcaaa

SEQ ID NO: 25622 - protein, 107 aa, synthetic construct
  REGION 1..107: note = Description of Artificial Sequence: Synthetic polypeptide
DIQLTQSPSSLSASVGDRVTITCRASQVISSYLHWYQQKPGKVPKVLIYSASNLQCGVPSRFSGSGSGTDFTLTFSSLQPEDVATYYGQRPYNAPLTFGGGTKVEIK

SEQ ID NO: 25623 - DNA, 321 bp, synthetic construct
  misc_feature 1..321: note = Description of Artificial Sequence: Synthetic polynucleotide
  source 1..321: mol_type = other DNA
gacatccagatgacccagtctccatcctccgtgtctgcatctgtaggagacagagtcaccatcacttgtcgggcgagtcagggtattagcagctggttagcctggtatcagcagaaaccagggaaagcccctaagctcttgatctatgctgcatccagtttgcaaagtggggtcccatcaaggttcagcggcagtggatctgggacagatttcactctcaccatcagcagcctgcagcctgaagattttgcaactttctattgtcaacaggttaacagtttccctctcactttcggcggagggaccaaggtggagatcaaa

SEQ ID NO: 25624 - protein, 107 aa, synthetic construct
  REGION 1..107: note = Description of Artificial Sequence: Synthetic polypeptide
DIQMTQSPSSVSASVGDRVTITCRASQGISSWLAWYQQKPGKAPKLLIYAASSLQSGVPSRFSGSGSGTDFTLTISSLQPEDFATFYCQQVNSFPLTFGGGTKVEIK

SEQ ID NO: 25625 - DNA, 321 bp, synthetic construct
  misc_feature 1..321: note = Description of Artificial Sequence: Synthetic polynucleotide
  source 1..321: mol_type = other DNA
gacatccagatgacccagtctccgtcctcactatctgcatctgtaggagacagagtcaccatcacttgtcgggcgagtcaggacattaacaattatttagcctggtttcagcagaaaccagggaaagcccctaggtccctaatttatgctgcatccagtttgcacagtggggtcccatcacagttcagcgccagtggttctgggtcagatttcactcttactatcagcagcctgcagcctgaagattttgcaacttattactgcccactgtataaaagttatccactcacttttggccctgggaccaaagtggatatcaaa

SEQ ID NO: 25626 - protein, 107 aa, synthetic construct
  REGION 1..107: note = Description of Artificial Sequence: Synthetic polypeptide
DIQMTQSPSSLSASVGDRVTITCRASQDINNYLAWFQQKPGKAPRSLIYAASSLHSGVPSQFSASGSGSDFTLTISSLQPEDFATYYCPLYKSYPLTFGPGTKVDIK

SEQ ID NO: 25627 - DNA, 321 bp, synthetic construct
  misc_feature 1..321: note = Description of Artificial Sequence: Synthetic polynucleotide
  source 1..321: mol_type = other DNA
gaaatagtgatgacgcagtctccagtcaccctgtttgtgtctccaggggaaagagccaccctctcctgcagggccagtcagagtgttaacagcaacttagcctggtaccagcagaaacctggccaggctcccaggctcctcatctatggtgcatccaccagggccactggtatcccagccaggttcaatggcagtgggtctgggacagagttcactctcaccatcagcagcctgcagtctgaagattttgcagtttattattgtcagcagtataatgactggccgtgcagttttggcctggagaccaagctggagatcaaa

SEQ ID NO: 25628 - protein, 107 aa, synthetic construct
  REGION 1..107: note = Description of Artificial Sequence: Synthetic polypeptide
EIVMTQSPVTLFVSPGERATLSCRASQSVNSNLAWYQQKPGQAPRLLIYGASTRATGIPARFNGSGSGTEFTLTISSLQSEDFAVYYCQQYNDWPCSFGLETKLEIK

SEQ ID NO: 25629 - DNA, 321 bp, synthetic construct
  misc_feature 1..321: note = Description of Artificial Sequence: Synthetic polynucleotide
  source 1..321: mol_type = other DNA
gacatccagatgacccagtctccatcctctctgtctgcatctgtaggagacagagtcaccatcacttgtcgggcgagtcaggacattagcacttatttagcctggtttcagcagaaaccagggaaagcccctaagtcactgatctatgctgcatccagtttgcaaagtggggtcccatcaaagttcagcggcagtggatctgggacagatttcactctcaccatcagtagcctgcagcctgaagattttgcaacttattactgccaacagtataatagtttccctctcactttcggcggagggaccaaggtggagatcaaa

SEQ ID NO: 25630 - protein, 107 aa, synthetic construct
  REGION 1..107: note = Description of Artificial Sequence: Synthetic polypeptide
DIQMTQSPSSLSASVGDRVTITCRASQDISTYLAWFQQKPGKAPKSLIYAASSLQSGVPSKFSGSGSGTDFTLTISSLQPEDFATYYCQQYNSFPLTFGGGTKVEIK

SEQ ID NO: 25631 - DNA, 321 bp, synthetic construct
  misc_feature 1..321: note = Description of Artificial Sequence: Synthetic polynucleotide
  source 1..321: mol_type = other DNA
gacatccagatgacccagtctccatcttccgtgtctgcatctgtaggagacagagtcaccatcacttgtcgggcgagtcagggtattagcagctggttagcctggtatcagcagaaaccagggaaagcccttaagctcttgatctatgctgcatccagtttgcaaagtggggtcccatcaaggttcagcggcagtggatctgggacagatttcactctcaccatcagcagcctgcagcctgaagattttgcaacttactattgtcaacagactaacagtttccctctcactttcggcggagggaccaaggtggagatcaaa

SEQ ID NO: 25632 - protein, 107 aa, synthetic construct
  REGION 1..107: note = Description of Artificial Sequence: Synthetic polypeptide
DIQMTQSPSSVSASVGDRVTITCRASQGISSWLAWYQQKPGKALKLLIYAASSLQSGVPSRFSGSGSGTDFTLTISSLQPEDFATYYCQQTNSFPLTFGGGTKVEIK

SEQ ID NO: 25633 - DNA, 321 bp, synthetic construct
  misc_feature 1..321: note = Description of Artificial Sequence: Synthetic polynucleotide
  source 1..321: mol_type = other DNA
gacatccagatgacccagtctccatcttccgtgtctgcatctgtaggggacagagtcaccatcacttgtcgggcgagtcagggtattagcagctggttagcctggtatcagcagaaaccagggaaagcccctaagctcttgatctatgctgcatccagtttgcaaagtggggtcccttcaaggttcagcggcagtggatctgggacagatttcactctcaccatcagcagcctgcagcctgaagattttgcaacttactattgtcaacagattaatagtttccctctcactttcggcggagggaccaaggtggagatcaaa

SEQ ID NO: 25634 - protein, 107 aa, synthetic construct
  REGION 1..107: note = Description of Artificial Sequence: Synthetic polypeptide
DIQMTQSPSSVSASVGDRVTITCRASQGISSWLAWYQQKPGKAPKLLIYAASSLQSGVPSRFSGSGSGTDFTLTISSLQPEDFATYYCQQINSFPLTFGGGTKVEIK

SEQ ID NO: 25635 - DNA, 321 bp, synthetic construct
  misc_feature 1..321: note = Description of Artificial Sequence: Synthetic polynucleotide
  source 1..321: mol_type = other DNA
gacatccagttgacccagtctccatcctccctgtctgcatctgtaggagacagagtcaccatcactcgccgggcgagtcagggcattagcaattatttacattggtatcagcagaaaccagggaaagctcctaagctcttgatctattgtgcatccaatttacaatgtggagtcccatcacggttcagcggcagtggatctgggacagatttcactctcacaatcagcagcctgcagcctgaagatgttgcaacttattactgtcaacagcataataattccccgctcactttcggcggagggaccaaggtggagatcaaa

SEQ ID NO: 25636 - protein, 107 aa, synthetic construct
  REGION 1..107: note = Description of Artificial Sequence: Synthetic polypeptide
DIQLTQSPSSLSASVGDRVTITRRASQGISNYLHWYQQKPGKAPKLLIYCASNLQCGVPSRFSGSGSGTDFTLTISSLQPEDVATYYCQQHNNSPLTFGGGTKVEIK

SEQ ID NO: 25637 - DNA, 321 bp, synthetic construct
  misc_feature 1..321: note = Description of Artificial Sequence: Synthetic polynucleotide
  source 1..321: mol_type = other DNA
gacatccagatgacccagtctccatcctccctgtctgcatctgtaggagacagagtcaccatcacttgccgggcaagtcagaacattttcagctatttaaattggtatcagcagaaaccagggaaagcccctaaactcctgatctttgctgcatccagtttacaaagtggggtcccatcaaggttcagtggcagtggatctgggacagatttcactctcaccatcagcagtctgcaacctgaggactttgcaacttactactgtcaacagacttacagtgtccctttcactttcggccctgggactaaggtggatttcaaa

SEQ ID NO: 25638 - protein, 107 aa, synthetic construct
  REGION 1..107: note = Description of Artificial Sequence: Synthetic polypeptide
DIQMTQSPSSLSASVGDRVTITCRASQNIFSYLNWYQQKPGKAPKLLIFAASSLQSGVPSRFSGSGSGTDFTLTISSLQPEDFATYYCQQTYSVPFTFGPGTKVDFK

SEQ ID NO: 25639 - DNA, 321 bp, synthetic construct
  misc_feature 1..321: note = Description of Artificial Sequence: Synthetic polynucleotide
  source 1..321: mol_type = other DNA
gacatccagatgacccagtctccatcctccctgtctgcatctgtaggagacagagtcaccatcacttgccgggcaagtcaggacattagaaatgttttaggctggtatcagcagaaaccagggaaagcccctaagcgcctgatctatactgcatccagtttacaaagtggggtcccatcagggttcagcggcagtggatctgggacagaattcactctcacaatcagcagcctgcagcctgaagattttgcaacttattactgtctacagtataatagttacccattcactttcggccctgggaccaaagtggatatcaaa

SEQ ID NO: 25640 - protein, 107 aa, synthetic construct
  REGION 1..107: note = Description of Artificial Sequence: Synthetic polypeptide
DIQMTQSPSSLSASVGDRVTITCRASQDIRNVLGWYQQKPGKAPKRLIYTASSLQSGVPSGFSGSGSGTEFTLTISSLQPEDFATYYCLQYNSYPFTFGPGTKVDIK

SEQ ID NO: 25641 - DNA, 324 bp, synthetic construct
  misc_feature 1..324: note = Description of Artificial Sequence: Synthetic polynucleotide
  source 1..324: mol_type = other DNA
gacatccagatgacccagtctccatcctccctgtctgcatctgtaggagacagagtcaccatcacttgccgggcaagtcaggccattagaaatgatttaggctggtatcagcagaaaccagggaaagcccctaagcgcctgatctatcctgcatccagtttgcaaagtggggtcccatcaaggttcagcggcagtggatctgggacagaattcactctcacaatcagcagcctgcagcctgaagattttgcaacttattactgtctacagtataatagttaccctccgtggacgttcggccaagggtccaaggtggaaatcaaa

SEQ ID NO: 25642 - protein, 108 aa, synthetic construct
  REGION 1..108: note = Description of Artificial Sequence: Synthetic polypeptide
DIQMTQSPSSLSASVGDRVTITCRASQAIRNDLGWYQQKPGKAPKRLIYPASSLQSGVPSRFSGSGSGTEFTLTISSLQPEDFATYYCLQYNSYPPWTFGQGSKVEIK

SEQ ID NO: 25643 - DNA, 321 bp, synthetic construct
  misc_feature 1..321: note = Description of Artificial Sequence: Synthetic polynucleotide
  source 1..321: mol_type = other DNA
gatatccagatgacccagtttccatcctcccagtctgcatctgtaggagacagagtcaccatcacttgccgggcaagtcagggcattagaaatgatttaggttggtatcagcagaaaccagggaaagcccataagcgcttgatctatgctgcatccagttgtcaaagtggggtcccatcaaggttcagcggcagtggatgtgggacagaattcactatctcaatcagcagcatgcagcgtgaagattttgcaacttattactgtatagtgcataatagttaccctcggacgttcggccaagggaccaaggtggaaatcaaa

SEQ ID NO: 25644 - protein, 107 aa, synthetic construct
  REGION 1..107: note = Description of Artificial Sequence: Synthetic polypeptide
DIQMTQFPSSQSASVGDRVTITCRASQGIRNDLGWYQQKPGKAHKRLIYAASSCQSGVPSRFSGSGCGTEFTISISSMQREDFATYYCIVHNSYPRTFGQGTKVEIK

SEQ ID NO: 25645 - DNA, 321 bp, synthetic construct
  misc_feature 1..321: note = Description of Artificial Sequence: Synthetic polynucleotide
  source 1..321: mol_type = other DNA
gacatccagatgacccagtctccatcttccgtgtgtgcatctgtaggagacagagtcaccatcacttgtcgggagagtcagggtattagcatctggttagcctggtatcagcagaaaccagggaaagcccctaagcttttgatctatgctgcatccagtttgcaaagtggggtcccatcaaggttcagcggcagtggatatgggacagatttcactctcaccatcagcagcgtgcagcctgaagattttgcaacttactattgtcaacaggctaacagtttcccattcactttcggccctgggaccaaagtggatatcaaa

SEQ ID NO: 25646 - protein, 107 aa, synthetic construct
  REGION 1..107: note = Description of Artificial Sequence: Synthetic polypeptide
DIQMTQSPSSVCASVGDRVTITCRESQGISIWLAWYQQKPGKAPKLLIYAASSLQSGVPSRFSGSGYGTDFTLTISSVQPEDFATYYCQQANSFPFTFGPGTKVDIK

SEQ ID NO: 25647 - DNA, 321 bp, synthetic construct
  misc_feature 1..321: note = Description of Artificial Sequence: Synthetic polynucleotide
  source 1..321: mol_type = other DNA
gaaatagtgatgacgcagtctccagccaccctgtctgtgtctccaggggaaagagccaccctctcctgcagggccagtcagagtgttaacagcaacttagcctggtaccagcagaaacctggccaggctcccaggctcctcatctctattgcatccaccagggccactggtatcccagccaggttcaatggcagtgggtctgggacagagttcactctcaccatcagcagcctgcagtctgaagattttgcagtttattactgtcagcagtataatgactggccgtgtagttttggccaggggaccaagctggagatcaaa

SEQ ID NO: 25648 - protein, 107 aa, synthetic construct
  REGION 1..107: note = Description of Artificial Sequence: Synthetic polypeptide
EIVMTQSPATLSVSPGERATLSCRASQSVNSNLAWYQQKPGQAPRLLISIASTRATGIPARFNGSGSGTEFTLTISSLQSEDFAVYYCQQYNDWPCSFGQGTKLEIK

SEQ ID NO: 25649 - DNA, 321 bp, synthetic construct
  misc_feature 1..321: note = Description of Artificial Sequence: Synthetic polynucleotide
  source 1..321: mol_type = other DNA
gacatccagatgacccagtctccatcttccgtgtctgcatctgtaggagacagagtcaccatcacttgtcgggcgagtcagggtattagcagctggttagcctggtatcagcagaaaccagggaaagcccctaagctcttgatctatgctgcatccagtttgcaaagtggggtcccatcaaggttcagcggcagtggatctgggacagatttcactctcaccatcagcagcctgcagcctgaagattttgcaacttactattgtcaacagattaacagtttccctctcactttcggcggagggaccaaggtggagatcaaa

SEQ ID NO: 25650 - protein, 107 aa, synthetic construct; identical to SEQ ID NO: 25634
  REGION 1..107: note = Description of Artificial Sequence: Synthetic polypeptide

SEQ ID NO: 25651 - DNA, 321 bp, synthetic construct
  misc_feature 1..321: note = Description of Artificial Sequence: Synthetic polynucleotide
  source 1..321: mol_type = other DNA
gacatccagatgacccagtctccatcctccctgtctgcatctgtaggagacagagtcaccatcacttgccgggcaagtcagggcattagaaatgatttaggctggtttcagcagaaaccagggaaagcccctaagcgcctgatctatgctgcatccagtttgcaaagtggggtcccatcaaggttcagcggcagtggatctgggacagaattctctctcacaatcagcagcctgcagcctgaagattttgcaacttattactgtctacaccataatagttatccattcaaatttggccctgggaccaaagtggatatcaaa

SEQ ID NO: 25652 - protein, 107 aa, synthetic construct
  REGION 1..107: note = Description of Artificial Sequence: Synthetic polypeptide
DIQMTQSPSSLSASVGDRVTITCRASQGIRNDLGWFQQKPGKAPKRLIYAASSLQSGVPSRFSGSGSGTEFSLTISSLQPEDFATYYCLHHNSYPFKFGPGTKVDIK

SEQ ID NO: 25653 - DNA, 321 bp, synthetic construct
  misc_feature 1..321: note = Description of Artificial Sequence: Synthetic polynucleotide
  source 1..321: mol_type = other DNA
gacatccagatgacccagtctccatcctcactgtctgcatctgtaggagacagagtcaccatcacttgtcgggcgagtcagggcattagctattatttagcctggtttcagcagaaaccagggagagcccctaagtccctgatctatgttgcatccagtttgcaaagtggggtcccatcaaggttcagcggcagtggatctgggacagatttcactctcaccatcagcagcctgcagcctgaagattttgcaatttattactgccaacagtatgatagttacccattcactttcggccctgggaccaaagtggatatcaga

SEQ ID NO: 25654 - protein, 107 aa, synthetic construct
  REGION 1..107: note = Description of Artificial Sequence: Synthetic polypeptide
DIQMTQSPSSLSASVGDRVTITCRASQGISYYLAWFQQKPGRAPKSLIYVASSLQSGVPSRFSGSGSGTDFTLTISSLQPEDFAIYYCQQYDSYPFTFGPGTKVDIR

SEQ ID NO: 25655 - DNA, 321 bp, synthetic construct
  misc_feature 1..321: note = Description of Artificial Sequence: Synthetic polynucleotide
  source 1..321: mol_type = other DNA
gacatccagatgacccagtctccatcctccctgtctgcatctgtaggagacagagtcaccatcacttgccgggcaagtcagggcattagaaataatttaggctggtatcagcagagaccagggaaagcccctaagcgcctgatctatgctgcatccagtgtgcaaagtggggtcccatcacggttcagcggcagtggatctgggacagaattcactctcacaatcagcagcctgcagcctgaagattttgcaacttattactgtctacagtataatagttacccattcactttcggccctgggaccaaagtggatatcaaa

SEQ ID NO: 25656 - protein, 107 aa, synthetic construct
  REGION 1..107: note = Description of Artificial Sequence: Synthetic polypeptide
DIQMTQSPSSLSASVGDRVTITCRASQGIRNNLGWYQQRPGKAPKRLIYAASSVQSGVPSRFSGSGSGTEFTLTISSLQPEDFATYYCLQYNSYPFTFGPGTKVDIK

SEQ ID NO: 25657 - DNA, 321 bp, synthetic construct
  misc_feature 1..321: note = Description of Artificial Sequence: Synthetic polynucleotide
  source 1..321: mol_type = other DNA
gacatccagatgacccagtctccatcctccctgtctgcatctgtaggagacagagtcaccatcacttgccgggcaagtcagggcattagaaatgatttaggctggtatcagcagaaaccagggaaagcccctaagcgcctgatctatgctgcatccagtttgcaaagtggggtcccatcaaggttcagcggcagtggatctgggccagaattcactctctcaatcagcagcctgcagcctgaagattttgcaacttattactgtctacagcataatagttatccgttcactttcggcggagggaccaaggtggagatcaaa

SEQ ID NO: 25658 - protein, 107 aa, synthetic construct
  REGION 1..107: note = Description of Artificial Sequence: Synthetic polypeptide
DIQMTQSPSSLSASVGDRVTITCRASQGIRNDLGWYQQKPGKAPKRLIYAASSLQSGVPSRFSGSGSGPEFTLSISSLQPEDFATYYCLQHNSYPFTFGGGTKVEIK

SEQ ID NO: 25659 - DNA, 321 bp, synthetic construct
  misc_feature 1..321: note = Description of Artificial Sequence: Synthetic polynucleotide
  source 1..321: mol_type = other DNA
gacatccagatgacccagtctccatcctccctgtctgcatctgtaggagacagagtcaccatcacttgccgggcaagtcagggcattagaaatgatttaggctggtatcagcagaaaccagggaaagcccctaagcgcctgatctatgctgcatccagtttgcaaagtggggtcccatcaagattcagcggcagtggatctgggacagaattcactctcacaatcagcagcctgcagcctgaagattttgcaacttattactgtctacagcatagtacttacccgctcactttcggcggagggaccaaggtggagatcaaa

SEQ ID NO: 25660 - protein, 107 aa, synthetic construct; identical to SEQ ID NO: 24464
  REGION 1..107: note = Description of Artificial Sequence: Synthetic polypeptide

SEQ ID NO: 25661 - DNA, 321 bp, synthetic construct
  misc_feature 1..321: note = Description of Artificial Sequence: Synthetic polynucleotide
  source 1..321: mol_type = other DNA
gacatccagatgacccagtctccatcctccctgtctgcatctgtaggagacagagtcaccttcacttgccgggcaggtcagaccatttacaattatttaaattggtatcagcagaaaccagggaaagcccctaagctcctgatccatgttgcgtccagtttgcaaagtggggtcccatcaaggttcagtggcagtggatctgggacagatttcactctcgtcattagtagtctgcaacctgaagattttgcaacttactactgtcaacagagttacagtaccccattcactttcggccctgggaccaaagtggatatcaaa

SEQ ID NO: 25662 - protein, 107 aa, synthetic construct
  REGION 1..107: note = Description of Artificial Sequence: Synthetic polypeptide
DIQMTQSPSSLSASVGDRVTFTCRAGQTIYNYLNWYQQKPGKAPKLLIHVASSLQSGVPSRFSGSGSGTDFTLVISSLQPEDFATYYCQQSYSTPFTFGPGTKVDIK

SEQ ID NO: 25663 - DNA, 321 bp, synthetic construct
  misc_feature 1..321: note = Description of Artificial Sequence: Synthetic polynucleotide
  source 1..321: mol_type = other DNA
gacatccagatgacccagtctccatcttccgtgtctgcatctgtaggagacagagtcaccatcacttgtcgggcgagtcagggtgttagcaggtggttagcctggtatcagcagaaaccagggaaagcccctaagctcctgatctatgctgcatccagtttgcaaagtggggtcccatcaaggttcagcggcagtggatctgggacagatttcactgtcaccatcagcagcctgcagcctgaagattttgcaacttactattgtcaacaggctaacagtttcccattcactttcggccctgggaccaaagtggatatcaaa

SEQ ID NO: 25664 - protein, 107 aa, synthetic construct
  REGION 1..107: note = Description of Artificial Sequence: Synthetic polypeptide
DIQMTQSPSSVSASVGDRVTITCRASQGVSRWLAWYQQKPGKAPKLLIYAASSLQSGVPSRFSGSGSGTDFTVTISSLQPEDFATYYCQQANSFPFTFGPGTKVDIK

SEQ ID NO: 25665 - DNA, 321 bp, synthetic construct
  misc_feature 1..321: note = Description of Artificial Sequence: Synthetic polynucleotide
  source 1..321: mol_type = other DNA
gaaatagtgatgacgcagtctccagccaccctgtctgtgtctccaggggaaagagccaccctctcctgcagggccagtcagagtgttaacagcaacttagcctggtaccagctgaaacctggccaggctcccaggctcctcatctctattgcatccaccagggccactggtatcccaccccggttcaatggcagtgggtctgggacagagttcactctcaccatcagcagcctgcagtctgaagattttgcagtttattactgtcagcagtataatgactggccgtgtagttttggccaggggaccaagctggagatcaaa

SEQ ID NO: 25666 - protein, 107 aa, synthetic construct
  REGION 1..107: note = Description of Artificial Sequence: Synthetic polypeptide
EIVMTQSPATLSVSPGERATLSCRASQSVNSNLAWYQLKPGQAPRLLISIASTRATGIPPRFNGSGSGTEFTLTISSLQSEDFAVYYCQQYNDWPCSFGQGTKLEIK

SEQ ID NO: 25667 - DNA, 321 bp, synthetic construct
  misc_feature 1..321: note = Description of Artificial Sequence: Synthetic polynucleotide
  source 1..321: mol_type = other DNA
gacatccagatgacccagtctccatcttccgtgtctgcatctgtaggagacagagtcaccatcacttgtcgggcgagtcagggtattagcaaatggttagcctggtatcagcagaatccagggaaagcccttaagctcttgatctttgctgcatccagtttgcaaagtggggtcccatcaaggttcagcggcagtggatctgggacagatttcactctcaccatcagcagcctccagcctgaagattttgcaaattactattgtcaacagactaacagtttccctctcactttcggcggagggaccaaggtggagatcaaa

SEQ ID NO: 25668 - protein, 107 aa, synthetic construct
  REGION 1..107: note = Description of Artificial Sequence: Synthetic polypeptide
DIQMTQSPSSVSASVGDRVTITCRASQGISKWLAWYQQNPGKALKLLIFAASSLQSGVPSRFSGSGSGTDFTLTISSLQPEDFANYYCQQTNSFPLTFGGGTKVEIK

SEQ ID NO: 25669 - DNA, 321 bp, synthetic construct
  misc_feature 1..321: note = Description of Artificial Sequence: Synthetic polynucleotide
  source 1..321: mol_type = other DNA
gacatccagatgacccagtctccatcctccctgtctgcatctttaggagacagagtcaccatcacttgccggacaagtcagagcattttcaactatttaaattggtttcagcggaaaccagggaaagcccctaaggtcctgatctatactgcatccagtttgcaaagtgggatcccatcaaggttcagtggcagtggatctgggacagacttcactctcaccatcagcagtctgcaacctgaagattctgcaacttactactgtcaacagagttacagtatcccgctcactttcggcggagggaccaaggtggagatcaaa

SEQ ID NO: 25670 - protein, 107 aa, synthetic construct
  REGION 1..107: note = Description of Artificial Sequence: Synthetic polypeptide
DIQMTQSPSSLSASLGDRVTITCRTSQSIFNYLNWFQRKPGKAPKVLIYTASSLQSGIPSRFSGSGSGTDFTLTISSLQPEDSATYYCQQSYSIPLTFGGGTKVEIK

SEQ ID NO: 25671 - DNA, 339 bp, synthetic construct
  misc_feature 1..339: note = Description of Artificial Sequence: Synthetic polynucleotide
  source 1..339: mol_type = other DNA
gacatcgtgatgacccagtctccagactccctggctgtgtctctgggcgagagggccaccctcaactgcaagtccagccagagtgttttatacagctccaacaataacaactacttggcttggtaccagcagaaaccaggacagcctcctaaactgctcatttactgggcatctacccgggaatccggggtccctgaccgattcagtggcagcgggtctgggacagatttcactctcactatcagcagcctgcaggctgaagatgtggcagtttattactgtcagcaatattataatattcctccgacgttcggccaagggaccaaggtggaaatcaaa

SEQ ID NO: 25672 - protein, 113 aa, synthetic construct
  REGION 1..113: note = Description of Artificial Sequence: Synthetic polypeptide
DIVMTQSPDSLAVSLGERATLNCKSSQSVLYSSNNNNYLAWYQQKPGQPPKLLIYWASTRESGVPDRFSGSGSGTDFTLTISSLQAEDVAVYYCQQYYNIPPTFGQGTKVEIK

SEQ ID NO: 25673 - DNA, 321 bp, synthetic construct
  misc_feature 1..321: note = Description of Artificial Sequence: Synthetic polynucleotide
  source 1..321: mol_type = other DNA
gacatccagatgacccagtctccatcctccctgtctacatctgtcggagacagagtcaccatcacttgccgggcaagtcagggcattagaaaggatttaggctggtatcagcagaaaccagggaaagcccctaagcgcctgatctatgctgcatccagtttgcaaagtggggtcccatcaaggttcagcggcagtggatctgggacagaattcactctcacaatcagcagcctgcagcctgaagattttgcaacttattactgtctacagcataatcgttacccgctcactttcggcggagggaccaaggtggagatcaaa

SEQ ID NO: 25674 - protein, 107 aa, synthetic construct
  REGION 1..107: note = Description of Artificial Sequence: Synthetic polypeptide
DIQMTQSPSSLSTSVGDRVTITCRASQGIRKDLGWYQQKPGKAPKRLIYAASSLQSGVPSRFSGSGSGTEFTLTISSLQPEDFATYYCLQHNRYPLTFGGGTKVEIK

SEQ ID NO: 25675 - DNA, 321 bp, synthetic construct
  misc_feature 1..321: note = Description of Artificial Sequence: Synthetic polynucleotide
  source 1..321: mol_type = other DNA
gacatccaaatgacccagtctccatcttccgtgtctgcatctgtaggagacagagtcaccatcacttgtcgggcgagtcaggatattagcagctggttagcctggtatcagcagaatccagggaaagcccctaaactcttgatctatgctgcatccagtttgcaaagtggggtcccatcaaggttcagcggcagtggatctgggacagatttcactctcaccatcagcagcctccagcctgaagattttgcaacttactattgtcaacagactaacagtttccctctcactttcggcggagggaccaaggtggagatcaaa

SEQ ID NO: 25676 - protein, 107 aa, synthetic construct
  REGION 1..107: note = Description of Artificial Sequence: Synthetic polypeptide
DIQMTQSPSSVSASVGDRVTITCRASQDISSWLAWYQQNPGKAPKLLIYAASSLQSGVPSRFSGSGSGTDFTLTISSLQPEDFATYYCQQTNSFPLTFGGGTKVEIK

SEQ ID NO: 25677 - DNA, 321 bp, synthetic construct
  misc_feature 1..321: note = Description of Artificial Sequence: Synthetic polynucleotide
  source 1..321: mol_type = other DNA
gacatccagatgacccagtctccatcttccgtgtctgcatctgtaggagacagagtcaccatcacttgtcgggcgagtcagggtattagcagctggttagcctggtatcagcagaaaccagggaaagcccttaagctcttgatatatgctgcatccagtttgcaaagtggggtcccatcaaggttcagcggcagtggatctgggacagatttcactctcaccatcagcagcgtgcagcctgaagattttgcaacttactattgtcaacagattaacagtttccctctcactttcggcggagggaccaaggtggagatcaaa

SEQ ID NO: 25678 - protein, 107 aa, synthetic construct
  REGION 1..107: note = Description of Artificial Sequence: Synthetic polypeptide
DIQMTQSPSSVSASVGDRVTITCRASQGISSWLAWYQQKPGKALKLLIYAASSLQSGVPSRFSGSGSGTDFTLTISSVQPEDFATYYCQQINSFPLTFGGGTKVEIK

SEQ ID NO: 25679 - DNA, 321 bp, synthetic construct
  misc_feature 1..321: note = Description of Artificial Sequence: Synthetic polynucleotide
  source 1..321: mol_type = other DNA
gacatccagatgacccagtctccatcctccctatctgcatctgtaggagacagagtcaccatcacttgccgggcaagtcagggcattaacaataatttaaactggtttcagcagaaaccagggaaagcccctaagcgcctgatctatgctgcatccagtttgcaaagtggggtcccatcaaggttcagcggcagtggatctgggacagaattcactctcacaatcagcagcctgcagcctgaagattttgcaacttattactgtctacagcataatagttacccgctcactttcggcggagggtccaaggtggagatcaaa

SEQ ID NO: 25680 - protein, 107 aa, synthetic construct
  REGION 1..107: note = Description of Artificial Sequence: Synthetic polypeptide
DIQMTQSPSSLSASVGDRVTITCRASQGINNNLNWFQQKPGKAPKRLIYAASSLQSGVPSRFSGSGSGTEFTLTISSLQPEDFATYYCLQHNSYPLTFGGGSKVEIK

SEQ ID NO: 25681 - DNA, 321 bp, synthetic construct
  misc_feature 1..321: note = Description of Artificial Sequence: Synthetic polynucleotide
  source 1..321: mol_type = other DNA
gacatccagatgacccagtctccatcctcccggtctgcatctgtaggagacagagtcaccatcacttgccgtgcaagtcagggcattagaaatgatttaggatggtatcagcagaaaccaggaaaagcccctaagcgcctgatctatattgcattcagattgcaaattggggtcccatcaaggttcagcggcagtggatctgggacagaattcactctcacaatcagcagcctgcagcctgaagattttgcaacttattactgtatacaccataatagttacccgtggacgttcggccaagggaccaaggtggaaatcaaa

SEQ ID NO: 25682 - protein, 107 aa, synthetic construct
  REGION 1..107: note = Description of Artificial Sequence: Synthetic polypeptide
DIQMTQSPSSRSASVGDRVTITCRASQGIRNDLGWYQQKPGKAPKRLIYIAFRLQIGVPSRFSGSGSGTEFTLTISSLQPEDFATYYCIHHNSYPWTFGQGTKVEIK

SEQ ID NO: 25683 - DNA, 339 bp, synthetic construct
  misc_feature 1..339: note = Description of Artificial Sequence: Synthetic polynucleotide
  source 1..339: mol_type = other DNA
gacatcgtgatgacccagtctccagactccctggctgtgtctctgggcgagagggtcgccatcaattgcaagtccagccagagtgttttacacagctccaacaataacaactacttagattggtatcagcagaaaccaggacagcttcctaaactgctcattttctgggcatctacccgggaattcggggttcctgaccgattcagtggcagcgggtttgggacagatttcactctcaccatcagcagcctgcaggctgaagatgtggcagattactactgtcaacaatattatattactccgtgcagttttggccaggggaccaagctggagatcaaa

SEQ ID NO: 25684 - protein, 113 aa, synthetic construct
  REGION 1..113: note = Description of Artificial Sequence: Synthetic polypeptide
DIVMTQSPDSLAVSLGERVAINCKSSQSVLHSSNNNNYLDWYQQKPGQLPKLLIFWASTREFGVPDRFSGSGFGTDFTLTISSLQAEDVADYYCQQYYITPCSFGQGTKLEIK

SEQ ID NO: 25685 - DNA, 321 bp, synthetic construct
  misc_feature 1..321: note = Description of Artificial Sequence: Synthetic polynucleotide
  source 1..321: mol_type = other DNA
gacatccagatgacccagtctccatcctccccgtctgcatctgtaggagacagagtcaccatcacttgccgggcaagtcagggcattagaaatgatttagattggtatcagcagaagccagggaaggcccctcagcgccttatctatgctgcatccagtttgcaaagtggggtcccatcaaggttcagcggcagtggatctgggacagaattcactctcacaatcagcagcctgcagcctgacgattttgcaacttattactgtctacagcataatagttacccattcactttcggccctgggaccaaagtggatatcaaa

SEQ ID NO: 25686 - protein, 107 aa, synthetic construct
  REGION 1..107: note = Description of Artificial Sequence: Synthetic polypeptide
DIQMTQSPSSPSASVGDRVTITCRASQGIRNDLDWYQQKPGKAPQRLIYAASSLQSGVPSRFSGSGSGTEFTLTISSLQPDDFATYYCLQHNSYPFTFGPGTKVDIK

SEQ ID NO: 25687 - DNA, 321 bp, synthetic construct
  misc_feature 1..321: note = Description of Artificial Sequence: Synthetic polynucleotide
  source 1..321: mol_type = other DNA
gacatccagatgacccagtctccatcctccctgtctgcatctgtaggagacagagtcaccatcacttgccgggcaagtcagggcattagaaatgttttaggctggtatcagcagaaaccagggaaagcccctaagcgcctgatctatgctgcatccagtttacaaagtggggtcccatcaaggttcagcggcagtggatctgggacagaattcactctcacaatcagcagcctgcagcctgaagattttgcaacttattactgtctacagtataatagttacccattcactttcggccctgggaccaaagtggatatcaaa

SEQ ID NO: 25688 - protein, 107 aa, synthetic construct
  REGION 1..107: note = Description of Artificial Sequence: Synthetic polypeptide
DIQMTQSPSSLSASVGDRVTITCRASQGIRNVLGWYQQKPGKAPKRLIYAASSLQSGVPSRFSGSGSGTEFTLTISSLQPEDFATYYCLQYNSYPFTFGPGTKVDIK

SEQ ID NO: 25689 - DNA, 321 bp, synthetic construct
  misc_feature 1..321: note = Description of Artificial Sequence: Synthetic polynucleotide
  source 1..321: mol_type = other DNA
gacatccagatgacccagtctccatcttccgtgtctgcatctgtaggagacagagtcaccatcacttgtcgggcgagtcagggtattagcagctggttagcctggtatcagcagaatccaggggaagcccctaagctcctgatctatgctgcatccagtttgcaaggtggggtcccatcaaggttcagcggcagtggatctgggacagatttcactctcaccatcagcagcctccagcctgaagattttgcaaattactattgtcaacagactaatagtttccctctcactttcggcggagggaccaaggtggagatcaaa

SEQ ID NO: 25690 - protein, 107 aa, synthetic construct
  REGION 1..107: note = Description of Artificial Sequence: Synthetic polypeptide
DIQMTQSPSSVSASVGDRVTITCRASQGISSWLAWYQQNPGEAPKLLIYAASSLQGGVPSRFSGSGSGTDFTLTISSLQPEDFANYYCQQTNSFPLTFGGGTKVEIK

SEQ ID NO: 25691 - DNA, 321 bp, synthetic construct
  misc_feature 1..321: note = Description of Artificial Sequence: Synthetic polynucleotide
  source 1..321: mol_type = other DNA
gacatccagatgacccagtctccatcctccctgtctgcatctgtaggagacagagtcaccatcacttgccgggcaagtcagggcattagaaatgatttagattggtatcagcagacaccagggaaagcccctaagcgcctgatctatgctgcatccagtttgcaaagtggggtcccatcaaggttcagcggcggtggatctgggacagaattctctctcacaatcagcagcctgcagcctgaagattttacaacttattactgtctacagcataatacttacccattcactttcggccctgggaccaaagtggatgtcaaa

SEQ ID NO: 25692 - protein, 107 aa, synthetic construct
  REGION 1..107: note = Description of Artificial Sequence: Synthetic polypeptide
DIQMTQSPSSLSASVGDRVTITCRASQGIRNDLDWYQQTPGKAPKRLIYAASSLQSGVPSRFSGGGSGTEFSLTISSLQPEDFTTYYCLQHNTYPFTFGPGTKVDVK

SEQ ID NO: 25693 - DNA, 318 bp, synthetic construct
  misc_feature 1..318: note = Description of Artificial Sequence: Synthetic polynucleotide
  source 1..318: mol_type = other DNA
gacatccagatgacccagtctccatcctccctgtctgcatctgtaggagacagagtcatcatcccttgccgggcaagtcagaacattagcagctatttaaattggtatcagcagaaaccagggaaagcccctaaactcctgatctatgctgcatccagtttgcaaagtggggtcccatcaaggttcagtggcagtggatctgggacagatttcactctgaccatcagcagtctgcagcctgaagattttgcaacttactcctgtcaacagacttacagtacccccaccttcggccaagggacacgactggatattaat

SEQ ID NO: 25694 - protein, 106 aa, synthetic construct
  REGION 1..106: note = Description of Artificial Sequence: Synthetic polypeptide
DIQMTQSPSSLSASVGDRVIIPCRASQNISSYLNWYQQKPGKAPKLLIYAASSLQSGVPSRFSGSGSGTDFTLTISSLQPEDFATYSCQQTYSTPTFGQGTRLDIN

SEQ ID NO: 25695 - DNA, 321 bp, synthetic construct
  misc_feature 1..321: note = Description of Artificial Sequence: Synthetic polynucleotide
  source 1..321: mol_type = other DNA
gacatccagttgacccagtctccatcctccctgtctgcatctgtaggagacagagtcaccatcacttgccgggcgagtcagggcattagcagttatttaaattggtctcagcagaaaccagggaaagttcctaagctcctgatctgtggtgcttccaatttgcaatctggagtcccatctcggttcagcggcagtgcatctgggacagaattcattctcactatcagcagcctgcagcctgaagatgttacaacttattacggtcaacagaattacaatgccccgctcactttcggcggagggaccaaggtggagatcaaa

SEQ ID NO: 25696 - protein, 107 aa, synthetic construct
  REGION 1..107: note = Description of Artificial Sequence: Synthetic polypeptide
DIQLTQSPSSLSASVGDRVTITCRASQGISSYLNWSQQKPGKVPKLLICGASNLQSGVPSRFSGSASGTEFILTISSLQPEDVTTYYGQQNYNAPLTFGGGTKVEIK

SEQ ID NO: 25697 - DNA, 321 bp, synthetic construct
  misc_feature 1..321: note = Description of Artificial Sequence: Synthetic polynucleotide
  source 1..321: mol_type = other DNA
gacatccagatgacccagtctccatcttccgtgtctgcatctgtaggagacagagtcaccatcacttgtcgggcgagtcagggtattagcagctggttagcctggtatcagcagaaacctgggaaagcccctaagctcctgatctatgctgcatccagtttgcaaagtggggtcccatcaaggttcagcggcagtggatctgggacagatttcactctcaccatcagcagcctgcagcctgaagattttgcaacttactattgtcaacaggttaacagtttccctctcactttcggcggagggaccaaggtggagctcaaa

SEQ ID NO: 25698 - protein, 107 aa, synthetic construct
  REGION 1..107: note = Description of Artificial Sequence: Synthetic polypeptide
DIQMTQSPSSVSASVGDRVTITCRASQGISSWLAWYQQKPGKAPKLLIYAASSLQSGVPSRFSGSGSGTDFTLTISSLQPEDFATYYCQQVNSFPLTFGGGTKVELK

SEQ ID NO: 25699 - DNA, 321 bp, synthetic construct
  misc_feature 1..321: note = Description of Artificial Sequence: Synthetic polynucleotide
  source 1..321: mol_type = other DNA
gacatccagatgacccagtctccatcttccgtgtctgcatctataggagacagagtcaccatcacttgtcgggcgagtcagggtattagcaactggttagcctggtatcagcagaaaccagggaaagcccctaagctcctgatctatgctgcatccagtttgcaaagtggggtcccgtcaaggttcagcggcagtggatctgagacagatttcactctcaccatcagcagcctgcagcctgaagattttgcaacttactattgtcaacaggttaacagtttccctctcactttcggcggagggaccaaggtggagatcaaa

SEQ ID NO: 25700 - protein, 107 aa, synthetic construct
  REGION 1..107: note = Description of Artificial Sequence: Synthetic polypeptide
DIQMTQSPSSVSASIGDRVTITCRASQGISNWLAWYQQKPGKAPKLLIYAASSLQSGVPSRFSGSGSETDFTLTISSLQPEDFATYYCQQVNSFPLTFGGGTKVEIK

SEQ ID NO: 25701 - DNA, 321 bp, synthetic construct
  misc_feature 1..321: note = Description of Artificial Sequence: Synthetic polynucleotide
  source 1..321: mol_type = other DNA
gacatccagatgacccagtctccatcctccctgtctgcatctgtaggagacagagtcaccatcacttgccgggcaagtcagggcattagaaatgatttaggctggtttcagcagaaaccagggaaagcccctaagcgcctgatctatgctgcatccaatttgcaaagtggggtcccatcaaggttcagcggcagtggatctgggacagaattcactctcacaatcagcagcctgcagcctgaagattttgcaacttattactgtctacagcataatagttacccattcactttcggccctgggaccaaagtggatatcaaa

SEQ ID NO: 25702 - protein, 107 aa, synthetic construct
  REGION 1..107: note = Description of Artificial Sequence: Synthetic polypeptide
DIQMTQSPSSLSASVGDRVTITCRASQGIRNDLGWFQQKPGKAPKRLIYAASNLQSGVPSRFSGSGSGTEFTLTISSLQPEDFATYYCLQHNSYPFTFGPGTKVDIK

SEQ ID NO: 25703 - DNA, 324 bp, synthetic construct
  misc_feature 1..324: note = Description of Artificial Sequence: Synthetic polynucleotide
  source 1..324: mol_type = other DNA
gacatccagatgacccagtctccatcctccctgtatgcatctgtaggagacagagtcaccatcactcgccgggcaagtcaggacatcagaaatgatttaggctggtatcagcagaaaccagggaaagcccttaagcgcgtgatctatgctgcatccagtttgcaaagtggggtcccatcaagcttcagcggcagtggatctgggacagaattcactctcacaatcagcagcttgcagcctgaagattttgcaacttattacggtatacagcataatagttaccctccgatcaccgtcggccaagggacacgactggagattaaa

SEQ ID NO: 25704 - protein, 108 aa, synthetic construct
  REGION 1..108: note = Description of Artificial Sequence: Synthetic polypeptide
DIQMTQSPSSLYASVGDRVTITRRASQDIRNDLGWYQQKPGKALKRVIYAASSLQSGVPSSFSGSGSGTEFTLTISSLQPEDFATYYGIQHNSYPPITVGQGTRLEIK

SEQ ID NO: 25705 - DNA, 321 bp, synthetic construct
  misc_feature 1..321: note = Description of Artificial Sequence: Synthetic polynucleotide
  source 1..321: mol_type = other DNA
gacatccagatgacccagtctccatcctccctgtctgcatctgtaggagacagagtcaccatcacttgccgggcaagtcagggcattagaaatgatttaggctggtatcagcagaaaccagggaaagcccctaagcgcctgatctatgctgcatccagtttgcaaagtggggtcccatcaaggttcagcggcagtggatctgggacagaattcactctcacaatcagcagcctgcagcctgaagattttgcaacttattactgtctacagcattatagttaccctcggacgttcggccaagggaccaaggtggaaatcaaa

SEQ ID NO: 25706 - protein, 107 aa, synthetic construct; identical to SEQ ID NO: 24168
  REGION 1..107: note = Description of Artificial Sequence: Synthetic polypeptide

SEQ ID NO: 25707 - DNA, 324 bp, synthetic construct
  misc_feature 1..324: note = Description of Artificial Sequence: Synthetic polynucleotide
  source 1..324: mol_type = other DNA
gaaattgtgttgacgcagtcgccaggcaccctgtctttgtctccaggggagagagccaccctctcctgcagggcccgtcagaatgttgacagcagctacttagcctggtaccagcagaaacctggccaggctcccaggctcctcatctatggtgcatccagcagggccactggcatcccagacaggttcagtggcagtgggtctgggacagacttcactctcaccatcagcagactggagcctgaagattttgcagtgttttactgtcagcagtatgaacgctcaccgtggacgttcggccaagggaccaaggtggagatcaaa

SEQ ID NO: 25708 - protein, 108 aa, synthetic construct
  REGION 1..108: note = Description of Artificial Sequence: Synthetic polypeptide
EIVLTQSPGTLSLSPGERATLSCRARQNVDSSYLAWYQQKPGQAPRLLIYGASSRATGIPDRFSGSGSGTDFTLTISRLEPEDFAVFYCQQYERSPWTFGQGTKVEIK

SEQ ID NO: 25709 - DNA, 324 bp, synthetic construct
  misc_feature 1..324: note = Description of Artificial Sequence: Synthetic polynucleotide
  source 1..324: mol_type = other DNA
gaaattgtgttgacgcagtctccaggcaccctgtctttgtctccaggggaaagagccaccctctcctgcagggccagtcagaatatttacagcaactacctagcctggtaccaggagaagcctggccaggctcccagactcctcatctatggtgcatccagcagggccactggcatcccagacaggttcagtggcagtgggtctgggacagacttcactctcaccatcagcagactggagcctgaagattttgtagtgtattactgtcagcagtatgaaagttcaccgtggacgttcggccaagggaccaaggtggaaatcaaa

SEQ ID NO: 25710 - protein, 108 aa, synthetic construct
  REGION 1..108: note = Description of Artificial Sequence: Synthetic polypeptide
EIVLTQSPGTLSLSPGERATLSCRASQNIYSNYLAWYQEKPGQAPRLLIYGASSRATGIPDRFSGSGSGTDFTLTISRLEPEDFVVYYCQQYESSPWTFGQGTKVEIK

SEQ ID NO: 25711 - DNA, 339 bp, synthetic construct
  misc_feature 1..339: note = Description of Artificial Sequence: Synthetic polynucleotide
  source 1..339: mol_type = other DNA
gacatcgtgatgacccagtctccagactccctggctgtgtctctgggcgagagggccaccatcaactgcaagtccagccagagtgttttatacagctccaacaattacaactacttagcttggtaccagcagaaaccaggacagcctcctaagaagctcatttactgggcatctacccgggaatccggggtccctgaccgattcagtggcagcgggtctgggacagatttcactctcaccatcagcagcctgcaggctgaagatgtggcagtttattcctgtcagcaatattatagtagtcctccgacgttcggccaagggaccaaggtggaaatcaaa

SEQ ID NO: 25712 - protein, 113 aa, synthetic construct
  REGION 1..113: note = Description of Artificial Sequence: Synthetic polypeptide
DIVMTQSPDSLAVSLGERATINCKSSQSVLYSSNNYNYLAWYQQKPGQPPKKLIYWASTRESGVPDRFSGSGSGTDFTLTISSLQAEDVAVYSCQQYYSSPPTFGQGTKVEIK

SEQ ID NO: 25713 - DNA, 339 bp, synthetic construct
  misc_feature 1..339: note = Description of Artificial Sequence: Synthetic polynucleotide
  source 1..339: mol_type = other DNA
gacatcgtgatgacccagtctccagactccctggctgtgtctccgggcgagagggccaccatcaactgcaagtccagccagagtgttttacacagctccaacaataacaattacttagcctggtaccagcagaaaccaggacagcctcctgacctgctcatttactgggcatcaacccgggaatccggggtccctgaccgattcagtggcagcgggtctgggacagatttcactctcaccatcagcagcctgcaggctgaagatgtggcagtttattactgtcagcaatattttagtactccgtggacgttcggccaagggacccaggtggaaatcaaa

SEQ ID NO: 25714 - protein, 113 aa, synthetic construct
  REGION 1..113: note = Description of Artificial Sequence: Synthetic polypeptide
DIVMTQSPDSLAVSPGERATINCKSSQSVLHSSNNNNYLAWYQQKPGQPPDLLIYWASTRESGVPDRFSGSGSGTDFTLTISSLQAEDVAVYYCQQYFSTPWTFGQGTQVEIK

SEQ ID NO: 25715 - DNA, 324 bp, synthetic construct
  misc_feature 1..324: note = Description of Artificial Sequence: Synthetic polynucleotide
  source 1..324: mol_type = other DNA
gaatttatgttgacgcagtctccaggcaccctgtattggtctccaggggaaagagccaccctctcgtgcagggccagtcagagtgttagcagcagctacttagtctggtatcagcagaaacctggccaggctcccaggctcctcatctatggtgcatccaccagggccactggcatcccagacaggttcagtggcagtgggtctgggacagacttcactctcaccatcagcagactggagcctgaatattttgcagtttattactgtcagcagtatggttgctcaccgctcactttcggcggagggaccaaggtggagatcaca

SEQ ID NO: 25716 - protein, 108 aa, synthetic construct
  REGION 1..108: note = Description of Artificial Sequence: Synthetic polypeptide
EFMLTQSPGTLYWSPGERATLSCRASQSVSSSYLVWYQQKPGQAPRLLIYGASTRATGIPDRFSGSGSGTDFTLTISRLEPEYFAVYYCQQYGCSPLTFGGGTKVEIT

SEQ ID NO: 25717 - DNA, 339 bp, synthetic construct
  misc_feature 1..339: note = Description of Artificial Sequence: Synthetic polynucleotide
  source 1..339: mol_type = other DNA
gacatcgtgatgacccagtctccagactccctggctgtgtctctgggcgagagggccaccatcaactgcaagtccagccagagtgttttacacagctccaacaataagaactacttaacttggtaccagcagaaaccaggacagcctcctaagctgctcatttactgggcatctactcgggaatccggggtccctgaccgattcagtggcagcgggtctgggacagatttcagtctcacgatcggcagcctgcaggctgaagatgtggcagtttattactgtcagcaatattatagtattcctccgacgttcggccaagggaccaaggtggaaatcaaa

SEQ ID NO: 25718 - protein, 113 aa, synthetic construct
  REGION 1..113: note = Description of Artificial Sequence: Synthetic polypeptide
DIVMTQSPDSLAVSLGERATINCKSSQSVLHSSNNKNYLTWYQQKPGQPPKLLIYWASTRESGVPDRFSGSGSGTDFSLTIGSLQAEDVAVYYCQQYYSIPPTFGQGTKVEIK

SEQ ID NO: 25719 - DNA, 339 bp, synthetic construct
  misc_feature 1..339: note = Description of Artificial Sequence: Synthetic polynucleotide
  source 1..339: mol_type = other DNA
gacatcgtgatgacccagtctccagactccctggctgtgtctctgggcgagagggccaccatcaactgcaagtccagccagagtgttttatacagctccaacaatgcgaactacttagcttggtaccagcagaaaccaggacagcctcctaacctgctcatttactgggcatctacccgggaatccggggtccctgaccgattcagtggcagcgggtctgggacagatttcactctcaccatcagcagcctgcaggctgaagatgtggcagtttattactgtcagcaatattatagtactccgtgcagttttggccaggggaccaagctggagatcaaa

SEQ ID NO: 25720 - protein, 113 aa, synthetic construct
  REGION 1..113: note = Description of Artificial Sequence: Synthetic polypeptide
DIVMTQSPDSLAVSLGERATINCKSSQSVLYSSNNANYLAWYQQKPGQPPNLLIYWASTRESGVPDRFSGSGSGTDFTLTISSLQAEDVAVYYCQQYYSTPCSFGQGTKLEIK

SEQ ID NO: 25721 - DNA, 321 bp, synthetic construct
  misc_feature 1..321: note = Description of Artificial Sequence: Synthetic polynucleotide
  source 1..321: mol_type = other DNA
gaaatagtgatgacgcagtctccagccaccccgtctgtgtctccaggggaaagagccaccctctcctgcagggccagtgtgagtgttgtcaacagcttagcctggtaccagcagaaacctggccaggctcccaggctcctcatccatggtgcatccaccagggccactggtatcccagccaggttcagtggcagtgggtctgggacagagttcactctcaccatcagcagtgtgcagtctgaagattttgcaatttattactgtcagcaatataatgactggccgtgcagttttggccaggggaccaagctggagatcaaa

SEQ ID NO: 25722 - protein, 107 aa, synthetic construct
  REGION 1..107: note = Description of Artificial Sequence: Synthetic polypeptide
EIVMTQSPATPSVSPGERATLSCRASVSVVNSLAWYQQKPGQAPRLLIHGASTRATGIPARFSGSGSGTEFTLTISSVQSEDFAIYYCQQYNDWPCSFGQGTKLEIK

SEQ ID NO: 25723 - DNA, 339 bp, synthetic construct
  misc_feature 1..339: note = Description of Artificial Sequence: Synthetic polynucleotide
  source 1..339: mol_type = other DNA
gacatcgtgatgacccagtctccagactccctggctgtgtctctgggcgagagggccaccatcaactgcaagtccagccagagtgttttacacagctccaacaattacaactacttagcttggtaccagcagagaccaggacagcctcctaggctgctcatttactgggcatctacccgggaatccggggtccctgaccgattcagtggcagcggttctgggacagatttcactctcaccatcagcagcctgcaggttgaagatgtggcagtttattactgtcagcaatattatagttctcctccgacgttcggccaagggaccaaggtggaaatcaaa

SEQ ID NO: 25724 - protein, 113 aa, synthetic construct
  REGION 1..113: note = Description of Artificial Sequence: Synthetic polypeptide
DIVMTQSPDSLAVSLGERATINCKSSQSVLHSSNNYNYLAWYQQRPGQPPRLLIYWASTRESGVPDRFSGSGSGTDFTLTISSLQVEDVAVYYCQQYYSSPPTFGQGTKVEIK

SEQ ID NO: 25725 - DNA, 321 bp, synthetic construct
  misc_feature 1..321: note = Description of Artificial Sequence: Synthetic polynucleotide
  source 1..321: mol_type = other DNA
gacatccagatgacccagtctccatcctccctgtctgcttctgtaggagacagagtcaccatcacttgccgggcaagtcagggcattagaaatgatttaggctggtatcagcagaaaccagggaaagcccctaagcgcctgatctatgctgcatccactttgcaaagtggggtcccatcaaggttcagcggcagtggatctgggacagaattcactctcacaatcagcggcctgcagcctgaagattttgcaacttatcactgtctacagcatagtaattacccgctcactttcggcggagggaccaaggtggagatcaaa

SEQ ID NO: 25726 - protein, 107 aa, synthetic construct
  REGION 1..107: note = Description of Artificial Sequence: Synthetic polypeptide
DIQMTQSPSSLSASVGDRVTITCRASQGIRNDLGWYQQKPGKAPKRLIYAASTLQSGVPSRFSGSGSGTEFTLTISGLQPEDFATYHCLQHSNYPLTFGGGTKVEIK

SEQ ID NO: 25727 - DNA, 339 bp, synthetic construct
  misc_feature 1..339: note = Description of Artificial Sequence: Synthetic polynucleotide
  source 1..339: mol_type = other DNA
gacatcgttatgacccagtgtccagactccccggctgtgtctctgggcgagagggccaccatcaattgcaagtccagccagagtgttttattcagctccaacaattataattacttagcttggtaccagcagagaccaggacagcctcatgacctgctcatttactgggcatctacccgggaatccggggtccctgaccgattcagtggcagcgggtctgggacagatttcactctcaccatcagcagcctgcaggctgctgatgtggcagtttattactgtcagcaatatcatagttctcctctgacgttcggccaagggaccacggtgcaaatcaaa

SEQ ID NO: 25728 - protein, 113 aa, synthetic construct
  REGION 1..113: note = Description of Artificial Sequence: Synthetic polypeptide
DIVMTQCPDSPAVSLGERATINCKSSQSVLFSSNNYNYLAWYQQRPGQPHDLLIYWASTRESGVPDRFSGSGSGTDFTLTISSLQAADVAVYYCQQYHSSPLTFGQGTTVQIK

SEQ ID NO: 25729 - DNA, 324 bp, synthetic construct
  misc_feature 1..324: note = Description of Artificial Sequence: Synthetic polynucleotide
  source 1..324: mol_type = other DNA
gaacttgtgttgacgcagtctccaggcaccctgtctttgtctccaggggaaagagccaccctctcctgcagggccagtcagaatatttacagcagttacttagcctggtaccagcagaaacctggccaggctcccaggctcctcatctatggtgcatccagcagggccactggcatcccagacaggttcagtggcagtgggtctgggacagacttcactctcaccatcagcagactggagcctgaagattttgcagtgtattgctgtcagcagtatgaaagctcaccgtggaccttcggccaagggaccaaggtggaaatcaaa

SEQ ID NO: 25730 - protein, 108 aa, synthetic construct
  REGION 1..108: note = Description of Artificial Sequence: Synthetic polypeptide
ELVLTQSPGTLSLSPGERATLSCRASQNIYSSYLAWYQQKPGQAPRLLIYGASSRATGIPDRFSGSGSGTDFTLTISRLEPEDFAVYCCQQYESSPWTFGQGTKVEIK

SEQ ID NO: 25731 - DNA, 324 bp, synthetic construct
  misc_feature 1..324: note = Description of Artificial Sequence: Synthetic polynucleotide
  source 1..324: mol_type = other DNA
gaaattgtgttgacgcagtctccaggcaccctgtatttgtctccaggggaaagagccaccctctcatgcagggccagtcagagtgtttacagcagctacttagcctggtaccagcagaaacctggccaggctcccaggctcctcatttatggtgcatccagccgggccactggcatcccagacaggttcagtggcagtgggtctgggacagacttcgctctcaccatcagcagactggagcctgaagattttgcagtgtattactgtcagcactctgataactcaccgtggacgttcggccaagggaccaaggtggaaatcaaa

SEQ ID NO: 25732 - protein, 108 aa, synthetic construct
  REGION 1..108: note = Description of Artificial Sequence: Synthetic polypeptide
EIVLTQSPGTLYLSPGERATLSCRASQSVYSSYLAWYQQKPGQAPRLLIYGASSRATGIPDRFSGSGSGTDFALTISRLEPEDFAVYYCQHSDNSPWTFGQGTKVEIK

SEQ ID NO: 25733 - DNA, 324 bp, synthetic construct
  misc_feature 1..324: note = Description of Artificial Sequence: Synthetic polynucleotide
  source 1..324: mol_type = other DNA
gaaattgtgttgacgcagtctccaggcaccctgtctttgtctccaggggaaagagccaccctctcatgcagggccagtcagagtgtttacagcagctacttagcctggtaccagcagaaacctggccaggctcccaggctcctcatttatggtgcatccagccgggccactggcatcccagacaggttcagtggcagtgggtctgggacagacttcgctctcaccatcagcagactggagcctgaagattgtgcagtgtattactgtcagcactctgataactcaccgtggacgttcggccaagggaccaaggtggaaatcaaa

SEQ ID NO: 25734 - protein, 108 aa, synthetic construct
  REGION 1..108: note = Description of Artificial Sequence: Synthetic polypeptide
EIVLTQSPGTLSLSPGERATLSCRASQSVYSSYLAWYQQKPGQAPRLLIYGASSRATGIPDRFSGSGSGTDFALTISRLEPEDCAVYYCQHSDNSPWTFGQGTKVEIK

SEQ ID NO: 25735 - DNA, 321 bp, synthetic construct
  misc_feature 1..321: note = Description of Artificial Sequence: Synthetic polynucleotide
  source 1..321: mol_type = other DNA
gacatccagatgacccagtctccatcctccctgtctgcatctgtaggagacagagtcaccatcacttgccgggcaagtcagggcattagaaatgatttaggctggtatcagcagaaaccagggaaagcccctaagcgcctgatctatgctgcatccagtttgcaaagtggggtcccatcaaggttcagcggcagtggatttgggacagaattcactctcaccatcagcagcctgcagcctgaagattttgcaacttattactgtcttcagcatagtaattacccgctcactttcggcggagggaccaaggtggagatcaaa

SEQ ID NO: 25736 - protein, 107 aa, synthetic construct
  REGION 1..107: note = Description of Artificial Sequence: Synthetic polypeptide
DIQMTQSPSSLSASVGDRVTITCRASQGIRNDLGWYQQKPGKAPKRLIYAASSLQSGVPSRFSGSGFGTEFTLTISSLQPEDFATYYCLQHSNYPLTFGGGTKVEIK

SEQ ID NO: 25737 - DNA, 324 bp, synthetic construct
  misc_feature 1..324: note = Description of Artificial Sequence: Synthetic polynucleotide
  source 1..324: mol_type = other DNA
gaaattgtgttgacgcagtctccaggcaccctgtctttgtctccaggggaaagagccaccctctcttgcagggccagtcagagtgttaacagcaactacttagcctggtaccagcagaaacctggccaggctcccaggctcctcatctatggtgcattcagcagggccactggcatcccagacagggtcagtggcagtgggtctgggacagacttcaatctcatcatcagcagactggagcctgaagattttgcagtgtattactgtcagcagtatgaaagctcaccgtggacgttcggccaagggaccaaggtggaaatcaaa

SEQ ID NO: 25738 - protein, 108 aa, synthetic construct
  REGION 1..108: note = Description of Artificial Sequence: Synthetic polypeptide
EIVLTQSPGTLSLSPGERATLSCRASQSVNSNYLAWYQQKPGQAPRLLIYGAFSRATGIPDRVSGSGSGTDFNLIISRLEPEDFAVYYCQQYESSPWTFGQGTKVEIK

SEQ ID NO: 25739 - DNA, 339 bp, synthetic construct
  misc_feature 1..339: note = Description of Artificial Sequence: Synthetic polynucleotide
  source 1..339: mol_type = other DNA
gtcatcgtgttgacccagtctccagactccctggctgtgtctctgggcgagagggccaccatcaactgcaagtccagccagagtgtattacacagctccaacagttacaactacttagcttggtaccagcagaaaccaggacagtctcctaaggtgctcatttactggacatctacccgggaatccggggtccctgaccgattcagtggcagcgggtctgggacagatttcactctcaccatcagcagcctgcaggctgaagatgtggcagtttattactgtcagcaatattatagtagtcctccgacgttcggccaagggaccaaggtggaaatcaaa

SEQ ID NO: 25740 - protein, 113 aa, synthetic construct
  REGION 1..113: note = Description of Artificial Sequence: Synthetic polypeptide
VIVLTQSPDSLAVSLGERATINCKSSQSVLHSSNSYNYLAWYQQKPGQSPKVLIYWTSTRESGVPDRFSGSGSGTDFTLTISSLQAEDVAVYYCQQYYSSPPTFGQGTKVEIK

SEQ ID NO: 25741 - DNA, 339 bp, synthetic construct
  misc_feature 1..339: note = Description of Artificial Sequence: Synthetic polynucleotide
  source 1..339: mol_type = other DNA
gatatcgtgatgacccagtctccagactccctgactgtgtctctgggcgagagggccaccatcaactgcaagtccagccagagtattttatacaactccaacaataacaactacttagcttggtaccagcagaaaccaggacagcctcctaagctgctcatttactgggcatctacccgggaatccggggtccctgaccgattcagtggcagcgggtctgggacagatttcattctcaccatcagcagcctgcaggctgaagatgtggcagtttactactgtcagcaatattatagcactcctcctactttcggcggagggaccaaggtggagatcaaa

SEQ ID NO: 25742 - protein, 113 aa, synthetic construct
  REGION 1..113: note = Description of Artificial Sequence: Synthetic polypeptide
DIVMTQSPDSLTVSLGERATINCKSSQSILYNSNNNNYLAWYQQKPGQPPKLLIYWASTRESGVPDRFSGSGSGTDFILTISSLQAEDVAVYYCQQYYSTPPTFGGGTKVEIK

SEQ ID NO: 25743 - DNA, 324 bp, synthetic construct
  misc_feature 1..324: note = Description of Artificial Sequence: Synthetic polynucleotide
  source 1..324: mol_type = other DNA
gaaattgtgttgacgcagtctccaggcacccggtcttggtctccaggggaaagagccaccctctcgtgcagggccagtcagagtgttagcagcagctacttagcctggtaccagcagaaacctggccaggctcccaggctcctcatctatggtgcatccaccagggccactggcatcccagacaggttcagtggcagtgggtctgggacagacttcactctcaccatcagcagactggagcctgaatattttgcagtttattactgtcagcagtatggtaactcaccgctcactttcggcggagggaccaaggtggagatcaaa

SEQ ID NO: 25744 - protein, 108 aa, synthetic construct
  REGION 1..108: note = Description of Artificial Sequence: Synthetic polypeptide
EIVLTQSPGTRSWSPGERATLSCRASQSVSSSYLAWYQQKPGQAPRLLIYGASTRATGIPDRFSGSGSGTDFTLTISRLEPEYFAVYYCQQYGNSPLTFGGGTKVEIK

SEQ ID NO: 25745 - DNA, 324 bp, synthetic construct
  misc_feature 1..324: note = Description of Artificial Sequence: Synthetic polynucleotide
  source 1..324: mol_type = other DNA
gaatttatgttgacgcagtctccaggcaccctgtctttgtctccaggggaaagagccaccctctcgtgcagggccagtcagagtgttagcagcagctacttagtctggtatcagcagaaacctggccaggctcccaggctcctcatctatggtgcatccaccagggccactggcatcccagacaggttcagtggcagtgggtctgggacagacttcactctcaccatcagcagactggagcctgaatattttgcagtttattactgtcagcagtatggttgctcaccgctcactttcggcggagggaccaaggtggagatcaca

SEQ ID NO: 25746 - protein, 108 aa, synthetic construct
  REGION 1..108: note = Description of Artificial Sequence: Synthetic polypeptide
EFMLTQSPGTLSLSPGERATLSCRASQSVSSSYLVWYQQKPGQAPRLLIYGASTRATGIPDRFSGSGSGTDFTLTISRLEPEYFAVYYCQQYGCSPLTFGGGTKVEIT

SEQ ID NO: 25747 - DNA, 324 bp, synthetic construct
  misc_feature 1..324: note = Description of Artificial Sequence: Synthetic polynucleotide
  source 1..324: mol_type = other DNA
gaaattgcgttgacgcagtctccaggcaccctgtctttgtctccaggggaaagagccaccctctcctgcagggccagtccgagtgttgacagcagctacttagcctggtaccagcagagacctggccaggctcccaggctcctcatctatggtgcatccagcagggcccctggcatcccagacaggttcagtggcagtgggtctgggacagacttcactctcaccatcagcagactggagcctgaagattttgcagtgtattactgtcagcagtatgaaagttcaccgtggacgttcggccaagggaccaaggtggaaatcaaa

SEQ ID NO: 25748 - protein, 108 aa, synthetic construct
  REGION 1..108: note = Description of Artificial Sequence: Synthetic polypeptide
EIALTQSPGTLSLSPGERATLSCRASPSVDSSYLAWYQQRPGQAPRLLIYGASSRAPGIPDRFSGSGSGTDFTLTISRLEPEDFAVYYCQQYESSPWTFGQGTKVEIK

SEQ ID NO: 25749 - DNA, 324 bp, synthetic construct
  misc_feature 1..324: note = Description of Artificial Sequence: Synthetic polynucleotide
  source 1..324: mol_type = other DNA
gaaattgtgttgacgcagtcgccaggcaccctgtctttgtctccaggggagagagccaccctctcctgcaggaccagtccgaatgttgacagcagctacttagcctggtaccagcagaaacctggccaggctcccaggctcctcatctatggtgcatccagcagggccactggcatcccagacaggttcagtggcagtgggtctgggacagacttcactctcaccatcagcagactggagcctgaagattttgcagtgttttactgtcagcagtatgaacgctcaccgtggacgttcggccaagggaccaaggtggaaatcaaa

SEQ ID NO: 25750 - protein, 108 aa, synthetic construct
  REGION 1..108: note = Description of Artificial Sequence: Synthetic polypeptide
EIVLTQSPGTLSLSPGERATLSCRTSPNVDSSYLAWYQQKPGQAPRLLIYGASSRATGIPDRFSGSGSGTDFTLTISRLEPEDFAVFYCQQYERSPWTFGQGTKVEIK

SEQ ID NO: 25751 - DNA, 324 bp, synthetic construct
  misc_feature 1..324: note = Description of Artificial Sequence: Synthetic polynucleotide
  source 1..324: mol_type = other DNA
gaaattgtgttgacgcagtctccaggcaccctgtctttgtctcaaggggaaagagccaccctctcctgcagggccagtcagagtgttagcagcaggtacttagcctggtaccagcagaaacctggccaggctcccagactcctcatctatggtgcatccagcagggccactggcatcccagacaggttcagtggcagtgggtctgggacagacttcactctcaccatcagcagactggagcctgaagattttgcagtatattactgtcagcattatgatagctcaccgtggacgttcggccaagggaccaaggtggaaatcaaa

SEQ ID NO: 25752 - protein, 108 aa, synthetic construct
  REGION 1..108: note = Description of Artificial Sequence: Synthetic polypeptide
EIVLTQSPGTLSLSQGERATLSCRASQSVSSRYLAWYQQKPGQAPRLLIYGASSRATGIPDRFSGSGSGTDFTLTISRLEPEDFAVYYCQHYDSSPWTFGQGTKVEIK

SEQ ID NO: 25753 - DNA, 339 bp, synthetic construct
  misc_feature 1..339: note = Description of Artificial Sequence: Synthetic polynucleotide
  source 1..339: mol_type = other DNA
gacatcgtgatgacccagtctccagactccctggctgtgtctctgggcgagagggccaccatcaactgcaagtccagccagactgttttacacagctccaacaattataactacttagcttggtaccagcagaagccaggacagccccctaaggtgctcatttactggacatctacccgggaatccggggtccctgaccgattcagtggcagcgggtctgggacagatttcactctcaccatcagcagcctgcaggctgaagatgtggcagtttattactgtcagcaatattttagtagtcctctgacgttcggccaagggaccaaggtggaaatcaaa

SEQ ID NO: 25754 - protein, 113 aa, synthetic construct
  REGION 1..113: note = Description of Artificial Sequence: Synthetic polypeptide
DIVMTQSPDSLAVSLGERATINCKSSQTVLHSSNNYNYLAWYQQKPGQPPKVLIYWTSTRESGVPDRFSGSGSGTDFTLTISSLQAEDVAVYYCQQYFSSPLTFGQGTKVEIK

SEQ ID NO: 25755 - DNA, 324 bp, synthetic construct
  misc_feature 1..324: note = Description of Artificial Sequence: Synthetic polynucleotide
  source 1..324: mol_type = other DNA
gaatttatgttgacgcagtctccaggcaccctgtcttggtctccaggggaaagagccaccctctcgtgcagggccagtcagagtgttagcagcagctacttagtctggtatcagcagaaacctggccaggctcccaggctcctcatctatggtgcatccaccagggccactggcatcccagacaggttcagtggcagtgggtctgggacagacttcactctcaccatcagcagactggagcctgaatattttgcagtttattactgtcagcagtatggttgctcaccgctcactttcggcggagggaccaaggtggagatcaca

SEQ ID NO: 25756 - protein, 108 aa, synthetic construct
  REGION 1..108: note = Description of Artificial Sequence: Synthetic polypeptide
EFMLTQSPGTLSWSPGERATLSCRASQSVSSSYLVWYQQKPGQAPRLLIYGASTRATGIPDRFSGSGSGTDFTLTISRLEPEYFAVYYCQQYGCSPLTFGGGTKVEIT

SEQ ID NO: 25757 - DNA, 321 bp, synthetic construct
  misc_feature 1..321: note = Description of Artificial Sequence: Synthetic polynucleotide
  source 1..321: mol_type = other DNA
gaaattgtgttgacgcagtctccaggcaccctgtctttgtctccaggggaaagagccaccctctcctgcagggccagtcagagtgttagcagcagttacttatcctggtaccagcagaaacctggccaggctcccaggctcctcatctatggtgcatccagcagggccactggcatcccagacaggttcagtggcagtgggtctgggacagacttcactctcaccatcagcagactggagcctgaagattttgcagtgtattactgtcagcagtatggtaggtcacggacgttcggccaagggaccaaggtggaaatcaga

SEQ ID NO: 25758 - protein, 107 aa, synthetic construct
  REGION 1..107: note = Description of Artificial Sequence: Synthetic polypeptide
EIVLTQSPGTLSLSPGERATLSCRASQSVSSSYLSWYQQKPGQAPRLLIYGASSRATGIPDRFSGSGSGTDFTLTISRLEPEDFAVYYCQQYGRSRTFGQGTKVEIR

SEQ ID NO: 25759 - DNA, 324 bp, synthetic construct
  misc_feature 1..324: note = Description of Artificial Sequence: Synthetic polynucleotide
  source 1..324: mol_type = other DNA
gaacctgtgttgacgcagtctccaggcaccctgtctttgtctccaggggaaagagccaccctctcctgcagggccagtcagaatatttacagcaactacttagcctggtaccagcagaaacctggccaggctcccaggctcctcatctatggtgcatccagcagggccactggcatcccagacaggttcagtggcagtgggtctgggacagacttcactctcaccatcagcagactggagcctgaagattttgcagtgtattgctgtcagcagtatgaaagctcaccgtggaccttcggccaagggaccaaggtggaaatcaaa

SEQ ID NO: 25760 - protein, 108 aa, synthetic construct
  REGION 1..108: note = Description of Artificial Sequence: Synthetic polypeptide
EPVLTQSPGTLSLSPGERATLSCRASQNIYSNYLAWYQQKPGQAPRLLIYGASSRATGIPDRFSGSGSGTDFTLTISRLEPEDFAVYCCQQYESSPWTFGQGTKVEIK

SEQ ID NO: 25761 - DNA, 321 bp, synthetic construct
  misc_feature 1..321: note = Description of Artificial Sequence: Synthetic polynucleotide
  source 1..321: mol_type = other DNA
gacatccagatgacccagtctccatcctcactgtctgcatcagtaggagacagagtcaccatcacttgtcgggcgagtcagggcattggcaagtatttagcctggtttcagcagaaaccagggaaagcccctaagtccctgatctatactacatccaatttacaaagtggggccccatcaaagttcagcggcagtggatctgggacagatttcactctcaccatcagcagcctgcagtatgaagattttgcaacttattactgccaacagtacagtaattacccgctcactttcggcggagggaccaaggtggagatcaat

SEQ ID NO: 25762 - protein, 107 aa, synthetic construct
  REGION 1..107: note = Description of Artificial Sequence: Synthetic polypeptide
DIQMTQSPSSLSASVGDRVTITCRASQGIGKYLAWFQQKPGKAPKSLIYTTSNLQSGAPSKFSGSGSGTDFTLTISSLQYEDFATYYCQQYSNYPLTFGGGTKVEIN

SEQ ID NO: 25763 - DNA, 321 bp, synthetic construct
  misc_feature 1..321: note = Description of Artificial Sequence: Synthetic polynucleotide
  source 1..321: mol_type = other DNA
gaaatagtgatgacgcagtctccagccaccctgtctgtgtctccaggggaaagagccaccctctcctgcagggccagtctgagtgttgtcaacagcttagcctggtaccagcagaaacctggccaggctcccaggctcctcatccatggtgcatccaccagggccactggtatcccagccaggttcagtggcagtgggtctgggacagagttcactctcaccatcagcagtctgcagtctgaagattttgcaatttattactgtcagcagtataatgactggccgtgcagttttggccaggggaccaagctggagatcaaa

SEQ ID NO: 25764 - protein, 107 aa, synthetic construct
  REGION 1..107: note = Description of Artificial Sequence: Synthetic polypeptide
EIVMTQSPATLSVSPGERATLSCRASLSVVNSLAWYQQKPGQAPRLLIHGASTRATGIPARFSGSGSGTEFTLTISSLQSEDFAIYYCQQYNDWPCSFGQGTKLEIK

SEQ ID NO: 25765 - DNA, 336 bp, synthetic construct
  misc_feature 1..336: note = Description of Artificial Sequence: Synthetic polynucleotide
  source 1..336: mol_type = other DNA
gatattgtgatgactcagtctccactctccctgcccgtcacccctggagagccggcctccatctcctgcaggtctagtcagagcctcctgcatagtaatggacacaactatttggattggtacctacagaagccagggcggtctccacagctcctgatctatttgggttctaatcgggcctccggggtccctgagaggttcagtggcagtggatcaggcacagattttacactgaaaatcagcagagtggaggctgaggatgttggggtttattactgcatgcaacctctacaaactccgttcactttcggcggagggaccaaggtggagatcaaa

SEQ ID NO: 25766 - protein, 112 aa, synthetic construct
  REGION 1..112: note = Description of Artificial Sequence: Synthetic polypeptide
DIVMTQSPLSLPVTPGEPASISCRSSQSLLHSNGHNYLDWYLQKPGRSPQLLIYLGSNRASGVPERFSGSGSGTDFTLKISRVEAEDVGVYYCMQPLQTPFTFGGGTKVEIK

SEQ ID NO: 25767 - DNA, 324 bp, synthetic construct; identical to SEQ ID NO: 24135
  misc_feature 1..324: note = Description of Artificial Sequence: Synthetic polynucleotide
  source 1..324: mol_type = other DNA

SEQ ID NO: 25768 - protein, 108 aa, synthetic construct; identical to SEQ ID NO: 24136
  REGION 1..108: note = Description of Artificial Sequence: Synthetic polypeptide

SEQ ID NO: 25769 - DNA, 339 bp, synthetic construct
  misc_feature 1..339: note = Description of Artificial Sequence: Synthetic polynucleotide
  source 1..339: mol_type = other DNA
gacatcgtgatgacccagtctccagactccctggctgtgtctctgggcgagggggccaccatcaactgcaagtcccgccagagtgttttacacagctccaacaattacaactacttagcttggtaccagcagaaagcaggacagcctcctaaactgctcatttactgggcttctacccgggaatccggggtccctgaccgattcagtggcagcgggtctgggacagatttcactctcaccatcagcagcctgcaggctgaagatgtggcagtttattactgtcagcaatattatagtactcctccgacgttcggccaagggaccaaggtggaaatcaga

SEQ ID NO: 25770 - protein, 113 aa, synthetic construct
  REGION 1..113: note = Description of Artificial Sequence: Synthetic polypeptide
DIVMTQSPDSLAVSLGEGATINCKSRQSVLHSSNNYNYLAWYQQKAGQPPKLLIYWASTRESGVPDRFSGSGSGTDFTLTISSLQAEDVAVYYCQQYYSTPPTFGQGTKVEIR

SEQ ID NO: 25771 - DNA, 339 bp, synthetic construct
  misc_feature 1..339: note = Description of Artificial Sequence: Synthetic polynucleotide
  source 1..339: mol_type = other DNA
gacatcgtgatgacccagtctccagactccctggctgtgtctctgggcgagagggccaccatcaactgtaagtccagccagagtattttatacagctccaacaataataactacttagcttggttccagcagaaaccaggacagcctcctaagctgctcatttattgggcatctacccgggaatccggggtccctgaccgattcagtggcagcgggtctgggacagatttcactctcaccatcagcagcctgcaggctgaagatgtggcagtttattactgtcagcaatattatattactcctccgacgttcggccaagggaccaaggtggaaatcaaa

SEQ ID NO: 25772 - protein, 113 aa, synthetic construct
  REGION 1..113: note = Description of Artificial Sequence: Synthetic polypeptide
DIVMTQSPDSLAVSLGERATINCKSSQSILYSSNNNNYLAWFQQKPGQPPKLLIYWASTRESGVPDRFSGSGSGTDFTLTISSLQAEDVAVYYCQQYYITPPTFGQGTKVEIK

SEQ ID NO: 25773 - DNA, 324 bp, synthetic construct
  misc_feature 1..324: note = Description of Artificial Sequence: Synthetic polynucleotide
  source 1..324: mol_type = other DNA
gaaattgtgttgacgcagtctccaggcaccctgtctttgtctccaggggaaagagccaccctctcctgcagggccagtcagagtgtttacagcagctacttagcctggtaccagcagaaacctggccaggctcccaggctcctcatttatggtgcatccagccgggccactggcatcccagacaggttcagtggcagtgggtctgggacagacttcgctctcaccatcagcagactggagcctgaagattttgcagtgtattactgtcagcactatgataactcaccgtggacgttcggccaagggaccaaggtggaaatcaaa

SEQ ID NO: 25774 - protein, 108 aa, synthetic construct
  REGION 1..108: note = Description of Artificial Sequence: Synthetic polypeptide
EIVLTQSPGTLSLSPGERATLSCRASQSVYSSYLAWYQQKPGQAPRLLIYGASSRATGIPDRFSGSGSGTDFALTISRLEPEDFAVYYCQHYDNSPWTFGQGTKVEIK

SEQ ID NO: 25775 - DNA, 324 bp, synthetic construct
  misc_feature 1..324: note = Description of Artificial Sequence: Synthetic polynucleotide
  source 1..324: mol_type = other DNA
gaaattgtgttgacgcagtctccaggcaccctgtatttgtctccaggggaaagagccaccctctcatgcagggccagtcagagtgtttacagcagctacttagcctggtaccagcagaaacctggccaggctcccaggctcctcatttatggtgcatccagccgggccactggcatcccagacaggttcagtggcagtgggtctgggacagacttcgctctcaccatcagcagactggagcctgaagattgtgcagtgtattactgtcagcactatgataactcaccgtggacgttcggccaagggaccaaggtggaaatcaaa

SEQ ID NO: 25776 - protein, 108 aa, synthetic construct
  REGION 1..108: note = Description of Artificial Sequence: Synthetic polypeptide
EIVLTQSPGTLYLSPGERATLSCRASQSVYSSYLAWYQQKPGQAPRLLIYGASSRATGIPDRFSGSGSGTDFALTISRLEPEDCAVYYCQHYDNSPWTFGQGTKVEIK

SEQ ID NO: 25777 - DNA, 336 bp, synthetic construct
  misc_feature 1..336: note = Description of Artificial Sequence: Synthetic polynucleotide
  source 1..336: mol_type = other DNA
gatattgtgatgactcagtctccactctccctgcccgtcacccctggagagccggcctccatctcctgcaggtctagtcagagcctcctgcatagtagtggatacaactatttggattggtacctgcagaagccagggcagtctccacagctcctgatctatttgggttctaatcgggcctccggggtccctgacaggttcagtggcagtggatcaggctcagattttacactgaagatcagcagagtggaggctgaggatgttggactttattactgcatgcaagctctacaccctcctctcactttcggcggagggaccaaggtggagatcaaa

SEQ ID NO: 25778 - protein, 112 aa, synthetic construct
  REGION 1..112: note = Description of Artificial Sequence: Synthetic polypeptide
DIVMTQSPLSLPVTPGEPASISCRSSQSLLHSSGYNYLDWYLQKPGQSPQLLIYLGSNRASGVPDRFSGSGSGSDFTLKISRVEAEDVGLYYCMQALHPPLTFGGGTKVEIK

SEQ ID NO: 25779 - DNA, 324 bp, synthetic construct
  misc_feature 1..324: note = Description of Artificial Sequence: Synthetic polynucleotide
  source 1..324: mol_type = other DNA
gaaattgtgttgacgcagtctccaggcaccctatctttgtctccaggggaaagagccaccctctcctgcagggccagtccgagtgttaacagctactacttagcctggtaccagcagaaacctggccaggctcccaggctcctcatctatggtgcaaccagcagggccactggcatcccagacaggttcagtggcagtgggtctggaacagacttcactctcaccatcagcagactggagcctgaagattttgcagtttatttctgtcagcagtatgaagactcaccgtggacgttcggccaagggaccaaggtggaaatcaaa

SEQ ID NO: 25780 - protein, 108 aa, synthetic construct
  REGION 1..108: note = Description of Artificial Sequence: Synthetic polypeptide
EIVLTQSPGTLSLSPGERATLSCRASPSVNSYYLAWYQQKPGQAPRLLIYGATSRATGIPDRFSGSGSGTDFTLTISRLEPEDFAVYFCQQYEDSPWTFGQGTKVEIK

SEQ ID NO: 25781 - DNA, 321 bp, synthetic construct
  misc_feature 1..321: note = Description of Artificial Sequence: Synthetic polynucleotide
  source 1..321: mol_type = other DNA
gaaatagtgatgacgcagtctccagtcaccctgtctgtgtctccaggggaaagagccaccctctcctgcagggccagtcagagtgttagcagcagcttagcctggtaccagcagaaacctggcctggctcccaggctcctcatctatggtgcatccaccagggccactggtatcccagccaggttcagtggcagtgggtctgggacagagttctcttttaccatcagcagcctgcagtctgaagattttgcagtttatttctgtcagcagtataatgactggccgtgcagttttggccagggctccaagctggagatccaa

SEQ ID NO: 25782 - protein, 107 aa, synthetic construct
  REGION 1..107: note = Description of Artificial Sequence: Synthetic polypeptide
EIVMTQSPVTLSVSPGERATLSCRASQSVSSSLAWYQQKPGLAPRLLIYGASTRATGIPARFSGSGSGTEFSFTISSLQSEDFAVYFCQQYNDWPCSFGQGSKLEIQ

SEQ ID NO: 25783 - DNA, 324 bp, synthetic construct
  misc_feature 1..324: note = Description of Artificial Sequence: Synthetic polynucleotide
  source 1..324: mol_type = other DNA
gaaattgtgttgacgcagtctccaggcaccctgtctttgtctccaggggaaagagccaccctctcctgcagggccagtcagagtgttgacagcaactacttagcctggtaccagcagaaacctggccaggctcccaggctcctcatctatggtgcatccagcagggcccctggcatcccagacaggttcagtggcagtgggtctgggacagacttcactctcaccatcaacagactggagcctgaagattttgcagtgtatttctgtcagcagtatgaaagctcaccgtggacgttcggccaagggaccaaggtggaaatcaaa

SEQ ID NO: 25784 - protein, 108 aa, synthetic construct
  REGION 1..108: note = Description of Artificial Sequence: Synthetic polypeptide
EIVLTQSPGTLSLSPGERATLSCRASQSVDSNYLAWYQQKPGQAPRLLIYGASSRAPGIPDRFSGSGSGTDFTLTINRLEPEDFAVYFCQQYESSPWTFGQGTKVEIK

SEQ ID NO: 25785 - DNA, 321 bp, synthetic construct
  misc_feature 1..321: note = Description of Artificial Sequence: Synthetic polynucleotide
  source 1..321: mol_type = other DNA
gacatccagatgacccagtctccatcctcactgtctgcatctgtaggagacagagtcaccatcacttgtcgggcgagtcagggcattagcaagtatttagcctggtttcagcagaaaccagggaaagcccctaagtccctgatctatgctgcatccagtttgcaaggtggggccccatcaaagttcagcggcagtggatctgggacagatttcactctcaccatcagcagcctgcagcctgaagattttgcaacttattactgccaacagtacagtaattacccgctcactttcggcggagggaccagggtggagatcaaa

SEQ ID NO: 25786 - protein, 107 aa, synthetic construct
  REGION 1..107: note = Description of Artificial Sequence: Synthetic polypeptide
DIQMTQSPSSLSASVGDRVTITCRASQGISKYLAWFQQKPGKAPKSLIYAASSLQGGAPSKFSGSGSGTDFTLTISSLQPEDFATYYCQQYSNYPLTFGGGTRVEIK

SEQ ID NO: 25787 - DNA, 339 bp, synthetic construct
  misc_feature 1..339: note = Description of Artificial Sequence: Synthetic polynucleotide
  source 1..339: mol_type = other DNA
gacatcgtgatgacccagtctccagactccctggctgtgtctctgggcgagagggccaccatcaactgcaagtccagccagactgttttacacagctccaacaattataactacttagcttggtaccagcagaagccaggacagccccctaaggtgctcctttactggacatctacccgggaatccggggtccctgaccgattcagtggcagcgggtctgggacagatttcactctcaccatcagcagcctgcaggctgaagatgtggcagtttattactgtcagcaatattttagtagtcctccgacgttcggccaagggaccagggtggaaatcaaa

SEQ ID NO: 25788 - protein, 113 aa, synthetic construct
  REGION 1..113: note = Description of Artificial Sequence: Synthetic polypeptide
DIVMTQSPDSLAVSLGERATINCKSSQTVLHSSNNYNYLAWYQQKPGQPPKVLLYWTSTRESGVPDRFSGSGSGTDFTLTISSLQAEDVAVYYCQQYFSSPPTFGQGTRVEIK

SEQ ID NO: 25789 - DNA, 324 bp, synthetic construct
  misc_feature 1..324: note = Description of Artificial Sequence: Synthetic polynucleotide
  source 1..324: mol_type = other DNA
gaaattgtgttgacgcagtctccaggcaccctgtatttgtctccaggggaaagagccaccctgtcatgcagggccagtcagagtgtttacagcagctacttagcgtggtaccagcagaaacctggccaggctcccaggctcatcatttatggtgcatccagccgggccactggcatcccagacaggttcagtggcagtgggtgtgggacagacttcgctctcaccatcagcagagtggagcatgaagattgtgcagtgtattactgtcagcactatgataactcaccgtggacgttcggccaagggaccaaggtggaaatcaaa

SEQ ID NO: 25790 - protein, 108 aa, synthetic construct
  REGION 1..108: note = Description of Artificial Sequence: Synthetic polypeptide
EIVLTQSPGTLYLSPGERATLSCRASQSVYSSYLAWYQQKPGQAPRLIIYGASSRATGIPDRFSGSGCGTDFALTISRVEHEDCAVYYCQHYDNSPWTFGQGTKVEIK

SEQ ID NO: 25791 - DNA, 324 bp, synthetic construct
  misc_feature 1..324: note = Description of Artificial Sequence: Synthetic polynucleotide
  source 1..324: mol_type = other DNA
gaaattgtgttgacgcagtctccaggcaccctgtatttgtctccaggggaaagagccaccctctcctgcagggccagtcagagtgtttacagcagctacttagcctggtaccagcagaaacctggccaggctcccaggctcctcatttatggtgcatccagccggtccactggcatcccagacaggttcagtggcagtgggtctgggacagacttcgctctcaccatcagcagactggagcctgaagattttgcagtgtattactgtcagcactatgataactcaccgtggacgttcggccaagggaccaaggtggaaatcaaa

SEQ ID NO: 25792 - protein, 108 aa, synthetic construct
  REGION 1..108: note = Description of Artificial Sequence: Synthetic polypeptide
EIVLTQSPGTLYLSPGERATLSCRASQSVYSSYLAWYQQKPGQAPRLLIYGASSRSTGIPDRFSGSGSGTDFALTISRLEPEDFAVYYCQHYDNSPWTFGQGTKVEIK

SEQ ID NO: 25793 - DNA, 324 bp, synthetic construct
  misc_feature 1..324: note = Description of Artificial Sequence: Synthetic polynucleotide
  source 1..324: mol_type = other DNA
gaaattgtgttgacgcagtctccaggcaccctgtctttgtctccaggggaaagagccaccctctcctgcagggccagtcagagtgttagcagcagctacttagcctggtaccagcagaaacctggccaggctcccaggctcctcatctatggtgcatccaccagggccactggcatcccagacaggttcagtggcagtgggtctgggacagacttcactctcaccatcagcagactggagcctgaatattttgcagtttattactgtcagcagtatggtaactcaccgctcactttcggcggagggaccaaggtggagatcaaa

SEQ ID NO: 25794 - protein, 108 aa, synthetic construct
  REGION 1..108: note = Description of Artificial Sequence: Synthetic polypeptide
EIVLTQSPGTLSLSPGERATLSCRASQSVSSSYLAWYQQKPGQAPRLLIYGASTRATGIPDRFSGSGSGTDFTLTISRLEPEYFAVYYCQQYGNSPLTFGGGTKVEIK

SEQ ID NO: 25795 - DNA, 324 bp, synthetic construct
  misc_feature 1..324: note = Description of Artificial Sequence: Synthetic polynucleotide
  source 1..324: mol_type = other DNA
gaaattgtgttgacgcagtctccaggcaccctgtctttgtctccaggggaaagagccaccctctcctgcagggccagtcagagtgttagcagcaggtacttagcctggtaccagcagaaacctggccaggctcccagactcctcatctatggtgcatccagcagggccactggcatcccagacaggttcagtggcagtgggtctgggacagacttcactctcaccatcagcagactggagcctgcagattttgcagtatattactgtcagcattatgatagctcaccgtggacgttcggccaagggaccaaggtggaaatcaaa

SEQ ID NO: 25796 - protein, 108 aa, synthetic construct
  REGION 1..108: note = Description of Artificial Sequence: Synthetic polypeptide
EIVLTQSPGTLSLSPGERATLSCRASQSVSSRYLAWYQQKPGQAPRLLIYGASSRATGIPDRFSGSGSGTDFTLTISRLEPADFAVYYCQHYDSSPWTFGQGTKVEIK

SEQ ID NO: 25797 - DNA, 324 bp, synthetic construct
  misc_feature 1..324: note = Description of Artificial Sequence: Synthetic polynucleotide
  source 1..324: mol_type = other DNA
gaatttatgttgacgcagtctccaggcaccctgtgttggtctccaggggaaagagccaccctctcgtgcagggccagtcagagtgttagcagcagctacttagtctggtatcagcagaaacctggccaggctcccaggctcctcatctatggtgcatccaccagggccactggcatcccagacaggttcagtggcagtgggtctgggacagacttcactctcaccatcagcagactggagcctgaatattttgcagtttattactgtcagcagtatggttgctcaccgctcactttcggcggagggaccaaggtggagatcaca

SEQ ID NO: 25798 - protein, 108 aa, synthetic construct
  REGION 1..108: note = Description of Artificial Sequence: Synthetic polypeptide
EFMLTQSPGTLCWSPGERATLSCRASQSVSSSYLVWYQQKPGQAPRLLIYGASTRATGIPDRFSGSGSGTDFTLTISRLEPEYFAVYYCQQYGCSPLTFGGGTKVEIT

SEQ ID NO: 25799 - DNA, 324 bp, synthetic construct
  misc_feature 1..324: note = Description of Artificial Sequence: Synthetic polynucleotide
  source 1..324: mol_type = other DNA
gaaattgtgttgacgcagtctccaggcaccctgtctttgtctccaggggagagagccaccctctcctgcagggccagtcagagtgttcacagcaggtacttagcctggtaccagcagaaacctggccaggctcccaaactcctcatctttggtgcatccagcagggccactggcatcccagacaggttcagtggcagtgggtctgggacggacttcactctcaccatcagcagactggagcctgaagattttgcagtatattactgtcagcattatgatagctcaccgtggacgttcggccaagggaccaaggtggaaatcaaa

SEQ ID NO: 25800 - protein, 108 aa, synthetic construct
  REGION 1..108: note = Description of Artificial Sequence: Synthetic polypeptide
EIVLTQSPGTLSLSPGERATLSCRASQSVHSRYLAWYQQKPGQAPKLLIFGASSRATGIPDRFSGSGSGTDFTLTISRLEPEDFAVYYCQHYDSSPWTFGQGTKVEIK

SEQ ID NO: 25801 - DNA, 339 bp, synthetic construct
  misc_feature 1..339: note = Description of Artificial Sequence: Synthetic polynucleotide
  source 1..339: mol_type = other DNA
gacatcgtgatgacccagtctccagattgcctggctgtgtctctgggcgagagggccaccatcaactgcaagtccagccagagtgttttatacacctccaacaataacaactacttagcttggtaccagcagaaaccaggacagcctcctaagctgctcatttactgggcatctacccgggaatccggggtccctgaccgattcagtggcagcgggtctgggacagatttcactctcaccatcagcagcctgcaggctgaagatgttgcagtttattattgtcagcactattataatactccgtggaagtttgtccaagggaccaaggtggaaatcaca

SEQ ID NO: 25802 - protein, 113 aa, synthetic construct
  REGION 1..113: note = Description of Artificial Sequence: Synthetic polypeptide
DIVMTQSPDCLAVSLGERATINCKSSQSVLYTSNNNNYLAWYQQKPGQPPKLLIYWASTRESGVPDRFSGSGSGTDFTLTISSLQAEDVAVYYCQHYYNTPWKFVQGTKVEIT

SEQ ID NO: 25803 - DNA, 324 bp, synthetic construct
  misc_feature 1..324: note = Description of Artificial Sequence: Synthetic polynucleotide
  source 1..324: mol_type = other DNA
gaatttatgttgacgcagtctccaggcaccctgtattggtctccaggggaaagagccaccatctcgtgcagggccagtcagagtgttagcagcagctacttagtctggtatcagcagaaacctggccaggctcccaggctcctcatctatggtgcatccaccagggccactggcatcccagacaggttcagtggcagtgggtctgggacagacttcactctcaccatcagcagactggagcctgaatattttgcagtttattactgtcagcagtatggttgctcaccgctcactttcggcggagggaccaaggtggagatcaca

SEQ ID NO: 25804 - protein, 108 aa, synthetic construct
  REGION 1..108: note = Description of Artificial Sequence: Synthetic polypeptide
EFMLTQSPGTLYWSPGERATISCRASQSVSSSYLVWYQQKPGQAPRLLIYGASTRATGIPDRFSGSGSGTDFTLTISRLEPEYFAVYYCQQYGCSPLTFGGGTKVEIT

SEQ ID NO: 25805 - DNA, 324 bp, synthetic construct
  misc_feature 1..324: note = Description of Artificial Sequence: Synthetic polynucleotide
  source 1..324: mol_type = other DNA
gaaattgtgttgacgcagtctccaggcaccctgtctttgtctccaggggaaagagccaccctctcctgcagggccaggcagagtgttgacagcagttatttagcctggtaccagcagaaacgtggccaggctcccaggctcctcatctatggtgcatccagcagggccactggcatcccagacaggttcagtggcagtgggtctgggacagacttcactctcaccatcagcaggctggagcctgaagattttgcagtatattactgtcagcagtatgaaagctcaccgtggacgttcggccaagggaccaaggtggaaatcaaa

SEQ ID NO: 25806 - protein, 108 aa, synthetic construct
  REGION 1..108: note = Description of Artificial Sequence: Synthetic polypeptide
EIVLTQSPGTLSLSPGERATLSCRARQSVDSSYLAWYQQKRGQAPRLLIYGASSRATGIPDRFSGSGSGTDFTLTISRLEPEDFAVYYCQQYESSPWTFGQGTKVEIK

SEQ ID NO: 25807 - DNA, 339 bp, synthetic construct
  misc_feature 1..339: note = Description of Artificial Sequence: Synthetic polynucleotide
  source 1..339: mol_type = other DNA
gacatcgtgatgacccagtctccagactccctggctgtgtctctgggcgcgagggccaccatcaattgcaggtccagccagagtgttttatacagctccaacaattataactacttagcttggtaccagcagaaaccaggacagcctcctaagctgctcatttactgggcatctacccgggattccggggtccctgaccgattcagtggcagcgggtctgggacagatttcactctcaccatcagcagcctgcaggctgaagatgtggccgtttattactgtcagcaatattatactactccgtgcagttttggccaggggaccaagctggagatcaag

SEQ ID NO: 25808 - protein, 113 aa, synthetic construct
  REGION 1..113: note = Description of Artificial Sequence: Synthetic polypeptide
DIVMTQSPDSLAVSLGARATINCRSSQSVLYSSNNYNYLAWYQQKPGQPPKLLIYWASTRDSGVPDRFSGSGSGTDFTLTISSLQAEDVAVYYCQQYYTTPCSFGQGTKLEIK

SEQ ID NO: 25809 - DNA, 321 bp, synthetic construct
  misc_feature 1..321: note = Description of Artificial Sequence: Synthetic polynucleotide
  source 1..321: mol_type = other DNA
gacatccagatgacccagtctccatcctcactgtctgcatctgtaggagacagagtcaccatcacttgtcgggcgagtcaggtcattagcaagtatttagcctggtttcagcagaaaccagggaaagcccctaagtccctgatctatgctgcatccagtttgcaaagtggggccccatcaaagttcagcggcagtggatctgggacagatttcactctcaccatcagcagcctgcagcctgaagattttgcaacttattactgccaacagtacagtaattacccgctcactttcggcggagggaccaaggtggagatcaaa

SEQ ID NO: 25810 - protein, 107 aa, synthetic construct
  REGION 1..107: note = Description of Artificial Sequence: Synthetic polypeptide
DIQMTQSPSSLSASVGDRVTITCRASQVISKYLAWFQQKPGKAPKSLIYAASSLQSGAPSKFSGSGSGTDFTLTISSLQPEDFATYYCQQYSNYPLTFGGGTKVEIK

SEQ ID NO: 25811 - DNA, 339 bp, synthetic construct
  misc_feature 1..339: note = Description of Artificial Sequence: Synthetic polynucleotide
  source 1..339: mol_type = other DNA
gacagcgtgatgacccagtctccagactccctggctgtgtctctgggcgagagggccaccatcaactgcaagtccagccagagtgttttacacagctctaataaaaagaactacttagcttggtaccagcagaaaccaggacagcctcctaagctgctcatttactgggcatctacccgggaatccggggtccctgaccgattcagtggcagcgggtctgggacagatttcactctcaccatcagcagtctgcaggctgaagatgtggcagtttattactgtcagcaatattataggactccgtggacgttcggccaagggaccaaggtggaaatcaaa

SEQ ID NO: 25812 - protein, 113 aa, synthetic construct
  REGION 1..113: note = Description of Artificial Sequence: Synthetic polypeptide
DSVMTQSPDSLAVSLGERATINCKSSQSVLHSSNKKNYLAWYQQKPGQPPKLLIYWASTRESGVPDRFSGSGSGTDFTLTISSLQAEDVAVYYCQQYYRTPWTFGQGTKVEIK

SEQ ID NO: 25813 - DNA, 339 bp, synthetic construct
  misc_feature 1..339: note = Description of Artificial Sequence: Synthetic polynucleotide
  source 1..339: mol_type = other DNA
gacatcgtgatgacccagtctccagattgcctggctgtgtctctgggcgagagggccaccatcaactgcaagtccagccagagtgttttatacacctccaacaataacaactacttagcttggtaccagcagaaaccaggacagcctcctaagctgctcatttactgggcatctacccgggaatccggggtccctgaccgattcagtggcagcgggtctgggacagatttcactctcaccatcagcagcctgcaggctgaagatgttgcagtttattattgtcagcactattataatactccgtggaagtttgtccaagggaccaaggtggaaatcaaa

SEQ ID NO: 25814 - protein, 113 aa, synthetic construct
  REGION 1..113: note = Description of Artificial Sequence: Synthetic polypeptide
DIVMTQSPDCLAVSLGERATINCKSSQSVLYTSNNNNYLAWYQQKPGQPPKLLIYWASTRESGVPDRFSGSGSGTDFTLTISSLQAEDVAVYYCQHYYNTPWKFVQGTKVEIK

SEQ ID NO: 25815 - DNA, 324 bp, synthetic construct
  misc_feature 1..324: note = Description of Artificial Sequence: Synthetic polynucleotide
  source 1..324: mol_type = other DNA
gaaatagtgatgacgcagtctccagccaccctgtctgtgtctccaggggaaagagccaccctctcctgcagggccagtcagagtgttagcagaaatttagcctggttccagcagaaacctggccaggctcccaggctcctcatctatggtgcatccatcagggccactggtatcccagccaggttcagtggcagtgggtctgggacagagttcactctcaccatctacagcctgcagtctgaagattttgcagtttattactgtcagcagtataataactggcctccgctcactttcggcggagggaccaaggtggagatcaaa

SEQ ID NO: 25816 - protein, 108 aa, synthetic construct
  REGION 1..108: note = Description of Artificial Sequence: Synthetic polypeptide
EIVMTQSPATLSVSPGERATLSCRASQSVSRNLAWFQQKPGQAPRLLIYGASIRATGIPARFSGSGSGTEFTLTIYSLQSEDFAVYYCQQYNNWPPLTFGGGTKVEIK

SEQ ID NO: 25817 - DNA, 321 bp, synthetic construct
  misc_feature 1..321: note = Description of Artificial Sequence: Synthetic polynucleotide
  source 1..321: mol_type = other DNA
gaaatagtgatgacgcagtctccagccaccctgtctgtgtctccaggggaaagagccaccctctcctgcagggccagtcagagtgttgccagcagcttagcctggtaccagcagaaacctggccaggctcccaggctcctcatctttggtacatccaccagggccactggtatcccagccaggttcagtggcagtgggtctgggacagagttcactctcataatcagcagcctgcagtctgaagattttgcagtttattactgtcagcagtataatgactggccgtgcagttttggcctggggaccaagctggagatcaaa

SEQ ID NO: 25818 - protein, 107 aa, synthetic construct
  REGION 1..107: note = Description of Artificial Sequence: Synthetic polypeptide
EIVMTQSPATLSVSPGERATLSCRASQSVASSLAWYQQKPGQAPRLLIFGTSTRATGIPARFSGSGSGTEFTLIISSLQSEDFAVYYCQQYNDWPCSFGLGTKLEIK

SEQ ID NO: 25819 - DNA, 321 bp, synthetic construct
  misc_feature 1..321: note = Description of Artificial Sequence: Synthetic polynucleotide
  source 1..321: mol_type = other DNA
gaaattgtgttgacgcagtctccaggcaccctgtctttgtctccaggggaaagagccaccctctcctgcagggccagtcagagttttagcagcgcctacttagcctggtaccagcagaaacctggccaggctcccaggctcctcatctatggtacttccagcagggccactggcatcccagacaggttcagtggcagtgggtctgggacagatttcactctcaccatcggcagactggagcctgaagattttgcagtgtattactgtcaacagtatggtaactcaaggacgttcggccaagggaccaaggtggaaatcaaa

SEQ ID NO: 25820 - protein, 107 aa, synthetic construct
  REGION 1..107: note = Description of Artificial Sequence: Synthetic polypeptide
EIVLTQSPGTLSLSPGERATLSCRASQSFSSAYLAWYQQKPGQAPRLLIYGTSSRATGIPDRFSGSGSGTDFTLTIGRLEPEDFAVYYCQQYGNSRTFGQGTKVEIK

SEQ ID NO: 25821 - DNA, 339 bp, synthetic construct
  misc_feature 1..339: note = Description of Artificial Sequence: Synthetic polynucleotide
  source 1..339: mol_type = other DNA
gacatcgtgatgacccagtctccagactccctggctgtgtctctgggcgagagggccaccatcaactgcaagtccagccagagtgttttgtacagctccaacagtcacaactacttagcttggtaccagcagaaaccaggacagcctcctaaactgctcatttactgggcatctatccgggaatccggggtccctgaccgattcagtggcagcgggtctgggacagatttcactctctccatcagcagcctgcaggctgaagatgtggcagtttattactgtcagcaatattatagtactccgtgcagttttggccaggggaccaagctggagatcaaa

SEQ ID NO: 25822 - protein, 113 aa, synthetic construct
  REGION 1..113: note = Description of Artificial Sequence: Synthetic polypeptide
DIVMTQSPDSLAVSLGERATINCKSSQSVLYSSNSHNYLAWYQQKPGQPPKLLIYWASIRESGVPDRFSGSGSGTDFTLSISSLQAEDVAVYYCQQYYSTPCSFGQGTKLEIK

SEQ ID NO: 25823 - DNA, 324 bp, synthetic construct
  misc_feature 1..324: note = Description of Artificial Sequence: Synthetic polynucleotide
  source 1..324: mol_type = other DNA
gaaattgtgttgacgcagtcgccaggcaccctgtctttgtctccaggggagagagccaccctctcctgcagggccagtcagaatgttgacagcaactacttagcctggtaccagcagaaacctggccaggctcccaggctcctcatctatggtgcatccagcagggccactggcatcccagacaggttcagtggcagtgggtctgggacagacttcactctcaccatcagcagactggagcctgaagattttgcagtgttttactgtcagcagtatgaacgctcaccgtggacgttcggccaagggaccaaggtggaaatcaaa

SEQ ID NO: 25824 - protein, 108 aa, synthetic construct
  REGION 1..108: note = Description of Artificial Sequence: Synthetic polypeptide
EIVLTQSPGTLSLSPGERATLSCRASQNVDSNYLAWYQQKPGQAPRLLIYGASSRATGIPDRFSGSGSGTDFTLTISRLEPEDFAVFYCQQYERSPWTFGQGTKVEIK

SEQ ID NO: 25825 - DNA, 339 bp, synthetic construct
  misc_feature 1..339: note = Description of Artificial Sequence: Synthetic polynucleotide
  source 1..339: mol_type = other DNA
gacatcgtgatgacccagtctccagactccctggctgtgtctctgggcgagagggccaccatcaactgcaagtccagccagactgttttacacagctccaacaattataactacttagcttggtaccagcagaagccaggacagccccctaaggtgctcatttactggacatctacccgggaatccggggtccctgaccgattcagtggcagcgggtctgggacagatttcactctcaccatcagcagcctgcaggctgaagatgtggcagtttattactgtcagcaatattttagtagtcctccgacgttcggccaagggaccaaggtggaaatcaaa

SEQ ID NO: 25826 - protein, 113 aa, synthetic construct
  REGION 1..113: note = Description of Artificial Sequence: Synthetic polypeptide
DIVMTQSPDSLAVSLGERATINCKSSQTVLHSSNNYNYLAWYQQKPGQPPKVLIYWTSTRESGVPDRFSGSGSGTDFTLTISSLQAEDVAVYYCQQYFSSPPTFGQGTKVEIK

SEQ ID NO: 25827 - DNA, 339 bp, synthetic construct
  misc_feature 1..339: note = Description of Artificial Sequence: Synthetic polynucleotide
  source 1..339: mol_type = other DNA
gacatcgtgatgacccagtctccagactccctggctgtgtctctgggcgagagggccaccatcaactgcaagtccagccagagtgttttatacagcttcaacaattacaactacttagcttggtaccagcagaaaccaggacagcctcctaagaagctcatttactgggcatctacccgggaatccggggtccctgaccgattcagtggcagcgggtctgggacagatttcactctcaccatcagcagcctgcaggctgaagatgtggcagtttattcctgtcagcaatattatagtagtcctccgacgttcggccaagggaccaaggtggaaatcaaa

SEQ ID NO: 25828 - protein, 113 aa, synthetic construct
  REGION 1..113: note = Description of Artificial Sequence: Synthetic polypeptide
DIVMTQSPDSLAVSLGERATINCKSSQSVLYSFNNYNYLAWYQQKPGQPPKKLIYWASTRESGVPDRFSGSGSGTDFTLTISSLQAEDVAVYSCQQYYSSPPTFGQGTKVEIK

SEQ ID NO: 25829 - DNA, 339 bp, synthetic construct
  misc_feature 1..339: note = Description of Artificial Sequence: Synthetic polynucleotide
  source 1..339: mol_type = other DNA
gacatcgttatgacccagtctccagactccctggctgtgtctctgggcgagagggccaccatcaactgcaagtccagccagagtgttttattcagctccaacaattataactacttagcttggtaccagcagagaccaggacagcctcctaacctgctcatttactgggcatctacccgggaatccggggtccctgaccgattcagtggcagcgggtctgggacagatttcactctcaccatcagcagcctgcaggctgctgatgtggcagtttattactgtcagcaatattatagttctcctccgacgttcggccaagggaccacggtgcaaatcaaa

SEQ ID NO: 25830 - protein, 113 aa, synthetic construct
  REGION 1..113: note = Description of Artificial Sequence: Synthetic polypeptide
DIVMTQSPDSLAVSLGERATINCKSSQSVLFSSNNYNYLAWYQQRPGQPPNLLIYWASTRESGVPDRFSGSGSGTDFTLTISSLQAADVAVYYCQQYYSSPPTFGQGTTVQIK

SEQ ID NO: 25831 - DNA, 339 bp, synthetic construct
  misc_feature 1..339: note = Description of Artificial Sequence: Synthetic polynucleotide
  source 1..339: mol_type = other DNA
gacatcgtgatgacccagtctccagactccctggctgtgtctctgggcgagagggccaccatcaactgcaagtccagccagactgttttacacagcttcaacaattataactacttagcttggtaccagcagaagccaggacagccccctaaggtgctcatttactggacatctacccgggaatccggggtccctgaccgattcagtggcagcgggtctgggacagatttcactctcaccatcagcagcctgcaggctgaagatgtggcagtttattactgtcagcaatattttagtagtcctccgacgttcggccaagggaccaaggtggaaatcaaa

SEQ ID NO: 25832 - protein, 113 aa, synthetic construct
  REGION 1..113: note = Description of Artificial Sequence: Synthetic polypeptide
DIVMTQSPDSLAVSLGERATINCKSSQTVLHSFNNYNYLAWYQQKPGQPPKVLIYWTSTRESGVPDRFSGSGSGTDFTLTISSLQAEDVAVYYCQQYFSSPPTFGQGTKVEIK

SEQ ID NO: 25833 - DNA, 324 bp, synthetic construct
  misc_feature 1..324: note = Description of Artificial Sequence: Synthetic polynucleotide
  source 1..324: mol_type = other DNA
gaaattgtgttgacgcagtctccaggcaccctgtatttgtcttcaggggaaagagccaccctctcctgcagggccagtcagagtgtttacagcagctacttagcctggtaccagcagaaacctgcccaggctcccaggctcctcatttatggtgcatccagccggtccactggcatcccagacaggttcagtggcagtgggtctgggacagacttcgctctcaccatcagcagactggagcctgaagattttgcagtgtattactgtcagcactatgataactcaccgtggacgttcggccaagggaccaaggtggaaatcaaa

SEQ ID NO: 25834 - protein, 108 aa, synthetic construct
  REGION 1..108: note = Description of Artificial Sequence: Synthetic polypeptide
EIVLTQSPGTLYLSSGERATLSCRASQSVYSSYLAWYQQKPAQAPRLLIYGASSRSTGIPDRFSGSGSGTDFALTISRLEPEDFAVYYCQHYDNSPWTFGQGTKVEIK

SEQ ID NO: 25835 - DNA, 324 bp, synthetic construct
  misc_feature 1..324: note = Description of Artificial Sequence: Synthetic polynucleotide
  source 1..324: mol_type = other DNA
gaaattgtgttgacgcagtctccaggcaccctgtatttgtctccaggggaaagagccaccctctcctgcagggccagtcagagtgtttacagcagctacttagcctggtaccagcagaaacctgcccaggctcccaggctcctcatctatggtgcatccagccggtccactggcatcccagacaggttcagtggcagtgggtctgggacagacttcgctctcaccatcagcagactggagcctgaagattttgcagtgtattactgtcagcactatgataactcaccgtggacgttcggccaagggaccaaggtggaaatcaaa

SEQ ID NO: 25836 - protein, 108 aa, synthetic construct
  REGION 1..108: note = Description of Artificial Sequence: Synthetic polypeptide
EIVLTQSPGTLYLSPGERATLSCRASQSVYSSYLAWYQQKPAQAPRLLIYGASSRSTGIPDRFSGSGSGTDFALTISRLEPEDFAVYYCQHYDNSPWTFGQGTKVEIK

SEQ ID NO: 25837 - DNA, 339 bp, synthetic construct
  misc_feature 1..339: note = Description of Artificial Sequence: Synthetic polynucleotide
  source 1..339: mol_type = other DNA
gacatcgtgatgacccagtctccagactccctggctgtgtctctgggcgagagggccaccatcaactgcaagtccagccagagtgttttatacagttccaacaataataactacttagcttggtaccagcagaaggcaggacagcctcctaagctgctcatttactgggcatctacccgggaatccggggtccctgaccgattcagtggcagcgggtctgggacagatttcactctcaccatcagcagcctgcaggcggaagatgtggcagtttattactgtcagcaatattatagtattcctccgacgttcggccaagggaccaaggtggaaatcaaa

SEQ ID NO: 25838 - protein, 113 aa, synthetic construct
  REGION 1..113: note = Description of Artificial Sequence: Synthetic polypeptide
DIVMTQSPDSLAVSLGERATINCKSSQSVLYSSNNNNYLAWYQQKAGQPPKLLIYWASTRESGVPDRFSGSGSGTDFTLTISSLQAEDVAVYYCQQYYSIPPTFGQGTKVEIK

SEQ ID NO: 25839 - DNA, 321 bp, synthetic construct
  misc_feature 1..321: note = Description of Artificial Sequence: Synthetic polynucleotide
  source 1..321: mol_type = other DNA
gacatccagatgacccagtctccatcctcactgtctgcatctgtaggagacagagtcaccatcacttgtcgggcgagtcagggcattagcaagtatttagcctggtttcagcagaaaccagggaaagcccctaagtccctgatctatgctgcatccagtttgcaaggtggggccccatctaagttcagcggcagtggatctgggacagatttcactctcaccatcagcagcctgcagcctgaagattttgcaacttattactgccaacagtacagtaattacccactcactttcggcggagggaccagggtggagatcaaa

SEQ ID NO: 25840 - protein, 107 aa, synthetic construct; identical to SEQ ID NO: 25786
  REGION 1..107: note = Description of Artificial Sequence: Synthetic polypeptide

SEQ ID NO: 25841 - DNA, 321 bp, synthetic construct
  misc_feature 1..321: note = Description of Artificial Sequence: Synthetic polynucleotide
  source 1..321: mol_type = other DNA
gaaattgtgttgacgcagtctccaggcaccctgtctttgtctccaggggaaagagccaccctctcctgcagggccagtcagatttttagcagcagctacttagcctggtaccagcagaaacctggccagtctcccaggctcctcatctatggtgcatccagcagggccactggcatcccagacaggttcagtggcagtgggtctgggacagacttcactctcaccatcagcagactggagcctgaagattttgcagtgtattactgtcagcagtatggtagctcacggacgttcggccaagggaccaaggtggaaatcaaa

SEQ ID NO: 25842 - protein, 107 aa, synthetic construct
  REGION 1..107: note = Description of Artificial Sequence: Synthetic polypeptide
EIVLTQSPGTLSLSPGERATLSCRASQIFSSSYLAWYQQKPGQSPRLLIYGASSRATGIPDRFSGSGSGTDFTLTISRLEPEDFAVYYCQQYGSSRTFGQGTKVEIK

SEQ ID NO: 25843 - DNA, 321 bp, synthetic construct
  misc_feature 1..321: note = Description of Artificial Sequence: Synthetic polynucleotide
  source 1..321: mol_type = other DNA
gaaatagtgatgacgcagtctccagccaccctgtctctgtctccaggggaaagagccaccctctcctgcagggccagtctgagtgttgtcaacagcttagcctggtaccagcagaaacctggccaggctcccaggctcctcatctatggtgcatccaccagggccactggtatcccagccaggttcagtggcagtgggtctgggacagagttcactctcaccatcagcagcctgcagtctgaagattttgcaatttattactgtcagcagtataatgactggccgtgcagttttggccaggggaccaagctggagatcaaa

SEQ ID NO: 25844 - protein, 107 aa, synthetic construct
  REGION 1..107: note = Description of Artificial Sequence: Synthetic polypeptide
EIVMTQSPATLSLSPGERATLSCRASLSVVNSLAWYQQKPGQAPRLLIYGASTRATGIPARFSGSGSGTEFTLTISSLQSEDFAIYYCQQYNDWPCSFGQGTKLEIK

SEQ ID NO: 25845 - DNA, 339 bp, synthetic construct
  misc_feature 1..339: note = Description of Artificial Sequence: Synthetic polynucleotide
  source 1..339: mol_type = other DNA
gacatcgtgatgacccagtctccagactgcctggctgtgtctctgggcgagagggccaccatcagctgcatgtccagccagagtgttttacacagcttcaacaataagaactacttaacttggtaccagcagaaaccaggacagcctcctaagctgctcatttactgggcatctacttgggaatccggggtccctgaccgattcagtggcagcgggtctgggacagatttcagtctcccgatcggcagcctgcaggctgaagatgtggcagtttattactgtcagcaatattatagtattcctccgacgttcggccaagggaccaaggtggaaatcaaa

SEQ ID NO: 25846 - protein, 113 aa, synthetic construct
  REGION 1..113: note = Description of Artificial Sequence: Synthetic polypeptide
DIVMTQSPDCLAVSLGERATISCMSSQSVLHSFNNKNYLTWYQQKPGQPPKLLIYWASTWESGVPDRFSGSGSGTDFSLPIGSLQAEDVAVYYCQQYYSIPPTFGQGTKVEIK

SEQ ID NO: 25847 - DNA, 339 bp, synthetic construct
  misc_feature 1..339: note = Description of Artificial Sequence: Synthetic polynucleotide
  source 1..339: mol_type = other DNA
gacatcgtgatgacccagtctccagactccctggctgtgtctctgggcgagagggccaccatcaactgcaagtccagccagagtgttttgtacagctccaacagtcacaactacttagcttggtaccagcagaaaccaggacagcctcctaaactgctcattttctgggcatctatccgggaatccggggtccctgaccgattcagtggcagcgggtctgggacagatttcactctctccatcagcagcatgcaggctgaagatgtggcagtttattactgtcagcaatattatagtactccgtgcagttttggccaggggaccaagctggagatcaaa

SEQ ID NO: 25848 - protein, 113 aa, synthetic construct
  REGION 1..113: note = Description of Artificial Sequence: Synthetic polypeptide
DIVMTQSPDSLAVSLGERATINCKSSQSVLYSSNSHNYLAWYQQKPGQPPKLLIFWASIRESGVPDRFSGSGSGTDFTLSISSMQAEDVAVYYCQQYYSTPCSFGQGTKLEIK

SEQ ID NO: 25849 - DNA, 339 bp, synthetic construct
  misc_feature 1..339: note = Description of Artificial Sequence: Synthetic polynucleotide
  source 1..339: mol_type = other DNA
gacatcgtgatgacccagtctccagactccctggctgtgtctctgggcgagagggccaccatcaactgtaagtccagccagagtattttatacagctccaacaataataactacttagcttggttccagcagaaaccaggacagcctcctaagctgctcatttattgggcatctacccgggaatccggggtccctgaccgattcagtggcagcgggtgtgggacagatttcactctcaccatcagcagcctgcaggctgaagatgtggcagtttattactgtcagcaatattatattactcctccgacgttcggccaagggaccaaggtggaaatcaaa

SEQ ID NO: 25850 - protein, 113 aa, synthetic construct
  REGION 1..113: note = Description of Artificial Sequence: Synthetic polypeptide
DIVMTQSPDSLAVSLGERATINCKSSQSILYSSNNNNYLAWFQQKPGQPPKLLIYWASTRESGVPDRFSGSGCGTDFTLTISSLQAEDVAVYYCQQYYITPPTFGQGTKVEIK

SEQ ID NO: 25851 - DNA, 324 bp, synthetic construct
  misc_feature 1..324: note = Description of Artificial Sequence: Synthetic polynucleotide
  source 1..324: mol_type = other DNA
gaaattgtgttgacgcagtctccaggcaccctgtatttgtctccaggggaaagagccaccctctcatgcagggccagtcagagtgtttacagcagctacttagcctggtaccagcagaaacctggccaggctcccaggctcctcatttatggtgcatccagccgggccactggcatcccagacaggttcagtggcagtgggtctgggacagacttcgctctcaccatcagcagactggagcctgaagattttgcagtgtattactgtcagcactatgataactcaccgtggacgttcggccaagggaccaaggtggaaatcaaa

SEQ ID NO: 25852 - protein, 108 aa, synthetic construct
  REGION 1..108: note = Description of Artificial Sequence: Synthetic polypeptide
EIVLTQSPGTLYLSPGERATLSCRASQSVYSSYLAWYQQKPGQAPRLLIYGASSRATGIPDRFSGSGSGTDFALTISRLEPEDFAVYYCQHYDNSPWTFGQGTKVEIK

SEQ ID NO: 25853 - DNA, 339 bp, synthetic construct
  misc_feature 1..339: note = Description of Artificial Sequence: Synthetic polynucleotide
  source 1..339: mol_type = other DNA
gacatcgttatgacccagtctccagactccctggctgtgtctctgggcgagagggccaccatcaattgcaagtccagccagagtgttttattcagctccaacaattataattacttagcttggtaccagcagagaccaggacagcctcataacctgctcatttactgggcatctacccgggaatccggggtccctgaccgattcagtggcagcgggtctgggacagatttcactctcaccatcagcagcctgcaggctgctgatgtggcagtttattactgtcagcaatatcatagttctcctctgacgttcggccaagggaccacggtgcaaatcaaa

SEQ ID NO: 25854 - protein, 113 aa, synthetic construct
  REGION 1..113: note = Description of Artificial Sequence: Synthetic polypeptide
DIVMTQSPDSLAVSLGERATINCKSSQSVLFSSNNYNYLAWYQQRPGQPHNLLIYWASTRESGVPDRFSGSGSGTDFTLTISSLQAADVAVYYCQQYHSSPLTFGQGTTVQIK

SEQ ID NO: 25855 - DNA, 324 bp, synthetic construct; identical to SEQ ID NO: 25805
  misc_feature 1..324: note = Description of Artificial Sequence: Synthetic polynucleotide
  source 1..324: mol_type = other DNA

SEQ ID NO: 25856 - protein, 108 aa, synthetic construct; identical to SEQ ID NO: 25806
  REGION 1..108: note = Description of Artificial Sequence: Synthetic polypeptide

SEQ ID NO: 25857 - DNA, 324 bp, synthetic construct
  misc_feature 1..324: note = Description of Artificial Sequence: Synthetic polynucleotide
  source 1..324: mol_type = other DNA
gaaattgtgttgacgcagtctccaggcaccctgtctttgtctccaggggaaagagccaccctctcatgcagggccagtcagagtgtttacagcagctacttagcctggtaccagcagaaacctggccaggctcccaggctcctcatttatggtgcatccagccgggccactggcatcccagacaggttcagtggcagtgggtctgggacagacttcgctctcaccatcagcagactggagcctgaagattttgcagtgtattactgtcagcactctgataactcaccgtggacgttcggccaagggaccaaggtggaaatcaaa

SEQ ID NO: 25858 - protein, 108 aa, synthetic construct
  REGION 1..108: note = Description of Artificial Sequence: Synthetic polypeptide
EIVLTQSPGTLSLSPGERATLSCRASQSVYSSYLAWYQQKPGQAPRLLIYGASSRATGIPDRFSGSGSGTDFALTISRLEPEDFAVYYCQHSDNSPWTFGQGTKVEIK

SEQ ID NO: 25859 - DNA, 339 bp, synthetic construct
  misc_feature 1..339: note = Description of Artificial Sequence: Synthetic polynucleotide
  source 1..339: mol_type = other DNA
gacatcgtgatgacccagtctccagactccctggctgtgtctctgggcgagagggccaccatcaactgcaagtccagccagagtattttatacagctccaacaattacaactacttagcttggtaccagcagaaaccaggacagcctcctaagttgctcatttactgggcatctacccgggaatccggggtccctgaccgattcagtggcagcgggtctgggacagatttcactctcaccatcagcagcctgcaggctgaagatgtggcagtttattactgtcagcaatattatagtactccgtggacgttcggccaagggaccaaggtggaaatcaaa

SEQ ID NO: 25860 - protein, 113 aa, synthetic construct
  REGION 1..113: note = Description of Artificial Sequence: Synthetic polypeptide
DIVMTQSPDSLAVSLGERATINCKSSQSILYSSNNYNYLAWYQQKPGQPPKLLIYWASTRESGVPDRFSGSGSGTDFTLTISSLQAEDVAVYYCQQYYSTPWTFGQGTKVEIK

SEQ ID NO: 25861 - DNA, 324 bp, synthetic construct
  misc_feature 1..324: note = Description of Artificial Sequence: Synthetic polynucleotide
  source 1..324: mol_type = other DNA
gaaattgtgttgacgcagtctccaggcaccctgtatttgtctccaggggaaagagccaccctctcatgcagggccagtcagagtgtttacagcagctacttagcctggtaccagcagaaacctggccaggctcccaggctcctcatttatggtgcatccagccggtccactggcatcccagacaggttcagtggcagtgggtctgggacagacttcgctctcaccatcagcagactggagcctgaagattgtgcagtgtattactgtcagcactctgataactcaccgtggacgttcggccaagggaccaaggtggaaatcaaa

SEQ ID NO: 25862 - protein, 108 aa, synthetic construct
  REGION 1..108: note = Description of Artificial Sequence: Synthetic polypeptide
EIVLTQSPGTLYLSPGERATLSCRASQSVYSSYLAWYQQKPGQAPRLLIYGASSRSTGIPDRFSGSGSGTDFALTISRLEPEDCAVYYCQHSDNSPWTFGQGTKVEIK

SEQ ID NO: 25863 - DNA, 324 bp, synthetic construct
  misc_feature 1..324: note = Description of Artificial Sequence: Synthetic polynucleotide
  source 1..324: mol_type = other DNA
gaaattgtgttgacgcagtctccaggcacccggtatttgtctccaggggaaagagccaccctctcatgcagggccagtcagagtgtttacagcagctacttagcctggtaccagcagaaacctggccaggctcccaggctcctcatttatggtgcatccagccggtccactggcatcccagacaggttcagtggcagtgggtgtgggacagacttcgctctcaccatcagcagagtggagcctgaagattgtgcagtgtattactgtcagcactctgataactcaccgtggacgttcggccaagggaccaaggtggaaatcaaa

SEQ ID NO: 25864 - protein, 108 aa, synthetic construct
  REGION 1..108: note = Description of Artificial Sequence: Synthetic polypeptide
EIVLTQSPGTRYLSPGERATLSCRASQSVYSSYLAWYQQKPGQAPRLLIYGASSRSTGIPDRFSGSGCGTDFALTISRVEPEDCAVYYCQHSDNSPWTFGQGTKVEIK

SEQ ID NO: 25865 - DNA, 324 bp, synthetic construct
  misc_feature 1..324: note = Description of Artificial Sequence: Synthetic polynucleotide
  source 1..324: mol_type = other DNA
gaaattgtgttgacgcagtctccaggcaccctgtatttgtctccaggggaaagagccaccctctcatgcagggccagtcagagtgtttacagcagctacttagcctggtaccagcagaaacctggccaggctcccaggctcctcatttatggtgcatccagccggtccactggcatcccagacaggttcagtggcagtgggtctgggacagacttcgctctcaccatcagcagagtggagcctgaagattgtgcagtgtattactgtcagcactctgataactcaccgtggacgttcggccaagggaccaaggtggaaatcaaa

SEQ ID NO: 25866 - protein, 108 aa, synthetic construct
  REGION 1..108: note = Description of Artificial Sequence: Synthetic polypeptide
EIVLTQSPGTLYLSPGERATLSCRASQSVYSSYLAWYQQKPGQAPRLLIYGASSRSTGIPDRFSGSGSGTDFALTISRVEPEDCAVYYCQHSDNSPWTFGQGTKVEIK

SEQ ID NO: 25867 - DNA, 324 bp, synthetic construct
  misc_feature 1..324: note = Description of Artificial Sequence: Synthetic polynucleotide
  source 1..324: mol_type = other DNA
gaatttatgttgacgcagtctccaggcaccctgtatttgtctccaggggaaagagccaccctctcgtgcagggccagtcagagtgttagcagcagctacttagtctggtatcagcagaaacctggccaggctcccaggctcctcatctatggtgcatccaccagggccactggcatcccagacaggttcagtggcagtgggtctgggacagacttcactctcaccatcagcagactggagcctgaatattttgcagtttattactgtcagcagtatggttgctcaccgctcactttcggcggagggaccaaggtggagatcaca

SEQ ID NO: 25868 - protein, 108 aa, synthetic construct
  REGION 1..108: note = Description of Artificial Sequence: Synthetic polypeptide
EFMLTQSPGTLYLSPGERATLSCRASQSVSSSYLVWYQQKPGQAPRLLIYGASTRATGIPDRFSGSGSGTDFTLTISRLEPEYFAVYYCQQYGCSPLTFGGGTKVEIT

SEQ ID NO: 25869 - DNA, 339 bp, synthetic construct
  misc_feature 1..339: note = Description of Artificial Sequence: Synthetic polynucleotide
  source 1..339: mol_type = other DNA
gacatcgtgatgacccagtctccagattgcctggctgtgtctctgggcgagagggccaccatcaactgcaagtccagccagagtgttttatacacctccaacaataacaactacttagcttggtaccagcagaaaccaggacagcctcctaagctgctcatttactgggcatctacccgggaatccggggtccctgaccgattcagtggcagcgggtctgggacagatttcactctcaccatcagcagcctgcaggctgaagatgttgcagtttattattgtcagcactacaatgaaactccagggaagtttgtccaagtgaccaaggtggaaatcaca

SEQ ID NO: 25870 - protein, 113 aa, synthetic construct
  REGION 1..113: note = Description of Artificial Sequence: Synthetic polypeptide
DIVMTQSPDCLAVSLGERATINCKSSQSVLYTSNNNNYLAWYQQKPGQPPKLLIYWASTRESGVPDRFSGSGSGTDFTLTISSLQAEDVAVYYCQHYNETPGKFVQVTKVEIT

SEQ ID NO: 25871 - DNA, 324 bp, synthetic construct
  misc_feature 1..324: note = Description of Artificial Sequence: Synthetic polynucleotide
  source 1..324: mol_type = other DNA
gaaattgtgttgacgcagtctccaggcaccctgtatttgtcttcaggggaaagagccaccctctcatgcagggccagtcagagtgtttacagcagctacttagcctggtaccagcagaaacctggccaggctcccaggctcctcatttatggtgcatccagccggtccactggcatcccagacaggttcagtggcagtgggtgtgggacagacttcgctctcaccatcagcagagtggagcctgaagattttgcagtgtattactgtcagcattctgataactcaccgtggacgttcggccaagggaccaaggtggaaatcaaa

SEQ ID NO: 25872 - protein, 108 aa, synthetic construct
  REGION 1..108: note = Description of Artificial Sequence: Synthetic polypeptide
EIVLTQSPGTLYLSSGERATLSCRASQSVYSSYLAWYQQKPGQAPRLLIYGASSRSTGIPDRFSGSGCGTDFALTISRVEPEDFAVYYCQHSDNSPWTFGQGTKVEIK

SEQ ID NO: 25873 - DNA, 339 bp, synthetic construct
  misc_feature 1..339: note = Description of Artificial Sequence: Synthetic polynucleotide
  source 1..339: mol_type = other DNA
gacatcgtgatgacccagtctccagactccctggctgtgtctctgggcgagagggccaccaccaattgtaagtccagccagagtgttttacacaggtccaacaattacaactacttagcgtggtaccagcagaaaccaggacagcctcctaagctgctcatttactgggcatctacccgggaatccggggtccctgaccgattcagtggcagcgggtctgggacagatttcactctcaccatcagcagcctgcaggctgaagatgtggcagtttattactgtcagcaatattatagtactcctccgacgttcggccaagggaccaaggtggaaatcaaa

SEQ ID NO: 25874 - protein, 113 aa, synthetic construct
  REGION 1..113: note = Description of Artificial Sequence: Synthetic polypeptide
DIVMTQSPDSLAVSLGERATTNCKSSQSVLHRSNNYNYLAWYQQKPGQPPKLLIYWASTRESGVPDRFSGSGSGTDFTLTISSLQAEDVAVYYCQQYYSTPPTFGQGTKVEIK

SEQ ID NO: 25875 - DNA, 324 bp, synthetic construct
  misc_feature 1..324: note = Description of Artificial Sequence: Synthetic polynucleotide
  source 1..324: mol_type = other DNA
gaacttgtgttgacgcagtctccaggcaccctgtctttgtctccagggaaaagagtcaccctctcctgcagggccagtcagaatatttacagcagctacttagcctggtaccagcagaaacctggccaggctcccagactcctcatctatggtgcatccagcagggccactggcatcccagacaggttcagtggcagtgggtctgggacagacttcactctcaccatcaccagactggagcctgaagattttgcagtgtattgctgtcagcagtatgaaagctcaccgtggaccttcggccaagggaccaaggtggaaatcaaa

SEQ ID NO: 25876 - protein, 108 aa, synthetic construct
  REGION 1..108: note = Description of Artificial Sequence: Synthetic polypeptide
ELVLTQSPGTLSLSPGKRVTLSCRASQNIYSSYLAWYQQKPGQAPRLLIYGASSRATGIPDRFSGSGSGTDFTLTITRLEPEDFAVYCCQQYESSPWTFGQGTKVEIK

SEQ ID NO: 25877 - DNA, 324 bp, synthetic construct
  misc_feature 1..324: note = Description of Artificial Sequence: Synthetic polynucleotide
  source 1..324: mol_type = other DNA
gaaattgtgttgacgcagtctccaggcaccctgtctttgtctccaggggaaatacccaccctctcctgcagggccagtcagagtgttgacagcggctacttagcctggtaccagcagaaacctggccaggctcccaggctcctcatctatggtgcatccagcagggcccctggcatcccagacaggttcagtggcagtgggtctgggacagacttcactctcaccatcagcagactggaacctgaagattttgcagtgtattactgtcagcagtatgaaagctcaccgtggacgttcggccaagggaccaaggtggaaatcaaa

SEQ ID NO: 25878 - protein, 108 aa, synthetic construct
  REGION 1..108: note = Description of Artificial Sequence: Synthetic polypeptide
EIVLTQSPGTLSLSPGEIPTLSCRASQSVDSGYLAWYQQKPGQAPRLLIYGASSRAPGIPDRFSGSGSGTDFTLTISRLEPEDFAVYYCQQYESSPWTFGQGTKVEIK

SEQ ID NO: 25879 - DNA, 324 bp, synthetic construct
  misc_feature 1..324: note = Description of Artificial Sequence: Synthetic polynucleotide
  source 1..324: mol_type = other DNA
gaaattgtgttgacgcagtctccaggcaccctgtctttgtctccaggggaaagagccaccctctcctgcagggccagtcagagtattaacagcaactacttagcctggtaccagcagaaacctggccaggctcccaggctcctcatctatggtgcatccagcagggccactggcatcccagacaggttcagtggcagtgggtctgggacagacttcactctcaccatcagcagactggagcctgaagattttgcagtgttttactgtcagcagtatgagagctcaccgtggacgttcggccaagggaccaaggtggaaatcaaa

SEQ ID NO: 25880 - protein, 108 aa, synthetic construct
  REGION 1..108: note = Description of Artificial Sequence: Synthetic polypeptide
EIVLTQSPGTLSLSPGERATLSCRASQSINSNYLAWYQQKPGQAPRLLIYGASSRATGIPDRFSGSGSGTDFTLTISRLEPEDFAVFYCQQYESSPWTFGQGTKVEIK

SEQ ID NO: 25881 - DNA, 339 bp, synthetic construct
  misc_feature 1..339: note = Description of Artificial Sequence: Synthetic polynucleotide
  source 1..339: mol_type = other DNA
gacatcgtgttgacccagtcgccagactccctggctgtgtctctgggcgagagggccaccatcaactgcaagtccagacagagtgttttatacagctccaacaattacaactacttaacttggtaccagcagaaaccaggacagcctcctaagctgctcatttactgggcatctacccgggaatccggggtccctgaccgattcagtggcagcgggtctgggacagatttcactctcaccatcagcagcctgcaggctgaagacgtggcagtttattactgtcagcaatattatagttctcctcctactttcggcggagggaccaaggtggagatcaaa

SEQ ID NO: 25882 - protein, 113 aa, synthetic construct
  REGION 1..113: note = Description of Artificial Sequence: Synthetic polypeptide
DIVLTQSPDSLAVSLGERATINCKSRQSVLYSSNNYNYLTWYQQKPGQPPKLLIYWASTRESGVPDRFSGSGSGTDFTLTISSLQAEDVAVYYCQQYYSSPPTFGGGTKVEIK

SEQ ID NO: 25883 - DNA, 339 bp, synthetic construct
  misc_feature 1..339: note = Description of Artificial Sequence: Synthetic polynucleotide
  source 1..339: mol_type = other DNA
gacatcgtgatgacccagtctccagattgcctggctgtgtctctgggcgagagggccaccatcaactgcaagtccagccagagtgttttatacacctccaacaataacaactacttagcttggtaccagcagaaaccaggacagcctcctaagctgctcatttactgggcatctacccgggaatccggggtccctgaccgattcagtggcagcgggtctgggacagatttcactctcaccatcagcagcctgcaggctgaagatgttgcagtttattattgtcagcaatattataatactccgtggacgttcgtccaagggaccaaggtggaaatcaaa

SEQ ID NO: 25884 - protein, 113 aa, synthetic construct
  REGION 1..113: note = Description of Artificial Sequence: Synthetic polypeptide
DIVMTQSPDCLAVSLGERATINCKSSQSVLYTSNNNNYLAWYQQKPGQPPKLLIYWASTRESGVPDRFSGSGSGTDFTLTISSLQAEDVAVYYCQQYYNTPWTFVQGTKVEIK

SEQ ID NO: 25885 - DNA, 324 bp, synthetic construct
  misc_feature 1..324: note = Description of Artificial Sequence: Synthetic polynucleotide
  source 1..324: mol_type = other DNA
gaaattgtgttgacgcagtctccaggcaccctgtctttgtctccaggggaaagagccaccctctcctgcagggccagtcagagtgttgacagcagctacttagcctggtaccagcagaaacctggccaggctcccaggctcctcatctatggtgcatccagcagggcccctggcatcccagacaggttcagtggcagtgggtctgggacagacttcactctcaccatcagcagactggagcctgaagattttgcagtgtattactgtcagcagtatgaaagctcaccgtggacgttcggccaagggaccaaggtggaaatcaaa

SEQ ID NO: 25886 - protein, 108 aa, synthetic construct
  REGION 1..108: note = Description of Artificial Sequence: Synthetic polypeptide
EIVLTQSPGTLSLSPGERATLSCRASQSVDSSYLAWYQQKPGQAPRLLIYGASSRAPGIPDRFSGSGSGTDFTLTISRLEPEDFAVYYCQQYESSPWTFGQGTKVEIK

SEQ ID NO: 25887 - DNA, 321 bp, synthetic construct
  misc_feature 1..321: note = Description of Artificial Sequence: Synthetic polynucleotide
  source 1..321: mol_type = other DNA
gacatccagatgacccagtctccatcctcactgtctgcatcagtaggagacagagtcaccatcacttgtcgggcgagtcagggcattggcaagtatttagcctggtttcagcagaaaccagggaaagcccctaagtccctgatctatactacatccagtttgcaaagtggggccccatcaaagttcagcggcagtggatctgggacagatttcactctcaccatcagcagcctgcagtatgaagattttgcaacttattactgccaacagtacagtaattacccgctcactttcggcggagggaccaaggtggagatcaat

SEQ ID NO: 25888 - protein, 107 aa, synthetic construct
  REGION 1..107: note = Description of Artificial Sequence: Synthetic polypeptide
DIQMTQSPSSLSASVGDRVTITCRASQGIGKYLAWFQQKPGKAPKSLIYTTSSLQSGAPSKFSGSGSGTDFTLTISSLQYEDFATYYCQQYSNYPLTFGGGTKVEIN

SEQ ID NO: 25889 - DNA, 321 bp, synthetic construct
  misc_feature 1..321: note = Description of Artificial Sequence: Synthetic polynucleotide
  source 1..321: mol_type = other DNA
gacatccagatgacccagtctccatcctcactgtctgcttctgtaggggacagagtcaccatcacttgtcgggcgagtcagggcattggcaggtatttagcctggtttcagcagaaaccagggagagcccctaagtccctgatctatactgcatccagtttgcaaagtggggccccatcaaagttcagcggcagtggatctgggacagatttcactctcaccatcagcagcctgcagcctgaagattttgcaacttattactgccaacagtacagtaattacccgctcactttcggcggagggaccaaagtggagatcaat

SEQ ID NO: 25890 - protein, 107 aa, synthetic construct
  REGION 1..107: note = Description of Artificial Sequence: Synthetic polypeptide
DIQMTQSPSSLSASVGDRVTITCRASQGIGRYLAWFQQKPGRAPKSLIYTASSLQSGAPSKFSGSGSGTDFTLTISSLQPEDFATYYCQQYSNYPLTFGGGTKVEIN

SEQ ID NO: 25891 - DNA, 324 bp, synthetic construct
  misc_feature 1..324: note = Description of Artificial Sequence: Synthetic polynucleotide
  source 1..324: mol_type = other DNA
gaaattgtgttgacgcagtctccaggcaccctgtatttgtctccaggggaaagagccaccctctcatgcagggccagtcagagtgtttacagcagctacttagcctggtaccagcagaaacctggccaggctcccaggctcctcatttatggtgcatccagccggtccactggcatcccagacaggttcagtggcagtgggtgtgggacagacttcgctctcaccatcagcagactggagcctgaagattgtgcagtgtattactgtcagcactctgataactcaccgtggacgttcggccaagggaccaaggtggaaatcaaa

SEQ ID NO: 25892 - protein, 108 aa, synthetic construct
  REGION 1..108: note = Description of Artificial Sequence: Synthetic polypeptide
EIVLTQSPGTLYLSPGERATLSCRASQSVYSSYLAWYQQKPGQAPRLLIYGASSRSTGIPDRFSGSGCGTDFALTISRLEPEDCAVYYCQHSDNSPWTFGQGTKVEIK

SEQ ID NO: 25893 - DNA, 324 bp, synthetic construct
  misc_feature 1..324: note = Description of Artificial Sequence: Synthetic polynucleotide
  source 1..324: mol_type = other DNA
gaaattgtgttgacgcagtctccaggcaccctgtatttgtctccaggggaaagagccaccctctcgtgcagggccagtcagagtgttagcagcagctacttagcctggtaccagcagaaacctggccaggctcccaggctcctcatctatggtgcatccaccagggccactggcatcccagacaggttcagtggcagtgggtctgggacagacttcactctcaccatcagcagactggagcctgaatattttgcagtttattactgtcagcagtatggtaactcaccgctcactttcggcggagggaccaaggtggagatcaaa

SEQ ID NO: 25894 - protein, 108 aa, synthetic construct
  REGION 1..108: note = Description of Artificial Sequence: Synthetic polypeptide
EIVLTQSPGTLYLSPGERATLSCRASQSVSSSYLAWYQQKPGQAPRLLIYGASTRATGIPDRFSGSGSGTDFTLTISRLEPEYFAVYYCQQYGNSPLTFGGGTKVEIK

SEQ ID NO: 25895 - DNA, 324 bp, synthetic construct
  misc_feature 1..324: note = Description of Artificial Sequence: Synthetic polynucleotide
  source 1..324: mol_type = other DNA
gaaattgtgttgacgcagtctccaggcaccctgtctttgtctccaggggaaagagccaccctctcatgcagggccagtcagagtgtttacagcagctacttagcctggtaccagcagaaacctggccaggctcccaggctcctcatttatggtgcatccagccggtccactggcatcccagacaggttcagtggcagtgggtctgggacagacttcgctctcaccatcagcagactggagcctgaagattttgcagtgtattactgtcagcactctgataactcaccgtggacgttcggccaagggaccaaggtggaaatcaaa

SEQ ID NO: 25896 - protein, 108 aa, synthetic construct
  REGION 1..108: note = Description of Artificial Sequence: Synthetic polypeptide
EIVLTQSPGTLSLSPGERATLSCRASQSVYSSYLAWYQQKPGQAPRLLIYGASSRSTGIPDRFSGSGSGTDFALTISRLEPEDFAVYYCQHSDNSPWTFGQGTKVEIK

SEQ ID NO: 25897 - DNA, 324 bp, synthetic construct
  misc_feature 1..324: note = Description of Artificial Sequence: Synthetic polynucleotide
  source 1..324: mol_type = other DNA
gaaattgtgttgacgcagtctccaggcaccctgtatttgtcttcaggggaaagagccaccctctcatgcagggccagtcagagtgtttacagcagctacttagcctggtaccagcagaaacctggccaggctcccaggctcctcatttatggtgcatccagccggtccactggcatcccagacaggttcagtggcagtgggtgtgggacagacttcgctctcaccatcagcagagtggagcctgaagattgtgcagtgtattactgtcagcattctgataactcaccgtggacgttcggccaagggaccaaggtggaaatcaaa

SEQ ID NO: 25898 - protein, 108 aa, synthetic construct
  REGION 1..108: note = Description of Artificial Sequence: Synthetic polypeptide
EIVLTQSPGTLYLSSGERATLSCRASQSVYSSYLAWYQQKPGQAPRLLIYGASSRSTGIPDRFSGSGCGTDFALTISRVEPEDCAVYYCQHSDNSPWTFGQGTKVEIK

SEQ ID NO: 25899 - DNA, 339 bp, synthetic construct
  misc_feature 1..339: note = Description of Artificial Sequence: Synthetic polynucleotide
  source 1..339: mol_type = other DNA
gacatcgttatgacccagtctccagactccctggctgtgtctctgggcgagagggccaccatcaattgcaagtccagccagagtgttttattcagctccaacaattataattacttagcttggtaccagcagagaccaggacagcctcctaacctgctcatttactgggcatctacccgggaatccggggtccctgaccgattcagtggcagcgggtctgggacagatttcactctcaccatcagcagcctgcaggctgctgatgtggcagtttattactgtcagcaatattatagttctcctctgacgttcggccaagggaccacggtgcaaatcaaa

SEQ ID NO: 25900 - protein, 113 aa, synthetic construct
  REGION 1..113: note = Description of Artificial Sequence: Synthetic polypeptide
DIVMTQSPDSLAVSLGERATINCKSSQSVLFSSNNYNYLAWYQQRPGQPPNLLIYWASTRESGVPDRFSGSGSGTDFTLTISSLQAADVAVYYCQQYYSSPLTFGQGTTVQIK

SEQ ID NO: 25901 - DNA, 339 bp, synthetic construct
  misc_feature 1..339: note = Description of Artificial Sequence: Synthetic polynucleotide
  source 1..339: mol_type = other DNA
gacatcgtgatgacccagtctccagattgcctggctgtgtctctgggcgagagggccaccatcaactgcaagtccagccagagtgttttatacacctccaacaataacaactacttagcttggtaccagcagaaaccaggacagcctcctaagctgctcatttactgggcatctacccgggaatccggggtccctgaccgattcagtggcagcgggtctgggacagatttcactctcaccatcagcagcctgcaggctgaagatgttgcagtttattatcgtcagcactacaatgatactccagggaagtttgtccaaggcatcatggtggaaatcaca

SEQ ID NO: 25902 - protein, 113 aa, synthetic construct
  REGION 1..113: note = Description of Artificial Sequence: Synthetic polypeptide
DIVMTQSPDCLAVSLGERATINCKSSQSVLYTSNNNNYLAWYQQKPGQPPKLLIYWASTRESGVPDRFSGSGSGTDFTLTISSLQAEDVAVYYRQHYNDTPGKFVQGIMVEIT

SEQ ID NO: 25903 - DNA, 324 bp, synthetic construct
  misc_feature 1..324: note = Description of Artificial Sequence: Synthetic polynucleotide
  source 1..324: mol_type = other DNA
gaaattgtgttgacgcagtctccaggcaccctgtctttgtctccaggggaaagagccaccctctcctgcagggccagtcagagtgttagcagcagctacttagcctggtaccagcagaaacgtggccaggctcccaggctcctcatctatggtgcatccagcagggccactggcattccagacaggttcagtggcagtgggtctgggacagacttcactctcaccatcagcagactggagcctgaagattttgcagtgtattactgtcagcagtatgaaagctcaccgtggacgttcggccaagggaccaaggtggaaatcaaa

SEQ ID NO: 25904 - protein, 108 aa, synthetic construct
  REGION 1..108: note = Description of Artificial Sequence: Synthetic polypeptide
EIVLTQSPGTLSLSPGERATLSCRASQSVSSSYLAWYQQKRGQAPRLLIYGASSRATGIPDRFSGSGSGTDFTLTISRLEPEDFAVYYCQQYESSPWTFGQGTKVEIK

SEQ ID NO: 25905 - DNA, 324 bp, synthetic construct
  misc_feature 1..324: note = Description of Artificial Sequence: Synthetic polynucleotide
  source 1..324: mol_type = other DNA
gaaattgtgttgacgcagtctccaggcacccggtatttgtctccagtggaaagagccaccctctcatgcagggccagtcagagtgtttacagcagctacttagcctggtaccagcagaaacctggccaggctcccaggctcctcatttatggtgcatccagccggtccactggcctcccagacaggttcagtggcagtgggtgtgggacagacttcgctctcaccatcagcagagtggagcctgaagattgtgcagtgtattactgtcagcattctgataactcaccgtggacgttcggccaagggaccaaggtggaaatcaaa

SEQ ID NO: 25906 - protein, 108 aa, synthetic construct
  REGION 1..108: note = Description of Artificial Sequence: Synthetic polypeptide
EIVLTQSPGTRYLSPVERATLSCRASQSVYSSYLAWYQQKPGQAPRLLIYGASSRSTGLPDRFSGSGCGTDFALTISRVEPEDCAVYYCQHSDNSPWTFGQGTKVEIK

SEQ ID NO: 25907 - DNA, 324 bp, synthetic construct
  misc_feature 1..324: note = Description of Artificial Sequence: Synthetic polynucleotide
  source 1..324: mol_type = other DNA
gaaattgtgttgacgcagtctccaggcaccctgtcttggtctccaggggaaagagccaccctctcgtgcagggccagtcagagtgttagcagcagctacttagcctggtaccagcagaaacctggccaggctcccaggctcctcatctatggtgcatccaccagggccactggcatcccagacaggttcagtggcagtgggtctgggacagacttcactctcaccatcagcagactggagcctgaatattttgcagtttattactgtcagcagtatggtaactcaccgctcactttcggcggagggaccaaggtggagatcaaa

SEQ ID NO: 25908 - protein, 108 aa, synthetic construct
  REGION 1..108: note = Description of Artificial Sequence: Synthetic polypeptide
EIVLTQSPGTLSWSPGERATLSCRASQSVSSSYLAWYQQKPGQAPRLLIYGASTRATGIPDRFSGSGSGTDFTLTISRLEPEYFAVYYCQQYGNSPLTFGGGTKVEIK

SEQ ID NO: 25909 - DNA, 324 bp, synthetic construct
  misc_feature 1..324: note = Description of Artificial Sequence: Synthetic polynucleotide
  source 1..324: mol_type = other DNA
gaatttatgttgacgcagtctccaggcaccctgtattggtctccaggggaaagagccaccctctcgagcagggccagtgagagtgttagcagcagctacttagtctggtatcagcagaaacctggccaggctcccaggctcctcatctatggtgcatccaccagggccactggcatcccagacaggttcagtggcagtgggtctgggacagacttcactctcaccatcagcagactggagcctgaatattttgcagtttattactgtcagcagtatggttgctcaccgctcactttcggcggagggaccaaggtggagatcaca

SEQ ID NO: 25910 - protein, 108 aa, synthetic construct
  REGION 1..108: note = Description of Artificial Sequence: Synthetic polypeptide
EFMLTQSPGTLYWSPGERATLSSRASESVSSSYLVWYQQKPGQAPRLLIYGASTRATGIPDRFSGSGSGTDFTLTISRLEPEYFAVYYCQQYGCSPLTFGGGTKVEIT

SEQ ID NO: 25911 - DNA, 324 bp, synthetic construct
  misc_feature 1..324: note = Description of Artificial Sequence: Synthetic polynucleotide
  source 1..324: mol_type = other DNA
gaatttatgttgacgcagtctccaggcaccctgtcttggtctccaggggaaagagccaccctctcgtgcagggccagtgagagtgttagcagcagctacttagtctggtatcagcagaaacctggccaggctcccaggctcctcatctatggtgcatccaccagggccactggcatcccagacaggttcagtggcagtgggtctgggacagacttcactctcaccatcagcagactggagcctgaatattttgcagtttattactgtcagcagtatggttgctcaccgctcactttcggcggagggaccaaggtggagatcaca

SEQ ID NO: 25912 - protein, 108 aa, synthetic construct
  REGION 1..108: note = Description of Artificial Sequence: Synthetic polypeptide
EFMLTQSPGTLSWSPGERATLSCRASESVSSSYLVWYQQKPGQAPRLLIYGASTRATGIPDRFSGSGSGTDFTLTISRLEPEYFAVYYCQQYGCSPLTFGGGTKVEIT

SEQ ID NO: 25913 - DNA, 324 bp, synthetic construct
  misc_feature 1..324: note = Description of Artificial Sequence: Synthetic polynucleotide
  source 1..324: mol_type = other DNA
gaaattgtgttgacgcagtctccaggcaccctgtatttgtctccaggggaaagagccaccctctcatgcagggccagtcagagtgtttacagcagctacttagcctggtaccagcagaaacctggccaggctcccaggctcctcatttatggtgcatccagccggtccactggcatcccagacaggttcagtggcagtgggtctgggacagacttcgctctcaccatcagcagactggagcctgaagattttgcagtgtattactgtcagcactctgataactcaccgtggacgttcggccaagggaccaaggtggaaatcaaa

SEQ ID NO: 25914 - protein, 108 aa, synthetic construct
  REGION 1..108: note = Description of Artificial Sequence: Synthetic polypeptide
EIVLTQSPGTLYLSPGERATLSCRASQSVYSSYLAWYQQKPGQAPRLLIYGASSRSTGIPDRFSGSGSGTDFALTISRLEPEDFAVYYCQHSDNSPWTFGQGTKVEIK

SEQ ID NO: 25915 - DNA, 324 bp, synthetic construct
  misc_feature 1..324: note = Description of Artificial Sequence: Synthetic polynucleotide
  source 1..324: mol_type = other DNA
gaaattgtgttgacgcagtctccaggcaccctgtcttggtctccaggggaaagagccaccctctcgtgcagggccagtcagagtgttagcagcagctacttagcctggtaccagcagaaacctggccaggctcccaggctcctcatctatggtgcatccaccagggcctctggcatcccagacaggttcagtggcagtgggtctgggacagacttcactctcaccatcagcagactggagcctgaatattttgcagtttattactgtcagcagtatggtaactcaccgctcactttcggcggagggaccaaggtggagatcaaa

SEQ ID NO: 25916 - protein, 108 aa, synthetic construct
  REGION 1..108: note = Description of Artificial Sequence: Synthetic polypeptide
EIVLTQSPGTLSWSPGERATLSCRASQSVSSSYLAWYQQKPGQAPRLLIYGASTRASGIPDRFSGSGSGTDFTLTISRLEPEYFAVYYCQQYGNSPLTFGGGTKVEIK

SEQ ID NO: 25917 - DNA, 321 bp, synthetic construct
  misc_feature 1..321: note = Description of Artificial Sequence: Synthetic polynucleotide
  source 1..321: mol_type = other DNA
gacatccagatgacccagtctccatcctccctgtctgcatctgtaggagacagagtcaccatcacttgccgggcaagtcaggacattagaaatgatttaggctggtatcagcagaaaccagggaaagcccctaagcgcctgatctgtgctgcatccagtttgcaaagtggggtcccatcaaggttcagcggcagtggatctgggaccgagttcactctcacaatcagcagcctgcagcctgaggattttgcaacttatttctgtctacagcataatgattacccattcactttcggccctgggaccaaagtggatatcaaa

SEQ ID NO: 25918 - protein, 107 aa, synthetic construct
  REGION 1..107: note = Description of Artificial Sequence: Synthetic polypeptide
DIQMTQSPSSLSASVGDRVTITCRASQDIRNDLGWYQQKPGKAPKRLICAASSLQSGVPSRFSGSGSGTEFTLTISSLQPEDFATYFCLQHNDYPFTFGPGTKVDIK

SEQ ID NO: 25919 - DNA, 324 bp, synthetic construct
  misc_feature 1..324: note = Description of Artificial Sequence: Synthetic polynucleotide
  source 1..324: mol_type = other DNA
gaaattgtgttgacgcagtctccaggcacccggtatttgtctccaggggaaagagccaccctctcatgcagggccagtcagagtgtttacagcagctacttagcctggtaccagcagaaacctggccaggctcccaggctcctcatttatggtgcatccagccggtccacggtcctcccagacaggttcagtggcagtgggtctgggacagacttcgctctcaccatcagcagagtggagcctgaagattgtgcagtgtattactgtcagcactctgataactcaccgtggacgttcggccaagggaccaaggtggaaatcaaa

SEQ ID NO: 25920 - protein, 108 aa, synthetic construct
  REGION 1..108: note = Description of Artificial Sequence: Synthetic polypeptide
EIVLTQSPGTRYLSPGERATLSCRASQSVYSSYLAWYQQKPGQAPRLLIYGASSRSTVLPDRFSGSGSGTDFALTISRVEPEDCAVYYCQHSDNSPWTFGQGTKVEIK

SEQ ID NO: 25921 - DNA, 324 bp, synthetic construct
  misc_feature 1..324: note = Description of Artificial Sequence: Synthetic polynucleotide
  source 1..324: mol_type = other DNA
gaatttatgttgacgcagtctccaggcaccctgtgtttgtctccaggggaaagagccaccctctcgtgcagggccagtcagagtgttagcagcagctacttagtctggtatcagcagaaacctggccaggctcccaggctcctcatctatggtgcatccaccagggccactggcatcccagacaggttcagtggcagtgggtctgggacagacttcactctcaccatcagcagactggagcctgaatattttgcagtttattactgtcagcagtatggttgctcaccgctcactttcggcggagggaccaaggtggagatcaca

SEQ ID NO: 25922 - protein, 108 aa, synthetic construct
  REGION 1..108: note = Description of Artificial Sequence: Synthetic polypeptide
EFMLTQSPGTLCLSPGERATLSCRASQSVSSSYLVWYQQKPGQAPRLLIYGASTRATGIPDRFSGSGSGTDFTLTISRLEPEYFAVYYCQQYGCSPLTFGGGTKVEIT

SEQ ID NO: 25923 - DNA, 339 bp, synthetic construct
  misc_feature 1..339: note = Description of Artificial Sequence: Synthetic polynucleotide
  source 1..339: mol_type = other DNA
gacatcgtgatgacccagtctccagattgcctggctgtgtctctgggcgagagggccaccatcaactgcaagtccagccagagtgttttatacacctccaacaataacaactacttagcttggtaccagcagaaaccaggacagcctcctaagctgctcatttactgggcatctacccgggaatccggggtccctgaccgattcagtggcagcgggtctgggacagatttcactctcaccatcagcagcctgcaggctgaagatgttgcagtttattattgtcagcactataatgatactccatggaagtttgtccaagggatcaaggtggaaatcaaa

SEQ ID NO: 25924 - protein, 113 aa, synthetic construct
  REGION 1..113: note = Description of Artificial Sequence: Synthetic polypeptide
DIVMTQSPDCLAVSLGERATINCKSSQSVLYTSNNNNYLAWYQQKPGQPPKLLIYWASTRESGVPDRFSGSGSGTDFTLTISSLQAEDVAVYYCQHYNDTPWKFVQGIKVEIK

SEQ ID NO: 25925 - DNA, 339 bp, synthetic construct
  misc_feature 1..339: note = Description of Artificial Sequence: Synthetic polynucleotide
  source 1..339: mol_type = other DNA
gacatcgtgatgacccagtctccagattgcctggctgtgtctctgggcgagagggccaccatcaactgcaagtccagccagagtgttttatacacctccaacaataacaactacttagcttggtaccagcagaaaccaggacagcctcctaagctgctcatttactgggcatctacccgggaatccggggtccctgaccgattcagtggcagcgggtctgggacagatttcactctcaccatcagcagcctgcaggctgaagatgttgcagtttattattgtcagcactattataatactccgtggacgtttgtccaagggaccaaggtggaaatcaaa

SEQ ID NO: 25926 - protein, 113 aa, synthetic construct
  REGION 1..113: note = Description of Artificial Sequence: Synthetic polypeptide
DIVMTQSPDCLAVSLGERATINCKSSQSVLYTSNNNNYLAWYQQKPGQPPKLLIYWASTRESGVPDRFSGSGSGTDFTLTISSLQAEDVAVYYCQHYYNTPWTFVQGTKVEIK

SEQ ID NO: 25927 - DNA, 324 bp, synthetic construct
  misc_feature 1..324: note = Description of Artificial Sequence: Synthetic polynucleotide
  source 1..324: mol_type = other DNA
gaatttatgttgacgcagtctccaggcaccctgtgttggtctccaggggaaagagccaccctctcgtgcagggccagtgagagtgttagcagcagctacttagtctggtatcagcagaaacctggccaggctcccaggctcctcatctatggtgcatccaccagggccactggcatcccagacaggttcagtggcagtgggtctgggacagacttcactctcaccatcagcagactggagcctgaatattttgcagtttattactgtcagcagtatggttgctcaccgctcactttcggcggagggaccaaggtggagatcaca

SEQ ID NO: 25928 - protein, 108 aa, synthetic construct
  REGION 1..108: note = Description of Artificial Sequence: Synthetic polypeptide
EFMLTQSPGTLCWSPGERATLSCRASESVSSSYLVWYQQKPGQAPRLLIYGASTRATGIPDRFSGSGSGTDFTLTISRLEPEYFAVYYCQQYGCSPLTFGGGTKVEIT

SEQ ID NO: 25929 - DNA, 324 bp, synthetic construct
  misc_feature 1..324: note = Description of Artificial Sequence: Synthetic polynucleotide
  source 1..324: mol_type = other DNA
gaaattgtgttgacgcagtctccaggcactttgtctttgtctccaggggaaagagccaccctctcctgcagggccagtcagagtgttgacagcggctacttagcctggtaccagcagaaacctggccaggctcccaggctcctcatctatggtgcatccagcaggacccctggcatcccagacaggttcagtggcagtgggtctgggacagacttcactctcaccatcagcagactggagcctgaagattttgcagtgtattactgtcagcagtatgaaagctcaccgtggacgttcggccaagggaccaaggtggaaatcaaa

SEQ ID NO: 25930 - protein, 108 aa, synthetic construct
  REGION 1..108: note = Description of Artificial Sequence: Synthetic polypeptide
EIVLTQSPGTLSLSPGERATLSCRASQSVDSGYLAWYQQKPGQAPRLLIYGASSRTPGIPDRFSGSGSGTDFTLTISRLEPEDFAVYYCQQYESSPWTFGQGTKVEIK

SEQ ID NO: 25931 - DNA, 324 bp, synthetic construct
  misc_feature 1..324: note = Description of Artificial Sequence: Synthetic polynucleotide
  source 1..324: mol_type = other DNA
gaaattgtgttgacgcagtctccaggcacccggtatttgtcttcagtggaaagagccaccctctcatgcagggccagtcagagtgtttacagcagctacttagcgtggtaccagcagaaacctggccaggctcccaggctcctcatttatggtgcatccagccggtccactggcatcccagacaggttcagtggcagtgggtctgggacagacttcgctctcaccatcagcagactggagcctgaagattgtgcagtgtattactgtcagcactctgataactcaccgtggacgttcggccaagggaccaaggtggaaatcaaa

SEQ ID NO: 25932 - protein, 108 aa, synthetic construct
  REGION 1..108: note = Description of Artificial Sequence: Synthetic polypeptide
EIVLTQSPGTRYLSSVERATLSCRASQSVYSSYLAWYQQKPGQAPRLLIYGASSRSTGIPDRFSGSGSGTDFALTISRLEPEDCAVYYCQHSDNSPWTFGQGTKVEIK

SEQ ID NO: 25933 - DNA, 339 bp, synthetic construct
  misc_feature 1..339: note = Description of Artificial Sequence: Synthetic polynucleotide
  source 1..339: mol_type = other DNA
gacatcgtgatgacccagtctccagactccctggctgtgtctctgggcgagagggccaccatcatctgcaagtccagccagactgttttacacagctccaacaattataactacttagcttggtaccagcagaagccaggacagccccctaaggtgctcatttactggacatctacccgggaatccggggtccctgaccgattcagtggcagcgggtctgggacagatttcactctcaccatcagcagcctgcaggctgaagatgtggcagtttattactgtcagcaatattttagtagtcctctgacgttcggccaagggaccaaggtggaaatcaaa

SEQ ID NO: 25934 - protein, 113 aa, synthetic construct
  REGION 1..113: note = Description of Artificial Sequence: Synthetic polypeptide
DIVMTQSPDSLAVSLGERATIICKSSQTVLHSSNNYNYLAWYQQKPGQPPKVLIYWTSTRESGVPDRFSGSGSGTDFTLTISSLQAEDVAVYYCQQYFSSPLTFGQGTKVEIK

SEQ ID NO: 25935 - DNA, 324 bp, synthetic construct
  misc_feature 1..324: note = Description of Artificial Sequence: Synthetic polynucleotide
  source 1..324: mol_type = other DNA
gaaattgtgttgacgcagtctccaggcaccctgtctttgtctccaggggaaagagccaccctctcctgcagggccagtccgagtgttcacagcaactacttagcctggtaccagcagaaacctggccaggctcccaggctcctcatctatggtgcatccagcagggccactggcatcccagacaggttcagtggcagtgggtctgggacagacttcattctcaccatcagcagactggagcctgaagattttgcagtgtattactgtcagcagtatgaaagttcaccgtggacgttcggccaagggaccaaggtggaaatcaaa

SEQ ID NO: 25936 - protein, 108 aa, synthetic construct
  REGION 1..108: note = Description of Artificial Sequence: Synthetic polypeptide
EIVLTQSPGTLSLSPGERATLSCRASPSVHSNYLAWYQQKPGQAPRLLIYGASSRATGIPDRFSGSGSGTDFILTISRLEPEDFAVYYCQQYESSPWTFGQGTKVEIK

SEQ ID NO: 25937 - DNA, 339 bp, synthetic construct
  misc_feature 1..339: note = Description of Artificial Sequence: Synthetic polynucleotide
  source 1..339: mol_type = other DNA
gacatcgtgatgacccagtcgccagactccctggctgtgtctctgggcgagagggccaccatcaactgcaagtccagacagagtgttttacacagctccaacaattacaactacttagcttggtaccagcagaaaccaggacagcctcctgaactactcatttactgggcatctacccgggaatccggggtccctgaccgattcagtggcagcgggtctgggacagatttcactctcaccatcagcagcctgcaggctgaggatgtggcagtttattactgtcagcaatattatagtactcctcctactttcggcggagggaccaaggtggagatcaaa

SEQ ID NO: 25938 - protein, 113 aa, synthetic construct
  REGION 1..113: note = Description of Artificial Sequence: Synthetic polypeptide
DIVMTQSPDSLAVSLGERATINCKSRQSVLHSSNNYNYLAWYQQKPGQPPELLIYWASTRESGVPDRFSGSGSGTDFTLTISSLQAEDVAVYYCQQYYSTPPTFGGGTKVEIK

SEQ ID NO: 25939 - DNA, 339 bp, synthetic construct
  misc_feature 1..339: note = Description of Artificial Sequence: Synthetic polynucleotide
  source 1..339: mol_type = other DNA
gacatcgtgatgacccagtctccagactccccggctgtgtctctgggcgagagggccaccatcatctgcaagtccagccagactgttttacacagctccaacaattataactacttagcttggtaccagcagaagccaggacagccccctaaggtgctcatttactggacatctacccgggaatccggggtccctgaccgattcagtggcagcgggtctgggacagatttcactctcaccatcagcagcctgcaggctgaagatgtggcagtttattactgtcagcaatattttagtagtcctccgacgttcggccaagggaccaaggtggaaatcaaa

SEQ ID NO: 25940 - protein, 113 aa, synthetic construct
  REGION 1..113: note = Description of Artificial Sequence: Synthetic polypeptide
DIVMTQSPDSPAVSLGERATIICKSSQTVLHSSNNYNYLAWYQQKPGQPPKVLIYWTSTRESGVPDRFSGSGSGTDFTLTISSLQAEDVAVYYCQQYFSSPPTFGQGTKVEIK

SEQ ID NO: 25941 - DNA, 321 bp, synthetic construct; identical to SEQ ID NO: 25809
  misc_feature 1..321: note = Description of Artificial Sequence: Synthetic polynucleotide
  source 1..321: mol_type = other DNA

SEQ ID NO: 25942 - protein, 107 aa, synthetic construct; identical to SEQ ID NO: 25810
  REGION 1..107: note = Description of Artificial Sequence: Synthetic polypeptide

SEQ ID NO: 25943 - DNA, 324 bp, synthetic construct
  misc_feature 1..324: note = Description of Artificial Sequence: Synthetic polynucleotide
  source 1..324: mol_type = other DNA
gaaattgtgttgacgcagtctccaggcaccctgtctttgtctccaggggaaagagccaccctctcctgcagggccagtcagagtattaacagcaactacttagcctggtaccagcagaaacctggccaggctcccaggctcctcatctatggtgcatccagcagggccactggcatcccagacaggttcagtggcagtgggtctgggacagacttcactctcaccatcagcagactggagcctgacgattttgcagtgttttactgtcagcagtatgagagctcaccgtggacgttcggccaagggaccaaggtggaaatcaaa

SEQ ID NO: 25944 - protein, 108 aa, synthetic construct
  REGION 1..108: note = Description of Artificial Sequence: Synthetic polypeptide
EIVLTQSPGTLSLSPGERATLSCRASQSINSNYLAWYQQKPGQAPRLLIYGASSRATGIPDRFSGSGSGTDFTLTISRLEPDDFAVFYCQQYESSPWTFGQGTKVEIK

SEQ ID NO: 25945 - DNA, 321 bp, synthetic construct
  misc_feature 1..321: note = Description of Artificial Sequence: Synthetic polynucleotide
  source 1..321: mol_type = other DNA
gagatagtgatgacgcagtctccagccaccctgtctgtgtctccaggggaaagagccaccctctcctgcagggccagtcaggatgttatcacctacttagcctggtaccagcagaaacctggccaggctcccaggctcctcatctatggtgcatccaccagggccactggtgtcccagccaggttcagtggcagtgggtctgggacagagttcactctcaccatcagcagcctgcagtctgaagattttgcactttattactgtcaggagtataatgactggccgtgcagttttggccaggggaccaaggtggagatcaaa

SEQ ID NO: 25946 - protein, 107 aa, synthetic construct
  REGION 1..107: note = Description of Artificial Sequence: Synthetic polypeptide
EIVMTQSPATLSVSPGERATLSCRASQDVITYLAWYQQKPGQAPRLLIYGASTRATGVPARFSGSGSGTEFTLTISSLQSEDFALYYCQEYNDWPCSFGQGTKVEIK

SEQ ID NO: 25947 - DNA, 339 bp, synthetic construct
  misc_feature 1..339: note = Description of Artificial Sequence: Synthetic polynucleotide
  source 1..339: mol_type = other DNA
gacagcatgatgacccagtctccagactccctggctgtgtctctgggcgagagggccaccatcaactgcaagtccagccagagtgttttacacagctctaataaaaagaactacttagcttggtaccagcagaaaccaggacagcctcctaagctgctcatttactgggcatctacccgggaatccggggtccctgaccgattcagtggcagcgggtctgggacagatttcactctcaccatcagcagtctgcaggctgaagatgtggcagtttattactgtcagcaatattataggactccgtggacgttcggccaagggaccaaggtggaaatcaaa

SEQ ID NO: 25948 - protein, 113 aa, synthetic construct
  REGION 1..113: note = Description of Artificial Sequence: Synthetic polypeptide
DSMMTQSPDSLAVSLGERATINCKSSQSVLHSSNKKNYLAWYQQKPGQPPKLLIYWASTRESGVPDRFSGSGSGTDFTLTISSLQAEDVAVYYCQQYYRTPWTFGQGTKVEIK

SEQ ID NO: 25949 - DNA, 324 bp, synthetic construct
  misc_feature 1..324: note = Description of Artificial Sequence: Synthetic polynucleotide
  source 1..324: mol_type = other DNA
gaaattgtgttgacgcagtctccaggcaccctgtttttgtctccaggggaaagagccaccctctcctgcagggccagtcagagtgtttacagcagctacttagcctggtaccagcagaaacctgcccaggctcccaggctcctcatctatggtgcatccagccgggccagtggcatcccagacaggttcagtggcagtgggtctgggacagacttcgctctcaccatcagcagactggagcctgaagattttgcagtgtattactgtcagcactatgataactcaccgtggacgttcggccaagggaccaaggtggaaatcaaa

SEQ ID NO: 25950 - protein, 108 aa, synthetic construct
  REGION 1..108: note = Description of Artificial Sequence: Synthetic polypeptide
EIVLTQSPGTLFLSPGERATLSCRASQSVYSSYLAWYQQKPAQAPRLLIYGASSRASGIPDRFSGSGSGTDFALTISRLEPEDFAVYYCQHYDNSPWTFGQGTKVEIK

SEQ ID NO: 25951 - DNA, 324 bp, synthetic construct
  misc_feature 1..324: note = Description of Artificial Sequence: Synthetic polynucleotide
  source 1..324: mol_type = other DNA
gaaattgtgttgacgcagtctccaggcaccctgtttttgtctccaggggaaagagccaccctctcctgcagggccagtcagagtgtttacagcagctacttagcctggtaccagcagaaacctggccaggctcccaggctcctcatctatggtgcatccagccgggccactggcatcccagacaggttcagtggcagtgggtctgggacagacttcgctctcaccatcagcagactggagcctgaagattttgcagtgtattactgtcagcactatgataactcaccgtggacgttcggccaagggaccaaggtggaaatcaaa

SEQ ID NO: 25952 - protein, 108 aa, synthetic construct
  REGION 1..108: note = Description of Artificial Sequence: Synthetic polypeptide
EIVLTQSPGTLFLSPGERATLSCRASQSVYSSYLAWYQQKPGQAPRLLIYGASSRATGIPDRFSGSGSGTDFALTISRLEPEDFAVYYCQHYDNSPWTFGQGTKVEIK

SEQ ID NO: 25953 - DNA, 324 bp, synthetic construct
  misc_feature 1..324: note = Description of Artificial Sequence: Synthetic polynucleotide
  source 1..324: mol_type = other DNA
gaatttatgttgacgcagtctccaggcaccctgtctttgtctccaggggaaagagccaccctctcgtgcaggtccagtcagagtgttagcagcagctacttagtctggtatcagcagaaacctggccaggctcccaggctcctcatctatggtgcatccaccagggccactggcatcccagacaggttcagtggcagtgggtctgggacagacttcactctcaccatcagcagactggagcctgaatattttgcagtttattactgtcagcagtatggttgctcaccgctcactttcggcggagggaccaaggtggagatcaca

SEQ ID NO: 25954 - protein, 108 aa, synthetic construct
  REGION 1..108: note = Description of Artificial Sequence: Synthetic polypeptide
EFMLTQSPGTLSLSPGERATLSCRSSQSVSSSYLVWYQQKPGQAPRLLIYGASTRATGIPDRFSGSGSGTDFTLTISRLEPEYFAVYYCQQYGCSPLTFGGGTKVEIT

SEQ ID NO: 25955 - DNA, 324 bp, synthetic construct
  misc_feature 1..324: note = Description of Artificial Sequence: Synthetic polynucleotide
  source 1..324: mol_type = other DNA
gaaattgtgttgacgcagtctccaggcaccctgtttttgtctcaaggggaaagagccaccctctcctgcagggccagtcagagtgttagcagcaggtacttagcctggtaccagcagaaacctggccaggctcccagactcctcatctatggtgcatccagcagggccactggcatcccagacaggttcagtggcagtgggtctgggacagacttcactctcaccatcagcagactggagcctgaagattttgcagtatattactgtcagcattatgatagctcaccgtggacgttcggccaagggaccaaggtggaaatcaaa

SEQ ID NO: 25956 - protein, 108 aa, synthetic construct
  REGION 1..108: note = Description of Artificial Sequence: Synthetic polypeptide
EIVLTQSPGTLFLSQGERATLSCRASQSVSSRYLAWYQQKPGQAPRLLIYGASSRATGIPDRFSGSGSGTDFTLTISRLEPEDFAVYYCQHYDSSPWTFGQGTKVEIK

SEQ ID NO: 25957 - DNA, 324 bp, synthetic construct
  misc_feature 1..324: note = Description of Artificial Sequence: Synthetic polynucleotide
  source 1..324: mol_type = other DNA
gaaattgcgttgacgcagtctccaggcaccctgtctttgtctccaggggaaagagccaccctctcctgcagggccagtccgagtgttgacagcagctacttagcctggtaccagcagaaacctggccaggctcccaggctcctcatctatggtgcagccagcagggcccctggcatcccagacaggttcagtggcagtgggtctgggacagacttcactctcaccatcagcagactggagcctgaagactttgtagtgtattactgtcagcagtatgaaagttcaccgtggacgttcggccaagggaccaaggtggaaatcaaa

SEQ ID NO: 25958 - protein, 108 aa, synthetic construct
  REGION 1..108: note = Description of Artificial Sequence: Synthetic polypeptide
EIALTQSPGTLSLSPGERATLSCRASPSVDSSYLAWYQQKPGQAPRLLIYGAASRAPGIPDRFSGSGSGTDFTLTISRLEPEDFVVYYCQQYESSPWTFGQGTKVEIK

SEQ ID NO: 25959 - DNA, 324 bp, synthetic construct
  misc_feature 1..324: note = Description of Artificial Sequence: Synthetic polynucleotide
  source 1..324: mol_type = other DNA
gaacttgtgttgacgcagtctccaggcaccctgtctttgtctccaggggaaagagccaccctctcctgcagggccagtcagaatatttacagcagctacttagcctggtaccaacagaaacctggccaggctcccaggctcctcatctatggtgcatccagcagggccactggcatcccagacaggttcagtggcagtgggtctgggacagacttcactctcaccatcagcagactggagcctgaagattttgcagtgtattgctgtcagcagtatgaaagctcaccgtggaccttcggccaagggaccaaggtggaaatcaaa

SEQ ID NO: 25960 - protein, 108 aa, synthetic construct; identical to SEQ ID NO: 25730
  REGION 1..108: note = Description of Artificial Sequence: Synthetic polypeptide

SEQ ID NO: 25961 - DNA, 324 bp, synthetic construct
  misc_feature 1..324: note = Description of Artificial Sequence: Synthetic polynucleotide
  source 1..324: mol_type = other DNA
gaaattgtgttgacgcagtctccaggcaccctgtttttgtctccaggggagagagccaccctctcctgcagggccagtcagagtgttaacagcaactacttagcctggtaccggcagaaacctggccaggctcccaggctcctcatctatggtgcatccagcagggccactggcatcccagacaggttcagtggcagtgggtctgggacagacttcattctcatcatcagcagactggagcctgaggattttgcagtgtattactgtcagcagtatgaaagctcgccgtggacgttcggccaagggaccaaggtggaaatcaaa

SEQ ID NO: 25962 - protein, 108 aa, synthetic construct
  REGION 1..108: note = Description of Artificial Sequence: Synthetic polypeptide
EIVLTQSPGTLFLSPGERATLSCRASQSVNSNYLAWYRQKPGQAPRLLIYGASSRATGIPDRFSGSGSGTDFILIISRLEPEDFAVYYCQQYESSPWTFGQGTKVEIK

SEQ ID NO: 25963 - DNA, 339 bp, synthetic construct; identical to SEQ ID NO: 25873
  misc_feature 1..339: note = Description of Artificial Sequence: Synthetic polynucleotide
  source 1..339: mol_type = other DNA

SEQ ID NO: 25964 - protein, 113 aa, synthetic construct; identical to SEQ ID NO: 25874
  REGION 1..113: note = Description of Artificial Sequence: Synthetic polypeptide

SEQ ID NO: 25965 - DNA, 324 bp, synthetic construct
  misc_feature 1..324: note = Description of Artificial Sequence: Synthetic polynucleotide
  source 1..324: mol_type = other DNA
gaaattgtgttgacgcagtctccaggctccctgtctttgtctccaggggaaagagccaccctctcctgcagggccagtcagagtgtttggagcggctacttagcctggtaccagcagaaacctggccaggctcccaggctcctcatctatggtgcatctagcagggccactggcatcccagacaggttcagtggcagtgggtctgggacagacttcactctcaccatcagcagactggagcctgaagattttgcagtgtatttctgtcagcagtatgagagttcaccgtggacgttcggccaagggaccaaggtggaaatcaaa

SEQ ID NO: 25966 - protein, 108 aa, synthetic construct
  REGION 1..108: note = Description of Artificial Sequence: Synthetic polypeptide
EIVLTQSPGSLSLSPGERATLSCRASQSVWSGYLAWYQQKPGQAPRLLIYGASSRATGIPDRFSGSGSGTDFTLTISRLEPEDFAVYFCQQYESSPWTFGQGTKVEIK

SEQ ID NO: 25967 - DNA, 339 bp, synthetic construct
  misc_feature 1..339: note = Description of Artificial Sequence: Synthetic polynucleotide
  source 1..339: mol_type = other DNA
gacatcgtgatgacccagtctccagactccctggctgtgtctctgggcgagagggccaccatcaactgcaagtccagccagagtgttttgtacagctccaacagtcacaacttcttagcttggtaccagcagaacccaggacagcctcctaaactgctcattttctgggcatttatccgggaatccggggtccctgaaggattcagtggcagcgggtctggggcagatttcactctctccatcagcggcctacaggcagaagatgtggcagtttattactgtcagcaatattatagtactccgtgcagttttggccaggggaccaagctggagatcaaa

SEQ ID NO: 25968 - protein, 113 aa, synthetic construct
  REGION 1..113: note = Description of Artificial Sequence: Synthetic polypeptide
DIVMTQSPDSLAVSLGERATINCKSSQSVLYSSNSHNFLAWYQQNPGQPPKLLIFWAFIRESGVPEGFSGSGSGADFTLSISGLQAEDVAVYYCQQYYSTPCSFGQGTKLEIK

SEQ ID NO: 25969 - DNA, 324 bp, synthetic construct
  misc_feature 1..324: note = Description of Artificial Sequence: Synthetic polynucleotide
  source 1..324: mol_type = other DNA
gaatttatgttgacgcagtctccaggcaccctgtctttgtctacaggggaaagagccaccctctcgtgcaggtccagtcagagtgttagcagcagctacttagtctggtatcagcagaaacctggccaggctcccaggctcctcatctatggtgcatccaccagggccactggcatcccagacaggttcagtggcagtgggtctgggacagacttcactctcaccatcagcagactggagcctgaatattttgcagtttattactgtcagcagtatggttgctcaccgctcactttcggcggagggaccaaggtggagatcaca

SEQ ID NO: 25970 - protein, 108 aa, synthetic construct
  REGION 1..108: note = Description of Artificial Sequence: Synthetic polypeptide
EFMLTQSPGTLSLSTGERATLSCRSSQSVSSSYLVWYQQKPGQAPRLLIYGASTRATGIPDRFSGSGSGTDFTLTISRLEPEYFAVYYCQQYGCSPLTFGGGTKVEIT

SEQ ID NO: 25971 - DNA, 324 bp, synthetic construct
  misc_feature 1..324: note = Description of Artificial Sequence: Synthetic polynucleotide
  source 1..324: mol_type = other DNA
gaaattgtgttgacgcagtctccaggcaccctgtatttgtctccaggggaaagagccaccctctcctgcagggccagtcagagtgtttacagcagctacttagcctggtaccagcagaaacctgcccaggctcccaggctcctcatctatggtgcatccagccgggccactggcatcccagacaggttcagtggcagtgggtctgggacagacttcgctctcaccatcagcagactggagcctgaagattgtgcagtgtattactgtcagcactatgataactcaccgtggacgttcggccaagggaccaaggtggaaatcaaa

SEQ ID NO: 25972 - protein, 108 aa, synthetic construct
  REGION 1..108: note = Description of Artificial Sequence: Synthetic polypeptide
EIVLTQSPGTLYLSPGERATLSCRASQSVYSSYLAWYQQKPAQAPRLLIYGASSRATGIPDRFSGSGSGTDFALTISRLEPEDCAVYYCQHYDNSPWTFGQGTKVEIK

SEQ ID NO: 25973 - DNA, 324 bp, synthetic construct
  misc_feature 1..324: note = Description of Artificial Sequence: Synthetic polynucleotide
  source 1..324: mol_type = other DNA
gaaattgtgttgacgcagtctccaggcacccggtatttgtctccaggggaaagagccaccctctcatgcagggccagtcagagtgtttacagcagctacttagcctggtaccagcagaaacctggccaggctcccaggctcctcatttatggtgcatccagccggtccactggcatcccagacaggttcagtggcagtgggtctgggacagacttcgctctcaccatcagcagactggagcctgaagattgtgcagtgtattactgtcagcactctgataactcaccgtggacgttcggccaagggaccaaggtggaaatcaaa

SEQ ID NO: 25974 - protein, 108 aa, synthetic construct
  REGION 1..108: note = Description of Artificial Sequence: Synthetic polypeptide
EIVLTQSPGTRYLSPGERATLSCRASQSVYSSYLAWYQQKPGQAPRLLIYGASSRSTGIPDRFSGSGSGTDFALTISRLEPEDCAVYYCQHSDNSPWTFGQGTKVEIK

SEQ ID NO: 25975 - DNA, 339 bp, synthetic construct
  misc_feature 1..339: note = Description of Artificial Sequence: Synthetic polynucleotide
  source 1..339: mol_type = other DNA
gacatcgtgatgacccagtgtccagactccccggctgtgtctctgggcgagagggccaccatcaattgcaagtccagccagagtgttttgcacagatccaacaattataattacttagcttggtaccagcagaaaccaggacagcctcctaacctgctcatttactgggcatctacccgggaatccggggtccctgaccgattcagtggcagcgggtctgggacagatttcactctcaccatcagcagcctgcaggctgctgatgtggcagtttattactgtcagcaatatcatagtagtccactgacgttcggccaagggaccacggtggaaatcaaa

SEQ ID NO: 25976 - protein, 113 aa, synthetic construct
  REGION 1..113: note = Description of Artificial Sequence: Synthetic polypeptide
DIVMTQCPDSPAVSLGERATINCKSSQSVLHRSNNYNYLAWYQQKPGQPPNLLIYWASTRESGVPDRFSGSGSGTDFTLTISSLQAADVAVYYCQQYHSSPLTFGQGTTVEIK

SEQ ID NO: 25977 - DNA, 324 bp, synthetic construct
  misc_feature 1..324: note = Description of Artificial Sequence: Synthetic polynucleotide
  source 1..324: mol_type = other DNA
gaaattgtgttgacgcagtctccaggcaccctgtatttgtctccaggggaaagagccaccctctcatgcagggccagtcagagtgtttacagcagctacttagcctggtaccagcagaaacctggccaggctcccaggctcctcatttatggtgcatccagccggtccactggcctcccagacaggttcagtggcagtgggtctgggacagacttcgctctcaccatcagcagactggagcctgaagattgtgcagtgtattactgtcagcactctgataactcaccgtggacgttcggccaagggaccaaggtggaaatcaaa

SEQ ID NO: 25978 - protein, 108 aa, synthetic construct
  REGION 1..108: note = Description of Artificial Sequence: Synthetic polypeptide
EIVLTQSPGTLYLSPGERATLSCRASQSVYSSYLAWYQQKPGQAPRLLIYGASSRSTGLPDRFSGSGSGTDFALTISRLEPEDCAVYYCQHSDNSPWTFGQGTKVEIK

SEQ ID NO: 25979 - DNA, 324 bp, synthetic construct
  misc_feature 1..324: note = Description of Artificial Sequence: Synthetic polynucleotide
  source 1..324: mol_type = other DNA
gaaattgtgttgacgcagtctccaggcaccctgtctttgtctccaggggaaagagccaccctctcctgcagggccagtcagagtgttgacagcaactacttagcctggtaccagcagaaacctggccaggctcccaggctcctcatctatggtgcatctgccaggaccactggcatcccagacaggttcagtggcagtgggtctgggacagacttcactctcaccatcagcagactggagcctgaagattttgcagtgtattcctgtcagcagtatgaaagctcaccgtggacgttcggccaagggaccaaggtggaaatcaaa

SEQ ID NO: 25980 - protein, 108 aa, synthetic construct
  REGION 1..108: note = Description of Artificial Sequence: Synthetic polypeptide
EIVLTQSPGTLSLSPGERATLSCRASQSVDSNYLAWYQQKPGQAPRLLIYGASARTTGIPDRFSGSGSGTDFTLTISRLEPEDFAVYSCQQYESSPWTFGQGTKVEIK

SEQ ID NO: 25981 - DNA, 324 bp, synthetic construct
  misc_feature 1..324: note = Description of Artificial Sequence: Synthetic polynucleotide
  source 1..324: mol_type = other DNA
gaatttgtgttgacgcagtctccaggcaccctgtatttgtctccaggggaaagagccaccctctcatgcagggccagtcagagtgtttacagcagctacttagcctggtaccagcagaaacctggccaggctcccaggctcctcatttatggtgcatccagccggtccactggcatcccagacaggttcagtggcagtgggtctgggacagacttcgctctcaccatcagcagagtggagcctgaagattgtgcagtgtattactgtcagcattctgataactcaccgtggacgttcggccaagggaccaaggtggaaatcaaa

SEQ ID NO: 25982 - protein, 108 aa, synthetic construct
  REGION 1..108: note = Description of Artificial Sequence: Synthetic polypeptide
EFVLTQSPGTLYLSPGERATLSCRASQSVYSSYLAWYQQKPGQAPRLLIYGASSRSTGIPDRFSGSGSGTDFALTISRVEPEDCAVYYCQHSDNSPWTFGQGTKVEIK

SEQ ID NO: 25983 - DNA, 321 bp, synthetic construct
  misc_feature 1..321: note = Description of Artificial Sequence: Synthetic polynucleotide
  source 1..321: mol_type = other DNA
gacatccagatgacccagtctccatcctcactgtctgcatctgtaggagacagagtcaccatcacttgtcgggcgagtcagggcattagcaattatttagcctggtttcagcagaaaccagggaaagcccctaagtccctgatctatgctgcatccagtttgcacagtggggtcccatcaaagttcagcggcagtggatctgggacagatttcactctcaccatcagcagcctgcagcctgaagattctgcaacttatttctgcctactctatcttacttacccgctcaccttcggccaagggacacgactggagattaaa

SEQ ID NO: 25984 - protein, 107 aa, synthetic construct
  REGION 1..107: note = Description of Artificial Sequence: Synthetic polypeptide
DIQMTQSPSSLSASVGDRVTITCRASQGISNYLAWFQQKPGKAPKSLIYAASSLHSGVPSKFSGSGSGTDFTLTISSLQPEDSATYFCLLYLTYPLTFGQGTRLEIK

SEQ ID NO: 25985 - DNA, 324 bp, synthetic construct
  misc_feature 1..324: note = Description of Artificial Sequence: Synthetic polynucleotide
  source 1..324: mol_type = other DNA
gaaattgtgttgacgcagtctccaggcaccctgtatttgtctccagtggaaagagccaccctctcatgcagggccagtcagagtgtttacagcagctacttagcctggtaccagcagaaacctggccaggctcccaggctcctcatttatggtgcatccagccggtccactggcatcccagacaggttcagtggcagtgggtctgggacagacttcgctctcaccatcagcagactggagcctgaagattgtgcagtgtattactgtcagcattctgataactcaccgtggacgttcggccaagggaccaaggtggaaatcaaa

SEQ ID NO: 25986 - protein, 108 aa, synthetic construct
  REGION 1..108: note = Description of Artificial Sequence: Synthetic polypeptide
EIVLTQSPGTLYLSPVERATLSCRASQSVYSSYLAWYQQKPGQAPRLLIYGASSRSTGIPDRFSGSGSGTDFALTISRLEPEDCAVYYCQHSDNSPWTFGQGTKVEIK

SEQ ID NO: 25987 - DNA, 324 bp, synthetic construct
  misc_feature 1..324: note = Description of Artificial Sequence: Synthetic polynucleotide
  source 1..324: mol_type = other DNA
gaatttgtgttgacgcagtctccaggcaccctgtatttgtctccaggggaaagagccaccctctcgtgcagggccagtcagagtgttagcagcagctacttagcctggtaccagcagaaacctggccaggctcccaggctcctcatctatggtgcatccaccagggcctctggcatcccagacaggttcagtggcagtgggtctgggacagacttcactctcaccatcagcagactggagcctgaatattttgcagtttattactgtcagcagtatggtaactcaccgctcactttcggcggagggaccaaggtggagatcaaa

SEQ ID NO: 25988 - protein, 108 aa, synthetic construct
  REGION 1..108: note = Description of Artificial Sequence: Synthetic polypeptide
EFVLTQSPGTLYLSPGERATLSCRASQSVSSSYLAWYQQKPGQAPRLLIYGASTRASGIPDRFSGSGSGTDFTLTISRLEPEYFAVYYCQQYGNSPLTFGGGTKVEIK

SEQ ID NO: 25989 - DNA, 339 bp, synthetic construct
  misc_feature 1..339: note = Description of Artificial Sequence: Synthetic polynucleotide
  source 1..339: mol_type = other DNA
gacatcgtgatgacccagtctccagactccctggctgtgtctctgggcgagagggccaccatcaagtgcaagtccagccagagtgttttacacagctccaacaatatgaactacttagcttggtaccagcagaaacctggacagcctcctaaactgctcatttactgggcatctacccggaaatccggggtccctgaccgattcagtggcaccgggtctgggacagatttcactctcaccatcagcagcctgcaggctgaagatgtggcagtttattactgtcagcaatattatagtagtccgtgcagttttggccaggggaccaagctgaagatcaaa

SEQ ID NO: 25990 - protein, 113 aa, synthetic construct
  REGION 1..113: note = Description of Artificial Sequence: Synthetic polypeptide
DIVMTQSPDSLAVSLGERATIKCKSSQSVLHSSNNMNYLAWYQQKPGQPPKLLIYWASTRKSGVPDRFSGTGSGTDFTLTISSLQAEDVAVYYCQQYYSSPCSFGQGTKLKIK

SEQ ID NO: 25991 - DNA, 324 bp, synthetic construct
  misc_feature 1..324: note = Description of Artificial Sequence: Synthetic polynucleotide
  source 1..324: mol_type = other DNA
gaaattgtgttgacgcagtctccaggcacccggtatttgtctccaggggaaagagccaccctctcatgcagggccagtcagagtgtttacagcagctacttagcctggtaccagcagaaacctggccaggctcccaggctcctcatttatggtgcatccagccggtccactgtcatcccagacaggttcagtggcagtgggtgtgggacagacttcgctctcaccatcagcagagtggagcctgaagattgtgcagtgtattactgtcagcactctgataactcaccgtggacgttcggccaagggaccaaggtggaaatcaaa

SEQ ID NO: 25992 - protein, 108 aa, synthetic construct
  REGION 1..108: note = Description of Artificial Sequence: Synthetic polypeptide
EIVLTQSPGTRYLSPGERATLSCRASQSVYSSYLAWYQQKPGQAPRLLIYGASSRSTVIPDRFSGSGCGTDFALTISRVEPEDCAVYYCQHSDNSPWTFGQGTKVEIK

SEQ ID NO: 25993 - DNA, 339 bp, synthetic construct
  misc_feature 1..339: note = Description of Artificial Sequence: Synthetic polynucleotide
  source 1..339: mol_type = other DNA
aatatcgtgatgacccagtctccagactccctggctgtgtctctgggcgcgagggccaccatcaactgcaagtccagccagagtgttttacacagctccaacaattacaactacttaacttggtaccagcagaaaccaggacagcctcctaagctgctcctttactgggcatctacccggaaatccggggtccctgaccgattcagtggcagcgggtctgggacagatttcactctcaccatcagcagcctgcaggctgaagatgtggcagtttatttctgtcagcaatattatagttctcctccgacgttcggccaagggaccaaggtggaaatcaaa

SEQ ID NO: 25994 - protein, 113 aa, synthetic construct
  REGION 1..113: note = Description of Artificial Sequence: Synthetic polypeptide
NIVMTQSPDSLAVSLGARATINCKSSQSVLHSSNNYNYLTWYQQKPGQPPKLLLYWASTRKSGVPDRFSGSGSGTDFTLTISSLQAEDVAVYFCQQYYSSPPTFGQGTKVEIK

SEQ ID NO: 25995 - DNA, 324 bp, synthetic construct
  misc_feature 1..324: note = Description of Artificial Sequence: Synthetic polynucleotide
  source 1..324: mol_type = other DNA
gaaattgtgttgacgcagtctccaggcaccctgtatttgtctccaggggaaagagccaccctgtcatgcagggccagtcagagtgtttacagcagctacttagcctggtaccagcagaaacctggccaggctcccaggctcctcatttatggtgcatccagccggtccacggtcatcccagacaggttcagtggcagtgggtgtgggacagacttcgctctcaccatcagcagagtggagcctgaagattgtgcagtgtattactgtcagcattctgataactcaccgtggacgttcggccaagggaccaaggtggaaatcaaa

SEQ ID NO: 25996 - protein, 108 aa, synthetic construct
  REGION 1..108: note = Description of Artificial Sequence: Synthetic polypeptide
EIVLTQSPGTLYLSPGERATLSCRASQSVYSSYLAWYQQKPGQAPRLLIYGASSRSTVIPDRFSGSGCGTDFALTISRVEPEDCAVYYCQHSDNSPWTFGQGTKVEIK

SEQ ID NO: 25997 - DNA, 339 bp, synthetic construct
  misc_feature 1..339: note = Description of Artificial Sequence: Synthetic polynucleotide
  source 1..339: mol_type = other DNA
gacatcgtgatgacccagtctccagattgcctggctgtgtctctgggcgagagggccaccatcaactgcaagtccagccagagtgttttatacacctccaacaataacaactacttagcttggtaccagcagaaaccaggacagcctcctaagctgctcatttactgggcatctacccgggaatccggggtccctgaccgattcagtggcagcgggtctgggacagatttcactctcaccatcagcagcctgcaggctgaagatgttgcagtttattattgtcagcaatattataatactccgtggacgtttgtccaagggaccaaggtggaaatcaaa

SEQ ID NO: 25998 - protein, 113 aa, synthetic construct; identical to SEQ ID NO: 25884
  REGION 1..113: note = Description of Artificial Sequence: Synthetic polypeptide

SEQ ID NO: 25999 - DNA, 339 bp, synthetic construct
  misc_feature 1..339: note = Description of Artificial Sequence: Synthetic polynucleotide
  source 1..339: mol_type = other DNA
gacatcgtgatgacccagtctccagactccctggctgtgtctctgggcgagagggccaccatcaactgcaagtccagccagagtgttttatacatctccaacaataataattacttagcttggtaccagcagaaaccaggacagcctcctaaactgctcatttactgggcatctacccgggaatccggggtccctgcccgattcagtggcagcgggtctgggacagatttcactctcaccatcagcagcctgcaggctgaagatgtggcagtttattactgtcagcaatattatagtactcctccgacgttcggccaagggaccaaggtggaaatcaaa

SEQ ID NO: 26000 - protein, 113 aa, synthetic construct
  REGION 1..113: note = Description of Artificial Sequence: Synthetic polypeptide
DIVMTQSPDSLAVSLGERATINCKSSQSVLYISNNNNYLAWYQQKPGQPPKLLIYWASTRESGVPARFSGSGSGTDFTLTISSLQAEDVAVYYCQQYYSTPPTFGQGTKVEIK

SEQ ID NO: 26001 - DNA, 321 bp, synthetic construct
  misc_feature 1..321: note = Description of Artificial Sequence: Synthetic polynucleotide
  source 1..321: mol_type = other DNA
gacatccagatgacccagtctccatcctccctgtctgcatctgtaggagacagagtcaccatcacttgccgggcaagtcagggcattagaaatgatttaggctggtatcagcagaaaccagggaaagcccctaagcgcctgatctatgctgcatccagtttgcaaagtggggtcccatcaaggttcagcggcagtggatctgggacagaattcactctcacaatcagcagcctgcagcctgaagattttgcaacttattactgtctacagcataatgattacccattcactttcggccctgggaccaaagtggaaatcaaa

SEQ ID NO: 26002 - protein, 107 aa, synthetic construct
  REGION 1..107: note = Description of Artificial Sequence: Synthetic polypeptide
DIQMTQSPSSLSASVGDRVTITCRASQGIRNDLGWYQQKPGKAPKRLIYAASSLQSGVPSRFSGSGSGTEFTLTISSLQPEDFATYYCLQHNDYPFTFGPGTKVEIK

SEQ ID NO: 26003 - DNA, 324 bp, synthetic construct
  misc_feature 1..324: note = Description of Artificial Sequence: Synthetic polynucleotide
  source 1..324: mol_type = other DNA
gaaattgtgttgacgcagtctccaggcaccctgtctttgtctccaggggaaagagccaccctctcctgcagggccagtcagagtgtttacagcagctacttagcctggtaccagcagaaacctggccaggctcccaggctcctcatttatggtgcatccagccggtccactggcatcccagacaggttcagtggcagtgggtctgggacagacttcgctctcaccatcagcagagtggagcctgaagattgtgcagtgtattactgtcagcactctgataactcaccgtggacgttcggccaagggaccaaggtggaaatcaaa

SEQ ID NO: 26004 - protein, 108 aa, synthetic construct
  REGION 1..108: note = Description of Artificial Sequence: Synthetic polypeptide
EIVLTQSPGTLSLSPGERATLSCRASQSVYSSYLAWYQQKPGQAPRLLIYGASSRSTGIPDRFSGSGSGTDFALTISRVEPEDCAVYYCQHSDNSPWTFGQGTKVEIK

SEQ ID NO: 26005 - DNA, 324 bp, synthetic construct
  misc_feature 1..324: note = Description of Artificial Sequence: Synthetic polynucleotide
  source 1..324: mol_type = other DNA
gaaattgtgttgacgcagtctccaggcaccctgtctttgtctccaggggaaagagccaccctctcatgcagggccagtcagagtgtttacagcagctacttagcctggtaccagcagaaacctggccaggctcccaggctcctcatttatggtgcatccagccggtccactggcatcccagacaggttcagtggcagtgggtctgggacagacttcgctctcaccatcagcagactggagcctgaagattgtgcagtgtattactgtcagcactctgataactcaccgtggacgttcggccaagggaccaaggtggaaatcaaa

SEQ ID NO: 26006 - protein, 108 aa, synthetic construct
  REGION 1..108: note = Description of Artificial Sequence: Synthetic polypeptide
EIVLTQSPGTLSLSPGERATLSCRASQSVYSSYLAWYQQKPGQAPRLLIYGASSRSTGIPDRFSGSGSGTDFALTISRLEPEDCAVYYCQHSDNSPWTFGQGTKVEIK

SEQ ID NO: 26007 - DNA, 324 bp, synthetic construct
  misc_feature 1..324: note = Description of Artificial Sequence: Synthetic polynucleotide
  source 1..324: mol_type = other DNA
gaaattgtgttgacgcagtctccaggcacccggtatttgtctccaggggaaagagccaccctctcctgcagggccagtcagagtgtttacagcagctacttagcctggtaccagcagaaacctggccaggctcccaggctcctcatttatggtgcatccagccggtccactggcatcccagacaggttcagtggcagtgggtctgggacagacttcgctctcaccatcagcagagtggagcctgaagattgtgcagtgtattactgtcagcactctgataactcaccgtggacgttcggccaagggaccaaggtggaaatcaaa

SEQ ID NO: 26008 - protein, 108 aa, synthetic construct
  REGION 1..108: note = Description of Artificial Sequence: Synthetic polypeptide
EIVLTQSPGTRYLSPGERATLSCRASQSVYSSYLAWYQQKPGQAPRLLIYGASSRSTGIPDRFSGSGSGTDFALTISRVEPEDCAVYYCQHSDNSPWTFGQGTKVEIK

SEQ ID NO: 26009 - DNA, 339 bp, synthetic construct
  misc_feature 1..339: note = Description of Artificial Sequence: Synthetic polynucleotide
  source 1..339: mol_type = other DNA
gacatcgtgatgacccagtctccagactccctggctgtgtctctgggcgagagggccaccatcaactgcaagtccagccagagtgttttacacagctccaacaattggaattacttagcttggcaccagcagaaaccaggacagcctcctaagttgctcattcactgggcatttactcggaaatccggggtccctgaccgattcagtggcggcgggtctgggacaaatttcactctcaccatcagcagcctgcaggctgaagatgtggcagtttattactgtcagcaatattatagagctcctccgacgttcggccaagggaccaaggtggaaatcaaa

SEQ ID NO: 26010 - protein, 113 aa, synthetic construct
  REGION 1..113: note = Description of Artificial Sequence: Synthetic polypeptide
DIVMTQSPDSLAVSLGERATINCKSSQSVLHSSNNWNYLAWHQQKPGQPPKLLIHWAFTRKSGVPDRFSGGGSGTNFTLTISSLQAEDVAVYYCQQYYRAPPTFGQGTKVEIK

SEQ ID NO: 26011 - DNA, 324 bp, synthetic construct
  misc_feature 1..324: note = Description of Artificial Sequence: Synthetic polynucleotide
  source 1..324: mol_type = other DNA
gaaattgtgttgacgcagtctccaggcaccctgtatttgtctccaggggaaagagccaccctctcatgcagggccagtcagagtgtttacagcagctacttagcctggtaccagcagaaacctggccaggctcccaggctcctcatttatggtgcatccagccgggccactggcatcccagacaggttcagtggcagtgggtctgggacagacttcgctctcaccatcagcagagtggagcctgaagattgtgcagtgtattactgtcagcactctgataactcaccgtggacgttcggccaagggaccaaggtggaaatcaaa

SEQ ID NO: 26012 - protein, 108 aa, synthetic construct
  REGION 1..108: note = Description of Artificial Sequence: Synthetic polypeptide
EIVLTQSPGTLYLSPGERATLSCRASQSVYSSYLAWYQQKPGQAPRLLIYGASSRATGIPDRFSGSGSGTDFALTISRVEPEDCAVYYCQHSDNSPWTFGQGTKVEIK

SEQ ID NO: 26013 - DNA, 336 bp, synthetic construct
  misc_feature 1..336: note = Description of Artificial Sequence: Synthetic polynucleotide
  source 1..336: mol_type = other DNA
gatattgtgatgactcagtctccactctccctgcccgtcacccctggagagccggcctccatctcctgcaggtctagtcagagcctcctgcatagtagtggatacaactatttggattggtacctgcagaagccagggcagtctccacagctcctgatctatttgggttctaatcgggcctccggggtccctgacaggttcagtggcagtggttcaggcacagattttacactgaaaatcagcagagtggaggctgaggatattggggtttattactgcatgcaagctctacatattcctctcactttcggcggagggaccaaggtggagatcaaa

SEQ ID NO: 26014 - protein, 112 aa, synthetic construct
  REGION 1..112: note = Description of Artificial Sequence: Synthetic polypeptide
DIVMTQSPLSLPVTPGEPASISCRSSQSLLHSSGYNYLDWYLQKPGQSPQLLIYLGSNRASGVPDRFSGSGSGTDFTLKISRVEAEDIGVYYCMQALHIPLTFGGGTKVEIK

SEQ ID NO: 26015 - DNA, 324 bp, synthetic construct
  misc_feature 1..324: note = Description of Artificial Sequence: Synthetic polynucleotide
  source 1..324: mol_type = other DNA
gaaattgtgttgacgcagtctccaggcaccctgtatttgtcttcaggggaaagagccaccctctcatgcagggccagtcagagtgtttacagcagctacttagcctggtaccagcagaaacctggccaggctcccaggctcctcatttatggtgcatccagccggtccactggcatcccagacaggttcagtggcagtgggtctgggacagacttcgctctcaccatcagcagactggagcctgaagattttgcagtgtattactgtcagcactatgataactcaccgtggacgttcggccaagggaccaaggtggaaatcaaa

SEQ ID NO: 26016 - protein, 108 aa, synthetic construct
  REGION 1..108: note = Description of Artificial Sequence: Synthetic polypeptide
EIVLTQSPGTLYLSSGERATLSCRASQSVYSSYLAWYQQKPGQAPRLLIYGASSRSTGIPDRFSGSGSGTDFALTISRLEPEDFAVYYCQHYDNSPWTFGQGTKVEIK

SEQ ID NO: 26017 - DNA, 324 bp, synthetic construct
  misc_feature 1..324: note = Description of Artificial Sequence: Synthetic polynucleotide
  source 1..324: mol_type = other DNA
gaaattgtgttgacgcagtctccaggcaccctgtctttgtctccaggggaaagagccaccctctcctgcagggccagtcagagtgttaacagcaactacttagcctggtaccagcagaaacctggccaggctcccaggctcctcatctatggtgcattcagcagggccactggcatcccagacagggtcagtggcagtgggtctgggacagacttcaatctcatcatcagcagactggagcctgaagattttgcagtgtattactgtcagcagtatgaaagctcagtgtggacgttcggccaagggaccaaggtggaaatcaaa

SEQ ID NO: 26018 - protein, 108 aa, synthetic construct
  REGION 1..108: note = Description of Artificial Sequence: Synthetic polypeptide
EIVLTQSPGTLSLSPGERATLSCRASQSVNSNYLAWYQQKPGQAPRLLIYGAFSRATGIPDRVSGSGSGTDFNLIISRLEPEDFAVYYCQQYESSVWTFGQGTKVEIK

SEQ ID NO: 26019 - DNA, 324 bp, synthetic construct
  misc_feature 1..324: note = Description of Artificial Sequence: Synthetic polynucleotide
  source 1..324: mol_type = other DNA
gaaattgtgttgacgcagtctccaggcaccctgtatttgtcttcaggggaaagagccaccctctcctgcagggccagtcagagtgtttacagcagctacttagcctggtaccagcagaaacctggccaggctcccaggctcctcatttatggtgcatccagccggtccactgtcatcccagacaggttcagtggcagtgggtctgggacagacttcgctctcaccatcagcagagtggagcctgaagattttgcagtgtattactgtcagcattctgataactctccgtggacgttcggccaagggaccaaggtggaaatcaaa

SEQ ID NO: 26020 - protein, 108 aa, synthetic construct
  REGION 1..108: note = Description of Artificial Sequence: Synthetic polypeptide
EIVLTQSPGTLYLSSGERATLSCRASQSVYSSYLAWYQQKPGQAPRLLIYGASSRSTVIPDRFSGSGSGTDFALTISRVEPEDFAVYYCQHSDNSPWTFGQGTKVEIK

SEQ ID NO: 26021 - DNA, 324 bp, synthetic construct
  misc_feature 1..324: note = Description of Artificial Sequence: Synthetic polynucleotide
  source 1..324: mol_type = other DNA
gaaattgtgttgacgcagtctccaggcaccctgtctttgtctccaggggaaagagccaccctctcctgcagggccagtcagagtgttgacagcaacttcttagcctggtaccagcagaaacctggccaggctcccaggctcctcatctatggtgcatctgccaggaccactggcatcccagacaggttcagtggcagtgggtctgggacagacttcactctcaccatcagcagactggagcctgaagattttgcagtgtattcctgtcagcagtatgaaatctcaccgtggacgttcggccaagggaccaaggtggaaatcaaa

SEQ ID NO: 26022 - protein, 108 aa, synthetic construct
  REGION 1..108: note = Description of Artificial Sequence: Synthetic polypeptide
EIVLTQSPGTLSLSPGERATLSCRASQSVDSNFLAWYQQKPGQAPRLLIYGASARTTGIPDRFSGSGSGTDFTLTISRLEPEDFAVYSCQQYEISPWTFGQGTKVEIK

SEQ ID NO: 26023 - DNA, 324 bp, synthetic construct
  misc_feature 1..324: note = Description of Artificial Sequence: Synthetic polynucleotide
  source 1..324: mol_type = other DNA
gaaattgtgttgacgcagtctccaggcaccctgtatttgtctccaggggaaagagccaccctctcatgcagggccagtcagagtgtttacagcagctacttagcctggtaccagcagaaacctggccaggctcccaggctcctcatttatggtgcatccagccggtccactgtcatcccagacaggttcagtggcagtgggtctgggacagacttcgctctcaccatcagcagagtggagcctgaagattgtgcagtgtattactgtcagcactctgataactcaccgtggacgttcggccaagggaccaaggtggaaatcaaa

SEQ ID NO: 26024 - protein, 108 aa, synthetic construct
  REGION 1..108: note = Description of Artificial Sequence: Synthetic polypeptide
EIVLTQSPGTLYLSPGERATLSCRASQSVYSSYLAWYQQKPGQAPRLLIYGASSRSTVIPDRFSGSGSGTDFALTISRVEPEDCAVYYCQHSDNSPWTFGQGTKVEIK

SEQ ID NO: 26025 - DNA, 324 bp, synthetic construct
  misc_feature 1..324: note = Description of Artificial Sequence: Synthetic polynucleotide
  source 1..324: mol_type = other DNA
gaaattgtgttgacgcagtctccaggcaccctgtatttgtctccaggggaaagagccaccctctcatgcagggccagtcagagtgtttacagcagctacttagcctggtaccagcagaaacctggccaggctcccaggctcctcatttatggtgcatccagccgggccactggcatcccagacaggttcagtggcagtgggtctgggacagacttcgctctcaccatcagcagagtggagcatgaagattttgcagtgtattactgtcagcactatgataactcaccgtggacgttcggccaagggaccaaggtggaaatcaaa

SEQ ID NO: 26026 - protein, 108 aa, synthetic construct
  REGION 1..108: note = Description of Artificial Sequence: Synthetic polypeptide
EIVLTQSPGTLYLSPGERATLSCRASQSVYSSYLAWYQQKPGQAPRLLIYGASSRATGIPDRFSGSGSGTDFALTISRVEHEDFAVYYCQHYDNSPWTFGQGTKVEIK

SEQ ID NO: 26027 - DNA, 324 bp, synthetic construct
  misc_feature 1..324: note = Description of Artificial Sequence: Synthetic polynucleotide
  source 1..324: mol_type = other DNA
gaaattgtgttgacgcagtctccaggcaccctgtatttgtctccaggggaaagagccaccctctcatgcagggccagtcagagtgtttacagcagctacttagcctggtaccagcagaaacctggccaggctcccaggctcatcatttatggtgcatccagccgggccactggcatcccagacaggttcagtggcagtgggtctgggacagacttcgctctcaccatcagcagagtggagcatgaagattttgcagtgtattactgtcagcactatgataactcaccgtggacgttcggccaagggaccaaggtggaaatcaaa

SEQ ID NO: 26028 - protein, 108 aa, synthetic construct
  REGION 1..108: note = Description of Artificial Sequence: Synthetic polypeptide
EIVLTQSPGTLYLSPGERATLSCRASQSVYSSYLAWYQQKPGQAPRLIIYGASSRATGIPDRFSGSGSGTDFALTISRVEHEDFAVYYCQHYDNSPWTFGQGTKVEIK

SEQ ID NO: 26029 - DNA, 321 bp, synthetic construct
  misc_feature 1..321: note = Description of Artificial Sequence: Synthetic polynucleotide
  source 1..321: mol_type = other DNA
gacatccagatgacccagtctccatcctccctgtctgcatctgtaggagacagagtcaccatcacttgccgggcaagtcagggcattagaaatgatttaggctggtatcagcagaaaccagggaaagcccctaagcgcctgatctatattgcatccagtttgcaaagtggggtcccatcaaggttcagcggcagtggatctgggacagaattcactctcacaatcagcagcctgcagcctgaagattttgcaacttattactgtctacagcataatagttacccgatcaccttcggccaagggacacgactggagattaaa

SEQ ID NO: 26030 - protein, 107 aa, synthetic construct
  REGION 1..107: note = Description of Artificial Sequence: Synthetic polypeptide
DIQMTQSPSSLSASVGDRVTITCRASQGIRNDLGWYQQKPGKAPKRLIYIASSLQSGVPSRFSGSGSGTEFTLTISSLQPEDFATYYCLQHNSYPITFGQGTRLEIK

SEQ ID NO: 26031 - DNA, 339 bp, synthetic construct
  misc_feature 1..339: note = Description of Artificial Sequence: Synthetic polynucleotide
  source 1..339: mol_type = other DNA
gacatcgtgatgacccagtctccagactccctggctgtgtctctgggcgagagggccaccatcatctgcaagtccagccagactgttttacacagctccaacaattataactacttagcttggtaccagcagaagccaggacagccccctaaggtgctcatttactggacatctacccgggaatccggggtccctgaccgattcagtggcagcgggtctgggacagatttcactctcaccatcagcagcctgcaggctgaagatgtggcagtttattactgtcagcaatatcttagtagtcctctgacgttcggccaagggaccaaggtggaaatcaaa

SEQ ID NO: 26032 - protein, 113 aa, synthetic construct
  REGION 1..113: note = Description of Artificial Sequence: Synthetic polypeptide
DIVMTQSPDSLAVSLGERATIICKSSQTVLHSSNNYNYLAWYQQKPGQPPKVLIYWTSTRESGVPDRFSGSGSGTDFTLTISSLQAEDVAVYYCQQYLSSPLTFGQGTKVEIK

SEQ ID NO: 26033 - DNA, 339 bp, synthetic construct
  misc_feature 1..339: note = Description of Artificial Sequence: Synthetic polynucleotide
  source 1..339: mol_type = other DNA
gacatcgtgatgacccagtctccagactccctgcctgtgtctctgggcgagagggccaccgtcaactgcaagtccagccagagtgttttacacaactccaacaataataactacttggcttggtaccagcagaaaccaggacagcctcctaagctgctcatttactgggcatctacgcgggagtccggggtccctgaccgattcagtggcagcgggtctgggacagatttcactctcaccatcagcagcctgcaggctgaagatgtggcagtttattactgtcaacaatattatagtagtcctccgacgttcggccaagggaccaaggtggaaatcaaa

SEQ ID NO: 26034 - protein, 113 aa, synthetic construct
  REGION 1..113: note = Description of Artificial Sequence: Synthetic polypeptide
DIVMTQSPDSLPVSLGERATVNCKSSQSVLHNSNNNNYLAWYQQKPGQPPKLLIYWASTRESGVPDRFSGSGSGTDFTLTISSLQAEDVAVYYCQQYYSSPPTFGQGTKVEIK

SEQ ID NO: 26035 - DNA, 324 bp, synthetic construct
  misc_feature 1..324: note = Description of Artificial Sequence: Synthetic polynucleotide
  source 1..324: mol_type = other DNA
gaaattgtgttgacgcagtctccaggcaccctgtatttgtctccaggggaaagagccaccctctcatgcagggccagtcagagtgtttacagcagctacttagcctggtaccagcagaaacctggccaggctcccaggctcctcatttatggtgcatccagccggtccactggcatcccagacaggttcagtggcagtgggtctgggacagacttcgctctcaccatcagcagactggagcctgaagattgtgcagtgtattactgtcagcactatgataactcaccgtggacgttcggccaagggaccaaggtggaaatcaaa

SEQ ID NO: 26036 - protein, 108 aa, synthetic construct
  REGION 1..108: note = Description of Artificial Sequence: Synthetic polypeptide
EIVLTQSPGTLYLSPGERATLSCRASQSVYSSYLAWYQQKPGQAPRLLIYGASSRSTGIPDRFSGSGSGTDFALTISRLEPEDCAVYYCQHYDNSPWTFGQGTKVEIK

SEQ ID NO: 26037 - DNA, 336 bp, synthetic construct
  misc_feature 1..336: note = Description of Artificial Sequence: Synthetic polynucleotide
  source 1..336: mol_type = other DNA
gatattgtgatgactcagtctccactctccctgcccgtcacccctggagagccggcctccatctcatgcaggtatagtcagagcctcgtgcatagtagtggatacaactatttggattggtacctgcagaagccagggcagtctccacagctcgttatctatttgggttctaatcgggcctccggggtccctgacaggttcagtggcagtggatcaggttcagattttacactgaagatcagcagagtggaggctgaggatgttggactttattactgcatgcaagctctacaccctcctctcactttcggcggagggaccaaggtggagatcaaa

SEQ ID NO: 26038 - protein, 112 aa, synthetic construct
  REGION 1..112: note = Description of Artificial Sequence: Synthetic polypeptide
DIVMTQSPLSLPVTPGEPASISCRYSQSLVHSSGYNYLDWYLQKPGQSPQLVIYLGSNRASGVPDRFSGSGSGSDFTLKISRVEAEDVGLYYCMQALHPPLTFGGGTKVEIK

SEQ ID NO: 26039 - DNA, 339 bp, synthetic construct; identical to SEQ ID NO: 25813
  misc_feature 1..339: note = Description of Artificial Sequence: Synthetic polynucleotide
  source 1..339: mol_type = other DNA

SEQ ID NO: 26040 - protein, 113 aa, synthetic construct; identical to SEQ ID NO: 25814
  REGION 1..113: note = Description of Artificial Sequence: Synthetic polypeptide

SEQ ID NO: 26041 - DNA, 324 bp, synthetic construct
  misc_feature 1..324: note = Description of Artificial Sequence: Synthetic polynucleotide
  source 1..324: mol_type = other DNA
gaaattgtgttgacgcagtctccaggcaccctgtatttgtctccaggggaaagagccaccctctcatgcagggccagtcagagtgtttacagcagctacttagcctggtaccagcagaaacctggccaggctcccaggctcctcatttatggtgcatccagccggtccactggcatcccagacaggttcagtggcagtgggtctgggacagacttcgctctcaccatcagcagagtggagcctgaagattgtgcagtgtattactgtcagcactatgataactcaccgtggacgttcggccaagggaccaaggtggaaatcaaa

SEQ ID NO: 26042 - protein, 108 aa, synthetic construct
  REGION 1..108: note = Description of Artificial Sequence: Synthetic polypeptide
EIVLTQSPGTLYLSPGERATLSCRASQSVYSSYLAWYQQKPGQAPRLLIYGASSRSTGIPDRFSGSGSGTDFALTISRVEPEDCAVYYCQHYDNSPWTFGQGTKVEIK

SEQ ID NO: 26043 - DNA, 324 bp, synthetic construct
  misc_feature 1..324: note = Description of Artificial Sequence: Synthetic polynucleotide
  source 1..324: mol_type = other DNA
gaaattgtgttgacgcagtctccaggcaccctgtatttgtctccaggggaaagagccaccctctcatgcagggccagtcagagtgtttacagcagctacttagcctggtaccagcagaaacctggccaggctcccaggctcctcatttatggtgcatccagccggtccactggcatcccagacaggttcagtggcagtgggtctgggacagacttcgctctcaccatcagcagagtggagcatgaagattgtgcagtgtattactgtcagcactatgataactcaccgtggacgttcggccaagggaccaaggtggaaatcaaa

SEQ ID NO: 26044 - protein, 108 aa, synthetic construct
  REGION 1..108: note = Description of Artificial Sequence: Synthetic polypeptide
EIVLTQSPGTLYLSPGERATLSCRASQSVYSSYLAWYQQKPGQAPRLLIYGASSRSTGIPDRFSGSGSGTDFALTISRVEHEDCAVYYCQHYDNSPWTFGQGTKVEIK

SEQ ID NO: 26045 - DNA, 324 bp, synthetic construct
  misc_feature 1..324: note = Description of Artificial Sequence: Synthetic polynucleotide
  source 1..324: mol_type = other DNA
gaaattgtgttgacgcagtctccaggcaccctgtatttgtctccaggggaaagagccaccctctcatgcagggccagtcagagtgtttacagcagctacttagcctggtaccagcagaaacctgcccaggctcccaggctcctcatttatggtgcatccagccggtccactggcatcccagacaggttcagtggcagtgggtctgggacagacttcgctctcaccatcagcagagtggagcctgaagattgtgcagtgtattactgtcagcattctgataactcaccgtggacgttcggccaagggaccaaggtggaaatcaaa

SEQ ID NO: 26046 - protein, 108 aa, synthetic construct
  REGION 1..108: note = Description of Artificial Sequence: Synthetic polypeptide
EIVLTQSPGTLYLSPGERATLSCRASQSVYSSYLAWYQQKPAQAPRLLIYGASSRSTGIPDRFSGSGSGTDFALTISRVEPEDCAVYYCQHSDNSPWTFGQGTKVEIK

SEQ ID NO: 26047 - DNA, 324 bp, synthetic construct
  misc_feature 1..324: note = Description of Artificial Sequence: Synthetic polynucleotide
  source 1..324: mol_type = other DNA
gaaattgtgttgacgcagtctccaggcaccctgtatttgtctccaggggaaagagccaccctctcatgcagggccagtcagagtgtttacagcagctacttagcctggtaccagcagaaacctggccaggctcccaggctcatcatttatggtgcatccagccggtccactggcatcccagacaggttcagtggcagtgggtctgggacagacttcgctctcaccatcagcagagtggagcctgaagattgtgcagtgtattactgtcagcactatgataactcaccgtggacgttcggccaagggaccaaggtggaaatcaaa

SEQ ID NO: 26048 - protein, 108 aa, synthetic construct
  REGION 1..108: note = Description of Artificial Sequence: Synthetic polypeptide
EIVLTQSPGTLYLSPGERATLSCRASQSVYSSYLAWYQQKPGQAPRLIIYGASSRSTGIPDRFSGSGSGTDFALTISRVEPEDCAVYYCQHYDNSPWTFGQGTKVEIK

SEQ ID NO: 26049 - DNA, 339 bp, synthetic construct
  misc_feature 1..339: note = Description of Artificial Sequence: Synthetic polynucleotide
  source 1..339: mol_type = other DNA
gacatcgtgatgacccagtctccagattgcctggctgtgtctctgggcgagagggccaccatcaactgcaagtccagccagagtgttttatacacctccaacaataacaactacttagcttggtaccagcagaaaccaggacagcctcctaagctgctcatttactgggcatctacccgggaatccggggtccctgaccgattcagtggcagcgggtctgggacagatttcactctcaccatcagcagcctgcaggctgaagatgttgcagtttattattgtcagcaatattatactactccgtggacgttcggccaagggaccaaggtggaaatcaaa

SEQ ID NO: 26050 - protein, 113 aa, synthetic construct
  REGION 1..113: note = Description of Artificial Sequence: Synthetic polypeptide
DIVMTQSPDCLAVSLGERATINCKSSQSVLYTSNNNNYLAWYQQKPGQPPKLLIYWASTRESGVPDRFSGSGSGTDFTLTISSLQAEDVAVYYCQQYYTTPWTFGQGTKVEIK

SEQ ID NO: 26051 - DNA, 324 bp, synthetic construct
  misc_feature 1..324: note = Description of Artificial Sequence: Synthetic polynucleotide
  source 1..324: mol_type = other DNA
gaaattgtgttgacgcagtctccaggcaccctgtatttgtctccaggggaaagagccaccctgtcatgcagggccagtcagagtgtttacagcagctacttagcgtggtaccagcagaaacctggccaggctcccaggctcctcatttatggtgcatccagccgggccacgggcatcccagacaggttcagtggcagtgggtgtgggacagacttcgctctcaccatcagcagagtggagcatgaagattgtgcagtgtattactgtcagcactctgataactcaccgtggacgttcggccaagggaccaaggtggaaatcaaa

SEQ ID NO: 26052 - protein, 108 aa, synthetic construct
  REGION 1..108: note = Description of Artificial Sequence: Synthetic polypeptide
EIVLTQSPGTLYLSPGERATLSCRASQSVYSSYLAWYQQKPGQAPRLLIYGASSRATGIPDRFSGSGCGTDFALTISRVEHEDCAVYYCQHSDNSPWTFGQGTKVEIK

SEQ ID NO: 26053 - DNA, 324 bp, synthetic construct
  misc_feature 1..324: note = Description of Artificial Sequence: Synthetic polynucleotide
  source 1..324: mol_type = other DNA
gaaattgtgttgacgcagtctccaggcaccctgtctttgtctccaggggaaagagccaccctctcctgcagggccagtcagagtgttggcagcaactacttagcctggtaccagcagaaacgtggccaggctcccaggctcctcatctatggtgcatccagcagggccactgacatcccagacaggttcagtggcagtgggtctgggacagacttcactctcaccatcagcagactggagcctgaagattttgcagtgtattactgtcagcagtatgaaagttcaccgtggacgttcggccaagggaccaaggtggaaatcaaa

SEQ ID NO: 26054 - protein, 108 aa, synthetic construct
  REGION 1..108: note = Description of Artificial Sequence: Synthetic polypeptide
EIVLTQSPGTLSLSPGERATLSCRASQSVGSNYLAWYQQKRGQAPRLLIYGASSRATDIPDRFSGSGSGTDFTLTISRLEPEDFAVYYCQQYESSPWTFGQGTKVEIK

SEQ ID NO: 26055 - DNA, 336 bp, synthetic construct
  misc_feature 1..336: note = Description of Artificial Sequence: Synthetic polynucleotide
  source 1..336: mol_type = other DNA
gatattgtgatgactcagtctccactctccctccctgtcacccctggagagccggcctccatctcatgcaggtctagtcagagcctcgtgcatagtagtggatacaactatttggattggtacctgcagaagccagggcagtctccacaactcgtgatctatttgggttctaatcgggcctccggggtccctgacaggttcagtggcagtggttcagtcacagattttacactgagaatcagcagagtggaggctgaggatattgggatttattattgcatgcaagctctacatattcctctcactttcggcggagggaccaaggtggagatcaaa

SEQ ID NO: 26056 - protein, 112 aa, synthetic construct
  REGION 1..112: note = Description of Artificial Sequence: Synthetic polypeptide
DIVMTQSPLSLPVTPGEPASISCRSSQSLVHSSGYNYLDWYLQKPGQSPQLVIYLGSNRASGVPDRFSGSGSVTDFTLRISRVEAEDIGIYYCMQALHIPLTFGGGTKVEIK

SEQ ID NO: 26057 - DNA, 321 bp, synthetic construct
  misc_feature 1..321: note = Description of Artificial Sequence: Synthetic polynucleotide
  source 1..321: mol_type = other DNA
gaaatagtgatgacgcagtctccagccaccctgtctgtgtctccaggggaaagagccaccctctcctgccgggccagtcaggatgttatcacctacttagcctggtaccagcagaaacctggccaggctcccaggctcctcatctatggtgcatccaccagggccactggtgtcccagccaggttcagtggcagtgggtctgggacagagttcactctcaccatcaccagcctgcagtctgaagattttgcactttattactgtcaggagtataatgactggccgtgcagttttggccaggggaccaagctggagatcaaa

SEQ ID NO: 26058 - protein, 107 aa, synthetic construct
  REGION 1..107: note = Description of Artificial Sequence: Synthetic polypeptide
EIVMTQSPATLSVSPGERATLSCRASQDVITYLAWYQQKPGQAPRLLIYGASTRATGVPARFSGSGSGTEFTLTITSLQSEDFALYYCQEYNDWPCSFGQGTKLEIK

SEQ ID NO: 26059 - DNA, 324 bp, synthetic construct
  misc_feature 1..324: note = Description of Artificial Sequence: Synthetic polynucleotide
  source 1..324: mol_type = other DNA
gaaattgtgttgacgcagtctccaggcaccctgtatttgtctccaggggaaagagccaccctctcatgcagggccagtcagagtgtttacagcagctacttagcctggtaccagcagaaacctggccaggctcccaggctcctcatttatggtgcatccagccggtccactgtcatcccagacaggttcagtggcagtgggtgtgggacagacttcgctctcaccatcagcagactggagcctgaagattgtgcagtgtattactgtcagcattatgataactctccgtggacgttcggccaagggaccaaggtggaaatcaaa

SEQ ID NO: 26060 - protein, 108 aa, synthetic construct
  REGION 1..108: note = Description of Artificial Sequence: Synthetic polypeptide
EIVLTQSPGTLYLSPGERATLSCRASQSVYSSYLAWYQQKPGQAPRLLIYGASSRSTVIPDRFSGSGCGTDFALTISRLEPEDCAVYYCQHYDNSPWTFGQGTKVEIK

SEQ ID NO: 26061 - DNA, 339 bp, synthetic construct
  misc_feature 1..339: note = Description of Artificial Sequence: Synthetic polynucleotide
  source 1..339: mol_type = other DNA
gacatcgtgatgacccagtctccagactccctggctgcgtctctgggcgagagggccaccatcaactgcaagtccagtcagaatattttatccagctccaacaataagaactacttaacttggtaccagcagaaaccaggacagcctcctaaaatactcatttactggacatctacccgggaatccggggtccctgaccgattcagtggcagcgggtttgggacagatttcactctcaccatcagcagcctgcaggctgaagatgtggctgtttattactgtcagcaatattttagtgttcctccgacgttcggccaagggaccaaggtggaaatcaaa

SEQ ID NO: 26062 - protein, 113 aa, synthetic construct
  REGION 1..113: note = Description of Artificial Sequence: Synthetic polypeptide
DIVMTQSPDSLAASLGERATINCKSSQNILSSSNNKNYLTWYQQKPGQPPKILIYWTSTRESGVPDRFSGSGFGTDFTLTISSLQAEDVAVYYCQQYFSVPPTFGQGTKVEIK

SEQ ID NO: 26063 - DNA, 324 bp, synthetic construct
  misc_feature 1..324: note = Description of Artificial Sequence: Synthetic polynucleotide
  source 1..324: mol_type = other DNA
gaaattgtgttgacgcagtctccaggcaccctgtctttgtctccaggggaaagagccaccctctcatgcagggccagtcagagtgtttacagcagctacttagcctggtaccagcagaaacctggccaggctcccaggctcctcatttatggtgcatccagccggtccactggcatcccagacaggttcagtggcagtgggtctgggacagacttcgctctcaccatcagcagactggagcctgaagattttgcagtgtattactgtcagcactatgataactcaccgtggacgttcggccaagggaccaaggtggaaatcaaa

SEQ ID NO: 26064 - protein, 108 aa, synthetic construct
  REGION 1..108: note = Description of Artificial Sequence: Synthetic polypeptide
EIVLTQSPGTLSLSPGERATLSCRASQSVYSSYLAWYQQKPGQAPRLLIYGASSRSTGIPDRFSGSGSGTDFALTISRLEPEDFAVYYCQHYDNSPWTFGQGTKVEIK

SEQ ID NO: 26065 - DNA, 339 bp, synthetic construct; identical to SEQ ID NO: 25873
  misc_feature 1..339: note = Description of Artificial Sequence: Synthetic polynucleotide
  source 1..339: mol_type = other DNA

SEQ ID NO: 26066 - protein, 113 aa, synthetic construct; identical to SEQ ID NO: 25874
  REGION 1..113: note = Description of Artificial Sequence: Synthetic polypeptide

SEQ ID NO: 26067 - DNA, 324 bp, synthetic construct
  misc_feature 1..324: note = Description of Artificial Sequence: Synthetic polynucleotide
  source 1..324: mol_type = other DNA
gaaattgtgttgacgcagtctccaggcaccctgtatttgtctccaggggaaagagccaccctctcctgcagggccagtcagagtgtttacagcagctacttagcctggtaccagcagaaacctggccaggctcccaggctcctcatctatggtgcatccagccgggccactggcataccagacaggttcagtggcagtgggtctgggacagacttcgctctcaccatcagcagactggagcatgaagattgtgcagtgtattactgtcagcactatgataactcaccgtggacgttcggccaagggaccaaggtggaaatcaaa

SEQ ID NO: 26068 - protein, 108 aa, synthetic construct
  REGION 1..108: note = Description of Artificial Sequence: Synthetic polypeptide
EIVLTQSPGTLYLSPGERATLSCRASQSVYSSYLAWYQQKPGQAPRLLIYGASSRATGIPDRFSGSGSGTDFALTISRLEHEDCAVYYCQHYDNSPWTFGQGTKVEIK

SEQ ID NO: 26069 - DNA, 324 bp, synthetic construct
  misc_feature 1..324: note = Description of Artificial Sequence: Synthetic polynucleotide
  source 1..324: mol_type = other DNA
gaaattgtgttgacgcagtctccaggcaccctgtatttgtctccaggggaaagagccaccctctcatgcagggccagtcagagtgtttacagcagctacttagcctggtaccagcagaaacctggccaggctcccaggctcctcatttatggtgcatccagccggtccactggcatcccagacaggttcagtggcagtgggtgtgggacagacttcgctctcaccatcagcagagtggagcctgaagattttgcagtgtattactgtcagcactctgataactcaccgtggacgttcggccaagggaccaaggtggaaatcaaa

SEQ ID NO: 26070 - protein, 108 aa, synthetic construct
  REGION 1..108: note = Description of Artificial Sequence: Synthetic polypeptide
EIVLTQSPGTLYLSPGERATLSCRASQSVYSSYLAWYQQKPGQAPRLLIYGASSRSTGIPDRFSGSGCGTDFALTISRVEPEDFAVYYCQHSDNSPWTFGQGTKVEIK

SEQ ID NO: 26071 - DNA, 324 bp, synthetic construct
  misc_feature 1..324: note = Description of Artificial Sequence: Synthetic polynucleotide
  source 1..324: mol_type = other DNA
gaaattgtgttgacgcagtctccaggcaccctgtctttgtctccaggggaaagagccaccctctcctgcagggccagtcagagtgttgacagcagctacctagcctggtaccagcagaaaactggccaggctcccaggctcctcatctatggtgcatccagcagggcccctggcatcccagacaggttcagtggcagtgggtctgggacagacttcactctcaccatcagcagactggagcctgaagattttgcagtgtattactgtcagcagtatgaaagctcaccgtggacgttcggccaagggaccaaggtggaaatcaaa

SEQ ID NO: 26072 - protein, 108 aa, synthetic construct
  REGION 1..108: note = Description of Artificial Sequence: Synthetic polypeptide
EIVLTQSPGTLSLSPGERATLSCRASQSVDSSYLAWYQQKTGQAPRLLIYGASSRAPGIPDRFSGSGSGTDFTLTISRLEPEDFAVYYCQQYESSPWTFGQGTKVEIK

SEQ ID NO: 26073 - DNA, 324 bp, synthetic construct
  misc_feature 1..324: note = Description of Artificial Sequence: Synthetic polynucleotide
  source 1..324: mol_type = other DNA
gaaattgtgttgacgcagtctccaggcaccctgtctttgtctcaaggggaaagagccaccctctcctgcagggccagtcagagtgttagcagcaggtacttagcctggtaccagcagaaacctggccaggctcccagactcctcatctatggtgcatccagcagggccactggcatcccagacaggttcagtggcagtgggtctgggacagacttcactctcaccatcagcagactggagcctgaagattttgcagtatattactgtcagcattatgatagctcaccgtggacgttcggccaagggaccaaggtggaaaatcaa

SEQ ID NO: 26074 - protein, 108 aa, synthetic construct
  REGION 1..108: note = Description of Artificial Sequence: Synthetic polypeptide
EIVLTQSPGTLSLSQGERATLSCRASQSVSSRYLAWYQQKPGQAPRLLIYGASSRATGIPDRFSGSGSGTDFTLTISRLEPEDFAVYYCQHYDSSPWTFGQGTKVENQ

SEQ ID NO: 26075 - DNA, 321 bp, synthetic construct
  misc_feature 1..321: note = Description of Artificial Sequence: Synthetic polynucleotide
  source 1..321: mol_type = other DNA
gacatccagatgacccagtctccatcctccctgtctgcatctgtaggagacagagtcaccatcacttgccgggcaagtcaggccattagagatgatttaggctggtatcagcagaaaccagggaaagcccctcagcgcctgatctttgctgcatccagtttgcaaagtggggtcccatcaaggttcagcggcagtggatctgggacagaattcactctcacaatcagcagcctgcagcctgaagattttgcaacttattactgtctccagcattatagttaccctcggacgttcggccgagggaccaaggtggcaatcaaa

SEQ ID NO: 26076 - protein, 107 aa, synthetic construct
  REGION 1..107: note = Description of Artificial Sequence: Synthetic polypeptide
DIQMTQSPSSLSASVGDRVTITCRASQAIRDDLGWYQQKPGKAPQRLIFAASSLQSGVPSRFSGSGSGTEFTLTISSLQPEDFATYYCLQHYSYPRTFGRGTKVAIK

SEQ ID NO: 26077 - DNA, 339 bp, synthetic construct; identical to SEQ ID NO: 25825
  misc_feature 1..339: note = Description of Artificial Sequence: Synthetic polynucleotide
  source 1..339: mol_type = other DNA

SEQ ID NO: 26078 - protein, 113 aa, synthetic construct; identical to SEQ ID NO: 25826
  REGION 1..113: note = Description of Artificial Sequence: Synthetic polypeptide

SEQ ID NO: 26079 - DNA, 339 bp, synthetic construct
  misc_feature 1..339: note = Description of Artificial Sequence: Synthetic polynucleotide
  source 1..339: mol_type = other DNA
aatatcgtgatgacccagtctccagactccctggctgtgtctctgggcgcgagggccaccatcaactgcaagtccagccagagtgttttacacaactccaacaattacaactacttaacttggtaccagcagaaaccaggacagcctcctaagctgctcctttactgggcatctacccggaaatccggggtccctgaccgattcagtggcagcgggtctgggacagatttcactctcaccatcagcagcctgcaggctgaagatgtggcagtttatttctgtcagcaatattatagttctcctccgacgttcggccaagggaccaaggtggaaatcaaa

SEQ ID NO: 26080 - protein, 113 aa, synthetic construct
  REGION 1..113: note = Description of Artificial Sequence: Synthetic polypeptide
NIVMTQSPDSLAVSLGARATINCKSSQSVLHNSNNYNYLTWYQQKPGQPPKLLLYWASTRKSGVPDRFSGSGSGTDFTLTISSLQAEDVAVYFCQQYYSSPPTFGQGTKVEIK

SEQ ID NO: 26081 - DNA, 339 bp, synthetic construct
  misc_feature 1..339: note = Description of Artificial Sequence: Synthetic polynucleotide
  source 1..339: mol_type = other DNA
gacatcgttatgacccagtctccagactccctggctgtgtctctgggcgagagggccaccatcaattgcaagtccagccagagtgttttattcagctccaacaattataattacttagcttggtaccagcagagaccaggacagcctcctaacctgctcatttactgggcatctacccgggaatccggggtccctgaccgattcagtggcagcgggtctgggacagatttcactctcaccatcagcagcctgcaggctgctgatgtggcagtttattactgtcagcaatatcatagttctcctctgacgttcggccaagggaccacggtgcaaatcaaa

SEQ ID NO: 26082 - protein, 113 aa, synthetic construct
  REGION 1..113: note = Description of Artificial Sequence: Synthetic polypeptide
DIVMTQSPDSLAVSLGERATINCKSSQSVLFSSNNYNYLAWYQQRPGQPPNLLIYWASTRESGVPDRFSGSGSGTDFTLTISSLQAADVAVYYCQQYHSSPLTFGQGTTVQIK

SEQ ID NO: 26083 - DNA, 339 bp, synthetic construct; identical to SEQ ID NO: 25873
  misc_feature 1..339: note = Description of Artificial Sequence: Synthetic polynucleotide
  source 1..339: mol_type = other DNA

SEQ ID NO: 26084 - protein, 113 aa, synthetic construct; identical to SEQ ID NO: 25874
  REGION 1..113: note = Description of Artificial Sequence: Synthetic polypeptide

SEQ ID NO: 26085 - DNA, 324 bp, synthetic construct
  misc_feature 1..324: note = Description of Artificial Sequence: Synthetic polynucleotide
  source 1..324: mol_type = other DNA
gaaattgtgttgacgcagtctccaggcaccctgtatttgtctccaggggaaagagccaccttctcatgcagggccagtcagagtgtttacagcagctacttagcgtggtaccagcagaaacctggccaggctcccaggctcctcatttatggtgcatccagccggtccactggcatcccagacaggttcagtggcagtgggtctgggacagacttcgctctcaccatcagcagactggagcctgaagattttgcagtgtattactgtcagcattatgataactcaccgtggacgttcggccaagggaccaaggtggaaatcaaa

SEQ ID NO: 26086 - protein, 108 aa, synthetic construct
  REGION 1..108: note = Description of Artificial Sequence: Synthetic polypeptide
EIVLTQSPGTLYLSPGERATFSCRASQSVYSSYLAWYQQKPGQAPRLLIYGASSRSTGIPDRFSGSGSGTDFALTISRLEPEDFAVYYCQHYDNSPWTFGQGTKVEIK

SEQ ID NO: 26087 - DNA, 324 bp, synthetic construct
  misc_feature 1..324: note = Description of Artificial Sequence: Synthetic polynucleotide
  source 1..324: mol_type = other DNA
gaaattgtgttgacgcagtctccaggcaccctgtctttgtctccaggggaaagagccaccctctcatgcagggccagtcagagtgtttacagcagctacttagcctggtaccagcagaaacctggccaggctcccaggctcctcatctatggtgcatccagccgggccactggcatcccagacaggttcagtggcagtgggtctgggacagacttcgctctcaccatcagcagactggagcctgaagattgtgcagtgtattactgtcagcactatgataactcaccgtggacgttcggccaagggaccaaggtggaaatcaaa

SEQ ID NO: 26088 - protein, 108 aa, synthetic construct
  REGION 1..108: note = Description of Artificial Sequence: Synthetic polypeptide
EIVLTQSPGTLSLSPGERATLSCRASQSVYSSYLAWYQQKPGQAPRLLIYGASSRATGIPDRFSGSGSGTDFALTISRLEPEDCAVYYCQHYDNSPWTFGQGTKVEIK

SEQ ID NO: 26089 - DNA, 321 bp, synthetic construct
  misc_feature 1..321: note = Description of Artificial Sequence: Synthetic polynucleotide
  source 1..321: mol_type = other DNA
gaaatagtgatgacgcagtctccagccaccctgtctctgtctccaggggaaagagccaccctctcctgcagggccagtatgagtgttgtcaacagcttagcctggtaccagcagaaacctggccaggctcccaggctcctcatctatggtgcatccaccagggccactggtatcccagccaggttcagtggcagtgggtctgggacagagttcactctcaccatcagcagcctgcagtctgaagattttgcaatttattactgtcagcagtataatgactggccgtgcagttttggccaggggaccaagctggagatcaaa

SEQ ID NO: 26090 - protein, 107 aa, synthetic construct
  REGION 1..107: note = Description of Artificial Sequence: Synthetic polypeptide
EIVMTQSPATLSLSPGERATLSCRASMSVVNSLAWYQQKPGQAPRLLIYGASTRATGIPARFSGSGSGTEFTLTISSLQSEDFAIYYCQQYNDWPCSFGQGTKLEIK

SEQ ID NO: 26091 - DNA, 339 bp, synthetic construct
  misc_feature 1..339: note = Description of Artificial Sequence: Synthetic polynucleotide
  source 1..339: mol_type = other DNA
gacatcgttatgacccagtgtccagactccctggctgtgtctctgggcgagagggccaccatcaattgcaagtccagccagagtgttttattcagatccaacaattataattacttagcttggtaccagcagagaccaggacagcctcataacctgctcatttactgggcatctacccgggaatccggggtccctgaccgattcagtggcagcgggtatgggacagatttcactctcaccatcagcagcgtgcaggctgctgatgtggcagtttattactgtcagcaatatcatagttctcctctgacgttcggccaagggaccacggtgcaaatcaaa

SEQ ID NO: 26092 - protein, 113 aa, synthetic construct
  REGION 1..113: note = Description of Artificial Sequence: Synthetic polypeptide
DIVMTQCPDSLAVSLGERATINCKSSQSVLFRSNNYNYLAWYQQRPGQPHNLLIYWASTRESGVPDRFSGSGYGTDFTLTISSVQAADVAVYYCQQYHSSPLTFGQGTTVQIK

SEQ ID NO: 26093 - DNA, 324 bp, synthetic construct
  misc_feature 1..324: note = Description of Artificial Sequence: Synthetic polynucleotide
  source 1..324: mol_type = other DNA
gaaattgtgttgacgcagtctccaggcaccctgtatttgtctccaggggaaagagccaccctctcctgcagggccagtcagagtgtttacagcagctacttagcctggtaccagcagaaacctggccaggctcccaggctcctcatttatggtgcatccagccggtccactggcatcccagacaggttcagtggcagtgggtgtgggacagacttcgctctcaccatcagcagactggagcctgaagattttgcagtgtattactgtcagcactatgataactcaccgtggacgttcggccaagggaccaaggtggaaatcaaa

SEQ ID NO: 26094 - protein, 108 aa, synthetic construct
  REGION 1..108: note = Description of Artificial Sequence: Synthetic polypeptide
EIVLTQSPGTLYLSPGERATLSCRASQSVYSSYLAWYQQKPGQAPRLLIYGASSRSTGIPDRFSGSGCGTDFALTISRLEPEDFAVYYCQHYDNSPWTFGQGTKVEIK

SEQ ID NO: 26095 - DNA, 324 bp, synthetic construct
  misc_feature 1..324: note = Description of Artificial Sequence: Synthetic polynucleotide
  source 1..324: mol_type = other DNA
gaaattgtgttgacgcagtctccaggcaccctgtatttgtcttcaggggaaagagccaccctctcatgcagggccagtcagagtgtttacagcagctacttagcgtggtaccagcagaaacctggccaggctcccaggctcctcatttatggtgcatccagccggtccactggcatcccagacaggttcagtggcagtgggtctgggacagacttcgctctcaccatcagcagagtggagcatgaagattgtgcagtgtattactgtcagcactatgataactcaccgtggacgttcggccaagggaccaaggtggaaatcaaa

SEQ ID NO: 26096 - protein, 108 aa, synthetic construct
  REGION 1..108: note = Description of Artificial Sequence: Synthetic polypeptide
EIVLTQSPGTLYLSSGERATLSCRASQSVYSSYLAWYQQKPGQAPRLLIYGASSRSTGIPDRFSGSGSGTDFALTISRVEHEDCAVYYCQHYDNSPWTFGQGTKVEIK

SEQ ID NO: 26097 - DNA, 324 bp, synthetic construct
  misc_feature 1..324: note = Description of Artificial Sequence: Synthetic polynucleotide
  source 1..324: mol_type = other DNA
gaaattgtgttgtcgcagtctccaggcatcctgtatttgtcttcaggggaaagagccaccctctcctgcagggccagtcagagtgtttacagcagctacttagcctggtaccagcagaaacctggccaggctcccaggctcctcatttatggtgcatccagccgggccactggcatcccagacaggttcagtggcagtgggtctgggacagacttcgctctcaccatcagcagactggagcctgaagattttgcagtgtattactgtcagcactatgataactctccgtggacgttcggccaagggaccaaggtggaaatcaaa

SEQ ID NO: 26098 - protein, 108 aa, synthetic construct
  REGION 1..108: note = Description of Artificial Sequence: Synthetic polypeptide
EIVLSQSPGILYLSSGERATLSCRASQSVYSSYLAWYQQKPGQAPRLLIYGASSRATGIPDRFSGSGSGTDFALTISRLEPEDFAVYYCQHYDNSPWTFGQGTKVEIK

SEQ ID NO: 26099 - DNA, 339 bp, synthetic construct
  misc_feature 1..339: note = Description of Artificial Sequence: Synthetic polynucleotide
  source 1..339: mol_type = other DNA
gacatcgtgatgacccagtctccagactccctggctgtgtctctgggcgagagggccaccatcaactgcaagtccagccagagtgttttatacagctccaacaatgcgaactacttagcttggtaccagcagaaaccaggacagcctcctaacctgttcatttactgggcatctacccgggaatccggggtccctgaccgattcagtggcagcgggtctgggacagatttcactctcaccatcagcagcctgcaggctgaagatgtggcagtttattactgtcagcaatattatagtactccgtgcagttttggccaggggaccaaggtggagatcaaa

SEQ ID NO: 26100 - protein, 113 aa, synthetic construct
  REGION 1..113: note = Description of Artificial Sequence: Synthetic polypeptide
DIVMTQSPDSLAVSLGERATINCKSSQSVLYSSNNANYLAWYQQKPGQPPNLFIYWASTRESGVPDRFSGSGSGTDFTLTISSLQAEDVAVYYCQQYYSTPCSFGQGTKVEIK

SEQ ID NO: 26101 - DNA, 324 bp, synthetic construct
  misc_feature 1..324: note = Description of Artificial Sequence: Synthetic polynucleotide
  source 1..324: mol_type = other DNA
gaaattgtgttgacgcagtctccaggcaccctgtctttgtctacaggggaaagagccaccctctcgtgcagggccagtcagagcgttagcagcagctacttagcttggtaccagcagaaacctggccagcctcccaggctcctcatttatggtgcatccaccagggcctctggcatcccagacaggttcagtggcagtgggtctgggacagacttcactctcaccatcagcagactggagcctgaatattttgcagtttattactgtcagcagtatggtaactcaccgctcactttcggcggagggaccaaggtggagatcaaa

SEQ ID NO: 26102 - protein, 108 aa, synthetic construct
  REGION 1..108: note = Description of Artificial Sequence: Synthetic polypeptide
EIVLTQSPGTLSLSTGERATLSCRASQSVSSSYLAWYQQKPGQPPRLLIYGASTRASGIPDRFSGSGSGTDFTLTISRLEPEYFAVYYCQQYGNSPLTFGGGTKVEIK

SEQ ID NO: 26103 - DNA, 339 bp, synthetic construct
  misc_feature 1..339: note = Description of Artificial Sequence: Synthetic polynucleotide
  source 1..339: mol_type = other DNA
gacagcgtgatgacccagtctccagactccctggctgtgtctctgggcgagagggccaccatcaactgcaagtccagccagagtgttttacacagctctaataaaaagaactacttagcttggtaccagcagaaaccaggacagcctcctaagctgctcatttactgggcatctacctgggaatccggggtccctgaccgattcagtggcagcgggtctgggacagatttcactctcaccatcagcagtctgcaggctgaagatgtggcagtttattactgtcagcaatattataggactccgtggacgttcggccaagggaccaaggtggaaatcaaa

SEQ ID NO: 26104 - protein, 113 aa, synthetic construct
  REGION 1..113: note = Description of Artificial Sequence: Synthetic polypeptide
DSVMTQSPDSLAVSLGERATINCKSSQSVLHSSNKKNYLAWYQQKPGQPPKLLIYWASTWESGVPDRFSGSGSGTDFTLTISSLQAEDVAVYYCQQYYRTPWTFGQGTKVEIK

SEQ ID NO: 26105 - DNA, 321 bp, synthetic construct
  misc_feature 1..321: note = Description of Artificial Sequence: Synthetic polynucleotide
  source 1..321: mol_type = other DNA
gacatccagatgacccagtctccatcctccctgtctgcttctgtaggagacagagtcaccatcacttgccgggcaagtcagggcattagaaatgatttaggctggtatcagcagaaaccagggaaagcccctaagcgcctgatctatgctgcatccactttgcaaagtggggtcccatcaaggttcagcggcagtggatctgggacagaattcactctcacaatcagcggcctgcagcgtgaagattttgcaacttatcactgtctacagcatagtaattacccgctcactttcggcggagggaccaaggtggagatcaaa

SEQ ID NO: 26106 - protein, 107 aa, synthetic construct
  REGION 1..107: note = Description of Artificial Sequence: Synthetic polypeptide
DIQMTQSPSSLSASVGDRVTITCRASQGIRNDLGWYQQKPGKAPKRLIYAASTLQSGVPSRFSGSGSGTEFTLTISGLQREDFATYHCLQHSNYPLTFGGGTKVEIK

SEQ ID NO: 26107 - DNA, 321 bp, synthetic construct
  misc_feature 1..321: note = Description of Artificial Sequence: Synthetic polynucleotide
  source 1..321: mol_type = other DNA
gacatccagatgacccagtctccatcctccctgtctgcatctgtaggagacagagtcaccatcacttgccgggcaagtcaggacattagaaatgatttaggctggtatcagcagaaaccagggaaagcccctaagcgcctgatctatggtgtatccagtttgcaaagtggggtcccatcaaggttcagcggcagtggatctgggaccgaattcactctcacaatcagcagcctgcagcgtgaagattttgcaacttattactgtctacagcataatgattacccattcactttcggccgtgggaccaaagtggatatcaaa

SEQ ID NO: 26108 - protein, 107 aa, synthetic construct
  REGION 1..107: note = Description of Artificial Sequence: Synthetic polypeptide
DIQMTQSPSSLSASVGDRVTITCRASQDIRNDLGWYQQKPGKAPKRLIYGVSSLQSGVPSRFSGSGSGTEFTLTISSLQREDFATYYCLQHNDYPFTFGRGTKVDIK

SEQ ID NO: 26109 - DNA, 339 bp, synthetic construct
  misc_feature 1..339: note = Description of Artificial Sequence: Synthetic polynucleotide
  source 1..339: mol_type = other DNA
gacatcgtgatgacccagtctccagactccctggctgtgtctctgggcgagagggccaccatcaactgcaagtccagccagagtgttttgcacagctccaacaattataattacttagcttggtaccagcagaaaccaggacagcctcctaacctgctcatttactgggcatctacccgggaatccggggtccctgaccgattcagtggcagcgggtctgggacagatttcactctcaccatcagcagcctgcaggctgctgatgtggcagtttattactgtcagcaatattatagtagtccaccgacgttcggccaagggaccacggtggaaatcaaa

SEQ ID NO: 26110 - protein, 113 aa, synthetic construct
  REGION 1..113: note = Description of Artificial Sequence: Synthetic polypeptide
DIVMTQSPDSLAVSLGERATINCKSSQSVLHSSNNYNYLAWYQQKPGQPPNLLIYWASTRESGVPDRFSGSGSGTDFTLTISSLQAADVAVYYCQQYYSSPPTFGQGTTVEIK

SEQ ID NO: 26111 - DNA, 339 bp, synthetic construct
  misc_feature 1..339: note = Description of Artificial Sequence: Synthetic polynucleotide
  source 1..339: mol_type = other DNA
gacatcgtgatgacccagtctccagactccctggctgtgtctctgggcgagagggccaccatcaactgcaagtccagccagagtgttttgtacagctccaacagtcacaactacttagcttggtaccagcagaaaccaggacagcctcctaaactgctcatttactgggcatctatccgggaatccggggtccctgaccgattcagtggcagcgggtctgggacagatttcactctctccatcagcagcatgcaggctgaagatgtggcagtttattactgtcagcaatattatagtactccgtgcagttttggccaggggaccaaggtggagatcaaa

SEQ ID NO: 26112 - protein, 113 aa, synthetic construct
  REGION 1..113: note = Description of Artificial Sequence: Synthetic polypeptide
DIVMTQSPDSLAVSLGERATINCKSSQSVLYSSNSHNYLAWYQQKPGQPPKLLIYWASIRESGVPDRFSGSGSGTDFTLSISSMQAEDVAVYYCQQYYSTPCSFGQGTKVEIK

SEQ ID NO: 26113 - DNA, 321 bp, synthetic construct
  misc_feature 1..321: note = Description of Artificial Sequence: Synthetic polynucleotide
  source 1..321: mol_type = other DNA
gacatccagatgacccagtctccatcctcactgtctgcatctgtaggagacagagtcaccatcacttgtcgggcgagtcagggcattagcaattatttagcctggtttcagcagaaaccagggaaagcccctaagtccctgatctatgctgcttccagtttgcaaagtggggtcccctcaaagttcagcggcagtggatctgggacagatttcactctcaccatcaacagcctgcagcctgaagattttgcaacttattactgccaccagtataatgattacccattcactttcggccctgggaccaaagtggatatcaaa

SEQ ID NO: 26114 - protein, 107 aa, synthetic construct
  REGION 1..107: note = Description of Artificial Sequence: Synthetic polypeptide
DIQMTQSPSSLSASVGDRVTITCRASQGISNYLAWFQQKPGKAPKSLIYAASSLQSGVPSKFSGSGSGTDFTLTINSLQPEDFATYYCHQYNDYPFTFGPGTKVDIK

SEQ ID NO: 26115 - DNA, 339 bp, synthetic construct
  misc_feature 1..339: note = Description of Artificial Sequence: Synthetic polynucleotide
  source 1..339: mol_type = other DNA
gacatcgtgatgacccagtctccagactccctggctgtgtctctgggcgagagggccaccatcaattgcaagtccagtcagaatattttatccagctccaacaataagaactacttaacttggtaccagcagaaaccaggacagcctcctaaaatactcatttactggacatctacccgggaatccggggtccctgaccgattcagtggcagcgggtttgggacagatttcactctcaccatcagcagcctgcaggctgaagatgtggctgtttattactgtcagcaatattttagtgttcctccgacgttcggccaagggaccaaggtggaaatcaaa

SEQ ID NO: 26116 - protein, 113 aa, synthetic construct
  REGION 1..113: note = Description of Artificial Sequence: Synthetic polypeptide
DIVMTQSPDSLAVSLGERATINCKSSQNILSSSNNKNYLTWYQQKPGQPPKILIYWTSTRESGVPDRFSGSGFGTDFTLTISSLQAEDVAVYYCQQYFSVPPTFGQGTKVEIK

SEQ ID NO: 26117 - DNA, 324 bp, synthetic construct
  misc_feature 1..324: note = Description of Artificial Sequence: Synthetic polynucleotide
  source 1..324: mol_type = other DNA
gaaattgtgttgacgcagtctccaggcaccctgtatttgtcttcaggggaaagagccaccctctcatgcagggccagtcagagtgtttacagcagctacttagcctggtaccagcagaaacctggccaggctcccaggctcctcatttatggtgcatccagccggtccactggcatcccagacaggttcagtggcagtgggtgtgggacagacttcgctctcaccatcagcagactggagcctgaagattgtgcagtgtattactgtcagcattctgataactcaccgtggacgttcggccaagggaccaaggtggaaatcaaa

SEQ ID NO: 26118 - protein, 108 aa, synthetic construct
  REGION 1..108: note = Description of Artificial Sequence: Synthetic polypeptide
EIVLTQSPGTLYLSSGERATLSCRASQSVYSSYLAWYQQKPGQAPRLLIYGASSRSTGIPDRFSGSGCGTDFALTISRLEPEDCAVYYCQHSDNSPWTFGQGTKVEIK

SEQ ID NO: 26119 - DNA, 339 bp, synthetic construct
  misc_feature 1..339: note = Description of Artificial Sequence: Synthetic polynucleotide
  source 1..339: mol_type = other DNA
gacatcgtgatgacccagtctccagattgcctggctgtgtctctgggcgagagggccaccatcaactgcaagtccagccagagtgttttatacacctccaacaataacaactacttagcttggtaccagcagaaaccaggacagcctcctaagctgctcatttactgggcatctacccgggaatccggggtccctgaccgattcagtggcagcgggtctgggacagatttcactctcaccatcagcagcctgcaggctgaagatgttgcagtttattattgtcagcactacaatgatactccatggaagtttgtccaagggaccaaggtggaaatcaca

SEQ ID NO: 26120 - protein, 113 aa, synthetic construct
  REGION 1..113: note = Description of Artificial Sequence: Synthetic polypeptide
DIVMTQSPDCLAVSLGERATINCKSSQSVLYTSNNNNYLAWYQQKPGQPPKLLIYWASTRESGVPDRFSGSGSGTDFTLTISSLQAEDVAVYYCQHYNDTPWKFVQGTKVEIT

SEQ ID NO: 26121 - DNA, 324 bp, synthetic construct
  misc_feature 1..324: note = Description of Artificial Sequence: Synthetic polynucleotide
  source 1..324: mol_type = other DNA
gaaattgtgttgacgcagtctccaggcaccctgtctttgtctccaggggaaagagccaccctctcatgcagggccagtcagagtgtttacagcagctacttagcctggtaccagcagaaacctggccaggctcccaggctcctcatttatggtgcatccagccgggccactggcatcccagacaggttcagtggcagtgggtgtgggacagacttcgctctcaccatcagcagagtggagcctgaagattgtgcagtgtattactgtcagcactctgataactcaccgtggacgttcggccaagggaccaaggtggaaatcaaa

SEQ ID NO: 26122 - protein, 108 aa, synthetic construct
  REGION 1..108: note = Description of Artificial Sequence: Synthetic polypeptide
EIVLTQSPGTLSLSPGERATLSCRASQSVYSSYLAWYQQKPGQAPRLLIYGASSRATGIPDRFSGSGCGTDFALTISRVEPEDCAVYYCQHSDNSPWTFGQGTKVEIK

SEQ ID NO: 26123 - DNA, 321 bp, synthetic construct
  misc_feature 1..321: note = Description of Artificial Sequence: Synthetic polynucleotide
  source 1..321: mol_type = other DNA
gacatcaagatgacccagtctccatcttccgtgtctgcatctgtaggagacagagtcaccatcacttgtcgggcgagtcagggtattaacaactggttagtctggtatcagcagaaaccagggaaagcccctaagctcctgatctatgctgcatccagtttgcaaagtggggtcccatcaaggttccgcggcagtggatctgggacagatttcactctcaccatcagcagcctgcagcctgaagattttgcaacttactattgtcaacaggctaacagtttcccattcactttcggccctgggaccaaagtggatatcaaa

SEQ ID NO: 26124 - protein, 107 aa, synthetic construct
  REGION 1..107: note = Description of Artificial Sequence: Synthetic polypeptide
DIKMTQSPSSVSASVGDRVTITCRASQGINNWLVWYQQKPGKAPKLLIYAASSLQSGVPSRFRGSGSGTDFTLTISSLQPEDFATYYCQQANSFPFTFGPGTKVDIK

SEQ ID NO: 26125 - DNA, 321 bp, synthetic construct
  misc_feature 1..321: note = Description of Artificial Sequence: Synthetic polynucleotide
  source 1..321: mol_type = other DNA
gacatccagatgacccagtctccatcctccctgtctgcatctgtaggagacagagtcaccatcacttgccgggcaagtcagggcattagaaatgatttaggctggtatcagcagaaaccagggaaagcccctaagcgcctgatctatgctgcatccagtttgcaaagtggggtcccatcaaggttcagcggcggtggatctgggacagaattcactctcacaatcagcagcctgcagcctgaagattttgcaacttattactgtcttcagcatagtacttacccgctcactttcggcggagggaccaaggtggagatcaaa

SEQ ID NO: 26126 - protein, 107 aa, synthetic construct
  REGION 1..107: note = Description of Artificial Sequence: Synthetic polypeptide
DIQMTQSPSSLSASVGDRVTITCRASQGIRNDLGWYQQKPGKAPKRLIYAASSLQSGVPSRFSGGGSGTEFTLTISSLQPEDFATYYCLQHSTYPLTFGGGTKVEIK

SEQ ID NO: 26127 - DNA, 318 bp, synthetic construct
  misc_feature 1..318: note = Description of Artificial Sequence: Synthetic polynucleotide
  source 1..318: mol_type = other DNA
gacatccagatgacccagtctccatcctccctgtctgcatctgtaggagacagagtcaccatcacttgccgggcaagtcagagcattagcgactatttaaattggtatcagcaaaaaccagggaaagcccctaaggtcctgatctatactacatccagtttgcaaagtggggtcccatcaaggttcagtggcagtggatctgggacagatttcactctcaccatcagcagtctgcaacctgaagattttgcaacttactactgtcaacagagttacagtacccccactttcggcggagggaccaaggtggagatcaaa

SEQ ID NO: 26128 - protein, 106 aa, synthetic construct
  REGION 1..106: note = Description of Artificial Sequence: Synthetic polypeptide
DIQMTQSPSSLSASVGDRVTITCRASQSISDYLNWYQQKPGKAPKVLIYTTSSLQSGVPSRFSGSGSGTDFTLTISSLQPEDFATYYCQQSYSTPTFGGGTKVEIK

SEQ ID NO: 26129 - DNA, 336 bp, synthetic construct
  misc_feature 1..336: note = Description of Artificial Sequence: Synthetic polynucleotide
  source 1..336: mol_type = other DNA
gatattgtgatgacccagactccactctctctgtccgtcacccctggacagccggcctccatctcctgcaagtctagtcagagcctcctgcatggtgatggaaagacctatttgtattggtacctgcagaagccaggccagcctccacagctcctgatctatgaagtttccaaccggttctctggagtgccagataggttcagtggcagcgggtcagggacagatttcacactgaaaatcagccgggtggaggctgaggatgttgggctttatcactgcatgcaaagtatacagcttccgtggacgttcggccaagggaccaaggtggaaatcaaa

SEQ ID NO: 26130 - protein, 112 aa, synthetic construct
  REGION 1..112: note = Description of Artificial Sequence: Synthetic polypeptide
DIVMTQTPLSLSVTPGQPASISCKSSQSLLHGDGKTYLYWYLQKPGQPPQLLIYEVSNRFSGVPDRFSGSGSGTDFTLKISRVEAEDVGLYHCMQSIQLPWTFGQGTKVEIK

SEQ ID NO: 26131 - DNA, 339 bp, synthetic construct
  misc_feature 1..339: note = Description of Artificial Sequence: Synthetic polynucleotide
  source 1..339: mol_type = other DNA
gacatcgtgatgacccagtctccagactccctggctgtgtctctgggcgagagggccaccatcaactgcaagtccagccagagtgttttatacagctccaacaataacaactacttagcttggtaccagcagaaaccaggacagcctcctaagctggtcatttactgggcatctacccgggaatccggggtccctgaccgattcagtggcagcgggtctgggacagatttcactctcaccatcagcagcctgcaggctgaagatgtggcagtttattactgtcagcaatattatagtactccgtgcagttttggccaggggaccaagctggagatcaaa

SEQ ID NO: 26132 - protein, 113 aa, synthetic construct
  REGION 1..113: note = Description of Artificial Sequence: Synthetic polypeptide
DIVMTQSPDSLAVSLGERATINCKSSQSVLYSSNNNNYLAWYQQKPGQPPKLVIYWASTRESGVPDRFSGSGSGTDFTLTISSLQAEDVAVYYCQQYYSTPCSFGQGTKLEIK

SEQ ID NO: 26133 - DNA, 324 bp, synthetic construct
  misc_feature 1..324: note = Description of Artificial Sequence: Synthetic polynucleotide
  source 1..324: mol_type = other DNA
gaaattgtattgacgcagtctccaggcaccctgtctttatttccaggggaaagagccaccctctcctgcagggccagtcagaatattatcagcagctatttagcctggtaccagcagaaacctggccaggctcccaggctcctcatctttggtgtatctagtcgggccactggcatcccagacaggttcagtggcagtgggtctgggacagacttcactctcaccatcagcagactggagcctgaagattttgcagtgtattactgtcaacaatatggtaggtcaccattcaatttcggccctgggaccaaagtggatatcaac

SEQ ID NO: 26134 - protein, 108 aa, synthetic construct
  REGION 1..108: note = Description of Artificial Sequence: Synthetic polypeptide
EIVLTQSPGTLSLFPGERATLSCRASQNIISSYLAWYQQKPGQAPRLLIFGVSSRATGIPDRFSGSGSGTDFTLTISRLEPEDFAVYYCQQYGRSPFNFGPGTKVDIN

SEQ ID NO: 26135 - DNA, 321 bp, synthetic construct
  misc_feature 1..321: note = Description of Artificial Sequence: Synthetic polynucleotide
  source 1..321: mol_type = other DNA
gacatccagatgacccagtctccagcttccgtgtctgcatctgtgggagacagagtcaccataacttgtcgggcgagtcagggtattagcaactggttagcctggtatcagcagaaaccagggaaagcccctaaactcctgatctatgctgcatccagtttgcaaggtggggtcccatcaaggttcagcggcagtggatctgggacagatttcactctctccatcagcagcctgcagcctgaagattttgcaacttactattgtcaacagactgacagtttcccattcactttcggccctgggaccaaagtggatatcaaa

SEQ ID NO: 26136 - protein, 107 aa, synthetic construct
  REGION 1..107: note = Description of Artificial Sequence: Synthetic polypeptide
DIQMTQSPASVSASVGDRVTITCRASQGISNWLAWYQQKPGKAPKLLIYAASSLQGGVPSRFSGSGSGTDFTLSISSLQPEDFATYYCQQTDSFPFTFGPGTKVDIK

SEQ ID NO: 26137 - DNA, 339 bp, synthetic construct
  misc_feature 1..339: note = Description of Artificial Sequence: Synthetic polynucleotide
  source 1..339: mol_type = other DNA
gacatcgtgatgacccagtctccagactccctggctgtgtctctgggcgagagggccaccatcaactgcaagtccagccagagtgttttacacagctccaacaattataattacttagcttggtaccagcagaaaccaggacagcctcctaaggtgctcatttactgggcatctacccggaaatccggggtccctgaccgattcagtggtagcgggtctgggacagatttcactctcaccatcagcagcctgcaggctgaagatgtggcagtttattattgtcagcaatattatagtactccgtgcagttttggccaggggaccaagctggagatcaaa

SEQ ID NO: 26138 - protein, 113 aa, synthetic construct
  REGION 1..113: note = Description of Artificial Sequence: Synthetic polypeptide
DIVMTQSPDSLAVSLGERATINCKSSQSVLHSSNNYNYLAWYQQKPGQPPKVLIYWASTRKSGVPDRFSGSGSGTDFTLTISSLQAEDVAVYYCQQYYSTPCSFGQGTKLEIK

SEQ ID NO: 26139 - DNA, 318 bp, synthetic construct
  misc_feature 1..318: note = Description of Artificial Sequence: Synthetic polynucleotide
  source 1..318: mol_type = other DNA
gacatccagatgacccagtctccatcctccctgtctgcatctgtaggagacagagtcaccatcacttgccgggcaagtcagagcattagcgactatttaaattggtatcagctgaaaccagggaaagcccctaaggtcctgatctatactacatccagtttgcaaagtggggtcccatcaaggttcagtggcagtggatctgggacagatttcactctcaccatcagcagtctgcaacctgaagattttgcaacttacttctgtcaacagagttacagtacccccactttcggcggagggaccaaggtggagatcaaa

SEQ ID NO: 26140 - protein, 106 aa, synthetic construct
  REGION 1..106: note = Description of Artificial Sequence: Synthetic polypeptide
DIQMTQSPSSLSASVGDRVTITCRASQSISDYLNWYQLKPGKAPKVLIYTTSSLQSGVPSRFSGSGSGTDFTLTISSLQPEDFATYFCQQSYSTPTFGGGTKVEIK

SEQ ID NO: 26141 - DNA, 339 bp, synthetic construct
  misc_feature 1..339: note = Description of Artificial Sequence: Synthetic polynucleotide
  source 1..339: mol_type = other DNA
gacatcgtgatgacccagtctccagactccctggctgtgtctctgggcgagagggccaccatcaactgcaagtccagccagaatattttacacagctccaacaataacaactacttagcttggtaccagcagaaaccaggacagcctccttacctgctcatttactgggcatctacccgggaatccggggtccctgaccgattcagtggcagcgggtctgggacagatttcactctcaccatcaccagcctgcaggctgaagatgtggcagtttattactgtcagcaatattatactactccgtgcagttttggccaggggaccaagctggagatcact

SEQ ID NO: 26142 - protein, 113 aa, synthetic construct
  REGION 1..113: note = Description of Artificial Sequence: Synthetic polypeptide
DIVMTQSPDSLAVSLGERATINCKSSQNILHSSNNNNYLAWYQQKPGQPPYLLIYWASTRESGVPDRFSGSGSGTDFTLTITSLQAEDVAVYYCQQYYTTPCSFGQGTKLEIT

SEQ ID NO: 26143 - DNA, 321 bp, synthetic construct; identical to SEQ ID NO: 24247
  misc_feature 1..321: note = Description of Artificial Sequence: Synthetic polynucleotide
  source 1..321: mol_type = other DNA

SEQ ID NO: 26144 - protein, 107 aa, synthetic construct; identical to SEQ ID NO: 24146
  REGION 1..107: note = Description of Artificial Sequence: Synthetic polypeptide

SEQ ID NO: 26145 - DNA, 321 bp, synthetic construct
  misc_feature 1..321: note = Description of Artificial Sequence: Synthetic polynucleotide
  source 1..321: mol_type = other DNA
gacatccagatgacccagtctccatcctccctgtctgcatctgtaggagacagagtcaccatcacttgccgggcaagtcaggacattagaaataattttggctggtatcagcagaaaccagggaaagcccctaagcgcctgatctatgctgcatccagtttgcaaagtggggtcccattaaggttcagcggcagtggatctgggacagaattcactctcacaatcagcagcctgcagcctgaagattttgcaacttattactgtctccaacatgatagttacccgctcactttcggcggagggaccaaggtggagatcaaa

SEQ ID NO: 26146 - protein, 107 aa, synthetic construct
  REGION 1..107: note = Description of Artificial Sequence: Synthetic polypeptide
DIQMTQSPSSLSASVGDRVTITCRASQDIRNNFGWYQQKPGKAPKRLIYAASSLQSGVPLRFSGSGSGTEFTLTISSLQPEDFATYYCLQHDSYPLTFGGGTKVEIK

SEQ ID NO: 26147 - DNA, 336 bp, synthetic construct
  misc_feature 1..336: note = Description of Artificial Sequence: Synthetic polynucleotide
  source 1..336: mol_type = other DNA
gatattgtgatgacccagactcccctctctctgtccgtcacgcctggacagccggcctccatctcctgcaagtctagtcagagcctcctgcatagtgaaggaaagacctatttgtattggtacctgcagaagccaggccagcctccacagctcctgatctatgaagtttcccaccgggtctctggagtgccagataggttcagtggcagcgggtcagggacagatttcacagtgaaaatcagccgggtggaggctgaggatgttggggtttattactgcatgcaaagtacacagtttcctcccactttcggccctgggaccaaagtggatatcaaa

SEQ ID NO: 26148 - protein, 112 aa, synthetic construct
  REGION 1..112: note = Description of Artificial Sequence: Synthetic polypeptide
DIVMTQTPLSLSVTPGQPASISCKSSQSLLHSEGKTYLYWYLQKPGQPPQLLIYEVSHRVSGVPDRFSGSGSGTDFTVKISRVEAEDVGVYYCMQSTQFPPTFGPGTKVDIK

SEQ ID NO: 26149 - DNA, 321 bp, synthetic construct
  misc_feature 1..321: note = Description of Artificial Sequence: Synthetic polynucleotide
  source 1..321: mol_type = other DNA
gaaattgtgttgacgcagtctccaggcaccctgtctttgtctccaggggaaagagccaccctctcctgcagggccagtcagagtgttggcagcagctacttagcctggtaccagcagaaacctggccaggctcccaggctcctcatctatggtgcatccagcagggccactggcatcccagacaggttcagtggcagtgggtctgggacagacttcactctcaccatcagcagactggagcctgaagattttgcagtgtattactgtcagcagtatggtagcttattcactttcggccctgggaccaaagtggatatcaaa

SEQ ID NO: 26150 - protein, 107 aa, synthetic construct
  REGION 1..107: note = Description of Artificial Sequence: Synthetic polypeptide
EIVLTQSPGTLSLSPGERATLSCRASQSVGSSYLAWYQQKPGQAPRLLIYGASSRATGIPDRFSGSGSGTDFTLTISRLEPEDFAVYYCQQYGSLFTFGPGTKVDIK

SEQ ID NO: 26151 - DNA, 324 bp, synthetic construct
  misc_feature 1..324: note = Description of Artificial Sequence: Synthetic polynucleotide
  source 1..324: mol_type = other DNA
gaaattgtgttgacgcagtctccaggcaccctgtctttgtctccaggggaaagagccaccctctcctgcagggccagtcagagtgttatcagtagctacttagcctggtaccagcagaaacctggccaggctcccaggctcctcatctatggtgcatccagcagggccactgccatcccagacaggttcagtggcagtgggtctgggacagacttcactctcaccatcagcagactggagcctgaagattttgcagtgtattactgtcaacaatatggtaggtcaccattcaatttcggccctgggaccaaagtggatatcaaa

SEQ ID NO: 26152 - protein, 108 aa, synthetic construct
  REGION 1..108: note = Description of Artificial Sequence: Synthetic polypeptide
EIVLTQSPGTLSLSPGERATLSCRASQSVISSYLAWYQQKPGQAPRLLIYGASSRATAIPDRFSGSGSGTDFTLTISRLEPEDFAVYYCQQYGRSPFNFGPGTKVDIK

SEQ ID NO: 26153 - DNA, 339 bp, synthetic construct
  misc_feature 1..339: note = Description of Artificial Sequence: Synthetic polynucleotide
  source 1..339: mol_type = other DNA
gacatcgtgatgacccagtctccagactccctggctgtgtctctgggcgagagggccaccatcaactgcaagtccagccagagtgttttacacagctccaacaattacaactacttagcttggtaccagctgaaaccaagacagcctcctaagctgctcatttactgggcatctacccgggaatccggggtccctgaccgattcagtggccgcgggtcggggacagacttcactctcaccatcagcagcctgcaggctgaagatgtggcaatttattactgtcagcaatattatagtactccatccactttcggccctgggaccaaagtggagatcaaa

SEQ ID NO: 26154 - protein, 113 aa, synthetic construct
  REGION 1..113: note = Description of Artificial Sequence: Synthetic polypeptide
DIVMTQSPDSLAVSLGERATINCKSSQSVLHSSNNYNYLAWYQLKPRQPPKLLIYWASTRESGVPDRFSGRGSGTDFTLTISSLQAEDVAIYYCQQYYSTPSTFGPGTKVEIK

SEQ ID NO: 26155 - DNA, 339 bp, synthetic construct
  misc_feature 1..339: note = Description of Artificial Sequence: Synthetic polynucleotide
  source 1..339: mol_type = other DNA
gacatcgtgatgacccagtctccagactccctggctgtgtctctgggcgagagggccaccatcaactgcaagtccagccagagtgttttatacagctccaacaataacaactacttagcttggtaccagcagaaaccaggacagcctcctaaactgctcatttactgggcatctacccgggaatccggggtccctgaccgattcagtggcagtgggtctgggacagatttcactctctccatcagcagcctgcaggctgaagatgtggcagtttattactgtcaccaatattatagtactccgtgcagttttggccaggggaccaaactggagatcaaa

SEQ ID NO: 26156 - protein, 113 aa, synthetic construct
  REGION 1..113: note = Description of Artificial Sequence: Synthetic polypeptide
DIVMTQSPDSLAVSLGERATINCKSSQSVLYSSNNNNYLAWYQQKPGQPPKLLIYWASTRESGVPDRFSGSGSGTDFTLSISSLQAEDVAVYYCHQYYSTPCSFGQGTKLEIK

SEQ ID NO: 26157 - DNA, 321 bp, synthetic construct; identical to SEQ ID NO: 24183
  misc_feature 1..321: note = Description of Artificial Sequence: Synthetic polynucleotide
  source 1..321: mol_type = other DNA

SEQ ID NO: 26158 - protein, 107 aa, synthetic construct; identical to SEQ ID NO: 24184
  REGION 1..107: note = Description of Artificial Sequence: Synthetic polypeptide

SEQ ID NO: 26159 - DNA, 339 bp, synthetic construct
  misc_feature 1..339: note = Description of Artificial Sequence: Synthetic polynucleotide
  source 1..339: mol_type = other DNA
gacatcgtgatgacccagtctccagactccctggctgtgtctctgggcgagagggccaccatcaactgcaagtccagccagagtgttttatacagctccaacagtaacaactacttagcttggtaccagcagaaaccaggccagcctcctaagctgctcatttactgggcatctgcccgggaatccggggtccctgaccgattcagtggcagcgggtctgggacagatttcactctcaccatcagcagcctgcaggctgaagatgtggcagtttattactgtcagcaatattatactactcctcccactttcggccctgggaccaaagtggatatcaaa

SEQ ID NO: 26160 - protein, 113 aa, synthetic construct
  REGION 1..113: note = Description of Artificial Sequence: Synthetic polypeptide
DIVMTQSPDSLAVSLGERATINCKSSQSVLYSSNSNNYLAWYQQKPGQPPKLLIYWASARESGVPDRFSGSGSGTDFTLTISSLQAEDVAVYYCQQYYTTPPTFGPGTKVDIK

SEQ ID NO: 26161 - DNA, 333 bp, synthetic construct
  misc_feature 1..333: note = Description of Artificial Sequence: Synthetic polynucleotide
  source 1..333: mol_type = other DNA
gatattgtgatgacccagactccactctctctgtccgtcacccctggacagccggcctccatctcctgcaagactagtcagagcctcctgcatagtgaaggaaagacctatttgtattggtacctgcagaagccaggccagcctccacagctcctgatctatgaagtttccaaccggttctctggagtgccagataggttcagtggcagcgggtcagggacagatttcacactgaaaatcagccgggtggaggctgaggatgttggggtttattactgcatgcaaagtatacagctaatcaccttcggccaagggacacgactggagattaaa

SEQ ID NO: 26162 - protein, 111 aa, synthetic construct
  REGION 1..111: note = Description of Artificial Sequence: Synthetic polypeptide
DIVMTQTPLSLSVTPGQPASISCKTSQSLLHSEGKTYLYWYLQKPGQPPQLLIYEVSNRFSGVPDRFSGSGSGTDFTLKISRVEAEDVGVYYCMQSIQLITFGQGTRLEIK

SEQ ID NO: 26163 - DNA, 324 bp, synthetic construct
  misc_feature 1..324: note = Description of Artificial Sequence: Synthetic polynucleotide
  source 1..324: mol_type = other DNA
caaattgtgttgacgcagtctccaggcaccctgtctttgtctccaggggaaagagccaccctctcctgcagggccagtcagagaattttcagcaactacttagcctggtaccagcagaagcctggccaggctcccaggatcctcatctatggtgcatccagcagggccactggcatcccagacaggatcagtggcagtgggtctgggacagacttcactctcaccatcaccagactggagcctgaagattttgcagtgtattactgtcagcagtatgatagctcaccgtggacgttcggccaagggaccaaggtggaaatcaac

SEQ ID NO: 26164 - protein, 108 aa, synthetic construct
  REGION 1..108: note = Description of Artificial Sequence: Synthetic polypeptide
QIVLTQSPGTLSLSPGERATLSCRASQRIFSNYLAWYQQKPGQAPRILIYGASSRATGIPDRISGSGSGTDFTLTITRLEPEDFAVYYCQQYDSSPWTFGQGTKVEIN

SEQ ID NO: 26165 - DNA, 321 bp, synthetic construct
  misc_feature 1..321: note = Description of Artificial Sequence: Synthetic polynucleotide
  source 1..321: mol_type = other DNA
gacatccagatgacccagtctccatcctcactgtctgcatctgtaggagacagagtcaccatcacttgtcgggcgagtcaggacattaacaattatttagcctggtttcagcagaaaccagggaaagcccctaagtccctgatcgttgctgcatccagtttgcaaagtggggtcccatcaaagttcagcggcagtggatctgggacagatttcactctcaccatcagcagcctgcagcctgaagattttgcaacttattactgccaacagtataatagttaccctctcactttcggcggagggaccaaggtggagatcaaa

SEQ ID NO: 26166 - protein, 107 aa, synthetic construct
  REGION 1..107: note = Description of Artificial Sequence: Synthetic polypeptide
DIQMTQSPSSLSASVGDRVTITCRASQDINNYLAWFQQKPGKAPKSLIVAASSLQSGVPSKFSGSGSGTDFTLTISSLQPEDFATYYCQQYNSYPLTFGGGTKVEIK

SEQ ID NO: 26167 - DNA, 321 bp, synthetic construct
  misc_feature 1..321: note = Description of Artificial Sequence: Synthetic polynucleotide
  source 1..321: mol_type = other DNA
gacatccagatgacccagtctccagcttccgtgtctgcatctgtaggagacagagtcaccataacttgtcgggcgagtcagaatattagcaactggttaacctggtatcagcagaaaccagggaaagcccctaagctcctgatctatgctgcatccagtttgcaaagtggggtcccatcaaggttcagcggcagtggatctgggacagatttcactctctccatcagcagcctgcagcctgaagattttgcaacttactattgtcaacagactgacagtttcccattcactttcggccctgggaccaaagtggatgtcaaa

SEQ ID NO: 26168 - protein, 107 aa, synthetic construct
  REGION 1..107: note = Description of Artificial Sequence: Synthetic polypeptide
DIQMTQSPASVSASVGDRVTITCRASQNISNWLTWYQQKPGKAPKLLIYAASSLQSGVPSRFSGSGSGTDFTLSISSLQPEDFATYYCQQTDSFPFTFGPGTKVDVK

SEQ ID NO: 26169 - DNA, 321 bp, synthetic construct
  misc_feature 1..321: note = Description of Artificial Sequence: Synthetic polynucleotide
  source 1..321: mol_type = other DNA
gacatccagatgacccagtctccagcttccgtgtctgcatctgtaggagacagagtcaccataacttgtcgggcgagtcagggtattagcaactggttagcctggtatcaggagaaaccagggaaagcccctaaactcctgatctatgctgcatccagtttgcaaagtggggtcccatcaaggttcagcggcagtggatccgggacagatttcactctctccatcagcagcctgcagcctgaagattttgcaacttactattgtcaacagactgacagtttcccattcactttcggccctgggaccaaagtggatgtcaaa

SEQ ID NO: 26170 - protein, 107 aa, synthetic construct
  REGION 1..107: note = Description of Artificial Sequence: Synthetic polypeptide
DIQMTQSPASVSASVGDRVTITCRASQGISNWLAWYQEKPGKAPKLLIYAASSLQSGVPSRFSGSGSGTDFTLSISSLQPEDFATYYCQQTDSFPFTFGPGTKVDVK

SEQ ID NO: 26171 - DNA, 336 bp, synthetic construct
  misc_feature 1..336: note = Description of Artificial Sequence: Synthetic polynucleotide
  source 1..336: mol_type = other DNA
gctattgtgatgacccagactccactctctctgtccgtcacccctggacagccggcctccatctcctgcaagtctagtcagagcctcctgcatggtgatggaaagacctatttttattggtacctgcagaagccaggccagcctccacagctcctgatctatgaagtttcccaccggttctctggagtgccagataggttcagtggcagcgggtcagggacagatttcacactgaaaatcagccgggtggaggctgaggatgttggggtttattactgcatgcaaagtatacagattccgtggacgttcggccaagggaccaaggtggaaatcaaa

SEQ ID NO: 26172 - protein, 112 aa, synthetic construct
  REGION 1..112: note = Description of Artificial Sequence: Synthetic polypeptide
AIVMTQTPLSLSVTPGQPASISCKSSQSLLHGDGKTYFYWYLQKPGQPPQLLIYEVSHRFSGVPDRFSGSGSGTDFTLKISRVEAEDVGVYYCMQSIQIPWTFGQGTKVEIK

SEQ ID NO: 26173 - DNA, 321 bp, synthetic construct
  misc_feature 1..321: note = Description of Artificial Sequence: Synthetic polynucleotide
  source 1..321: mol_type = other DNA
gacatccagatgacccagtctccagcttccgtgtctgcatctgtaggagacagagtcaccataacttgtcgggcgagtcagggtattagcaactggttagcctggtatcagcagaaaccagggaaagcccctaagctcctgatctatgctgcatccagtttgcaaagtggggtcccatcaaggttcagcggcaatgaatctgggacagatttcactctctccatcagcagcctgcagcctgaagattttgcaacttactattgtcaacagactgacagtttcccattcactttcggccctgggaccaaagtggatgtcaaa

SEQ ID NO: 26174 - protein, 107 aa, synthetic construct
  REGION 1..107: note = Description of Artificial Sequence: Synthetic polypeptide
DIQMTQSPASVSASVGDRVTITCRASQGISNWLAWYQQKPGKAPKLLIYAASSLQSGVPSRFSGNESGTDFTLSISSLQPEDFATYYCQQTDSFPFTFGPGTKVDVK

SEQ ID NO: 26175 - DNA, 339 bp, synthetic construct
  misc_feature 1..339: note = Description of Artificial Sequence: Synthetic polynucleotide
  source 1..339: mol_type = other DNA
gacatcgtgatgacccagtctccagactccctggctgtgtctctgggcgagagggccaccatccactgcaagtccagccaacgtgttttacacagctccaacaattataactacttagcttggtaccagcagaaaccaggacagcctcctaagctgctcatttactgggcatctacccgggattccggggtccctgaccgattcagtggcagcgggtctggggccgatttcactctcaccatcagcagcctgcaggctgaagatgtggcactttattactgtcagcaatattatagtactccattcactttcggccctgggaccaaagtggatatcaaa

SEQ ID NO: 26176 - protein, 113 aa, synthetic construct
  REGION 1..113: note = Description of Artificial Sequence: Synthetic polypeptide
DIVMTQSPDSLAVSLGERATIHCKSSQRVLHSSNNYNYLAWYQQKPGQPPKLLIYWASTRDSGVPDRFSGSGSGADFTLTISSLQAEDVALYYCQQYYSTPFTFGPGTKVDIK

SEQ ID NO: 26177 - DNA, 318 bp, synthetic construct
  misc_feature 1..318: note = Description of Artificial Sequence: Synthetic polynucleotide
  source 1..318: mol_type = other DNA
gacatccagatgacccagtctccatcctccctgtctgcatctgtaggagacagagtcaccatcacttgccgggcaagtcagagcattatcaactatttaaattggtatcagcagaaaccagggaaagcccctaaggtcctgatctatactgcatccagtttacagagtggggtcccatcaaggttcagtggcagtggatctgggacagatttcactctcaccatcagcagtctgcaacctgaagattttacaacttactactgtcaacagagttacagtacccccactttcggcggagggaccaaggtagagatcgaa

SEQ ID NO: 26178 - protein, 106 aa, synthetic construct
  REGION 1..106: note = Description of Artificial Sequence: Synthetic polypeptide
DIQMTQSPSSLSASVGDRVTITCRASQSIINYLNWYQQKPGKAPKVLIYTASSLQSGVPSRFSGSGSGTDFTLTISSLQPEDFTTYYCQQSYSTPTFGGGTKVEIE

SEQ ID NO: 26179 - DNA, 336 bp, synthetic construct
  misc_feature 1..336: note = Description of Artificial Sequence: Synthetic polynucleotide
  source 1..336: mol_type = other DNA
gatattgtgatgacccagactccactctctctgtccgtcacccctggacagccggcctccatctcctgtaagtctagtcagagcctcctgcatagtgaaggaaagacctatttgtattggtacctgcagaagccaggccagcctccacagctcctgatctatgaagtttcctaccgggtctctggagtgccagatagattcagtggcagcgggtcagggacagatttcacactgaaaatcagccgggtggaggcagaggatgttggggtctatttctgcatgcaaagtatacagcttccgctcactttcggcggagggaccaaggtggagatcaaa

SEQ ID NO: 26180 - protein, 112 aa, synthetic construct
  REGION 1..112: note = Description of Artificial Sequence: Synthetic polypeptide
DIVMTQTPLSLSVTPGQPASISCKSSQSLLHSEGKTYLYWYLQKPGQPPQLLIYEVSYRVSGVPDRFSGSGSGTDFTLKISRVEAEDVGVYFCMQSIQLPLTFGGGTKVEIK

SEQ ID NO: 26181 - DNA, 321 bp, synthetic construct
  misc_feature 1..321: note = Description of Artificial Sequence: Synthetic polynucleotide
  source 1..321: mol_type = other DNA
gacatccagatgacccagtctccatcctcactgtctgcatctgtaggagacagagtcagcatcacttgtcgggcgagtcagggcattagcaaatatttagcctggtttcagcagaaaccagggaaagcccctaagtccctgatctttgctgcatccagtttgcaaagtggggtcccatcaaagttcagcggcagtggatctgggacagatttcactctcaccatcagcagcctgcagcctgaagattttgcaacttattactgccaacagtataatagtttcccattcactttcggccctgggaccaaagtggatatcaaa

SEQ ID NO: 26182 - protein, 107 aa, synthetic construct
  REGION 1..107: note = Description of Artificial Sequence: Synthetic polypeptide
DIQMTQSPSSLSASVGDRVSITCRASQGISKYLAWFQQKPGKAPKSLIFAASSLQSGVPSKFSGSGSGTDFTLTISSLQPEDFATYYCQQYNSFPFTFGPGTKVDIK

SEQ ID NO: 26183 - DNA, 339 bp, synthetic construct
  misc_feature 1..339: note = Description of Artificial Sequence: Synthetic polynucleotide
  source 1..339: mol_type = other DNA
gacatcgtgatgacccagtctctagactccctggctgtgtctctgggcgagagggccaccatcaactgcaagtccagccagagtgctttacacagctccaacaattacaactacttagcttggtaccagcagaaaccaggacagcctcctaaactgctcatttactgggcatctacccggaaatccggggtccctgaccgattcagtggcagcgggtctgggacagatttcactctcaccatcagcagcctgcaggctgaagatgtggcagtttattactgtcagcaatattatagtattcctccgacgttcggccaagggaccaaggtggaaatcaaa

SEQ ID NO: 26184 - protein, 113 aa, synthetic construct
  REGION 1..113: note = Description of Artificial Sequence: Synthetic polypeptide
DIVMTQSLDSLAVSLGERATINCKSSQSALHSSNNYNYLAWYQQKPGQPPKLLIYWASTRKSGVPDRFSGSGSGTDFTLTISSLQAEDVAVYYCQQYYSIPPTFGQGTKVEIK

SEQ ID NO: 26185 - DNA, 318 bp, synthetic construct
  misc_feature 1..318: note = Description of Artificial Sequence: Synthetic polynucleotide
  source 1..318: mol_type = other DNA
gacatccagatgacccagtctccatcctccctgtctgcatctgtaggagacagagtcaccatcacttgccgggcaagtcagagcattagtaactatttaaattggtatcagcagaaaccagggaaagcccctaaggtcctgatctatattgcatccagtttgcaaagtggggtcccatctaggttcagtggcagtggatctgggacagatttcactctcaccatcagcagtctgcaacctgaagattttgcaacttactactgtcaacagagttacagtacccccactttcggcggagggaccaaggtggagatcaaa

SEQ ID NO: 26186 - protein, 106 aa, synthetic construct
  REGION 1..106: note = Description of Artificial Sequence: Synthetic polypeptide
DIQMTQSPSSLSASVGDRVTITCRASQSISNYLNWYQQKPGKAPKVLIYIASSLQSGVPSRFSGSGSGTDFTLTISSLQPEDFATYYCQQSYSTPTFGGGTKVEIK

SEQ ID NO: 26187 - DNA, 336 bp, synthetic construct
  misc_feature 1..336: note = Description of Artificial Sequence: Synthetic polynucleotide
  source 1..336: mol_type = other DNA
gatattgtgatgacccagactccactctctctgtccgtcacccctggacagccggcctccatctcctgcaagtctagtcagagcctcctgcatggtgatggaaagacctatttgtattggtacctgcagaggccaggccagcctccacagctcctgatctatgaagtttccaaccggttctctggagtgccagataggttcagtggcagcgggtcagggacagatttcacactgaaaatcagccgggtggaggctgaggatgttggggtttattactgcatgcaaagtatacagcttccgtggacgttcggccaagggaccaaggtggaaatcaaa

SEQ ID NO: 26188 - protein, 112 aa, synthetic construct
  REGION 1..112: note = Description of Artificial Sequence: Synthetic polypeptide
DIVMTQTPLSLSVTPGQPASISCKSSQSLLHGDGKTYLYWYLQRPGQPPQLLIYEVSNRFSGVPDRFSGSGSGTDFTLKISRVEAEDVGVYYCMQSIQLPWTFGQGTKVEIK

SEQ ID NO: 26189 - DNA, 336 bp, synthetic construct
  misc_feature 1..336: note = Description of Artificial Sequence: Synthetic polynucleotide
  source 1..336: mol_type = other DNA
gatattgtgatgacccagactccactctctctgtccgtcactcctggacagccggcctccatctcctgcaagtctagtcagagcctcctgcatagtgagggaaagacctatttgtattggtacctgcagaagccaggccagcctccacagctcctgatctatgaagtttcctaccgggtctctggagtgccagataggttcagtggcagcgggtcagggacagatttcacactgaaaatcagccgggtggaggcagaggatgttggggtctattactgcatgcagagtatacagcttccgctcactttcggcggagggaccaaggtggagatcaaa

SEQ ID NO: 26190 - protein, 112 aa, synthetic construct
  REGION 1..112: note = Description of Artificial Sequence: Synthetic polypeptide
DIVMTQTPLSLSVTPGQPASISCKSSQSLLHSEGKTYLYWYLQKPGQPPQLLIYEVSYRVSGVPDRFSGSGSGTDFTLKISRVEAEDVGVYYCMQSIQLPLTFGGGTKVEIK

SEQ ID NO: 26191 - DNA, 321 bp, synthetic construct
  misc_feature 1..321: note = Description of Artificial Sequence: Synthetic polynucleotide
  source 1..321: mol_type = other DNA
gacatccagatgacccagtctccatcctccctgtctgcatctgtaggagacagagtcaccatcacttgccgggcaagtcagggcattagaaatgatttaggctggtatcagcagaaaccagggaaagcccctaagcgcctgatctctgctgcatccagtttgcaaagtggggtcccatcaaggttcaccggcagtggatctgggacagaattcactttcacaatcagcagcgtgcagcctgaagattttgcaacttattactgtctacagcatcgtaattacccgctcactttcggcggagggaccaaggtggagatcaaa

SEQ ID NO: 26192 - protein, 107 aa, synthetic construct
  REGION 1..107: note = Description of Artificial Sequence: Synthetic polypeptide
DIQMTQSPSSLSASVGDRVTITCRASQGIRNDLGWYQQKPGKAPKRLISAASSLQSGVPSRFTGSGSGTEFTFTISSVQPEDFATYYCLQHRNYPLTFGGGTKVEIK

SEQ ID NO: 26193 - DNA, 321 bp, synthetic construct
  misc_feature 1..321: note = Description of Artificial Sequence: Synthetic polynucleotide
  source 1..321: mol_type = other DNA
gacatccagatgacccagtctccttcctccctgtctgcatctgtaggagacagagtcaccatcacttgccgggcaagtcagggcattagaaatgccttaggctggtatcagcagaaaccagggaaagcccctaagcgcctgatctatgctgcatccagtttgcaaagtggggtcccatcaaggttcagcggcagtggatctgggacagaattcactctcacaatcagcagcctgcagcctgaagattttgcaacttatttctgtctacagcataatagttaccctctcattttcggcggagggaccaaggtggagatcaaa

SEQ ID NO: 26194 - protein, 107 aa, synthetic construct
  REGION 1..107: note = Description of Artificial Sequence: Synthetic polypeptide
DIQMTQSPSSLSASVGDRVTITCRASQGIRNALGWYQQKPGKAPKRLIYAASSLQSGVPSRFSGSGSGTEFTLTISSLQPEDFATYFCLQHNSYPLIFGGGTKVEIK

SEQ ID NO: 26195 - DNA, 336 bp, synthetic construct
  misc_feature 1..336: note = Description of Artificial Sequence: Synthetic polynucleotide
  source 1..336: mol_type = other DNA
gatattgtgatgacccagtctccactctctctgttcgtcactcctggacagccggcctccatctcctacaagtctagtcagagcctcctgcatggtgatggaaagacctatttttattggtacctgcagaagccaggccagcctccacagctcttgatttatgaagtttcccaccggttctctggagtgccagataggttcagtggcagcgggtcagggacagatttcacactgaaaatcagccgggtggaggctgaggatgttggggtttattactgcatgcaaagtatacagattccgtggacgttcggccaagggaccaaggtggaaatcaaa

SEQ ID NO: 26196 - protein, 112 aa, synthetic construct
  REGION 1..112: note = Description of Artificial Sequence: Synthetic polypeptide
DIVMTQSPLSLFVTPGQPASISYKSSQSLLHGDGKTYFYWYLQKPGQPPQLLIYEVSHRFSGVPDRFSGSGSGTDFTLKISRVEAEDVGVYYCMQSIQIPWTFGQGTKVEIK

SEQ ID NO: 26197 - DNA, 321 bp, synthetic construct
  misc_feature 1..321: note = Description of Artificial Sequence: Synthetic polynucleotide
  source 1..321: mol_type = other DNA
gacatccagatgacccagtctccatcctccctgtctgcatctgtaggagccagagtcaccatcacttgccgggcaagtcagggcattagaaatgatttaggctggtatcagcagaaaccagggaaagcccctaagcgcctgatctatgctgcatccaatttgcaaagtggggtcccatcaaggttcagtggcagtggatctgggacagaattcactctcacaatcagcagcctgcagcctgaagattttgcaacttattactgtctacagcataatagttacccgctcactttcggcggagggaccaaggtggagatcaaa

SEQ ID NO: 26198 - protein, 107 aa, synthetic construct
  REGION 1..107: note = Description of Artificial Sequence: Synthetic polypeptide
DIQMTQSPSSLSASVGARVTITCRASQGIRNDLGWYQQKPGKAPKRLIYAASNLQSGVPSRFSGSGSGTEFTLTISSLQPEDFATYYCLQHNSYPLTFGGGTKVEIK

SEQ ID NO: 26199 - DNA, 339 bp, synthetic construct
  misc_feature 1..339: note = Description of Artificial Sequence: Synthetic polynucleotide
  source 1..339: mol_type = other DNA
gacatcgtgatgacccagtctccagactccctggctgtgtctctgggcgagagggccaccatcaactgcaagtccagccagagtgttttatacagtcccaacaataacaactacttagcttggtaccagcagaaaccaggacagccccctaagctgctcatttactgggcatctacccgggaatccggggtccctgaccgattcagtggcagcgggtctgggacagatttcactctcaccatcagcagcctgcaggctgaagatgtggcagtttattactgtcagcaatattatagtactccgtgcagttttggccaggggaccaaggtggagatcaaa

SEQ ID NO: 26200 - protein, 113 aa, synthetic construct
  REGION 1..113: note = Description of Artificial Sequence: Synthetic polypeptide
DIVMTQSPDSLAVSLGERATINCKSSQSVLYSPNNNNYLAWYQQKPGQPPKLLIYWASTRESGVPDRFSGSGSGTDFTLTISSLQAEDVAVYYCQQYYSTPCSFGQGTKVEIK

SEQ ID NO: 26201 - DNA, 318 bp, synthetic construct
  misc_feature 1..318: note = Description of Artificial Sequence: Synthetic polynucleotide
  source 1..318: mol_type = other DNA
gacatccagatgacccagtctccatcctccctgtctgcatctgtaggagacagagtcaccatcacttgccgggcaagtcagagcattagcagttatttaaattggtatcagcagaaaccagggaaagcccctaaggtcatgatctatactgcatccagtttgcaaagtggggtcccatcaaggttcagtggcagtggatctgggacagatttcactctcaccatcaacagtctgcaacctgaagattttgcaacttactactgtcaacagagttacagtatccccactttcggcggagggaccaaggtggagatcaaa

SEQ ID NO: 26202 - protein, 106 aa, synthetic construct
  REGION 1..106: note = Description of Artificial Sequence: Synthetic polypeptide
DIQMTQSPSSLSASVGDRVTITCRASQSISSYLNWYQQKPGKAPKVMIYTASSLQSGVPSRFSGSGSGTDFTLTINSLQPEDFATYYCQQSYSIPTFGGGTKVEIK

SEQ ID NO: 26203 - DNA, 339 bp, synthetic construct
  misc_feature 1..339: note = Description of Artificial Sequence: Synthetic polynucleotide
  source 1..339: mol_type = other DNA
gacatcgtgatgacccagtctccagactccctggctgtgtctctgggcgagagggccaccatcagctgcaagtccagccagactgttttacacaactccaataatcacaattactttgcttggtaccagcagaaaccaggacagcctcctaagctgctcatttactgggcatctaccctgagatccggggtccctgaccgattcagtggcagcgggtctgggacagatttcactctcaccatcagcagcctgcaggctgaagatgtggcagtttattactgtcagcaatattatagtactcctccgacgttcggccaagggaccaaggtggaaatcaaa

SEQ ID NO: 26204 - protein, 113 aa, synthetic construct
  REGION 1..113: note = Description of Artificial Sequence: Synthetic polypeptide
DIVMTQSPDSLAVSLGERATISCKSSQTVLHNSNNHNYFAWYQQKPGQPPKLLIYWASTLRSGVPDRFSGSGSGTDFTLTISSLQAEDVAVYYCQQYYSTPPTFGQGTKVEIK

SEQ ID NO: 26205 - DNA, 339 bp, synthetic construct
  misc_feature 1..339: note = Description of Artificial Sequence: Synthetic polynucleotide
  source 1..339: mol_type = other DNA
gacatcgtgatgacccagtctccagactccctggctgtatctctgggcgagagggccaccatcaactgcaagtccagccagagtgttttatccagctccaacgataacaactacttagcttggtaccaacagaaaccaggacggcctcctaagctgctcatttactggtcatctacccgggaatccggggtccctgaccgattcagtggcagcgggtctgggacagatttcactctcaccatcagcagcctgcaggctgaagatgtggcagtttattactgtcaccaatattatagttatcctccgacgttcggccaagggaccaaggtggaaatcaaa

SEQ ID NO: 26206 - protein, 113 aa, synthetic construct
  REGION 1..113: note = Description of Artificial Sequence: Synthetic polypeptide
DIVMTQSPDSLAVSLGERATINCKSSQSVLSSSNDNNYLAWYQQKPGRPPKLLIYWSSTRESGVPDRFSGSGSGTDFTLTISSLQAEDVAVYYCHQYYSYPPTFGQGTKVEIK

SEQ ID NO: 26207 - DNA, 321 bp, synthetic construct
  misc_feature 1..321: note = Description of Artificial Sequence: Synthetic polynucleotide
  source 1..321: mol_type = other DNA
gacatccagatgacccagtctccttcctccctgtctgcatctgtaggagacagagtcaccatcacttgccgggcaagtcagggcattagaaatgccttaggctggtttcagcagaaaccagggaaagcccctaagcgcctgatctatgctgcatccagtttgcaaagtggggtcccatcaaggttcagcggcagtggatctgggacagaattcactctcacaatcagcagcctgcagcctgaagattttgcaacttattactgtctacagcataatagttaccctctcactttcggcggagggaccaaggtggagatcaaa

SEQ ID NO: 26208 - protein, 107 aa, synthetic construct
  REGION 1..107: note = Description of Artificial Sequence: Synthetic polypeptide
DIQMTQSPSSLSASVGDRVTITCRASQGIRNALGWFQQKPGKAPKRLIYAASSLQSGVPSRFSGSGSGTEFTLTISSLQPEDFATYYCLQHNSYPLTFGGGTKVEIK

SEQ ID NO: 26209 - DNA, 321 bp, synthetic construct
  misc_feature 1..321: note = Description of Artificial Sequence: Synthetic polynucleotide
  source 1..321: mol_type = other DNA
gacatccagatgacccagtctccatcttccgtgtcggcatctgtaggagacagagtcaccatcacttgtcgggcgagtcagggtattatcagttggttagcctggtatcagcagaaaccaggaaaagcccctaagctcctgatctatgctgcatccagtttgcaaagtggggtcccatcaaggttcagcggcagtggatctgggacagatttcactctcaccatcagcagcctgcagcctgaagattttgcaacttactattgtcaacagggtaacagtttcccattcactttcggccctgggaccaaagtggatatcaaa

SEQ ID NO: 26210 - protein, 107 aa, synthetic construct
  REGION 1..107: note = Description of Artificial Sequence: Synthetic polypeptide
DIQMTQSPSSVSASVGDRVTITCRASQGIISWLAWYQQKPGKAPKLLIYAASSLQSGVPSRFSGSGSGTDFTLTISSLQPEDFATYYCQQGNSFPFTFGPGTKVDIK

SEQ ID NO: 26211 - DNA, 321 bp, synthetic construct
  misc_feature 1..321: note = Description of Artificial Sequence: Synthetic polynucleotide
  source 1..321: mol_type = other DNA
gacatccagatgacccagtctccagcttccgtgtctgcatctgtaggagacagagtcaccataacttgtcgggcgagtcagggtattagcaactggttagcctggtatcagcagaaaccagggagagcccctaagctcctgatctatgctgcatccagtttgcaaggtggggtcccatcaaggttcagcggcagtggatctgggacagattacactctctccatcagcagcctgcagcctgaagattttgcaacttactattgtcaacagactgacagtttcccattcactttcggccctgggaccaaagtggatatcaaa

SEQ ID NO: 26212 - protein, 107 aa, synthetic construct
  REGION 1..107: note = Description of Artificial Sequence: Synthetic polypeptide
DIQMTQSPASVSASVGDRVTITCRASQGISNWLAWYQQKPGRAPKLLIYAASSLQGGVPSRFSGSGSGTDYTLSISSLQPEDFATYYCQQTDSFPFTFGPGTKVDIK

SEQ ID NO: 26213 - DNA, 324 bp, synthetic construct
  misc_feature 1..324: note = Description of Artificial Sequence: Synthetic polynucleotide
  source 1..324: mol_type = other DNA
gaaattgtgttgacgcagtctccaggcaccctgtctttgtttccaggggaaagagtcaccctctcctgcagggccagtcagagtattatcagcaactacttagcctggtaccagcagaaacctggccaggctcccaggctcctcatctttggtgtatctagtagggccactggcatcccagacaggttcagtggcagtgggtctgggacagacttcactctcaccatcagcagactggagcctgaagattttgcagtgtattactgtcaacaatatggtcggtcaccattcaatttcggccctgggaccaaagtggatatcaaa

SEQ ID NO: 26214 - protein, 108 aa, synthetic construct
  REGION 1..108: note = Description of Artificial Sequence: Synthetic polypeptide
EIVLTQSPGTLSLFPGERVTLSCRASQSIISNYLAWYQQKPGQAPRLLIFGVSSRATGIPDRFSGSGSGTDFTLTISRLEPEDFAVYYCQQYGRSPFNFGPGTKVDIK

SEQ ID NO: 26215 - DNA, 321 bp, synthetic construct
  misc_feature 1..321: note = Description of Artificial Sequence: Synthetic polynucleotide
  source 1..321: mol_type = other DNA
gacatccagatgacccagtctccagcttccgtgtctgcatctgtaggagacagagtcaccataacttgtcgggcgagtcagggtattagcaactggttagcctggtatcagcagaaaccagggaaagcccctaagctcctgatctatgctgcatccagtttgcaaagtggggtcccatcaaggttcagcggcaatgaatctgggacagatttcactctctccatcagcagcctgcagcctgaagattttgcaatttactattgtcaacagactgacagtttcccattcactttcggccctgggaccaaagtggatgtcaaa

SEQ ID NO: 26216 - protein, 107 aa, synthetic construct
  REGION 1..107: note = Description of Artificial Sequence: Synthetic polypeptide
DIQMTQSPASVSASVGDRVTITCRASQGISNWLAWYQQKPGKAPKLLIYAASSLQSGVPSRFSGNESGTDFTLSISSLQPEDFAIYYCQQTDSFPFTFGPGTKVDVK

SEQ ID NO: 26217 - DNA, 321 bp, synthetic construct
  misc_feature 1..321: note = Description of Artificial Sequence: Synthetic polynucleotide
  source 1..321: mol_type = other DNA
gacatccagatgacccagtctccatcctccctgtctgcatctgtaggagacagagtcaccatcacttgccgggcaagtcggggcattagaaatgatttaggctggtatcagcagaaaccagggaaagcccctaagcgcctgatctatgctgcatccagtttgcagagtggggtcccatcaaggttcagcggcagtggatctgggacagaattcactctcacaatcagcagcctgcagcctgaagattttgcaacttattactgtctacagcattatagttatcctcggacgttcggccaagggaccaaggtggaaatcaaa

SEQ ID NO: 26218 - protein, 107 aa, synthetic construct
  REGION 1..107: note = Description of Artificial Sequence: Synthetic polypeptide
DIQMTQSPSSLSASVGDRVTITCRASRGIRNDLGWYQQKPGKAPKRLIYAASSLQSGVPSRFSGSGSGTEFTLTISSLQPEDFATYYCLQHYSYPRTFGQGTKVEIK

SEQ ID NO: 26219 - DNA, 321 bp, synthetic construct; identical to SEQ ID NO: 26167
  misc_feature 1..321: note = Description of Artificial Sequence: Synthetic polynucleotide
  source 1..321: mol_type = other DNA

SEQ ID NO: 26220 - protein, 107 aa, synthetic construct; identical to SEQ ID NO: 26168
  REGION 1..107: note = Description of Artificial Sequence: Synthetic polypeptide

SEQ ID NO: 26221 - DNA, 321 bp, synthetic construct
  misc_feature 1..321: note = Description of Artificial Sequence: Synthetic polynucleotide
  source 1..321: mol_type = other DNA
gacatccagatgacccagtctccatcctccctgtctgcatctgtaggagacagagtcaccatcacttgccgggcaagtcagggcattagaaatgatttaggctggtatcagcagaaaccagggaaagcccctaagcgcctgatctatgctgcatccaatttgcaaagtggggtcccatcaaggttcagcggcagtggatctgggacagaattcactctcacaatcagcagcctgcagcctgaagattttgcaatttattactgtctacagcataatagttacccgctcactttcggcggagggaccaaggtggagatcaaa

SEQ ID NO: 26222 - protein, 107 aa, synthetic construct
  REGION 1..107: note = Description of Artificial Sequence: Synthetic polypeptide
DIQMTQSPSSLSASVGDRVTITCRASQGIRNDLGWYQQKPGKAPKRLIYAASNLQSGVPSRFSGSGSGTEFTLTISSLQPEDFAIYYCLQHNSYPLTFGGGTKVEIK

SEQ ID NO: 26223 - DNA, 339 bp, synthetic construct
  misc_feature 1..339: note = Description of Artificial Sequence: Synthetic polynucleotide
  source 1..339: mol_type = other DNA
gacatcgtgatgacccagtctccagactccctggctgtgtctctgggcgagagggccaccatcaagtgcaagtccagccagagtgttttatacagatccaacagtaagaaatacttaacttggtaccagcagaaaccaggacagcctcctaagctgttcatttattgggcatctacccggaaatccggggtccctgaccgattcagtggcagcgggtctgggacagatttcactctcaccatcagcaacctgcaggctgaagatgtggcagtttatttctgtcagcaatattttagtactccgtacaattttggccaggggaccaagagggagatcaaa

SEQ ID NO: 26224 - protein, 113 aa, synthetic construct
  REGION 1..113: note = Description of Artificial Sequence: Synthetic polypeptide
DIVMTQSPDSLAVSLGERATIKCKSSQSVLYRSNSKKYLTWYQQKPGQPPKLFIYWASTRKSGVPDRFSGSGSGTDFTLTISNLQAEDVAVYFCQQYFSTPYNFGQGTKREIK

SEQ ID NO: 26225 - DNA, 321 bp, synthetic construct
  misc_feature 1..321: note = Description of Artificial Sequence: Synthetic polynucleotide
  source 1..321: mol_type = other DNA
gacatccagatgacccagtctccatcctccctgtctgcatctgtgggagacagagtcaccatctcttgccgggcaagtcagggcattggaaatgatttaggctggtatcagcagaaaccagggaaagcccctacgcgcctgatctatgctgcatccagtttgcaaagtggggtcccatcaaggttcagcggcagtggatctgggacagaattcactctcactatcagcagcctgcagcctgcagattttgcaacttattactgtctacaacattatagtttcccgtacagttttggccaggggaccaagctggagatcaaa

SEQ ID NO: 26226 - protein, 107 aa, synthetic construct
  REGION 1..107: note = Description of Artificial Sequence: Synthetic polypeptide
DIQMTQSPSSLSASVGDRVTISCRASQGIGNDLGWYQQKPGKAPTRLIYAASSLQSGVPSRFSGSGSGTEFTLTISSLQPADFATYYCLQHYSFPYSFGQGTKLEIK

SEQ ID NO: 26227 - DNA, 321 bp, synthetic construct
  misc_feature 1..321: note = Description of Artificial Sequence: Synthetic polynucleotide
  source 1..321: mol_type = other DNA
gacatccagatgacccagtctccaggttccgtgtctgcatctgtaggagacagagtcaccataacttgtcgggcgagtcagggtattaacaactggttagcctggtatcagcagaaaccagggaaagcccctaagctcctgatctatgctgcatccagtttgcaaggtggggtcccatcaaggttcagcggcagtggatctgggacagatttcactctctccatcagcagcctgcagcctgaagattttgcaacttactattgtcaacagactgacagtttcccattcactttcggccctgggaccaaagtggatatcaaa

SEQ ID NO: 26228 - protein, 107 aa, synthetic construct
  REGION 1..107: note = Description of Artificial Sequence: Synthetic polypeptide
DIQMTQSPGSVSASVGDRVTITCRASQGINNWLAWYQQKPGKAPKLLIYAASSLQGGVPSRFSGSGSGTDFTLSISSLQPEDFATYYCQQTDSFPFTFGPGTKVDIK

SEQ ID NO: 26229 - DNA, 339 bp, synthetic construct
  misc_feature 1..339: note = Description of Artificial Sequence: Synthetic polynucleotide
  source 1..339: mol_type = other DNA
gacatcgtgatgacccagtctccagactccctggctgtgtctctgggcgagagggccaccatcaactgcaagtccagccagaatgttttatacagctcccacaataacaactacttagcttggtaccagcagaaaccagggcagcctcctaaactactcatttactgggcatctacccggaaatccggggtccctgaccgattcagtggcagcgggtctgggacagatttcactctcaccatcaccagcctgcaggctgaagatgtggcagtttattactgtcagcaatattatagtactccattcactttcggccctgggaccaaagtggatatcaaa

SEQ ID NO: 26230 - protein, 113 aa, synthetic construct
  REGION 1..113: note = Description of Artificial Sequence: Synthetic polypeptide
DIVMTQSPDSLAVSLGERATINCKSSQNVLYSSHNNNYLAWYQQKPGQPPKLLIYWASTRKSGVPDRFSGSGSGTDFTLTITSLQAEDVAVYYCQQYYSTPFTFGPGTKVDIK

SEQ ID NO: 26231 - DNA, 321 bp, synthetic construct
  misc_feature 1..321: note = Description of Artificial Sequence: Synthetic polynucleotide
  source 1..321: mol_type = other DNA
gacatccagatgacccagtctccatcctccctgtctgcatctgtaggagacagagtcaccatcacttgccgggcaagtcagggcattagaaatgatttaggctggtatcagcagaaaccagggaaagcccctaagcgcctgatctatgctgcatccaatttgcaaagtggggtcccattaaggttcagcggcagtggatctgggacagacttcactctcacaatcagcagcctgcagcctgaagattttgcagcttattactgtctacagcataatagttacccgctcactttcggcggagggaccaaggtggagatcaaa

SEQ ID NO: 26232 - protein, 107 aa, synthetic construct
  REGION 1..107: note = Description of Artificial Sequence: Synthetic polypeptide
DIQMTQSPSSLSASVGDRVTITCRASQGIRNDLGWYQQKPGKAPKRLIYAASNLQSGVPLRFSGSGSGTDFTLTISSLQPEDFAAYYCLQHNSYPLTFGGGTKVEIK

SEQ ID NO: 26233 - DNA, 321 bp, synthetic construct
  misc_feature 1..321: note = Description of Artificial Sequence: Synthetic polynucleotide
  source 1..321: mol_type = other DNA
gacatccagatgacccagtctccatcctcactgtctgcatctgtaggagacagagtcaccatcacttgtcgggcgagtcagggcattagccattatttagcctggtttcagcagaaaccagggaaagcccctaagtccctgatctatgttgcatccagtttgcaaaatggggtcccatcaaggttcagcggcagtggatctgggacagatttcactctcaccatcagcagcctgcagcctgaagattttgcaacttattactgccaacagtataataattacccgctcactttcggcggagggaccaaggtggagatcaaa

SEQ ID NO: 26234 - protein, 107 aa, synthetic construct
  REGION 1..107: note = Description of Artificial Sequence: Synthetic polypeptide
DIQMTQSPSSLSASVGDRVTITCRASQGISHYLAWFQQKPGKAPKSLIYVASSLQNGVPSRFSGSGSGTDFTLTISSLQPEDFATYYCQQYNNYPLTFGGGTKVEIK

SEQ ID NO: 26235 - DNA, 336 bp, synthetic construct
  misc_feature 1..336: note = Description of Artificial Sequence: Synthetic polynucleotide
  source 1..336: mol_type = other DNA
gatattgtgatgacccagactccactctctctgtccgtcacccctggacagccggcctccatctcctgcaagtctagtcagagcctcgtgcatggtgatggaaagacctatttgtattggtacctgcagaggccaggccagcctccacagctcctgatctatgaagtttccaaccggttctctggagtgccagataggttcagtggcagcgggtcagggacagatttcacattgaaaatcagccgggtggaggctgaggatgttggggtttattactgcatgcaaagtatacagcttccgtggacgttcggccaagggaccaaggtggaaatcaaa

SEQ ID NO: 26236 - protein, 112 aa, synthetic construct
  REGION 1..112: note = Description of Artificial Sequence: Synthetic polypeptide
DIVMTQTPLSLSVTPGQPASISCKSSQSLVHGDGKTYLYWYLQRPGQPPQLLIYEVSNRFSGVPDRFSGSGSGTDFTLKISRVEAEDVGVYYCMQSIQLPWTFGQGTKVEIK

SEQ ID NO: 26237 - DNA, 318 bp, synthetic construct
  misc_feature 1..318: note = Description of Artificial Sequence: Synthetic polynucleotide
  source 1..318: mol_type = other DNA
gacatccagatgacccagtctccatcctccctgtctgcatctgtaggagacagagtcaccatcacttgccgggcaagtcagagcattagcagctatttaaattggtatcagcagaaaccagggaaagcccctaaactcctgatctatactgcatccagtttgcaaagtggggtcccatcaaggttcagtggcagtggatctgggacagatttcactctcaccatcagcagtctgcaacctgaagattttgcaacttactactgtcaacagagttacagtatttacactttcggcggagggtccaaggtggagatcaaa

SEQ ID NO: 26238 - protein, 106 aa, synthetic construct
  REGION 1..106: note = Description of Artificial Sequence: Synthetic polypeptide
DIQMTQSPSSLSASVGDRVTITCRASQSISSYLNWYQQKPGKAPKLLIYTASSLQSGVPSRFSGSGSGTDFTLTISSLQPEDFATYYCQQSYSIYTFGGGSKVEIK

SEQ ID NO: 26239 - DNA, 336 bp, synthetic construct
  misc_feature 1..336: note = Description of Artificial Sequence: Synthetic polynucleotide
  source 1..336: mol_type = other DNA
gatattgtgatgacccagactccactctctctgtccgtcactcctggacagccggcctccatctcctgcaagtctagtcagagcctcctgcatagtgagggaaagacctatttgtattggtacctgcagaagccaggccagcctccacagctcctgatctatgaagtttcctaccggttctctggagtgccagataggttcagtggcagcgggtcagggacagatttcacactgaaaatcagccgggtggaggctgaggatgttggggtttattactgcatgcaaggtatacagcttccgctcactttcggcggagggaccaaggtggagatcaaa

SEQ ID NO: 26240 - protein, 112 aa, synthetic construct
  REGION 1..112: note = Description of Artificial Sequence: Synthetic polypeptide
DIVMTQTPLSLSVTPGQPASISCKSSQSLLHSEGKTYLYWYLQKPGQPPQLLIYEVSYRFSGVPDRFSGSGSGTDFTLKISRVEAEDVGVYYCMQGIQLPLTFGGGTKVEIK

SEQ ID NO: 26241 - DNA, 318 bp, synthetic construct
  misc_feature 1..318: note = Description of Artificial Sequence: Synthetic polynucleotide
  source 1..318: mol_type = other DNA
gacatccagatgacccagtctccatcctccctgtctgcatctgtaggagacagagtcaccatcacttgccgggcaagtcagagcattagcgactatttaaattggtatcagcagaaaccagggaaagcccctaaggtcctgatctatactacatccagtttgcaaagtggggtcccatcaaggttcagtggcagtggatctgggacagatttcactctcaccatcagcagtctgcagcctgaagattttgcaacttactactgtcaacagagtttcagtacccccactttcggcggagggaccaaggtggagatcaaa

SEQ ID NO: 26242 - protein, 106 aa, synthetic construct
  REGION 1..106: note = Description of Artificial Sequence: Synthetic polypeptide
DIQMTQSPSSLSASVGDRVTITCRASQSISDYLNWYQQKPGKAPKVLIYTTSSLQSGVPSRFSGSGSGTDFTLTISSLQPEDFATYYCQQSFSTPTFGGGTKVEIK

SEQ ID NO: 26243 - DNA, 324 bp, synthetic construct
  misc_feature 1..324: note = Description of Artificial Sequence: Synthetic polynucleotide
  source 1..324: mol_type = other DNA
gaaatggtgatgacgcagtctccagccaccctgtctgtgtctccaggggaaagagtcaccctctcctgcagggccagtcagagtattaacatcaatatagcctggtaccagcagaaacctggccaggctcccaggctcctcatctatggtgcatccaccagggccactggtatcccagccaggttcagtggcagtgggtctgggacagagttcactctcaccatcagcagcctgcagtctgaagattttgcagtttattactgtcagcagtataatgactggcctccgtggacgttcggccaagggaccaaggtggaaatcaaa

SEQ ID NO: 26244 - protein, 108 aa, synthetic construct
  REGION 1..108: note = Description of Artificial Sequence: Synthetic polypeptide
EMVMTQSPATLSVSPGERVTLSCRASQSININIAWYQQKPGQAPRLLIYGASTRATGIPARFSGSGSGTEFTLTISSLQSEDFAVYYCQQYNDWPPWTFGQGTKVEIK

SEQ ID NO: 26245 - DNA, 336 bp, synthetic construct
  misc_feature 1..336: note = Description of Artificial Sequence: Synthetic polynucleotide
  source 1..336: mol_type = other DNA
gatattgtgatgacccagactccactctctctgtccgtcacccctggacagccggcctccatctcctgcaagtctagtcagcgcctcctgcatggtgatggaaagacctatttgtattggtacctgcagaagccaggccagcctccacagctcctgctctatgaagtttccaaccggttctctggagtgccagataggttcagtggcagcgggtcagggacagatttcacactgaaaatcagccgggtggaggctgaggatgttggggtttattactgcatgcaaagtatacaggttccgtggacgttcggccaagggaccaaggtggaaatcaaa

SEQ ID NO: 26246 - protein, 112 aa, synthetic construct
  REGION 1..112: note = Description of Artificial Sequence: Synthetic polypeptide
DIVMTQTPLSLSVTPGQPASISCKSSQRLLHGDGKTYLYWYLQKPGQPPQLLLYEVSNRFSGVPDRFSGSGSGTDFTLKISRVEAEDVGVYYCMQSIQVPWTFGQGTKVEIK

SEQ ID NO: 26247 - DNA, 318 bp, synthetic construct
  misc_feature 1..318: note = Description of Artificial Sequence: Synthetic polynucleotide
  source 1..318: mol_type = other DNA
gacatacagatgacccagtctccatcctccctgtctgcgtctgtaggagacagagtcaccatcacttgccgggcaagtcagagcattagcaactttttaaattggtatcagcagaaaccagggaaagcccctaaggtcctgatctatactgcatccagtttggaaagtggggtcccatcaaggttcagtggcagtgaatctgggacagatttcactctcaccatcagcagtctgcaacctgaagattttgcaacttactactgtcaacagagttacagtacccccactttcggcggagggaccagggtggagatcaaa

SEQ ID NO: 26248 - protein, 106 aa, synthetic construct
  REGION 1..106: note = Description of Artificial Sequence: Synthetic polypeptide
DIQMTQSPSSLSASVGDRVTITCRASQSISNFLNWYQQKPGKAPKVLIYTASSLESGVPSRFSGSESGTDFTLTISSLQPEDFATYYCQQSYSTPTFGGGTRVEIK

SEQ ID NO: 26249 - DNA, 321 bp, synthetic construct
  misc_feature 1..321: note = Description of Artificial Sequence: Synthetic polynucleotide
  source 1..321: mol_type = other DNA
gacatccagatgacccagtctccatcctcactgtctgcttctgtaggagacagagtcaccatcacttgtcgggcgagtcagggcattagcaagtatttagcctggtttcagcagaaaccagggaaagcccctaagtctctgatctatgatgcatccaggttgcaaagtggggtcccatcaaagttcagcggcagtggatctgggacagatttcactctcaccatcagcagcctgcagccagaagattttgcaagttattactgccatcagtataaacattacccgatcaccttcggccaagggacacgactggagattaaa

SEQ ID NO: 26250 - protein, 107 aa, synthetic construct
  REGION 1..107: note = Description of Artificial Sequence: Synthetic polypeptide
DIQMTQSPSSLSASVGDRVTITCRASQGISKYLAWFQQKPGKAPKSLIYDASRLQSGVPSKFSGSGSGTDFTLTISSLQPEDFASYYCHQYKHYPITFGQGTRLEIK

SEQ ID NO: 26251 - DNA, 336 bp, synthetic construct
  misc_feature 1..336: note = Description of Artificial Sequence: Synthetic polynucleotide
  source 1..336: mol_type = other DNA
gatattgtgatgacccagactccactctctctgtccgtcacccctggacagccggcctccatctcctgcaagtctagtcagagcctcctgcatggtgatggaaagacctatttgtattggtacctacagaagccaggccagcctccacagctcctgatctatgaagtttcccaccggttctctggagtgccagataggttcagtggcagcgggtcagggacagatttcacactgaaaatcagccgggtggaggctgaggatgttggggtttattactgcatgcaaagtatacagattccgtggacgttcggccaagggaccaaggtggaaatcaaa

SEQ ID NO: 26252 - protein, 112 aa, synthetic construct
  REGION 1..112: note = Description of Artificial Sequence: Synthetic polypeptide
DIVMTQTPLSLSVTPGQPASISCKSSQSLLHGDGKTYLYWYLQKPGQPPQLLIYEVSHRFSGVPDRFSGSGSGTDFTLKISRVEAEDVGVYYCMQSIQIPWTFGQGTKVEIK

SEQ ID NO: 26253 - DNA, 318 bp, synthetic construct
  misc_feature 1..318: note = Description of Artificial Sequence: Synthetic polynucleotide
  source 1..318: mol_type = other DNA
gacatccagatgaccctgtctccatcctccctgtctgcatctgtaggagacagagtcaccatcacttgccgggcaagtcagagcattagcgactatttaaattggtatcagctgaaaccagggaaagcccctaaggtcttgatctatactacatccagtttgcaaagtggggtcccatcaaggttcagtggcagtggatctgggacagatttcactctcaccatcagcagtctgcaacctgaagattttgcaacttacttctgtcaacagagttacagtacccccactttcggcggagggaccaaggtggagatcaaa

SEQ ID NO: 26254 - protein, 106 aa, synthetic construct
  REGION 1..106: note = Description of Artificial Sequence: Synthetic polypeptide
DIQMTLSPSSLSASVGDRVTITCRASQSISDYLNWYQLKPGKAPKVLIYTTSSLQSGVPSRFSGSGSGTDFTLTISSLQPEDFATYFCQQSYSTPTFGGGTKVEIK

SEQ ID NO: 26255 - DNA, 339 bp, synthetic construct
  misc_feature 1..339: note = Description of Artificial Sequence: Synthetic polynucleotide
  source 1..339: mol_type = other DNA
gacatcgtgatgacccagtctccagactccctggctgtgtctctgggcgagagggccaccatcaactgcaagtccagccagagtgttttacacagctccaacaattacaactacttagtttggtaccagcagaaaccaggacagtctcctaagcggctcatttactgggcatctacccgggaatccggggtccctgaccgattcagtggcagcgggtctgggacagatttctctctcaccatcagcagcctgcaggctgaagatgtggcagtttattactgtcagcaatattacagtactccattcactttcggccctgggaccaaagtggatatcaaa

SEQ ID NO: 26256 - protein, 113 aa, synthetic construct
  REGION 1..113: note = Description of Artificial Sequence: Synthetic polypeptide
DIVMTQSPDSLAVSLGERATINCKSSQSVLHSSNNYNYLVWYQQKPGQSPKRLIYWASTRESGVPDRFSGSGSGTDFSLTISSLQAEDVAVYYCQQYYSTPFTFGPGTKVDIK

SEQ ID NO: 26257 - DNA, 339 bp, synthetic construct
  misc_feature 1..339: note = Description of Artificial Sequence: Synthetic polynucleotide
  source 1..339: mol_type = other DNA
gacatcgtgatgacccagtctccagactccctggctgtgtctctgggcgagaaggccaccatcaactgcaagtccagccagagtgttttgcacagctccaacaattacaactacttaacttggtaccagcagaaaccaggacagcctcctaaactgctcatttactgggcatctacccggaaatccggggtccctgaccgattcagtggcagcgggtctgggacagatttcactctcaccatcagcagcctgcaggctgaagatgtggcagtttattactgtcagcaatattatagtactccgtgcagttttggccaggggaccaagctggagatcaaa

SEQ ID NO: 26258 - protein, 113 aa, synthetic construct
  REGION 1..113: note = Description of Artificial Sequence: Synthetic polypeptide
DIVMTQSPDSLAVSLGEKATINCKSSQSVLHSSNNYNYLTWYQQKPGQPPKLLIYWASTRKSGVPDRFSGSGSGTDFTLTISSLQAEDVAVYYCQQYYSTPCSFGQGTKLEIK

SEQ ID NO: 26259 - DNA, 339 bp, synthetic construct
  misc_feature 1..339: note = Description of Artificial Sequence: Synthetic polynucleotide
  source 1..339: mol_type = other DNA
gacatcgtgatgacccagtctccagactccctggctgtgtctctgggcgagagggccaccatcaactgcaagtccagccagagtgttttatacagctccaacaattacaactacttagcttggtaccagcagaaaccagggcagcctcctaaactgctcatttactgggcatctacccggaaatccggggtccctgaccgattcagtggcagcgggtctgggacagatttcactctcaccgtcagcagcctgcaggctgaagatgtggcagtttattactgtcagcaatattttaatactcctcccactttcggccctgggaccaaagtggatatcaaa

SEQ ID NO: 26260 - protein, 113 aa, synthetic construct
  REGION 1..113: note = Description of Artificial Sequence: Synthetic polypeptide
DIVMTQSPDSLAVSLGERATINCKSSQSVLYSSNNYNYLAWYQQKPGQPPKLLIYWASTRKSGVPDRFSGSGSGTDFTLTVSSLQAEDVAVYYCQQYFNTPPTFGPGTKVDIK

SEQ ID NO: 26261 - DNA, 318 bp, synthetic construct
  misc_feature 1..318: note = Description of Artificial Sequence: Synthetic polynucleotide
  source 1..318: mol_type = other DNA
gacatccagatgacccagtctccatcctccctgtctgcatctgtaggagacagagtcaccatcacttgccgggcaagtcagagcattagcgactatttaaattggtatcagcaaaaaccagggaaagcccctaaggtcctgatctatactacatccagtttgcaaagtggggtcccatcaaggttcagtggcagtggatctgggacagatttcactctcaccatcagcagtctgcaacctgaagattttgcaacttacttctgtcaacagagttacagtacccccactttcggcggagggaccaaggtggagatcaaa

SEQ ID NO: 26262 - protein, 106 aa, synthetic construct
  REGION 1..106: note = Description of Artificial Sequence: Synthetic polypeptide
DIQMTQSPSSLSASVGDRVTITCRASQSISDYLNWYQQKPGKAPKVLIYTTSSLQSGVPSRFSGSGSGTDFTLTISSLQPEDFATYFCQQSYSTPTFGGGTKVEIK

SEQ ID NO: 26263 - DNA, 336 bp, synthetic construct
  misc_feature 1..336: note = Description of Artificial Sequence: Synthetic polynucleotide
  source 1..336: mol_type = other DNA
gatattgtgatgacccagactccactctctctgtccgtcacccctggacagccggcctccatctcctgcaagtctagtcagagcctccggcatggtgatggaaagacctatttgacttggtacctacagaggccaggccagcctccacaggtcctgatccatgaaatttccaagcggttcactggagtgccagataggttcagtggcagcgggtcagggacagatttcacactgaacatcagccgggtggaggctgaggatgttggcttttattactgcatgcaaagtatacaggttccgtggacgttcggccaagggaccaaggtggaaatcaaa

SEQ ID NO: 26264 - protein, 112 aa, synthetic construct
  REGION 1..112: note = Description of Artificial Sequence: Synthetic polypeptide
DIVMTQTPLSLSVTPGQPASISCKSSQSLRHGDGKTYLTWYLQRPGQPPQVLIHEISKRFTGVPDRFSGSGSGTDFTLNISRVEAEDVGFYYCMQSIQVPWTFGQGTKVEIK

SEQ ID NO: 26265 - DNA, 324 bp, synthetic construct
  misc_feature 1..324: note = Description of Artificial Sequence: Synthetic polynucleotide
  source 1..324: mol_type = other DNA
gaaattgtgttgacgcagtctccaggcaccctgtctttgtttccaggggaaagagccaccctctcctgcagggccagtcagagtgttatcagcagctacttagcctggtaccagcagaaacctggccaggctcccaggctcctcatctttggtgtatctagtagggccactggcatcccagacaggttcagtggcagtgggtctgggacagacttcactctcaccatcagcagactggagcctgaagattttgcagtgtattactgtcaacaatatggtaggtcaccattcaatttcggccctgggaccaaagtggatatcaaa

SEQ ID NO: 26266 - protein, 108 aa, synthetic construct
  REGION 1..108: note = Description of Artificial Sequence: Synthetic polypeptide
EIVLTQSPGTLSLFPGERATLSCRASQSVISSYLAWYQQKPGQAPRLLIFGVSSRATGIPDRFSGSGSGTDFTLTISRLEPEDFAVYYCQQYGRSPFNFGPGTKVDIK

SEQ ID NO: 26267 - DNA, 321 bp, synthetic construct
  misc_feature 1..321: note = Description of Artificial Sequence: Synthetic polynucleotide
  source 1..321: mol_type = other DNA
gacatccagatgacccagtctccatcctccctgtctgcatctgttggagacagagtcaccatcacttgccgggcaagtcagggcattagaaatgatttaggctggtatcagcagaaaccagggaaagcccctaagcgcctgatctatgctacatccagtttgcaaagtggggtcccatcaaggttcagcggcagtggatctgggacagaattcactctcacaatcagcagcctacagcctgaagattttgcaacttattactgtctacagcattataatttcccgtacagttttggccaggggaccaagctggagatcaaa

SEQ ID NO: 26268 - protein, 107 aa, synthetic construct
  REGION 1..107: note = Description of Artificial Sequence: Synthetic polypeptide
DIQMTQSPSSLSASVGDRVTITCRASQGIRNDLGWYQQKPGKAPKRLIYATSSLQSGVPSRFSGSGSGTEFTLTISSLQPEDFATYYCLQHYNFPYSFGQGTKLEIK

SEQ ID NO: 26269 - DNA, 321 bp, synthetic construct
  misc_feature 1..321: note = Description of Artificial Sequence: Synthetic polynucleotide
  source 1..321: mol_type = other DNA
gacatccagatgacccagtctccagcttccgtgtctgcatctgtgggagacagagtcaccataacttgtcgggcgagtcaggatattagcaactggttagcctggtatcagcagaaaccagggaaagcccctaaactcctgatctatgctgcatccagtttgcaaggtggggtcccatcaaggttcagcggcagtggatctgggacagatttcactctctccatcagcaccctgcagcctgaagattttgcaacttactattgtcaacagactgacagtttcccattcactttcggccctgggaccaaagtggatatcaaa

SEQ ID NO: 26270 - protein, 107 aa, synthetic construct
  REGION 1..107: note = Description of Artificial Sequence: Synthetic polypeptide
DIQMTQSPASVSASVGDRVTITCRASQDISNWLAWYQQKPGKAPKLLIYAASSLQGGVPSRFSGSGSGTDFTLSISTLQPEDFATYYCQQTDSFPFTFGPGTKVDIK

SEQ ID NO: 26271 - DNA, 321 bp, synthetic construct
  misc_feature 1..321: note = Description of Artificial Sequence: Synthetic polynucleotide
  source 1..321: mol_type = other DNA
gacatccagatgacccagtctccatcctccctgtctgcatctgtaggagacagagtcaccatcacttgccgggcaagtcagggcattagaaatgatttaggctggtatcagcagaaaccagggaaagcccctaagcgcctgatctatgctgcatccagtttgcaaagtggggtcccatcaaggttcaccggcagtggatctgggacagaattcactttcacaatcagcagcctgcagcctgaagattttgcaacttattactgtctacagcatagtaattacccgctcactttcggcggagggaccaaggtggagatcaaa

SEQ ID NO: 26272 - protein, 107 aa, synthetic construct
  REGION 1..107: note = Description of Artificial Sequence: Synthetic polypeptide
DIQMTQSPSSLSASVGDRVTITCRASQGIRNDLGWYQQKPGKAPKRLIYAASSLQSGVPSRFTGSGSGTEFTFTISSLQPEDFATYYCLQHSNYPLTFGGGTKVEIK

SEQ ID NO: 26273 - DNA, 336 bp, synthetic construct
  misc_feature 1..336: note = Description of Artificial Sequence: Synthetic polynucleotide
  source 1..336: mol_type = other DNA
ggcatcgtgatgacccagtctccagactccctggctgtgtctctgggcgcgagggccaccatcgactgcaagtccagccagagtgttttatacagctccaacaataagaactacttagcttggtaccagcagaaaccaggacagcctcctaagttgctcatttactgggcatctacccgggaatccggggtccctgaccgattcagtggcagcggatctgggacagatttcactctcaccatctacagcctgcaggctgaagatgtggcagtttattactgtcagcaatattatcgtagtcctagttttggccaggggaccaagctggagatcaaa

SEQ ID NO: 26274 - protein, 112 aa, synthetic construct
  REGION 1..112: note = Description of Artificial Sequence: Synthetic polypeptide
GIVMTQSPDSLAVSLGARATIDCKSSQSVLYSSNNKNYLAWYQQKPGQPPKLLIYWASTRESGVPDRFSGSGSGTDFTLTIYSLQAEDVAVYYCQQYYRSPSFGQGTKLEIK

SEQ ID NO: 26275 - DNA, 321 bp, synthetic construct
  misc_feature 1..321: note = Description of Artificial Sequence: Synthetic polynucleotide
  source 1..321: mol_type = other DNA
gacatccagatgacccagtctccagcttccgtgtctgcatctgtaggagacagagtcaccataacttgtcgggcgagtcagggtattagcaactggttagcctggtatcagcagaaaccagggaaagcccctaagctcctgatctctgctgcatccagtttgcaaagtggggtcccatcaaggttcagcggcaatgaatctgggacagatttcactctctccatcagcagcctgcagcctgaagattttgcaacttactattgtcaacagactgacagtttcccattcactttcggccctgggaccaaagtggatgtcaaa

SEQ ID NO: 26276 - protein, 107 aa, synthetic construct
  REGION 1..107: note = Description of Artificial Sequence: Synthetic polypeptide
DIQMTQSPASVSASVGDRVTITCRASQGISNWLAWYQQKPGKAPKLLISAASSLQSGVPSRFSGNESGTDFTLSISSLQPEDFATYYCQQTDSFPFTFGPGTKVDVK

SEQ ID NO: 26277 - DNA, 318 bp, synthetic construct
  misc_feature 1..318: note = Description of Artificial Sequence: Synthetic polynucleotide
  source 1..318: mol_type = other DNA
gacatccagatgacccagtctccatcctccctgtctgcatctgtaggagacagagtcaccatcacttgccgggcaagtcagagcattagcgactatttaaattggtatcagcagaaaccagggaaagcccctaaggtcctgatctatactacatccagtttgcaaagtggggtcccatcaaggttcagtggcagtggatctgggacagatttcactctcaccatcagcagtctgcaacctgaagattttgcaacttacttctgtcaacagagttacagtacccccactttcggcggagggaccaaggtggagatcaaa

SEQ ID NO: 26278 - protein, 106 aa, synthetic construct; identical to SEQ ID NO: 26262
  REGION 1..106: note = Description of Artificial Sequence: Synthetic polypeptide

SEQ ID NO: 26279 - DNA, 336 bp, synthetic construct
  misc_feature 1..336: note = Description of Artificial Sequence: Synthetic polynucleotide
  source 1..336: mol_type = other DNA
gatattgtgatgacccaggctccactctctctgtccgtcacccctggacagccggcctccatctcctgcaagtctagtcagagcctcctgcatggtgatggaaagacctatttatattggtacctgcagaagccaggccagcctccacagatcctgatctatgaagtttccaaccggttctctggagtgccagataggttcagtggcagcgggtcagggacagatttcacactgaacatcagccgggtggaggctgaggattttgggttttattactgcatgcaaagtatacagattccgtggacgttcggccaagggaccaaggtggacatcaaa

SEQ ID NO: 26280 - protein, 112 aa, synthetic construct
  REGION 1..112: note = Description of Artificial Sequence: Synthetic polypeptide
DIVMTQAPLSLSVTPGQPASISCKSSQSLLHGDGKTYLYWYLQKPGQPPQILIYEVSNRFSGVPDRFSGSGSGTDFTLNISRVEAEDFGFYYCMQSIQIPWTFGQGTKVDIK

SEQ ID NO: 26281 - DNA, 339 bp, synthetic construct
  misc_feature 1..339: note = Description of Artificial Sequence: Synthetic polynucleotide
  source 1..339: mol_type = other DNA
gccgtcgtgatgacccagtctccagactccctggctgtgtctctgggcgagagggccaccatcaactgcacgtccagccagagtattttacacagctccaataattacaactacttagcttggtaccagcagaaaccaggacagcctcctaaattgctcatttactgggcatctacccgggaatccggggtccctgaccgattcagtggcagcgggtctgggacagatttcactctcaccatcagcagcctgcaggctgaagatgtggcagtttattactgtcaacaatattatagtggtccgtgcagttttggccaggggaccaagctggagatcaaa

SEQ ID NO: 26282 - protein, 113 aa, synthetic construct
  REGION 1..113: note = Description of Artificial Sequence: Synthetic polypeptide
AVVMTQSPDSLAVSLGERATINCTSSQSILHSSNNYNYLAWYQQKPGQPPKLLIYWASTRESGVPDRFSGSGSGTDFTLTISSLQAEDVAVYYCQQYYSGPCSFGQGTKLEIK

SEQ ID NO: 26283 - DNA, 321 bp, synthetic construct
  misc_feature 1..321: note = Description of Artificial Sequence: Synthetic polynucleotide
  source 1..321: mol_type = other DNA
gacatccagatgacccagtctccatcctcactgtctgcatctgtaggagacagagtcaccatcacttgtcgggcgagtcaggtcattagcaattatttagcctggtttcagcagaaaccagggaaagcccctaagtccctgatctctgctgcatccagtttgcgaagtggggtcccatcaaacttcagcggcagtggatctgggacagatttcactctcaccatcagcagcctgcagcctgaagattttgcaacttattactgccaacagtatcatagttacccattcactttcggccctgggaccaaagtggatttcaaa

SEQ ID NO: 26284 - protein, 107 aa, synthetic construct
  REGION 1..107: note = Description of Artificial Sequence: Synthetic polypeptide
DIQMTQSPSSLSASVGDRVTITCRASQVISNYLAWFQQKPGKAPKSLISAASSLRSGVPSNFSGSGSGTDFTLTISSLQPEDFATYYCQQYHSYPFTFGPGTKVDFK

SEQ ID NO: 26285 - DNA, 336 bp, synthetic construct
  misc_feature 1..336: note = Description of Artificial Sequence: Synthetic polynucleotide
  source 1..336: mol_type = other DNA
gatattgtgatgacccagactccactctctctgtccgtcacccctggacagccggcctccatctcctgcaagtctagtcagagcctccggcatggtgatggaaagacctatttgacttggtacctacagaggccaggccagcctccacaggtcctgatccatgaagtttccaagcggttcactggagtgccagataggttcagtggcagcgggtcagggacagatttcacactgaacatcagccgggtggaggctgaggatgttgggttttattactgcatgcaaagtatacaggttccgtggacgttcggccaagggaccaaggtggaaatcaaa

SEQ ID NO: 26286 - protein, 112 aa, synthetic construct
  REGION 1..112: note = Description of Artificial Sequence: Synthetic polypeptide
DIVMTQTPLSLSVTPGQPASISCKSSQSLRHGDGKTYLTWYLQRPGQPPQVLIHEVSKRFTGVPDRFSGSGSGTDFTLNISRVEAEDVGFYYCMQSIQVPWTFGQGTKVEIK

SEQ ID NO: 26287 - DNA, 324 bp, synthetic construct
  misc_feature 1..324: note = Description of Artificial Sequence: Synthetic polynucleotide
  source 1..324: mol_type = other DNA
gaaattgtgttgacgcagtctccaggcaccctgtctttgtttccaggggaaagagcccccctctcctgcagggccagtcagagtgttatcagcagctacttagcctggtaccagcagaaacctggccaggctcccaggctcctcatctttggtgtatctagtagggccactggcatcccagacaggttcagtggcagtgggtctgggacagacttcactctcaccatcagcagactggagcctgaagattttgcagtgtattactgtcaacaatatggtaggtcaccattcaatttcggccctgggaccaaagtggatatcaaa

SEQ ID NO: 26288 - protein, 108 aa, synthetic construct
  REGION 1..108: note = Description of Artificial Sequence: Synthetic polypeptide
EIVLTQSPGTLSLFPGERAPLSCRASQSVISSYLAWYQQKPGQAPRLLIFGVSSRATGIPDRFSGSGSGTDFTLTISRLEPEDFAVYYCQQYGRSPFNFGPGTKVDIK

SEQ ID NO: 26289 - DNA, 336 bp, synthetic construct
  misc_feature 1..336: note = Description of Artificial Sequence: Synthetic polynucleotide
  source 1..336: mol_type = other DNA
ggcatcgtgatgacccagtttccagattccctggctgtgtctctgggcgagagggccaccatcaactgcaagtccagccagagtgttttatacagctccaacaataagaactacttagcttggtaccagcagaaaccaggacagcctcataagttgctcatttactgggcatctacccgggaatttggggtccctgaccgattcagtggcagcgggtgtgggacagatttcactctcaccatctacagcgtgcaggctgaagatgtggcagtttattactgtcagcaatataatcgtagtcttagttttggccaggggaccaagctggagatcaaa

SEQ ID NO: 26290 - protein, 112 aa, synthetic construct
  REGION 1..112: note = Description of Artificial Sequence: Synthetic polypeptide
GIVMTQFPDSLAVSLGERATINCKSSQSVLYSSNNKNYLAWYQQKPGQPHKLLIYWASTREFGVPDRFSGSGCGTDFTLTIYSVQAEDVAVYYCQQYNRSLSFGQGTKLEIK

SEQ ID NO: 26291 - DNA, 336 bp, synthetic construct
  misc_feature 1..336: note = Description of Artificial Sequence: Synthetic polynucleotide
  source 1..336: mol_type = other DNA
gatattgtgatgacccagactcccttctctctgtccgtcacccctggacagccggcctccatctcctgcaagtctagtcagagcctcctgcatagtgatggaaagacctatttgtattggtacctgcagaagccaggccagcctccacagttcctgatctatgaagtttccaaccggttctctggagtgccagataggttcagtggcagcgggtcagggacagatttcacactgaaaatcagccgggtggaggctgacgatgttggggtttattactgcatgcaaaatataaagtatccgctcactttcggcggagggaccaaggtggagatcaaa

SEQ ID NO: 26292 - protein, 112 aa, synthetic construct
  REGION 1..112: note = Description of Artificial Sequence: Synthetic polypeptide
DIVMTQTPFSLSVTPGQPASISCKSSQSLLHSDGKTYLYWYLQKPGQPPQFLIYEVSNRFSGVPDRFSGSGSGTDFTLKISRVEADDVGVYYCMQNIKYPLTFGGGTKVEIK

SEQ ID NO: 26293 - DNA, 339 bp, synthetic construct
  misc_feature 1..339: note = Description of Artificial Sequence: Synthetic polynucleotide
  source 1..339: mol_type = other DNA
gacatcgtgatgacccagtctccagactccctggctgtgtctctgggcgagagggccaccatcaactgcaagtccagccagagtgttttatacagctccaacaattacaagtacttagcttggtaccagcagaaaccaggacagcctcctaacctgctcatttactgggcatctacccggaaatccggggtccctgaccgattcagtggcagcgggtctgggacagatttcactctcaccatcagcagcctgcaggctgaagatgtggcagtttattactgtcagcaatattatagtactccgtgcagttttggccaggggaccaagctggagatcaaa

SEQ ID NO: 26294 - protein, 113 aa, synthetic construct
  REGION 1..113: note = Description of Artificial Sequence: Synthetic polypeptide
DIVMTQSPDSLAVSLGERATINCKSSQSVLYSSNNYKYLAWYQQKPGQPPNLLIYWASTRKSGVPDRFSGSGSGTDFTLTISSLQAEDVAVYYCQQYYSTPCSFGQGTKLEIK

SEQ ID NO: 26295 - DNA, 339 bp, synthetic construct
  misc_feature 1..339: note = Description of Artificial Sequence: Synthetic polynucleotide
  source 1..339: mol_type = other DNA
gacatcgtgatgacccagtctccagactccctggctgtgtctctgggcgagagggccaccatcaactgcaagtccagccagagtgttttacacagttccaacaattacaactatttagcttggtaccagcagaaaccaggacagcctcctaagctgctcatttactggacatctacccggaaatccggggtccctgaccgattcagtggcagcgggtctgggacacatttcactctctccatcagcagcctgcaggctgaagatgtggcagtttattactgtcagcattattatagtactccgtgcagttttggccaggggaccaagctggagatcaaa

SEQ ID NO: 26296 - protein, 113 aa, synthetic construct
  REGION 1..113: note = Description of Artificial Sequence: Synthetic polypeptide
DIVMTQSPDSLAVSLGERATINCKSSQSVLHSSNNYNYLAWYQQKPGQPPKLLIYWTSTRKSGVPDRFSGSGSGTHFTLSISSLQAEDVAVYYCQHYYSTPCSFGQGTKLEIK

SEQ ID NO: 26297 - DNA, 321 bp, synthetic construct
  misc_feature 1..321: note = Description of Artificial Sequence: Synthetic polynucleotide
  source 1..321: mol_type = other DNA
gacattcagatgaccctgtctccatcctccgtgtatgcatctgtcggagacagagtcaccatcacttgtcgggcgagtcaggatattagcaactggttagcctggtatcagcagagaccagggaaagcccctaaggtccttatctatgctgcatccagtttgcaaagtggggtcccatcaagattcagcggcagtggatctgggacagatttcactctcaccatcagcagcgtgcagcctgaagattttgcaacttactattgtcaacagggtaacagtttcccgctcactttcggcggagggaccaaggtggacatcaaa

SEQ ID NO: 26298 - protein, 107 aa, synthetic construct
  REGION 1..107: note = Description of Artificial Sequence: Synthetic polypeptide
DIQMTLSPSSVYASVGDRVTITCRASQDISNWLAWYQQRPGKAPKVLIYAASSLQSGVPSRFSGSGSGTDFTLTISSVQPEDFATYYCQQGNSFPLTFGGGTKVDIK

SEQ ID NO: 26299 - DNA, 339 bp, synthetic construct
  misc_feature 1..339: note = Description of Artificial Sequence: Synthetic polynucleotide
  source 1..339: mol_type = other DNA
gacatcgtgatgacccagtctccagactccctggctgtgtctctgggcgagagggccaccatcaactgcaggtcaagccagagtgttttacacagctccaacaattataactacttagcttggtaccagcagaaaccaggacagcctcctaagctgctcatttactgggcatctaaacgggattccggggtccctgaccgattcagtggcagcgggtctgggacagatttcactctcaccatcagcagcctgcaggctgaggatgtggcagtttattactgtcagcaatattttagttctcctcggacgttcggccaagggaccaaggtggaaatcaag

SEQ ID NO: 26300 - protein, 113 aa, synthetic construct
  REGION 1..113: note = Description of Artificial Sequence: Synthetic polypeptide
DIVMTQSPDSLAVSLGERATINCRSSQSVLHSSNNYNYLAWYQQKPGQPPKLLIYWASKRDSGVPDRFSGSGSGTDFTLTISSLQAEDVAVYYCQQYFSSPRTFGQGTKVEIK

SEQ ID NO: 26301 - DNA, 321 bp, synthetic construct
  misc_feature 1..321: note = Description of Artificial Sequence: Synthetic polynucleotide
  source 1..321: mol_type = other DNA
gacatccagatgacccagtctccagcttccgtgtctgcatctgtaggagacagagtcaccataacttgtcgggcgagtcagggtattagcaactggttagcctggtatcaccagaaaccagggaaagcccctaagctcctgatctatgctgcatccagtttgcaaggtggggtcccatcaaggttcagcggcagtggatctgggacagatttcactctctccatcagcagcctgcagcctgaagattttgcaacttactattgtcaccagactgacagtttcccattcactttcggccctgggaccaaagtggatatcaaa

SEQ ID NO: 26302 - protein, 107 aa, synthetic construct
  REGION 1..107: note = Description of Artificial Sequence: Synthetic polypeptide
DIQMTQSPASVSASVGDRVTITCRASQGISNWLAWYHQKPGKAPKLLIYAASSLQGGVPSRFSGSGSGTDFTLSISSLQPEDFATYYCHQTDSFPFTFGPGTKVDIK

SEQ ID NO: 26303 - DNA, 321 bp, synthetic construct
  misc_feature 1..321: note = Description of Artificial Sequence: Synthetic polynucleotide
  source 1..321: mol_type = other DNA
gacatccagatgacccagtctccagcttccgtgtctgcatctgtaggagacagagtcaccataacttgtcgggcgagtcaggatattagcaactggttagcctggtatcagcagaaaccagggaaagcccctaagctcctgatctatgctgcatccagtttgcaaggtggggtcccatcaaggttcaacggcagtggatctgggacagatttcactctctccatcagcagcctgcagcctgaagattttgcaacttactattgtcaccagactgacagtttcccattcactttcggccctgggaccaaagtggatatcaaa

SEQ ID NO: 26304 - protein, 107 aa, synthetic construct
  REGION 1..107: note = Description of Artificial Sequence: Synthetic polypeptide
DIQMTQSPASVSASVGDRVTITCRASQDISNWLAWYQQKPGKAPKLLIYAASSLQGGVPSRFNGSGSGTDFTLSISSLQPEDFATYYCHQTDSFPFTFGPGTKVDIK

SEQ ID NO: 26305 - DNA, 318 bp, synthetic construct
  misc_feature 1..318: note = Description of Artificial Sequence: Synthetic polynucleotide
  source 1..318: mol_type = other DNA
gacatccagatgacccagtctccatcctccctgtctgcatctgtaggagacagagtcaccatcacttgccgggcaagtcagagcattagcagctatttaaattggtatcagcagaaaccagggaaagcccctaaggtcctgatctttactgcatccagtttgcaaagtggggtcccatcaagattcagtggcagtggatctgggacagatttcactctcaccatcagcagtctgcaacctgaagattttgcaacttactactgtcaacagagttacagtacccccactttcggcggagggaccagggtggagatcaaa

SEQ ID NO: 26306 - protein, 106 aa, synthetic construct
  REGION 1..106: note = Description of Artificial Sequence: Synthetic polypeptide
DIQMTQSPSSLSASVGDRVTITCRASQSISSYLNWYQQKPGKAPKVLIFTASSLQSGVPSRFSGSGSGTDFTLTISSLQPEDFATYYCQQSYSTPTFGGGTRVEIK

SEQ ID NO: 26307 - DNA, 336 bp, synthetic construct
  misc_feature 1..336: note = Description of Artificial Sequence: Synthetic polynucleotide
  source 1..336: mol_type = other DNA
gatattgtgatgacccagactccactctctctgtccgtcacccctggacagccggcctccatctcctgcaagtctagtcagagcctcctgcatggtgatggaaagacctatttgtattggtacctgcagaagccaggccagcctccacagctcctgatttatgaagtttccaatcggttctctggagtgccagataggttcagtggcagcggttcagggacagatttcacactgaaaatcagccgggtggaggctgaggatgttggattttattactgcatgcaaagtatacaggttccgtggacgttcggccaagggaccaaggtggaaatcaaa

SEQ ID NO: 26308 - protein, 112 aa, synthetic construct
  REGION 1..112: note = Description of Artificial Sequence: Synthetic polypeptide
DIVMTQTPLSLSVTPGQPASISCKSSQSLLHGDGKTYLYWYLQKPGQPPQLLIYEVSNRFSGVPDRFSGSGSGTDFTLKISRVEAEDVGFYYCMQSIQVPWTFGQGTKVEIK

SEQ ID NO: 26309 - DNA, 339 bp, synthetic construct
  misc_feature 1..339: note = Description of Artificial Sequence: Synthetic polynucleotide
  source 1..339: mol_type = other DNA
gacatcgtgatgacccagtctccagactccctggctgtgtctctgggcgagcgggccaccatcaactgcaagtccagccagagtgttttatccagctccaacaataataattatttagcttggtaccagcagaaaccaggacagcctcctaagctgctcatttactgggcatctacccggaaatccggggtccctgaccgattcagtggcagcgggtctgggacagatttcactctcaccatcagcagcctgcaggctgaagatgtggcagtttattactgtcagcaatattatagtactccgtgcagttttggccaggggaccaagctggagatcaag

SEQ ID NO: 26310 - protein, 113 aa, synthetic construct
  REGION 1..113: note = Description of Artificial Sequence: Synthetic polypeptide
DIVMTQSPDSLAVSLGERATINCKSSQSVLSSSNNNNYLAWYQQKPGQPPKLLIYWASTRKSGVPDRFSGSGSGTDFTLTISSLQAEDVAVYYCQQYYSTPCSFGQGTKLEIK

SEQ ID NO: 26311 - DNA, 339 bp, synthetic construct
  misc_feature 1..339: note = Description of Artificial Sequence: Synthetic polynucleotide
  source 1..339: mol_type = other DNA
gacatcgtgatgacccagtctccagactccctggctgtgtctctgggcgagagggccaccatcaactgcaagtccagccagagtgttttacacagctccaataattacaactacttagcttggtaccagcagaaaccaggacagccccctaaactgctcatttactggacatctacccgggaatccggggtccctgaccgattcagtggcagcgggtctgggacagatttcactctcaccatcagcagcctgcaggctgaagatgtggcagtttattactgtcaacaatattatagtactccgtgcagttttggccaggggaccaagttggagatcaaa

SEQ ID NO: 26312 - protein, 113 aa, synthetic construct
  REGION 1..113: note = Description of Artificial Sequence: Synthetic polypeptide
DIVMTQSPDSLAVSLGERATINCKSSQSVLHSSNNYNYLAWYQQKPGQPPKLLIYWTSTRESGVPDRFSGSGSGTDFTLTISSLQAEDVAVYYCQQYYSTPCSFGQGTKLEIK

SEQ ID NO: 26313 - DNA, 324 bp, synthetic construct
  misc_feature 1..324: note = Description of Artificial Sequence: Synthetic polynucleotide
  source 1..324: mol_type = other DNA
gaaatagtgatgacgcagtctccagccaccctgtctgtgtctccaggggaaagagccaccctctcctgcagggccagtcagagtgttagtagtaacttagcctggtaccagcagaaacctggccaggctcccagactcctcatctatggtgcatccaccagggccactggtatcccagccaggttcagtggcagtgggtctgggacagagttcactctcaccatcagcagcctgcagtctgaagattttgcagtttattactgtcagcagtatgatgactggcctccgtggacgttcggccaagggaccaaggtggaaatcaaa

SEQ ID NO: 26314 - protein, 108 aa, synthetic construct
  REGION 1..108: note = Description of Artificial Sequence: Synthetic polypeptide
EIVMTQSPATLSVSPGERATLSCRASQSVSSNLAWYQQKPGQAPRLLIYGASTRATGIPARFSGSGSGTEFTLTISSLQSEDFAVYYCQQYDDWPPWTFGQGTKVEIK

SEQ ID NO: 26315 - DNA, 321 bp, synthetic construct
  misc_feature 1..321: note = Description of Artificial Sequence: Synthetic polynucleotide
  source 1..321: mol_type = other DNA
gacatccagatgacccagtctccatcctccctgtctgcatctgtaggagacagagtcaccatcacttgccgggcaagtcagggcattagaaatgatttaggctggtatcagcagaaaccagggaaagcccctaagcgcctgatctatgctgcatccagtttgcaaagtggggtcccatcaaggttcagcggcagtggatctgggacagaattcactttcacaatcagcagcctgcagcctgaagattttgcaacttattactgtctacagcatagtaattacccgctcactttcggcggagggaccaaggtggagatcaaa

SEQ ID NO: 26316 - protein, 107 aa, synthetic construct
  REGION 1..107: note = Description of Artificial Sequence: Synthetic polypeptide
DIQMTQSPSSLSASVGDRVTITCRASQGIRNDLGWYQQKPGKAPKRLIYAASSLQSGVPSRFSGSGSGTEFTFTISSLQPEDFATYYCLQHSNYPLTFGGGTKVEIK

SEQ ID NO: 26317 - DNA, 339 bp, synthetic construct
  misc_feature 1..339: note = Description of Artificial Sequence: Synthetic polynucleotide
  source 1..339: mol_type = other DNA
gacatcgtgatgacccagtctccagactccctggctgtgtctctgggcgagagggccaccatcaactgcaagtccagccagagtgttttatacagctccaacaataacaactacttagcttggtaccagcagaaaccaggacagcctcctaagctgctcatttactgggcatctacccgggaatccggggtccctgcccgattcagtggcagcgggtctgggacagatttcactctcaccatcagcagcctgcaggctgaagatgtggcagtttattactgtcaccaatattatagtactccgtgcagttttggccaggggaccaagctggagatcaaa

SEQ ID NO: 26318 - protein, 113 aa, synthetic construct
  REGION 1..113: note = Description of Artificial Sequence: Synthetic polypeptide
DIVMTQSPDSLAVSLGERATINCKSSQSVLYSSNNNNYLAWYQQKPGQPPKLLIYWASTRESGVPARFSGSGSGTDFTLTISSLQAEDVAVYYCHQYYSTPCSFGQGTKLEIK

SEQ ID NO: 26319 - DNA, 318 bp, synthetic construct
  misc_feature 1..318: note = Description of Artificial Sequence: Synthetic polynucleotide
  source 1..318: mol_type = other DNA
gacatccagatgacccagtctccatcctccctgtctgcatctgtaggagacagagtcaccatcacttgccgggcaagtcagagcattagcagctatttaaattggtatcagcagaaaccagggaaagcccctaaggtcctgatctatactgcatccagtttgcaaagtggggtcccatcaaggttcagtggcagtggatctgggacagatttcactctcaccatcagcagtctgcaacctgaagattttgcaacttactactgtcaacagagttacagtgcccccactttcggcggagggaccaaggtggagatcaaa

SEQ ID NO: 26320 - protein, 106 aa, synthetic construct
  REGION 1..106: note = Description of Artificial Sequence: Synthetic polypeptide
DIQMTQSPSSLSASVGDRVTITCRASQSISSYLNWYQQKPGKAPKVLIYTASSLQSGVPSRFSGSGSGTDFTLTISSLQPEDFATYYCQQSYSAPTFGGGTKVEIK

SEQ ID NO: 26321 - DNA, 321 bp, synthetic construct
  misc_feature 1..321: note = Description of Artificial Sequence: Synthetic polynucleotide
  source 1..321: mol_type = other DNA
gacatccagatgacccagtctccatcctcactgtctgcatctataggagacagaatcaccctcacttgtcgggcgagtcagggcattagcaattatttagcctggtttcagcagagaccagggaaagcccctaagtccctgatctatgctgcatccagtttgctaagtggggtcccatcaaagttcagcggcagtggatctgggacagatttcactctcaccatcagcagcctgcagcctgaagattttgcaacttattactgccaacagtataatagttttccattcactttcggcggagggaccaaggtggagctcaaa

SEQ ID NO: 26322 - protein, 107 aa, synthetic construct
  REGION 1..107: note = Description of Artificial Sequence: Synthetic polypeptide
DIQMTQSPSSLSASIGDRITLTCRASQGISNYLAWFQQRPGKAPKSLIYAASSLLSGVPSKFSGSGSGTDFTLTISSLQPEDFATYYCQQYNSFPFTFGGGTKVELK

SEQ ID NO: 26323 - DNA, 321 bp, synthetic construct
  misc_feature 1..321: note = Description of Artificial Sequence: Synthetic polynucleotide
  source 1..321: mol_type = other DNA
gacatccagatgacccagtctccatcctcactgtctgcatctgtaggagacagagtcaccatcacttgtcgggcgagtcaggacattagcaattatttagtctggtttcagcagagaccagggaaagcccctaggtccctgatctatgctgcatccagtttgcaaagtggggtcccatctaagttcagcggcagtggatctgggacagatttcactctcaccatcagcagcctgcagcctgaagattttgcaacttattactgccaacaatatcatagttacccattcactttcggccctgggaccaaagtggatatcaaa

SEQ ID NO: 26324 - protein, 107 aa, synthetic construct
  REGION 1..107: note = Description of Artificial Sequence: Synthetic polypeptide
DIQMTQSPSSLSASVGDRVTITCRASQDISNYLVWFQQRPGKAPRSLIYAASSLQSGVPSKFSGSGSGTDFTLTISSLQPEDFATYYCQQYHSYPFTFGPGTKVDIK

SEQ ID NO: 26325 - DNA, 321 bp, synthetic construct
  misc_feature 1..321: note = Description of Artificial Sequence: Synthetic polynucleotide
  source 1..321: mol_type = other DNA
gacatccagatgacccagtctccatcctccctgtctgcatctgtaggagacagagtcaccatcacttgccgggcaagtcagggcattagaaatgatttaggctggtatcagcagaaaccagggaaagcccctaagcgcctcatctatgctgcatccagtttgcaaagtggggtcccatcaaggttcagcggcagtggatctgggacagacttcactctcacaatcagcagcctgcagcctgatgactttgcaacttattactgtctacagcataatagttacccattcactttcggccctgggaccaaagtggatatcaaa

SEQ ID NO: 26326 - protein, 107 aa, synthetic construct
  REGION 1..107: note = Description of Artificial Sequence: Synthetic polypeptide
DIQMTQSPSSLSASVGDRVTITCRASQGIRNDLGWYQQKPGKAPKRLIYAASSLQSGVPSRFSGSGSGTDFTLTISSLQPDDFATYYCLQHNSYPFTFGPGTKVDIK

SEQ ID NO: 26327 - DNA, 324 bp, synthetic construct
  misc_feature 1..324: note = Description of Artificial Sequence: Synthetic polynucleotide
  source 1..324: mol_type = other DNA
gacatccagatgacccagtctccatcctccctgtctgcatctgtaggagacagagtcaccatcacttgccgggcaagtcagaacattagcagttatttaaattggtatcagctgaaaccagggaaagcccctaaactcctgatctatactgcatccagtttgcaaagtggggtcccatcaaggttcagtggcagtggatctgggacagatttcactctcaccatcagcagtctgcaacctgaggattttgcaacttactactgtcaacagagttacaatacccccacgtggacgttcggccaagggaccaaggtggaaatcaaa

SEQ ID NO: 26328 - protein, 108 aa, synthetic construct
  REGION 1..108: note = Description of Artificial Sequence: Synthetic polypeptide
DIQMTQSPSSLSASVGDRVTITCRASQNISSYLNWYQLKPGKAPKLLIYTASSLQSGVPSRFSGSGSGTDFTLTISSLQPEDFATYYCQQSYNTPTWTFGQGTKVEIK

SEQ ID NO: 26329 - DNA, 321 bp, synthetic construct
  misc_feature 1..321: note = Description of Artificial Sequence: Synthetic polynucleotide
  source 1..321: mol_type = other DNA
gacatccagatgacccagtctccatcctcactgtctgcatctgtaggagacagagtcaccttcacttgtcgggcgagtcagggcattagcaattatttagcctggtttcagcagaaaccagggagagcccctaagtccctgatctatgctgcatccagtttgcgaagtggggtcccatcacagttcagcggcagtggatctgggacagatttcactctcaccatcaacagcctgcagcctgaagattttgcaacttattactgccaacagtatcatagttatccattcactttcggccctgggaccaaagtggatatcaaa

SEQ ID NO: 26330 - protein, 107 aa, synthetic construct
  REGION 1..107: note = Description of Artificial Sequence: Synthetic polypeptide
DIQMTQSPSSLSASVGDRVTFTCRASQGISNYLAWFQQKPGRAPKSLIYAASSLRSGVPSQFSGSGSGTDFTLTINSLQPEDFATYYCQQYHSYPFTFGPGTKVDIK

SEQ ID NO: 26331 - DNA, 321 bp, synthetic construct
  misc_feature 1..321: note = Description of Artificial Sequence: Synthetic polynucleotide
  source 1..321: mol_type = other DNA
gacatccagatgacccagtctccatcctccctgtctgcatctgtaggagacagagtcaccatcacttgccgggcaagtcagggcattagaaatgatttaggctggtatcagcagaaaccagggaaagcccctaagcgcctgatctatcctgcatccagtttacaaactggggtcccatcaaggttcagcggcagtggatctgggacagaattcactctcacaatcagcagcctgcagcctgaagattttgcaacttattactgtctacaggataatagttacccattcactttcggccctgggaccaaagtggatatcaaa

SEQ ID NO: 26332 - protein, 107 aa, synthetic construct
  REGION 1..107: note = Description of Artificial Sequence: Synthetic polypeptide
DIQMTQSPSSLSASVGDRVTITCRASQGIRNDLGWYQQKPGKAPKRLIYPASSLQTGVPSRFSGSGSGTEFTLTISSLQPEDFATYYCLQDNSYPFTFGPGTKVDIK

SEQ ID NO: 26333 - DNA, 321 bp, synthetic construct
  misc_feature 1..321: note = Description of Artificial Sequence: Synthetic polynucleotide
  source 1..321: mol_type = other DNA
gacatccagatgacccagtctccatcctcactgtctgcatctgtaggggacagagtcaccatcacttgtcgggcgagtcagggcattaacaattatttagcctggtttcagcagaaaccagggaaagcccctgagtccctgatctatgctgcatccagtttacaaagtggggtcccatcacagttcagcggcagtggatctgggacagatttcactctcaccatcagcagcctgcagcctgaagattttgcaacttattactgccaacagtataatagttatccattcactttcggccctgggaccaaagtggatatcaaa

SEQ ID NO: 26334 - protein, 107 aa, synthetic construct
  REGION 1..107: note = Description of Artificial Sequence: Synthetic polypeptide
DIQMTQSPSSLSASVGDRVTITCRASQGINNYLAWFQQKPGKAPESLIYAASSLQSGVPSQFSGSGSGTDFTLTISSLQPEDFATYYCQQYNSYPFTFGPGTKVDIK

SEQ ID NO: 26335 - DNA, 321 bp, synthetic construct
  misc_feature 1..321: note = Description of Artificial Sequence: Synthetic polynucleotide
  source 1..321: mol_type = other DNA
gacatccagatgacccagtctccatcctccctgtctgcatctgtaggagacagagtcaccatcacttgccgggcaagtcagagctttagcagctatttaaattggtatcagcagaaaccagggatagcccctaaactcctgatctatgctgcatccagtttgcaaagtggggtcccatcaaggttcagtggcagtggatctgggacagatttcactctcaccatcagcagtctgcaacctgaagattttgcaacttactactgtcaagagagttatagtatccgcttcgccttcggccaagggacacgactggagattaaa

SEQ ID NO: 26336 - protein, 107 aa, synthetic construct
  REGION 1..107: note = Description of Artificial Sequence: Synthetic polypeptide
DIQMTQSPSSLSASVGDRVTITCRASQSFSSYLNWYQQKPGIAPKLLIYAASSLQSGVPSRFSGSGSGTDFTLTISSLQPEDFATYYCQESYSIRFAFGQGTRLEIK

SEQ ID NO: 26337 - DNA, 321 bp, synthetic construct
  misc_feature 1..321: note = Description of Artificial Sequence: Synthetic polynucleotide
  source 1..321: mol_type = other DNA
gacattcagatgactcagtctccatcctccctgtgtgcatcagtaggagacagagtcaccatcacttgccgggcaagtcagggcattagaaatgatttaggctggtatcagcagaaaccagggaaagcccctaagcgcttgatcaatgttgcatccagtttgcaaagtggggtcccatcaaggttcagcggcagtggatctgggacagaattcactctcacaatcagcagcgtgcagcgtgaagattttgcaacttattactgtatacaggataatagtcacccattcactttcggccctgggaccaaagtggaaatcaaa

SEQ ID NO: 26338 - protein, 107 aa, synthetic construct
  REGION 1..107: note = Description of Artificial Sequence: Synthetic polypeptide
DIQMTQSPSSLCASVGDRVTITCRASQGIRNDLGWYQQKPGKAPKRLINVASSLQSGVPSRFSGSGSGTEFTLTISSVQREDFATYYCIQDNSHPFTFGPGTKVEIK

SEQ ID NO: 26339 - DNA, 321 bp, synthetic construct
  misc_feature 1..321: note = Description of Artificial Sequence: Synthetic polynucleotide
  source 1..321: mol_type = other DNA
gacatccagatgacccagtctccatcctcactgtctgcatctgtaggagacagagtcaccatcacttgtcgggcgagtcaggacattagcaattttttagcctggtttcagcagaaaccagggaaagcccctaagtccctggtctctactgcatccagtttgcaaagtggggtcccatcaaagttcagcggcagtggatctgggacagatttcactctcaccatcagcagcctgcagcctgaagattttgcaacttattactgccaacagtatcatagttacccgatcaccttcggccaagggacacgactggagattaaa

SEQ ID NO: 26340 - protein, 107 aa, synthetic construct
  REGION 1..107: note = Description of Artificial Sequence: Synthetic polypeptide
DIQMTQSPSSLSASVGDRVTITCRASQDISNFLAWFQQKPGKAPKSLVSTASSLQSGVPSKFSGSGSGTDFTLTISSLQPEDFATYYCQQYHSYPITFGQGTRLEIK

SEQ ID NO: 26341 - DNA, 336 bp, synthetic construct
  misc_feature 1..336: note = Description of Artificial Sequence: Synthetic polynucleotide
  source 1..336: mol_type = other DNA
gatattgtgatgacccagactccactctctctgtccgtcacccctggacagccggcctccatctcctgcaagtctagtcagagcctcctgcatggtgatggaaagacctatttatattggtacctgcagaagccaggccagtctccacaactcctgatctatgaaatttccaagcggttctctggagtgccagataggttcagtggcagcgggtcagggacagatttcacactgaaaatcagccgggtggaggctgaggatgttggggtttactactgcatgcaaagtatacaggttccgtggacgttcggccaagggaccaaggtggaaatcaaa

SEQ ID NO: 26342 - protein, 112 aa, synthetic construct
  REGION 1..112: note = Description of Artificial Sequence: Synthetic polypeptide
DIVMTQTPLSLSVTPGQPASISCKSSQSLLHGDGKTYLYWYLQKPGQSPQLLIYEISKRFSGVPDRFSGSGSGTDFTLKISRVEAEDVGVYYCMQSIQVPWTFGQGTKVEIK

SEQ ID NO: 26343 - DNA, 321 bp, synthetic construct
  misc_feature 1..321: note = Description of Artificial Sequence: Synthetic polynucleotide
  source 1..321: mol_type = other DNA
gacatccagatgacccagtctccatcctccctgtctgcatctgtaggagacagagtcaccatcacttgccgggcaagtcagggcattagaaatgatttaggctggtatcagcagaaaccagggaaagcccctaagcgcctgatctatgctgcatccagtttgcaaagtggggtcccatcaaggttcagcggcagtggatctgggacagacttcactctcacaatcagcagcctgcagcctgatgactttgcaacttattactgtctacagcataatagttacccattcactttcggccctgggaccaaagtggatatcaaa

SEQ ID NO: 26344 - protein, 107 aa, synthetic construct; identical to SEQ ID NO: 26326
  REGION 1..107: note = Description of Artificial Sequence: Synthetic polypeptide

SEQ ID NO: 26345 - DNA, 321 bp, synthetic construct
  misc_feature 1..321: note = Description of Artificial Sequence: Synthetic polynucleotide
  source 1..321: mol_type = other DNA
gacatccagatgacccagtctccatcctcactgtctgcatctgtaggagacagagtcaccatcacttgtcgggcgagtcagggcattaccaattatttagcctggtttcagcagaaaccagggaaagcccctaagtccctgatctatactgcatccaatttgcaaagtggggtcccatcaaagttcagcggcagtggatctgggacagatttcactctcaccatcagcagcctgcagcctgaagattttgcaacttattactgccaacagtatcatagttacccattcactttcggccctgggaccaaagtggatatcaaa

SEQ ID NO: 26346 - protein, 107 aa, synthetic construct
  REGION 1..107: note = Description of Artificial Sequence: Synthetic polypeptide
DIQMTQSPSSLSASVGDRVTITCRASQGITNYLAWFQQKPGKAPKSLIYTASNLQSGVPSKFSGSGSGTDFTLTISSLQPEDFATYYCQQYHSYPFTFGPGTKVDIK

SEQ ID NO: 26347 - DNA, 321 bp, synthetic construct
  misc_feature 1..321: note = Description of Artificial Sequence: Synthetic polynucleotide
  source 1..321: mol_type = other DNA
gacatccagatgacccagtctccatcctccctgtctgcatctgtaggagacagagtcaccatcacttgccgggcaagtcagggcattagaaatgattttggctggtatcagcagagaccagggaaagcccctaagtgcctgattcatgctgcatccagtttacagagtggggtcccatcaaggttcagcggcagtggatctgggacagaattcactctcacaatcagcagcctgcagcctgaagattttgcaacttattactgtctacagcattatagttacccattcactttcggccctgggaccaaagtggatatcaaa

SEQ ID NO: 26348 - protein, 107 aa, synthetic construct
  REGION 1..107: note = Description of Artificial Sequence: Synthetic polypeptide
DIQMTQSPSSLSASVGDRVTITCRASQGIRNDFGWYQQRPGKAPKCLIHAASSLQSGVPSRFSGSGSGTEFTLTISSLQPEDFATYYCLQHYSYPFTFGPGTKVDIK

SEQ ID NO: 26349 - DNA, 321 bp, synthetic construct
  misc_feature 1..321: note = Description of Artificial Sequence: Synthetic polynucleotide
  source 1..321: mol_type = other DNA
gacatccagatgacccagtctccatcctccctgtctgcatctgtaggagacagagtcaccatcacttgccgggcaagtcagggcattagaaatgatttaggctggtatcagcagaaaccagggaaagcccctaagcgcctgatctatactgcatccaatttgcaaagtggggtcccatcaaggttcagcggcagtggatgtgggacagaattcactctcacagtcagcagcctgcagcctgaagattttgcaacttattactgtctacagcataatagttacccgtggacgttcggccaagggaccaaggtggaaatcaaa

SEQ ID NO: 26350 - protein, 107 aa, synthetic construct
  REGION 1..107: note = Description of Artificial Sequence: Synthetic polypeptide
DIQMTQSPSSLSASVGDRVTITCRASQGIRNDLGWYQQKPGKAPKRLIYTASNLQSGVPSRFSGSGCGTEFTLTVSSLQPEDFATYYCLQHNSYPWTFGQGTKVEIK

SEQ ID NO: 26351 - DNA, 321 bp, synthetic construct
  misc_feature 1..321: note = Description of Artificial Sequence: Synthetic polynucleotide
  source 1..321: mol_type = other DNA
gacatccagatgacccagtctccatcctccctgtctgcatctgtaggagacagagtcaccatcacttgccgggcaagtcaggacattagaaaggatttaggctggtatcagcagaaaccagggaaagcccctaagcgcctgatctatgctgcatccagtttgcaaagtggggtcccatcaaggttcagcggcagtggatctgggacagaattcactctcacattcagcagcctgcagcctgaagattttgcaacttattactgtctacagcattatagttaccctcggacgttcggccaagggaccaaggtggaaatcaaa

SEQ ID NO: 26352 - protein, 107 aa, synthetic construct
  REGION 1..107: note = Description of Artificial Sequence: Synthetic polypeptide
DIQMTQSPSSLSASVGDRVTITCRASQDIRKDLGWYQQKPGKAPKRLIYAASSLQSGVPSRFSGSGSGTEFTLTFSSLQPEDFATYYCLQHYSYPRTFGQGTKVEIK

SEQ ID NO: 26353 - DNA, 321 bp, synthetic construct
  misc_feature 1..321: note = Description of Artificial Sequence: Synthetic polynucleotide
  source 1..321: mol_type = other DNA
gacatccagatgacccagtctccatcctccctgcctgcatctgtaggagacagagtcaccatcacttgccgggcaagtcagaacattagaaagtatttacattggtatcagttcttaccagggaaagcccctaagctcctgatctatactgcatccactttacaaagtggggtcccatcaaggttcagtggcagcggatctgggacagatttcactctcaccatcagcagtctgcaacctgaagatttcgcaacttactactgtcaacagagttacaatatttcattcactttcggccctgggaccaaagtggatatcaaa

SEQ ID NO: 26354 - protein, 107 aa, synthetic construct
  REGION 1..107: note = Description of Artificial Sequence: Synthetic polypeptide
DIQMTQSPSSLPASVGDRVTITCRASQNIRKYLHWYQFLPGKAPKLLIYTASTLQSGVPSRFSGSGSGTDFTLTISSLQPEDFATYYCQQSYNISFTFGPGTKVDIK

SEQ ID NO: 26355 - DNA, 321 bp, synthetic construct
  misc_feature 1..321: note = Description of Artificial Sequence: Synthetic polynucleotide
  source 1..321: mol_type = other DNA
gacattcagatgacccagtctccatcctccctgtctgcatctgtaggagacagagtcaccatcacttgccgggcaagtcagggcattagaaatgatttaggctggtatcagcagaaaccagggaaagcccctaagcgcctgatcaatgctgcatccagtttgcaaagtggggtcccatcaaggttcagcggcagtggatctgggacagaattcactctcacaatcagcagcctgcagcctgaagattttgcaacttattactgtctacaggataatagtcacccattcactttcggccctgggaccaaagtggaaatcaaa

SEQ ID NO: 26356 - protein, 107 aa, synthetic construct
  REGION 1..107: note = Description of Artificial Sequence: Synthetic polypeptide
DIQMTQSPSSLSASVGDRVTITCRASQGIRNDLGWYQQKPGKAPKRLINAASSLQSGVPSRFSGSGSGTEFTLTISSLQPEDFATYYCLQDNSHPFTFGPGTKVEIK

SEQ ID NO: 26357 - DNA, 321 bp, synthetic construct
  misc_feature 1..321: note = Description of Artificial Sequence: Synthetic polynucleotide
  source 1..321: mol_type = other DNA
gacatccagatgatccagtctccatccttcctgtttgcatctgtaggagacagagttaccatcacttgccgggcaagtcagggcatgagaattgatttagggtggtatcagcagaaaccaggaaaagcccctaagcgcctgatttatcgtgcatccagtttgcaaagtggggtcccatcaaggttcagcggcagtggatgtgggacagaattcactctcacaatcagcagcgtgcagcgtgaagattttgcaagttattactgtgtacagcataatagttaccctctcactttcggcggagggaccaaggtggagatcaaa

SEQ ID NO: 26358 - protein, 107 aa, synthetic construct
  REGION 1..107: note = Description of Artificial Sequence: Synthetic polypeptide
DIQMIQSPSFLFASVGDRVTITCRASQGMRIDLGWYQQKPGKAPKRLIYRASSLQSGVPSRFSGSGCGTEFTLTISSVQREDFASYYCVQHNSYPLTFGGGTKVEIK

SEQ ID NO: 26359 - DNA, 321 bp, synthetic construct
  misc_feature 1..321: note = Description of Artificial Sequence: Synthetic polynucleotide
  source 1..321: mol_type = other DNA
gacatccagatgacccagtctccatcctccctgtctgcatctgtaggagacagagtcaccatcacttgccgggcaagtcagggcattagaagtgatttaggctggtatcagcagaaaccagggaaagcccctaagcgcctgatctatactgcatccagtttgcaaagtggggtcccatcaaggttcagcggcagtggatctgggacagaattcactctcacaatcagcagcctgcagcctgaagattttgcaacttattactgtctacagcataatagttacccattcactttcggccctgggaccaaagtggacatcaaa

SEQ ID NO: 26360 - protein, 107 aa, synthetic construct
  REGION 1..107: note = Description of Artificial Sequence: Synthetic polypeptide
DIQMTQSPSSLSASVGDRVTITCRASQGIRSDLGWYQQKPGKAPKRLIYTASSLQSGVPSRFSGSGSGTEFTLTISSLQPEDFATYYCLQHNSYPFTFGPGTKVDIK

SEQ ID NO: 26361 - DNA, 321 bp, synthetic construct
  misc_feature 1..321: note = Description of Artificial Sequence: Synthetic polynucleotide
  source 1..321: mol_type = other DNA
gacatccagatgacccagtctccatcctccctgtctgcatctgtaggagacagagtcaccatcacttgccgggcaagtcaggacattagaaatgatttaggctggtatcagcagaaaccagggaaagcccctaagcgcctgatgtatactgcatccagtttgcaaagtggggtcccatcaaggttcagcggcagtggatctgggacagaattcactctcacaatcagcagcctgcagcctgaagattttgcaacttattactgtctacagcataatagttacccattcactttcggccctgggaccaaagtggatatcaaa

SEQ ID NO: 26362 - protein, 107 aa, synthetic construct
  REGION 1..107: note = Description of Artificial Sequence: Synthetic polypeptide
DIQMTQSPSSLSASVGDRVTITCRASQDIRNDLGWYQQKPGKAPKRLMYTASSLQSGVPSRFSGSGSGTEFTLTISSLQPEDFATYYCLQHNSYPFTFGPGTKVDIK

SEQ ID NO: 26363 - DNA, 339 bp, synthetic construct
  misc_feature 1..339: note = Description of Artificial Sequence: Synthetic polynucleotide
  source 1..339: mol_type = other DNA
gacatcgtgatgacccagtctccagactccccggctgtgtctctgggcgagagggccaccatcaactgcaagtccagccagaatgttttacacagctccaacaataacaactacttaacttggtaccagcagagaccaggacagcctcctaagttgctcatttactgggcatctacccgggaatccggggtccctgaccgattcagtggcagcgggtctgggacagaattcactctcaccatcagcagcctgcaggctgaagatgtggcagtttattactgtcagcaatattatagtactcctccgacgttcggccaagggaccaaggtggaaatcaaa

SEQ ID NO: 26364 - protein, 113 aa, synthetic construct
  REGION 1..113: note = Description of Artificial Sequence: Synthetic polypeptide
DIVMTQSPDSPAVSLGERATINCKSSQNVLHSSNNNNYLTWYQQRPGQPPKLLIYWASTRESGVPDRFSGSGSGTEFTLTISSLQAEDVAVYYCQQYYSTPPTFGQGTKVEIK

SEQ ID NO: 26365 - DNA, 321 bp, synthetic construct
  misc_feature 1..321: note = Description of Artificial Sequence: Synthetic polynucleotide
  source 1..321: mol_type = other DNA
gacatccagatgacccagtctccatcctcactgtctgcatctgtaggagacagagtcaccatcacttgtcgggcgagtcagggcattaacaattatttagcctggtttcagcagaaaccagggaaagcccctaagtccctgatctctgctgcatccagtttacaaagtggggtcccatcaaagttcagcggcagtggatctgggacagatttcactctcagtatcagcagcctacagcctgaagattttgcaacttattactgtcaacagtatcatagttacccattcactttcggccctgggaccaaagtggatatcaaa

SEQ ID NO: 26366 - protein, 107 aa, synthetic construct
  REGION 1..107: note = Description of Artificial Sequence: Synthetic polypeptide
DIQMTQSPSSLSASVGDRVTITCRASQGINNYLAWFQQKPGKAPKSLISAASSLQSGVPSKFSGSGSGTDFTLSISSLQPEDFATYYCQQYHSYPFTFGPGTKVDIK

SEQ ID NO: 26367 - DNA, 321 bp, synthetic construct
  misc_feature 1..321: note = Description of Artificial Sequence: Synthetic polynucleotide
  source 1..321: mol_type = other DNA
gacatccagatgacccagtctccatcctccctgtctgcatcggtaggagacagagtcaccatcacttgccgggcaagtcagcgcgtcagaaatgatttaggctggtatcagcagaaaccagcgaaagcccctaagcgcatcattttcgatgcatccaatttgcaaagtggggtcccatcaaggttcagcggcagtggatctgggacagaattcactctcacaatcagcagcctgcagcctgaagattttgcaacttattactgtctacagcatcatagtttcccgatcaccttcggccaagggacccgactggagattaaa

SEQ ID NO: 26368 - protein, 107 aa, synthetic construct
  REGION 1..107: note = Description of Artificial Sequence: Synthetic polypeptide
DIQMTQSPSSLSASVGDRVTITCRASQRVRNDLGWYQQKPAKAPKRIIFDASNLQSGVPSRFSGSGSGTEFTLTISSLQPEDFATYYCLQHHSFPITFGQGTRLEIK

SEQ ID NO: 26369 - DNA, 321 bp, synthetic construct
  misc_feature 1..321: note = Description of Artificial Sequence: Synthetic polynucleotide
  source 1..321: mol_type = other DNA
gacatccagttgacccagtctccatcctccctgtctgcatctgtaggagacagagtcaccatcacttgccgggcaagtcagagcattagcaaatatttaaattggtatcagcagaaaccagggaaagcccctgaactcctgatctatgctacatccaatttgcaaagtggggtcccatcaaggttcagtggcagtggatctgggacagatttcactctcaccatcagcactctgcaacctgaagattttgtaacttactactgtcaacagagttacagtctcccggtcactttcggcggagggaccaaggtagagatcaaa

SEQ ID NO: 26370 - protein, 107 aa, synthetic construct
  REGION 1..107: note = Description of Artificial Sequence: Synthetic polypeptide
DIQLTQSPSSLSASVGDRVTITCRASQSISKYLNWYQQKPGKAPELLIYATSNLQSGVPSRFSGSGSGTDFTLTISTLQPEDFVTYYCQQSYSLPVTFGGGTKVEIK

SEQ ID NO: 26371 - DNA, 321 bp, synthetic construct
  misc_feature 1..321: note = Description of Artificial Sequence: Synthetic polynucleotide
  source 1..321: mol_type = other DNA
gacatccagatgacccagtctccatcctccctgtctgcatctgtaggagacagagtcaccatcacttgccaggcgagtcaggacattagcgactatttaaattggtatcaacagaaaccagggaaagcccctaaactcctgatctacgatgcctccactttggaaacaggggtcccatcaaggttcagtggaagtggatctgggacagattttactttcaccatcagcagcctgcagcctgaagatattgcaacatatttctgtcaacaatatgataatctcccgatcaccttcggccaagggacacgactggagattaaa

SEQ ID NO: 26372 - protein, 107 aa, synthetic construct
  REGION 1..107: note = Description of Artificial Sequence: Synthetic polypeptide
DIQMTQSPSSLSASVGDRVTITCQASQDISDYLNWYQQKPGKAPKLLIYDASTLETGVPSRFSGSGSGTDFTFTISSLQPEDIATYFCQQYDNLPITFGQGTRLEIK

SEQ ID NO: 26373 - DNA, 321 bp, synthetic construct
  misc_feature 1..321: note = Description of Artificial Sequence: Synthetic polynucleotide
  source 1..321: mol_type = other DNA
gacatccagatgacccagtctccatcctccctgtctgcatctgtaggagacagagtcaccatcacttgccggacaagtcagggcattagaaatgatttaggctggtatcagcagaaaccagggaaagcccctaagcgcctgatctatgctgcatccagtttgcaaagtggggtcccatcaaggttcagcggcagtggatctgggacagacttcactctcacaatcatcagcctgcagcctgatgactttgcaacttattactgtctacagcataatagttatccattcactttcggccctgggaccaaagtggatatcaaa

SEQ ID NO: 26374 - protein, 107 aa, synthetic construct
  REGION 1..107: note = Description of Artificial Sequence: Synthetic polypeptide
DIQMTQSPSSLSASVGDRVTITCRTSQGIRNDLGWYQQKPGKAPKRLIYAASSLQSGVPSRFSGSGSGTDFTLTIISLQPDDFATYYCLQHNSYPFTFGPGTKVDIK

SEQ ID NO: 26375 - DNA, 321 bp, synthetic construct
  misc_feature 1..321: note = Description of Artificial Sequence: Synthetic polynucleotide
  source 1..321: mol_type = other DNA
gacatccagatgacccagtctccatcctccctgtctgcatctgtaggagacagagtcaccatcacttgccgggcaagtcaggacattagaaaggatttagggtggtatcagcagaaaccagggaaagcccctaaccgcctgatctatgctgcatccagtttgcaaagtggggtcccatcaaggttcagcggcagtggatctgggacagaattcactctcacattcagcagcctgcagcctgaagattttgcaacttattactgtctacagcatcatagttatcctcggacgttcggccaagggaccaaggtggaaatcaaa

SEQ ID NO: 26376 - protein, 107 aa, synthetic construct
  REGION 1..107: note = Description of Artificial Sequence: Synthetic polypeptide
DIQMTQSPSSLSASVGDRVTITCRASQDIRKDLGWYQQKPGKAPNRLIYAASSLQSGVPSRFSGSGSGTEFTLTFSSLQPEDFATYYCLQHHSYPRTFGQGTKVEIK

SEQ ID NO: 26377 - DNA, 321 bp, synthetic construct
  misc_feature 1..321: note = Description of Artificial Sequence: Synthetic polynucleotide
  source 1..321: mol_type = other DNA
gacatccagatgacccagtctccatcctccctgtctgcatctgttggagacagagtcaccatcacttgccgggcaagtcgggacattggaaatgatttaggctggtatcagcagaaaccagggaaagcccctaagcgcctgatctctgctgcatccagtttgcaaagtggggtcccatcaaggttcagcggcagtggatctgggacagaattcactctcacattcagcagcctgcagcctgaagattttgcaacttattactgtctacagcattatagttaccctcggacgttcggccaagggaccaaggtggaaatcaaa

SEQ ID NO: 26378 - protein, 107 aa, synthetic construct
  REGION 1..107: note = Description of Artificial Sequence: Synthetic polypeptide
DIQMTQSPSSLSASVGDRVTITCRASRDIGNDLGWYQQKPGKAPKRLISAASSLQSGVPSRFSGSGSGTEFTLTFSSLQPEDFATYYCLQHYSYPRTFGQGTKVEIK

SEQ ID NO: 26379 - DNA, 321 bp, synthetic construct
  misc_feature 1..321: note = Description of Artificial Sequence: Synthetic polynucleotide
  source 1..321: mol_type = other DNA
gacatccagatgacccagtctccatcctcactgtctgcatctgtaggagacagagtcaccatcacttgtcgggcgagtcagggcattagcaaatatttagtctggtttcagcagaaaccagggaaagcccctaagtccctgatctatgctgcatccagtctgcaaagtggggtcccatcaaagttcagcggcagtggatctgggacagatttcactctcaccatcagcaacctgcagcctgaagattttgcaacttattactgccaacagtataatagttacccattcactttcggccctgggaccaaagtggatatcaaa

SEQ ID NO: 26380 - protein, 107 aa, synthetic construct
  REGION 1..107: note = Description of Artificial Sequence: Synthetic polypeptide
DIQMTQSPSSLSASVGDRVTITCRASQGISKYLVWFQQKPGKAPKSLIYAASSLQSGVPSKFSGSGSGTDFTLTISNLQPEDFATYYCQQYNSYPFTFGPGTKVDIK

SEQ ID NO: 26381 - DNA, 336 bp, synthetic construct
  misc_feature 1..336: note = Description of Artificial Sequence: Synthetic polynucleotide
  source 1..336: mol_type = other DNA
gatattgtgatgacccagactccactctctctgtccgtcacccctggacagccggcctccatctcctgcaagtctagtcagagcctcctgcatggtgatgggaagacctatttctattggtacctgcagaagccaggccagcctccacaggtcctgatctatgaagtatccaagcggttctctggagtgtcagaaaggttcagtggcagcgggtcagggacagatttcacactgaaaatcagccgggtggaggctgaggatgttggggtttattactgcatgcaaagtatacagattccgtggacgttcggccaagggaccaaggtggaaatcaaa

SEQ ID NO: 26382 - protein, 112 aa, synthetic construct
  REGION 1..112: note = Description of Artificial Sequence: Synthetic polypeptide
DIVMTQTPLSLSVTPGQPASISCKSSQSLLHGDGKTYFYWYLQKPGQPPQVLIYEVSKRFSGVSERFSGSGSGTDFTLKISRVEAEDVGVYYCMQSIQIPWTFGQGTKVEIK

SEQ ID NO: 26383 - DNA, 321 bp, synthetic construct
  misc_feature 1..321: note = Description of Artificial Sequence: Synthetic polynucleotide
  source 1..321: mol_type = other DNA
gacatccagatgacccagtctccatcctcgctgtctgcctctgtaggagacagagtcaccatcacttgtcgggcgagtcaggacattaacaattatttagcctggtttcagcagaaaccaggaaaagcccctacgtccctgatctatgcttcatccagtttgcaaagtggggtcccatcaaagttcagcggcagtggatctgggacagatttcactctcaccatcagcagcctgcagcctgaagattttgcaacttattactgccaacaatatcatagttacccattcactttcggccctgggaccaaagtggatatcaga

SEQ ID NO: 26384 - protein, 107 aa, synthetic construct
  REGION 1..107: note = Description of Artificial Sequence: Synthetic polypeptide
DIQMTQSPSSLSASVGDRVTITCRASQDINNYLAWFQQKPGKAPTSLIYASSSLQSGVPSKFSGSGSGTDFTLTISSLQPEDFATYYCQQYHSYPFTFGPGTKVDIR

SEQ ID NO: 26385 - DNA, 321 bp, synthetic construct
  misc_feature 1..321: note = Description of Artificial Sequence: Synthetic polynucleotide
  source 1..321: mol_type = other DNA
gacatccagatgacccagtctccatcctccctgtctgcatctgtaggagacagagtcaccatcacttgccgggcaagtcaggacattagaaatgatttaggctggtatcagcagaaaccagggaaagcccctaagcgcctgatctatgctgcatccagtttgcagaatggggtcccatcaaggttcagcggcagtggatctgggacagaattcactctcacaatcagcagcctgcagcctgaagattttacaacttattactgtctacagcataatagtttcccgtggacgttcggccaagggaccaaggtggaaatcaaa

SEQ ID NO: 26386 - protein, 107 aa, synthetic construct
  REGION 1..107: note = Description of Artificial Sequence: Synthetic polypeptide
DIQMTQSPSSLSASVGDRVTITCRASQDIRNDLGWYQQKPGKAPKRLIYAASSLQNGVPSRFSGSGSGTEFTLTISSLQPEDFTTYYCLQHNSFPWTFGQGTKVEIK

SEQ ID NO: 26387 - DNA, 321 bp, synthetic construct
  misc_feature 1..321: note = Description of Artificial Sequence: Synthetic polynucleotide
  source 1..321: mol_type = other DNA
gacatccagatgacccagtctccatcctccctgtctgcatctgtaggagacagagtcaccatcacttgccgggcaagtcagggcattagaaatgatttaggctggtatcagcagaaaccagggaaagcccctaagcgcctgatctatactgcatccaatttgcaaagtggggtcccatcaaggttcagcggcagtggatctgggacagaattcactctcacagtcagcagcctgcagcctgaagattttgcaacttattactgtctacagcataatagttacccgtggacgttcggccaagggaccaaggtggaaatcaaa

SEQ ID NO: 26388 - protein, 107 aa, synthetic construct
  REGION 1..107: note = Description of Artificial Sequence: Synthetic polypeptide
DIQMTQSPSSLSASVGDRVTITCRASQGIRNDLGWYQQKPGKAPKRLIYTASNLQSGVPSRFSGSGSGTEFTLTVSSLQPEDFATYYCLQHNSYPWTFGQGTKVEIK

SEQ ID NO: 26389 - DNA, 321 bp, synthetic construct
  misc_feature 1..321: note = Description of Artificial Sequence: Synthetic polynucleotide
  source 1..321: mol_type = other DNA
gacatccagatgacccagtctccatcctcgctgtctgcctctgtaggagacagagtcaccatcacttgtcgggcgagtcaggacattaacaattatttagcctggtttcagcagagaccagggaaagcccctacgtccctgatctatgcttcatccagtttgcaaagtggggtcccatcaaagttcagcggcagtggatctgggacagatttcactctcaccatcagcagcctgcagcctgaagattttgcaacttattactgccaacaatatcatagttacccattcactttcggccctgggaccaaagtggatatcaaa

SEQ ID NO: 26390 - protein, 107 aa, synthetic construct
  REGION 1..107: note = Description of Artificial Sequence: Synthetic polypeptide
DIQMTQSPSSLSASVGDRVTITCRASQDINNYLAWFQQRPGKAPTSLIYASSSLQSGVPSKFSGSGSGTDFTLTISSLQPEDFATYYCQQYHSYPFTFGPGTKVDIK

SEQ ID NO: 26391 - DNA, 321 bp, synthetic construct
  misc_feature 1..321: note = Description of Artificial Sequence: Synthetic polynucleotide
  source 1..321: mol_type = other DNA
gacatccagatgacccagtctccatcctccctgtctgcatctgtaggagacagagtcaccatcacttgccgggcaagtcagggcattagaaatgatttaggctggtatcagcagaaaccagggaaagcccctaagcgcctgatttatgctgcatccagtttgcaaagtggggtcccatcaaggttcagcggcagtggatctgggacagaattcactctcacaatcagcagcctgcagcctgaagattttgcaacttattactgtctacagcatagtaattacccgctcactttcggcggagggacccaggtggagagcaaa

SEQ ID NO: 26392 - protein, 107 aa, synthetic construct
  REGION 1..107: note = Description of Artificial Sequence: Synthetic polypeptide
DIQMTQSPSSLSASVGDRVTITCRASQGIRNDLGWYQQKPGKAPKRLIYAASSLQSGVPSRFSGSGSGTEFTLTISSLQPEDFATYYCLQHSNYPLTFGGGTQVESK

SEQ ID NO: 26393 - DNA, 339 bp, synthetic construct
  misc_feature 1..339: note = Description of Artificial Sequence: Synthetic polynucleotide
  source 1..339: mol_type = other DNA
gacatcgtgatgacccagtctccagactccctggctgtgtctctgggcgagagggccaccatcaactgcaagtccagccagagtgttttacacagctccaacaataataactacttagcttggtaccagcagaaaccaggacagcctcctaagctactcatttactgggcatctacccgggaatccggggtccctgaccgattcagtggcagcgggtctgggacagatttcactctcaccatcagcagcctgcaggctgaagatgtggcagtttattactgtcagcaatattataatagtccgtgcagttttggccaggggaccaagctggagatcaaa

SEQ ID NO: 26394 - protein, 113 aa, synthetic construct
  REGION 1..113: note = Description of Artificial Sequence: Synthetic polypeptide
DIVMTQSPDSLAVSLGERATINCKSSQSVLHSSNNNNYLAWYQQKPGQPPKLLIYWASTRESGVPDRFSGSGSGTDFTLTISSLQAEDVAVYYCQQYYNSPCSFGQGTKLEIK

SEQ ID NO: 26395 - DNA, 321 bp, synthetic construct
  misc_feature 1..321: note = Description of Artificial Sequence: Synthetic polynucleotide
  source 1..321: mol_type = other DNA
gacatccagatgacccagtctccatcctccctgtctgcatctgtaggagacagagtcaccatcacttgccgggcaagtcaggacattagaaaggatttagggtggtatcagcagaaaccagggaaagcccctaaccgcctgatctatgctgcatccagtttgcaaagtggggtcccatcaaggttcagcggcagtggatctgggacagaattcactctcacattcagcagcctgcagcctgaagattttgcaacttattactgtctacagcattatagttatcctcggacgttcggccaagggaccaaggtggaaatcaaa

SEQ ID NO: 26396 - protein, 107 aa, synthetic construct
  REGION 1..107: note = Description of Artificial Sequence: Synthetic polypeptide
DIQMTQSPSSLSASVGDRVTITCRASQDIRKDLGWYQQKPGKAPNRLIYAASSLQSGVPSRFSGSGSGTEFTLTFSSLQPEDFATYYCLQHYSYPRTFGQGTKVEIK

SEQ ID NO: 26397 - DNA, 321 bp, synthetic construct
  misc_feature 1..321: note = Description of Artificial Sequence: Synthetic polynucleotide
  source 1..321: mol_type = other DNA
gacattcagatgacccagtctccatcctccccgtctgcatctgtaggagacagagtcaccatcacttgccgggcaagtcagggcattagaaatgatttaggctggtatcagcagaaaccagggaaagcccctaagcgcttgatcaatgttgcatccagtttgcaaagtggggtcccatcaaggttcagcggcagtggatctgggacagaattcactcttacaatcagcagcgtgcagcctgaagattttgcaacttattactgtatacaggataatagtcacccattcactttcggccctgggaccaaagtggaaatcaaa

SEQ ID NO: 26398 - protein, 107 aa, synthetic construct
  REGION 1..107: note = Description of Artificial Sequence: Synthetic polypeptide
DIQMTQSPSSPSASVGDRVTITCRASQGIRNDLGWYQQKPGKAPKRLINVASSLQSGVPSRFSGSGSGTEFTLTISSVQPEDFATYYCIQDNSHPFTFGPGTKVEIK

SEQ ID NO: 26399 - DNA, 321 bp, synthetic construct
  misc_feature 1..321: note = Description of Artificial Sequence: Synthetic polynucleotide
  source 1..321: mol_type = other DNA
gacatccagatgacccagtctccatcctcactgtctgcatctgtaggagacagagtcaccatcacttgtcgggcgagtcaggacattagtaattatttagtctggtttcagcagaaattagggaaagcccctaagtccctgatctatgttgcatccagtttgcaaagtggggtcccatcaaggttcagcggcagtggatctgggacagatttcactctcaccatcagcagcctgcagcctgaagattttgcaacttattactgccaacagtataatagttaccctctcactttcggcggagggaccaaagtagagatcaaa

SEQ ID NO: 26400 - protein, 107 aa, synthetic construct
  REGION 1..107: note = Description of Artificial Sequence: Synthetic polypeptide
DIQMTQSPSSLSASVGDRVTITCRASQDISNYLVWFQQKLGKAPKSLIYVASSLQSGVPSRFSGSGSGTDFTLTISSLQPEDFATYYCQQYNSYPLTFGGGTKVEIK

SEQ ID NO: 26401 - DNA, 321 bp, synthetic construct
  misc_feature 1..321: note = Description of Artificial Sequence: Synthetic polynucleotide
  source 1..321: mol_type = other DNA
gacatccagatgacccagtctccatcctccccgtctgcatctgtaggagacagagtcaccatcacttgccgggcaagtcagggcattagaaatgatttaggctggtatcagcagaaaccagggacagcccctaagcgccttatctatgctgcatccagtttgcaaagtggggtcccatcaaggttcagcggcagtggatctgggacagaattcactctcacaatcagcaacctgcagcctgaggattttgcaacttattactgtctacagcatagtagttacccgctcactttcggcggcgggaccaaggtggagatcaaa

SEQ ID NO: 26402 - protein, 107 aa, synthetic construct
  REGION 1..107: note = Description of Artificial Sequence: Synthetic polypeptide
DIQMTQSPSSPSASVGDRVTITCRASQGIRNDLGWYQQKPGTAPKRLIYAASSLQSGVPSRFSGSGSGTEFTLTISNLQPEDFATYYCLQHSSYPLTFGGGTKVEIK

SEQ ID NO: 26403 - DNA, 336 bp, synthetic construct
  misc_feature 1..336: note = Description of Artificial Sequence: Synthetic polynucleotide
  source 1..336: mol_type = other DNA
gctattgtgatgacccagactccactctctctgtccgtcacccctggacagccggcctccatctcctgcaagtctagtcagagcctcctgcacggtgatggaaagacctatttgtattggtacctgcagaagccaggccagcctccacacctcctgatctatgaagtttccaaacggttctctggagtgccagataggttcagtggcagcgggtcagggacagatttcacactgaaaatcagccgggtggaggctgaggatgttgggctttattactgcatgcaaagtatacagcttccgtggacgtttgtccaagggaccaaggtggaaatcaca

SEQ ID NO: 26404 - protein, 112 aa, synthetic construct
  REGION 1..112: note = Description of Artificial Sequence: Synthetic polypeptide
AIVMTQTPLSLSVTPGQPASISCKSSQSLLHGDGKTYLYWYLQKPGQPPHLLIYEVSKRFSGVPDRFSGSGSGTDFTLKISRVEAEDVGLYYCMQSIQLPWTFVQGTKVEIT

SEQ ID NO: 26405 - DNA, 318 bp, synthetic construct
  misc_feature 1..318: note = Description of Artificial Sequence: Synthetic polynucleotide
  source 1..318: mol_type = other DNA
gaaatagtgatgacgcagtctccagccaccctgtctgtgtctccaggggaaagagcctccctctcctgcaggtccagtcagagtgttaacagcaacttagcctggtaccagcagaggcctggccaggctctcaggctcctcatctatggtgcatccatcagggccactgatatcccagccaggttcaatggcagtgggtctgggacagagttcactctcaccatcagcagcctgcagtctgaagattttgcagtttatttctgtcagcagtataataactggtggacgttcggccaagggaccacggtggaaatcaaa

SEQ ID NO: 26406 - protein, 106 aa, synthetic construct
  REGION 1..106: note = Description of Artificial Sequence: Synthetic polypeptide
EIVMTQSPATLSVSPGERASLSCRSSQSVNSNLAWYQQRPGQALRLLIYGASIRATDIPARFNGSGSGTEFTLTISSLQSEDFAVYFCQQYNNWWTFGQGTTVEIK

SEQ ID NO: 26407 - DNA, 321 bp, synthetic construct
  misc_feature 1..321: note = Description of Artificial Sequence: Synthetic polynucleotide
  source 1..321: mol_type = other DNA
gacatccagatgacccagtctccatcctccctgtctgcatctgtaggagacagagtcaccatcacttgccaggcgagtcaggacatttacaattatttaaattggtatcagcagaaaccagggaaagcccctaagctcctgatctacgatgcatccaatttggaaacaggggtcccatcaaggttcagtggaagtggatctgggacagattttactttcgccatcagcagcctgcagcctgaagatattgcaacatattactgtcaacagtatgatattctcccgatcaccttcggccaagggacacgactggagattaaa

SEQ ID NO: 26408 - protein, 107 aa, synthetic construct
  REGION 1..107: note = Description of Artificial Sequence: Synthetic polypeptide
DIQMTQSPSSLSASVGDRVTITCQASQDIYNYLNWYQQKPGKAPKLLIYDASNLETGVPSRFSGSGSGTDFTFAISSLQPEDIATYYCQQYDILPITFGQGTRLEIK

SEQ ID NO: 26409 - DNA, 321 bp, synthetic construct
  misc_feature 1..321: note = Description of Artificial Sequence: Synthetic polynucleotide
  source 1..321: mol_type = other DNA
gacatccagatgacccagtctccatcctccctgtctgcatctgtaggcgacagagtcaccatcacttgccgggcaagtcagggcattagaaatgatttgggctggtatcagcagaaaccaggagaagcccctaagcgcctgatctatgctgcatccactttgcaaagtggggtcccatcgcggttcagcggcagtggatctggggcagaattcactgtcacaatcggcagcgtgcagcgtgaagattttgcaacttattacggtctactatatattcgttacccattcacttttggccgtgggaccaaagtggatatcaaa

SEQ ID NO: 26410 - protein, 107 aa, synthetic construct
  REGION 1..107: note = Description of Artificial Sequence: Synthetic polypeptide
DIQMTQSPSSLSASVGDRVTITCRASQGIRNDLGWYQQKPGEAPKRLIYAASTLQSGVPSRFSGSGSGAEFTVTIGSVQREDFATYYGLLYIRYPFTFGRGTKVDIK

SEQ ID NO: 26411 - DNA, 321 bp, synthetic construct
  misc_feature 1..321: note = Description of Artificial Sequence: Synthetic polynucleotide
  source 1..321: mol_type = other DNA
gacatccagatgacccagtctccatcctccctgtctgcatctgtaggagacagagtcaccatcacttgccaggcgagtcaggacatttacaaccatttaagttggtatcagcagaaaccagggaaagcccctaagctcctgatctacgatgcatccaattgggaaacaggggtcccatccaggttcagtggaggtggatctgggacagattttactttcaccatcagcagcctgcagcctgaagattttgcaacatattactgtcaacagtatgaaaatctcccgctcaccttcggcggagggaccaaggtggagatcaaa

SEQ ID NO: 26412 - protein, 107 aa, synthetic construct
  REGION 1..107: note = Description of Artificial Sequence: Synthetic polypeptide
DIQMTQSPSSLSASVGDRVTITCQASQDIYNHLSWYQQKPGKAPKLLIYDASNWETGVPSRFSGGGSGTDFTFTISSLQPEDFATYYCQQYENLPLTFGGGTKVEIK

SEQ ID NO: 26413 - DNA, 321 bp, synthetic construct
  misc_feature 1..321: note = Description of Artificial Sequence: Synthetic polynucleotide
  source 1..321: mol_type = other DNA
gacatccagatgacccagtctccatcctccctgtctgcatctgtaggcgacagagtcaccatcacttgccgggcaagtcagggcattagaaatgatttgggctggtatcagcagaaaccaggagaagcccctaagcgcctgatctatgctgcatccactttgcaaagtggggtcccatcgcggttcagcggcagtggatctggggcagaattcactctcacaatcggcagcgtgcagcgtgaagattttgcaacttattacggtctacaatataatcgttacccattcacttttggccgtgggaccaaagtggatatcaaa

SEQ ID NO: 26414 - protein, 107 aa, synthetic construct
  REGION 1..107: note = Description of Artificial Sequence: Synthetic polypeptide
DIQMTQSPSSLSASVGDRVTITCRASQGIRNDLGWYQQKPGEAPKRLIYAASTLQSGVPSRFSGSGSGAEFTLTIGSVQREDFATYYGLQYNRYPFTFGRGTKVDIK

SEQ ID NO: 26415 - DNA, 321 bp, synthetic construct
  misc_feature 1..321: note = Description of Artificial Sequence: Synthetic polynucleotide
  source 1..321: mol_type = other DNA
gacatccagatgacccagtctccatcctcccggtctgcatctgtaggagacagagtcaccatcacttgccgggcaagtcaggacattagaaaggatttagggtggtatcagcagaaaccagggaaagcccctaaccgcctgatctatgctgcatccagtttgcaaagtggggtcccatcaaggttcagcggcagtggatctgggacagaattcactctcacattcagcagcctgcagcctgaagattttgcaacttattactgtctacagcatcatagttatcctcggacgttcggccaagggaccaaggtggaaatcaaa

SEQ ID NO: 26416 - protein, 107 aa, synthetic construct
  REGION 1..107: note = Description of Artificial Sequence: Synthetic polypeptide
DIQMTQSPSSRSASVGDRVTITCRASQDIRKDLGWYQQKPGKAPNRLIYAASSLQSGVPSRFSGSGSGTEFTLTFSSLQPEDFATYYCLQHHSYPRTFGQGTKVEIK

SEQ ID NO: 26417 - DNA, 321 bp, synthetic construct
  misc_feature 1..321: note = Description of Artificial Sequence: Synthetic polynucleotide
  source 1..321: mol_type = other DNA
gacattcagatgacccagtctccatcctccctgtgtgcatctgtaggagacagagtcaccatcacttgccgggcaagtcagggcattagaaatgatttaggctggtatcagcagaaaccagggaaagcccctaagcgcttgatcaatgctgcatccagtttgcaaagtggggtcccatcaaggttcagcggcagtggatctgggacagaattcactctcacaatcagcagcgtgcagcctgaagattttgcaacttattactgtatacaggataatagtcacccattcactttcggccctgggaccaaagtggaaatcaaa

SEQ ID NO: 26418 - protein, 107 aa, synthetic construct
  REGION 1..107: note = Description of Artificial Sequence: Synthetic polypeptide
DIQMTQSPSSLCASVGDRVTITCRASQGIRNDLGWYQQKPGKAPKRLINAASSLQSGVPSRFSGSGSGTEFTLTISSVQPEDFATYYCIQDNSHPFTFGPGTKVEIK

SEQ ID NO: 26419 - DNA, 321 bp, synthetic construct
  misc_feature 1..321: note = Description of Artificial Sequence: Synthetic polynucleotide
  source 1..321: mol_type = other DNA
gacattcagatgacccagtctccatcctccctgtctgcatctgtaggagacagagtcaccatcacttgccgggcaagtcagggcattagaaatgatttaggctggtatcagcagaaaccagggaaagcccctaagcgcttgatcaatgctgcatccagtttgcaaagtggggtcccatcaaggttcagcggcagtggatctgggacagaattcactctcacaatcagcagcctgcagcctgaagattttgcaacttattactgtctacaggataatagtcacccattcactttcggccctgggaccaaagtggaaatcaaa

SEQ ID NO: 26420 - protein, 107 aa, synthetic construct; identical to SEQ ID NO: 26356
  REGION 1..107: note = Description of Artificial Sequence: Synthetic polypeptide

SEQ ID NO: 26421 - DNA, 339 bp, synthetic construct
  misc_feature 1..339: note = Description of Artificial Sequence: Synthetic polynucleotide
  source 1..339: mol_type = other DNA
gacattgtgatgacccagtctccagacttccgtaatgtgtctatgggcgagagggccatcatcaacttcaagtccaaccatagtgttttatacaggtccaacaataatcaatacttagcttggtaccagcggaaaccaggacagcctcctaagttgctcatttaccggacatctatccggaaatccggggtccctgaccgattcagtggcagcgggtgtgggacagatttcactctcaccatcgacagcctgcaggctgaagatgtggcagtttattactgtcagcaatattatagtactcctcccactttcggcggagggaccaaggtggagatcaaa

SEQ ID NO: 26422 - protein, 113 aa, synthetic construct
  REGION 1..113: note = Description of Artificial Sequence: Synthetic polypeptide
DIVMTQSPDFRNVSMGERAIINFKSNHSVLYRSNNNQYLAWYQRKPGQPPKLLIYRTSIRKSGVPDRFSGSGCGTDFTLTIDSLQAEDVAVYYCQQYYSTPPTFGGGTKVEIK

SEQ ID NO: 26423 - DNA, 339 bp, synthetic construct
  misc_feature 1..339: note = Description of Artificial Sequence: Synthetic polynucleotide
  source 1..339: mol_type = other DNA
gacatcgtgatgacccagtctccagactccctggctgtgtctctgggcgagagggccaccatcaactgcaagtccagccagaatgttttacacagctccaacaataacaactacttaacttggtaccagcagagaccaggacagcctcctaagttgctcatttactgggcatctacccgggaatccggggtccctgaccgattcagtggcagcgggtctgggacagaattcactctcaccatcagcagcctgcaggctgaagatgtggcagtttattactgtcagcaatattatagtactcctccgacgttcggccaagggaccaaggtggaaatcaaa

SEQ ID NO: 26424 - protein, 113 aa, synthetic construct
  REGION 1..113: note = Description of Artificial Sequence: Synthetic polypeptide
DIVMTQSPDSLAVSLGERATINCKSSQNVLHSSNNNNYLTWYQQRPGQPPKLLIYWASTRESGVPDRFSGSGSGTEFTLTISSLQAEDVAVYYCQQYYSTPPTFGQGTKVEIK

SEQ ID NO: 26425 - DNA, 336 bp, synthetic construct
  misc_feature 1..336: note = Description of Artificial Sequence: Synthetic polynucleotide
  source 1..336: mol_type = other DNA
gatattgtgatgacccagactccactctctctgtccgtcacccctggacagccggcctccatctcctgcaagtctactcagagcctcctgcatggtgatggaaagacctatttgtattggtacctgcagaagccaggccagcctccacaactcctgatctatgaagtttccaagcggttctctggagtgccagaaaggttcagtggcagcgggtcagggacagatttcacactgaaaatcagccgggtggaggctgaggatgttggggtttattactgcaagcaaagtatacagcttccgtggacgttcggccaagggaccaaggtggaaatcaaa

SEQ ID NO: 26426 - protein, 112 aa, synthetic construct
  REGION 1..112: note = Description of Artificial Sequence: Synthetic polypeptide
DIVMTQTPLSLSVTPGQPASISCKSTQSLLHGDGKTYLYWYLQKPGQPPQLLIYEVSKRFSGVPERFSGSGSGTDFTLKISRVEAEDVGVYYCKQSIQLPWTFGQGTKVEIK

SEQ ID NO: 26427 - DNA, 321 bp, synthetic construct
  misc_feature 1..321: note = Description of Artificial Sequence: Synthetic polynucleotide
  source 1..321: mol_type = other DNA
gacatccagatgacccagtctccatcctcactgtctgcatctgtaggagacagagtcaccatcacttgtcgggcgagtcaggacattagcaattatttagcctggtttcagcagaaaccagggaaagcccctaagtccctgatctatgctgcatccagtttgcaaagtggggtcccatcaaagttcagcggcagtggatctgggacagatttcactctcaccatcagcagcctgcagcctgaagattttgcagcttattactgccaacagtataatagttacccattcactttcggccctgggacccaagtggatgcccaa

SEQ ID NO: 26428 - protein, 107 aa, synthetic construct
  REGION 1..107: note = Description of Artificial Sequence: Synthetic polypeptide
DIQMTQSPSSLSASVGDRVTITCRASQDISNYLAWFQQKPGKAPKSLIYAASSLQSGVPSKFSGSGSGTDFTLTISSLQPEDFAAYYCQQYNSYPFTFGPGTQVDAQ

SEQ ID NO: 26429 - DNA, 321 bp, synthetic construct
  misc_feature 1..321: note = Description of Artificial Sequence: Synthetic polynucleotide
  source 1..321: mol_type = other DNA
gacatccagatgacccagtctccatcctccctgtctgcatctgtaggagacagagtcaccatcacttgccgggcaagtcaggacattagaaatgatttaggctggtatcagcagaaaccagggaaagcccctacgcgcctgatctatcctgcatccagtttgcaaagtggggtcccatcaaggttcagcggcagtggatctgggacagaattcactctctcaatcagtagcctgcagcctgaagattttgcaacttattactgtctacagcataatagtcacccattcactttcggccctgggaccaaagtggatatcaaa

SEQ ID NO: 26430 - protein, 107 aa, synthetic construct
  REGION 1..107: note = Description of Artificial Sequence: Synthetic polypeptide
DIQMTQSPSSLSASVGDRVTITCRASQDIRNDLGWYQQKPGKAPTRLIYPASSLQSGVPSRFSGSGSGTEFTLSISSLQPEDFATYYCLQHNSHPFTFGPGTKVDIK

SEQ ID NO: 26431 - DNA, 321 bp, synthetic construct
  misc_feature 1..321: note = Description of Artificial Sequence: Synthetic polynucleotide
  source 1..321: mol_type = other DNA
gacatccagatgacccagtctccatcctcactgtctgcatctgtaggagacagagtcaccatcacttgtcgggcgagtcaggacattagcaattatttagtctggtttcagcagaaaccagggaaagcccctaagtccctgatctatgctgcatccagtttgctaagtggggtcccttcaaagttcagcggcagtggatctgggacagatttcactctcaccatcagcagcctgcagcctgaagattttgcaacttattactgccaacagtatcatagttacccgctcactttcggcggagggaccaaggtggcgatcaaa

SEQ ID NO: 26432 - protein, 107 aa, synthetic construct
  REGION 1..107: note = Description of Artificial Sequence: Synthetic polypeptide
DIQMTQSPSSLSASVGDRVTITCRASQDISNYLVWFQQKPGKAPKSLIYAASSLLSGVPSKFSGSGSGTDFTLTISSLQPEDFATYYCQQYHSYPLTFGGGTKVAIK

SEQ ID NO: 26433 - DNA, 321 bp, synthetic construct
  misc_feature 1..321: note = Description of Artificial Sequence: Synthetic polynucleotide
  source 1..321: mol_type = other DNA
gacatccagatgacccagtctccatcctccctgtctgcatctgtaggagacagagtcaccatcacttgccgggcaagtcaggacattagagatgatttaggctggtatcagcagaaaccagggaaagcccctaagcgcctgatctatcctgcatccagtttgcaaagtggggtcccatcaaggttcagcggcagtggatctgggacagaattcactctcacaatcagcagcctgcagcctgaagattttgcagcttattactgtctacaggataatagttacccattcactttcggccctgggaccaaagtggatatcaaa

SEQ ID NO: 26434 - protein, 107 aa, synthetic construct
  REGION 1..107: note = Description of Artificial Sequence: Synthetic polypeptide
DIQMTQSPSSLSASVGDRVTITCRASQDIRDDLGWYQQKPGKAPKRLIYPASSLQSGVPSRFSGSGSGTEFTLTISSLQPEDFAAYYCLQDNSYPFTFGPGTKVDIK

SEQ ID NO: 26435 - DNA, 321 bp, synthetic construct
  misc_feature 1..321: note = Description of Artificial Sequence: Synthetic polynucleotide
  source 1..321: mol_type = other DNA
gacatccagatgacccagtctccatcctccctgtctgcatctgtaggagacagagtcaccatcacttgccgggcaagtcaggacattagaaataatttaggctggtatcagcagaaaccagggaaagcccctaagcgcctgatctatcctgcatccagtttgcaaagtggggtcccatcaaggttcagcggcagtggatctgggacagaattcactctcacaatcagcagcctgcagcctgaagattttgcaacttattactgtctacaggattatagttacccattcactttcggccctgggaccaaagtggatatcaaa

SEQ ID NO: 26436 - protein, 107 aa, synthetic construct
  REGION 1..107: note = Description of Artificial Sequence: Synthetic polypeptide
DIQMTQSPSSLSASVGDRVTITCRASQDIRNNLGWYQQKPGKAPKRLIYPASSLQSGVPSRFSGSGSGTEFTLTISSLQPEDFATYYCLQDYSYPFTFGPGTKVDIK

SEQ ID NO: 26437 - DNA, 339 bp, synthetic construct
  misc_feature 1..339: note = Description of Artificial Sequence: Synthetic polynucleotide
  source 1..339: mol_type = other DNA
gacatcgtgatgacccagtctccagactccctgactgtgtctccgggcgagagggccaccatcaactgcaagtccagccagagtgttttacacagctccaacaataagaactacttaacttggtaccagcagaaaccaggacagcctcctaaactgctcatttactgggcatctacccgagaatccggggtccctgtccgattcagtggcagcgggtcggggacagatttcactgtccccatcagcagcatgcaggatgatgatgtggcagtttattaccgtcagcaatcttatagtattcctcccactttcggccccgggaccaacgtggatatcaaa

SEQ ID NO: 26438 - protein, 113 aa, synthetic construct
  REGION 1..113: note = Description of Artificial Sequence: Synthetic polypeptide
DIVMTQSPDSLTVSPGERATINCKSSQSVLHSSNNKNYLTWYQQKPGQPPKLLIYWASTRESGVPVRFSGSGSGTDFTVPISSMQDDDVAVYYRQQSYSIPPTFGPGTNVDIK

SEQ ID NO: 26439 - DNA, 321 bp, synthetic construct
  misc_feature 1..321: note = Description of Artificial Sequence: Synthetic polynucleotide
  source 1..321: mol_type = other DNA
gacatccagatgacccagtctccatcctcactgtctacatctgtaggagacagagtcaccatcacttgtcgggcgagtcaggacattagccattatttagcctggtttcagcagaaaccagggaaagcccctaagtccctgatctatgctgcatccagtttgcaaagtggggtcccatcaaagttcagcggcagtggatctgggacagatttcactctcaccatcagcagcctgcagcctgaagattttgcaacttattactgccaacagtataatagtttcccgctcactttcggcggagggaccaaggtggagatcaca

SEQ ID NO: 26440 - protein, 107 aa, synthetic construct
  REGION 1..107: note = Description of Artificial Sequence: Synthetic polypeptide
DIQMTQSPSSLSTSVGDRVTITCRASQDISHYLAWFQQKPGKAPKSLIYAASSLQSGVPSKFSGSGSGTDFTLTISSLQPEDFATYYCQQYNSFPLTFGGGTKVEIT

SEQ ID NO: 26441 - DNA, 336 bp, synthetic construct
  misc_feature 1..336: note = Description of Artificial Sequence: Synthetic polynucleotide
  source 1..336: mol_type = other DNA
gatattgtgatgacccagactccactctctctgtccgtcacccctggacagccggcctccatctcctgtaagtctagtcagagcctcctgcacggtgatgggaagacctatttgtattggtacctgcagaagccaggccagcctccacacctcctgatctatgaagtttccaaacggttctctggagtgccagataggttcagtggcagcgggtcagggacagatttcacactgaagatcagccgggtggaggctgaggatgttgggctttatcactgcatgcaaagcatacagcttccgtggacgttcggccaagggaccaaggtggaaatcaaa

SEQ ID NO: 26442 - protein, 112 aa, synthetic construct
  REGION 1..112: note = Description of Artificial Sequence: Synthetic polypeptide
DIVMTQTPLSLSVTPGQPASISCKSSQSLLHGDGKTYLYWYLQKPGQPPHLLIYEVSKRFSGVPDRFSGSGSGTDFTLKISRVEAEDVGLYHCMQSIQLPWTFGQGTKVEIK

SEQ ID NO: 26443 - DNA, 336 bp, synthetic construct
  misc_feature 1..336: note = Description of Artificial Sequence: Synthetic polynucleotide
  source 1..336: mol_type = other DNA
gatattgtgatgacccagactccactctctctgtccgtcacccctggacagccggcctccatctcctgcaagtctagtcagagcctcctgcacggtgatggaaagacctatttgtattggtacctgcagaagccaggccagcctccacacctcctgatctatgaagtttccaaacggttctctggagtgccagataggttcagtggcagcgggtcagggacagatttcacactgaaaatcagccgggtggaggctgaggatgttgggctttatcactgcatgcaaagcatacagcttccgtggacgttcggccaagggaccaaggtggaaatcaaa

SEQ ID NO: 26444 - protein, 112 aa, synthetic construct; identical to SEQ ID NO: 26442
  REGION 1..112: note = Description of Artificial Sequence: Synthetic polypeptide

SEQ ID NO: 26445 - DNA, 321 bp, synthetic construct
  misc_feature 1..321: note = Description of Artificial Sequence: Synthetic polynucleotide
  source 1..321: mol_type = other DNA
gacatccagatgacccagtctccatcctcactgtctgcatctgtaggggacagagtcaccatcacttgtcgggcgagtcagggcattaacaattatttagcctggtttcagcagaaaccagggaaagcccctgagtccctgatctatgctgcatccagtttgcaaagtggggtcccatcaaagttcagcggcagtggatctgggacagatttcactctcaccatcagcagcctgcagcctgaagattttgcaacttatttctgccaacagtataatagttatccattcactttcggccctgggaccaaagtggatatcaaa

SEQ ID NO: 26446 - protein, 107 aa, synthetic construct
  REGION 1..107: note = Description of Artificial Sequence: Synthetic polypeptide
DIQMTQSPSSLSASVGDRVTITCRASQGINNYLAWFQQKPGKAPESLIYAASSLQSGVPSKFSGSGSGTDFTLTISSLQPEDFATYFCQQYNSYPFTFGPGTKVDIK

SEQ ID NO: 26447 - DNA, 321 bp, synthetic construct
  misc_feature 1..321: note = Description of Artificial Sequence: Synthetic polynucleotide
  source 1..321: mol_type = other DNA
gacatccagatgacccaatctccatcctccctgtctgcatctgtaggagacagagtcaccatcacttgccgggctagtcagggcattagaaatgatttaggctggtatcagcagaaaccagggaaagcccctaagcgcctgatcggtgctgaatccagtttgcaaagtggggtcccatcaaggttcagcggcagtggatctgggacagaattcactctcacaatcagcggcctgcagcctgaagattttgcaacttattactgtctacagcattatagttacccgctcactttcggcggagggaccaaagtggagatcaaa

SEQ ID NO: 26448 - protein, 107 aa, synthetic construct
  REGION 1..107: note = Description of Artificial Sequence: Synthetic polypeptide
DIQMTQSPSSLSASVGDRVTITCRASQGIRNDLGWYQQKPGKAPKRLIGAESSLQSGVPSRFSGSGSGTEFTLTISGLQPEDFATYYCLQHYSYPLTFGGGTKVEIK

SEQ ID NO: 26449 - DNA, 336 bp, synthetic construct
  misc_feature 1..336: note = Description of Artificial Sequence: Synthetic polynucleotide
  source 1..336: mol_type = other DNA
gacatcgtgatgacccagtctccagactccctggctgtgtctctgggcgagagggccaccatcaactgcaagtccagccagagtgttttatacatctccaacaataaaaactacttagcttggtaccagcagaaaccaggacagcctcctaaactgctcatttactgggcatctacccgggaatccggggtccctgaccgattcagtggcagcgggtctgggacagatttcactctcaccatcagcagcctgcaggctgaagatgtggcagtttattactgtcagcaatattatcgtgctcccaccttcggccaagggacacgactggagattaaa

SEQ ID NO: 26450 - protein, 112 aa, synthetic construct
  REGION 1..112: note = Description of Artificial Sequence: Synthetic polypeptide
DIVMTQSPDSLAVSLGERATINCKSSQSVLYISNNKNYLAWYQQKPGQPPKLLIYWASTRESGVPDRFSGSGSGTDFTLTISSLQAEDVAVYYCQQYYRAPTFGQGTRLEIK

SEQ ID NO: 26451 - DNA, 336 bp, synthetic construct
  misc_feature 1..336: note = Description of Artificial Sequence: Synthetic polynucleotide
  source 1..336: mol_type = other DNA
gacattgtgatgactcagtctccactctccctgcccgtcacccctggagagccggcctccatctcctgcaggtctagtcagagcctcctgcataataatggatacaagtatttggattggtacctgcagaagccagggcagtctccacagctcctgatctatttgggttctaatcgggcctccggggtccctgacaggttcagtgccagtggatcaggcacagattttacactgaaaatcagcagagtggaggctgaggatgttggggtttattactgcatgcaagttctacaaactccgtggacgttcggccaagggaccaaggtggaaatcaaa

SEQ ID NO: 26452 - protein, 112 aa, synthetic construct
  REGION 1..112: note = Description of Artificial Sequence: Synthetic polypeptide
DIVMTQSPLSLPVTPGEPASISCRSSQSLLHNNGYKYLDWYLQKPGQSPQLLIYLGSNRASGVPDRFSASGSGTDFTLKISRVEAEDVGVYYCMQVLQTPWTFGQGTKVEIK

SEQ ID NO: 26453 - DNA, 321 bp, synthetic construct
  misc_feature 1..321: note = Description of Artificial Sequence: Synthetic polynucleotide
  source 1..321: mol_type = other DNA
gacatccagatgacccagtctccatcctccctgtctgcatctgtaggagacagagtcaccatcacttgccgggcaagtcagggcattagaaatgatttaggctggtatcagcagaaaccagggaaagcccctaagcgcctgatctttgctgcatccagtttgcaaagtggggtcccatcaaggttcagcggcagtggatctgggacagaattcactctcacaatcagcagcctgcagcctgaagattttgcaacttattactgtctacagcattatagttacccgctcactttcggcggagggaccaaggtggagatcaaa

SEQ ID NO: 26454 - protein, 107 aa, synthetic construct
  REGION 1..107: note = Description of Artificial Sequence: Synthetic polypeptide
DIQMTQSPSSLSASVGDRVTITCRASQGIRNDLGWYQQKPGKAPKRLIFAASSLQSGVPSRFSGSGSGTEFTLTISSLQPEDFATYYCLQHYSYPLTFGGGTKVEIK

SEQ ID NO: 26455 - DNA, 336 bp, synthetic construct; identical to SEQ ID NO: 26449
  misc_feature 1..336: note = Description of Artificial Sequence: Synthetic polynucleotide
  source 1..336: mol_type = other DNA

SEQ ID NO: 26456 - protein, 112 aa, synthetic construct; identical to SEQ ID NO: 26450
  REGION 1..112: note = Description of Artificial Sequence: Synthetic polypeptide

SEQ ID NO: 26457 - DNA, 336 bp, synthetic construct; identical to SEQ ID NO: 26451
  misc_feature 1..336: note = Description of Artificial Sequence: Synthetic polynucleotide
  source 1..336: mol_type = other DNA

SEQ ID NO: 26458 - protein, 112 aa, synthetic construct; identical to SEQ ID NO: 26452
  REGION 1..112: note = Description of Artificial Sequence: Synthetic polypeptide

SEQ ID NO: 26459 - DNA, 321 bp, synthetic construct
  misc_feature 1..321: note = Description of Artificial Sequence: Synthetic polynucleotide
  source 1..321: mol_type = other DNA
gacatccagatgacccagtctccatcctccctgtctgcatctgtaggagacagagtcaccatcacttgccgggcaagtcagggcattagaaatgatttaggctggtatcagcagaaaccagggaaagcccctaagcgcctgatctatgctgcatccagtttgcaaagtggggtcccatcaaggttcagcggcagtggatctgggacagaattcactctcacaatcagcagcctgcagcctgaagattttgcaacttattactgtctacagcatcatagttgcccgtggacgttcggccaagggaccaaggtggaaatcaaa

SEQ ID NO: 26460 - protein, 107 aa, synthetic construct
  REGION 1..107: note = Description of Artificial Sequence: Synthetic polypeptide
DIQMTQSPSSLSASVGDRVTITCRASQGIRNDLGWYQQKPGKAPKRLIYAASSLQSGVPSRFSGSGSGTEFTLTISSLQPEDFATYYCLQHHSCPWTFGQGTKVEIK

SEQ ID NO: 26461 - DNA, 321 bp, synthetic construct
  misc_feature 1..321: note = Description of Artificial Sequence: Synthetic polynucleotide
  source 1..321: mol_type = other DNA
gacatccagatgacccagtctccatcctcactgtctgcatctgtaggagacagagtcaccatcacttgtcgggcgagtcaggacattagcaattatttagcctggtttcagcagaaaccagggaaagcccctaagtccctaatcttttctgcatccagtttgcaaagtggggtcccatcaaaattcagcggcagtggatctgggacagatttcaatctcaccatcagcagcctgcagcctgaagattttgcaacttattactgccaacaatctgatagttaccctctcactttcggcggagggaccaaggtggagatcaaa

SEQ ID NO: 26462 - protein, 107 aa, synthetic construct
  REGION 1..107: note = Description of Artificial Sequence: Synthetic polypeptide
DIQMTQSPSSLSASVGDRVTITCRASQDISNYLAWFQQKPGKAPKSLIFSASSLQSGVPSKFSGSGSGTDFNLTISSLQPEDFATYYCQQSDSYPLTFGGGTKVEIK

SEQ ID NO: 26463 - DNA, 321 bp, synthetic construct
  misc_feature 1..321: note = Description of Artificial Sequence: Synthetic polynucleotide
  source 1..321: mol_type = other DNA
gacatccagatgacccagtctccatcttcactgtctgcatctgtaggagacagagtcaccatcacttgtcgggcgagtcaggacattagcaattatttagcctggtttcagcagaaaccagggaaagcccctaagtccctgatctatgctgcatccagtttgcaaagtggggtcccatcaaagttcagcggcagtggatctgggacagatttcactctcaccatcagcagcctgcagcctgaagattttgcaacttattactgccaacagtatcatagttacccattcactttcggccctgggaccaaagtggatatcaaa

SEQ ID NO: 26464 - protein, 107 aa, synthetic construct
  REGION 1..107: note = Description of Artificial Sequence: Synthetic polypeptide
DIQMTQSPSSLSASVGDRVTITCRASQDISNYLAWFQQKPGKAPKSLIYAASSLQSGVPSKFSGSGSGTDFTLTISSLQPEDFATYYCQQYHSYPFTFGPGTKVDIK

SEQ ID NO: 26465 - DNA, 321 bp, synthetic construct
  misc_feature 1..321: note = Description of Artificial Sequence: Synthetic polynucleotide
  source 1..321: mol_type = other DNA
gacatccagatgacccagtctccatcctccctgtctgcatctgtaggagacagagtcaccatcacttgccgggcaagtcagggcattagagatgatttaggctggtatcaacagaaaccagggaaagtccctaagcgcctgatatatgctgcatccagtttgcaaagtggggtcccatcaaggttcagcggcagtggatctgggacagaattcactctcacaatcagcagcctacagcctgaagattttgcaacttattactgtcttcagcattatagttaccctcggacgttcggccaagggaccaaggtggaaatcaaa

SEQ ID NO: 26466 - protein, 107 aa, synthetic construct
  REGION 1..107: note = Description of Artificial Sequence: Synthetic polypeptide
DIQMTQSPSSLSASVGDRVTITCRASQGIRDDLGWYQQKPGKVPKRLIYAASSLQSGVPSRFSGSGSGTEFTLTISSLQPEDFATYYCLQHYSYPRTFGQGTKVEIK

SEQ ID NO: 26467 - DNA, 336 bp, synthetic construct
  misc_feature 1..336: note = Description of Artificial Sequence: Synthetic polynucleotide
  source 1..336: mol_type = other DNA
gagattgtgatgacccagactccactcttcctgtccgtcacccctggacagccggcctccatctcctgcaagtctagtcagagcctcctgcatggtgatggaaagacctatttgttttggtacctgcagaagccaggccagcctccacaggtcctgatctatgaagtttccaaccggttctctggagtgccagataggttcagtggcagcgggtcagggacagatttcacactgaaaatcagccgggtggaggctgaggatgttggggtttattactgcatgcaaagtattcagcttccgtggacgttcggccaagggaccaaggtggaaatcaaa

SEQ ID NO: 26468 - protein, 112 aa, synthetic construct
  REGION 1..112: note = Description of Artificial Sequence: Synthetic polypeptide
EIVMTQTPLFLSVTPGQPASISCKSSQSLLHGDGKTYLFWYLQKPGQPPQVLIYEVSNRFSGVPDRFSGSGSGTDFTLKISRVEAEDVGVYYCMQSIQLPWTFGQGTKVEIK

SEQ ID NO: 26469 - DNA, 321 bp, synthetic construct
  misc_feature 1..321: note = Description of Artificial Sequence: Synthetic polynucleotide
  source 1..321: mol_type = other DNA
gacatccagatgacccagtctccatcctcactgtctgcatctgaaggagacagagtcaccatcacttgtcgggcgagtcagggcattagcaattatttagcctggtttcagcagaaaccagggaaagcccctaagtccctgatctatgctgcatccagtttgcaaagtggggtcccatcaaagttcagcggcagtggatctgggacagatttcactctcaccatcagcagcctgcagcctgaagattttgcaacttattactgccaacagtatcatagttacccattcactttcggccctgggaccaaagtggatatcaaa

SEQ ID NO: 26470 - protein, 107 aa, synthetic construct
  REGION 1..107: note = Description of Artificial Sequence: Synthetic polypeptide
DIQMTQSPSSLSASEGDRVTITCRASQGISNYLAWFQQKPGKAPKSLIYAASSLQSGVPSKFSGSGSGTDFTLTISSLQPEDFATYYCQQYHSYPFTFGPGTKVDIK

SEQ ID NO: 26471 - DNA, 321 bp, synthetic construct
  misc_feature 1..321: note = Description of Artificial Sequence: Synthetic polynucleotide
  source 1..321: mol_type = other DNA
gacatccagatgacccagtctccatcctccctgtctgcatctgtaggagacagagtcaccatcacttgccgggcaagtcagggcattagaaatgatttaggctggtatcagcagaaaccagggaaagcccctaagcgcctgatctatgctacatccagtttgcaaagtggggtcccatcaaggttcagcggcagtggatctgggacagaattcactctcacaatcagcagcctgcagcctgaagattttgcaacttattattgtctacagcatagtagtaacccgtggacgttcggccaagggaccaaggtggaaagcaaa

SEQ ID NO: 26472 - protein, 107 aa, synthetic construct
  REGION 1..107: note = Description of Artificial Sequence: Synthetic polypeptide
DIQMTQSPSSLSASVGDRVTITCRASQGIRNDLGWYQQKPGKAPKRLIYATSSLQSGVPSRFSGSGSGTEFTLTISSLQPEDFATYYCLQHSSNPWTFGQGTKVESK

SEQ ID NO: 26473 - DNA, 321 bp, synthetic construct
  misc_feature 1..321: note = Description of Artificial Sequence: Synthetic polynucleotide
  source 1..321: mol_type = other DNA
gacatccagatgacccagtctccatcctccctgtctgcttctgtacaagacagagtcaccatcacttgccgggcaagtcggggcattagaaatgatttaggctggtatcagcagaaaccagggaaagcccctaagcgcctgatctatgctgcatccagtttgcaaagtggggtcccatcaaggttcagcggcagtggatctgggacagaattcactctcacaatcaacagcctgcagcctgaagattttgcaacttattactgtctacagcattatagttaccctcggacgttcggccaagggaccaaggtggaaatcaaa

SEQ ID NO: 26474 - protein, 107 aa, synthetic construct
  REGION 1..107: note = Description of Artificial Sequence: Synthetic polypeptide
DIQMTQSPSSLSASVQDRVTITCRASRGIRNDLGWYQQKPGKAPKRLIYAASSLQSGVPSRFSGSGSGTEFTLTINSLQPEDFATYYCLQHYSYPRTFGQGTKVEIK

SEQ ID NO: 26475 - DNA, 321 bp, synthetic construct
  misc_feature 1..321: note = Description of Artificial Sequence: Synthetic polynucleotide
  source 1..321: mol_type = other DNA
gacatccagatgacccagtctccatcctccctgtctgcatctgtaggagacagagtcaccatcacttgccgggcaagtcagggcattagaaatgatttaggctggtatcaccagaaaccggggaaagcccctaagcgcctgatctatgctgcatccactttgcaaagtggggtcccatcaaggttcagcggcagtggatctgggacagaattcactctcacaatcagcagcctgcagcctgaagattttgcaacttattactgtctacagcattatagttacccgctcactttcggcggagggaccaaggtggagatcaaa

SEQ ID NO: 26476 - protein, 107 aa, synthetic construct
  REGION 1..107: note = Description of Artificial Sequence: Synthetic polypeptide
DIQMTQSPSSLSASVGDRVTITCRASQGIRNDLGWYHQKPGKAPKRLIYAASTLQSGVPSRFSGSGSGTEFTLTISSLQPEDFATYYCLQHYSYPLTFGGGTKVEIK

SEQ ID NO: 26477 - DNA, 321 bp, synthetic construct
  misc_feature 1..321: note = Description of Artificial Sequence: Synthetic polynucleotide
  source 1..321: mol_type = other DNA
gacatccagatgacccagtctccatcctccctgtctgcatctgtcggagacagagtcaccatcacttgccgggcaagtcagggcattagaaatgatttaggctggtatcaggagaaaccagggaaagcccctaaacacctgatctatgctgcatccagtttgcaaaatggggtcccatcaaggttcagcggcagtggatctgggacagagttcactctcacaatcagcagcctgcagcctgaagattttgcaacttattactgtctacagcattatagtttcccgctcactttcggcggagggaccaaggtggagatcaaa

SEQ ID NO: 26478 - protein, 107 aa, synthetic construct
  REGION 1..107: note = Description of Artificial Sequence: Synthetic polypeptide
DIQMTQSPSSLSASVGDRVTITCRASQGIRNDLGWYQEKPGKAPKHLIYAASSLQNGVPSRFSGSGSGTEFTLTISSLQPEDFATYYCLQHYSFPLTFGGGTKVEIK

SEQ ID NO: 26479 - DNA, 321 bp, synthetic construct
  misc_feature 1..321: note = Description of Artificial Sequence: Synthetic polynucleotide
  source 1..321: mol_type = other DNA
gacatccagatgacccagtctccatcctccctgtctgcatctgtaggagacagagtcaccatcacttgccgggcaagtcagggcattagaactgatttaggctggtttcagcagaaaccagggaaagcccctaagcgcctgatctatactgcatccagtttgcaaagtggggtcccatcaaggttcagcggcagtggatctgggacagaattcactctcacgatcagcagcctgcagcctgaagattttgcaacttattactgtctacagcattatagttacccgctcactttcggcggagggaccaaggtggagatcaaa

SEQ ID NO: 26480 - protein, 107 aa, synthetic construct
  REGION 1..107: note = Description of Artificial Sequence: Synthetic polypeptide
DIQMTQSPSSLSASVGDRVTITCRASQGIRTDLGWFQQKPGKAPKRLIYTASSLQSGVPSRFSGSGSGTEFTLTISSLQPEDFATYYCLQHYSYPLTFGGGTKVEIK

SEQ ID NO: 26481 - DNA, 321 bp, synthetic construct
  misc_feature 1..321: note = Description of Artificial Sequence: Synthetic polynucleotide
  source 1..321: mol_type = other DNA
gacatccagatgacccagtctccatcctctctgtctgcatctgtaggagacagagtcgccatcacttgtcgggcgagtcaggacattggcaattgtttagcctggtttcagcagaaaccagggaaagcccctaagtccctgatctattctgcgtccagtttgcaaagtggggtcccatcaaagttcagcggcagtggatctgggacagatttcactctcaccatcagcagcctgcagcctgaagattttgcaacttattactgccaacaatctgatagttaccctctcactttcggcggagggaccaaggtggagatcaaa

SEQ ID NO: 26482 - protein, 107 aa, synthetic construct
  REGION 1..107: note = Description of Artificial Sequence: Synthetic polypeptide
DIQMTQSPSSLSASVGDRVAITCRASQDIGNCLAWFQQKPGKAPKSLIYSASSLQSGVPSKFSGSGSGTDFTLTISSLQPEDFATYYCQQSDSYPLTFGGGTKVEIK

SEQ ID NO: 26483 - DNA, 339 bp, synthetic construct
  misc_feature 1..339: note = Description of Artificial Sequence: Synthetic polynucleotide
  source 1..339: mol_type = other DNA
gacatcgtgatgacccagtctccagactccctggctgtgtctctgggcgcgagggccaccatcaactgcaagtccagccagagtgttttacacagctccaacaattacaactacttagcttggtaccagcagagaccaggacagcctcctaaagtgctcattcactgggcatctacccggaaatccggggtccctgaccgattcagtggcagcgtgtctgggacagatttcactctcaccatcaacagcctgcaggctgaagatgtggcagtttattactgtcagcaatattatagtactccgtggacgttcggccaagggaccaaggtggaaatcaaa

SEQ ID NO: 26484 - protein, 113 aa, synthetic construct
  REGION 1..113: note = Description of Artificial Sequence: Synthetic polypeptide
DIVMTQSPDSLAVSLGARATINCKSSQSVLHSSNNYNYLAWYQQRPGQPPKVLIHWASTRKSGVPDRFSGSVSGTDFTLTINSLQAEDVAVYYCQQYYSTPWTFGQGTKVEIK

SEQ ID NO: 26485 - DNA, 321 bp, synthetic construct
  misc_feature 1..321: note = Description of Artificial Sequence: Synthetic polynucleotide
  source 1..321: mol_type = other DNA
gacatccagatgacccagtctccatcctccctgtctgcatctgtcggagacagagtcaccatcacttgccgggcaagtcagggcattagaaatgatttaggctggtatcagcagaaaccagggaaagcccctaaacacctgatctatgctgcatccagtttgcaaaatggggtcccatcaaggttcagcggcagtggatctgggacagaattcactctcacaatcagcagcctgcagcctgaagattttgcaacttattactgtctacagcattatagtttcccgctcactttcggcggagggaccaaggtggagatcaga

SEQ ID NO: 26486 - protein, 107 aa, synthetic construct
  REGION 1..107: note = Description of Artificial Sequence: Synthetic polypeptide
DIQMTQSPSSLSASVGDRVTITCRASQGIRNDLGWYQQKPGKAPKHLIYAASSLQNGVPSRFSGSGSGTEFTLTISSLQPEDFATYYCLQHYSFPLTFGGGTKVEIR

SEQ ID NO: 26487 - DNA, 321 bp, synthetic construct; identical to SEQ ID NO: 26479
  misc_feature 1..321: note = Description of Artificial Sequence: Synthetic polynucleotide
  source 1..321: mol_type = other DNA

SEQ ID NO: 26488 - protein, 107 aa, synthetic construct; identical to SEQ ID NO: 26480
  REGION 1..107: note = Description of Artificial Sequence: Synthetic polypeptide

SEQ ID NO: 26489 - DNA, 321 bp, synthetic construct
  misc_feature 1..321: note = Description of Artificial Sequence: Synthetic polynucleotide
  source 1..321: mol_type = other DNA
gacatccagatgacccagtctccatcctccctgtctgcatctgtaggagacagagtcaccatcacttgccgggcaagtcagggcattagaaatgatttaggctggtatcagcagaaaccagggaaagcccctaagcgcctgatctatactgcatccagtttgcaaagtggggtcccatcaaggttcagcggcagtggatctgggacagaattcactctcacgatcagcagcctgcagcctgaagattttgcaacttattactgtctacagcattatagttacccgctcactttcggcggagggaccaaggtggagatcaaa

SEQ ID NO: 26490 - protein, 107 aa, synthetic construct
  REGION 1..107: note = Description of Artificial Sequence: Synthetic polypeptide
DIQMTQSPSSLSASVGDRVTITCRASQGIRNDLGWYQQKPGKAPKRLIYTASSLQSGVPSRFSGSGSGTEFTLTISSLQPEDFATYYCLQHYSYPLTFGGGTKVEIK

SEQ ID NO: 26491 - DNA, 321 bp, synthetic construct
  misc_feature 1..321: note = Description of Artificial Sequence: Synthetic polynucleotide
  source 1..321: mol_type = other DNA
gacatccagatgacccagtctccatcttccgtgtctgcatctgtaggagacagagtcaccatcacttgtcgggcgagtcagggtgttaacgactggttagcctggtatcagcagaaaccagggagagcccctaagctcctgatctatgatgcatcaagtttgcaaagtggggtcccatcaaggttcagcggcagtggatctgggacagatttcactctcaccatcagcagcctgcagcctgaagattttgcaacttactattgtcaacaggctaacagtttcccgtggacgttcggccaagggaccaaggtggaaatcaaa

SEQ ID NO: 26492 - protein, 107 aa, synthetic construct
  REGION 1..107: note = Description of Artificial Sequence: Synthetic polypeptide
DIQMTQSPSSVSASVGDRVTITCRASQGVNDWLAWYQQKPGRAPKLLIYDASSLQSGVPSRFSGSGSGTDFTLTISSLQPEDFATYYCQQANSFPWTFGQGTKVEIK

SEQ ID NO: 26493 - DNA, 336 bp, synthetic construct
  misc_feature 1..336: note = Description of Artificial Sequence: Synthetic polynucleotide
  source 1..336: mol_type = other DNA
gatattgtgatgactcagtctccactctccctgcccgtcacccctggagagccggcctccatctcctgcaggtctagtcagagcctcctgtatcataatggatacaactatttggattggtacctgcagaagacagggcagtctccacagctcctgatctatgtgggttctaatcgggcctccggggtccctgacaggttcagtggcagtggatcaggcacagattttacactgaaaatcagcagagtggaggctgaggatgttggggtttattactgcatgcaaactctacaaactccgctcactttcggcggagggaccaaggtggagatcaaa

SEQ ID NO: 26494 - protein, 112 aa, synthetic construct
  REGION 1..112: note = Description of Artificial Sequence: Synthetic polypeptide
DIVMTQSPLSLPVTPGEPASISCRSSQSLLYHNGYNYLDWYLQKTGQSPQLLIYVGSNRASGVPDRFSGSGSGTDFTLKISRVEAEDVGVYYCMQTLQTPLTFGGGTKVEIK

SEQ ID NO: 26495 - DNA, 321 bp, synthetic construct
  misc_feature 1..321: note = Description of Artificial Sequence: Synthetic polynucleotide
  source 1..321: mol_type = other DNA
gccatccagatgacccagtctccatcttccgtgtctgcatctgtaggagacagagtcaccatcacttgtcgggcgagtcagggtattagcaactggttagcctggtatcagcagaaaccagggaaagcccctaacctcatgatccatgctgcattcagtttgcaaggtggggtcccatcaaggttcagcggcagtggatctgggacagatttcactctcaccatcagcagcctgcagcctgaagattttgcaacttactattgtcaacagactaacagtttcccgtggacgttcggccaagggaccaaggtggaaatcaaa

SEQ ID NO: 26496 - protein, 107 aa, synthetic construct
  REGION 1..107: note = Description of Artificial Sequence: Synthetic polypeptide
AIQMTQSPSSVSASVGDRVTITCRASQGISNWLAWYQQKPGKAPNLMIHAAFSLQGGVPSRFSGSGSGTDFTLTISSLQPEDFATYYCQQTNSFPWTFGQGTKVEIK

SEQ ID NO: 26497 - DNA, 321 bp, synthetic construct
  misc_feature 1..321: note = Description of Artificial Sequence: Synthetic polynucleotide
  source 1..321: mol_type = other DNA
gacatccagatgacccagtctccatcttccgtgtctgcatctgtaggagacagagtcaccatcacttgtcgggcgagtcaggatattaccacctggttagcctggtatcagcagaaaccagggaaagcccctaagctcctgatctatgatgcatccagtttgcaaagtgcggtcccatcaaggttcagcggcagtggatctgggacagatttcactctcaccgtcagcagtttgcagcctgaagattttgcaacttactattgtctacagactaacagtttcccgtggacgttcggccaagggaccaaggtggagatcaag

SEQ ID NO: 26498 - protein, 107 aa, synthetic construct
  REGION 1..107: note = Description of Artificial Sequence: Synthetic polypeptide
DIQMTQSPSSVSASVGDRVTITCRASQDITTWLAWYQQKPGKAPKLLIYDASSLQSAVPSRFSGSGSGTDFTLTVSSLQPEDFATYYCLQTNSFPWTFGQGTKVEIK

SEQ ID NO: 26499 - DNA, 321 bp, synthetic construct
  misc_feature 1..321: note = Description of Artificial Sequence: Synthetic polynucleotide
  source 1..321: mol_type = other DNA
gacatccagatgacccagtctccatcctccctgtctgcatctgtaggagacagagtcaccatcacttgccgggcaagtcagggcattagaaataatttaggctggtatcagcagaaaccagggaaagcccctaagcgcctgatctatcctgcatccagtttgcaaagtggggtcccatcaaggttcagcggcagtggatctgggacagaattcactctcacaatcagcagcctgcagcctgaagattttgcaacttattactgtctacaggatcatagttacccattcactttcggccctgggaccaaagtggatatcaaa

SEQ ID NO: 26500 - protein, 107 aa, synthetic construct
  REGION 1..107: note = Description of Artificial Sequence: Synthetic polypeptide
DIQMTQSPSSLSASVGDRVTITCRASQGIRNNLGWYQQKPGKAPKRLIYPASSLQSGVPSRFSGSGSGTEFTLTISSLQPEDFATYYCLQDHSYPFTFGPGTKVDIK

SEQ ID NO: 26501 - DNA, 321 bp, synthetic construct; identical to SEQ ID NO: 26447
  misc_feature 1..321: note = Description of Artificial Sequence: Synthetic polynucleotide
  source 1..321: mol_type = other DNA

SEQ ID NO: 26502 - protein, 107 aa, synthetic construct; identical to SEQ ID NO: 26448
  REGION 1..107: note = Description of Artificial Sequence: Synthetic polypeptide

SEQ ID NO: 26503 - DNA, 336 bp, synthetic construct
  misc_feature 1..336: note = Description of Artificial Sequence: Synthetic polynucleotide
  source 1..336: mol_type = other DNA
gatattgtgatgacccagactccactctctctgtccgtcacccctggacagccggcctccatctcctgcaagtctagtcagagcctcctgcatggtgatggaaagacctatttctattggtacctgcagaagccaggccagcctccacaggtcctgttatttgaagtttcccaccggttctctggagtgccagataggttcagtggcggcgggtcagggacagatttcacactgaagatcagccgggtggaggctgaggatgttggggtttactattgcatgcaaagtatacagtttccgtggacgttcggccaagggaccagggtggacatcaaa

SEQ ID NO: 26504 - protein, 112 aa, synthetic construct
  REGION 1..112: note = Description of Artificial Sequence: Synthetic polypeptide
DIVMTQTPLSLSVTPGQPASISCKSSQSLLHGDGKTYFYWYLQKPGQPPQVLLFEVSHRFSGVPDRFSGGGSGTDFTLKISRVEAEDVGVYYCMQSIQFPWTFGQGTRVDIK

SEQ ID NO: 26505 - DNA, 321 bp, synthetic construct
  misc_feature 1..321: note = Description of Artificial Sequence: Synthetic polynucleotide
  source 1..321: mol_type = other DNA
gacatccagatgacccagtctccatcctccctgtctgcatctgtcggagacagagtcaccatcacttgccgggcaagtcagggcgttagaaatgatttaggctggtatcagcagaaaccagggaaagcccctaaacacctgatctatgctgcatccagtttgcaaaatggggtcccatcaaggttcagcggcagtggctctgggacagaattcactctcacaatcagcagcctgcagcctgaagattttgccacttattactgtctacaccattatagtttcccgctcactttcggcggagggaccaaggtggagatcaaa

SEQ ID NO: 26506 - protein, 107 aa, synthetic construct
  REGION 1..107: note = Description of Artificial Sequence: Synthetic polypeptide
DIQMTQSPSSLSASVGDRVTITCRASQGVRNDLGWYQQKPGKAPKHLIYAASSLQNGVPSRFSGSGSGTEFTLTISSLQPEDFATYYCLHHYSFPLTFGGGTKVEIK

SEQ ID NO: 26507 - DNA, 339 bp, synthetic construct
  misc_feature 1..339: note = Description of Artificial Sequence: Synthetic polynucleotide
  source 1..339: mol_type = other DNA
gacatcgtgatgacccagtctccagactccctggcggtgtctctgggcgagagggccaccatcaactgcaagtccagccagagtgttttacacagctccaacaataacaactacttagcttggtaccagcagaaaccaggacagcctcctaagctgctcatttactgggcatctactcgggaatccggggtccctgaccgattcagtggcagcgggtctgggacagatttcattctcaccatcagcggcctgcaggctgaagatgtggcagtttattactgtcagcaatattttactactccgtgcagttttggccaggggaccaagctggagatcaaa

SEQ ID NO: 26508 - protein, 113 aa, synthetic construct
  REGION 1..113: note = Description of Artificial Sequence: Synthetic polypeptide
DIVMTQSPDSLAVSLGERATINCKSSQSVLHSSNNNNYLAWYQQKPGQPPKLLIYWASTRESGVPDRFSGSGSGTDFILTISGLQAEDVAVYYCQQYFTTPCSFGQGTKLEIK

SEQ ID NO: 26509 - DNA, 324 bp, synthetic construct
  misc_feature 1..324: note = Description of Artificial Sequence: Synthetic polynucleotide
  source 1..324: mol_type = other DNA
gacatccagatgacccagtctccatcctcccggtctgcatgtataggagacagagccaccatcacttaccgtgcaagtcagaccattagcaactatttaaattggtatcagcagaaaccagggaaagcccctaaactccttatctatgctgcatccagtttgcaaattggggtcccatcaaggttcagtggcagtggatctgggacagatttcactctcaccatcagcagtgtgcaacctgaagattttgcaacttacttctgtcaacagagttacagaacccctcagtggacgttcggccaagggaccaaggtggaaatcaaa

SEQ ID NO: 26510 - protein, 108 aa, synthetic construct
  REGION 1..108: note = Description of Artificial Sequence: Synthetic polypeptide
DIQMTQSPSSRSACIGDRATITYRASQTISNYLNWYQQKPGKAPKLLIYAASSLQIGVPSRFSGSGSGTDFTLTISSVQPEDFATYFCQQSYRTPQWTFGQGTKVEIK

SEQ ID NO: 26511 - DNA, 336 bp, synthetic construct
  misc_feature 1..336: note = Description of Artificial Sequence: Synthetic polynucleotide
  source 1..336: mol_type = other DNA
gatattgtgatgacccagactccactctctctgtccgtcacccctggacagccggcctccatctcctgcaagtctagtcagagcctcctgcatggtgatggaaagacctatttgtattggtacctgcagaagccaggccagcctccacagctcctgatctatgaagtttccaaccggttctctggcgtgccagataggttcagtggcagcgggtcagggacagatttcacactgaaaatcagccgggtggaggctgaggatgttggggtttttttctgcatgcaaagtatacaggttccgtggacgttcggccaagggaccaaggtggaaatcaaa

SEQ ID NO: 26512 - protein, 112 aa, synthetic construct
  REGION 1..112: note = Description of Artificial Sequence: Synthetic polypeptide
DIVMTQTPLSLSVTPGQPASISCKSSQSLLHGDGKTYLYWYLQKPGQPPQLLIYEVSNRFSGVPDRFSGSGSGTDFTLKISRVEAEDVGVFFCMQSIQVPWTFGQGTKVEIK

SEQ ID NO: 26513 - DNA, 333 bp, synthetic construct
  misc_feature 1..333: note = Description of Artificial Sequence: Synthetic polynucleotide
  source 1..333: mol_type = other DNA
gatattgtgatgacccagactccactctctctgtccgtcacccctggacagccggcctccatctcctgcaagtctagtcagagcctcctgcatagtgagggaaagacctacttgtattggtacctgcagaagccaggccagcctccacagctcctgatctatgaagtttcccaccggttctctggagtgccagataggttcagtggcagcgggtcagggacagatttcacactgaaaatcagccgggtggaggctgaggatgttggggtttattactgcatgcaaagtatacagcttctcactttcggcggagggaccaaggtggagatcaaa

SEQ ID NO: 26514 - protein, 111 aa, synthetic construct
  REGION 1..111: note = Description of Artificial Sequence: Synthetic polypeptide
DIVMTQTPLSLSVTPGQPASISCKSSQSLLHSEGKTYLYWYLQKPGQPPQLLIYEVSHRFSGVPDRFSGSGSGTDFTLKISRVEAEDVGVYYCMQSIQLLTFGGGTKVEIK

SEQ ID NO: 26515 - DNA, 321 bp, synthetic construct
  misc_feature 1..321: note = Description of Artificial Sequence: Synthetic polynucleotide
  source 1..321: mol_type = other DNA
gacatccagatgacccagtctccatcctccctgtctgcatctgtaggagacagagtcaccatcacttgccgggcaagtcagggcattagaaatgatttaggctggtatcagcagaaaccagggaaagcccctaagcgcctgatctatactacatccagtttgcaaagtggggtcccatcaaggttcagcggcagtggatctgggacagaattcactctcacaatcagcagcctgcagcctgaagattttgcaagttattactgtctacagcattatagtttcccgaacactttcggcggagggaccaaggtggagatcaaa

SEQ ID NO: 26516 - protein, 107 aa, synthetic construct
  REGION 1..107: note = Description of Artificial Sequence: Synthetic polypeptide
DIQMTQSPSSLSASVGDRVTITCRASQGIRNDLGWYQQKPGKAPKRLIYTTSSLQSGVPSRFSGSGSGTEFTLTISSLQPEDFASYYCLQHYSFPNTFGGGTKVEIK

SEQ ID NO: 26517 - DNA, 339 bp, synthetic construct
  misc_feature 1..339: note = Description of Artificial Sequence: Synthetic polynucleotide
  source 1..339: mol_type = other DNA
gacatcgtgatgacccagtctccagattccctggctgtgtctctgggcgcgagggccaccatcaattgcaagtccagccagagtgtattacacagctccaacaattacaactacttaacttggtaccagcagaaatcaggacagcctcctaagctgctcatttactgggcatctacccgggaatccggggtccctgaccgattcagtggcagcgggtctgggacagatttcactctcaccatcagcagcctgcaggctgaagatgtggcagtttattactgtcagcaatattatcgtactccgtggacgttcggccaagggaccaaggtggaaatcaaa

SEQ ID NO: 26518 - protein, 113 aa, synthetic construct
  REGION 1..113: note = Description of Artificial Sequence: Synthetic polypeptide
DIVMTQSPDSLAVSLGARATINCKSSQSVLHSSNNYNYLTWYQQKSGQPPKLLIYWASTRESGVPDRFSGSGSGTDFTLTISSLQAEDVAVYYCQQYYRTPWTFGQGTKVEIK

SEQ ID NO: 26519 - DNA, 321 bp, synthetic construct
  misc_feature 1..321: note = Description of Artificial Sequence: Synthetic polynucleotide
  source 1..321: mol_type = other DNA
gccatccagatgacccagtctccatcttccgtgtctgcatctgtaggagacagagtcaccatcacttgtcgggcgagtcagggtattagcaactggttagcctggtatcagcagaaaccagggaaagcccctaacctcctgatccatgctgcattcagtttgcaaggtggggtcccatcaaggttcagcggcagtggatctgggacagatttcactctcaccatcagcagcctgcagcctgaagattttgcaacttactattgtcaacagactaacagtttcccgtggacgttcggccaagggaccaaggtggaaatcaaa

SEQ ID NO: 26520 - protein, 107 aa, synthetic construct
  REGION 1..107: note = Description of Artificial Sequence: Synthetic polypeptide
AIQMTQSPSSVSASVGDRVTITCRASQGISNWLAWYQQKPGKAPNLLIHAAFSLQGGVPSRFSGSGSGTDFTLTISSLQPEDFATYYCQQTNSFPWTFGQGTKVEIK

SEQ ID NO: 26521 - DNA, 321 bp, synthetic construct
  misc_feature 1..321: note = Description of Artificial Sequence: Synthetic polynucleotide
  source 1..321: mol_type = other DNA
gacatccagatgacccagtctccatcctccctgtctgcatctgtaggagacagagtcaccatcacttgccgggcaagtcagggcattagagatgatttaggctggtatcaacagaaaccagggaaagtccctaagcgcctgatatatgctgcatccagtttgcaaagtggggtcccatcaaggttcagcggcagtggatctgggacagaattcactctcacaatcagcagcctacagcctgaagattttgcaacttattactgtcttcagcatcatagttaccctcggacgttcggccaagggaccaaggtggaaatcaaa

SEQ ID NO: 26522 - protein, 107 aa, synthetic construct
  REGION 1..107: note = Description of Artificial Sequence: Synthetic polypeptide
DIQMTQSPSSLSASVGDRVTITCRASQGIRDDLGWYQQKPGKVPKRLIYAASSLQSGVPSRFSGSGSGTEFTLTISSLQPEDFATYYCLQHHSYPRTFGQGTKVEIK

SEQ ID NO: 26523 - DNA, 321 bp, synthetic construct
  misc_feature 1..321: note = Description of Artificial Sequence: Synthetic polynucleotide
  source 1..321: mol_type = other DNA
gacatccagatgacccagtctccatcctccctgtctgcatctgtaggagacagagtcaccatcacttgccgggcaagtcagggcattagaactgatttaggctggtatcagcagaaaccagggaaagcccctaagcgcctgatctatactgcatccagtttgcaaagtggggtcccatcaaggttcagcggcagtggatctgggacagaattcactctcacgatcagcagcctgcagcctgaagattttgcaacttattactgtctacagcattatagttacccgctcactttcggcggagggaccaaggtggagatcaag

SEQ ID NO: 26524 - protein, 107 aa, synthetic construct
  REGION 1..107: note = Description of Artificial Sequence: Synthetic polypeptide
DIQMTQSPSSLSASVGDRVTITCRASQGIRTDLGWYQQKPGKAPKRLIYTASSLQSGVPSRFSGSGSGTEFTLTISSLQPEDFATYYCLQHYSYPLTFGGGTKVEIK

SEQ ID NO: 26525 - DNA, 321 bp, synthetic construct
  misc_feature 1..321: note = Description of Artificial Sequence: Synthetic polynucleotide
  source 1..321: mol_type = other DNA
gacatccagatgacccagtctccatcctcactgtctgcatctgtaggagacagagtcaccatcacttgtcgggcgagtcaggacattagcaatgatttagcctggtttcagcagaaaccagggaaagcccctaagtccctgatcttttctgcatccagtttgcaaagtggggtcccatcaaagttcagcggcagtggatctgggacagatttcactctcaccatcagcagcctgcagcctgaagattttgcaacttattactgccaacaatctgatagttaccctctcactttcggcggagggaccaaggttgagatcaaa

SEQ ID NO: 26526 - protein, 107 aa, synthetic construct
  REGION 1..107: note = Description of Artificial Sequence: Synthetic polypeptide
DIQMTQSPSSLSASVGDRVTITCRASQDISNDLAWFQQKPGKAPKSLIFSASSLQSGVPSKFSGSGSGTDFTLTISSLQPEDFATYYCQQSDSYPLTFGGGTKVEIK

SEQ ID NO: 26527 - DNA, 321 bp, synthetic construct
  misc_feature 1..321: note = Description of Artificial Sequence: Synthetic polynucleotide
  source 1..321: mol_type = other DNA
gacatccagatgacccagtctccatcctcactgtctgcatctgtaggagacagagtcaccatcacttgtcgggcgagtcagggcattgggaattatttagcctggtttcagcagaaaccagggaaagcccctaagtccctgatctatgctgcatccggtttgcaaagtgggttcccatcaaaattcagcggcagtggatctgggacagatttcactctcaccatcagcagcctacagcctgaagattttgcaacttattactgccaacagtattatagttacccattcactttcggccctgggaccaaagtggatatcaaa

SEQ ID NO: 26528 - protein, 107 aa, synthetic construct
  REGION 1..107: note = Description of Artificial Sequence: Synthetic polypeptide
DIQMTQSPSSLSASVGDRVTITCRASQGIGNYLAWFQQKPGKAPKSLIYAASGLQSGFPSKFSGSGSGTDFTLTISSLQPEDFATYYCQQYYSYPFTFGPGTKVDIK

SEQ ID NO: 26529 - DNA, 321 bp, synthetic construct
  misc_feature 1..321: note = Description of Artificial Sequence: Synthetic polynucleotide
  source 1..321: mol_type = other DNA
gacatccagatgacccagtctccatcttccgtgtctgcatctgtaggagacagagtcaccatcacttgtcgggcgagtcagggtattaccgactggttagcctggtatcagcagaaaccagggaaagcccctaagctcctgatctatgctgcatccagtttgcaaagtggggtcccatcaaggttcagcggcagtggatctgggacagatttcactctcaccttcagcagcctgcagcctgacgattttgcaacttactattgtcaacagactaacagtttcccgtggacgttcggccaagggaccaaggtggaaatcaaa

SEQ ID NO: 26530 - protein, 107 aa, synthetic construct
  REGION 1..107: note = Description of Artificial Sequence: Synthetic polypeptide
DIQMTQSPSSVSASVGDRVTITCRASQGITDWLAWYQQKPGKAPKLLIYAASSLQSGVPSRFSGSGSGTDFTLTFSSLQPDDFATYYCQQTNSFPWTFGQGTKVEIK

SEQ ID NO: 26531 - DNA, 339 bp, synthetic construct
  misc_feature 1..339: note = Description of Artificial Sequence: Synthetic polynucleotide
  source 1..339: mol_type = other DNA
gacatcgtgatgacccagtctccagactccctggctgtgtctctgggcgagagggccaccatcaactgcaagtccagccagagtgttttatacagctccaacaataacaactacttagcttggtaccagcagaaaccaggacagcctcctaacctgctcatttactggacatctacccgggaatccggggtccctgaccgattcagtggcagcgggtctgggacaaatttcactctcaccatcagcagcctgcaggctgaagatgtggcagtttattactgtcagcaatattatagtactcctccgacgttcggccaagggaccaaggtggaaatcaaa

SEQ ID NO: 26532 - protein, 113 aa, synthetic construct
  REGION 1..113: note = Description of Artificial Sequence: Synthetic polypeptide
DIVMTQSPDSLAVSLGERATINCKSSQSVLYSSNNNNYLAWYQQKPGQPPNLLIYWTSTRESGVPDRFSGSGSGTNFTLTISSLQAEDVAVYYCQQYYSTPPTFGQGTKVEIK

SEQ ID NO: 26533 - DNA, 324 bp, synthetic construct
  misc_feature 1..324: note = Description of Artificial Sequence: Synthetic polynucleotide
  source 1..324: mol_type = other DNA
gacatccagatgacccagtctccatcctccctgtctgcatctgtaggagacagagtcatcatcacttgccgggcaagtcagaccattggcaactatttaaattggtatcagcagaaaccagggagagcccctaagctcctgatctatgctgcatccagtttgcacagtggggtcccatcagggttcagtggcagtggatctgggacagatttcactctcaccatcagcagtctgcaacctgaagattttgcaacttacttctgtcaacagagttacagaacccctcagtggacgttcggccaagggaccaaggtggaaatcaaa

SEQ ID NO: 26534 - protein, 108 aa, synthetic construct
  REGION 1..108: note = Description of Artificial Sequence: Synthetic polypeptide
DIQMTQSPSSLSASVGDRVIITCRASQTIGNYLNWYQQKPGRAPKLLIYAASSLHSGVPSGFSGSGSGTDFTLTISSLQPEDFATYFCQQSYRTPQWTFGQGTKVEIK

SEQ ID NO: 26535 - DNA, 336 bp, synthetic construct
  misc_feature 1..336: note = Description of Artificial Sequence: Synthetic polynucleotide
  source 1..336: mol_type = other DNA
gatattgtgatgacccagactccactctctctgtccgtcacccctggacagccggcctccatctcctgcaagtctagtcagagcctcctgcatggtgatggaaagacctatttgtattggtacctgcagaagccaggccagcctccacagctcctgatctatgaagtttccaaccggttctctggagtgccagataggttcagtggcagcgggtcagggacagatttcacactgaaaatcagccgggtggaggctgaggatgttgggatttattactgcatgcaaagtatacagattccgtggacgttcggccaagggaccagggtggaaatcaaa

SEQ ID NO: 26536 - protein, 112 aa, synthetic construct
  REGION 1..112: note = Description of Artificial Sequence: Synthetic polypeptide
DIVMTQTPLSLSVTPGQPASISCKSSQSLLHGDGKTYLYWYLQKPGQPPQLLIYEVSNRFSGVPDRFSGSGSGTDFTLKISRVEAEDVGIYYCMQSIQIPWTFGQGTRVEIK

SEQ ID NO: 26537 - DNA, 336 bp, synthetic construct; identical to SEQ ID NO: 26451
  misc_feature 1..336: note = Description of Artificial Sequence: Synthetic polynucleotide
  source 1..336: mol_type = other DNA

SEQ ID NO: 26538 - protein, 112 aa, synthetic construct; identical to SEQ ID NO: 26452
  REGION 1..112: note = Description of Artificial Sequence: Synthetic polypeptide

SEQ ID NO: 26539 - DNA, 321 bp, synthetic construct
  misc_feature 1..321: note = Description of Artificial Sequence: Synthetic polynucleotide
  source 1..321: mol_type = other DNA
gacatccagatgacccagtctccatcctccctgtctgcatctgtaggagacagagtcaccatcacttgccgggcaagtcagggcattagaaatgatttaggctggtttcagcagaaaccagggaaagcccctaagcgcctgatctatgctgcatccagtttgcaaagtggggtcccatcaaggttcagcggcagtggatctgggacagaattcactctcacactcagcagcctgcagcctgaagattttgcaacttattattgtctacagcattatagttacccgctcactttcggcggagggaccaaggtggagatcaaa

SEQ ID NO: 26540 - protein, 107 aa, synthetic construct
  REGION 1..107: note = Description of Artificial Sequence: Synthetic polypeptide
DIQMTQSPSSLSASVGDRVTITCRASQGIRNDLGWFQQKPGKAPKRLIYAASSLQSGVPSRFSGSGSGTEFTLTLSSLQPEDFATYYCLQHYSYPLTFGGGTKVEIK

SEQ ID NO: 26541 - DNA, 321 bp, synthetic construct
  misc_feature 1..321: note = Description of Artificial Sequence: Synthetic polynucleotide
  source 1..321: mol_type = other DNA
gacatccagatgacccagtctccatcctccctgtctgcatctgtaggagacagagtcaccatcacttgccgggcaagtcagggcattagaaatgatttaggctggtatcagcagaaaccagggaaagcccctaaccgcctgatctatgctgcatccagtttgcaaagtggggtcccatcacggttcagcggcagtggatctgggacagaattcactctcacaatcagcagcctgcagcgtgaagattttgcaacttattacggtctacagcataatagttaccctcgcagttttggccaggggaccaagctggagatcaaa

SEQ ID NO: 26542 - protein, 107 aa, synthetic construct
  REGION 1..107: note = Description of Artificial Sequence: Synthetic polypeptide
DIQMTQSPSSLSASVGDRVTITCRASQGIRNDLGWYQQKPGKAPNRLIYAASSLQSGVPSRFSGSGSGTEFTLTISSLQREDFATYYGLQHNSYPRSFGQGTKLEIK

SEQ ID NO: 26543 - DNA, 321 bp, synthetic construct
  misc_feature 1..321: note = Description of Artificial Sequence: Synthetic polynucleotide
  source 1..321: mol_type = other DNA
gacatccagatgtcccagtctccatcctcactgtctgcttctgtaggagacagagtcaccatcacttgtcgggcgagtcagggcattaccaattatttagcctggtttcagcagaaaccagggaaagcccctaagtccctgatctatgctgcatccagtttgcaaagtggggtcccatcaaagttcagcggcagtggatctgggacagatttcactctcaccatcagcagcctgcagcctgaagattttgcaacttattactgccaacagtataatagttacccattcactttcggccctgggaccaaagtggatatcaaa

SEQ ID NO: 26544 - protein, 107 aa, synthetic construct
  REGION 1..107: note = Description of Artificial Sequence: Synthetic polypeptide
DIQMSQSPSSLSASVGDRVTITCRASQGITNYLAWFQQKPGKAPKSLIYAASSLQSGVPSKFSGSGSGTDFTLTISSLQPEDFATYYCQQYNSYPFTFGPGTKVDIK

SEQ ID NO: 26545 - DNA, 321 bp, synthetic construct
  misc_feature 1..321: note = Description of Artificial Sequence: Synthetic polynucleotide
  source 1..321: mol_type = other DNA
gacatccagatgacccagtctccatcctccctgtctgcatctgtaggagacagagtcaccatcacttgccgggcaagtcagggcattagaaatgatttaggctggtatcagcagaaaccagggaaagcccctaagcgcctgatctatgctgcatccagtttgcaaagtggggtcccatcaaggttcagcggcagtggatctgggacagaattcactctcacaatcagcagcctgcagcctgaagattttgcaacttattactgtctacagcattatagtttccctcgcagttttggccaggggaccaagctggagatcaaa

SEQ ID NO: 26546 - protein, 107 aa, synthetic construct
  REGION 1..107: note = Description of Artificial Sequence: Synthetic polypeptide
DIQMTQSPSSLSASVGDRVTITCRASQGIRNDLGWYQQKPGKAPKRLIYAASSLQSGVPSRFSGSGSGTEFTLTISSLQPEDFATYYCLQHYSFPRSFGQGTKLEIK

SEQ ID NO: 26547 - DNA, 321 bp, synthetic construct
  misc_feature 1..321: note = Description of Artificial Sequence: Synthetic polynucleotide
  source 1..321: mol_type = other DNA
gacatccagatgacccagtctccatcctccctgtctgcatctgtaggagacagagtcaccatcacttgccgggcaagtcaggacattagcaatgatttaggctggtatcagcagaaaccagggaaagcccctaagcgcctgatctatgctgcatccagtttgcaaagtggggtcccatcaaggttcagcggcagtggttctgggacagaattcactctcacaatcaacagcctgcagcctgaagattttgcaacttattactgtctacagcttaatagttacccattcactttcggccctgggaccaaagtggatatcaaa

SEQ ID NO: 26548 - protein, 107 aa, synthetic construct
  REGION 1..107: note = Description of Artificial Sequence: Synthetic polypeptide
DIQMTQSPSSLSASVGDRVTITCRASQDISNDLGWYQQKPGKAPKRLIYAASSLQSGVPSRFSGSGSGTEFTLTINSLQPEDFATYYCLQLNSYPFTFGPGTKVDIK

SEQ ID NO: 26549 - DNA, 336 bp, synthetic construct
  misc_feature 1..336: note = Description of Artificial Sequence: Synthetic polynucleotide
  source 1..336: mol_type = other DNA
gatattgtgatgacccagactccactctctctgtccgtcactcctggacagccggcctccatctcctgcaagtctagtcagcgcctcctgcatggtgatggaaagacctatttgtattggtacctgcagaagccaggccagcctccacagatcctgatctatgaagtttccaaccggttctctggagtgccagataggttcagtggcagcgggtcagggacagagttcacacttaaaatcagccgggtggaggctgaggatgttggggtttattactgcatgcaaagtatacagattccgtggacgttcggccaagggaccaaggtggaaatcaaa

SEQ ID NO: 26550 - protein, 112 aa, synthetic construct
  REGION 1..112: note = Description of Artificial Sequence: Synthetic polypeptide
DIVMTQTPLSLSVTPGQPASISCKSSQRLLHGDGKTYLYWYLQKPGQPPQILIYEVSNRFSGVPDRFSGSGSGTEFTLKISRVEAEDVGVYYCMQSIQIPWTFGQGTKVEIK

SEQ ID NO: 26551 - DNA, 339 bp, synthetic construct
  misc_feature 1..339: note = Description of Artificial Sequence: Synthetic polynucleotide
  source 1..339: mol_type = other DNA
gacatcgtgatgacccagtctccagactccctggctgtgtctctgggcgagagggctaccgtcaactgcaagtccagccagagtgttttacacagctccaacaataacaactacttaacttggtaccagcagaaaccaggacagcctcctaagctgctcatttactgggcatctacccgggaatccggggtccctgaccgattcagtggcagcgggtctgggacagatttcactctcaccatcagcagcctgcaggctgaagatgtggcagtttattactgtcagcaatattatagtagtcctccgacgttcggccaagggaccaaggtggaaatcaaa

SEQ ID NO: 26552 - protein, 113 aa, synthetic construct
  REGION 1..113: note = Description of Artificial Sequence: Synthetic polypeptide
DIVMTQSPDSLAVSLGERATVNCKSSQSVLHSSNNNNYLTWYQQKPGQPPKLLIYWASTRESGVPDRFSGSGSGTDFTLTISSLQAEDVAVYYCQQYYSSPPTFGQGTKVEIK

SEQ ID NO: 26553 - DNA, 321 bp, synthetic construct
  misc_feature 1..321: note = Description of Artificial Sequence: Synthetic polynucleotide
  source 1..321: mol_type = other DNA
gacatccagatgacccagtctccatcttccgtgtctgcatctgtaggagacagagtcaccatcacttgtcgggcgagtcagggtattagcaactggttagcctggtatcagcagaaaccagggaaagcccctaagctcctgatctatgctgcttccagtttgcaaagtggggtcccatcaaggttcaacggcagtggatctgggacagatttcactctcaccatcagcagcctgcagcctgaagattttgcaacttactgttgtcaacaggctaacagtttaccgtggacgttcggccaagggaccaaggtggaaatcaaa

SEQ ID NO: 26554 - protein, 107 aa, synthetic construct
  REGION 1..107: note = Description of Artificial Sequence: Synthetic polypeptide
DIQMTQSPSSVSASVGDRVTITCRASQGISNWLAWYQQKPGKAPKLLIYAASSLQSGVPSRFNGSGSGTDFTLTISSLQPEDFATYCCQQANSLPWTFGQGTKVEIK

SEQ ID NO: 26555 - DNA, 321 bp, synthetic construct
  misc_feature 1..321: note = Description of Artificial Sequence: Synthetic polynucleotide
  source 1..321: mol_type = other DNA
gacatccagatgacccagtctccatcttccgtgtctgcatctgtaggagacagagtcaccatcacttgtcgggcgagtcaggatattactgactggttagcctggtatcagcagaaaccagggaaagcccctaaactcctgatctctgctgcatccagtttgcagagtggggtcccatcaaggttcagcggcagtggatctgggacagatttcactctcgccatcagcagcctgcagcctgaagattttgcaacttactattgtcaacaggctaacagtttaccgtggacgttcggccaagggaccaaggtggaaatcaaa

SEQ ID NO: 26556 - protein, 107 aa, synthetic construct
  REGION 1..107: note = Description of Artificial Sequence: Synthetic polypeptide
DIQMTQSPSSVSASVGDRVTITCRASQDITDWLAWYQQKPGKAPKLLISAASSLQSGVPSRFSGSGSGTDFTLAISSLQPEDFATYYCQQANSLPWTFGQGTKVEIK

SEQ ID NO: 26557 - DNA, 321 bp, synthetic construct
  misc_feature 1..321: note = Description of Artificial Sequence: Synthetic polynucleotide
  source 1..321: mol_type = other DNA
gacatccagatgacccagtctccatcctccctgtctgcatctgtcggagacagagtcaccatcacttgccgggcaagtcagggcattagaaatgatttaggctggtatcagcagaaaccagggaaagcccctaaacacctgatctatgctgcatccagtttgcaaaatggggtcccatcaaggttcagcggcagtggctctgggacagaattcactctcacaatcagcagcctgcagcctgaagattttgccacttattactgtctacaccattatagtttcccgctcactttcggcggagggaccaaggtggagatcaaa

SEQ ID NO: 26558 - protein, 107 aa, synthetic construct
  REGION 1..107: note = Description of Artificial Sequence: Synthetic polypeptide
DIQMTQSPSSLSASVGDRVTITCRASQGIRNDLGWYQQKPGKAPKHLIYAASSLQNGVPSRFSGSGSGTEFTLTISSLQPEDFATYYCLHHYSFPLTFGGGTKVEIK

SEQ ID NO: 26559 - DNA, 336 bp, synthetic construct
  misc_feature 1..336: note = Description of Artificial Sequence: Synthetic polynucleotide
  source 1..336: mol_type = other DNA
catattgtgatgacccagactccactctctctgtccgtcacccctggacagccggcctccatctcctgcaagtctagtcagagcctcctgcatggtgatggaaagacctatttgtattggtacctgcagaagccaggccagcctccacagctcctgatctatgaagtttccaaccggttttctggagtgccagacagactcagtggcggcgggtcagggacagatttcacactgaaaatcagccgggtggaggctgaggatgttggcatttattactgcatgcaaagtatacaggttccgtggacgttcggccaagggaccaaggtggaaatcaaa

SEQ ID NO: 26560 - protein, 112 aa, synthetic construct
  REGION 1..112: note = Description of Artificial Sequence: Synthetic polypeptide
HIVMTQTPLSLSVTPGQPASISCKSSQSLLHGDGKTYLYWYLQKPGQPPQLLIYEVSNRFSGVPDRLSGGGSGTDFTLKISRVEAEDVGIYYCMQSIQVPWTFGQGTKVEIK

SEQ ID NO: 26561 - DNA, 321 bp, synthetic construct
  misc_feature 1..321: note = Description of Artificial Sequence: Synthetic polynucleotide
  source 1..321: mol_type = other DNA
gacatccagatgacccagtctccatcttccgtgtctgcatctgtaggagacagagtcaccatcacttgtcgggcgagtcaggatattagcgactggttagcctggtatcagcaaaaatcagggaaagcccctaaactcctgatctctgctgcatccagtttgcaaagtggggtcccatcaaggttcggcggcagtggatctgggacagatttcactctcaccatcagcagcctgcagcctgaagattttgcaacttactattgtcaacaggctaacagtttaccgtggacgttcggccaagggaccaaggtggaaatcaaa

SEQ ID NO: 26562 - protein, 107 aa, synthetic construct
  REGION 1..107: note = Description of Artificial Sequence: Synthetic polypeptide
DIQMTQSPSSVSASVGDRVTITCRASQDISDWLAWYQQKSGKAPKLLISAASSLQSGVPSRFGGSGSGTDFTLTISSLQPEDFATYYCQQANSLPWTFGQGTKVEIK

SEQ ID NO: 26563 - DNA, 333 bp, synthetic construct
  misc_feature 1..333: note = Description of Artificial Sequence: Synthetic polynucleotide
  source 1..333: mol_type = other DNA
gatattgtgatgacccagactccactctctctgtccgtcacccctggacagccggcctccatctcctgcaaatctagtcagagcctcctgcatagtgagggaaagacctacttgtattggtacctgcagaagccaggccagcctccacagctcctgatctatgaggtttcccaccggttctctggagtgccagataggttcagtggcagcgggtcagggacagatttcacactgaaaatcagccgggtggaggctgaggatgttggggtttattactgcatgcaaagtatacaggttctcactttcggcggagggaccaaggtggagatcaaa

SEQ ID NO: 26564 - protein, 111 aa, synthetic construct
  REGION 1..111: note = Description of Artificial Sequence: Synthetic polypeptide
DIVMTQTPLSLSVTPGQPASISCKSSQSLLHSEGKTYLYWYLQKPGQPPQLLIYEVSHRFSGVPDRFSGSGSGTDFTLKISRVEAEDVGVYYCMQSIQVLTFGGGTKVEIK

SEQ ID NO: 26565 - DNA, 321 bp, synthetic construct
  misc_feature 1..321: note = Description of Artificial Sequence: Synthetic polynucleotide
  source 1..321: mol_type = other DNA
gacatccagatgacccagtctccatcttccgtgtctgcatctgtaggagacagagtcaccatcacttgtcgggcgagtcaggatattaccagctggttagcctggtatcagcagaaaccagggaaagcccctaagctcctgatctatgctgcatccagtttgcaaagtggggtcccatcaaggttcagcggcagtggatctgggacagatttcattctcaccatcagcagcctgcagcctgaagattttgcattttaccattgtcaacaggctaacagtatcccattcactttcggccctgggaccaaagtggacatcaac

SEQ ID NO: 26566 - protein, 107 aa, synthetic construct
  REGION 1..107: note = Description of Artificial Sequence: Synthetic polypeptide
DIQMTQSPSSVSASVGDRVTITCRASQDITSWLAWYQQKPGKAPKLLIYAASSLQSGVPSRFSGSGSGTDFILTISSLQPEDFAFYHCQQANSIPFTFGPGTKVDIN

SEQ ID NO: 26567 - DNA, 336 bp, synthetic construct
  misc_feature 1..336: note = Description of Artificial Sequence: Synthetic polynucleotide
  source 1..336: mol_type = other DNA
gatattgtgatgacccagactccactctctctgtccgtcacccctggacagccggcctccatctcctgcaagtctagtcagagcctcctgcatggtgatggaaagacctatttgtattggtacctgcagaagccaggccagcctccacagctcctgatctatgcaacttccaaccggttccctggagtgtcagataggttcagtggcagcgggtcaggtacagacttcacactgaaaatcagccgggtggaggctgaggatgttggggtttattactgcatgcaaagtatacaggttccgtggacgttcggccaagggaccaaggtggaaatcaaa

SEQ ID NO: 26568 - protein, 112 aa, synthetic construct
  REGION 1..112: note = Description of Artificial Sequence: Synthetic polypeptide
DIVMTQTPLSLSVTPGQPASISCKSSQSLLHGDGKTYLYWYLQKPGQPPQLLIYATSNRFPGVSDRFSGSGSGTDFTLKISRVEAEDVGVYYCMQSIQVPWTFGQGTKVEIK

SEQ ID NO: 26569 - DNA, 321 bp, synthetic construct
  misc_feature 1..321: note = Description of Artificial Sequence: Synthetic polynucleotide
  source 1..321: mol_type = other DNA
gacatccagatgacccagtctccatcctccctgtctgcatctgtaggagacagagtcaccatcacttgccgggcaagtcagggcattagaaatgatttaggctggtatcagcagaaaccagggaaagcccctaagcgcctgatctatactgcatccagtttgcaaagtggggtcccatcaaggttcagcggcagtggatctgggacagaattcactctcacaatcagcagcctgcagcctgaagattttgcatcttattactgtctacagcataatagttacccattcactttcggccctgggaccaaagtggatttcaaa

SEQ ID NO: 26570 - protein, 107 aa, synthetic construct
  REGION 1..107: note = Description of Artificial Sequence: Synthetic polypeptide
DIQMTQSPSSLSASVGDRVTITCRASQGIRNDLGWYQQKPGKAPKRLIYTASSLQSGVPSRFSGSGSGTEFTLTISSLQPEDFASYYCLQHNSYPFTFGPGTKVDFK

SEQ ID NO: 26571 - DNA, 321 bp, synthetic construct
  misc_feature 1..321: note = Description of Artificial Sequence: Synthetic polynucleotide
  source 1..321: mol_type = other DNA
gacatccagatgacccagtctccatcctccctgtctgcatctgtaggagacggagtcaccatcacttgccgggcaagtcagaccattctcagctatttaaattggtatcagcagaaaccagggaaagcccctaaactcctgatctatggtgtatccagtttacaaagtggggtcccatcaaggttcagtggcagtggatctgggacagatttctctctcaccatcagcagtctgcaacctgaagattttgcaacttactactgtcagcagagttacagtaccccattcactttcggccctgggaccaaagtggatatcaaa

SEQ ID NO: 26572 - protein, 107 aa, synthetic construct
  REGION 1..107: note = Description of Artificial Sequence: Synthetic polypeptide
DIQMTQSPSSLSASVGDGVTITCRASQTILSYLNWYQQKPGKAPKLLIYGVSSLQSGVPSRFSGSGSGTDFSLTISSLQPEDFATYYCQQSYSTPFTFGPGTKVDIK

SEQ ID NO: 26573 - DNA, 336 bp, synthetic construct
  misc_feature 1..336: note = Description of Artificial Sequence: Synthetic polynucleotide
  source 1..336: mol_type = other DNA
gaaattgtgatgacccagactccactctctctgtccgtcacccctggacagccggcctccatctcctgcaagtctagtcagagcctcctgcatggtgatggaaagacctatttgtattggtacctgcagaagccaggccagcctccacagctcctgatccatgaagtttccaaccggttctctggagtgccagataggttcagtggcagcgggtcagggacagatttcacactgaaaatcagccgggtggaggctgaggatgttggggtttattactgcatgcaaagtatacaggttccctggacgttcggccaagggaccaaggtggaaatcaaa

SEQ ID NO: 26574 - protein, 112 aa, synthetic construct
  REGION 1..112: note = Description of Artificial Sequence: Synthetic polypeptide
EIVMTQTPLSLSVTPGQPASISCKSSQSLLHGDGKTYLYWYLQKPGQPPQLLIHEVSNRFSGVPDRFSGSGSGTDFTLKISRVEAEDVGVYYCMQSIQVPWTFGQGTKVEIK

SEQ ID NO: 26575 - DNA, 321 bp, synthetic construct
  misc_feature 1..321: note = Description of Artificial Sequence: Synthetic polynucleotide
  source 1..321: mol_type = other DNA
gacatccagatgacccagtctccatcctcactgtctgcatctataggagagagagtcaccatcacttgtcgggcgagtcagggcattagcaattatttagcctggattcagcagaaaccagggacagcccctaagtccctgatctatgctgcatccagtttgcaaagtggggtctcatcaaggttcagcggcagtggatttgggacagatttcactctcaccatcagtagtctgcagcctgaagattttgcaacttattactgccaacagtataatggttacccattcactttcggccctgggaccaaagtggatatcaaa

SEQ ID NO: 26576 - protein, 107 aa, synthetic construct
  REGION 1..107: note = Description of Artificial Sequence: Synthetic polypeptide
DIQMTQSPSSLSASIGERVTITCRASQGISNYLAWIQQKPGTAPKSLIYAASSLQSGVSSRFSGSGFGTDFTLTISSLQPEDFATYYCQQYNGYPFTFGPGTKVDIK

SEQ ID NO: 26577 - DNA, 324 bp, synthetic construct
  misc_feature 1..324: note = Description of Artificial Sequence: Synthetic polynucleotide
  source 1..324: mol_type = other DNA
gacatccagatgacccagtctccatcctccctgtctgcatctgtaggagacagagtcaacatcacttgccgggcaagtcacagcattagcaactatttaaattggtatcagcagaaagcagggaaagcccctaacctcttgatctatactacattgaatttgcaaagtggggtcccatcaaggttcagtggcagtggatctgggacagatttcactctcaccatcagcagtctgcaacctgaagattttgcaacttactactgtcaacagagttacagttctcctccgtggacgttcggccaagggaccaaggtggaaatcaaa

SEQ ID NO: 26578 - protein, 108 aa, synthetic construct
  REGION 1..108: note = Description of Artificial Sequence: Synthetic polypeptide
DIQMTQSPSSLSASVGDRVNITCRASHSISNYLNWYQQKAGKAPNLLIYTTLNLQSGVPSRFSGSGSGTDFTLTISSLQPEDFATYYCQQSYSSPPWTFGQGTKVEIK

SEQ ID NO: 26579 - DNA, 339 bp, synthetic construct
  misc_feature 1..339: note = Description of Artificial Sequence: Synthetic polynucleotide
  source 1..339: mol_type = other DNA
gacatcgtgatgacccagtctccagactccctggctgtgtctctgggcgagagggccaccatcaactgcaagtccagccagagtgttttacacagctccaacaattacaactacttaacttggtaccagcagaaaccaggacagcctcctaagctgctcatttactgggcatctacccgggaatccggggtccctgaccgattcagtggcagcgggtctgggacagatttcactctcaccatcagcagcctgcaggctgaagatgtggcagtttattactgtcatcagtattttattactccgtggacgttcggccaagggaccaaggtggaaatcaaa

SEQ ID NO: 26580 - protein, 113 aa, synthetic construct
  REGION 1..113: note = Description of Artificial Sequence: Synthetic polypeptide
DIVMTQSPDSLAVSLGERATINCKSSQSVLHSSNNYNYLTWYQQKPGQPPKLLIYWASTRESGVPDRFSGSGSGTDFTLTISSLQAEDVAVYYCHQYFITPWTFGQGTKVEIK

SEQ ID NO: 26581 - DNA, 321 bp, synthetic construct
  misc_feature 1..321: note = Description of Artificial Sequence: Synthetic polynucleotide
  source 1..321: mol_type = other DNA
gacatccagatgacccagtctccatcctccctgtctgcatctgtaggagacagagtcaccatcacttgccgggcaagtcagggcattagaaatgatttaggctggtatcagcagaaaccaggaaaagcccctaagcgcctgatctatactgcatccagtttgcaaagtggggtcccatcaaggttcagcggcagtggatctgggacagatttcactctcacaatcagcagcctgcagcctgaagattttgcatcttattactgtctacagcataatagttacccattcactttcggccctgggaccaaagtggatttcaaa

SEQ ID NO: 26582 - protein, 107 aa, synthetic construct
  REGION 1..107: note = Description of Artificial Sequence: Synthetic polypeptide
DIQMTQSPSSLSASVGDRVTITCRASQGIRNDLGWYQQKPGKAPKRLIYTASSLQSGVPSRFSGSGSGTDFTLTISSLQPEDFASYYCLQHNSYPFTFGPGTKVDFK

SEQ ID NO: 26583 - DNA, 336 bp, synthetic construct
  misc_feature 1..336: note = Description of Artificial Sequence: Synthetic polynucleotide
  source 1..336: mol_type = other DNA
gatattgtgatgacccagactccactctctctgtccgtcacccctggacagccggcctccatctcctgcaagtctagtcagagcctcctgcatggtgatggaaagacctatttgtattggtacctgcagaagccaggccagcctccacagctcctgatctatgaagtttccaatcggttctctggagtgccagataggttcagtggcagcgggtcagggacagatttcacacttaaaatcagccgggtggaggctgaggatgttggggtttatcactgcatgcaaagtatacagattccctggacgttcggccaagggaccaaggtggaaatcaaa

SEQ ID NO: 26584 - protein, 112 aa, synthetic construct
  REGION 1..112: note = Description of Artificial Sequence: Synthetic polypeptide
DIVMTQTPLSLSVTPGQPASISCKSSQSLLHGDGKTYLYWYLQKPGQPPQLLIYEVSNRFSGVPDRFSGSGSGTDFTLKISRVEAEDVGVYHCMQSIQIPWTFGQGTKVEIK

SEQ ID NO: 26585 - DNA, 321 bp, synthetic construct
  misc_feature 1..321: note = Description of Artificial Sequence: Synthetic polynucleotide
  source 1..321: mol_type = other DNA
gacatccagatgacccagtctccatcttccgtgtatgcatctgttggagacagagtcaccatcacttgtcgggcgagtcaggatattaccagctggttagcctggtatcagcagaaaccagggaaagcccctaaactcctgatctatgctgcatccagtttacaaagtggggtcccatcaaggttcagcggcagtggatctgggacagatttcattctcaccatcaccagcgtgcagcctgatgattttgcaacttactattgtcaacaggttaacagtttcccattcactttcggccacgggaccaaagtggatatcaaa

SEQ ID NO: 26586 - protein, 107 aa, synthetic construct
  REGION 1..107: note = Description of Artificial Sequence: Synthetic polypeptide
DIQMTQSPSSVYASVGDRVTITCRASQDITSWLAWYQQKPGKAPKLLIYAASSLQSGVPSRFSGSGSGTDFILTITSVQPDDFATYYCQQVNSFPFTFGHGTKVDIK

SEQ ID NO: 26587 - DNA, 321 bp, synthetic construct
  misc_feature 1..321: note = Description of Artificial Sequence: Synthetic polynucleotide
  source 1..321: mol_type = other DNA
gacatccagatgacccagtctccatcctccctgtctgcatctgtaggagacagagtcaccatcgcttgccaggcgagtcaggacattagcaactatttaaattggtatcagcagacaccagggaaagcccctaaggtcctgatctacgatgcatccaatttggaaacaggggtcccagcaaggttcagtggaagtggatctgggacagattttactttcaccatcagcagcctgcagcctgaagatattgcaacatattactgtcaacagtatgataatctccctctcactttcggcggagggaccaaggtggacatcaaa

SEQ ID NO: 26588 - protein, 107 aa, synthetic construct
  REGION 1..107: note = Description of Artificial Sequence: Synthetic polypeptide
DIQMTQSPSSLSASVGDRVTIACQASQDISNYLNWYQQTPGKAPKVLIYDASNLETGVPARFSGSGSGTDFTFTISSLQPEDIATYYCQQYDNLPLTFGGGTKVDIK

SEQ ID NO: 26589 - DNA, 324 bp, synthetic construct
  misc_feature 1..324: note = Description of Artificial Sequence: Synthetic polynucleotide
  source 1..324: mol_type = other DNA
gacatccagatgacccagtctccatcctccctgtgtgcctctgtaggagacagagtcaccatcacttgccgggcaagtcggaacatcagcaactatttaaattggtatcagcagaaaccagggaaagcccctaagctcctgatctatgttgtatccagtttgcaaagtggggtcccatcaaggttcagtggcagtggatctgggacagatttcactctcaccatcagcagtctacaacctgaagattttgcaacttactactgtcaacagagttacagttcccctccgtggacgttcggccaagggaccaaggtggatatcaga

SEQ ID NO: 26590 - protein, 108 aa, synthetic construct
  REGION 1..108: note = Description of Artificial Sequence: Synthetic polypeptide
DIQMTQSPSSLCASVGDRVTITCRASRNISNYLNWYQQKPGKAPKLLIYVVSSLQSGVPSRFSGSGSGTDFTLTISSLQPEDFATYYCQQSYSSPPWTFGQGTKVDIR

SEQ ID NO: 26591 - DNA, 327 bp, synthetic construct
  misc_feature 1..327: note = Description of Artificial Sequence: Synthetic polynucleotide
  source 1..327: mol_type = other DNA
gaaattgtgttgacgcagtctccaggcaccctgtctttgtctccaggggaaagagccaccctctcctgcagggccagtccgagtgttagcagcagattcttagcctggtaccagcagaaacctggccaggctcccaggctcctcatctatggtgcatccagcagggccactggcatcccagacaggttcagtggcagtgggtctgggacagacttcactctcaccaacagcagactggagcctgaagattttgcagtgtattactgtcagcagtatggtagctcacctccgtggacgttcggccaagggaccaaggtagaaatcaaa

SEQ ID NO: 26592 - protein, 109 aa, synthetic construct
  REGION 1..109: note = Description of Artificial Sequence: Synthetic polypeptide
EIVLTQSPGTLSLSPGERATLSCRASPSVSSRFLAWYQQKPGQAPRLLIYGASSRATGIPDRFSGSGSGTDFTLTNSRLEPEDFAVYYCQQYGSSPPWTFGQGTKVEIK

SEQ ID NO: 26593 - DNA, 321 bp, synthetic construct
  misc_feature 1..321: note = Description of Artificial Sequence: Synthetic polynucleotide
  source 1..321: mol_type = other DNA
gaaattgtgctgactcagtctccagactttcagtctgtggctccaaaggagaaagtcaccatcacctgccgggccagtcagagtattggtagtaacttacactggtaccagcagaaaccagatcagtctccgaaactcctcatcaagtctgcttcccagtccttctcaggggtcccctcgaggttcagtggcagtggatctgggacagatttcaccctcaccatcaatagcctggaaactgaagatgctgcaacgtattactgtcagcagagtagtagtttaccgtggacgttcggccaagggaccaaggtggaaatcaaa

SEQ ID NO: 26594 - protein, 107 aa, synthetic construct
  REGION 1..107: note = Description of Artificial Sequence: Synthetic polypeptide
EIVLTQSPDFQSVAPKEKVTITCRASQSIGSNLHWYQQKPDQSPKLLIKSASQSFSGVPSRFSGSGSGTDFTLTINSLETEDAATYYCQQSSSLPWTFGQGTKVEIK

SEQ ID NO: 26595 - DNA, 321 bp, synthetic construct
  misc_feature 1..321: note = Description of Artificial Sequence: Synthetic polynucleotide
  source 1..321: mol_type = other DNA
gacatccagatgacccagtctccttcctcactgtctgcatctgtaggagacagagtcaccatcacttgtcggacgagtcagggcattggcaattatttagcctggtttcagcagaaaccagggaaagcccctaagtccctgctctataaaacatccagtttacaaagtggggtcccatcaaagttcagcggcagtggatctgggacagatttcactctcaccatcagcagcctgcagcctgaagattttgcaacttattactgccaacagtatatgacttacccgctcactttcggcggagggaccaaggtggagatcaaa

SEQ ID NO: 26596 - protein, 107 aa, synthetic construct
  REGION 1..107: note = Description of Artificial Sequence: Synthetic polypeptide
DIQMTQSPSSLSASVGDRVTITCRTSQGIGNYLAWFQQKPGKAPKSLLYKTSSLQSGVPSKFSGSGSGTDFTLTISSLQPEDFATYYCQQYMTYPLTFGGGTKVEIK

SEQ ID NO: 26597 - DNA, 321 bp, synthetic construct
  misc_feature 1..321: note = Description of Artificial Sequence: Synthetic polynucleotide
  source 1..321: mol_type = other DNA
gaaatagtgatgacgcagtctccagccaccctgtctgtgtctccaggggaaagagccaccctctcctgcagggccagtcagagttttcgcatcaacttagcctggtaccagcagagacctggccaggctcccaggctcctcatctatggtgcatccaccagggccactggtatcccagccaggttcagtggcagtgggtctgggacagagttcactctcaccatcagcagcctgcagtctgaagattttgcagtttattactgtcagcagtataataactggccgctcactttcggcggagggaccaaggtggagatcaaa

SEQ ID NO: 26598 - protein, 107 aa, synthetic construct
  REGION 1..107: note = Description of Artificial Sequence: Synthetic polypeptide
EIVMTQSPATLSVSPGERATLSCRASQSFRINLAWYQQRPGQAPRLLIYGASTRATGIPARFSGSGSGTEFTLTISSLQSEDFAVYYCQQYNNWPLTFGGGTKVEIK

SEQ ID NO: 26599 - DNA, 321 bp, synthetic construct
  misc_feature 1..321: note = Description of Artificial Sequence: Synthetic polynucleotide
  source 1..321: mol_type = other DNA
gaaattgtgctgactcagtttccagactctcagtctgtgactccaaaggagaaagtcaccatcacctgccgggccagtcagaacattggtagtagcttacactggtaccagcagaaaccagaacagtctccaaaggtcctcatcaagtatgcttcccagtccttctcaggggtcccctcgaggttcagtggcagtggatctgggacagatttcaccctcaccatcaatagcctggaagctgaagatgctgcaacgtattactgtcatcagagtagtagtttccctcggacgttcggccaagggaccaaggtggaaatcaaa

SEQ ID NO: 26600 - protein, 107 aa, synthetic construct
  REGION 1..107: note = Description of Artificial Sequence: Synthetic polypeptide
EIVLTQFPDSQSVTPKEKVTITCRASQNIGSSLHWYQQKPEQSPKVLIKYASQSFSGVPSRFSGSGSGTDFTLTINSLEAEDAATYYCHQSSSFPRTFGQGTKVEIK

SEQ ID NO: 26601 - DNA, 321 bp, synthetic construct
  misc_feature 1..321: note = Description of Artificial Sequence: Synthetic polynucleotide
  source 1..321: mol_type = other DNA
gacatccagatgacccagtctccttcctcactgtctgcatctgtaggagacagagtcaccatcacttgtcggacgagtcagggcattggcaattatttagcctggtttcagcagaaaccagggaaagcccctaagtccctgctctataaagcatccagtttgcaaagtggggtcccatcaaagttcagcggcagtggatctgggacagatttcactctcaccatcagcagcctgcagcctgaagattttgcaacttattactgccaacagtatatgacttacccgctcactttcggcggagggaccaaggtggagatcaaa

SEQ ID NO: 26602 - protein, 107 aa, synthetic construct
  REGION 1..107: note = Description of Artificial Sequence: Synthetic polypeptide
DIQMTQSPSSLSASVGDRVTITCRTSQGIGNYLAWFQQKPGKAPKSLLYKASSLQSGVPSKFSGSGSGTDFTLTISSLQPEDFATYYCQQYMTYPLTFGGGTKVEIK

SEQ ID NO: 26603 - DNA, 336 bp, synthetic construct
  misc_feature 1..336: note = Description of Artificial Sequence: Synthetic polynucleotide
  source 1..336: mol_type = other DNA
gatattgtgatgacccagactccactctctctgtccgtcacccctggacagccggcctccatctcctgcaagtctagtcagagcctcctccatagtgatggaaggacctatttgtattggtacctgcagaagccaggccagcctccacagctcctgatctgtgaggtttccaaccggttcgctggagtgacagataggttcagtggcagcgggtcagggacagatttcacactgaaaatcagccgggtggaggctggggatgttggggtttattactgcatgcaaagtatacagtttccctggacgttcggccaagggaccaaggtggaaatcaaa

SEQ ID NO: 26604 - protein, 112 aa, synthetic construct
  REGION 1..112: note = Description of Artificial Sequence: Synthetic polypeptide
DIVMTQTPLSLSVTPGQPASISCKSSQSLLHSDGRTYLYWYLQKPGQPPQLLICEVSNRFAGVTDRFSGSGSGTDFTLKISRVEAGDVGVYYCMQSIQFPWTFGQGTKVEIK

SEQ ID NO: 26605 - DNA, 321 bp, synthetic construct
  misc_feature 1..321: note = Description of Artificial Sequence: Synthetic polynucleotide
  source 1..321: mol_type = other DNA
gaaattgtgctgactcagtctccagactttcagtctgtgactccaaaggagaaagtcaccatcacctgccgggccagtcagagtattggtagtagcttacactggtaccagcagaaaccagatcagtctccaaagctcctcatcaagtatgcttcccagtccttctcaggggacccctcgaggttcagtggcagtggatctgggacagatttcaccctcaccatcaatagcctggaagctgaagatgctgcaacgtattactgtcatcagactagaagtttacctctcactttcggcggagggaccaaggtggagatcaaa

SEQ ID NO: 26606 - protein, 107 aa, synthetic construct
  REGION 1..107: note = Description of Artificial Sequence: Synthetic polypeptide
EIVLTQSPDFQSVTPKEKVTITCRASQSIGSSLHWYQQKPDQSPKLLIKYASQSFSGDPSRFSGSGSGTDFTLTINSLEAEDAATYYCHQTRSLPLTFGGGTKVEIK

SEQ ID NO: 26607 - DNA, 321 bp, synthetic construct
  misc_feature 1..321: note = Description of Artificial Sequence: Synthetic polynucleotide
  source 1..321: mol_type = other DNA
gacatccagatgacccagtctccatcctccctgtctgcatctgtaggagacagagtcaccatcacttgccgggcaagtcagggcattagaaaagatttaggctggtatcagcagaaaccagggaaagcccctaagcgcctgatccatactgcatccagtttgcaaagtggggtcccattaaggttcagcggcagtggatctgggacagaattcactctcacaatcagcagcctgcagcctgaagattttgcaacttattactgtctacagcataatagttacccgtggacgttcggccaagggaccaaggtggaaatcaaa

SEQ ID NO: 26608 - protein, 107 aa, synthetic construct
  REGION 1..107: note = Description of Artificial Sequence: Synthetic polypeptide
DIQMTQSPSSLSASVGDRVTITCRASQGIRKDLGWYQQKPGKAPKRLIHTASSLQSGVPLRFSGSGSGTEFTLTISSLQPEDFATYYCLQHNSYPWTFGQGTKVEIK

SEQ ID NO: 26609 - DNA, 321 bp, synthetic construct
  misc_feature 1..321: note = Description of Artificial Sequence: Synthetic polynucleotide
  source 1..321: mol_type = other DNA
gacattcagatgacccagtctccatcctccctgtctgcatctgtaggagacagagtcaccatcacttgccgggcgagtcagggcattagcaattatttagcctggtatcagcagaaaccagggaaagtccctaaactcctgatctatgttgcatccactttgcaatcaggggtcccatctcggttcagtggcagtggatctgggacagatttcactctcaccatcagcagcctgcagcctgaagatgttgcaacttattactgtcaaaagtataacagtgccccattcactttcggccctgggaccaaagtggatatcaaa

SEQ ID NO: 26610 - protein, 107 aa, synthetic construct
  REGION 1..107: note = Description of Artificial Sequence: Synthetic polypeptide
DIQMTQSPSSLSASVGDRVTITCRASQGISNYLAWYQQKPGKVPKLLIYVASTLQSGVPSRFSGSGSGTDFTLTISSLQPEDVATYYCQKYNSAPFTFGPGTKVDIK

SEQ ID NO: 26611 - DNA, 321 bp, synthetic construct
  misc_feature 1..321: note = Description of Artificial Sequence: Synthetic polynucleotide
  source 1..321: mol_type = other DNA
gacatccagatgacccagtctccatcctcactgtctgcatctgtgggagacagagtcaccatcacttgtcgggcgagtcagggcattggcaagtatttagcctggtttcagcagaaaccagggaaagcccctaagtcactgatctatgctgcatccagtttgcaaagtggggtcccatcaaaattcagcggcagtggatctgggacagatttcactctcaccatcagcagcctgcagcctgacgattttgcaacttattactgccaacgatatgatacttacccattcactttcggccctgggaccaaagtggatatcaaa

SEQ ID NO: 26612 - protein, 107 aa, synthetic construct
  REGION 1..107: note = Description of Artificial Sequence: Synthetic polypeptide
DIQMTQSPSSLSASVGDRVTITCRASQGIGKYLAWFQQKPGKAPKSLIYAASSLQSGVPSKFSGSGSGTDFTLTISSLQPDDFATYYCQRYDTYPFTFGPGTKVDIK

SEQ ID NO: 26613 - DNA, 321 bp, synthetic construct
  misc_feature 1..321: note = Description of Artificial Sequence: Synthetic polynucleotide
  source 1..321: mol_type = other DNA
gacatccagatggcccagtctccttcctcactgtctgcatctgtaggagacagagtcaccatcacttgtcggacgagtcagggcattggcaagtatttagcctggtttcagcagaagccagggaaagcccctaagtccctgctctataaagcatccagtttgcaaggtggggtcccatcaaagttcagcggcagtggatctgggacagatttcactctcaccatcagcagcctgcagcctgaagattttgcaacttattactgccaacagtatatgacttacccgctcactttcggcggagggaccaaggtggagatcaaa

SEQ ID NO: 26614 - protein, 107 aa, synthetic construct
  REGION 1..107: note = Description of Artificial Sequence: Synthetic polypeptide
DIQMAQSPSSLSASVGDRVTITCRTSQGIGKYLAWFQQKPGKAPKSLLYKASSLQGGVPSKFSGSGSGTDFTLTISSLQPEDFATYYCQQYMTYPLTFGGGTKVEIK

SEQ ID NO: 26615 - DNA, 336 bp, synthetic construct
  misc_feature 1..336: note = Description of Artificial Sequence: Synthetic polynucleotide
  source 1..336: mol_type = other DNA
gacattgtgatgacccagactccactctctctgtccgtcacccctggacagccggcctccatctcctgtaggtctagtcagagcctcctgcatagtgatggaaagacctatttgttttggtacctgcagaagccaggccagcctccacaggtcctgatctatgaactttccaaccggttctctggagtgccagataggttcagtggcagcgggtcagggacagatttcacactgaaaatcagccgggtggaggctgaggatgttggggtttattactgcatgcaaagtttccagcttccctggacgttcggtcaagggaccaaggtggaaatcaat

SEQ ID NO: 26616 - protein, 112 aa, synthetic construct
  REGION 1..112: note = Description of Artificial Sequence: Synthetic polypeptide
DIVMTQTPLSLSVTPGQPASISCRSSQSLLHSDGKTYLFWYLQKPGQPPQVLIYELSNRFSGVPDRFSGSGSGTDFTLKISRVEAEDVGVYYCMQSFQLPWTFGQGTKVEIN

SEQ ID NO: 26617 - DNA, 339 bp, synthetic construct
  misc_feature 1..339: note = Description of Artificial Sequence: Synthetic polynucleotide
  source 1..339: mol_type = other DNA
gacatcatgatgacccagtctccagactccctggctgtgtctctgggcgagagggccatcatcagctgcaggtccagccagagtgttttacacagctccaacaattacaactacttagcttggtaccagcagaaaccaggacatcctcctaaactgctcatttactgggcatctacccgggaatccggggtccctgaccgattcagtggcagcgggtctgggacagatttcactctcaccatcagcagcctgcaggctgaagatgtggcagtttattactgtcaacaatattatagtactcctccgacgttcggcctagggaccaaggtggaaatcaaa

SEQ ID NO: 26618 - protein, 113 aa, synthetic construct
  REGION 1..113: note = Description of Artificial Sequence: Synthetic polypeptide
DIMMTQSPDSLAVSLGERAIISCRSSQSVLHSSNNYNYLAWYQQKPGHPPKLLIYWASTRESGVPDRFSGSGSGTDFTLTISSLQAEDVAVYYCQQYYSTPPTFGLGTKVEIK

SEQ ID NO: 26619 - DNA, 324 bp, synthetic construct
  misc_feature 1..324: note = Description of Artificial Sequence: Synthetic polynucleotide
  source 1..324: mol_type = other DNA
gaaattgtgttgacgcagtctccaggcaccctgtctttgtctccaggggaaagagccgccctctcctgcagggccagtcagagtattagcctcaacttcttagcctggtaccagcagaaacctggccaggctcccaggctcctcatctatggtgcatccagcagggccactggcatcccagacaggttcagtggcagtgggtctgggacagacttcactctcaccatcaatagactggagcctgaagattttgcagtgtattactgtcagcagtatggtaggtcaccgtggacgttcggccaagggaccaaggtggaagtcaaa

SEQ ID NO: 26620 - protein, 108 aa, synthetic construct
  REGION 1..108: note = Description of Artificial Sequence: Synthetic polypeptide
EIVLTQSPGTLSLSPGERAALSCRASQSISLNFLAWYQQKPGQAPRLLIYGASSRATGIPDRFSGSGSGTDFTLTINRLEPEDFAVYYCQQYGRSPWTFGQGTKVEVK

SEQ ID NO: 26621 - DNA, 321 bp, synthetic construct
  misc_feature 1..321: note = Description of Artificial Sequence: Synthetic polynucleotide
  source 1..321: mol_type = other DNA
gacatccagatgacccagtctccatcctcactgtctgcatctgtaggagacagagtcaccatcacttgtcgggcgagtcagggcattagcaattatttagcctggtttcagcagaaaccagggaaagcccctaagtccctgatctatgctgcatccagtttgcaaagtggggtcccatcaaagttcagcggcagtggatctggaacagatttcactctcaccatcagcagcctgcagcctgaagattttgcaacttattactgccaacattatcttacttaccctctcactttcggcggagggaccaaggtggagatcaaa

SEQ ID NO: 26622 - protein, 107 aa, synthetic construct
  REGION 1..107: note = Description of Artificial Sequence: Synthetic polypeptide
DIQMTQSPSSLSASVGDRVTITCRASQGISNYLAWFQQKPGKAPKSLIYAASSLQSGVPSKFSGSGSGTDFTLTISSLQPEDFATYYCQHYLTYPLTFGGGTKVEIK

SEQ ID NO: 26623 - DNA, 324 bp, synthetic construct
  misc_feature 1..324: note = Description of Artificial Sequence: Synthetic polynucleotide
  source 1..324: mol_type = other DNA
gaaattgtgttgacgcagtctccaggcaccctgtctttgtctccaggggaaagagccaccctctcctgcagggccagtcagagtattcgcagcagcttcttagcctggtaccagcagaaacctggccaggctcccaggctcctcatctatggtgcatccagcagggccactggcatcccagacaggttcagtggcagtgggtctgggacagacttcactctcaccatcagcagactggagcctgaagattttgcagtgtattactgtcagcaatatggtaactcaccgtgggcgttcggccaagggaccaaggtggaagtcaaa

SEQ ID NO: 26624 - protein, 108 aa, synthetic construct
  REGION 1..108: note = Description of Artificial Sequence: Synthetic polypeptide
EIVLTQSPGTLSLSPGERATLSCRASQSIRSSFLAWYQQKPGQAPRLLIYGASSRATGIPDRFSGSGSGTDFTLTISRLEPEDFAVYYCQQYGNSPWAFGQGTKVEVK

SEQ ID NO: 26625 - DNA, 324 bp, synthetic construct
  misc_feature 1..324: note = Description of Artificial Sequence: Synthetic polynucleotide
  source 1..324: mol_type = other DNA
gaaattgtgttgacgcagtctccaggcaccctgtctttgtctccaggggaaagagccaccctctcctgcagggccagtcagagtattcgcagcagcttcttagcctggtatcagcagaaacctggccaggctcccaggctcctcatctatggtgcatccagcagggccactggcatcccagacaggttcagtggcagtgggtctgggacagacttcactctcaccatcagcagactggagcctgaagattttgcagtgtattactgtcagcagtatggtaactcaccgtgggcgttcggccaagggaccaaggtggaaatcaaa

SEQ ID NO: 26626 - protein, 108 aa, synthetic construct
  REGION 1..108: note = Description of Artificial Sequence: Synthetic polypeptide
EIVLTQSPGTLSLSPGERATLSCRASQSIRSSFLAWYQQKPGQAPRLLIYGASSRATGIPDRFSGSGSGTDFTLTISRLEPEDFAVYYCQQYGNSPWAFGQGTKVEIK

SEQ ID NO: 26627 - DNA, 324 bp, synthetic construct
  misc_feature 1..324: note = Description of Artificial Sequence: Synthetic polynucleotide
  source 1..324: mol_type = other DNA
gaaattgtgttgacgcagtctccaggcaccctgtctttgtctccaggggaaagcgccaccctctcctgcagggccggtcaaagtattagaaccaacttcttagcctggtaccagcagcagcctggccaggctcccaggctcctcatctatggtgcatccagcagggccactggcatcccagacaggttcagtggcagtgggtctgggacagacttcactctcaccatcaacagactggagcctgaagattttgcagtgtattactgtcagcagtatggtagctcaccgtggacgttcggccaagggaccaaggtggaaatcaaa

SEQ ID NO: 26628 - protein, 108 aa, synthetic construct
  REGION 1..108: note = Description of Artificial Sequence: Synthetic polypeptide
EIVLTQSPGTLSLSPGESATLSCRAGQSIRTNFLAWYQQQPGQAPRLLIYGASSRATGIPDRFSGSGSGTDFTLTINRLEPEDFAVYYCQQYGSSPWTFGQGTKVEIK

SEQ ID NO: 26629 - DNA, 336 bp, synthetic construct
  misc_feature 1..336: note = Description of Artificial Sequence: Synthetic polynucleotide
  source 1..336: mol_type = other DNA
gatattgtaatgacccagactccactctctctgtccgtcacccctggacagccggcctccatctcctgcaagtctagtcagagcctcctccatagtgatggaaggacctatttgtattggtacctgcagaagccaggccagcctccacagctcctgatctgtgaggtttccaaccggttcgctggagtgacagataggttcagtggcagcgggtcagggacagatttcacactgaaaatcagccgggtggaggctggggatgttggggtttattactgcatgcaaagtatacaacttccctggacgttcggccaagggaccaaggtggaaatcaaa

SEQ ID NO: 26630 - protein, 112 aa, synthetic construct
  REGION 1..112: note = Description of Artificial Sequence: Synthetic polypeptide
DIVMTQTPLSLSVTPGQPASISCKSSQSLLHSDGRTYLYWYLQKPGQPPQLLICEVSNRFAGVTDRFSGSGSGTDFTLKISRVEAGDVGVYYCMQSIQLPWTFGQGTKVEIK

SEQ ID NO: 26631 - DNA, 339 bp, synthetic construct
  misc_feature 1..339: note = Description of Artificial Sequence: Synthetic polynucleotide
  source 1..339: mol_type = other DNA
gacatcgtgatgacccagtctccagactccctggctgtgtctctgggcgagagggccaccatcgactgtaagtccagccagagtgttttacacagctccaacagttacaactacttagcttggtaccagcagaaattaggacagcctcctaaactgctcatttactgggcatctacccgaaaatccggggtccctgaccgattcagtggcagcgggtctgggacagatttcactctcaccatcagcagcctgcaggctgaagatgtggcattttattactgtcagcaatattatagtagtcctcccactttcggccctgggaccaaaatggatatcaaa

SEQ ID NO: 26632 - protein, 113 aa, synthetic construct
  REGION 1..113: note = Description of Artificial Sequence: Synthetic polypeptide
DIVMTQSPDSLAVSLGERATIDCKSSQSVLHSSNSYNYLAWYQQKLGQPPKLLIYWASTRKSGVPDRFSGSGSGTDFTLTISSLQAEDVAFYYCQQYYSSPPTFGPGTKMDIK

SEQ ID NO: 26633 - DNA, 321 bp, synthetic construct
  misc_feature 1..321: note = Description of Artificial Sequence: Synthetic polynucleotide
  source 1..321: mol_type = other DNA
gacatccagatgacccagtctccatcctccctgtctgcatctgtaggagacagagtcaccatcacttgccgggcaagtcagggcattagaaaagatttaggctggtatcagcagaaaccagggaaagcccctaagcgcctgatccatactgcatccagtttgcaaaatggggtcccattaaggttcagcggcagtggatctgggacagaattcactctcacaatcagcagcctgcagcctgaagattttgcaacttattactgtctacagcataatagttacccgtggacgttcggccaagggaccaaggtggaaatcaaa

SEQ ID NO: 26634 - protein, 107 aa, synthetic construct
  REGION 1..107: note = Description of Artificial Sequence: Synthetic polypeptide
DIQMTQSPSSLSASVGDRVTITCRASQGIRKDLGWYQQKPGKAPKRLIHTASSLQNGVPLRFSGSGSGTEFTLTISSLQPEDFATYYCLQHNSYPWTFGQGTKVEIK

SEQ ID NO: 26635 - DNA, 321 bp, synthetic construct; identical to SEQ ID NO: 26601
  misc_feature 1..321: note = Description of Artificial Sequence: Synthetic polynucleotide
  source 1..321: mol_type = other DNA

SEQ ID NO: 26636 - protein, 107 aa, synthetic construct; identical to SEQ ID NO: 26602
  REGION 1..107: note = Description of Artificial Sequence: Synthetic polypeptide

SEQ ID NO: 26637 - DNA, 321 bp, synthetic construct
  misc_feature 1..321: note = Description of Artificial Sequence: Synthetic polynucleotide
  source 1..321: mol_type = other DNA
gacatccagatgacccagtctccatcctcactgtctgcatctgtaggagacagagtcaccatcacttgtcgggcgagtcaggggattggcaatcatttagcctggtttcagcagaaaccagggaaagcccctaagtccctgatccatgctgcatccagtttgcaaagtggggtcccatcaaagttcagcggcagtggatctgggacagatttcactctcaccatcagcagcctgcagcctgaagattttgcaacttattactgccaacagtatagtaattacccagtcactttcggccctgggaccaaagtggatatcaaa

SEQ ID NO: 26638 - protein, 107 aa, synthetic construct
  REGION 1..107: note = Description of Artificial Sequence: Synthetic polypeptide
DIQMTQSPSSLSASVGDRVTITCRASQGIGNHLAWFQQKPGKAPKSLIHAASSLQSGVPSKFSGSGSGTDFTLTISSLQPEDFATYYCQQYSNYPVTFGPGTKVDIK

SEQ ID NO: 26639 - DNA, 321 bp, synthetic construct
  misc_feature 1..321: note = Description of Artificial Sequence: Synthetic polynucleotide
  source 1..321: mol_type = other DNA
gaaattgtgctgactcagtctccagactttcagtctgtgactccaaaggagaaagtcaccatcacctgccgggccaatcagagcattggtagtagcttacactggtaccagcagaaaccagatcagtctccaaagctcctcatcaagtatgcttcccagtccctctcaggggtcccctcgaggttcagtgccagtggatctgggacagatttcaccctcaccatcaatagcctggatgctgaagatgctgcaacgtattactgtcatcagactggtaggttacctctcactttcggcggagggaccaaggtggagatcaaa

SEQ ID NO: 26640 - protein, 107 aa, synthetic construct
  REGION 1..107: note = Description of Artificial Sequence: Synthetic polypeptide
EIVLTQSPDFQSVTPKEKVTITCRANQSIGSSLHWYQQKPDQSPKLLIKYASQSLSGVPSRFSASGSGTDFTLTINSLDAEDAATYYCHQTGRLPLTFGGGTKVEIK

SEQ ID NO: 26641 - DNA, 327 bp, synthetic construct
  misc_feature 1..327: note = Description of Artificial Sequence: Synthetic polynucleotide
  source 1..327: mol_type = other DNA
gaaattgtgttgacgcagtctccaggcaccctgtctttgtctccaggggaaagagccaccctctcctgcagggccagtcagagtgttagcagcaggttcttagcctggtaccagcagaaacctggccaggctcccaggctcctcatctatggtgcttccaacagggccactggcatccccgacaggttcagtggcagtgggtctgggacagacttcactctcaccatcagcagactggagcctgaagattttgcagtgtattactgtcagcagtatggtggttcacctccgtggacgttcgtccaagggaccaaggtggaaatcaaa

SEQ ID NO: 26642 - protein, 109 aa, synthetic construct
  REGION 1..109: note = Description of Artificial Sequence: Synthetic polypeptide
EIVLTQSPGTLSLSPGERATLSCRASQSVSSRFLAWYQQKPGQAPRLLIYGASNRATGIPDRFSGSGSGTDFTLTISRLEPEDFAVYYCQQYGGSPPWTFVQGTKVEIK

SEQ ID NO: 26643 - DNA, 321 bp, synthetic construct
  misc_feature 1..321: note = Description of Artificial Sequence: Synthetic polynucleotide
  source 1..321: mol_type = other DNA
gaaattgtgctgactcagtttccagactctcagtctgtgactccaaaggagaaagtcaccatcacctgccgggccagtcagagcattggtagtagcttacactggtaccagcagaaaccagatcagtctccaaagctcctcatcaagtatgcttcccagtccttctcaggggtcccctcgaggttcagtggcagtggatctgggacagatttcaccctcaccatcaatagtctggaggctgaagatgctgcaacgtattactgtcatcagagtagtagtttccctcggacgttcggccaagggaccaaggtggaaatcaaa

SEQ ID NO: 26644 - protein, 107 aa, synthetic construct
  REGION 1..107: note = Description of Artificial Sequence: Synthetic polypeptide
EIVLTQFPDSQSVTPKEKVTITCRASQSIGSSLHWYQQKPDQSPKLLIKYASQSFSGVPSRFSGSGSGTDFTLTINSLEAEDAATYYCHQSSSFPRTFGQGTKVEIK

SEQ ID NO: 26645 - DNA, 321 bp, synthetic construct
  misc_feature 1..321: note = Description of Artificial Sequence: Synthetic polynucleotide
  source 1..321: mol_type = other DNA
gacatccagatgacccagtctccatcctcactgtctgcatctgttggagacagagtcaccatcacttgtcgggcgagtcagggcattagaaattatttagcctggtttcagcagaaaccagggaaagcccctaagtccctgatctatgttgcatccagtttggaaagtggggtcccatcaaagttcagtggcagtggatctgggacagagttcactctcaccatcagcagcctgcaacctgaagattttggaacttattactgccaacagtatcttaattacccagtcactttcggccctgggaccaaagtggatatcaga

SEQ ID NO: 26646 - protein, 107 aa, synthetic construct
  REGION 1..107: note = Description of Artificial Sequence: Synthetic polypeptide
DIQMTQSPSSLSASVGDRVTITCRASQGIRNYLAWFQQKPGKAPKSLIYVASSLESGVPSKFSGSGSGTEFTLTISSLQPEDFGTYYCQQYLNYPVTFGPGTKVDIR

SEQ ID NO: 26647 - DNA, 336 bp, synthetic construct
  misc_feature 1..336: note = Description of Artificial Sequence: Synthetic polynucleotide
  source 1..336: mol_type = other DNA
gatattgtgatgacccagactccactctctctgtccgtcacccctggacagccggcctccatctcctgcaagtctagtcagagcctcctccatagtgatggaaggacctatttgtattggtacctgcagaagccaggccagcctccacagctcctgatctgtgaggtttccaaccggttcgctggagtgacagataggttcagtggcagcgggtcagggacagatttcacactgaaaatcagccgggtggaggctggggatgttgggatttattactgcatgcaaagtatacattttccctggacgttcggccaagggaccaaggtggaaatcaaa

SEQ ID NO: 26648 - protein, 112 aa, synthetic construct
  REGION 1..112: note = Description of Artificial Sequence: Synthetic polypeptide
DIVMTQTPLSLSVTPGQPASISCKSSQSLLHSDGRTYLYWYLQKPGQPPQLLICEVSNRFAGVTDRFSGSGSGTDFTLKISRVEAGDVGIYYCMQSIHFPWTFGQGTKVEIK

SEQ ID NO: 26649 - DNA, 321 bp, synthetic construct
  misc_feature 1..321: note = Description of Artificial Sequence: Synthetic polynucleotide
  source 1..321: mol_type = other DNA
gacatccagatgacccagtctccatcctcactgtctgcatctgtaggagacagagtcaccatcacttgtcgggcgagtcaggacattggcagatatttagcctggtttcagcagaagccagggaaagcccctaagtccctgatctatgctgcatccagtttgcaaagtggggtcccatcaaagttcagcggcagtggatctgggacagatttcactctcaccatcagcagcctgcagcctgaaaattttgcaacttattactgccaacaatatagtacttacccgctcactttcggcggagggaccaaggtggagatcaaa

SEQ ID NO: 26650 - protein, 107 aa, synthetic construct
  REGION 1..107: note = Description of Artificial Sequence: Synthetic polypeptide
DIQMTQSPSSLSASVGDRVTITCRASQDIGRYLAWFQQKPGKAPKSLIYAASSLQSGVPSKFSGSGSGTDFTLTISSLQPENFATYYCQQYSTYPLTFGGGTKVEIK

SEQ ID NO: 26651 - DNA, 321 bp, synthetic construct
  misc_feature 1..321: note = Description of Artificial Sequence: Synthetic polynucleotide
  source 1..321: mol_type = other DNA
gacatccagatgacccagtctccatcttccgtgtctgcatctgtaggagacagagtcaccatcacttgtcgggcgagtcagggtattaacaactggttagcctggtatcagcagaaaccagggaaagcccctaagctcctgatctatggtgtttccagtttgcagagtggggtcccatcaaggttcagcggcagtggatctgggacagatttcactctcaccatcagcagcctgcagcctgaagattttgcaacttactcttgtcaacaggctaacagtttcccgtggacgttcggccaagggaccaaggtggaaatcaga

SEQ ID NO: 26652 - protein, 107 aa, synthetic construct
  REGION 1..107: note = Description of Artificial Sequence: Synthetic polypeptide
DIQMTQSPSSVSASVGDRVTITCRASQGINNWLAWYQQKPGKAPKLLIYGVSSLQSGVPSRFSGSGSGTDFTLTISSLQPEDFATYSCQQANSFPWTFGQGTKVEIR

SEQ ID NO: 26653 - DNA, 321 bp, synthetic construct
  misc_feature 1..321: note = Description of Artificial Sequence: Synthetic polynucleotide
  source 1..321: mol_type = other DNA
gacatccagatgacccagtctccatcctcacggtctgcatctataggagagagagtcaccatcacttgtcgggcgagtcagggcattagcaattatttagcctggattcagcagaaaccagggacagcccctaagtcccttatttatgctgcatccagtttgcaaagtggggtttcatcaaggtttagcggcagtggatttgggacagatttcactatcaccatcagtagtgtgcagcgtgaagattttgcaacttattactgccaacagtataatggttacccattcactttcggccatgggaccaaagtggatatcaaa

SEQ ID NO: 26654 - protein, 107 aa, synthetic construct
  REGION 1..107: note = Description of Artificial Sequence: Synthetic polypeptide
DIQMTQSPSSRSASIGERVTITCRASQGISNYLAWIQQKPGTAPKSLIYAASSLQSGVSSRFSGSGFGTDFTITISSVQREDFATYYCQQYNGYPFTFGHGTKVDIK

SEQ ID NO: 26655 - DNA, 321 bp, synthetic construct
  misc_feature 1..321: note = Description of Artificial Sequence: Synthetic polynucleotide
  source 1..321: mol_type = other DNA
gacatccagatgacccagtctccatcctccctgtctgcatctgtaggagacagagtcaccatcacttgccgggcaagtcagggcattagaaatgatttaggctggtatcagcagaaaccagggaaagcccctaagcgcctgatctatattgcatccagtttgcaaagtggggtcccatcaaggttcagcggcagtggatctgggacagaattcactctcacaatcagcagcctgcagcctgaagattttgcaacttattactgtctacagcataatagttacccattcactttcggccctgggaccaaagtggatatcaaa

SEQ ID NO: 26656 - protein, 107 aa, synthetic construct
  REGION 1..107: note = Description of Artificial Sequence: Synthetic polypeptide
DIQMTQSPSSLSASVGDRVTITCRASQGIRNDLGWYQQKPGKAPKRLIYIASSLQSGVPSRFSGSGSGTEFTLTISSLQPEDFATYYCLQHNSYPFTFGPGTKVDIK

SEQ ID NO: 26657 - DNA, 321 bp, synthetic construct; identical to SEQ ID NO: 26655
  misc_feature 1..321: note = Description of Artificial Sequence: Synthetic polynucleotide
  source 1..321: mol_type = other DNA

SEQ ID NO: 26658 - protein, 107 aa, synthetic construct; identical to SEQ ID NO: 26656
  REGION 1..107: note = Description of Artificial Sequence: Synthetic polypeptide

SEQ ID NO: 26659 - DNA, 321 bp, synthetic construct
  misc_feature 1..321: note = Description of Artificial Sequence: Synthetic polynucleotide
  source 1..321: mol_type = other DNA
gacatccagatgacccagtctccatcctcactgtctgcatctgtaggagacagagtcaccatcacttgtcgggcgagtcagggcattagcaattatttagcctggtttcagcagacaccagggaaagcccctaagtccctgatctctgttgcatccagtttgcaaagtggggtcccatcaagattcagcgccagtggatctgggacagatttcactctcaccatcagcagcctgcagcctgaagattttgcaacttattactgccgacaatatcatagttacccattcactttcggccctgggaccaaagtggatatcaaa

SEQ ID NO: 26660 - protein, 107 aa, synthetic construct
  REGION 1..107: note = Description of Artificial Sequence: Synthetic polypeptide
DIQMTQSPSSLSASVGDRVTITCRASQGISNYLAWFQQTPGKAPKSLISVASSLQSGVPSRFSASGSGTDFTLTISSLQPEDFATYYCRQYHSYPFTFGPGTKVDIK

SEQ ID NO: 26661 - DNA, 321 bp, synthetic construct
  misc_feature 1..321: note = Description of Artificial Sequence: Synthetic polynucleotide
  source 1..321: mol_type = other DNA
gacatccagatgacccagtctccatcctcacggtctgcatctataggagagagagtcaccatcacttgtcgggcgagtcagggcattagcaattatttagcctggattcagcagaaaccagggacagcccctaagtcccttatctatgctgcatccagtttgcaaagtggggtttcatcaaggtttagcggcagtggatttgggacagatttcactctcaccatcagtagtctgcagcctgaagattttgcaacttattactgccaacagtataatggttacccattcactttcggccctgggaccaaagtggatatcaaa

SEQ ID NO: 26662 - protein, 107 aa, synthetic construct
  REGION 1..107: note = Description of Artificial Sequence: Synthetic polypeptide
DIQMTQSPSSRSASIGERVTITCRASQGISNYLAWIQQKPGTAPKSLIYAASSLQSGVSSRFSGSGFGTDFTLTISSLQPEDFATYYCQQYNGYPFTFGPGTKVDIK

SEQ ID NO: 26663 - DNA, 336 bp, synthetic construct
  misc_feature 1..336: note = Description of Artificial Sequence: Synthetic polynucleotide
  source 1..336: mol_type = other DNA
gatgttgtgatggcccagactccactctctctgtccgtcacccctggacagccggcctccatctcctgcaagtctagtcagagcctcctgcatggtgatggaaagacctatttgtgttggtacctccagaagccaggccagcctccacagctcctgatctatgaagtttccaagcggttctctggagtgccagataggttcagtggcagcgggtcagggacagatttcacactgaaaatcagccgggtggaggctgaggatgttggggtctattactgcatgcaaagtatacaggttccctggacgttcggccaagggaccaaggtggaaatcaaa

SEQ ID NO: 26664 - protein, 112 aa, synthetic construct
  REGION 1..112: note = Description of Artificial Sequence: Synthetic polypeptide
DVVMAQTPLSLSVTPGQPASISCKSSQSLLHGDGKTYLCWYLQKPGQPPQLLIYEVSKRFSGVPDRFSGSGSGTDFTLKISRVEAEDVGVYYCMQSIQVPWTFGQGTKVEIK

SEQ ID NO: 26665 - DNA, 321 bp, synthetic construct
  misc_feature 1..321: note = Description of Artificial Sequence: Synthetic polynucleotide
  source 1..321: mol_type = other DNA
gacatccagatgacccagtctccatcttccgtgtctgcatctgttggagacagagtcaccatcacttgtcgggcgagtcaggatattaccagctggttagcctggtatcagcagaaaccagggaaagcccctaaactcctgatctatgctgcatccagtttacaaagtggggtcccatcaaggttcagcggcagtggatctgggacagatttcattctcaccatcaccagcgtgcagcctgatgattttgcaacttactattgtcaacaggttaacagtttcccattcactttcggccatgggaccaaagtggatatcaaa

SEQ ID NO: 26666 - protein, 107 aa, synthetic construct
  REGION 1..107: note = Description of Artificial Sequence: Synthetic polypeptide
DIQMTQSPSSVSASVGDRVTITCRASQDITSWLAWYQQKPGKAPKLLIYAASSLQSGVPSRFSGSGSGTDFILTITSVQPDDFATYYCQQVNSFPFTFGHGTKVDIK

SEQ ID NO: 26667 - DNA, 321 bp, synthetic construct
  misc_feature 1..321: note = Description of Artificial Sequence: Synthetic polynucleotide
  source 1..321: mol_type = other DNA
gacatccagatgacccagtctccatcctcactgtctgcatctataggagagagagtcaccatcacttgtcgggcgagtcagggcattagcaattatttagcctggcttcagcagaaaccagggacagcccctaagtccctgatctatgctgcttccagtttgcaaagtggggtctcatcaaggttcagcggcagtggatttgggacagatttcactctcaccatcagtagtctgcagcctgaagattttgcaacttattactgccaacagtataatagttatccattcactttcggccctgggaccaaagtggatatcaaa

SEQ ID NO: 26668 - protein, 107 aa, synthetic construct
  REGION 1..107: note = Description of Artificial Sequence: Synthetic polypeptide
DIQMTQSPSSLSASIGERVTITCRASQGISNYLAWLQQKPGTAPKSLIYAASSLQSGVSSRFSGSGFGTDFTLTISSLQPEDFATYYCQQYNSYPFTFGPGTKVDIK

SEQ ID NO: 26669 - DNA, 321 bp, synthetic construct
  misc_feature 1..321: note = Description of Artificial Sequence: Synthetic polynucleotide
  source 1..321: mol_type = other DNA
gacatccagatgacccagtctccatcttccgtgtctgcatctgtaggagacagagtcaccatcacttgtcgggcgaatcaggatatttccagctggttagcctggtatcagcagaaaccagggaaagcccctaagctcctgatctatgctgcatccaatttgcaaagtggggtcccatcagggttcagcggcagtggatctgggacagatttcactctcaccatcagcagcctgcagcctgaagattttgcaacttactattgtcagcaggctaacagtttcccgtggacgttcggccaagggaccaaggtggaaatcaag

SEQ ID NO: 26670 - protein, 107 aa, synthetic construct
  REGION 1..107: note = Description of Artificial Sequence: Synthetic polypeptide
DIQMTQSPSSVSASVGDRVTITCRANQDISSWLAWYQQKPGKAPKLLIYAASNLQSGVPSGFSGSGSGTDFTLTISSLQPEDFATYYCQQANSFPWTFGQGTKVEIK

SEQ ID NO: 26671 - DNA, 321 bp, synthetic construct
  misc_feature 1..321: note = Description of Artificial Sequence: Synthetic polynucleotide
  source 1..321: mol_type = other DNA
gacatccagatgacccagtctccatcctcactgtctgcatctataggagagagagtcaccatcacttgtcgggcgagtcagggcattagcaattatttagcctggcttcagcagaaaccagggacagcccctaagtccctgatctatgctgcatccagtttgcaaagtggggtctcatcaaggttcagcggcagtggatttgggacagatttcactctcaccatcagtagtctgcagcctgaagattttgcaacttattactgccaacagtataatagttacccattcactttcggccctgggaccaaagtggatatcaaa

SEQ ID NO: 26672 - protein, 107 aa, synthetic construct; identical to SEQ ID NO: 26668
  REGION 1..107: note = Description of Artificial Sequence: Synthetic polypeptide

SEQ ID NO: 26673 - DNA, 336 bp, synthetic construct
  misc_feature 1..336: note = Description of Artificial Sequence: Synthetic polynucleotide
  source 1..336: mol_type = other DNA
gatattgtgatgacccagactccactctctctgtccgtcacccctggacagccggcctccatctcctgcatgtctagtcagagcctcctgcatggtgatggaaagacctatttatattggtacctgcagaagcccggccagcctccacagctcctgatctatgaagtttccaaccggttctctggagtgccagatacgttcagtggcagcgggtcagggacagatttcacactgaaaatcagccgggtggaggctgaggatgttggggtttattactgcatgcaaagtatacagattccttggacgttcggccaagggaccaaggtggaaatcaaa

SEQ ID NO: 26674 - protein, 112 aa, synthetic construct
  REGION 1..112: note = Description of Artificial Sequence: Synthetic polypeptide
DIVMTQTPLSLSVTPGQPASISCMSSQSLLHGDGKTYLYWYLQKPGQPPQLLIYEVSNRFSGVPDTFSGSGSGTDFTLKISRVEAEDVGVYYCMQSIQIPWTFGQGTKVEIK

SEQ ID NO: 26675 - DNA, 336 bp, synthetic construct
  misc_feature 1..336: note = Description of Artificial Sequence: Synthetic polynucleotide
  source 1..336: mol_type = other DNA
gatattgtgatgacccagactccactctctctgtccgtcacccctggacagccggcctccatctcctgcaagtctagtcagagcctcctgcatggtgatggaaagacctatttgttttggtacctgcagaagccaggccagcctccacaactcctgatctatgaagtttccaaccggttctctggagtgtcagataggttcagtggcagcgggtcagggacagatttcacactgaaaatcagccgggtggaggctgaggatgttggggtttactactgcatgcaaagtatacagattccgtggacgttcggccaagggaccaaggtggagatcaaa

SEQ ID NO: 26676 - protein, 112 aa, synthetic construct
  REGION 1..112: note = Description of Artificial Sequence: Synthetic polypeptide
DIVMTQTPLSLSVTPGQPASISCKSSQSLLHGDGKTYLFWYLQKPGQPPQLLIYEVSNRFSGVSDRFSGSGSGTDFTLKISRVEAEDVGVYYCMQSIQIPWTFGQGTKVEIK

SEQ ID NO: 26677 - DNA, 339 bp, synthetic construct
  misc_feature 1..339: note = Description of Artificial Sequence: Synthetic polynucleotide
  source 1..339: mol_type = other DNA
gacatcgtgatgacccagtctccagactccctggctgtgtctctgggcgagagggccaccatcaactgcaagtccagccagagtgttttattcaactccaacaataagaactacttagcttggtaccagcagaaaccaggtcagcctcctaacctgctcatttactgggcatctacccgggaatccggggtccctgaccgattcagtggcagcgggtctgggacagatttcactctcaccatcagcagcatgcaggctgaagatgtggcagtttattactgtcagcaatattgtagtcttccattcactttcggccctgggaccaaagtggatatcaga

SEQ ID NO: 26678 - protein, 113 aa, synthetic construct
  REGION 1..113: note = Description of Artificial Sequence: Synthetic polypeptide
DIVMTQSPDSLAVSLGERATINCKSSQSVLFNSNNKNYLAWYQQKPGQPPNLLIYWASTRESGVPDRFSGSGSGTDFTLTISSMQAEDVAVYYCQQYCSLPFTFGPGTKVDIR

SEQ ID NO: 26679 - DNA, 324 bp, synthetic construct
  misc_feature 1..324: note = Description of Artificial Sequence: Synthetic polynucleotide
  source 1..324: mol_type = other DNA
gaaattatgttgacgcagtctccaggcaccctgtctttgtctccaggggaaagagccaccctctcctgcagggccagtcagaatataaggagcaacttcttagcctggtaccagcagaaacctggccaggctcccaggctcctcatctatggtgcatccagcagggccactggcatcccagacagattcagtggcagtgtgtctgggacagacttcactctcaccatcaacagactggagcctgaagattttgcggtgtattactgtcagcagtatggtaactcaccgtggacgttcggccaagggaccaaggtggaaatcaaa

SEQ ID NO: 26680 - protein, 108 aa, synthetic construct
  REGION 1..108: note = Description of Artificial Sequence: Synthetic polypeptide
EIMLTQSPGTLSLSPGERATLSCRASQNIRSNFLAWYQQKPGQAPRLLIYGASSRATGIPDRFSGSVSGTDFTLTINRLEPEDFAVYYCQQYGNSPWTFGQGTKVEIK

SEQ ID NO: 26681 - DNA, 321 bp, synthetic construct
  misc_feature 1..321: note = Description of Artificial Sequence: Synthetic polynucleotide
  source 1..321: mol_type = other DNA
gacatccagatgacccagtctccatcctccctgtctgcatctgtaagagacagagtcaccatcacttgccgggcaagtcagggcattagaaaagatttaggctggtatcagcagaaaccagggaaagcccctaagcgcctgatccatactgcatccagtttgcaaagtggggtcccattaaggttcagcggcagtggatctgggacagaattcactctcacaatcagcagcctgcagcctgaagattttgcaacttattactgtctacagcataatagttacccgtggacgttcggccaagggaccaaggtggaaatcaaa

SEQ ID NO: 26682 - protein, 107 aa, synthetic construct
  REGION 1..107: note = Description of Artificial Sequence: Synthetic polypeptide
DIQMTQSPSSLSASVRDRVTITCRASQGIRKDLGWYQQKPGKAPKRLIHTASSLQSGVPLRFSGSGSGTEFTLTISSLQPEDFATYYCLQHNSYPWTFGQGTKVEIK

SEQ ID NO: 26683 - DNA, 321 bp, synthetic construct
  misc_feature 1..321: note = Description of Artificial Sequence: Synthetic polynucleotide
  source 1..321: mol_type = other DNA
gacatccagatgacccagtctccatcttccgtgtctgcatctgtaggagacagagtcaccatcacttgtcgggcgagtcagggtcttaacaactggttagcctggtatcagctgaaaccagggaaagcccctaagctcctgatctatgctgtgtccagtttgcaaagtggggtcccatcaaggttcagcggcagtggatctgggtcagagttcactctcaccatcagcagcctgcagcctgaagattttgcaacttaccattgtcaacaggctaacagtctcccgtggacgttcggccaagggaccaaggtggaaatcaaa

SEQ ID NO: 26684 - protein, 107 aa, synthetic construct
  REGION 1..107: note = Description of Artificial Sequence: Synthetic polypeptide
DIQMTQSPSSVSASVGDRVTITCRASQGLNNWLAWYQLKPGKAPKLLIYAVSSLQSGVPSRFSGSGSGSEFTLTISSLQPEDFATYHCQQANSLPWTFGQGTKVEIK

SEQ ID NO: 26685 - DNA, 324 bp, synthetic construct
  misc_feature 1..324: note = Description of Artificial Sequence: Synthetic polynucleotide
  source 1..324: mol_type = other DNA
gaaattgtgttgacgcagtctccaggcaccctgtctttgtctccaggggaaagagccacactctcctgcagggccagtcagagtattcgcagcagcttcttagcctggtaccagcagaaacctggccaggctcccaggctcctcatctatggtgcatccagcagggccactggcatcccagacaggttcagtggcagtgggtctgggacagacttcactctcaccatcagcagactggagcctgaagattttgcagtgtattactgtcagcagtatggtaactcaccgtgggcgttcggccaagggaccaaggtggaaatcaaa

SEQ ID NO: 26686 - protein, 108 aa, synthetic construct; identical to SEQ ID NO: 26626
  REGION 1..108: note = Description of Artificial Sequence: Synthetic polypeptide

SEQ ID NO: 26687 - DNA, 324 bp, synthetic construct
  misc_feature 1..324: note = Description of Artificial Sequence: Synthetic polynucleotide
  source 1..324: mol_type = other DNA
gaaattgtgttgacgcagtctccaggcaccctgtctttgtctccaggggaaagagccaccctctcctgcagggccagtcagagtgttagaagcaacttcttagcctggcaccagcagaaacctggccaggctcccaggctcctcatctatggtgcataccgcagggccactggcatcccagacaggttcagtggcagtgggtctgggacagacttcactctcaccatcaacagactggagcctgaagattttgcagtgtattactgtcagcagtatggtaactcaccgtggacgttcggccaagggaccaaggtggaaatcaaa

SEQ ID NO: 26688 - protein, 108 aa, synthetic construct
  REGION 1..108: note = Description of Artificial Sequence: Synthetic polypeptide
EIVLTQSPGTLSLSPGERATLSCRASQSVRSNFLAWHQQKPGQAPRLLIYGAYRRATGIPDRFSGSGSGTDFTLTINRLEPEDFAVYYCQQYGNSPWTFGQGTKVEIK

SEQ ID NO: 26689 - DNA, 339 bp, synthetic construct
  misc_feature 1..339: note = Description of Artificial Sequence: Synthetic polynucleotide
  source 1..339: mol_type = other DNA
gccaacgtgatgacccagtctccagactccctggctgtgtctctgggcgagaggaccaccatcaactgcaagtccagccagagtgttttacacagctccaacaattacaactacttagcttggtaccggcagaaaccaggacagcctcctaagctgctcatttactgggcatctacccgggaatccggggtccctgaccgattcagtggcagcgggtctggtacagatttcactctcaccatcagcagcctgcaggctgaagatgtggcagtttattactgtcagcaatattatagtattcctcccactttcggccctgggaccaaagtggatatcaaa

SEQ ID NO: 26690 - protein, 113 aa, synthetic construct
  REGION 1..113: note = Description of Artificial Sequence: Synthetic polypeptide
ANVMTQSPDSLAVSLGERTTINCKSSQSVLHSSNNYNYLAWYRQKPGQPPKLLIYWASTRESGVPDRFSGSGSGTDFTLTISSLQAEDVAVYYCQQYYSIPPTFGPGTKVDIK

SEQ ID NO: 26691 - DNA, 321 bp, synthetic construct
  misc_feature 1..321: note = Description of Artificial Sequence: Synthetic polynucleotide
  source 1..321: mol_type = other DNA
gaaattgtgctgactcagtctccagactttcagtctgtggctccaaaggagaaagtcaccatcacctgccgggccagtcagagtattggtagtaacttacactggtaccagcagaaacctgatcagtctccaaagctcctcatcaagtctgcttcccagtccttctcaggggtcccctcgaggttcagtggcagtggatctgggacagatttcaccctcaccatcaatagcctggaaactgaagatgctgcaacgtattactgtcagcagagtagtagtttaccgtggacgttcggccaagggaccaaggtggaaatcaaa

SEQ ID NO: 26692 - protein, 107 aa, synthetic construct; identical to SEQ ID NO: 26594
  REGION 1..107: note = Description of Artificial Sequence: Synthetic polypeptide

SEQ ID NO: 26693 - DNA, 321 bp, synthetic construct
  misc_feature 1..321: note = Description of Artificial Sequence: Synthetic polynucleotide
  source 1..321: mol_type = other DNA
gacatccagatgacccagtctccatcctccctgtctgcatctgtaggagacagagtcaccatcacttgccgggcaagtcagggcattagaaaagatttaggctggtatcagcagaaaccagggaaagcccctaagcgcctgatccatactgcatccagtttgcaaagtggggtcccattaaggttcagcggcagtggatctgggacagaattcactctcacaatcagcagcctgcagcctgaagattttgcaacttattactgtctacagcataataattacccgtggacgttcggccaagggaccaaggtggaaatcaaa

SEQ ID NO: 26694 - protein, 107 aa, synthetic construct
  REGION 1..107: note = Description of Artificial Sequence: Synthetic polypeptide
DIQMTQSPSSLSASVGDRVTITCRASQGIRKDLGWYQQKPGKAPKRLIHTASSLQSGVPLRFSGSGSGTEFTLTISSLQPEDFATYYCLQHNNYPWTFGQGTKVEIK

SEQ ID NO: 26695 - DNA, 321 bp, synthetic construct
  misc_feature 1..321: note = Description of Artificial Sequence: Synthetic polynucleotide
  source 1..321: mol_type = other DNA
gacatccagatgacccagtctccatcctccctgtctgcatctgtaggagacagagtcaccatcacttgccgggcaagtcagggcattagaaatgatttaggctggtatcagctgaaaccagggaaagcccctaagcgcctgatttatgctgcatccagtttgcaaagtggggtcccatcaaggttcagcggcagtggatctgggccagaattcactctcacaatcagcagcctgcagcctgaagattttgcaacttattactgtctacagcattatagtttcccattcactttcggccctgggaccaaagtggatatcaaa

SEQ ID NO: 26696 - protein, 107 aa, synthetic construct
  REGION 1..107: note = Description of Artificial Sequence: Synthetic polypeptide
DIQMTQSPSSLSASVGDRVTITCRASQGIRNDLGWYQLKPGKAPKRLIYAASSLQSGVPSRFSGSGSGPEFTLTISSLQPEDFATYYCLQHYSFPFTFGPGTKVDIK

SEQ ID NO: 26697 - DNA, 339 bp, synthetic construct
  misc_feature 1..339: note = Description of Artificial Sequence: Synthetic polynucleotide
  source 1..339: mol_type = other DNA
gacatcgtgatgacccagtctccagactccctggctgtgtctctgggcgagagggccaccatcaactgcaagtccagccagagtgttttattcaactccaacaataagaactacttagcttggtaccagcagaaaccaggtcagcctcctaacctgctcatttactgggcatctacccgggaatccggggtccctgaccgattcagtggcagcgggtgtgggacagatttcactctcaccatcagcagcctgcaggctgaagatgtggcagtttattactgtcagcaatattgtagtcttccattcactttcggccctgggaccaaagtggatatcaga

SEQ ID NO: 26698 - protein, 113 aa, synthetic construct
  REGION 1..113: note = Description of Artificial Sequence: Synthetic polypeptide
DIVMTQSPDSLAVSLGERATINCKSSQSVLFNSNNKNYLAWYQQKPGQPPNLLIYWASTRESGVPDRFSGSGCGTDFTLTISSLQAEDVAVYYCQQYCSLPFTFGPGTKVDIR

SEQ ID NO: 26699 - DNA, 339 bp, synthetic construct
  misc_feature 1..339: note = Description of Artificial Sequence: Synthetic polynucleotide
  source 1..339: mol_type = other DNA
gacatcgtgatgacccagtctccagactccctggctgtgtctctgggcgagagggccaccatcaactgcaagtccagccagagtgttttatccagctccaacaattacaactatttagtttggtatcagcagaaaccaggacagcctcctaagctgctcatttactgggcatctacccggaaatccggggtccctgaccgattcagtggcagcgggtctgggacagattttactctcaccatcagcagcctgcaggctgatgacgtggcagtttattactgtcaacaatattatcgtactccgtggacgttcggccaagggaccaaggtggagatcaaa

SEQ ID NO: 26700 - protein, 113 aa, synthetic construct
  REGION 1..113: note = Description of Artificial Sequence: Synthetic polypeptide
DIVMTQSPDSLAVSLGERATINCKSSQSVLSSSNNYNYLVWYQQKPGQPPKLLIYWASTRKSGVPDRFSGSGSGTDFTLTISSLQADDVAVYYCQQYYRTPWTFGQGTKVEIK

SEQ ID NO: 26701 - DNA, 336 bp, synthetic construct
  misc_feature 1..336: note = Description of Artificial Sequence: Synthetic polynucleotide
  source 1..336: mol_type = other DNA
gatattgtgttgacccagactccactctctctgtccgtcacccctggacagccggcctccatctcctgcaagtctagtcagagcctcctccatagtgatggaaggacctatttgtattggtacctgcagaaaccaggccagcctccacaggtcctgatctgtgaggtttccaaccggttctctggagtgccagataggttcagtggcagcgggtcagggacagatttcacactgaaaatcagccgggtggaggctggagatgttggggtttattactgcatgcaaagtatacagcttccctggacgttcggccaagggaccaaggtggaaatcaaa

SEQ ID NO: 26702 - protein, 112 aa, synthetic construct
  REGION 1..112: note = Description of Artificial Sequence: Synthetic polypeptide
DIVLTQTPLSLSVTPGQPASISCKSSQSLLHSDGRTYLYWYLQKPGQPPQVLICEVSNRFSGVPDRFSGSGSGTDFTLKISRVEAGDVGVYYCMQSIQLPWTFGQGTKVEIK

SEQ ID NO: 26703 - DNA, 321 bp, synthetic construct
  misc_feature 1..321: note = Description of Artificial Sequence: Synthetic polynucleotide
  source 1..321: mol_type = other DNA
gaaattgtgctgactcagtttccagactctcagtctgtgactccaaaggagaaagtcaccatcacctgccgggccagtcagagcattggtagtagcttacactggtaccagcagaaaccagatcagtctccaaagctcctcatcaagtatgcttcccagtccttctcaggggtcccctcgaggttcagtggcagtggatctgggacagatttcaccctcaccatcaatagcctggaagctgaagatgctgcaacatattactgtcatcagagtagtagtttccctcggacgttcggccaagggaccaaggtggaaatcaaa

SEQ ID NO: 26704 - protein, 107 aa, synthetic construct; identical to SEQ ID NO: 26644
  REGION 1..107: note = Description of Artificial Sequence: Synthetic polypeptide

SEQ ID NO: 26705 - DNA, 321 bp, synthetic construct
  misc_feature 1..321: note = Description of Artificial Sequence: Synthetic polynucleotide
  source 1..321: mol_type = other DNA
gacatccagatgacccagtctccttcctcactgtctgcatctgtaggagacagagtcaccatcacttgtcggacgagtcagggcattggcaattatttagcctggtttcagcagaaaccagggaaagcccctaagtccctactctataaagcatccagtttacaaagtggggtcccatcaaagttcagcggcagtggatctgggacagatttcactctcaccatcagcagcctgcagcctgaagattttgcaacttattactgccaacagtatatgacttacccactcactttcggcggagggaccaaggtggagatcaaa

SEQ ID NO: 26706 - protein, 107 aa, synthetic construct; identical to SEQ ID NO: 26602
  REGION 1..107: note = Description of Artificial Sequence: Synthetic polypeptide

SEQ ID NO: 26707 - DNA, 321 bp, synthetic construct
  misc_feature 1..321: note = Description of Artificial Sequence: Synthetic polynucleotide
  source 1..321: mol_type = other DNA
gaaattgtgctgactcagtttccagactctcagtctgtgactccaaaggagaaagtcaccatcacctgccgggccagtcagagcattggtagtagcttacactggtaccagcagaaaccagatcagtctccaaagctcctcatcaagtatgcttcccagtccttctcaggggtcccctcgaggttcagtggcagtggatctgggacagatttcaccctcaccatcaatagcctggaagctgaagatgctgcaacgtattactgtcatcagagtagtagtttccctcggacgttcggccaagggaccaaggtggaaatcaaa

SEQ ID NO: 26708 - protein, 107 aa, synthetic construct; identical to SEQ ID NO: 26644
  REGION 1..107: note = Description of Artificial Sequence: Synthetic polypeptide

SEQ ID NO: 26709 - DNA, 321 bp, synthetic construct
  misc_feature 1..321: note = Description of Artificial Sequence: Synthetic polynucleotide
  source 1..321: mol_type = other DNA
gacatccagatgacccagtctccatcctcactgtctgcatctgtgggagacagagtcaccatcacttgtcgggcgagtcagggcattggcaagtatttagcctggtttcagcagaaaccagggaaagcccttaagtcactgatctatgctgcatccagtttgcaaagtggggtcccatcaaaattcagcggcagtggatctgggacagatttcactctcaccatcagcagcctgcagcctgacgattttgcaacttattactgccaacgatatgatacttacccattcactttcggccctgggaccaaagtggatatcaaa

SEQ ID NO: 26710 - protein, 107 aa, synthetic construct
  REGION 1..107: note = Description of Artificial Sequence: Synthetic polypeptide
DIQMTQSPSSLSASVGDRVTITCRASQGIGKYLAWFQQKPGKALKSLIYAASSLQSGVPSKFSGSGSGTDFTLTISSLQPDDFATYYCQRYDTYPFTFGPGTKVDIK

SEQ ID NO: 26711 - DNA, 324 bp, synthetic construct
  misc_feature 1..324: note = Description of Artificial Sequence: Synthetic polynucleotide
  source 1..324: mol_type = other DNA
gaaattgtgttgacgcagtctccaggcaccctgtctttgtctccaggggaaagcgccaccctctcctgcagggccggtcaaagtattagaaccgacttcttagcctggtaccagcagcaacctggccaggctcccaggctcctcatctatggtccatccagcagggccactggcatcccagacaggttcagtggcagtgggtctgggacagacttcactctcaccatcaacagactggagcctgaagattttgcagtgtatttctgtcagcagtatggtagctcaccgtggacgttcggccaagggaccaaggtggaaatcaat

SEQ ID NO: 26712 - protein, 108 aa, synthetic construct
  REGION 1..108: note = Description of Artificial Sequence: Synthetic polypeptide
EIVLTQSPGTLSLSPGESATLSCRAGQSIRTDFLAWYQQQPGQAPRLLIYGPSSRATGIPDRFSGSGSGTDFTLTINRLEPEDFAVYFCQQYGSSPWTFGQGTKVEIN

SEQ ID NO: 26713 - DNA, 321 bp, synthetic construct
  misc_feature 1..321: note = Description of Artificial Sequence: Synthetic polynucleotide
  source 1..321: mol_type = other DNA
gaaatagtgatgacgcagtctccagccaccctgtctgtgtctccaggggaaagagccaccctctcctgcaggcccagtcagagttttagcagaaacttagcctggtaccagcagaaacctggccaggctcccaggctcctcatctatggtgcatccactagggccactggtatcccatccaggttcagtggcagtgggtctgggacagagttcactctcaccatcagcagcctggagtctgaagattttgcagtttactactgtcagcagtataataactggccgctcactttcggcggagggatcaaggtggagatcaaa

SEQ ID NO: 26714 - protein, 107 aa, synthetic construct
  REGION 1..107: note = Description of Artificial Sequence: Synthetic polypeptide
EIVMTQSPATLSVSPGERATLSCRPSQSFSRNLAWYQQKPGQAPRLLIYGASTRATGIPSRFSGSGSGTEFTLTISSLESEDFAVYYCQQYNNWPLTFGGGIKVEIK

SEQ ID NO: 26715 - DNA, 321 bp, synthetic construct
  misc_feature 1..321: note = Description of Artificial Sequence: Synthetic polynucleotide
  source 1..321: mol_type = other DNA
gaaattgtgctgactcagtctccagactttcagtctgtgactccaaaggagaaagtcaccatcacctgccgggccagtcagagtattggtagtagtttacactggtaccagcagaaaccagatcagtctccaaagctcctcatcaagtatgcttcccagtccttctcaggggacccctcgaggttcagtggcagtggatctgggacagatttcaccctcaccatcaatagcctggaagctgaagatgctgcaacgtattactgtcatcagactagaagtttacctctcactttcggcggagggaccaaggtggagatcaaa

SEQ ID NO: 26716 - protein, 107 aa, synthetic construct; identical to SEQ ID NO: 26606
  REGION 1..107: note = Description of Artificial Sequence: Synthetic polypeptide

SEQ ID NO: 26717 - DNA, 321 bp, synthetic construct
  misc_feature 1..321: note = Description of Artificial Sequence: Synthetic polynucleotide
  source 1..321: mol_type = other DNA
gacatccagatgacccagtctccatcctcactgtctgcatctgtaggagacagagtcaccatcacttgtcgggcgagtcagggcattggcaagtatttagcctggtttcagcagaaaccagggaaagcccctaagtccctgatctatgctgcatccagtttgcaaagtggggtcccatcaaagttcagcggcagtggatatgggacagatttcactctcaccatcagcagcctgcagcctgaaaattttgcaatttattactgccaacagtatagtacttacccgctcactttcggcggagggaccaaggtggagatcaaa

SEQ ID NO: 26718 - protein, 107 aa, synthetic construct
  REGION 1..107: note = Description of Artificial Sequence: Synthetic polypeptide
DIQMTQSPSSLSASVGDRVTITCRASQGIGKYLAWFQQKPGKAPKSLIYAASSLQSGVPSKFSGSGYGTDFTLTISSLQPENFAIYYCQQYSTYPLTFGGGTKVEIK

SEQ ID NO: 26719 - DNA, 321 bp, synthetic construct
  misc_feature 1..321: note = Description of Artificial Sequence: Synthetic polynucleotide
  source 1..321: mol_type = other DNA
gacatccagatgacccagtctccatcctcactgtctgcatctgtaggagacagagtcaccatcacttgtcgggcgagtcagggcattggcaagtatttagcctggtttcagcagaaaccagggaaagcccctaagtccctgatctatgctgcatccagtttgcaaagtggggtcccatcaaagttcagcggcagtggatctgggacagatttcactctcaccatcagcagcctgcagcctgaaaattttgcaacttattactgccaacagtatagtacttacccgctcactttcggcggagggaccaaggtggagatcaaa

SEQ ID NO: 26720 - protein, 107 aa, synthetic construct
  REGION 1..107: note = Description of Artificial Sequence: Synthetic polypeptide
DIQMTQSPSSLSASVGDRVTITCRASQGIGKYLAWFQQKPGKAPKSLIYAASSLQSGVPSKFSGSGSGTDFTLTISSLQPENFATYYCQQYSTYPLTFGGGTKVEIK

SEQ ID NO: 26721 - DNA, 339 bp, synthetic construct
  misc_feature 1..339: note = Description of Artificial Sequence: Synthetic polynucleotide
  source 1..339: mol_type = other DNA
gacatcgtgatgacccagtctccagactccctggctgtgtctctgggcgagagggccaccatcaactgcaagtccagccagagtgttttattcaactccaacaataagaactacttagcttggtaccagcagaaaccaggtcagcctcctaaactgctcatttactgggcctctacccgggaatccggggtccctgaccgattcagtggcagcgggtctgggacagatttcactctcaccatcagcaacctgcaggctgaagatgtggcaatttattactgtcagcaatattctagtcttccattcactttcggccctgggaccaaagtggatatcaaa

SEQ ID NO: 26722 - protein, 113 aa, synthetic construct
  REGION 1..113: note = Description of Artificial Sequence: Synthetic polypeptide
DIVMTQSPDSLAVSLGERATINCKSSQSVLFNSNNKNYLAWYQQKPGQPPKLLIYWASTRESGVPDRFSGSGSGTDFTLTISNLQAEDVAIYYCQQYSSLPFTFGPGTKVDIK

SEQ ID NO: 26723 - DNA, 321 bp, synthetic construct
  misc_feature 1..321: note = Description of Artificial Sequence: Synthetic polynucleotide
  source 1..321: mol_type = other DNA
gacatccagatgacccagtctccttcctcactgtctgcatctgtaggagacagagtcaccatcacttgtcggacgagtcagggcattggcaattatttagcctggtttcagcagaaaccagggaaagcccctaagtccctgctctataaagcatccagtttgcaaagtggggtcccatcaaagttcagcggcagtggatctgggacagatttcactctcaccatcagcagcctgcagcctgaagattttgcaacttattactgccaacagtatatcacttacccgctcactttcggcggagggtccaaggtggagatcaaa

SEQ ID NO: 26724 - protein, 107 aa, synthetic construct
  REGION 1..107: note = Description of Artificial Sequence: Synthetic polypeptide
DIQMTQSPSSLSASVGDRVTITCRTSQGIGNYLAWFQQKPGKAPKSLLYKASSLQSGVPSKFSGSGSGTDFTLTISSLQPEDFATYYCQQYITYPLTFGGGSKVEIK

SEQ ID NO: 26725 - DNA, 321 bp, synthetic construct
  misc_feature 1..321: note = Description of Artificial Sequence: Synthetic polynucleotide
  source 1..321: mol_type = other DNA
gacatccagatgacccagtctccatcctcactgtctgcatctgtaggagacagagtcaccatcacttgtcgggcgaatcagggcattaacaattatttagcctggtttcagcagaaaccagggaaagcccctaagtccctgatctatgctgcatccagtttgcaaagtggggtcccatcaaagttcagcggcagtggatctgggacagatttcactctcaccatcagcagcctgcagcctgaagattttgcaacttattactgccaacagtataatagttacccattcactttcggccctgggaccaaagtggatatcaaa

SEQ ID NO: 26726 - protein, 107 aa, synthetic construct
  REGION 1..107: note = Description of Artificial Sequence: Synthetic polypeptide
DIQMTQSPSSLSASVGDRVTITCRANQGINNYLAWFQQKPGKAPKSLIYAASSLQSGVPSKFSGSGSGTDFTLTISSLQPEDFATYYCQQYNSYPFTFGPGTKVDIK

SEQ ID NO: 26727 - DNA, 321 bp, synthetic construct
  misc_feature 1..321: note = Description of Artificial Sequence: Synthetic polynucleotide
  source 1..321: mol_type = other DNA
gacatccagatgattcagtctccatcctcactgtctgcatctgtaggagacagagtcaccatcacttgtcgggcgagtcagggcattagcaattatttagcctggtttcagcagaaaccagggaaagcccctaagtccctgatctatgctgcatccagtttgcaaagtggggtcccatcaaagttcagcggcagtggatctgggacagatttcactctcaccatcagcagcctgcagcctgaagattttgcaacttattactgccaacattatgttacttacccgaacactttcggcggagggaccaaggtggagatcaaa

SEQ ID NO: 26728 - protein, 107 aa, synthetic construct
  REGION 1..107: note = Description of Artificial Sequence: Synthetic polypeptide
DIQMIQSPSSLSASVGDRVTITCRASQGISNYLAWFQQKPGKAPKSLIYAASSLQSGVPSKFSGSGSGTDFTLTISSLQPEDFATYYCQHYVTYPNTFGGGTKVEIK

SEQ ID NO: 26729 - DNA, 321 bp, synthetic construct
  misc_feature 1..321: note = Description of Artificial Sequence: Synthetic polynucleotide
  source 1..321: mol_type = other DNA
gacatccagatgacccagtctccatcttccgtgtctgcatctgtaggagacagagtcaccatcacttgtcgggcgagtcagggtataagtagttggatagcctggtatcagcagaaaccagggaaagcccctaagctcctgatctatggtgcatccagtttgcaaagtggggtcccatctaggttcagcggcagtggatctgggacagatttcactctcaccatcagcagcctgcagcctgaagattttgcaacttactattgtcaacagtctaacagtttcccattcactttcggccctgggaccaaagtggatgtcaaa

SEQ ID NO: 26730 - protein, 107 aa, synthetic construct
  REGION 1..107: note = Description of Artificial Sequence: Synthetic polypeptide
DIQMTQSPSSVSASVGDRVTITCRASQGISSWIAWYQQKPGKAPKLLIYGASSLQSGVPSRFSGSGSGTDFTLTISSLQPEDFATYYCQQSNSFPFTFGPGTKVDVK

SEQ ID NO: 26731 - DNA, 324 bp, synthetic construct
  misc_feature 1..324: note = Description of Artificial Sequence: Synthetic polynucleotide
  source 1..324: mol_type = other DNA
gaaattgtgttgacgcagtctccaggcaccctgtctttgtctccaggggaaagagccaccctctcctgcagggccagtcagagtgttcgcagcagcttccttgcctggtaccagcagaaacctggccaggctcccaggctcctcatctatggtgcatctagcagggccactggcatcccagacaggttcagtggcagtgggtctgggacagacttcactctcaccatcagcagactggagcctgaagattttgctgtgtattactgtcagcagtatggtaactcaccgtgggcgttcggccaagggaccaaggtggaaatcaaa

SEQ ID NO: 26732 - protein, 108 aa, synthetic construct
  REGION 1..108: note = Description of Artificial Sequence: Synthetic polypeptide
EIVLTQSPGTLSLSPGERATLSCRASQSVRSSFLAWYQQKPGQAPRLLIYGASSRATGIPDRFSGSGSGTDFTLTISRLEPEDFAVYYCQQYGNSPWAFGQGTKVEIK

SEQ ID NO: 26733 - DNA, 321 bp, synthetic construct
  misc_feature 1..321: note = Description of Artificial Sequence: Synthetic polynucleotide
  source 1..321: mol_type = other DNA
gacatccagatgacccagtctccatcctcactgtctgcatctgtaggagacagagtcaccatcacttgtcgggcgagtcagggcattagcaattatttagcctggtttcagcagaaaccagggaaagcccctaagtccctgatctatgctgcatccagtttgcaaagtggggtcccatcaaagttcagcggcagtggatctggaacagatttcactctcaccatcagcagcctgcagcctgaagattttgcaacttattactgcctacattatcttacttaccctctcactttcggcggagggaccaaggtggagatcaaa

SEQ ID NO: 26734 - protein, 107 aa, synthetic construct
  REGION 1..107: note = Description of Artificial Sequence: Synthetic polypeptide
DIQMTQSPSSLSASVGDRVTITCRASQGISNYLAWFQQKPGKAPKSLIYAASSLQSGVPSKFSGSGSGTDFTLTISSLQPEDFATYYCLHYLTYPLTFGGGTKVEIK

SEQ ID NO: 26735 - DNA, 324 bp, synthetic construct
  misc_feature 1..324: note = Description of Artificial Sequence: Synthetic polynucleotide
  source 1..324: mol_type = other DNA
gaaattgtgttgacgcagtctccaggcaccctgtctttgtctccaggggaaagagccaccctctcctgcagggccagtcagagtgttagcagcaacttcttagcctggtaccagcagaaacctggccaggctcccaggctcctcatctttggtgcatccagcagggccactggcatcccagacaggttcagtggcagtgggtctgggacagacttcactctcaccatcaacagactggagcctgaagattttgcagtgtattactgtcagcaatatggtatctcaccgtggacgttcggccaagggaccaaggtggaaatcaaa

SEQ ID NO: 26736 - protein, 108 aa, synthetic construct
  REGION 1..108: note = Description of Artificial Sequence: Synthetic polypeptide
EIVLTQSPGTLSLSPGERATLSCRASQSVSSNFLAWYQQKPGQAPRLLIFGASSRATGIPDRFSGSGSGTDFTLTINRLEPEDFAVYYCQQYGISPWTFGQGTKVEIK

SEQ ID NO: 26737 - DNA, 321 bp, synthetic construct
  misc_feature 1..321: note = Description of Artificial Sequence: Synthetic polynucleotide
  source 1..321: mol_type = other DNA
gacatccagatgacccagtctccatcctcactgtctgcatctgtaggagacagagtcaccatcacttgtcgggcgagtcagggcattggcaattatttagcctggtttcagcagaaaccagggaaagcccctaagtccctgatctatgttgtatccagtttacaaagtggggtcccatcaaggttcagcggcagtggatctgggacagatttcactctcaccatcagcagcctgcagcctgaagattttgcgacttattactgccaacggtatgatacttacccattcactttcggccctgggaccaaagtggatatcaaa

SEQ ID NO: 26738 - protein, 107 aa, synthetic construct
  REGION 1..107: note = Description of Artificial Sequence: Synthetic polypeptide
DIQMTQSPSSLSASVGDRVTITCRASQGIGNYLAWFQQKPGKAPKSLIYVVSSLQSGVPSRFSGSGSGTDFTLTISSLQPEDFATYYCQRYDTYPFTFGPGTKVDIK

SEQ ID NO: 26739 - DNA, 321 bp, synthetic construct
  misc_feature 1..321: note = Description of Artificial Sequence: Synthetic polynucleotide
  source 1..321: mol_type = other DNA
gacatccagatgacccagtctccatcctcactgtctgcatctgtaggagacagagtcaccatcacttgtcgggcgagtcaggacattagcaattatttagcctggtttcagcagaaaccagggaaagcccctaagtccctgatctctgctgcatccagtttgcaaagtggggtcccatcaaagttcagcggcagtagatctgggacagatttcactctcaccatcagcagcctgcagcctgaagattttgcaacttattacggcctacattatctcaattacccgctcactttcggcggagggaccagggtggagatcaga

SEQ ID NO: 26740 - protein, 107 aa, synthetic construct
  REGION 1..107: note = Description of Artificial Sequence: Synthetic polypeptide
DIQMTQSPSSLSASVGDRVTITCRASQDISNYLAWFQQKPGKAPKSLISAASSLQSGVPSKFSGSRSGTDFTLTISSLQPEDFATYYGLHYLNYPLTFGGGTRVEIR

SEQ ID NO: 26741 - DNA, 321 bp, synthetic construct
  misc_feature 1..321: note = Description of Artificial Sequence: Synthetic polynucleotide
  source 1..321: mol_type = other DNA
gaaattgttctgactcagtctccagattttcagtctgtgactccaaaggagaaagtcaccatcacctgccgggccagtcagagcattggtaggagtttacactggtaccagcagaaaccagatcagtctccaaagctcctcatcaagtatgcttcccagtcattctcaggggtcccctcgaggttcagtggcagtggatctgggacagatttcaccctcaccatcaatagcctggaggctgaagatgctgcaacgtattactgtcatcagagtagtcgtttaccgctcactttcggcggagggaccaaggtggagatcaaa

SEQ ID NO: 26742 - protein, 107 aa, synthetic construct
  REGION 1..107: note = Description of Artificial Sequence: Synthetic polypeptide
EIVLTQSPDFQSVTPKEKVTITCRASQSIGRSLHWYQQKPDQSPKLLIKYASQSFSGVPSRFSGSGSGTDFTLTINSLEAEDAATYYCHQSSRLPLTFGGGTKVEIK

SEQ ID NO: 26743 - DNA, 321 bp, synthetic construct
  misc_feature 1..321: note = Description of Artificial Sequence: Synthetic polynucleotide
  source 1..321: mol_type = other DNA
gacatccagatgacccagtctccatcctccctgtctgcatctgtaggagacagagtcaccatcacttgccgggcaagtcagggcattagaaatgatttaggctggtatcagctgaaaccagggaaagcccctaagcgcctgatctatgctgcatccagtttgcaaagtggggtcccatcaaggttcagcggcagtggatctgggccagaattcactctcacaatcagcagcctgcagcctgaagattttgcaacttattactgtctacagcattatagtttcccattcactttcggccctgggaccaaagtggatatcaaa

SEQ ID NO: 26744 - protein, 107 aa, synthetic construct; identical to SEQ ID NO: 26696
  REGION 1..107: note = Description of Artificial Sequence: Synthetic polypeptide

SEQ ID NO: 26745 - DNA, 321 bp, synthetic construct
  misc_feature 1..321: note = Description of Artificial Sequence: Synthetic polynucleotide
  source 1..321: mol_type = other DNA
gacatcaagatgacccagtctccttcctcactgtctgcatctgtaggagacagagtcaccatcacttgtcggacgagtcagggcattggcaattatttagcctggtttcagcagaaaccagggaaagcccctaagtccctgctctataaagcatccagtttgcaaagtggggtcccatcaaagttcagcggcagtggatctgggacagatttcactctcaccatcagcagcctgcagcctgaagattttgcaacttattactgccaacagtatatgacttacccgctcactttcggcggggggaccaaggtggagatcaaa

SEQ ID NO: 26746 - protein, 107 aa, synthetic construct
  REGION 1..107: note = Description of Artificial Sequence: Synthetic polypeptide
DIKMTQSPSSLSASVGDRVTITCRTSQGIGNYLAWFQQKPGKAPKSLLYKASSLQSGVPSKFSGSGSGTDFTLTISSLQPEDFATYYCQQYMTYPLTFGGGTKVEIK

SEQ ID NO: 26747 - DNA, 321 bp, synthetic construct
  misc_feature 1..321: note = Description of Artificial Sequence: Synthetic polynucleotide
  source 1..321: mol_type = other DNA
gacatccagatgacccagtctccatcctccctgtctgcgtctgtaggagacagagtcaccatcacttgccgggcaagtcagggcattagaaaagatttaggctggtatcaacagaaaccagggaaagcccctaagcgcctaatccatactgcatccagtttgcaaagtggggtcccattaaggttcagcggcagtggatctgggacagaattcactctcacaatcagcagcctgcagcctgaagattttgcaacttattactgtctacagcatactagttacccgtggacgttcggccaagggaccaaggtggaaatctac

SEQ ID NO: 26748 - protein, 107 aa, synthetic construct
  REGION 1..107: note = Description of Artificial Sequence: Synthetic polypeptide
DIQMTQSPSSLSASVGDRVTITCRASQGIRKDLGWYQQKPGKAPKRLIHTASSLQSGVPLRFSGSGSGTEFTLTISSLQPEDFATYYCLQHTSYPWTFGQGTKVEIY

SEQ ID NO: 26749 - DNA, 321 bp, synthetic construct
  misc_feature 1..321: note = Description of Artificial Sequence: Synthetic polynucleotide
  source 1..321: mol_type = other DNA
gacatccagatgacccagtctccatcctcactgtctgcatctgtaggagacagagtcaccatcacttgtcgggcgagtcagggcattagcaattatttagcctggtttcagcagaaaccagggaaagcccctaagtccctgatctatgctgcatccagtttgcaaagtggggtcccatcaaagttcagcggcagtggatctggaacagatttcactctcaccatcagcagcctgcagcctgaggattttgctacttattactgccaacattatcttacttaccctctcactttcggcggagggaccaaggtggagatcaaa

SEQ ID NO: 26750 - protein, 107 aa, synthetic construct; identical to SEQ ID NO: 26622
  REGION 1..107: note = Description of Artificial Sequence: Synthetic polypeptide

SEQ ID NO: 26751 - DNA, 324 bp, synthetic construct
  misc_feature 1..324: note = Description of Artificial Sequence: Synthetic polynucleotide
  source 1..324: mol_type = other DNA
gaaattgtgttgacgcagtctccaggcaccctgtctttgtctccaggggaaagagccaccctctcctgcagggccagtcagagtattagcagcagctacttagcctggtaccagcagaaacctggccaggctccccggctcctcatctatggtgcatccagcagggccactggcatcccagccaggttcagtggcagtgggtctgggacagacttcactctcaccatcagcagactggagcctgaagattttgcagtgtattactgtcagcagtatgagagttcaccgtggacgttcggccaagggaccaaggtggaaatcaaa

SEQ ID NO: 26752 - protein, 108 aa, synthetic construct
  REGION 1..108: note = Description of Artificial Sequence: Synthetic polypeptide
EIVLTQSPGTLSLSPGERATLSCRASQSISSSYLAWYQQKPGQAPRLLIYGASSRATGIPARFSGSGSGTDFTLTISRLEPEDFAVYYCQQYESSPWTFGQGTKVEIK

SEQ ID NO: 26753 - DNA, 321 bp, synthetic construct
  misc_feature 1..321: note = Description of Artificial Sequence: Synthetic polynucleotide
  source 1..321: mol_type = other DNA
gacatccagatgacccagtctccttcctcactgtctgcatctgtaggagacagagtcaccatcacttgtcggacgagtcagggcattggcaattatttagcctggtttcagcagaaaccagggaaagcccctaagtccctgctctataaagcatccagtttgcaaagtggggtcccatcaaagttcagcggcagtggatctgggacagatttcactctcaccatcagcagcctgcagcctgaagattttgcaacttattactgccaacagtatatcacttacccgctcactttcggcggagggaccaaggtggagatcaaa

SEQ ID NO: 26754 - protein, 107 aa, synthetic construct
  REGION 1..107: note = Description of Artificial Sequence: Synthetic polypeptide
DIQMTQSPSSLSASVGDRVTITCRTSQGIGNYLAWFQQKPGKAPKSLLYKASSLQSGVPSKFSGSGSGTDFTLTISSLQPEDFATYYCQQYITYPLTFGGGTKVEIK

SEQ ID NO: 26755 - DNA, 336 bp, synthetic construct
  misc_feature 1..336: note = Description of Artificial Sequence: Synthetic polynucleotide
  source 1..336: mol_type = other DNA
gatattgtaatgacccagactccactctctctgtccgtcacccctggacagccggcctccatctcctgcaagtctagtcagagcctcctccatagtgatggaaggacctatttgtattggtacctgcagaggccaggccagcctccacagctcctgatctgtgaggtttccaaccggttcgctggagtgacagataggttcagtggcagcgggtcagggacagatttcacactgaaaatcagccgggtggaggctggggatgttggggtttattactgcatgcaaagtatacagcttccctggacgttcggccaagggaccaaggtggaaatcaaa

SEQ ID NO: 26756 - protein, 112 aa, synthetic construct
  REGION 1..112: note = Description of Artificial Sequence: Synthetic polypeptide
DIVMTQTPLSLSVTPGQPASISCKSSQSLLHSDGRTYLYWYLQRPGQPPQLLICEVSNRFAGVTDRFSGSGSGTDFTLKISRVEAGDVGVYYCMQSIQLPWTFGQGTKVEIK

SEQ ID NO: 26757 - DNA, 321 bp, synthetic construct
  misc_feature 1..321: note = Description of Artificial Sequence: Synthetic polynucleotide
  source 1..321: mol_type = other DNA
gacatccagatgacccagtctccatcctcactgtctgcatctgtgggagacagagtcaccatcacttgtcgggcgagtcagggcattggcaagtatttagcctggtttcagcagaaaccagggaaagcccctaagtcactgatctatgctgcatccagtttgcaaagtggggtcccatcaaagttcagcggcagtgggtctgggacagatttcactctcaccatcagcagcctgcagcctgacgattttgcaacttattactgccaacgatatgatacttacccattcactttcggccctgggaccaaagtggatttcaaa

SEQ ID NO: 26758 - protein, 107 aa, synthetic construct
  REGION 1..107: note = Description of Artificial Sequence: Synthetic polypeptide
DIQMTQSPSSLSASVGDRVTITCRASQGIGKYLAWFQQKPGKAPKSLIYAASSLQSGVPSKFSGSGSGTDFTLTISSLQPDDFATYYCQRYDTYPFTFGPGTKVDFK

SEQ ID NO: 26759 - DNA, 324 bp, synthetic construct
  misc_feature 1..324: note = Description of Artificial Sequence: Synthetic polynucleotide
  source 1..324: mol_type = other DNA
gacatccagatgacccagtctccatcctccctgtctgcatctgtaggagacagagtcaccatcacttgccgggcaagtcagagcattagcaactatttaaattggtatcagcagacaccaggaaaagcccctaagctcctgatctatgctgaatccagtttacaaagtggggtcccatcaaggttcagtggcagtggatctgggacagatttcactctcaccatcagcagtctgcaacctgaagattttgcaacttactcctgtcaacagagttacagttcccctccgtggacgttcggccaagggaccaaggtggaaatcaaa

SEQ ID NO: 26760 - protein, 108 aa, synthetic construct
  REGION 1..108: note = Description of Artificial Sequence: Synthetic polypeptide
DIQMTQSPSSLSASVGDRVTITCRASQSISNYLNWYQQTPGKAPKLLIYAESSLQSGVPSRFSGSGSGTDFTLTISSLQPEDFATYSCQQSYSSPPWTFGQGTKVEIK

SEQ ID NO: 26761 - DNA, 321 bp, synthetic construct
  misc_feature 1..321: note = Description of Artificial Sequence: Synthetic polynucleotide
  source 1..321: mol_type = other DNA
gacatccagatgacccagtctccatcctcactgtctgcatctgtaggagacagagtcaccatcacttgtcgggcgagtcagggcattggcaagtatttagcctggtttcagcagaaaccagggaaagcccctaagtccctgatctatgctgcatccagtttgcaaagtggggtcccatcaaagttcagcggcagtggatatgggacagatttcactctcaccatcagcagcctgcagcctgaaaattttgcaacttattactgccaacagtatagtacttacccgctcactttcggcggagggaccaaggtggagatcaag

SEQ ID NO: 26762 - protein, 107 aa, synthetic construct
  REGION 1..107: note = Description of Artificial Sequence: Synthetic polypeptide
DIQMTQSPSSLSASVGDRVTITCRASQGIGKYLAWFQQKPGKAPKSLIYAASSLQSGVPSKFSGSGYGTDFTLTISSLQPENFATYYCQQYSTYPLTFGGGTKVEIK

SEQ ID NO: 26763 - DNA, 324 bp, synthetic construct
  misc_feature 1..324: note = Description of Artificial Sequence: Synthetic polynucleotide
  source 1..324: mol_type = other DNA
gaaattgtgttgacgcagtctccaggcaccctgtctttgtctccaggggaaagagccaccctctcctgcagggccagtcagagtgtcagaagcgacttcttagcctggctccagcagaaacctggccaggctcccaggctcctcatctatggtgtatcccgcagggccactggcatcccagacaggttcagtggcagtgggtctgggacagacttcactctcaccatcaacagactggagcctgaagattttgcagtgtattactgtcagcagtatggtaactcaccgtggacgttcggccaagggaccaaggtggaaatcaaa

SEQ ID NO: 26764 - protein, 108 aa, synthetic construct
  REGION 1..108: note = Description of Artificial Sequence: Synthetic polypeptide
EIVLTQSPGTLSLSPGERATLSCRASQSVRSDFLAWLQQKPGQAPRLLIYGVSRRATGIPDRFSGSGSGTDFTLTINRLEPEDFAVYYCQQYGNSPWTFGQGTKVEIK

SEQ ID NO: 26765 - DNA, 324 bp, synthetic construct
  misc_feature 1..324: note = Description of Artificial Sequence: Synthetic polynucleotide
  source 1..324: mol_type = other DNA
gaaattgtgttgacgcagtctccaggcaccctgtctttgtctccaggggaaagagccaccctctcttgtagggccagtcagagtgttagaagcaacttcttagcctggcaccagcagaaacctggccaggctcccaggctcttcatctatggtgcatcccgcagggccactggcatcccagacaggttcagtggcagtgggtctgggacagacttcactctcaccatcaacagactggagcctgaagattttgcagtgtattactgtcagcagtatggtaactcaccgtggacgttcggccaagggaccaaggtggaaatcaaa

SEQ ID NO: 26766 - protein, 108 aa, synthetic construct
  REGION 1..108: note = Description of Artificial Sequence: Synthetic polypeptide
EIVLTQSPGTLSLSPGERATLSCRASQSVRSNFLAWHQQKPGQAPRLFIYGASRRATGIPDRFSGSGSGTDFTLTINRLEPEDFAVYYCQQYGNSPWTFGQGTKVEIK

SEQ ID NO: 26767 - DNA, 324 bp, synthetic construct
  misc_feature 1..324: note = Description of Artificial Sequence: Synthetic polynucleotide
  source 1..324: mol_type = other DNA
gaaattgtgttgacgcagtctccaggcaccctgtctttgtctccaggggacagagccaccctctcttgcagggccagtcagagtgttagaagcaacttcttagcctggcaccagcagaaacctggccaggctcccaggctcctcatctatggtgcatcccgcagggccactggcatcccagacaggttcagtggcagtgggtctgggacagacttcactctcaccatcaacagactggaacctgaagattttgcagtgtatttctgtcagcagtatggtaactcaccgtggacgttcggccaagggaccaaggtggaaatcaaa

SEQ ID NO: 26768 - protein, 108 aa, synthetic construct
  REGION 1..108: note = Description of Artificial Sequence: Synthetic polypeptide
EIVLTQSPGTLSLSPGDRATLSCRASQSVRSNFLAWHQQKPGQAPRLLIYGASRRATGIPDRFSGSGSGTDFTLTINRLEPEDFAVYFCQQYGNSPWTFGQGTKVEIK

SEQ ID NO: 26769 - DNA, 321 bp, synthetic construct
  misc_feature 1..321: note = Description of Artificial Sequence: Synthetic polynucleotide
  source 1..321: mol_type = other DNA
gacatccagatgacccagtctccatcttccgtgtctgcatctgtaggagacagagtcaccatcacttgtcgggcgagtcagggtattaacaactggttagcctggtatcagcagaaaccagggaaagcccctaagctcctgatctatggtgtttccagtttgcaaagtggggtcccatcaaggttcagcggcagtggatctgggacagatttcactctcaccatcagcagcctgcagcctgaagattttgcaacttactcttgtcaacaggctaacagtttcccgtggacgttcggccaagggaccaaggtggaaatcaga

SEQ ID NO: 26770 - protein, 107 aa, synthetic construct; identical to SEQ ID NO: 26652
  REGION 1..107: note = Description of Artificial Sequence: Synthetic polypeptide

SEQ ID NO: 26771 - DNA, 324 bp, synthetic construct
  misc_feature 1..324: note = Description of Artificial Sequence: Synthetic polynucleotide
  source 1..324: mol_type = other DNA
gaaattgtgttgacgcagtctccaggcaccctgtctttgtctccaggggaaagagccaccctctcctgcagggccagtcagagtattcgcagcagcttcttagcctggtatcagcagaaacctggccaggctcccaggctcctcatctatggtgcatccaacagggccactggcatcccagacaggttcagtggcagtgggtctgggacagacttcactctcaccatcagcagactggagcctgaagattttgcagtgtattactgtcagcagtatggtaactcaccgtgggcgttcggccaagggaccaaggtggaaatcaaa

SEQ ID NO: 26772 - protein, 108 aa, synthetic construct
  REGION 1..108: note = Description of Artificial Sequence: Synthetic polypeptide
EIVLTQSPGTLSLSPGERATLSCRASQSIRSSFLAWYQQKPGQAPRLLIYGASNRATGIPDRFSGSGSGTDFTLTISRLEPEDFAVYYCQQYGNSPWAFGQGTKVEIK

SEQ ID NO: 26773 - DNA, 324 bp, synthetic construct
  misc_feature 1..324: note = Description of Artificial Sequence: Synthetic polynucleotide
  source 1..324: mol_type = other DNA
gaaattgtgttgacgcagtctccaggcaccctgtctttgtctccaggggaaagcgccaccctctcctgcagggccggtcaaagtattagaaccgacttcttagtctggtaccagcagcaacctggccaggctcccaggctcctcatctatggtgcatccagcagggccactggcttcccagagaggttcagtggcagtgggtctgggacagacttcactctcaccatcaacagactggagcctgaagattttgcagtgtattactgtcagcagtatggaagctcaccgtggacgttcggccaagggaccaaggtggaaatcaat

SEQ ID NO: 26774 - protein, 108 aa, synthetic construct
  REGION 1..108: note = Description of Artificial Sequence: Synthetic polypeptide
EIVLTQSPGTLSLSPGESATLSCRAGQSIRTDFLVWYQQQPGQAPRLLIYGASSRATGFPERFSGSGSGTDFTLTINRLEPEDFAVYYCQQYGSSPWTFGQGTKVEIN

SEQ ID NO: 26775 - DNA, 321 bp, synthetic construct
  misc_feature 1..321: note = Description of Artificial Sequence: Synthetic polynucleotide
  source 1..321: mol_type = other DNA
gacatccagatgacccagtctccatcctccctgtctgcatctgttggagacagagtcaccatcacttgccggccgagtcagggcattagcatttatttagcctggtatcagcagaaaccagggaatgttcctaagctcctgatctatgctgcatccactttacaatcaggggtcccatctcggttcagtggcagtggatctgggacagatttcactctcaccatcagcagcctgcagcctgaagatgttgcaacttattactgtcaaaagtataacagtgccccattcactttcggccctgggaccaaagtggatatcaaa

SEQ ID NO: 26776 - protein, 107 aa, synthetic construct
  REGION 1..107: note = Description of Artificial Sequence: Synthetic polypeptide
DIQMTQSPSSLSASVGDRVTITCRPSQGISIYLAWYQQKPGNVPKLLIYAASTLQSGVPSRFSGSGSGTDFTLTISSLQPEDVATYYCQKYNSAPFTFGPGTKVDIK

SEQ ID NO: 26777 - DNA, 339 bp, synthetic construct
  misc_feature 1..339: note = Description of Artificial Sequence: Synthetic polynucleotide
  source 1..339: mol_type = other DNA
gacatcgtgatgacccagtctccagactccctggctgtgtctctgggcgagagggccaccatcaactgcaagtccagccagagtgttttatacagctccaacaattataactacttgacttggtaccagcagaaaccaggacagcctcctaagctgctcatttactgggcatctacccgaaaatccggggtccctgaccgattcagtggcagcgggtctgggacagatttcactctcaccatcagcagcctgcaggctgacgatgtggcagtttattactgtcagcaatattatattactccgtggacgttcggccaagggaccaaggtggacatcaaa

SEQ ID NO: 26778 - protein, 113 aa, synthetic construct
  REGION 1..113: note = Description of Artificial Sequence: Synthetic polypeptide
DIVMTQSPDSLAVSLGERATINCKSSQSVLYSSNNYNYLTWYQQKPGQPPKLLIYWASTRKSGVPDRFSGSGSGTDFTLTISSLQADDVAVYYCQQYYITPWTFGQGTKVDIK

SEQ ID NO: 26779 - DNA, 321 bp, synthetic construct
  misc_feature 1..321: note = Description of Artificial Sequence: Synthetic polynucleotide
  source 1..321: mol_type = other DNA
gacatccagatgacccagtctccatcctccctgtttgcatctgtaggagacagagtcatcatctcttgccgggcaagtcagggcattagaaatgatttagggtggtatcagcagtatccagggaaagcccctaagcgcgtgatttatgctgcatccagtttgcaaagtggggtcccatcaaggttcagcggcagtggatttgggacagaattcactatcacaatcagcagcgtgcagcctgaagattttgaaacttattactgtctacagcataatgatttcccgttcactttcggcggagggaccaaggtggagatcaaa

SEQ ID NO: 26780 - protein, 107 aa, synthetic construct
  REGION 1..107: note = Description of Artificial Sequence: Synthetic polypeptide
DIQMTQSPSSLFASVGDRVIISCRASQGIRNDLGWYQQYPGKAPKRVIYAASSLQSGVPSRFSGSGFGTEFTITISSVQPEDFETYYCLQHNDFPFTFGGGTKVEIK

SEQ ID NO: 26781 - DNA, 321 bp, synthetic construct
  misc_feature 1..321: note = Description of Artificial Sequence: Synthetic polynucleotide
  source 1..321: mol_type = other DNA
gaaattgtgctgactcagtctccagactttcagtctgtgactccaaaggagaaagtcaccatcacctgccgggccagtcagagcattggtagtagcttacactggtaccagcagaaaccagatcagtctccaaagctcctcatcaagtatgcttcccagtccttctcaggggtcccctcgaggttcagtggcagtggatctgggacagatttcaccctcaccatcaatagcctggaagctgaagatgctgcaacgtattactgtcatcagagtagtcgtttaccattcactttcggccctgggaccaaagtggatatcaaa

SEQ ID NO: 26782 - protein, 107 aa, synthetic construct
  REGION 1..107: note = Description of Artificial Sequence: Synthetic polypeptide
EIVLTQSPDFQSVTPKEKVTITCRASQSIGSSLHWYQQKPDQSPKLLIKYASQSFSGVPSRFSGSGSGTDFTLTINSLEAEDAATYYCHQSSRLPFTFGPGTKVDIK

SEQ ID NO: 26783 - DNA, 324 bp, synthetic construct
  misc_feature 1..324: note = Description of Artificial Sequence: Synthetic polynucleotide
  source 1..324: mol_type = other DNA
gaaattgtgttggcgcagtctccaggcaccctgtctttgtctccaggggaaagagccaccctctcctgcagggccagtcagagtgttaggagcggttacttagcctggtaccagcagaaacctggccaggctcccaggctcctcatctatggtgcatccagcagggccactggcatcccagacaggttcggtggcagtgggtctgggacagacttcactctcaccatcagcagactggagcctgaagattttgcagtgtattactgtcagcagtatgagagttcaccgtggacgttcggccaagggaccaaggtggaaatcaaa

SEQ ID NO: 26784 - protein, 108 aa, synthetic construct
  REGION 1..108: note = Description of Artificial Sequence: Synthetic polypeptide
EIVLAQSPGTLSLSPGERATLSCRASQSVRSGYLAWYQQKPGQAPRLLIYGASSRATGIPDRFGGSGSGTDFTLTISRLEPEDFAVYYCQQYESSPWTFGQGTKVEIK

SEQ ID NO: 26785 - DNA, 324 bp, synthetic construct
  misc_feature 1..324: note = Description of Artificial Sequence: Synthetic polynucleotide
  source 1..324: mol_type = other DNA
gaaattgtgttgacgcagtctccaggcaccctgtctttgtctccaggggaaagcgccaccctctcctgcagggccggtcaaagtattagaaccaacttcttagcctggtaccagcagcaacctggccaggctcccaggctcctcatctatggtgcatccagcagggccactggcatcccagacaggttcagtggcagtgggtctgggacagacttcactctcaccatcaacagactggagcctgaagattttgcagtgtatttctgtcagcagtatggtagctcaccgtggacgttcggccaagggaccaaggtggaaatcaat

SEQ ID NO: 26786 - protein, 108 aa, synthetic construct
  REGION 1..108: note = Description of Artificial Sequence: Synthetic polypeptide
EIVLTQSPGTLSLSPGESATLSCRAGQSIRTNFLAWYQQQPGQAPRLLIYGASSRATGIPDRFSGSGSGTDFTLTINRLEPEDFAVYFCQQYGSSPWTFGQGTKVEIN

SEQ ID NO: 26787 - DNA, 321 bp, synthetic construct
  misc_feature 1..321: note = Description of Artificial Sequence: Synthetic polynucleotide
  source 1..321: mol_type = other DNA
gacatccagatgacccagtctccatcctcactgtctgcatctgtaggagacagagtcaccatcacttgtcgggcgagtcagggcattggcaagtatttagcctggtttcagcagaaaccagggaaagcccctaagtccctgatctatgctgcatccagtttgcaaagtggggtcccatcaaagttcagcggcagtggatctgggacagatttcactctcaccatcagcagcctgcagcctgaagattttgcaacttattactgccaacagtatagtacttacccgctcactttcggcggagggaccaaggtggagatcaaa

SEQ ID NO: 26788 - protein, 107 aa, synthetic construct
  REGION 1..107: note = Description of Artificial Sequence: Synthetic polypeptide
DIQMTQSPSSLSASVGDRVTITCRASQGIGKYLAWFQQKPGKAPKSLIYAASSLQSGVPSKFSGSGSGTDFTLTISSLQPEDFATYYCQQYSTYPLTFGGGTKVEIK

SEQ ID NO: 26789 - DNA, 321 bp, synthetic construct
  misc_feature 1..321: note = Description of Artificial Sequence: Synthetic polynucleotide
  source 1..321: mol_type = other DNA
gacatccagatgacccagtctccatcctccctgtctgcatctgtaggagacagagtcaccatcacttgccgggcaagtcagggcattagaaatgatttaggctggtatcagcagaaaccagggaaagcccctaagcgcctaatctattctgcatccagtttgcaaaggggggtcccatcaagattcagcggcagtggatctgggacagaattcactctcacaatcagcagcctgcagcctgaagattttgcaacttattactgtctacagcataaaaggtacccgctcactttcggcggagggaccaaggtggagatcaaa

SEQ ID NO: 26790 - protein, 107 aa, synthetic construct
  REGION 1..107: note = Description of Artificial Sequence: Synthetic polypeptide
DIQMTQSPSSLSASVGDRVTITCRASQGIRNDLGWYQQKPGKAPKRLIYSASSLQRGVPSRFSGSGSGTEFTLTISSLQPEDFATYYCLQHKRYPLTFGGGTKVEIK

SEQ ID NO: 26791 - DNA, 324 bp, synthetic construct
  misc_feature 1..324: note = Description of Artificial Sequence: Synthetic polynucleotide
  source 1..324: mol_type = other DNA
gaaattgtgttgacgcagtctccaggcaccctgtttttgtctccaggggaaagagccaccctctcctgcagggccagtcagagtattcgcagcagcttcttagcctggtaccagcagaaacctggccaggctcccaggctcctcatctatggtgcatccagcagggccactggcatcccagacaggttcagtggcagtgggtctgggacagacttcactctcaccatcagcagactggagcctgaagattttgcagtgtattactgtcagcaatatggtaactcaccgtgggcgttcggccaagggatcaaggtggaagtcaaa

SEQ ID NO: 26792 - protein, 108 aa, synthetic construct
  REGION 1..108: note = Description of Artificial Sequence: Synthetic polypeptide
EIVLTQSPGTLFLSPGERATLSCRASQSIRSSFLAWYQQKPGQAPRLLIYGASSRATGIPDRFSGSGSGTDFTLTISRLEPEDFAVYYCQQYGNSPWAFGQGIKVEVK

SEQ ID NO: 26793 - DNA, 324 bp, synthetic construct
  misc_feature 1..324: note = Description of Artificial Sequence: Synthetic polynucleotide
  source 1..324: mol_type = other DNA
gaaattgtgttgaagcagtctccaggcaccctgtttttgtctccaggggagagagccaccctctcctgcagggccagtcagagtataaggaccaacttcttagcctggtaccagcagaaacctggccaggctcccaggctcctcatctatggtgcatccagcagggccactggcatcccagacaggttcagtggcagtgggtctgggacagacttcactctcaccatcaacagactggagcctgaagattttgcagtgtattactgtcagcagtatggtaactcaccgtggacgttcggccaagggaccaaggtggaaatcaaa

SEQ ID NO: 26794 - protein, 108 aa, synthetic construct
  REGION 1..108: note = Description of Artificial Sequence: Synthetic polypeptide
EIVLKQSPGTLFLSPGERATLSCRASQSIRTNFLAWYQQKPGQAPRLLIYGASSRATGIPDRFSGSGSGTDFTLTINRLEPEDFAVYYCQQYGNSPWTFGQGTKVEIK

SEQ ID NO: 26795 - DNA, 321 bp, synthetic construct
  misc_feature 1..321: note = Description of Artificial Sequence: Synthetic polynucleotide
  source 1..321: mol_type = other DNA
gacatccagatgatccagtctccatcctcactgtctgcatctgtaggagacagagtcaccatcacttgtcgggcgagtcagggcgttagcaatcatttagcctggtttcagcagaaaccagggagagcccctaagtccctgatctatgctgcatccagtttgcaaagtggggtcccatcaaagttcagcggcagtggatctggggcagatttcactctcaccatcagcagcctgcagcctgaagattttgcaacttattactgccaacagtataatagttacccattcactttcggccctgggaccaaagtggatatcaaa

SEQ ID NO: 26796 - protein, 107 aa, synthetic construct
  REGION 1..107: note = Description of Artificial Sequence: Synthetic polypeptide
DIQMIQSPSSLSASVGDRVTITCRASQGVSNHLAWFQQKPGRAPKSLIYAASSLQSGVPSKFSGSGSGADFTLTISSLQPEDFATYYCQQYNSYPFTFGPGTKVDIK

SEQ ID NO: 26797 - DNA, 324 bp, synthetic construct
  misc_feature 1..324: note = Description of Artificial Sequence: Synthetic polynucleotide
  source 1..324: mol_type = other DNA
gaaattgtgttgacgcagtctccaggcaccctgtctttgtctccaggggaaagagccaccctctcctgcagggccagtcagagtgttagaaccaacttcttagcctggcaccagcagaaacctggccaggctcccaggctcctcatctatggtgcatcccgcagggccactggcatcccagacaggttcagtggcagtgggtctgggacagacttcactctcaccatcaacagactggagcctgaagattttgcactgtattactgtcagcagtatggtaactcaccgtggacgttcggccaagggaccaaggtggaaatcaaa

SEQ ID NO: 26798 - protein, 108 aa, synthetic construct
  REGION 1..108: note = Description of Artificial Sequence: Synthetic polypeptide
EIVLTQSPGTLSLSPGERATLSCRASQSVRTNFLAWHQQKPGQAPRLLIYGASRRATGIPDRFSGSGSGTDFTLTINRLEPEDFALYYCQQYGNSPWTFGQGTKVEIK

SEQ ID NO: 26799 - DNA, 321 bp, synthetic construct
  misc_feature 1..321: note = Description of Artificial Sequence: Synthetic polynucleotide
  source 1..321: mol_type = other DNA
gaaattgtactgactcagtctccagattttcagtctgtgactccaaaggagaaagtcaccatcacctgccgggccagtcagagcattggtaggagtttacactggtaccagcagagaccagatcagtctctaaagctcctcatcaagtatgcttcccagtcattctcaggggtcccctcgaggttcagtggcagtggatctgggacagatttcaccctcaccatcaatagcctggaggctgaagatgctgcaacgtatttctgtcatcagagtagtcgtttaccgctcactttcggcggcgggaccaaggtggagatcaaa

SEQ ID NO: 26800 - protein, 107 aa, synthetic construct
  REGION 1..107: note = Description of Artificial Sequence: Synthetic polypeptide
EIVLTQSPDFQSVTPKEKVTITCRASQSIGRSLHWYQQRPDQSLKLLIKYASQSFSGVPSRFSGSGSGTDFTLTINSLEAEDAATYFCHQSSRLPLTFGGGTKVEIK

SEQ ID NO: 26801 - DNA, 321 bp, synthetic construct
  misc_feature 1..321: note = Description of Artificial Sequence: Synthetic polynucleotide
  source 1..321: mol_type = other DNA
gacatccagatgacccagtctccatcctcactgtctgcatctgtaggagacagagtcaccatcacttgtcgggcgagtcagggcattagcaattatttagcctggtttcagcagaaaccagggaaagcccctaagtccctgatctatgctgcatccagtttgcaaagtggggtcccatcaaagttcagcggcagtggatctggaacagatttcactctcaccatcagcagcctgcagcctgaagattttgcaacttatttctgccaacattatcttacttaccctctcactttcggcggagggaccaaggtggagatcaaa

SEQ ID NO: 26802 - protein, 107 aa, synthetic construct
  REGION 1..107: note = Description of Artificial Sequence: Synthetic polypeptide
DIQMTQSPSSLSASVGDRVTITCRASQGISNYLAWFQQKPGKAPKSLIYAASSLQSGVPSKFSGSGSGTDFTLTISSLQPEDFATYFCQHYLTYPLTFGGGTKVEIK

SEQ ID NO: 26803 - DNA, 327 bp, synthetic construct
  misc_feature 1..327: note = Description of Artificial Sequence: Synthetic polynucleotide
  source 1..327: mol_type = other DNA
gaaattgtgttgacgcagtctccaggcaccctgtctttgtctccaggggaaagagccaccctctcctgcagggccagtccgagtgttagcagcagctacttagcctggtaccagcaaaaacctggccaggctcccaggctcgtcatctatggtgcatccaggagggccactggcatcccagacaggttcagaggcagtgggtctgggacagacttcactctcaccatcagtagactggagcctgaggattttgcagtgtattactgtcagcagtatggtagctcacctccgtggacgttcggccaagggaccaaggtggaaatcaaa

SEQ ID NO: 26804 - protein, 109 aa, synthetic construct
  REGION 1..109: note = Description of Artificial Sequence: Synthetic polypeptide
EIVLTQSPGTLSLSPGERATLSCRASPSVSSSYLAWYQQKPGQAPRLVIYGASRRATGIPDRFRGSGSGTDFTLTISRLEPEDFAVYYCQQYGSSPPWTFGQGTKVEIK

SEQ ID NO: 26805 - DNA, 324 bp, synthetic construct
  misc_feature 1..324: note = Description of Artificial Sequence: Synthetic polynucleotide
  source 1..324: mol_type = other DNA
gaaattgtgttgacgcagtctccaggcaccctgtctttgtctccaggggaaagagccaccctctcctgcagggccagtcagagtattcgcagcagcttcttagcctggtatcagcagaaacctggccaggctcccaggctcctcatctatgatgcatccagcagggccactggcatcccagacaggttcagtggcagtgggtctgggacagacttcactctcaccatcagcagactggagcctgaagattttgcagtgtattactgtcagcagtatggtaactcaccgtgggcgttcggccaagggaccaaggtggaaatcaaa

SEQ ID NO: 26806 - protein, 108 aa, synthetic construct
  REGION 1..108: note = Description of Artificial Sequence: Synthetic polypeptide
EIVLTQSPGTLSLSPGERATLSCRASQSIRSSFLAWYQQKPGQAPRLLIYDASSRATGIPDRFSGSGSGTDFTLTISRLEPEDFAVYYCQQYGNSPWAFGQGTKVEIK

SEQ ID NO: 26807 - DNA, 321 bp, synthetic construct
  misc_feature 1..321: note = Description of Artificial Sequence: Synthetic polynucleotide
  source 1..321: mol_type = other DNA
gaaatagtgatgacgcagtctccagccaccctgtctgtgtctccaggggaaagagccaccctctcctgcagggccagtcagagtgttagcagcagcttagcctggtatcagcagaaacctggccaggctcccaggatcctcatctctggtgcatccaccagggccactggtatcccagccaggttcagtggcagtgggtctgggacagagttcactctcaccatcagcagcctgcagtctgcagattttgcagtttattactgccagcagtataataactggccgtgcagttttggccaggggaccaagctggagatcaaa

SEQ ID NO: 26808 - protein, 107 aa, synthetic construct
  REGION 1..107: note = Description of Artificial Sequence: Synthetic polypeptide
EIVMTQSPATLSVSPGERATLSCRASQSVSSSLAWYQQKPGQAPRILISGASTRATGIPARFSGSGSGTEFTLTISSLQSADFAVYYCQQYNNWPCSFGQGTKLEIK

SEQ ID NO: 26809 - DNA, 321 bp, synthetic construct; identical to SEQ ID NO: 26733
  misc_feature 1..321: note = Description of Artificial Sequence: Synthetic polynucleotide
  source 1..321: mol_type = other DNA

SEQ ID NO: 26810 - protein, 107 aa, synthetic construct; identical to SEQ ID NO: 26734
  REGION 1..107: note = Description of Artificial Sequence: Synthetic polypeptide

SEQ ID NO: 26811 - DNA, 321 bp, synthetic construct; identical to SEQ ID NO: 26691
  misc_feature 1..321: note = Description of Artificial Sequence: Synthetic polynucleotide
  source 1..321: mol_type = other DNA

SEQ ID NO: 26812 - protein, 107 aa, synthetic construct; identical to SEQ ID NO: 26594
  REGION 1..107: note = Description of Artificial Sequence: Synthetic polypeptide

SEQ ID NO: 26813 - DNA, 324 bp, synthetic construct
  misc_feature 1..324: note = Description of Artificial Sequence: Synthetic polynucleotide
  source 1..324: mol_type = other DNA
gaaattgtgttgacgcagtctccaggcaccctgtctttgtctccaggggaaagagccaccctctcctgcagggccagtcggggtgttagcaacatctacttagcctggtaccaacagaaacctggccaggctcccaggctcctcatctatggtgcttccaacagggccactggcatcccagacaggttcagtggcagtgggtctgggacagacttcactctcaccatcagcagactggagcctgaagattttgcagtgtattactgtcagcacaatgattactcaatgttcactttcggccctgggaccaaagtggatatcaaa

SEQ ID NO: 26814 - protein, 108 aa, synthetic construct
  REGION 1..108: note = Description of Artificial Sequence: Synthetic polypeptide
EIVLTQSPGTLSLSPGERATLSCRASRGVSNIYLAWYQQKPGQAPRLLIYGASNRATGIPDRFSGSGSGTDFTLTISRLEPEDFAVYYCQHNDYSMFTFGPGTKVDIK

SEQ ID NO: 26815 - DNA, 336 bp, synthetic construct
  misc_feature 1..336: note = Description of Artificial Sequence: Synthetic polynucleotide
  source 1..336: mol_type = other DNA
gatattgtgatgacccagactccactctctctgtccgtcacccctggacagccggcctccatctcctgcaagtctagtcagagcctcctccatagtgatggaaggacctatttgtattggtacctgcagaagccaggccagcctccacagctcctgatctgtgaggtttccaaccggttctctggagtgccagataggttcagtggcagcgggtcagggacagatttcacactgaaaatcagccgggtggaggctggggatgttggggtttattactgcatgcaaagtatacagcttccctggacgttcggccaagggaccaaggtggaaatcaaa

SEQ ID NO: 26816 - protein, 112 aa, synthetic construct
  REGION 1..112: note = Description of Artificial Sequence: Synthetic polypeptide
DIVMTQTPLSLSVTPGQPASISCKSSQSLLHSDGRTYLYWYLQKPGQPPQLLICEVSNRFSGVPDRFSGSGSGTDFTLKISRVEAGDVGVYYCMQSIQLPWTFGQGTKVEIK

SEQ ID NO: 26817 - DNA, 324 bp, synthetic construct
  misc_feature 1..324: note = Description of Artificial Sequence: Synthetic polynucleotide
  source 1..324: mol_type = other DNA
gaaattgtgttgacgcagtctccaggcaccctgtctttgtctccaggggaaagcgccaccctctcctgcagggccggtcaaagtattagaaccaacttcttagcctggtaccagcagaaacctggccaggctcccaggctcctcatctatggtgcatccagcagggccactggcatcccagacaggttcagtggcagtgggtctgggacagacttcactctcaccatcaacagactggagcctaaagattttgcagtgtattactgtcagcagtatggtagttcaccgtggacgttcggccaagggaccaaggtggaaatcaaa

SEQ ID NO: 26818 - protein, 108 aa, synthetic construct
  REGION 1..108: note = Description of Artificial Sequence: Synthetic polypeptide
EIVLTQSPGTLSLSPGESATLSCRAGQSIRTNFLAWYQQKPGQAPRLLIYGASSRATGIPDRFSGSGSGTDFTLTINRLEPKDFAVYYCQQYGSSPWTFGQGTKVEIK

SEQ ID NO: 26819 - DNA, 324 bp, synthetic construct
  misc_feature 1..324: note = Description of Artificial Sequence: Synthetic polynucleotide
  source 1..324: mol_type = other DNA
gaaattgtgttgacgcagtctccaggcaccctgtctttgtctccaggggaaagagccaccctctcctgcagggccagtcagagtattagaagcaacttcttagcctggtatcagcagaaacctggccaggctcccaggctcctcatctatggtgcatccagcagggccactggcatcccagacaggttcagtggcagtgtgtctgggacagacttcactctcaccatcaacagactggagcctgaagattttgcagtgtattactgtcagcagtatggtagctcaccgtggacgttcggccaagggaccaaggtggaaatcaaa

SEQ ID NO: 26820 - protein, 108 aa, synthetic construct
  REGION 1..108: note = Description of Artificial Sequence: Synthetic polypeptide
EIVLTQSPGTLSLSPGERATLSCRASQSIRSNFLAWYQQKPGQAPRLLIYGASSRATGIPDRFSGSVSGTDFTLTINRLEPEDFAVYYCQQYGSSPWTFGQGTKVEIK

SEQ ID NO: 26821 - DNA, 321 bp, synthetic construct
  misc_feature 1..321: note = Description of Artificial Sequence: Synthetic polynucleotide
  source 1..321: mol_type = other DNA
gacatccagatgacccagtctccatcctcactgtctgcatctgtaggagacagagtcaccatcacttgtcgggcgagtcagggcattagcaaatatttagcctggtttcagcagaaaccagggaaagcccctaagtccctgatctatggtgcatccaggttgcaaagtggggtcccatcaaagttcagcggcagtggatctgggacagatttcactctcaccatcagcagcctgcagcctgaagattttgcaacttattactgccaacattatcttaattaccctctcaccttcggccaagggacacgactggagattaaa

SEQ ID NO: 26822 - protein, 107 aa, synthetic construct
  REGION 1..107: note = Description of Artificial Sequence: Synthetic polypeptide
DIQMTQSPSSLSASVGDRVTITCRASQGISKYLAWFQQKPGKAPKSLIYGASRLQSGVPSKFSGSGSGTDFTLTISSLQPEDFATYYCQHYLNYPLTFGQGTRLEIK

SEQ ID NO: 26823 - DNA, 321 bp, synthetic construct
  misc_feature 1..321: note = Description of Artificial Sequence: Synthetic polynucleotide
  source 1..321: mol_type = other DNA
gacatccagatgacccagtctccatcttccgtgtctgcatctgtaggagacagagtcaccatcacttgtcgggcgagtcagggtattagcaggtggttagcctggtttcagcagaaaccagggaaagcccctaagatcctgatctatgctgcatccagtttgcaaagtggggtcccatcaaggttcagcggcagtggatctgggacagatttcactctcaccatcagcagcctgcagcctgaagattttgcaacttactattgtcaacaggctaacagtttcccgtggacgttcggccaagggaccaaggtggaaatcaaa

SEQ ID NO: 26824 - protein, 107 aa, synthetic construct
  REGION 1..107: note = Description of Artificial Sequence: Synthetic polypeptide
DIQMTQSPSSVSASVGDRVTITCRASQGISRWLAWFQQKPGKAPKILIYAASSLQSGVPSRFSGSGSGTDFTLTISSLQPEDFATYYCQQANSFPWTFGQGTKVEIK

SEQ ID NO: 26825 - DNA, 324 bp, synthetic construct
  misc_feature 1..324: note = Description of Artificial Sequence: Synthetic polynucleotide
  source 1..324: mol_type = other DNA
gaaattgtgttgacgcagtctccaggcaccctgtctttgtctccaggggaaagagccaccctctcctgcagggccagtccgagtgttaacagcggctacttagcctggtaccagcagaagcctggccagactcccaggctcctcatctttggtgcatccagcagggccactggcatccccgacaggttcagtgccagtgggtctggggcagacttcactctcaccatcagtagactggagcctgaagattttgcagtgtatttctgtcagcagtatgaaagctcaccgtggacgttcggccaagggaccaaggtggaaatcaaa

SEQ ID NO: 26826 - protein, 108 aa, synthetic construct
  REGION 1..108: note = Description of Artificial Sequence: Synthetic polypeptide
EIVLTQSPGTLSLSPGERATLSCRASPSVNSGYLAWYQQKPGQTPRLLIFGASSRATGIPDRFSASGSGADFTLTISRLEPEDFAVYFCQQYESSPWTFGQGTKVEIK

SEQ ID NO: 26827 - DNA, 321 bp, synthetic construct
  misc_feature 1..321: note = Description of Artificial Sequence: Synthetic polynucleotide
  source 1..321: mol_type = other DNA
gacatccagatgacccagtctccatcctccctgtctgcatctgtaggagacagagtcaccatcacttgccgggcaagtcagggcattagaaatgatttaggctggtatcagctgaaaccagggaaagcccctaagcgcctgatctatgctgcatccagtttacaaagtggggtcccatcaaggttcagcggcagtggatctgggccagaattcactctcacaatcagcagcctgcagcctgaagattttgcaacttattactgtctacagcattatagtttcccattcactttcggccctgggaccaaagtggatatcaaa

SEQ ID NO: 26828 - protein, 107 aa, synthetic construct; identical to SEQ ID NO: 26696
  REGION 1..107: note = Description of Artificial Sequence: Synthetic polypeptide

SEQ ID NO: 26829 - DNA, 321 bp, synthetic construct
  misc_feature 1..321: note = Description of Artificial Sequence: Synthetic polynucleotide
  source 1..321: mol_type = other DNA
gacatccagatgacccagtctccatcctcactgtctgcatctgtaggagacagagtcaccatcacttgtcgggcgagtcagggcattagcaattatttagcctggtttcagcagaaaccagggaaagcccctaagtccctgatctatgctgcatccagtttacaaagtggggtcccatcaaagttcagcggcagtggatctggaacagatttcactctcaccatcagcagcctgcagcctgaagattttgcaacttattactgccaacattatcttacttaccctctcactttcggcggagggaccaaggtggagatcaaa

SEQ ID NO: 26830 - protein, 107 aa, synthetic construct; identical to SEQ ID NO: 26622
  REGION 1..107: note = Description of Artificial Sequence: Synthetic polypeptide

SEQ ID NO: 26831 - DNA, 321 bp, synthetic construct
  misc_feature 1..321: note = Description of Artificial Sequence: Synthetic polynucleotide
  source 1..321: mol_type = other DNA
gacatccagatgacccagtctccatcctcactgtctgcatctgtgggagacagagtcaccatcactcgtcgggcgagtcagggcattggcaagtatttagcatggtttcagcagaaaccagggaaagcccttaagtcactgatatatgctgcatccagtttgcaaagtggggtcccatcaaaattcagcggcagtggatctgggacagatttcactctcaccatcagcagcctgcagcctgacgattttgcaacttattactgccaacgatatgatacttacccattcactttcggccctgggaccaaagtggatatcaaa

SEQ ID NO: 26832 - protein, 107 aa, synthetic construct
  REGION 1..107: note = Description of Artificial Sequence: Synthetic polypeptide
DIQMTQSPSSLSASVGDRVTITRRASQGIGKYLAWFQQKPGKALKSLIYAASSLQSGVPSKFSGSGSGTDFTLTISSLQPDDFATYYCQRYDTYPFTFGPGTKVDIK

SEQ ID NO: 26833 - DNA, 324 bp, synthetic construct
  misc_feature 1..324: note = Description of Artificial Sequence: Synthetic polynucleotide
  source 1..324: mol_type = other DNA
gaaattgtgttgacgcagtctccaggcaccctgtctttgtcttcaggggaaagagccaccctctcctgcagggccagtccgagtgttaacagtaactacttagcctggtatcagcagaaacctggccagactcccaggctcctcatctatggtgcatccaacagggccactggcgtcccagacaggttcagtgccagtgggtctgggacagacttcactctcaccatcagaagactggagcctgaagattttgcagtgtatttctgtcagcagtatgaaagctcaccgtggacgttcggccaagggaccaaggtggaaatcaaa

SEQ ID NO: 26834 - protein, 108 aa, synthetic construct
  REGION 1..108: note = Description of Artificial Sequence: Synthetic polypeptide
EIVLTQSPGTLSLSSGERATLSCRASPSVNSNYLAWYQQKPGQTPRLLIYGASNRATGVPDRFSASGSGTDFTLTIRRLEPEDFAVYFCQQYESSPWTFGQGTKVEIK

SEQ ID NO: 26835 - DNA, 321 bp, synthetic construct
  misc_feature 1..321: note = Description of Artificial Sequence: Synthetic polynucleotide
  source 1..321: mol_type = other DNA
gacatccagatgacccagtctccatcttccgtgtctgcatctgtaggagacagagtcaccatcacttgtcgggcgagtcagggtattagcaggtggttagcctggtatcagcagaaaccagggaaagcccctaagctcctgatctatgctgcatccagtttgctaggtggggtcccatcaaggttcagcggcagtggatctgggacagatttcactctcaccatcagcagcctgcagcctgaagattttgcaacttactattgtcaacgggctaacagtttcccgtgcagttttggccaggggaccaagctggagatcaaa

SEQ ID NO: 26836 - protein, 107 aa, synthetic construct
  REGION 1..107: note = Description of Artificial Sequence: Synthetic polypeptide
DIQMTQSPSSVSASVGDRVTITCRASQGISRWLAWYQQKPGKAPKLLIYAASSLLGGVPSRFSGSGSGTDFTLTISSLQPEDFATYYCQRANSFPCSFGQGTKLEIK

SEQ ID NO: 26837 - DNA, 321 bp, synthetic construct
  misc_feature 1..321: note = Description of Artificial Sequence: Synthetic polynucleotide
  source 1..321: mol_type = other DNA
gaaattgtgctgactcagtctccagactttcagtctgtgactccaaaggagaaagtcaccatcacctgccgggccagtcagagcattggtagtagcttacactggtaccagcagaaaccagatcagtctccaaagctcctcatcaagtatgcttcccagtccttctcaggggtcccctcgaggttcagtggcagtggatctgggacagatttcgccctcaccatcagtagcctggaagctgaagatgctgcaacgtattactgtcatcagagtagaactttaccgctcactttcggcggagggaccaaggtggagatcaaa

SEQ ID NO: 26838 - protein, 107 aa, synthetic construct
  REGION 1..107: note = Description of Artificial Sequence: Synthetic polypeptide
EIVLTQSPDFQSVTPKEKVTITCRASQSIGSSLHWYQQKPDQSPKLLIKYASQSFSGVPSRFSGSGSGTDFALTISSLEAEDAATYYCHQSRTLPLTFGGGTKVEIK

SEQ ID NO: 26839 - DNA, 321 bp, synthetic construct
  misc_feature 1..321: note = Description of Artificial Sequence: Synthetic polynucleotide
  source 1..321: mol_type = other DNA
gacatccagatgacccagtctccttcctcactgtctgcatctgtaggagacagagtcaccatcacttgtcggacgagtcagggcattggcaagtatttagcctggtttcagcagaaaccagggaaagcccctaagtccctgctctataaagtatccagtttgcaaagtggggtcccatcaaagttcagcggcagtggatctgggacagatttcactctcaccatcagcagcctgcagcctgaagattttgcaacttattactgccaacagtatatgacttacccgctcactttcggcggagggaccaaggtggagatcaaa

SEQ ID NO: 26840 - protein, 107 aa, synthetic construct
  REGION 1..107: note = Description of Artificial Sequence: Synthetic polypeptide
DIQMTQSPSSLSASVGDRVTITCRTSQGIGKYLAWFQQKPGKAPKSLLYKVSSLQSGVPSKFSGSGSGTDFTLTISSLQPEDFATYYCQQYMTYPLTFGGGTKVEIK

SEQ ID NO: 26841 - DNA, 324 bp, synthetic construct
  misc_feature 1..324: note = Description of Artificial Sequence: Synthetic polynucleotide
  source 1..324: mol_type = other DNA
gaaattgtgttgacgcagtctccaggcaccctgtctttgtctccaggggaaagagccaccctctcctgcagggccagtcagagtattcgcagcagcttcttagcctggtaccaacagaaacctggccaggctcccaggctcctcatctatggtgcatttagtagggccactggcatcccagacaggttcagtggcagtgggtctgggacagacttcactctcaccatcagcagactggagcctgaagattttgcagtgtattactgtcagcagtatggtaactcaccgtgggcgttcggccaagggaccaaggtggaaatcaaa

SEQ ID NO: 26842 - protein, 108 aa, synthetic construct
  REGION 1..108: note = Description of Artificial Sequence: Synthetic polypeptide
EIVLTQSPGTLSLSPGERATLSCRASQSIRSSFLAWYQQKPGQAPRLLIYGAFSRATGIPDRFSGSGSGTDFTLTISRLEPEDFAVYYCQQYGNSPWAFGQGTKVEIK

SEQ ID NO: 26843 - DNA, 321 bp, synthetic construct; identical to SEQ ID NO: 26621
  misc_feature 1..321: note = Description of Artificial Sequence: Synthetic polynucleotide
  source 1..321: mol_type = other DNA

SEQ ID NO: 26844 - protein, 107 aa, synthetic construct; identical to SEQ ID NO: 26622
  REGION 1..107: note = Description of Artificial Sequence: Synthetic polypeptide

SEQ ID NO: 26845 - DNA, 321 bp, synthetic construct
  misc_feature 1..321: note = Description of Artificial Sequence: Synthetic polynucleotide
  source 1..321: mol_type = other DNA
gacatccagatgacccagtctccatcctccctgtctgcatctgtaggagacagagtcaccatcacttgccgggcaagtcagggcataagaaaagatttaggctggtatcagcagaaaccagggaaagcccctaagcgcctgatctatgctgcatccgatttgcaaagtggggtcccatcaaggttcagcggcagtggatctgggacagaattcactctcacaatcagcagcctgcagcctgaagattttgcaacttattgctgtctacagcattatcgttacccattcactttcggccctgggaccaaagtggatttcaaa

SEQ ID NO: 26846 - protein, 107 aa, synthetic construct
  REGION 1..107: note = Description of Artificial Sequence: Synthetic polypeptide
DIQMTQSPSSLSASVGDRVTITCRASQGIRKDLGWYQQKPGKAPKRLIYAASDLQSGVPSRFSGSGSGTEFTLTISSLQPEDFATYCCLQHYRYPFTFGPGTKVDFK

SEQ ID NO: 26847 - DNA, 321 bp, synthetic construct
  misc_feature 1..321: note = Description of Artificial Sequence: Synthetic polynucleotide
  source 1..321: mol_type = other DNA
gaaattgtgctgactcagtctccagactttcagtctgtgactccaaaggagaaagtcaccatcacctgccgggccagtcagagcattggtagtagcttacactggtaccagcagaaaccagatcagtctccaaagctcctcatcaagtatgcttcccagtccttctcaggggtcccctcgaggttcagtggcagtggatctgggacagatttcaccctcaccatcaatagcctggaagctgaagatgctgcaacgtattactgtcatcagagtggtcgtttaccgctcactttcggcggagggaccaaggtggagatcaaa

SEQ ID NO: 26848 - protein, 107 aa, synthetic construct
  REGION 1..107: note = Description of Artificial Sequence: Synthetic polypeptide
EIVLTQSPDFQSVTPKEKVTITCRASQSIGSSLHWYQQKPDQSPKLLIKYASQSFSGVPSRFSGSGSGTDFTLTINSLEAEDAATYYCHQSGRLPLTFGGGTKVEIK

SEQ ID NO: 26849 - DNA, 321 bp, synthetic construct; identical to SEQ ID NO: 26781
  misc_feature 1..321: note = Description of Artificial Sequence: Synthetic polynucleotide
  source 1..321: mol_type = other DNA

SEQ ID NO: 26850 - protein, 107 aa, synthetic construct; identical to SEQ ID NO: 26782
  REGION 1..107: note = Description of Artificial Sequence: Synthetic polypeptide

SEQ ID NO: 26851 - DNA, 339 bp, synthetic construct
  misc_feature 1..339: note = Description of Artificial Sequence: Synthetic polynucleotide
  source 1..339: mol_type = other DNA
gacatcgtgatgacccagtctccagactccctggctgtgtctctgggcgagagggccaccatcaactgcaagtccagccagagtgttttattcaactccaacaataagaactacttagcttggtaccagcagaaacccggtcagcctcctaacctgctcatttactgggcatctaccctggaatctggggtccctgaccgattcagtggcagcgggtgtgggacagatttcactctcaccatcagcagcatgcaggctgaagatgtggcagtttattactgtcagcaatattgtagttttccattcactttcggccctgggaccaaagtggatatcaga

SEQ ID NO: 26852 - protein, 113 aa, synthetic construct
  REGION 1..113: note = Description of Artificial Sequence: Synthetic polypeptide
DIVMTQSPDSLAVSLGERATINCKSSQSVLFNSNNKNYLAWYQQKPGQPPNLLIYWASTLESGVPDRFSGSGCGTDFTLTISSMQAEDVAVYYCQQYCSFPFTFGPGTKVDIR

SEQ ID NO: 26853 - DNA, 321 bp, synthetic construct
  misc_feature 1..321: note = Description of Artificial Sequence: Synthetic polynucleotide
  source 1..321: mol_type = other DNA
gacatccagatgacccagtctccatcttccgtgtctgcatctgtaggagacagagtcaccatcacttgtcgggcgagtcagggtattaacaactggttagcctggtatcagcagaaaccagggaaagcccctaagctcctgatctatggtgtttccagtttgcagagtggggtcccatcaaggttcagcggcagtggatctgggacagatttcactctcaccatcagcagcctgcagcctgaagattttgcaacttactcttgtcaacaggctaacagtttcccgtggacgttcggccgagggaccaaggtggaaaatcag

SEQ ID NO: 26854 - protein, 107 aa, synthetic construct
  REGION 1..107: note = Description of Artificial Sequence: Synthetic polypeptide
DIQMTQSPSSVSASVGDRVTITCRASQGINNWLAWYQQKPGKAPKLLIYGVSSLQSGVPSRFSGSGSGTDFTLTISSLQPEDFATYSCQQANSFPWTFGRGTKVENQ

SEQ ID NO: 26855 - DNA, 339 bp, synthetic construct
  misc_feature 1..339: note = Description of Artificial Sequence: Synthetic polynucleotide
  source 1..339: mol_type = other DNA
gacatcgtgatgacccagtctccagactccctggctgtgtttctgggcgagagggccaccatcaactgcaagtccagccagagtattttattcagctccaacaataagaggtacttagcttggtatcagcagaaaccaggacagcctcctaagctgctcatttactgggcatctatccgggaatccggggtccctgaccgattcagtggcagcgggtctgggacagatttcactctcaccatcagcagcctgcaggctgaagatgtggcagtttattactgtcagcaatattctagtcttccattcactttcggccctgggaccaaagtggatatcaaa

SEQ ID NO: 26856 - protein, 113 aa, synthetic construct
  REGION 1..113: note = Description of Artificial Sequence: Synthetic polypeptide
DIVMTQSPDSLAVFLGERATINCKSSQSILFSSNNKRYLAWYQQKPGQPPKLLIYWASIRESGVPDRFSGSGSGTDFTLTISSLQAEDVAVYYCQQYSSLPFTFGPGTKVDIK

SEQ ID NO: 26857 - DNA, 339 bp, synthetic construct
  misc_feature 1..339: note = Description of Artificial Sequence: Synthetic polynucleotide
  source 1..339: mol_type = other DNA
gacatcgtgatgacccagtctccagactccctggctgtgtctctgggcgagagggccaccatcaactgcaagtccagccagagtgttttattcaactccaacaataagaactacttagcttggtaccagcagaaacccggtcagcttcctaacctgctcatttactgggcatctaccctggaatctggggtccctgaccgattcagtggcagcggctgtgggacagatttcactctcaccatcagcagcatgcaggctgaagatgtggcagtttattactgtcagcaatattgtagttttccattcactttcggccctgggaccaaagtggatatcaga

SEQ ID NO: 26858 - protein, 113 aa, synthetic construct
  REGION 1..113: note = Description of Artificial Sequence: Synthetic polypeptide
DIVMTQSPDSLAVSLGERATINCKSSQSVLFNSNNKNYLAWYQQKPGQLPNLLIYWASTLESGVPDRFSGSGCGTDFTLTISSMQAEDVAVYYCQQYCSFPFTFGPGTKVDIR

SEQ ID NO: 26859 - DNA, 321 bp, synthetic construct
  misc_feature 1..321: note = Description of Artificial Sequence: Synthetic polynucleotide
  source 1..321: mol_type = other DNA
gacatccagatgacccagtctccatcttccgtgtctgcatctgtaggagacagagtcaccatcacttgtcgggcgagtcagggtattagcagctggttagcctggtatcagcagaaaccagggaaagcccctaaactcctgatctatgctgcatccagtttgcaaagtggggtcccatcaaggttcagcggcagtggatctgggacagatttcactctcaccatcagcagcctgcagcctgaagattttgcaacttactattgtcaacagactaacagtgtcccattcactttcggccctgggaccaaagtagatatcaaa

SEQ ID NO: 26860 - protein, 107 aa, synthetic construct
  REGION 1..107: note = Description of Artificial Sequence: Synthetic polypeptide
DIQMTQSPSSVSASVGDRVTITCRASQGISSWLAWYQQKPGKAPKLLIYAASSLQSGVPSRFSGSGSGTDFTLTISSLQPEDFATYYCQQTNSVPFTFGPGTKVDIK

SEQ ID NO: 26861 - DNA, 321 bp, synthetic construct
  misc_feature 1..321: note = Description of Artificial Sequence: Synthetic polynucleotide
  source 1..321: mol_type = other DNA
gactttcagatgatccagtctccatcctccctgtctgcatctgtaggcgacagagtcaccatcacttgccgggcaagtcagcgcattcacagctatttaaattggtatcagcagaaaccagggaaagctcctaagctcctgatctatactgcatccagtttgcaaggtggggtcccatcaaggttcagtggcagtggatctgggacagatttcactctcaccatcagcagtctgcagcctgaagattttgcaacttactactgtcaacagagctacggttcccctctcactttcggcggagggaccaaggtggagatcaaa

SEQ ID NO: 26862 - protein, 107 aa, synthetic construct
  REGION 1..107: note = Description of Artificial Sequence: Synthetic polypeptide
DFQMIQSPSSLSASVGDRVTITCRASQRIHSYLNWYQQKPGKAPKLLIYTASSLQGGVPSRFSGSGSGTDFTLTISSLQPEDFATYYCQQSYGSPLTFGGGTKVEIK

SEQ ID NO: 26863 - DNA, 321 bp, synthetic construct
  misc_feature 1..321: note = Description of Artificial Sequence: Synthetic polynucleotide
  source 1..321: mol_type = other DNA
gacatccagatgacccagtctccatcctcactgtctgcatctgtaggagacagagtcaccatcacttgtcgggcgaatcaggccattagcaattatttagcctggtttcagcagaaaccagggaaagcccctaagtccctgatctatgctgcatccagtttgcaaagtggggtcccatcaaagttcagcggcagtggatctggaacagatttcactctcaccatcagcagcctgcagcctgaagattttgcaacttattactgccaacattatctcacttaccctctcactttcggcggagggaccaaggtggagatcaaa

SEQ ID NO: 26864 - protein, 107 aa, synthetic construct
  REGION 1..107: note = Description of Artificial Sequence: Synthetic polypeptide
DIQMTQSPSSLSASVGDRVTITCRANQAISNYLAWFQQKPGKAPKSLIYAASSLQSGVPSKFSGSGSGTDFTLTISSLQPEDFATYYCQHYLTYPLTFGGGTKVEIK

SEQ ID NO: 26865 - DNA, 339 bp, synthetic construct
  misc_feature 1..339: note = Description of Artificial Sequence: Synthetic polynucleotide
  source 1..339: mol_type = other DNA
gacatcgtgatgacccagtctccagactccctgactgtgtctctgggcgagagggccaccgtcaactgcaagtccagccagagtgttttacacagctccaacaataacaactacttagcttggtaccagcagaaaccaggacagcctcctaagctgctcatttactgggcatctacccgggaatccggagtccctgaccgattcagtggcagcgggtctgggacagatttcactctcgccatcagcagcctgcaggctgaagatgtggcggtttattactgtcagcaatattataatactcctccgacattcggccaagggaccaaggtggaaatcaaa

SEQ ID NO: 26866 - protein, 113 aa, synthetic construct
  REGION 1..113: note = Description of Artificial Sequence: Synthetic polypeptide
DIVMTQSPDSLTVSLGERATVNCKSSQSVLHSSNNNNYLAWYQQKPGQPPKLLIYWASTRESGVPDRFSGSGSGTDFTLAISSLQAEDVAVYYCQQYYNTPPTFGQGTKVEIK

SEQ ID NO: 26867 - DNA, 321 bp, synthetic construct
  misc_feature 1..321: note = Description of Artificial Sequence: Synthetic polynucleotide
  source 1..321: mol_type = other DNA
gacatccagatgacccagtctccatcttccgtgtctgcatctgtaggagacagagtcaccatcacttgtcgggcgagtcagggtattagcaactgcttagcctggtatcagcagaaaccagggaaagcccctaagttcctgatctgtgctgcatccagtttgcaaagtgcggtcccatcaaggttcagcggcagtggatctgggacagatttcactctcaccatcagcagcctgcagcctgaagattttgcatcttactattgtcaacagggtgacagtttccctccgacgttcggccaagggaccaaggtggaattcaga

SEQ ID NO: 26868 - protein, 107 aa, synthetic construct
  REGION 1..107: note = Description of Artificial Sequence: Synthetic polypeptide
DIQMTQSPSSVSASVGDRVTITCRASQGISNCLAWYQQKPGKAPKFLICAASSLQSAVPSRFSGSGSGTDFTLTISSLQPEDFASYYCQQGDSFPPTFGQGTKVEFR

SEQ ID NO: 26869 - DNA, 321 bp, synthetic construct
  misc_feature 1..321: note = Description of Artificial Sequence: Synthetic polynucleotide
  source 1..321: mol_type = other DNA
gacatccagatgacccagtatccatcttacgtgtctgcatctgtaggagacagagtcagcatcacttgtcgggcgagtcagggtattagcaggtggttagcctggtatcagcagaagccagggaaagccgccaagttcctgatctatgctgcatccagtttgctaggtggggtctcatcaaggttcagcggcagtggatctgggacagatttcactctcaccatcagcagcctgcagcctgaagattttgcaatttactattgtcaacgggataacagtttaccgtgcagttttggccaggggaccaagctggagatcaaa

SEQ ID NO: 26870 - protein, 107 aa, synthetic construct
  REGION 1..107: note = Description of Artificial Sequence: Synthetic polypeptide
DIQMTQYPSYVSASVGDRVSITCRASQGISRWLAWYQQKPGKAAKFLIYAASSLLGGVSSRFSGSGSGTDFTLTISSLQPEDFAIYYCQRDNSLPCSFGQGTKLEIK

SEQ ID NO: 26871 - DNA, 321 bp, synthetic construct
  misc_feature 1..321: note = Description of Artificial Sequence: Synthetic polynucleotide
  source 1..321: mol_type = other DNA
gacatccagatgacccagtctccatcctccctgtctgcatctgtaggagacagagtcaccatcacttgccgggcaagtcagggcattagaaatgatttaggctggtatcagcagaaaccagggaaagcccctaagcgcctgatctatgctgcatccagtttgcaaagtggggtcccatcaaggttcagcggcagtggttctgggacagaattcactctcacaatcagcagcctgcagcctgaagattttgcaacttattactgtctacaatataatagttaccctctcactttcggcggagggaccaaggtggagatcaaa

SEQ ID NO: 26872 - protein, 107 aa, synthetic construct
  REGION 1..107: note = Description of Artificial Sequence: Synthetic polypeptide
DIQMTQSPSSLSASVGDRVTITCRASQGIRNDLGWYQQKPGKAPKRLIYAASSLQSGVPSRFSGSGSGTEFTLTISSLQPEDFATYYCLQYNSYPLTFGGGTKVEIK

SEQ ID NO: 26873 - DNA, 327 bp, synthetic construct
  misc_feature 1..327: note = Description of Artificial Sequence: Synthetic polynucleotide
  source 1..327: mol_type = other DNA
gaaattgtgttgacgcagtctccaggcaccctgttattgtctcccggggaaagagccaccctctcctgcagggccagtccgagtgttagcaacagcttcttagcctggtaccagcagaaacctggccaggctcccaggctcctcatctatggtgcatccagcagggccactggcatcccagacaggttcagtggcagtgggtctgggacagacttcactctcaccaacagcagactggagcctgaagattttgcagtgtattactgtcagcagtatggtagctcacctccgtggacgttcggccaagggaccaaggtagaactcaaa

SEQ ID NO: 26874 - protein, 109 aa, synthetic construct
  REGION 1..109: note = Description of Artificial Sequence: Synthetic polypeptide
EIVLTQSPGTLLLSPGERATLSCRASPSVSNSFLAWYQQKPGQAPRLLIYGASSRATGIPDRFSGSGSGTDFTLTNSRLEPEDFAVYYCQQYGSSPPWTFGQGTKVELK

SEQ ID NO: 26875 - DNA, 321 bp, synthetic construct
  misc_feature 1..321: note = Description of Artificial Sequence: Synthetic polynucleotide
  source 1..321: mol_type = other DNA
gacatccagatgaccctgtctccatcgtccctgtttgcatgtgtaggagacagagtcatcatcacttgccgggcaagtcagggcattagaaatgatctaggctggtctcagcagaatccagggaaagcccctaagcgcctgatctatgctgcatccagtttgcaaagtggggtcccatcaaggttcagcggcagtggatctgggacagaattcactatcacaatcagcagcctgcagcctgaagattttgaaacttattactgtctacagcataatgatttcccgttcactttcggccgagggaccaaggtggagatcaaa

SEQ ID NO: 26876 - protein, 107 aa, synthetic construct
  REGION 1..107: note = Description of Artificial Sequence: Synthetic polypeptide
DIQMTLSPSSLFACVGDRVIITCRASQGIRNDLGWSQQNPGKAPKRLIYAASSLQSGVPSRFSGSGSGTEFTITISSLQPEDFETYYCLQHNDFPFTFGRGTKVEIK

SEQ ID NO: 26877 - DNA, 324 bp, synthetic construct
  misc_feature 1..324: note = Description of Artificial Sequence: Synthetic polynucleotide
  source 1..324: mol_type = other DNA
gaaattgtgttgacgcagtctccaggcaccctgtttttgtctccaggggaaagagccaccctctcctgcagggccagtcagagtgttagaagcaacttcttagcctggcaccagcagaaacctggccaggctcccaggctcctcatctatggtgcataccgcagggccactggcatcccagacaggttcagtggcagtgggtctgggacagacttcactctcaccatcaacagactggagcctgaagattttgcagtgtattactgtcagcagtatggtaactcaccgtggacgttcggccaagggaccaaggtggaaatcaaa

SEQ ID NO: 26878 - protein, 108 aa, synthetic construct
  REGION 1..108: note = Description of Artificial Sequence: Synthetic polypeptide
EIVLTQSPGTLFLSPGERATLSCRASQSVRSNFLAWHQQKPGQAPRLLIYGAYRRATGIPDRFSGSGSGTDFTLTINRLEPEDFAVYYCQQYGNSPWTFGQGTKVEIK

SEQ ID NO: 26879 - DNA, 321 bp, synthetic construct
  misc_feature 1..321: note = Description of Artificial Sequence: Synthetic polynucleotide
  source 1..321: mol_type = other DNA
gacatccagatgatccagtctccttcctcactgtctgcatctgtaggagacagagtcaccatcacttgtcggacgagtcagggcattggcaattatttagcctggtttcagcagaaaccagggaaagcccctaagtccctgctctataaaacatccagtttgcaaagtggggtcccatcaaagttcagcggcagtggatctgggacagatttcactctcaccatcagcagcctgcagcctgaagattttgcaacttattacttccaacaatatatcacttacccgctcactttcggcggagggaccaaggtggagatcaaa

SEQ ID NO: 26880 - protein, 107 aa, synthetic construct
  REGION 1..107: note = Description of Artificial Sequence: Synthetic polypeptide
DIQMIQSPSSLSASVGDRVTITCRTSQGIGNYLAWFQQKPGKAPKSLLYKTSSLQSGVPSKFSGSGSGTDFTLTISSLQPEDFATYYFQQYITYPLTFGGGTKVEIK

SEQ ID NO: 26881 - DNA, 321 bp, synthetic construct
  misc_feature 1..321: note = Description of Artificial Sequence: Synthetic polynucleotide
  source 1..321: mol_type = other DNA
gacatccagatgacccagtctccgtcctcactgtctgcatctgtaggagacagagtcaccatcacttgtcgggcgagtcagggcattggcaatcatttagcctggtttcagcagaaaccagggaaagcccctaagtccctgatctatgctgcatccagtttgcaaagtggggtcccatcaaagttcagcggcagtagatctgggacagatttctctctcaccatcagcagcctgcagcctgaagattttgcaacttattactgccaacagtatagtaattacccggtcactttcggccctgggaccaaagtggatatcaag

SEQ ID NO: 26882 - protein, 107 aa, synthetic construct
  REGION 1..107: note = Description of Artificial Sequence: Synthetic polypeptide
DIQMTQSPSSLSASVGDRVTITCRASQGIGNHLAWFQQKPGKAPKSLIYAASSLQSGVPSKFSGSRSGTDFSLTISSLQPEDFATYYCQQYSNYPVTFGPGTKVDIK

SEQ ID NO: 26883 - DNA, 324 bp, synthetic construct
  misc_feature 1..324: note = Description of Artificial Sequence: Synthetic polynucleotide
  source 1..324: mol_type = other DNA
gaaattgtgttgacgcagtctccaggcaccctgtctttgtctccaggggaaggagccaccctctcctgcagggccagtcagagtattcgcagcagcttcttagcctggtacctgcagaagcctggccaggctcccaggctcctcatctatggtgcatccagcagggccactggcatcccagacaggttcagtggcagtgggtctgggacagacttcactctcaccatcagcagactggagcctgaagattttgcagtgtattactgtcagcagtatggaaactcaccgtgggcgttcggccaagggaccaaggtggaaatcaaa

SEQ ID NO: 26884 - protein, 108 aa, synthetic construct
  REGION 1..108: note = Description of Artificial Sequence: Synthetic polypeptide
EIVLTQSPGTLSLSPGEGATLSCRASQSIRSSFLAWYLQKPGQAPRLLIYGASSRATGIPDRFSGSGSGTDFTLTISRLEPEDFAVYYCQQYGNSPWAFGQGTKVEIK

SEQ ID NO: 26885 - DNA, 339 bp, synthetic construct
  misc_feature 1..339: note = Description of Artificial Sequence: Synthetic polynucleotide
  source 1..339: mol_type = other DNA
gacatcatgatgacccagtcttcagactccctgactgtgtctctgggcgagagggccatcatcagctgcaggtccagccagagtgttttacacagcttcaacaattacaactacttagcttggtaccagcagaaagcaggacatcctcctaacctgctcatttactgggcatctacccgggaatccggggtccctgaccgattcagtggcagcgggtctgggacagatttcactctccccatcagcagcctgcaggctgaagatgtggcagtttattactgtcaacaatattatagtactcctccgacgttcggcctagggaccaaggtggaaatcaaa

SEQ ID NO: 26886 - protein, 113 aa, synthetic construct
  REGION 1..113: note = Description of Artificial Sequence: Synthetic polypeptide
DIMMTQSSDSLTVSLGERAIISCRSSQSVLHSFNNYNYLAWYQQKAGHPPNLLIYWASTRESGVPDRFSGSGSGTDFTLPISSLQAEDVAVYYCQQYYSTPPTFGLGTKVEIK

SEQ ID NO: 26887 - DNA, 321 bp, synthetic construct
  misc_feature 1..321: note = Description of Artificial Sequence: Synthetic polynucleotide
  source 1..321: mol_type = other DNA
gacatccagatgacccagtctccatcctcactgtctgcatctgtaggagacagagtcaccatcacttgtcgggcgagtcagggcattggcaaatatttagcctggtttcagcagaaaccagggaaagcccctaagtccctgatctatggtgcatccagtttgcaaagtggggtcccatcaaagttcagcggcagtggatctgggacagatttcactctcaccatcagcagcctgcagcctgaaaattttgcaacttattactgccaacaatatagtacttacccgctcactttcggcggagggaccaaggtggagatcaaa

SEQ ID NO: 26888 - protein, 107 aa, synthetic construct
  REGION 1..107: note = Description of Artificial Sequence: Synthetic polypeptide
DIQMTQSPSSLSASVGDRVTITCRASQGIGKYLAWFQQKPGKAPKSLIYGASSLQSGVPSKFSGSGSGTDFTLTISSLQPENFATYYCQQYSTYPLTFGGGTKVEIK

SEQ ID NO: 26889 - DNA, 339 bp, synthetic construct
  misc_feature 1..339: note = Description of Artificial Sequence: Synthetic polynucleotide
  source 1..339: mol_type = other DNA
gacatcatgatgacccagtctccagactccctggctgtgtctctgggcgagagggccatcatcagctgcaggtccagccagagtgttttacacagctccaacaattacaactacttagcttggtaccagcagaaaccaggacatcctcctaacctgctcatttactgggcatctacccgggaatccggggtccctgaccgattcagtggcagcgggtctgggacagatttcactctcaccatcagcagcctgcaggctgaagatgtggcagtttattactgtcaacaatattatagtactcctccgacgttcggcctagggaccaaggtggaaatcaaa

SEQ ID NO: 26890 - protein, 113 aa, synthetic construct
  REGION 1..113: note = Description of Artificial Sequence: Synthetic polypeptide
DIMMTQSPDSLAVSLGERAIISCRSSQSVLHSSNNYNYLAWYQQKPGHPPNLLIYWASTRESGVPDRFSGSGSGTDFTLTISSLQAEDVAVYYCQQYYSTPPTFGLGTKVEIK

SEQ ID NO: 26891 - DNA, 339 bp, synthetic construct
  misc_feature 1..339: note = Description of Artificial Sequence: Synthetic polynucleotide
  source 1..339: mol_type = other DNA
gacatcgtgatgaccccgtctccagactccctggctgtgtctctgggcgagagggccaccatcaactgcaagtccagccagagtgttttacacagttccaacaataagaactacttagcttggtaccagcagaaaccaggacagcctcctaagctgctcatttactgggcatctacccgggaatccggggtccctgaccgattcagtggcagcgggtctgggacagatttcactctcagcatcagcagcctgcaggctgaagatgtggcagtttattactgtcagcagtcttatactattccattcactttcggccctgggaccaaagtggataacaaa

SEQ ID NO: 26892 - protein, 113 aa, synthetic construct
  REGION 1..113: note = Description of Artificial Sequence: Synthetic polypeptide
DIVMTPSPDSLAVSLGERATINCKSSQSVLHSSNNKNYLAWYQQKPGQPPKLLIYWASTRESGVPDRFSGSGSGTDFTLSISSLQAEDVAVYYCQQSYTIPFTFGPGTKVDNK

SEQ ID NO: 26893 - DNA, 336 bp, synthetic construct
  misc_feature 1..336: note = Description of Artificial Sequence: Synthetic polynucleotide
  source 1..336: mol_type = other DNA
gagattgtgatgacccagactccactttctctgtccgtcatccctggacagccggcctccatctcctgcaagtctagtcagaacctcctgcatagtgatggaaagacctatttgtattggtacctgcagaagccaggccagcctccacaggtcctgatctatgaagtttccaaccggttctctggggtgccagataggttcagtggcagcgggtcagggacagatttcacactgaaaattagccgggtggaggctgaggatgttggggtttattcctgcatgcaaagtatacagcttccctggacgttcgcccaagggtccaaggtggaaatcaaa

SEQ ID NO: 26894 - protein, 112 aa, synthetic construct
  REGION 1..112: note = Description of Artificial Sequence: Synthetic polypeptide
EIVMTQTPLSLSVIPGQPASISCKSSQNLLHSDGKTYLYWYLQKPGQPPQVLIYEVSNRFSGVPDRFSGSGSGTDFTLKISRVEAEDVGVYSCMQSIQLPWTFAQGSKVEIK

SEQ ID NO: 26895 - DNA, 321 bp, synthetic construct
  misc_feature 1..321: note = Description of Artificial Sequence: Synthetic polynucleotide
  source 1..321: mol_type = other DNA
gacatccagatgacccagtctccatcttccgtgtctgcatctgtaggagacagagtcaccatcacttgtcgggcgagtcagggtattagcaactggttagcctggtttcagcagaaaccagggaaagcccctcagctcctgatctatgctgcatccagtttgcaaagtggggtcccatcaaggttcagcggcagtggatctgggacagacttcagtctcaccatcagcagcctgcagcctgaagattttgcaacttactattgtcaacaggctaacagtttcccgtggacgttcgggcaagggaccaaggtggaaatcaaa

SEQ ID NO: 26896 - protein, 107 aa, synthetic construct
  REGION 1..107: note = Description of Artificial Sequence: Synthetic polypeptide
DIQMTQSPSSVSASVGDRVTITCRASQGISNWLAWFQQKPGKAPQLLIYAASSLQSGVPSRFSGSGSGTDFSLTISSLQPEDFATYYCQQANSFPWTFGQGTKVEIK

SEQ ID NO: 26897 - DNA, 321 bp, synthetic construct
  misc_feature 1..321: note = Description of Artificial Sequence: Synthetic polynucleotide
  source 1..321: mol_type = other DNA
gacatccagatgacccagtctccatcctccctgtctgcatctgtaggagacagagtcaccatcacttgccgggcaagtcagggcattagaaatgatttaggctggtatcagcagaaaccagggaaagcccctaagcgcctgatctatggtgcatccagtttacaaagtggggtcccatcgaggttcagcggcagtggatctgggacagaattcactctcacaatcagcagcctgcagcctgaagattttgcaacttattactgtctacagcattataggtacccattcactttcggccctggaaccaaagtggatatcaaa

SEQ ID NO: 26898 - protein, 107 aa, synthetic construct
  REGION 1..107: note = Description of Artificial Sequence: Synthetic polypeptide
DIQMTQSPSSLSASVGDRVTITCRASQGIRNDLGWYQQKPGKAPKRLIYGASSLQSGVPSRFSGSGSGTEFTLTISSLQPEDFATYYCLQHYRYPFTFGPGTKVDIK

SEQ ID NO: 26899 - DNA, 321 bp, synthetic construct
  misc_feature 1..321: note = Description of Artificial Sequence: Synthetic polynucleotide
  source 1..321: mol_type = other DNA
gacatccagatgacccagtctccatcctcgctgtctgcatctgtgggagacagagtcaccatcacttgtcgggcgagtcagggcattaacaagtatttatcctggtttcagcagaaaccagggaaagcccctaagtcattgatctatgctgcatccagtgtgcaaagtggggtcccatcaaaattcagcggcagtggatctgggacagatttcactctcaccatcagccgcctgcagcctgacgattttgcaacttattacggccaacgatatgacacttacccattcactttcggccctgggaccaaagtggatatcaaa

SEQ ID NO: 26900 - protein, 107 aa, synthetic construct
  REGION 1..107: note = Description of Artificial Sequence: Synthetic polypeptide
DIQMTQSPSSLSASVGDRVTITCRASQGINKYLSWFQQKPGKAPKSLIYAASSVQSGVPSKFSGSGSGTDFTLTISRLQPDDFATYYGQRYDTYPFTFGPGTKVDIK

SEQ ID NO: 26901 - DNA, 321 bp, synthetic construct
  misc_feature 1..321: note = Description of Artificial Sequence: Synthetic polynucleotide
  source 1..321: mol_type = other DNA
gacatccagatgatccagtctccttcctcactgtctgcatctgtaggagacagagtcaccatcacttgtcggacgagtcagggcattggcaattatttagcctggtttcagcagaaaccagggaaagcccctaagtccctgctctataaaacatccagtttgcaaagtgggttcccatcaaagttcagcggcagtggatctgggacagatttcactctcaccatcagcagcctgcagcctgaagattttgcaacttattacttccaacaatatatgacttacccgctcactttcggcggagggaccaaggtggagatcaaa

SEQ ID NO: 26902 - protein, 107 aa, synthetic construct
  REGION 1..107: note = Description of Artificial Sequence: Synthetic polypeptide
DIQMIQSPSSLSASVGDRVTITCRTSQGIGNYLAWFQQKPGKAPKSLLYKTSSLQSGFPSKFSGSGSGTDFTLTISSLQPEDFATYYFQQYMTYPLTFGGGTKVEIK

SEQ ID NO: 26903 - DNA, 324 bp, synthetic construct
  misc_feature 1..324: note = Description of Artificial Sequence: Synthetic polynucleotide
  source 1..324: mol_type = other DNA
gaaattgtgttgacgcagtctccaggcaccctgtctttgtctccaggggaaagcgccaccctctcctgcagggccggtcaaagtattagaaccaacttcttagcctggtaccagcagcaacctggccaggctcccaggctcctcatctatggtgcatccagcagggccactggcatcccagacaggttcagtggcagtgggtctgggacagacttcactctcaccatcaacagactggagcctgaagattttgcagtgtattactgtcagcagtatggtagctcaccgtggacgttcggccaagggaccaaggtggaaatcaaa

SEQ ID NO: 26904 - protein, 108 aa, synthetic construct; identical to SEQ ID NO: 26628
  REGION 1..108: note = Description of Artificial Sequence: Synthetic polypeptide

SEQ ID NO: 26905 - DNA, 324 bp, synthetic construct
  misc_feature 1..324: note = Description of Artificial Sequence: Synthetic polynucleotide
  source 1..324: mol_type = other DNA
gaaattgtgttgacgcagtctccaggcaccctgtctttgtctccaggggaaagagccaccctctcctgcagggccagtcagagtataaggagcaacttcttagcctggtaccagcagaaacctggccaggctcccaggctcctcatctatggtgcattcagtagggccactggcatcccagacaggttcagtggcagtgggtctgggacagacttcactctcaccatcaacagactggagcctgaagattttgcagtgtattactgtcagcagtatggtaattcaccgtggacgttcggccaagggaccaaggtggaaatcaaa

SEQ ID NO: 26906 - protein, 108 aa, synthetic construct
  REGION 1..108: note = Description of Artificial Sequence: Synthetic polypeptide
EIVLTQSPGTLSLSPGERATLSCRASQSIRSNFLAWYQQKPGQAPRLLIYGAFSRATGIPDRFSGSGSGTDFTLTINRLEPEDFAVYYCQQYGNSPWTFGQGTKVEIK

SEQ ID NO: 26907 - DNA, 324 bp, synthetic construct
  misc_feature 1..324: note = Description of Artificial Sequence: Synthetic polynucleotide
  source 1..324: mol_type = other DNA
gaaattgtggtgacgcagtctccaggcaccctgttattgtattccgaggagagatccaccctctcctgcagggccagtcagagtgttagaagcagctacttagcctggtaccagcagaaacctggccaggctcccaggctcctcatctgtggtgcattcagcagggccagtggcatcccagacaggttcagtggcagtgggtctgggacagacttcactctcaccatcagcagactggagcctgaagatttcgcagtgtactactgtcagcagtatggtaactcaccgtggacgttgggccacgcgaccaaggtggaaatcaaa

SEQ ID NO: 26908 - protein, 108 aa, synthetic construct
  REGION 1..108: note = Description of Artificial Sequence: Synthetic polypeptide
EIVVTQSPGTLLLYSEERSTLSCRASQSVRSSYLAWYQQKPGQAPRLLICGAFSRASGIPDRFSGSGSGTDFTLTISRLEPEDFAVYYCQQYGNSPWTLGHATKVEIK

SEQ ID NO: 26909 - DNA, 321 bp, synthetic construct
  misc_feature 1..321: note = Description of Artificial Sequence: Synthetic polynucleotide
  source 1..321: mol_type = other DNA
gacatccagatgacccagtctccatcctcactgtctgcatctgtaggagacagagtcaccatcacttgtcgggcgagtcagggcattggcaattatttagcctggtttcagcagaaaccagggaaagcccctaagtccctgatctatgctgcatccagtttgcaaagtggggtcccatcaaagttcagcggcaatagatctgggacagatttcactctcaccatcagcagcctgcagcctgaagattttgcaacttattactgccaacaatatagtacttacccgctcactttcggcggagggaccaaggtggagatcaaa

SEQ ID NO: 26910 - protein, 107 aa, synthetic construct
  REGION 1..107: note = Description of Artificial Sequence: Synthetic polypeptide
DIQMTQSPSSLSASVGDRVTITCRASQGIGNYLAWFQQKPGKAPKSLIYAASSLQSGVPSKFSGNRSGTDFTLTISSLQPEDFATYYCQQYSTYPLTFGGGTKVEIK

SEQ ID NO: 26911 - DNA, 321 bp, synthetic construct; identical to SEQ ID NO: 24159
  misc_feature 1..321: note = Description of Artificial Sequence: Synthetic polynucleotide
  source 1..321: mol_type = other DNA

SEQ ID NO: 26912 - protein, 107 aa, synthetic construct; identical to SEQ ID NO: 24160
  REGION 1..107: note = Description of Artificial Sequence: Synthetic polypeptide

SEQ ID NO: 26913 - DNA, 336 bp, synthetic construct
  misc_feature 1..336: note = Description of Artificial Sequence: Synthetic polynucleotide
  source 1..336: mol_type = other DNA
gatattgtgttgacccagactccactctctctgtccgtcacccctggacagccggcctccatatcgtgcaagtctagtcagagcctcctctatagtgatggaaggacctatttgtattggtacctgcagaaaccaggccagcctccacaggtcctgatctgtgaggtttccaaccggttctctggagtgccagataggttcagtggcagcgggtcagggacagatttcacactgaaaatcagccgggtggaggcaggagatgttggggtttattactgcatgcaaagtatacagcttccctggacgttcggccaagggaccaaggtggaaatcaaa

SEQ ID NO: 26914 - protein, 112 aa, synthetic construct
  REGION 1..112: note = Description of Artificial Sequence: Synthetic polypeptide
DIVLTQTPLSLSVTPGQPASISCKSSQSLLYSDGRTYLYWYLQKPGQPPQVLICEVSNRFSGVPDRFSGSGSGTDFTLKISRVEAGDVGVYYCMQSIQLPWTFGQGTKVEIK

SEQ ID NO: 26915 - DNA, 324 bp, synthetic construct; identical to SEQ ID NO: 26625
  misc_feature 1..324: note = Description of Artificial Sequence: Synthetic polynucleotide
  source 1..324: mol_type = other DNA

SEQ ID NO: 26916 - protein, 108 aa, synthetic construct; identical to SEQ ID NO: 26626
  REGION 1..108: note = Description of Artificial Sequence: Synthetic polypeptide

SEQ ID NO: 26917 - DNA, 324 bp, synthetic construct
  misc_feature 1..324: note = Description of Artificial Sequence: Synthetic polynucleotide
  source 1..324: mol_type = other DNA
gaaattgtgttgacgcagtctccaggcaccctgtctttgtctccaggggaaagagccaccctctcctgcagggccagtcagagtattcgcagcagcttcttagcctggtaccagcagaaacctggccaggctcccaggctcctcatctatggtgcatccagcagggccactggcatcccagacaggttcagtggcagtgggtctgggacagacttcactctcaccatcaacagactggagcctgaagattttgcagtgtattactgtcagcagtatggtaactcaccgtgggcgttcggccaagggaccaaggtggaaatcaaa

SEQ ID NO: 26918 - protein, 108 aa, synthetic construct
  REGION 1..108: note = Description of Artificial Sequence: Synthetic polypeptide
EIVLTQSPGTLSLSPGERATLSCRASQSIRSSFLAWYQQKPGQAPRLLIYGASSRATGIPDRFSGSGSGTDFTLTINRLEPEDFAVYYCQQYGNSPWAFGQGTKVEIK

SEQ ID NO: 26919 - DNA, 321 bp, synthetic construct
  misc_feature 1..321: note = Description of Artificial Sequence: Synthetic polynucleotide
  source 1..321: mol_type = other DNA
gacatccagatgacccagtctccatcctccctgtctgcatctgtaggagacagagtcaccatcacttgccgggcaagtcagggcattagaaatgatttaggctggtatcagcagaaaccagggaaagcccctaagcgcctgatttcttctgcatccagtttgcaaaggggggtcccatcaagattcagcggcagtggatctgggacagaattcactctcacaatcagcagcctgcagcctgaagattttgcaacttattactgtctacagcataaaaggtacccgctcactttcggcggagggaccaaggtggagatcaaa

SEQ ID NO: 26920 - protein, 107 aa, synthetic construct
  REGION 1..107: note = Description of Artificial Sequence: Synthetic polypeptide
DIQMTQSPSSLSASVGDRVTITCRASQGIRNDLGWYQQKPGKAPKRLISSASSLQRGVPSRFSGSGSGTEFTLTISSLQPEDFATYYCLQHKRYPLTFGGGTKVEIK

SEQ ID NO: 26921 - DNA, 321 bp, synthetic construct
  misc_feature 1..321: note = Description of Artificial Sequence: Synthetic polynucleotide
  source 1..321: mol_type = other DNA
gacatccagatgacacagtctccatcctcactgtctgcatctgtaggagacagagtcaccatcacttgtcgggcgagtcagggcattagcaagtatttagcctggtttcagcagaaaccagggaaagcccctaagtccctgatctatgctgcatccagtttgcaaagtggggtcccatcaaagttcagcggcagtggatctgggacagatttcactctcaccatcagcagcctgcagcctgaagattttgcagcttattactgccaacagtatcttacttacccgctcactttcggcggagggaccaaggtggagatcaaa

SEQ ID NO: 26922 - protein, 107 aa, synthetic construct
  REGION 1..107: note = Description of Artificial Sequence: Synthetic polypeptide
DIQMTQSPSSLSASVGDRVTITCRASQGISKYLAWFQQKPGKAPKSLIYAASSLQSGVPSKFSGSGSGTDFTLTISSLQPEDFAAYYCQQYLTYPLTFGGGTKVEIK

SEQ ID NO: 26923 - DNA, 321 bp, synthetic construct
  misc_feature 1..321: note = Description of Artificial Sequence: Synthetic polynucleotide
  source 1..321: mol_type = other DNA
gacatagtgatgacgcagtctccagccaccctgtctgtgtctccaggggatagagccaccctctcctgcaggcccagtcagagttttagcagaaacttagcctggtaccagcagaaacctggccaggctcccaggctcctcatctatggtgcatccactagggccactggtatcccagccaggttcagtggcagtgggtctgggacagagttcactctcaccatcagcagcctggagtgtgaagattttgcagtttactactgtcagcagtataataactggccgctcactttcggcggagggaccaaggtggagatcaaa

SEQ ID NO: 26924 - protein, 107 aa, synthetic construct
  REGION 1..107: note = Description of Artificial Sequence: Synthetic polypeptide
DIVMTQSPATLSVSPGDRATLSCRPSQSFSRNLAWYQQKPGQAPRLLIYGASTRATGIPARFSGSGSGTEFTLTISSLECEDFAVYYCQQYNNWPLTFGGGTKVEIK

SEQ ID NO: 26925 - DNA, 321 bp, synthetic construct; identical to SEQ ID NO: 24159
  misc_feature 1..321: note = Description of Artificial Sequence: Synthetic polynucleotide
  source 1..321: mol_type = other DNA

SEQ ID NO: 26926 - protein, 107 aa, synthetic construct; identical to SEQ ID NO: 24160
  REGION 1..107: note = Description of Artificial Sequence: Synthetic polypeptide

SEQ ID NO: 26927 - DNA, 324 bp, synthetic construct
  misc_feature 1..324: note = Description of Artificial Sequence: Synthetic polynucleotide
  source 1..324: mol_type = other DNA
gaaattgtgttgacgcagtctccaggcaccctgtctttgtctccaggggaaagagccaccctctcctgcagggccagtcagagtataaggaccaacttcttagcctggtaccagcagaaacctggccaggctcccaggctcctcatctatggtgcatccagcagggccactggcatcccagacaggttcagtggcagtgggtctgggacagacttcactctcaccatcaacagactggagcctgaagattttgcagtgtattactgtcagcagtatggtaactcaccgtggacgttcggccaagggaccaaggtggaaatcaaa

SEQ ID NO: 26928 - protein, 108 aa, synthetic construct
  REGION 1..108: note = Description of Artificial Sequence: Synthetic polypeptide
EIVLTQSPGTLSLSPGERATLSCRASQSIRTNFLAWYQQKPGQAPRLLIYGASSRATGIPDRFSGSGSGTDFTLTINRLEPEDFAVYYCQQYGNSPWTFGQGTKVEIK

SEQ ID NO: 26929 - DNA, 324 bp, synthetic construct
  misc_feature 1..324: note = Description of Artificial Sequence: Synthetic polynucleotide
  source 1..324: mol_type = other DNA
gaaattgtggtgacgcagtctccaggcaccctgtctttgtctccaggggaaagagccaccctctcctgcagggccagtcagagtgttagaagcagctacttagcctggtaccagcagaaacctggccaggctcccaggctcctcatctatggtgcattcagcagggccactggcatcccagacaggttcagtggcagtgggtctgggacagacttcactctcaccatcagcagactggagcctgaagattttgcagtgtactactgtcagcagtatggtaactcaccgtggacgttcggccacgggaccaaggtggaaatcaaa

SEQ ID NO: 26930 - protein, 108 aa, synthetic construct
  REGION 1..108: note = Description of Artificial Sequence: Synthetic polypeptide
EIVVTQSPGTLSLSPGERATLSCRASQSVRSSYLAWYQQKPGQAPRLLIYGAFSRATGIPDRFSGSGSGTDFTLTISRLEPEDFAVYYCQQYGNSPWTFGHGTKVEIK

SEQ ID NO: 26931 - DNA, 324 bp, synthetic construct
  misc_feature 1..324: note = Description of Artificial Sequence: Synthetic polynucleotide
  source 1..324: mol_type = other DNA
gacatccagatgacccagtctccatcctccctgtctgcatctgtaggagacagagtcaccatcacttgccgggcaagtcagagcattagcagctatttaaattggtttcagcagaaaccagggaaagcccctaagctcctgatctatgctgagtccagtttacaaagtggggtcccatcaaggttcagtggcagtggatctgggacagatttcactctcaccatcagcagtctgcaacctgaagattttgcaacttattcctgtcaacagagttacagttcccctccgtggacgttcggccaagggaccaaggtggagttcaaa

SEQ ID NO: 26932 - protein, 108 aa, synthetic construct
  REGION 1..108: note = Description of Artificial Sequence: Synthetic polypeptide
DIQMTQSPSSLSASVGDRVTITCRASQSISSYLNWFQQKPGKAPKLLIYAESSLQSGVPSRFSGSGSGTDFTLTISSLQPEDFATYSCQQSYSSPPWTFGQGTKVEFK

SEQ ID NO: 26933 - DNA, 321 bp, synthetic construct
  misc_feature 1..321: note = Description of Artificial Sequence: Synthetic polynucleotide
  source 1..321: mol_type = other DNA
gacatccagatgacccagtctccatcctccctgtctgcatctgtaggagacagagtcaccatcacttgccgggcaagtcaggacattagaaatgatttaggctggtatcagcagaaaccagggaaagcccctaagcgcctgatctatgctgcatccagtttgcaaagtggggtcccatcaaggttcagcggcagtggatctgggacagaattcactctcacaatcagcagcctgcagcctgaagattttgcaacttatcactgtctacagcattatcgttacccattcactttcggccctgggaccaaagtggatatcaaa

SEQ ID NO: 26934 - protein, 107 aa, synthetic construct
  REGION 1..107: note = Description of Artificial Sequence: Synthetic polypeptide
DIQMTQSPSSLSASVGDRVTITCRASQDIRNDLGWYQQKPGKAPKRLIYAASSLQSGVPSRFSGSGSGTEFTLTISSLQPEDFATYHCLQHYRYPFTFGPGTKVDIK

SEQ ID NO: 26935 - DNA, 321 bp, synthetic construct
  misc_feature 1..321: note = Description of Artificial Sequence: Synthetic polynucleotide
  source 1..321: mol_type = other DNA
gaaattgtgctgactcagtctccagactttcagtctgtgactccaaaggagaaagtcaccatcacctgccgggccagtcagaacattggtaataccttgcactggtaccagcagaaaccagatcagtctcctaagctcctcatcaagtatgcttcccagtccttctcaggggtcccctcgaggttcagtggcagtgggtctgggacagatttcatcctcaccatcaatagcctggaagctgaagatgctgcaacgtattactgtcatcagagtggtagtttacctcagacgttcggccaagggaccaaggtggaaatcaaa

SEQ ID NO: 26936 - protein, 107 aa, synthetic construct
  REGION 1..107: note = Description of Artificial Sequence: Synthetic polypeptide
EIVLTQSPDFQSVTPKEKVTITCRASQNIGNTLHWYQQKPDQSPKLLIKYASQSFSGVPSRFSGSGSGTDFILTINSLEAEDAATYYCHQSGSLPQTFGQGTKVEIK

SEQ ID NO: 26937 - DNA, 339 bp, synthetic construct
  misc_feature 1..339: note = Description of Artificial Sequence: Synthetic polynucleotide
  source 1..339: mol_type = other DNA
gacatcgtgatgacccagtctccagactccccgactgcgtctctgggcgagagggccaccgtcaaatgcaagtccagccagagtgttttacacagctccaacaataacaactacttagcttggtaccagcagaaaccaggacagcctcctaagctgctcatttactgggcatctacccgggaatccggagtccctgaccgattcagtggcagcgggtctgggacagatttcactctcgccatcagcagcctgcaggctgaagatgtggcggtttattactgtcagcaatattataatactcctccgacattcggccaagggaccaaggtggaaatcaaa

SEQ ID NO: 26938 - protein, 113 aa, synthetic construct
  REGION 1..113: note = Description of Artificial Sequence: Synthetic polypeptide
DIVMTQSPDSPTASLGERATVKCKSSQSVLHSSNNNNYLAWYQQKPGQPPKLLIYWASTRESGVPDRFSGSGSGTDFTLAISSLQAEDVAVYYCQQYYNTPPTFGQGTKVEIK

SEQ ID NO: 26939 - DNA, 321 bp, synthetic construct; identical to SEQ ID NO: 26593
  misc_feature 1..321: note = Description of Artificial Sequence: Synthetic polynucleotide
  source 1..321: mol_type = other DNA

SEQ ID NO: 26940 - protein, 107 aa, synthetic construct; identical to SEQ ID NO: 26594
  REGION 1..107: note = Description of Artificial Sequence: Synthetic polypeptide

SEQ ID NO: 26941 - DNA, 321 bp, synthetic construct
  misc_feature 1..321: note = Description of Artificial Sequence: Synthetic polynucleotide
  source 1..321: mol_type = other DNA
gacatccagatgacccagtctccatcctccctgtctgcatctgttggagacagagtcaccatcacttgccgggcaactcagggcattagaaaagatttaggctggtatcagcagaaaccagggaaagcccctaagcgcctgatccatactgcatccagtttgcaaagtggggtcccattaaggttcagcggcagtggatctgggacagaattcactctcacaatcagcagcctgcagcctgaagattttgcaacttattactgtctacagcataatagttacccgtggacgttcggccaagggaccaaggtggaaatcaaa

SEQ ID NO: 26942 - protein, 107 aa, synthetic construct
  REGION 1..107: note = Description of Artificial Sequence: Synthetic polypeptide
DIQMTQSPSSLSASVGDRVTITCRATQGIRKDLGWYQQKPGKAPKRLIHTASSLQSGVPLRFSGSGSGTEFTLTISSLQPEDFATYYCLQHNSYPWTFGQGTKVEIK

SEQ ID NO: 26943 - DNA, 324 bp, synthetic construct
  misc_feature 1..324: note = Description of Artificial Sequence: Synthetic polynucleotide
  source 1..324: mol_type = other DNA
gaaattgtgttgacgcagtctccaggcaccctgtctttgtctccaggggaaagagccaccctctcctgcagggccagtcagaatattcgcagcagcttcttagcctggtaccaacagaaacctggccaggctcccaggctcctcatctatggtgcatccagcagggccactggcatcccagacaggttcagtggcagtgggtctgggacagacttcactctcaccatcaacagactggagcctgaagattttgcagtgtattactgtcagcagtatggtaactcaccgtgggcgttcggccaagggaccaaggtggaaatcaaa

SEQ ID NO: 26944 - protein, 108 aa, synthetic construct
  REGION 1..108: note = Description of Artificial Sequence: Synthetic polypeptide
EIVLTQSPGTLSLSPGERATLSCRASQNIRSSFLAWYQQKPGQAPRLLIYGASSRATGIPDRFSGSGSGTDFTLTINRLEPEDFAVYYCQQYGNSPWAFGQGTKVEIK

SEQ ID NO: 26945 - DNA, 321 bp, synthetic construct
  misc_feature 1..321: note = Description of Artificial Sequence: Synthetic polynucleotide
  source 1..321: mol_type = other DNA
gacatccagatgacccagtctccatcctccctgtctgcatctgtaggagacagagtcaccatcacttgccgggcaagtcagggcattagaaatgatttaggctggtatcagcagaaaccagggagagcccctaagcgcctgatctattctgcatccagtttgcatactggggtcccatcaaggttcagcggcagtggatctgggacagaattcactctcacaatcagcagcctgcagcctgaagattttgcaacttattactgtctacagcataagagttacccgctcactttcggcggagggaccaaggtggagatcaaa

SEQ ID NO: 26946 - protein, 107 aa, synthetic construct
  REGION 1..107: note = Description of Artificial Sequence: Synthetic polypeptide
DIQMTQSPSSLSASVGDRVTITCRASQGIRNDLGWYQQKPGRAPKRLIYSASSLHTGVPSRFSGSGSGTEFTLTISSLQPEDFATYYCLQHKSYPLTFGGGTKVEIK

SEQ ID NO: 26947 - DNA, 321 bp, synthetic construct
  misc_feature 1..321: note = Description of Artificial Sequence: Synthetic polynucleotide
  source 1..321: mol_type = other DNA
gacatccagatgacccagtctccatcctccctgtctgcatctgtaggagacagagtcaccatcacttgccgggcaagtcagggcattaggaatgatttaggctggtatcagcagaaaccagggaaagcccctaagcgcctgatctattctgcatccattttacaaaggggggtcccatcaaggttcagcggcagtggatctgggacagaattcactctcacaatcagcagcctgcagcctgaagattttgcaacttattactgtctacagcataaaagttaccctctcactttcggcggagggaccaaggtggaggtcaaa

SEQ ID NO: 26948 - protein, 107 aa, synthetic construct
  REGION 1..107: note = Description of Artificial Sequence: Synthetic polypeptide
DIQMTQSPSSLSASVGDRVTITCRASQGIRNDLGWYQQKPGKAPKRLIYSASILQRGVPSRFSGSGSGTEFTLTISSLQPEDFATYYCLQHKSYPLTFGGGTKVEVK

SEQ ID NO: 26949 - DNA, 324 bp, synthetic construct
  misc_feature 1..324: note = Description of Artificial Sequence: Synthetic polynucleotide
  source 1..324: mol_type = other DNA
gaaattgtgttgacgcagtctccagacaccctgtctttgtctccaggggaaagagccaccctctcctgcagggccagtccgagtattaacagcggcttcttagcctggtaccagcagaaacctggccaagctcccaggctcctcatctatggtgcatccagcagggccactggcatcccagacaggttcagtggcagtgggtctgggacagacttcactctcaccatcagcagactggagcctgaagattttgcaatgtttcactgtcaccagtatgagacctcaccgtggacgttcggccaagggaccaaggtggagatcaaa

SEQ ID NO: 26950 - protein, 108 aa, synthetic construct
  REGION 1..108: note = Description of Artificial Sequence: Synthetic polypeptide
EIVLTQSPDTLSLSPGERATLSCRASPSINSGFLAWYQQKPGQAPRLLIYGASSRATGIPDRFSGSGSGTDFTLTISRLEPEDFAMFHCHQYETSPWTFGQGTKVEIK

SEQ ID NO: 26951 - DNA, 330 bp, synthetic construct
  misc_feature 1..330: note = Description of Artificial Sequence: Synthetic polynucleotide
  source 1..330: mol_type = other DNA
cagtctgtgctgactcagccaccctcagcgtctgggacccccgggcagagggtcaccatctcttgttctggaagcaactccaacatcggaagtaatattgtaacctggtaccagcagctcccaggaacggcccccaaactcctcatctatagtaatgatcagcggccctcaggggtccctgaccgattctctggctccaagtctggcacctcagcctccctggccatcagtgggctccagtctgaggatgaggctgattattactgtacagcatgggatgacagcctgaatggttgggtgttcggcggaggtaccacgctgaccgtccta

SEQ ID NO: 26952 - protein, 110 aa, synthetic construct
  REGION 1..110: note = Description of Artificial Sequence: Synthetic polypeptide
QSVLTQPPSASGTPGQRVTISCSGSNSNIGSNIVTWYQQLPGTAPKLLIYSNDQRPSGVPDRFSGSKSGTSASLAISGLQSEDEADYYCTAWDDSLNGWVFGGGTTLTVL

SEQ ID NO: 26953 - DNA, 321 bp, synthetic construct
  misc_feature 1..321: note = Description of Artificial Sequence: Synthetic polynucleotide
  source 1..321: mol_type = other DNA
gaaatagtgatgacgcagtctccagccaccctgtctgtgtctccaggggaaagagccaccctctcctgcagggccagtcagaatattaaaaacaacttagcctggtaccagcagaaacctggccaggctcccaggctcctcatctttggtgcatccaccagggccactggtatcccagccaggttcagtggcagtgggtctgggacagagttcactctcaccatcagcagcctgcagtctgaagattttgcagtttattactgtcagcagttttataactggctgtgcagttttggccaggggaccaagctggagctcaaa

SEQ ID NO: 26954 - protein, 107 aa, synthetic construct
  REGION 1..107: note = Description of Artificial Sequence: Synthetic polypeptide
EIVMTQSPATLSVSPGERATLSCRASQNIKNNLAWYQQKPGQAPRLLIFGASTRATGIPARFSGSGSGTEFTLTISSLQSEDFAVYYCQQFYNWLCSFGQGTKLELK

SEQ ID NO: 26955 - DNA, 324 bp, synthetic construct
  misc_feature 1..324: note = Description of Artificial Sequence: Synthetic polynucleotide
  source 1..324: mol_type = other DNA
gaaattgttttgacgcagtctccaggcaccctgtctttgtctccaggggaaagagccaccctctcctgcagggccagtcagagtgttagcagcaactacttagcctggtatcagcagagacctggccaggctcccagactcctcatctatggtgcatccagcagggccactggcatcccagacagattcagtggcagtgggtctgggacagacttcactctcaccatcagcagactggagcctgaagattttgcagtgtatttctgtcagcagtatgaaaactcaccgtggacgttcggccaagggaccaaggtggaaatcaaa

SEQ ID NO: 26956 - protein, 108 aa, synthetic construct
  REGION 1..108: note = Description of Artificial Sequence: Synthetic polypeptide
EIVLTQSPGTLSLSPGERATLSCRASQSVSSNYLAWYQQRPGQAPRLLIYGASSRATGIPDRFSGSGSGTDFTLTISRLEPEDFAVYFCQQYENSPWTFGQGTKVEIK

SEQ ID NO: 26957 - DNA, 321 bp, synthetic construct
  misc_feature 1..321: note = Description of Artificial Sequence: Synthetic polynucleotide
  source 1..321: mol_type = other DNA
gaaattgtgctgactcagtctccagcctttcagtctgtgactccaaaggagaaagtcaccatcacctgccgggccagtcagaacattggtcgtagtttacactggtaccagcagaaaccagatcagtctccaaaactcctcatcaagtatgcttcccagtccttctcaggggtcccctcgaggttcagtggcagtggatctgggacaaatttcaccctcaccatcaatagcctggaagctgaagatgctgtaacgtattactgtcatcagagtcgaagtttaccgctcactttcggcggagggaccaaggtagagatcaga

SEQ ID NO: 26958 - protein, 107 aa, synthetic construct
  REGION 1..107: note = Description of Artificial Sequence: Synthetic polypeptide
EIVLTQSPAFQSVTPKEKVTITCRASQNIGRSLHWYQQKPDQSPKLLIKYASQSFSGVPSRFSGSGSGTNFTLTINSLEAEDAVTYYCHQSRSLPLTFGGGTKVEIR

SEQ ID NO: 26959 - DNA, 321 bp, synthetic construct
  misc_feature 1..321: note = Description of Artificial Sequence: Synthetic polynucleotide
  source 1..321: mol_type = other DNA
gacatccagatgacccagtctccatcctccctgtctgcatctgtaggagacagagtcaccatcacttgccgggcaagtcagggcattagaaatgatttaggctggtatcagcagaaaccagggagagcccctaagcgcctgatctattctacatccagtttgcattctggggtcccatcaaggttcagcggcagtggatctgggacagaattcactctcacaatcagcagcctgcagcctgaagattttgcaacttattactgtctacagcataatagttacccgctcactttcggcggagggaccaaggtggagatcaaa

SEQ ID NO: 26960 - protein, 107 aa, synthetic construct
  REGION 1..107: note = Description of Artificial Sequence: Synthetic polypeptide
DIQMTQSPSSLSASVGDRVTITCRASQGIRNDLGWYQQKPGRAPKRLIYSTSSLHSGVPSRFSGSGSGTEFTLTISSLQPEDFATYYCLQHNSYPLTFGGGTKVEIK

SEQ ID NO: 26961 - DNA, 321 bp, synthetic construct
  misc_feature 1..321: note = Description of Artificial Sequence: Synthetic polynucleotide
  source 1..321: mol_type = other DNA
gacatccagatgacccagtctccatcctccctgtctgcatctgttggagacagagtcaccatcacttgccgggcaagtcacaacattaacagctatttaaattggtatcagcagaaatcagggaaagcccctaaactcctaatctatgctgcatccagtttgcaaagtggggtcccgtcaaggttcagtggcagtggatctgggacagatttcactctcaccttcagtagtctacaacctgaagattttgcaacttactactgtcaacagagttacagtttcccgctcactttcggcggagggaccaaggtggagatgagg

SEQ ID NO: 26962 - protein, 107 aa, synthetic construct
  REGION 1..107: note = Description of Artificial Sequence: Synthetic polypeptide
DIQMTQSPSSLSASVGDRVTITCRASHNINSYLNWYQQKSGKAPKLLIYAASSLQSGVPSRFSGSGSGTDFTLTFSSLQPEDFATYYCQQSYSFPLTFGGGTKVEMR

SEQ ID NO: 26963 - DNA, 333 bp, synthetic construct
  misc_feature 1..333: note = Description of Artificial Sequence: Synthetic polynucleotide
  source 1..333: mol_type = other DNA
gatattgtgatgactcagtctccactctccctgcccgtcacccctggagagccggcctccatctcctgcaggtctagtcagagcctcctccataataatagatacaaccatttggattggtacctgcagaagccaggacagtctccacagctcctgatctatttgggttctaatcgggcctccggggtccctgacaggttcagtggcagtggatcaggcacagattttacactgaaaatcagcagagtggaggctgaggatgttggggtttattactgcatgcaagctctacaaactcccactttcggcggagggaccaaggtggagatcaaa

SEQ ID NO: 26964 - protein, 111 aa, synthetic construct
  REGION 1..111: note = Description of Artificial Sequence: Synthetic polypeptide
DIVMTQSPLSLPVTPGEPASISCRSSQSLLHNNRYNHLDWYLQKPGQSPQLLIYLGSNRASGVPDRFSGSGSGTDFTLKISRVEAEDVGVYYCMQALQTPTFGGGTKVEIK

SEQ ID NO: 26965 - DNA, 321 bp, synthetic construct
  misc_feature 1..321: note = Description of Artificial Sequence: Synthetic polynucleotide
  source 1..321: mol_type = other DNA
gacatccagatgtcccaatctccatcctccctgtctgcatctgttggagacagagtcaccatcacttgccgggcaagtcagggcattagaaatgatttaggctggtatcagcagaaaccagggaaagcccctaagcgcctgatctgtgctgcatccaggttgcaaagtggggtcccatcaaggttcagcggcagtggatctgggacagaattcactctcacaatcagcagcctgcagcctgaagattttgcaatttattactgtctacagcatcatgactacccattcactttcggccctgggaccaaagtggatatcaaa

SEQ ID NO: 26966 - protein, 107 aa, synthetic construct
  REGION 1..107: note = Description of Artificial Sequence: Synthetic polypeptide
DIQMSQSPSSLSASVGDRVTITCRASQGIRNDLGWYQQKPGKAPKRLICAASRLQSGVPSRFSGSGSGTEFTLTISSLQPEDFAIYYCLQHHDYPFTFGPGTKVDIK

SEQ ID NO: 26967 - DNA, 321 bp, synthetic construct
  misc_feature 1..321: note = Description of Artificial Sequence: Synthetic polynucleotide
  source 1..321: mol_type = other DNA
gaaatagtgatgacgcagtctccagccaccctgtctgtgtctccaggggaaagtgccaccctctcctgcaggtccagtcagaatattaaaagcaacttagcctggtaccagcagaaacctggccaggctcccaggctcctcatctttggtgcatccaccagggccactggtatcccagccaggttcagtggcagtgggtctgggacagagttcactctcaccatcagcagcctgcagtctgaagattttgcagtttattactgtcagcagttttataactggctgtgcagttttggccaggggaccaagctggagctcaaa

SEQ ID NO: 26968 - protein, 107 aa, synthetic construct
  REGION 1..107: note = Description of Artificial Sequence: Synthetic polypeptide
EIVMTQSPATLSVSPGESATLSCRSSQNIKSNLAWYQQKPGQAPRLLIFGASTRATGIPARFSGSGSGTEFTLTISSLQSEDFAVYYCQQFYNWLCSFGQGTKLELK

SEQ ID NO: 26969 - DNA, 321 bp, synthetic construct
  misc_feature 1..321: note = Description of Artificial Sequence: Synthetic polynucleotide
  source 1..321: mol_type = other DNA
gaaatagtgatgacgcagtcaccagccaccctgtctgtgtctccaggggaaagagccaccctctcctgcagggccagtcagagaattaacaacaacttagcctggtaccagcagaaccctggccaggctcccaggctcctcatttatggtgcatccaccagggccactggtgtcccggccaggttcagtggcagtgggtctgggacagagttcactctcaccatcagcagcctgcagtctgaagactttacagtttattactgtcagcagtattataactggctgtgcagttttggccaggggaccaagctggagatcaga

SEQ ID NO: 26970 - protein, 107 aa, synthetic construct
  REGION 1..107: note = Description of Artificial Sequence: Synthetic polypeptide
EIVMTQSPATLSVSPGERATLSCRASQRINNNLAWYQQNPGQAPRLLIYGASTRATGVPARFSGSGSGTEFTLTISSLQSEDFTVYYCQQYYNWLCSFGQGTKLEIR

SEQ ID NO: 26971 - DNA, 333 bp, synthetic construct
  misc_feature 1..333: note = Description of Artificial Sequence: Synthetic polynucleotide
  source 1..333: mol_type = other DNA
gatattgtgctgactcagtctccactctccctgcccgtcacccctggagagccggcctccatctcctgcaggtctagtcagagcctcctgcataataataaatacaaccatttggattggtacctgcagaagccagggcagtctccacagctcctgatctatttgggttctaatcgggcctccggggtccctgacaggttcagtggcagtggatcaggcacagattttacactgaaaatcagcagagtggaggctgaggatgttggggtttattactgcatgcaagctctacaaactcccactttcggcggagggaccaaggtggagatcaaa

SEQ ID NO: 26972 - protein, 111 aa, synthetic construct
  REGION 1..111: note = Description of Artificial Sequence: Synthetic polypeptide
DIVLTQSPLSLPVTPGEPASISCRSSQSLLHNNKYNHLDWYLQKPGQSPQLLIYLGSNRASGVPDRFSGSGSGTDFTLKISRVEAEDVGVYYCMQALQTPTFGGGTKVEIK

SEQ ID NO: 26973 - DNA, 324 bp, synthetic construct
  misc_feature 1..324: note = Description of Artificial Sequence: Synthetic polynucleotide
  source 1..324: mol_type = other DNA
gaaattgtgttgacgcagtctccagacaccctgtctttgtctccaggggaaagagccaccctctcctgcagggccagtcagagtgttaacagcggctacttagcctggtaccagcagaaacctggccagtctcccaggctcctcatctatggtgcatccagcagggccactggcatcccagacaggttcagtggcagtgggtctgggacagacttcactctcaccatcagcagactggagcctgaagattttgcagtgcattactgtcaacaatatgagacctcaccgtggacgttcggccaagggaccaaggtggaaatcaaa

SEQ ID NO: 26974 - protein, 108 aa, synthetic construct
  REGION 1..108: note = Description of Artificial Sequence: Synthetic polypeptide
EIVLTQSPDTLSLSPGERATLSCRASQSVNSGYLAWYQQKPGQSPRLLIYGASSRATGIPDRFSGSGSGTDFTLTISRLEPEDFAVHYCQQYETSPWTFGQGTKVEIK

SEQ ID NO: 26975 - DNA, 324 bp, synthetic construct
  misc_feature 1..324: note = Description of Artificial Sequence: Synthetic polynucleotide
  source 1..324: mol_type = other DNA
gaaatagtgatgacgcagtctccagccaccctgtctgtgtctccaggggaaagagccaccctctcctgcagggccagtcagagtgttctgaacaacttagcctggtaccagcagagacctggccaggctcccaggctcctcatctatggtgcatccactagggccactggtatcccagccaggttcagtggcagtgggtctgggacagagttcactctcaccatcagcagcctgcagtctgaagattttgcagtttattactgtcagcagtatgataactggcctccgtgcagttttggccaggggaccaagctggagatcaaa

SEQ ID NO: 26976 - protein, 108 aa, synthetic construct
  REGION 1..108: note = Description of Artificial Sequence: Synthetic polypeptide
EIVMTQSPATLSVSPGERATLSCRASQSVLNNLAWYQQRPGQAPRLLIYGASTRATGIPARFSGSGSGTEFTLTISSLQSEDFAVYYCQQYDNWPPCSFGQGTKLEIK

SEQ ID NO: 26977 - DNA, 321 bp, synthetic construct
  misc_feature 1..321: note = Description of Artificial Sequence: Synthetic polynucleotide
  source 1..321: mol_type = other DNA
gacatccagatgacccagtctccatcctcactgtctgcatctgtcggagacagagtcaccatcacttgtcgggcgagtcagggcattggcaattatttagcctggtttcagcagaaaccagggaaagcccctaagtccctgatctatgttgcatccaggttgcaaagtggggtcccatcaaagttcagcggcactggatctgggtcagatttcactctcaccatcagcagcctgcagcctgacgattttgcgacttattactgccaacggtatcatacttacccgctcactttcggcggagggaccaaggtggagatcaaa

SEQ ID NO: 26978 - protein, 107 aa, synthetic construct
  REGION 1..107: note = Description of Artificial Sequence: Synthetic polypeptide
DIQMTQSPSSLSASVGDRVTITCRASQGIGNYLAWFQQKPGKAPKSLIYVASRLQSGVPSKFSGTGSGSDFTLTISSLQPDDFATYYCQRYHTYPLTFGGGTKVEIK

SEQ ID NO: 26979 - DNA, 321 bp, synthetic construct
  misc_feature 1..321: note = Description of Artificial Sequence: Synthetic polynucleotide
  source 1..321: mol_type = other DNA
gacatccagatgacccagtctccatcctccccgtctgcatctgttggagacagagtcaccatcactcgccgggcaagtcacaacattaacagctatttaaattggtatcagcagaaatcagggaaagcccctaaactccttatctatgctgcatccagtttgcaaagtggggtcccgtcaaggttcagtggcagtggatctgggacagatttcactctcactttcagtagtctacaacctgaagattttgcaacttactactgtcaacagagttacagtttcccgctcactttcggcggagggaccaaggtggagatgagg

SEQ ID NO: 26980 - protein, 107 aa, synthetic construct
  REGION 1..107: note = Description of Artificial Sequence: Synthetic polypeptide
DIQMTQSPSSPSASVGDRVTITRRASHNINSYLNWYQQKSGKAPKLLIYAASSLQSGVPSRFSGSGSGTDFTLTFSSLQPEDFATYYCQQSYSFPLTFGGGTKVEMR

SEQ ID NO: 26981 - DNA, 321 bp, synthetic construct
  misc_feature 1..321: note = Description of Artificial Sequence: Synthetic polynucleotide
  source 1..321: mol_type = other DNA
gacatccagatgacccagtctccatcctcccgttttgcatctgtaggagacagagtcaccatcacttgccgggcaagtcagggcattagacatgatttaggctggtatcagcagaaaccagggaaagcccttaagcgcttgatatatgctgcatccagtttgcaaagtggggtcccatcaaggttcagcggcagtggatgtgggacagaattcactctcacaatcagcagcgtgcagcctgaagattttgcaaattattactgtctacagcattatagtttccctcggacgttcggccaagggaccaaggtggaaatcaaa

SEQ ID NO: 26982 - protein, 107 aa, synthetic construct
  REGION 1..107: note = Description of Artificial Sequence: Synthetic polypeptide
DIQMTQSPSSRFASVGDRVTITCRASQGIRHDLGWYQQKPGKALKRLIYAASSLQSGVPSRFSGSGCGTEFTLTISSVQPEDFANYYCLQHYSFPRTFGQGTKVEIK

SEQ ID NO: 26983 - DNA, 321 bp, synthetic construct
  misc_feature 1..321: note = Description of Artificial Sequence: Synthetic polynucleotide
  source 1..321: mol_type = other DNA
gacatccagatgacccagtctccatcctccctgtctgcatctgtaggagacagagtcaccatcacttgccgggcaagtcagggcattagaaatgatttaggctggtatcagcagaaaccagggaaagcccctaagcgcctgatctatagggcatccagtgtgcaaaatggggtcccatcaaggttcagcggcagtggatctgggacagaattcactctcacaatcagcagcctgcagcctgaagattttgcaacttatcactgtctacagcataatagttacccattcactttcggccctgggaccaaagtggatatcaaa

SEQ ID NO: 26984 - protein, 107 aa, synthetic construct
  REGION 1..107: note = Description of Artificial Sequence: Synthetic polypeptide
DIQMTQSPSSLSASVGDRVTITCRASQGIRNDLGWYQQKPGKAPKRLIYRASSVQNGVPSRFSGSGSGTEFTLTISSLQPEDFATYHCLQHNSYPFTFGPGTKVDIK

SEQ ID NO: 26985 - DNA, 339 bp, synthetic construct
  misc_feature 1..339: note = Description of Artificial Sequence: Synthetic polynucleotide
  source 1..339: mol_type = other DNA
gacatcgtgatgacccagtctccagactccctggctgtgtctctgggcgagagggccaccatcaactgcaagtccagccagagtgtttttttccactcgaacaataagaactacttagcttggtaccagcagaaaccaggacagcctcctaagttgctcatttactgggcatctacccgggaatccggggtccctgaccgattcagtggcagcgggtctgggacagatttcactctcaccatcagcagcctgcaggctgaagatgtgacagtttattactgtcaacaatattttagtcttccattcactttcggccctgggaccaaagtggatatcaca

SEQ ID NO: 26986 - protein, 113 aa, synthetic construct
  REGION 1..113: note = Description of Artificial Sequence: Synthetic polypeptide
DIVMTQSPDSLAVSLGERATINCKSSQSVFFHSNNKNYLAWYQQKPGQPPKLLIYWASTRESGVPDRFSGSGSGTDFTLTISSLQAEDVTVYYCQQYFSLPFTFGPGTKVDIT

SEQ ID NO: 26987 - DNA, 339 bp, synthetic construct
  misc_feature 1..339: note = Description of Artificial Sequence: Synthetic polynucleotide
  source 1..339: mol_type = other DNA
gacatcgtgatgacccagtctccagagtccctggctgtgtctctgggcgagagggccaccatcaactgcaagtccagccagagtgttttatacagttccaacaataagaactacttagtttggtaccagcagaaaccaggacagcctcctaaactgctcatttactgggcatctacccgggaatccggggtccctgaccgattcagtggcagcgggtctgggacagatttcactctcaccatcagcagcctgcaggctgaagatgtggcagtttattactgtcagcaatattatagtactcctccgacgttcggccaagggaccaaggtggaaatcaaa

SEQ ID NO: 26988 - protein, 113 aa, synthetic construct
  REGION 1..113: note = Description of Artificial Sequence: Synthetic polypeptide
DIVMTQSPESLAVSLGERATINCKSSQSVLYSSNNKNYLVWYQQKPGQPPKLLIYWASTRESGVPDRFSGSGSGTDFTLTISSLQAEDVAVYYCQQYYSTPPTFGQGTKVEIK

SEQ ID NO: 26989 - DNA, 321 bp, synthetic construct
  misc_feature 1..321: note = Description of Artificial Sequence: Synthetic polynucleotide
  source 1..321: mol_type = other DNA
gacatccagatgacccagtctccatcctccctgtctgcatctgtaggagacagagtcaccatcacttgccgggcaagtcagggcattagaaatgatttaggctggtatcagcagaaaccagggaaagcccctgaactcctgatctatgctgcagccagtttgcaaggtggggtcccatcaaggttcagcggcagtggatctgggacagaattcactctcacaatcagcagcctgcagcctgaagattttgcaacttattactgtctacagcattatagttaccctcggacgttcggccaagggaccaaggtggaactccaa

SEQ ID NO: 26990 - protein, 107 aa, synthetic construct
  REGION 1..107: note = Description of Artificial Sequence: Synthetic polypeptide
DIQMTQSPSSLSASVGDRVTITCRASQGIRNDLGWYQQKPGKAPELLIYAAASLQGGVPSRFSGSGSGTEFTLTISSLQPEDFATYYCLQHYSYPRTFGQGTKVELQ

SEQ ID NO: 26991 - DNA, 321 bp, synthetic construct
  misc_feature 1..321: note = Description of Artificial Sequence: Synthetic polynucleotide
  source 1..321: mol_type = other DNA
gacatccagatgaccctgtctccatcctccccgtctgcatttgttggagacagagtcaccatcactcgccgggcaagtcacaacattaacagctatttaaattggtatcagcagaaatcagggaaagcccctaaactccttatctatgctgcatccagtttgcaaagtggggtcccgtcaaggttcagtggcagtggatctgggacagatttcactctcactttcagtagtctacaacctgaagattttgcaacttactactgtcaacagagttacagtttcccgctcactttcggcggagggaccaaggtggagatgagg

SEQ ID NO: 26992 - protein, 107 aa, synthetic construct
  REGION 1..107: note = Description of Artificial Sequence: Synthetic polypeptide
DIQMTLSPSSPSAFVGDRVTITRRASHNINSYLNWYQQKSGKAPKLLIYAASSLQSGVPSRFSGSGSGTDFTLTFSSLQPEDFATYYCQQSYSFPLTFGGGTKVEMR

SEQ ID NO: 26993 - DNA, 321 bp, synthetic construct
  misc_feature 1..321: note = Description of Artificial Sequence: Synthetic polynucleotide
  source 1..321: mol_type = other DNA
gagatagtgatgacgcagtctccagccaccctgtctgtgtctccaggggaaagagccaccctctcctgcagggccagtcagaatattaaaagcaacttagcctggtaccagcagaaacctggccaggctcccaggctcctcatctttggtgcatccaccagggccactggtatcccagccaggttcagtggcagtgggtctggtacagagttcactctcaccatcagcagcctgcagtctgaagattttgcagtgtattactgtcagcagttttataactggctgtgcagttttggccaggggaccaagctggagctcaag

SEQ ID NO: 26994 - protein, 107 aa, synthetic construct
  REGION 1..107: note = Description of Artificial Sequence: Synthetic polypeptide
EIVMTQSPATLSVSPGERATLSCRASQNIKSNLAWYQQKPGQAPRLLIFGASTRATGIPARFSGSGSGTEFTLTISSLQSEDFAVYYCQQFYNWLCSFGQGTKLELK

SEQ ID NO: 26995 - DNA, 321 bp, synthetic construct
  misc_feature 1..321: note = Description of Artificial Sequence: Synthetic polynucleotide
  source 1..321: mol_type = other DNA
gacagccagatgacccagtctccatcctccctgtctgcatctgtaggagacagagtcaccatcacttgccgggcaagtcggagcgttcacacctatttaaattggtatcaacagaagccagggaaagcccctaaggtcctgatctatggtgcatccagtttgcaacgtggggtcccatcaaggttcagtggcagtggatctgggacagatttcactctcaccatcagcagtctgcaacctgaagatgttgcaacttactactgtcaacagagttacagttccccgctcactttcggcggggggaccaaggtggagatccaa

SEQ ID NO: 26996 - protein, 107 aa, synthetic construct
  REGION 1..107: note = Description of Artificial Sequence: Synthetic polypeptide
DSQMTQSPSSLSASVGDRVTITCRASRSVHTYLNWYQQKPGKAPKVLIYGASSLQRGVPSRFSGSGSGTDFTLTISSLQPEDVATYYCQQSYSSPLTFGGGTKVEIQ

SEQ ID NO: 26997 - DNA, 321 bp, synthetic construct
  misc_feature 1..321: note = Description of Artificial Sequence: Synthetic polynucleotide
  source 1..321: mol_type = other DNA
gacatccggatgacccagtctccatcctcactgtctgcatctgtaggagacagaatcaccatcacttgtcggacgagtcagggcattggcaattatttagcctggtttcagcagaaaccagggaaagcccctaagtccctgatctatgctgcatccagtttgcaaagtggggtcccatcaaggttcagcggcagtggatctgggacagatttcactctcaccatcagcagcctgcagcctgaagattttgcaacttattactgccaacactatcttagttaccctctcactttcggcggagggaccaaggtggagatcaaa

SEQ ID NO: 26998 - protein, 107 aa, synthetic construct
  REGION 1..107: note = Description of Artificial Sequence: Synthetic polypeptide
DIRMTQSPSSLSASVGDRITITCRTSQGIGNYLAWFQQKPGKAPKSLIYAASSLQSGVPSRFSGSGSGTDFTLTISSLQPEDFATYYCQHYLSYPLTFGGGTKVEIK

SEQ ID NO: 26999 - DNA, 321 bp, synthetic construct
  misc_feature 1..321: note = Description of Artificial Sequence: Synthetic polynucleotide
  source 1..321: mol_type = other DNA
gacatccagatgacccagtctccatcctcactgtctgcatctgtaggagacagagtcaccatcacttgtcgggcgagtcagggcataagtaatcatttagcctggtttcagcagaaaccagggaaagcccctaagtccctgatctttgctgcatccagtttgcaaagtggggtcccatcacagttcagcggcagtggatctgggaccgaattcactctcaccatcagcagcctgcagcctgaagattttgcaacttattactgccaacagtatagtaattacccggtcactttcggcggagggaccaaggtggagatcaaa

SEQ ID NO: 27000 - protein, 107 aa, synthetic construct
  REGION 1..107: note = Description of Artificial Sequence: Synthetic polypeptide
DIQMTQSPSSLSASVGDRVTITCRASQGISNHLAWFQQKPGKAPKSLIFAASSLQSGVPSQFSGSGSGTEFTLTISSLQPEDFATYYCQQYSNYPVTFGGGTKVEIK

SEQ ID NO: 27001 - DNA, 321 bp, synthetic construct
  misc_feature 1..321: note = Description of Artificial Sequence: Synthetic polynucleotide
  source 1..321: mol_type = other DNA
gacatccagatgacccagtctccatcctccctgtctgcatctgtaggagacagagtcaccatcacttgccgggcaagtcagggcattagaaatgatttaggctggtatcagcagaaaccagggaaagcccctaagcgcctgatctattctgcatccagtttgcaaagtggggtcccatcaaggttcagcggccgtggatctgggacagaattcactctcacagtcagcagcctgcagcctgaagattttgcaacttattactgtctacaacataatagttaccctctcactttcggcggagggaccaaggtggagatcaaa

SEQ ID NO: 27002 - protein, 107 aa, synthetic construct
  REGION 1..107: note = Description of Artificial Sequence: Synthetic polypeptide
DIQMTQSPSSLSASVGDRVTITCRASQGIRNDLGWYQQKPGKAPKRLIYSASSLQSGVPSRFSGRGSGTEFTLTVSSLQPEDFATYYCLQHNSYPLTFGGGTKVEIK

SEQ ID NO: 27003 - DNA, 324 bp, synthetic construct
  misc_feature 1..324: note = Description of Artificial Sequence: Synthetic polynucleotide
  source 1..324: mol_type = other DNA
gaaatcgtgttgacgcagtctccaggcaccctgtctttgtctccaggggaaagagccaccctctcctgcagggccagtcagaatgttagttacagctacttagcctggtaccagcagaaacctggccaggctcccaggctcctcatctatggtgcatccaggagggccactggcatcccagacaggttcagtggcagtgggtctgggacagacttcactctcaccatcagcagactggagcctgaagattttgcagtgtattactgtcagcagtatggtagctcaccgtgcagttttggccaggggaccaagctggagatcaaa

SEQ ID NO: 27004 - protein, 108 aa, synthetic construct
  REGION 1..108: note = Description of Artificial Sequence: Synthetic polypeptide
EIVLTQSPGTLSLSPGERATLSCRASQNVSYSYLAWYQQKPGQAPRLLIYGASRRATGIPDRFSGSGSGTDFTLTISRLEPEDFAVYYCQQYGSSPCSFGQGTKLEIK

SEQ ID NO: 27005 - DNA, 321 bp, synthetic construct
  misc_feature 1..321: note = Description of Artificial Sequence: Synthetic polynucleotide
  source 1..321: mol_type = other DNA
gacatcccgatgacccagtctccatcctcactgtctgcatctgtaggagacagagtcaccatcacttgtcgggcgagtcaggccattagtaatcatttagcctggtttcagctgaaaccagggaaagcccctaagtccctgatctatgctgcatccagtttgcaaagtggggtcccatcaaagttcagcggcagtggatctgggtcagatttcactctcaccatcagcagcctgcagcctgaagattttgcaacttattactgccaacaatatagtaattacccactcactttcggcggagggaccaaggtggagatcaaa

SEQ ID NO: 27006 - protein, 107 aa, synthetic construct
  REGION 1..107: note = Description of Artificial Sequence: Synthetic polypeptide
DIPMTQSPSSLSASVGDRVTITCRASQAISNHLAWFQLKPGKAPKSLIYAASSLQSGVPSKFSGSGSGSDFTLTISSLQPEDFATYYCQQYSNYPLTFGGGTKVEIK

SEQ ID NO: 27007 - DNA, 321 bp, synthetic construct
  misc_feature 1..321: note = Description of Artificial Sequence: Synthetic polynucleotide
  source 1..321: mol_type = other DNA
gaaatagtgatgacgcagtctccagccaccctgtctgtgtctccaggggaaagagccaccctctcctgcagggccagtcagaatattaaaagcaacttagcctggtaccagcagaaacctggccaggctcccaggctcctcatctttggtgcatccaccagggccactggtatcccagccaggttcagtggcagtgggtctgggacagagttcactctcaccatcagcagcctgcagtctgaagattttgcagtttattactgtcagcagttttataactggctgtgcagttttggccaggggaccaagctggagctcaaa

SEQ ID NO: 27008 - protein, 107 aa, synthetic construct; identical to SEQ ID NO: 26994
  REGION 1..107: note = Description of Artificial Sequence: Synthetic polypeptide

SEQ ID NO: 27009 - DNA, 321 bp, synthetic construct
  misc_feature 1..321: note = Description of Artificial Sequence: Synthetic polynucleotide
  source 1..321: mol_type = other DNA
gacatccagatgacccagtctccatcctcactgtctgcatctgtaggagacagagtcaccatcacttgtcgggcgagtcagggcattggcaattatttagcctggtttcagcagaaaccagggaaagcccctaagtccctgatctatggtgtctccagtttgcaaagtggggtcccatcaaagttcagcggcagtggatctgggacagatttcactctcaccatcagcagcctgcagcctgaagattttgcaacttatacctgccaacaatatagtaattaccctctcactttcggcggagggaccaaggtggacatcaga

SEQ ID NO: 27010 - protein, 107 aa, synthetic construct
  REGION 1..107: note = Description of Artificial Sequence: Synthetic polypeptide
DIQMTQSPSSLSASVGDRVTITCRASQGIGNYLAWFQQKPGKAPKSLIYGVSSLQSGVPSKFSGSGSGTDFTLTISSLQPEDFATYTCQQYSNYPLTFGGGTKVDIR

SEQ ID NO: 27011 - DNA, 324 bp, synthetic construct
  misc_feature 1..324: note = Description of Artificial Sequence: Synthetic polynucleotide
  source 1..324: mol_type = other DNA
gaaattgtgttgacgcagtctccaggcaccctgtctttgtctccaggggaaagagccaccctctcctgcagggccagtcagagtgttttcagcaactacttagcctggtaccagcagaaacctggccaggctcccaggctcctcatctatggtgcatccagcagggccgctggcatccccgacaggttcagtggcagtgggtctgggacagacttcactctcaccatcagcagactggagcctgaaaattttgcagtgtattactgtcagcagtatgaaagttcaccgtggacgttcggccaagggaccaaggtggaaatcaaa

SEQ ID NO: 27012 - protein, 108 aa, synthetic construct
  REGION 1..108: note = Description of Artificial Sequence: Synthetic polypeptide
EIVLTQSPGTLSLSPGERATLSCRASQSVFSNYLAWYQQKPGQAPRLLIYGASSRAAGIPDRFSGSGSGTDFTLTISRLEPENFAVYYCQQYESSPWTFGQGTKVEIK

SEQ ID NO: 27013 - DNA, 333 bp, synthetic construct
  misc_feature 1..333: note = Description of Artificial Sequence: Synthetic polynucleotide
  source 1..333: mol_type = other DNA
gatattgtgatgactcagtctccactctccctgcccgtcacccctggagagccggcctccatctcctgcaggtctagtcagagcctcctgcataataatagatacaaccatttggattggtacctgcagaagccagggcagtctccacagctcctgatctatttgggttctaatcgggcctccggggtccctgacaggttcagtggcagtggatcaggcacagattttacactgaaaatcagcagagtggaggctgaggatgttggggtttattactgcatgcaagctctacaaactcccactttcggcggagggaccaaggtggagatcaaa

SEQ ID NO: 27014 - protein, 111 aa, synthetic construct; identical to SEQ ID NO: 26964
  REGION 1..111: note = Description of Artificial Sequence: Synthetic polypeptide

SEQ ID NO: 27015 - DNA, 321 bp, synthetic construct
  misc_feature 1..321: note = Description of Artificial Sequence: Synthetic polynucleotide
  source 1..321: mol_type = other DNA
gaaatagtgatgacgcagtctccagccaccctgtctgtgtctccaggggaaagagccaccctctcctgcagggccagtcagagtgttaatagctacttagcctggtaccagcagaaacctggccaggctcccaggctcctcatctatggtgcatccaccagggccactggtatcccagccaggttcagtggcagtgggtctgggacagaattcactctcaccatcagcagcctgcagtctgaagattttgcagtttattactgtcaagagtataatgactggccgtgcagttttggccaggggaccaacctggagatcaaa

SEQ ID NO: 27016 - protein, 107 aa, synthetic construct
  REGION 1..107: note = Description of Artificial Sequence: Synthetic polypeptide
EIVMTQSPATLSVSPGERATLSCRASQSVNSYLAWYQQKPGQAPRLLIYGASTRATGIPARFSGSGSGTEFTLTISSLQSEDFAVYYCQEYNDWPCSFGQGTNLEIK

SEQ ID NO: 27017 - DNA, 321 bp, synthetic construct
  misc_feature 1..321: note = Description of Artificial Sequence: Synthetic polynucleotide
  source 1..321: mol_type = other DNA
gacatccagatgacccagtctccatcctccctgtctgcatctgtaggagacagagtcaccatcacttgccgggcaagtcagggcattagaaatgatttaggctggtatcagcagaaacaagggaaagcccctaagctcctgatctattctgcatcctttttgcaaagaggggtcccatcaagattcagcggcagtggatctgggacagaattcactctcacaatcagcagcctgcagcctgaagattctgcagcttattactgtctacagcataatagttacccgctcactttcggcggagggaccacggtgaagatcaaa

SEQ ID NO: 27018 - protein, 107 aa, synthetic construct
  REGION 1..107: note = Description of Artificial Sequence: Synthetic polypeptide
DIQMTQSPSSLSASVGDRVTITCRASQGIRNDLGWYQQKQGKAPKLLIYSASFLQRGVPSRFSGSGSGTEFTLTISSLQPEDSAAYYCLQHNSYPLTFGGGTTVKIK

SEQ ID NO: 27019 - DNA, 324 bp, synthetic construct
  misc_feature 1..324: note = Description of Artificial Sequence: Synthetic polynucleotide
  source 1..324: mol_type = other DNA
gaaattgtgttgacgcagtctccaggcaccctgtctttgtctccaggggaaagagccaccctctcctgcagggccagtcagagtattaacagcaactacttagcctggtaccagcggaagcctggccaggctcccagggtcctcatctatggtgcatccagcagggccactggcatcccagacaggttcagtggcagtgggtctgggacagacttcactctcaccatcagcagactggagcctgaagattttgcagtgttttactgtcagcagtatgaaaactcaccgtggacgttcggccaagggaccaaggtggaaatcaaa

SEQ ID NO: 27020 - protein, 108 aa, synthetic construct
  REGION 1..108: note = Description of Artificial Sequence: Synthetic polypeptide
EIVLTQSPGTLSLSPGERATLSCRASQSINSNYLAWYQRKPGQAPRVLIYGASSRATGIPDRFSGSGSGTDFTLTISRLEPEDFAVFYCQQYENSPWTFGQGTKVEIK

SEQ ID NO: 27021 - DNA, 321 bp, synthetic construct
  misc_feature 1..321: note = Description of Artificial Sequence: Synthetic polynucleotide
  source 1..321: mol_type = other DNA
gacatccagatgaccctgtctccatcctccccgtctgcatttgttggagacagagtcaccatcactcgccgggcaagtcacaacattaacagctatttaaattggtatcagcagaaatcagggaaagcccctaaactccttatctgtgctgcatccagtttgcaaagtggggtcccgtcaaggttcagtggcagtggatctgggacagatttcactctcactttcagtagtctacaacctgaagattttgcaacttactactgtcaacagagttacagtttcccgctcactttcggcggagggaccaaggtggagatgagg

SEQ ID NO: 27022 - protein, 107 aa, synthetic construct
  REGION 1..107: note = Description of Artificial Sequence: Synthetic polypeptide
DIQMTLSPSSPSAFVGDRVTITRRASHNINSYLNWYQQKSGKAPKLLICAASSLQSGVPSRFSGSGSGTDFTLTFSSLQPEDFATYYCQQSYSFPLTFGGGTKVEMR

SEQ ID NO: 27023 - DNA, 321 bp, synthetic construct
  misc_feature 1..321: note = Description of Artificial Sequence: Synthetic polynucleotide
  source 1..321: mol_type = other DNA
gaaattgtgctgactcagtctccagactttcagtctgtgactccaaaggagaaagtcaccatcacctgccgggccagtcagagcattggtcgtagcttacactggtaccagcagaaaccagatcagtctccaaaactcctcatcaagtatgcttcccagtccttctcaggggtcccctcgaggttcagtggcagtggatctgggacagatttcaccctcaccatcaatagcctggaagctgaagatgctgcaacgtattactgtcatcagagtagaagtttaccgctcactttcggcggagggaccaaggtggagatcaaa

SEQ ID NO: 27024 - protein, 107 aa, synthetic construct
  REGION 1..107: note = Description of Artificial Sequence: Synthetic polypeptide
EIVLTQSPDFQSVTPKEKVTITCRASQSIGRSLHWYQQKPDQSPKLLIKYASQSFSGVPSRFSGSGSGTDFTLTINSLEAEDAATYYCHQSRSLPLTFGGGTKVEIK

SEQ ID NO: 27025 - DNA, 321 bp, synthetic construct
  misc_feature 1..321: note = Description of Artificial Sequence: Synthetic polynucleotide
  source 1..321: mol_type = other DNA
gacatccagatgacccagtctccatcctccccgtctgcatctgttggagacagagtcaccatcactcgccgggcaagtcacaacattaacagctatttaaattggtatcagcagaaatcagggaaagcccctaaactccttatctgtgctgcatccagtttgcaaagtggggtcccgtcaaggttcagtggcagtggatctgggacagatttcactctcactttcagtagtctacaacctgaagattttgcaacttactactgtcaacagagttacagtttcccgctcactttcggcggagggaccaaggtggagatgagg

SEQ ID NO: 27026 - protein, 107 aa, synthetic construct
  REGION 1..107: note = Description of Artificial Sequence: Synthetic polypeptide
DIQMTQSPSSPSASVGDRVTITRRASHNINSYLNWYQQKSGKAPKLLICAASSLQSGVPSRFSGSGSGTDFTLTFSSLQPEDFATYYCQQSYSFPLTFGGGTKVEMR

SEQ ID NO: 27027 - DNA, 321 bp, synthetic construct
  misc_feature 1..321: note = Description of Artificial Sequence: Synthetic polynucleotide
  source 1..321: mol_type = other DNA
gatatccagatgacccagtctccatcctcactgtctgcatctgtaggagacagagtcaccatcacttgtcgggcgagtcagggcattagaaattatttagcctggcttcagcagaaaccagggaaggcccctaagtccctgatccatgctgcatccagtttgcaaagtggggtcccatcaaagttcagcggcaatagatctgggacagatttcactctcaccatcagcagcctgcagcctgaagattttgcaacttattactgccaacagtacagtaattaccctctcactttcggcggagggaccaaggtggagatcaaa

SEQ ID NO: 27028 - protein, 107 aa, synthetic construct
  REGION 1..107: note = Description of Artificial Sequence: Synthetic polypeptide
DIQMTQSPSSLSASVGDRVTITCRASQGIRNYLAWLQQKPGKAPKSLIHAASSLQSGVPSKFSGNRSGTDFTLTISSLQPEDFATYYCQQYSNYPLTFGGGTKVEIK

SEQ ID NO: 27029 - DNA, 321 bp, synthetic construct
  misc_feature 1..321: note = Description of Artificial Sequence: Synthetic polynucleotide
  source 1..321: mol_type = other DNA
gacatccagatgacccagtctccatcctccctgtctgcatctgtaggagacagagtcaccatcacttgccgggcaagtcagggcattagaaatgatttaggctggtatcagcagaaaccagggaaagcccctaagcgcctgatctatgctgcatccagtttgcaaagtggggtcccatcaaggttcagcggcagtggatctgggacagaattcactctcacaatcagcagcctgcagcctgaagattttgcaacttatttctgtctacagcataatagttaccctctcaccttcggccaagggacacgactggaaattaaa

SEQ ID NO: 27030 - protein, 107 aa, synthetic construct
  REGION 1..107: note = Description of Artificial Sequence: Synthetic polypeptide
DIQMTQSPSSLSASVGDRVTITCRASQGIRNDLGWYQQKPGKAPKRLIYAASSLQSGVPSRFSGSGSGTEFTLTISSLQPEDFATYFCLQHNSYPLTFGQGTRLEIK

SEQ ID NO: 27031 - DNA, 321 bp, synthetic construct
  misc_feature 1..321: note = Description of Artificial Sequence: Synthetic polynucleotide
  source 1..321: mol_type = other DNA
gacatccagatgacccagtctccatcctccctgtctgcatctgtaggagacagagtcaccatcacttgccgggcaagtcagggcattagacatgatttaggctggtatcaacagaaaccagggaaagcccctaagcgcctgatctatgctgcatccagtttgcaaagtggggtcccatcagggttcagcggcagtggatctgggacagaattcactctcacaatcagcagcctgcagcctgaagattttgcaacttattactgtctacagcattatagttaccctcggacgttcggccaagggaccaaggtggaaatcaaa

SEQ ID NO: 27032 - protein, 107 aa, synthetic construct
  REGION 1..107: note = Description of Artificial Sequence: Synthetic polypeptide
DIQMTQSPSSLSASVGDRVTITCRASQGIRHDLGWYQQKPGKAPKRLIYAASSLQSGVPSGFSGSGSGTEFTLTISSLQPEDFATYYCLQHYSYPRTFGQGTKVEIK

SEQ ID NO: 27033 - DNA, 333 bp, synthetic construct; identical to SEQ ID NO: 26971
  misc_feature 1..333: note = Description of Artificial Sequence: Synthetic polynucleotide
  source 1..333: mol_type = other DNA

SEQ ID NO: 27034 - protein, 111 aa, synthetic construct; identical to SEQ ID NO: 26972
  REGION 1..111: note = Description of Artificial Sequence: Synthetic polypeptide

SEQ ID NO: 27035 - DNA, 324 bp, synthetic construct
  misc_feature 1..324: note = Description of Artificial Sequence: Synthetic polynucleotide
  source 1..324: mol_type = other DNA
gaaattgttttgacgcagtctccaggcaccctgtctttgtctccaggggaaagagccaccctctcctgcagggccagtcagagtgttagcagcaactacttagcctggtatcagcagagacctggccaggctcccagactcctcatctatggtgcatccagcagggccactggcatcccagacagattcagtggcagtgggtctgggacagacttcactctcaccatcagcagactggagcctgaagattttgcagtgtatttctgtcagcactacgaaaactcaccgtggacgttcggccaagggaccaaggtggaaatcaaa

SEQ ID NO: 27036 - protein, 108 aa, synthetic construct
  REGION 1..108: note = Description of Artificial Sequence: Synthetic polypeptide
EIVLTQSPGTLSLSPGERATLSCRASQSVSSNYLAWYQQRPGQAPRLLIYGASSRATGIPDRFSGSGSGTDFTLTISRLEPEDFAVYFCQHYENSPWTFGQGTKVEIK

SEQ ID NO: 27037 - DNA, 321 bp, synthetic construct
  misc_feature 1..321: note = Description of Artificial Sequence: Synthetic polynucleotide
  source 1..321: mol_type = other DNA
gacatccagatgacccagtctccatcctccccgtctgcatttgttggagacagagtcaccatcactcgccgggcaagtcacaacattaacagctatttaaattggtatcagcagaaatcagggaaagcccctaaactccttatctatgctgcatccagtttgcaaagtggggtcccgtcaaggttcagtggcagtggatctgggacagatttcactctcactttcagtagtctacaacctgaagattttgcaacttactactgtcaacagagttacagtttcccgctcactttcggcggagggaccaaggtggagatgagg

SEQ ID NO: 27038 - protein, 107 aa, synthetic construct
  REGION 1..107: note = Description of Artificial Sequence: Synthetic polypeptide
DIQMTQSPSSPSAFVGDRVTITRRASHNINSYLNWYQQKSGKAPKLLIYAASSLQSGVPSRFSGSGSGTDFTLTFSSLQPEDFATYYCQQSYSFPLTFGGGTKVEMR

SEQ ID NO: 27039 - DNA, 324 bp, synthetic construct
  misc_feature 1..324: note = Description of Artificial Sequence: Synthetic polynucleotide
  source 1..324: mol_type = other DNA
gaaattgtgttgacgcagtctccaggcaccctgtctttgtctccaggggaaagagccaccctctcctgcagggccagtcagagtgttagcaacaactacttagcctggtaccagcagaaacctggccaggctcccagggtcctcatctatggtgcatccagcagggccactggcatcccagacaggttcagtggcagtgggtctgggacagacttcactctcaccatcagcagactggagcctgaagattttgcagtgtattactgtcagcactatcatagctcaccgtggacgttcggccaagggaccaaggtggaaatcaaa

SEQ ID NO: 27040 - protein, 108 aa, synthetic construct
  REGION 1..108: note = Description of Artificial Sequence: Synthetic polypeptide
EIVLTQSPGTLSLSPGERATLSCRASQSVSNNYLAWYQQKPGQAPRVLIYGASSRATGIPDRFSGSGSGTDFTLTISRLEPEDFAVYYCQHYHSSPWTFGQGTKVEIK

SEQ ID NO: 27041 - DNA, 321 bp, synthetic construct
  misc_feature 1..321: note = Description of Artificial Sequence: Synthetic polynucleotide
  source 1..321: mol_type = other DNA
gacatccagatgacccagtctccatcctccccgtctgcatctgttggagacagagtcaccatcacttgccgggcaagtcacaacattaacagctatttaaattggtatcagcagaaatcagggaaagcccctaaactccttatctatgctgcatccagtttgcaaagtggggtcccgtcaaggttcagtggcagtggatctgggacagatttcactctcactttcagtagtctacaacctgaagattttgcaacttactactgtcaacagagttacagtttcccgctcactttcggcggagggaccaaggtggagatgagg

SEQ ID NO: 27042 - protein, 107 aa, synthetic construct
  REGION 1..107: note = Description of Artificial Sequence: Synthetic polypeptide
DIQMTQSPSSPSASVGDRVTITCRASHNINSYLNWYQQKSGKAPKLLIYAASSLQSGVPSRFSGSGSGTDFTLTFSSLQPEDFATYYCQQSYSFPLTFGGGTKVEMR

SEQ ID NO: 27043 - DNA, 321 bp, synthetic construct; identical to SEQ ID NO: 24295
  misc_feature 1..321: note = Description of Artificial Sequence: Synthetic polynucleotide
  source 1..321: mol_type = other DNA

SEQ ID NO: 27044 - protein, 107 aa, synthetic construct; identical to SEQ ID NO: 24296
  REGION 1..107: note = Description of Artificial Sequence: Synthetic polypeptide

SEQ ID NO: 27045 - DNA, 321 bp, synthetic construct
  misc_feature 1..321: note = Description of Artificial Sequence: Synthetic polynucleotide
  source 1..321: mol_type = other DNA
gacatccagatgacccagtctccatcctccctgtctgcatctgtaggagacagagtcaccatcacttgccgggcaagtcagggcattagacatgatttaggctggtatcaacagaaaccagggaaagcccctaagcgcctgatctatgctgcatccagtttgcaaagtggggtcccatcagggttcagcggcagtggatctgggacagaattcactctcacaatcagcagcctgcagcctgaagattttgcaacttattactgtctacaccattatagttaccctcggacgttcggccaagggaccaaggtggaaatcaaa

SEQ ID NO: 27046 - protein, 107 aa, synthetic construct
  REGION 1..107: note = Description of Artificial Sequence: Synthetic polypeptide
DIQMTQSPSSLSASVGDRVTITCRASQGIRHDLGWYQQKPGKAPKRLIYAASSLQSGVPSGFSGSGSGTEFTLTISSLQPEDFATYYCLHHYSYPRTFGQGTKVEIK

SEQ ID NO: 27047 - DNA, 321 bp, synthetic construct
  misc_feature 1..321: note = Description of Artificial Sequence: Synthetic polynucleotide
  source 1..321: mol_type = other DNA
gacatccagatgacccagtctccatcctccctgtctgcatctgtaggagacagagtcaccatcactttccggacaagtcagggcattagaaatgatttaggctggtatcagcagcaaccagggaaaacccctaagcgcatgatttatgctgcatccagtttgtttagtggggtcccatcaaggttcagcggcagtagatctgggacagatttcactctcacaatcagcagcctgcagcctgaagattttgcaacttattactgtctacagtataatagttaccctcccaccttcggccaagggacacgactggagattaaa

SEQ ID NO: 27048 - protein, 107 aa, synthetic construct
  REGION 1..107: note = Description of Artificial Sequence: Synthetic polypeptide
DIQMTQSPSSLSASVGDRVTITFRTSQGIRNDLGWYQQQPGKTPKRMIYAASSLFSGVPSRFSGSRSGTDFTLTISSLQPEDFATYYCLQYNSYPPTFGQGTRLEIK

SEQ ID NO: 27049 - DNA, 321 bp, synthetic construct
  misc_feature 1..321: note = Description of Artificial Sequence: Synthetic polynucleotide
  source 1..321: mol_type = other DNA
gaaatagtgatgacgcagtctccagccaccctgtctgtgtctccaggggaaagagccaccctctcctgcagggccagtcagagtgttaaaagcaacttagcctggtaccagcagaaacctggccaggctcccaggctcctcatctatggtgcatccaccagggccactggtatcccagccaggttcagtggcagtgggtctgggacagagttcactctcaccatcagcagcctgcagtctgaagattttgcagtttattcctgtcagcagtattataactggctgtgcagttttggccaggggaccaagctggagatcaaa

SEQ ID NO: 27050 - protein, 107 aa, synthetic construct
  REGION 1..107: note = Description of Artificial Sequence: Synthetic polypeptide
EIVMTQSPATLSVSPGERATLSCRASQSVKSNLAWYQQKPGQAPRLLIYGASTRATGIPARFSGSGSGTEFTLTISSLQSEDFAVYSCQQYYNWLCSFGQGTKLEIK

SEQ ID NO: 27051 - DNA, 321 bp, synthetic construct; identical to SEQ ID NO: 26961
  misc_feature 1..321: note = Description of Artificial Sequence: Synthetic polynucleotide
  source 1..321: mol_type = other DNA

SEQ ID NO: 27052 - protein, 107 aa, synthetic construct; identical to SEQ ID NO: 26962
  REGION 1..107: note = Description of Artificial Sequence: Synthetic polypeptide

SEQ ID NO: 27053 - DNA, 321 bp, synthetic construct
  misc_feature 1..321: note = Description of Artificial Sequence: Synthetic polynucleotide
  source 1..321: mol_type = other DNA
gacatccagatgacccagtctccatcttccgtgtctgcttctgtaggagacagagtcaccatcacttgtcgggcgagtcagggtattagcatctggttagcctggtatcagcagaaaccagggaaagcccctaacctcctgatctatgctgcatccagtttgcaaagtggagtcccatcaaggttcagcggcagaggatctgggacagatttcactctcaccatcagcagcctgcagcctgaagattttgcaacttactattgtcaacaggctaaaagtttcccattcactttcggccctgggaccaaagtggatatcaaa

SEQ ID NO: 27054 - protein, 107 aa, synthetic construct
  REGION 1..107: note = Description of Artificial Sequence: Synthetic polypeptide
DIQMTQSPSSVSASVGDRVTITCRASQGISIWLAWYQQKPGKAPNLLIYAASSLQSGVPSRFSGRGSGTDFTLTISSLQPEDFATYYCQQAKSFPFTFGPGTKVDIK

SEQ ID NO: 27055 - DNA, 339 bp, synthetic construct
  misc_feature 1..339: note = Description of Artificial Sequence: Synthetic polynucleotide
  source 1..339: mol_type = other DNA
gatattgtgatgactcagtctccactctccctgcccgtcacccctggagagccggcctccatctcctgcaggtctagtcagagcctcctgcattataatggacacaactttttggattggtacctgcagaagccagggcagtctccacagctcctgatctatttggtttctaatcgggcctccggggtccctgacaggttcagtggcagtggatcaggcacagattttacactgaaaatcagcagagtggaggctgaggatgttggggtttattactgcatgcaagctctacaaactcccatgtgcagttttggccaggggaccaagttggagatcaaa

SEQ ID NO: 27056 - protein, 113 aa, synthetic construct
  REGION 1..113: note = Description of Artificial Sequence: Synthetic polypeptide
DIVMTQSPLSLPVTPGEPASISCRSSQSLLHYNGHNFLDWYLQKPGQSPQLLIYLVSNRASGVPDRFSGSGSGTDFTLKISRVEAEDVGVYYCMQALQTPMCSFGQGTKLEIK

SEQ ID NO: 27057 - DNA, 321 bp, synthetic construct
  misc_feature 1..321: note = Description of Artificial Sequence: Synthetic polynucleotide
  source 1..321: mol_type = other DNA
gacatccagatgacccagtctccatcctcactgtctgcatctgtaggagacagagtcaccatcacttgtcgggcgagtcagggcattggcaattatttagcctggtttcagcagaaaccagggaaagcccctaggtccctgatctatgatgcatccagtttggaaagtggggtcccatcaaagttcagcggcagtaggtctgggacagatttcactctcaccatcggcagcctgcagcctgaagattttgcaacttattactgccaacactatatgacttacccgctcactttcggcgcagggaccaaggtggagatcaaa

SEQ ID NO: 27058 - protein, 107 aa, synthetic construct
  REGION 1..107: note = Description of Artificial Sequence: Synthetic polypeptide
DIQMTQSPSSLSASVGDRVTITCRASQGIGNYLAWFQQKPGKAPRSLIYDASSLESGVPSKFSGSRSGTDFTLTIGSLQPEDFATYYCQHYMTYPLTFGAGTKVEIK

SEQ ID NO: 27059 - DNA, 321 bp, synthetic construct
  misc_feature 1..321: note = Description of Artificial Sequence: Synthetic polynucleotide
  source 1..321: mol_type = other DNA
gacatccggatgacccagtctccatcctcactgtctgcatctgtaggagacagagtcaccatcacttgtcgggcgagtcaggccattgggaaacatttagcctggtttcagcagaggcctgggaaagcccctaagtccctgatctatgctgcatccagattgcaaagtggggtcccatcaaagttcagcggcagtggatctgggacagatttcactctcaccatcagcagcctgcagcctgaagatcttgcaacttattactgtcaacagtatagtaattatccgctcactttcggcggagggaccaaggtggagatcaaa

SEQ ID NO: 27060 - protein, 107 aa, synthetic construct
  REGION 1..107: note = Description of Artificial Sequence: Synthetic polypeptide
DIRMTQSPSSLSASVGDRVTITCRASQAIGKHLAWFQQRPGKAPKSLIYAASRLQSGVPSKFSGSGSGTDFTLTISSLQPEDLATYYCQQYSNYPLTFGGGTKVEIK

SEQ ID NO: 27061 - DNA, 324 bp, synthetic construct
  misc_feature 1..324: note = Description of Artificial Sequence: Synthetic polynucleotide
  source 1..324: mol_type = other DNA
gaaattgtgttgacgcagtctccaggcaccctgtctttgtctccaggggaaagagccaccctctcctgcagggccagtcagagtgttagcagcagcttcttagcctggtaccagcagaaacctggccaggctcccaggctcctcatctatggtgcatccagcagggccactggcatcccagacaggttcagtggcagtgggtctgggacagacttcactctcaccatcagcagactggagcctgaagattttgcagtgtattactgtcagcagtatgttagctcaccgctcactttcggcggagggaccaaggtggagatcaaa

SEQ ID NO: 27062 - protein, 108 aa, synthetic construct
  REGION 1..108: note = Description of Artificial Sequence: Synthetic polypeptide
EIVLTQSPGTLSLSPGERATLSCRASQSVSSSFLAWYQQKPGQAPRLLIYGASSRATGIPDRFSGSGSGTDFTLTISRLEPEDFAVYYCQQYVSSPLTFGGGTKVEIK

SEQ ID NO: 27063 - DNA, 321 bp, synthetic construct
  misc_feature 1..321: note = Description of Artificial Sequence: Synthetic polynucleotide
  source 1..321: mol_type = other DNA
gacatccagatgacccagtctccatcctcactgtctgcatctgtaggagacagcgtcaccatcacttgtcgggcgagtcagggcattggcaagtatttagcctggtttcagcagaaaccagggaaagcccctaagtccctgatctatgctgcatccagtttgctaagtggggtcccatcaaagttcagcggcagtggatctgggacagatttcactctcaccatcagcagccttcagcctgaagattttgccacttattactgccaaaagtatgatacttacccattcactttcggccctgggaccaaagtggatatcaaa

SEQ ID NO: 27064 - protein, 107 aa, synthetic construct
  REGION 1..107: note = Description of Artificial Sequence: Synthetic polypeptide
DIQMTQSPSSLSASVGDSVTITCRASQGIGKYLAWFQQKPGKAPKSLIYAASSLLSGVPSKFSGSGSGTDFTLTISSLQPEDFATYYCQKYDTYPFTFGPGTKVDIK

SEQ ID NO: 27065 - DNA, 321 bp, synthetic construct
  misc_feature 1..321: note = Description of Artificial Sequence: Synthetic polynucleotide
  source 1..321: mol_type = other DNA
gacatcgagatgacccagtctccaccctcactgtctgcatttgtaggagacagagtcaccatcacttgtcgggcgagtcagggcattagcagatatttagcctgggttcagcagaaaccagggaaagcccctaagtccctgatctatgctgcatccagtttgcaaagtggggtctcatcaaggttcagcggcagtggatctgggacagatttcactctcaccatcagcagcctgcagcctgaagatttcgcaacttattactgcctacggtatgatacttaccctctcattttcggcggagggaccaaggtggagatcaag

SEQ ID NO: 27066 - protein, 107 aa, synthetic construct
  REGION 1..107: note = Description of Artificial Sequence: Synthetic polypeptide
DIEMTQSPPSLSAFVGDRVTITCRASQGISRYLAWVQQKPGKAPKSLIYAASSLQSGVSSRFSGSGSGTDFTLTISSLQPEDFATYYCLRYDTYPLIFGGGTKVEIK

SEQ ID NO: 27067 - DNA, 339 bp, synthetic construct
  misc_feature 1..339: note = Description of Artificial Sequence: Synthetic polynucleotide
  source 1..339: mol_type = other DNA
gatattgtgatgactcagtctccactctccctgcccgtcacccctggagagccggcctccatctcctgcaggtctagtcagagcctcctccatagtaatggatacaactatttggattggtacctgctgaagccagggcagtctccacagctcctgatctatttgggttctaatcgggcctccggggtccctgacaggttcagtggcagtggatcaggcacagattttacactgaaaatcagcagaatggaggctgaggatgttgggatttattactgcatgcaagctctactaactcccgtgtgcagttttggccaggggaccaagctggagatcaaa

SEQ ID NO: 27068 - protein, 113 aa, synthetic construct
  REGION 1..113: note = Description of Artificial Sequence: Synthetic polypeptide
DIVMTQSPLSLPVTPGEPASISCRSSQSLLHSNGYNYLDWYLLKPGQSPQLLIYLGSNRASGVPDRFSGSGSGTDFTLKISRMEAEDVGIYYCMQALLTPVCSFGQGTKLEIK

SEQ ID NO: 27069 - DNA, 321 bp, synthetic construct
  misc_feature 1..321: note = Description of Artificial Sequence: Synthetic polynucleotide
  source 1..321: mol_type = other DNA
gacatccagatgacccagtctccatcctcactgtctgcatctgtaggagacagagtcaccatcacttgtcgggcgagtcagggcattagcaatcatttagcctggtttcagcagaaaccagggcaagcccctaagtccctgatctatgctgcatccagtttgcaaagtggggtcccatcaaagttcagcggcagtagatctgggacagatttcactctcaccatcagcagcctgcagcctgaagattttgcaacttattactgccaacagtatgttacctaccctctcactttcggcggagggaccaaggtggagatcaaa

SEQ ID NO: 27070 - protein, 107 aa, synthetic construct
  REGION 1..107: note = Description of Artificial Sequence: Synthetic polypeptide
DIQMTQSPSSLSASVGDRVTITCRASQGISNHLAWFQQKPGQAPKSLIYAASSLQSGVPSKFSGSRSGTDFTLTISSLQPEDFATYYCQQYVTYPLTFGGGTKVEIK

SEQ ID NO: 27071 - DNA, 321 bp, synthetic construct
  misc_feature 1..321: note = Description of Artificial Sequence: Synthetic polynucleotide
  source 1..321: mol_type = other DNA
gacatccagatgacccagtctccatcctcactgtctgcatctgtaggagacagagtcaccatcacttgtcgggcgagtcagggcattagcaatcatttagcctggtttcagcagaaaccagggaaagcccctaagtccctgatccatgctgcatccagtttgcaaagtggggtcccatcaaaattcagcggcaatagatctgggacagatttcactctcaccatcaacaacctgcagcctgaagattttgtaacttattactgccagcagtatagtaattaccctctcactttcggcggagggaccaaggtggagatcaaa

SEQ ID NO: 27072 - protein, 107 aa, synthetic construct
  REGION 1..107: note = Description of Artificial Sequence: Synthetic polypeptide
DIQMTQSPSSLSASVGDRVTITCRASQGISNHLAWFQQKPGKAPKSLIHAASSLQSGVPSKFSGNRSGTDFTLTINNLQPEDFVTYYCQQYSNYPLTFGGGTKVEIK

SEQ ID NO: 27073 - DNA, 321 bp, synthetic construct
  misc_feature 1..321: note = Description of Artificial Sequence: Synthetic polynucleotide
  source 1..321: mol_type = other DNA
gacatcgagatgacccagtctccatcctcactgtctgcatctgtaggagacagagtcaccatcacttgtcgggcgagtcagggcattagcagttatttagcctggcttcagcagaaaccagggaaagcccctaagtccctgatctatgctgcatccagtttgcaaagtggggtcccatcaaggttcagcggcagtggatctgggacagatttcactctcaccatcagcagcctgcagcctgaagatttcgcaacttattattgcctacggtatgatacttaccctctcactttcggcggagggaccaaggtggagatcaag

SEQ ID NO: 27074 - protein, 107 aa, synthetic construct
  REGION 1..107: note = Description of Artificial Sequence: Synthetic polypeptide
DIEMTQSPSSLSASVGDRVTITCRASQGISSYLAWLQQKPGKAPKSLIYAASSLQSGVPSRFSGSGSGTDFTLTISSLQPEDFATYYCLRYDTYPLTFGGGTKVEIK

SEQ ID NO: 27075 - DNA, 321 bp, synthetic construct
  misc_feature 1..321: note = Description of Artificial Sequence: Synthetic polynucleotide
  source 1..321: mol_type = other DNA
gaaatagtgatgacgcagtctccagccaccctgtctgtgtctccaggggaaagagccaccctctcctgcagggccagtcagagtgttgccagcagcttagcctggtaccagcagaagcctggccaggctcccaggctcctcatccatggtacatccaccagggccactgatgtcccagccaggttcagtggctttgggtctgggtcggacttcactctcaccatcagcagcctgcagtctgaagattttgcagtttattcctgtcagcagtataatgactggccgtgcagttttggccaggggaccaagctggagatcaaa

SEQ ID NO: 27076 - protein, 107 aa, synthetic construct
  REGION 1..107: note = Description of Artificial Sequence: Synthetic polypeptide
EIVMTQSPATLSVSPGERATLSCRASQSVASSLAWYQQKPGQAPRLLIHGTSTRATDVPARFSGFGSGSDFTLTISSLQSEDFAVYSCQQYNDWPCSFGQGTKLEIK

SEQ ID NO: 27077 - DNA, 321 bp, synthetic construct
  misc_feature 1..321: note = Description of Artificial Sequence: Synthetic polynucleotide
  source 1..321: mol_type = other DNA
gacatccagatgacccagtctccatcctcactgtctgcatctgtaggagacagagtcaccatcacttgtcgggcgagtcagggcattagcaattatttagactggtttcagcagaaaccagggaaagcccctaagtccctgatctattctgcatccaatttgcaaagtggggtcccatcaaagttcagcggcagtagatctgggacagatttcactctcaccatcagcagcctgcagcctgaagattttgcaacttattactgccaacactatagtaattacccgctcactttcggcggagggaccaaggtggagatcaaa

SEQ ID NO: 27078 - protein, 107 aa, synthetic construct
  REGION 1..107: note = Description of Artificial Sequence: Synthetic polypeptide
DIQMTQSPSSLSASVGDRVTITCRASQGISNYLDWFQQKPGKAPKSLIYSASNLQSGVPSKFSGSRSGTDFTLTISSLQPEDFATYYCQHYSNYPLTFGGGTKVEIK

SEQ ID NO: 27079 - DNA, 321 bp, synthetic construct
  misc_feature 1..321: note = Description of Artificial Sequence: Synthetic polynucleotide
  source 1..321: mol_type = other DNA
gacatccagatgacccagtctccatcttccctgcctgcatctgtaggagacagagtcaccatcacttgccgggcaagtcagggcattagaaatgatttaggctggtatcagcagaaaccagggaaagcccctaagcgcctgatctatgctgcatccagtttgcaaagtggggtcccatcaaggttcagcggcagtggatctgggacagaattcattctcacaatcagcagcctgcagcctgaagattttgcaacttattactgtctactgcattatagttaccctcggacgttcggccaagggaccaaggtggaaatcaaa

SEQ ID NO: 27080 - protein, 107 aa, synthetic construct
  REGION 1..107: note = Description of Artificial Sequence: Synthetic polypeptide
DIQMTQSPSSLPASVGDRVTITCRASQGIRNDLGWYQQKPGKAPKRLIYAASSLQSGVPSRFSGSGSGTEFILTISSLQPEDFATYYCLLHYSYPRTFGQGTKVEIK

SEQ ID NO: 27081 - DNA, 321 bp, synthetic construct
  misc_feature 1..321: note = Description of Artificial Sequence: Synthetic polynucleotide
  source 1..321: mol_type = other DNA
gacatccggatgacccagtctccatcctcactgtctgcatctgtaggagacagagtcaccatcacttgtcgggcgagtcaggccattgggaaacatttagcctggtttcagcagaggcctgggaaagcccctaagtccctgatctatgctgcatccagattgcaaagtggggtcccatcaaagttcagcggcagtggatctgggacagatttcactctcaccatcagcagcctgcagcctgaagatcttgcaacttattactgtcaacactatagtaattatccgctcacttttgtcggagggaccaaggtggagatcaca

SEQ ID NO: 27082 - protein, 107 aa, synthetic construct
  REGION 1..107: note = Description of Artificial Sequence: Synthetic polypeptide
DIRMTQSPSSLSASVGDRVTITCRASQAIGKHLAWFQQRPGKAPKSLIYAASRLQSGVPSKFSGSGSGTDFTLTISSLQPEDLATYYCQHYSNYPLTFVGGTKVEIT

SEQ ID NO: 27083 - DNA, 321 bp, synthetic construct
  misc_feature 1..321: note = Description of Artificial Sequence: Synthetic polynucleotide
  source 1..321: mol_type = other DNA
gacatccagatgacccagtctccatcctcactgtctgcatctgtaggagacagagtcaccatcacttgtcgggcgagtcagggcattagcaatcatttagcctggtttcagcagaaaccagggaaagcccctaagtccctgatccatgctgcatccagtttgcaaagtggggtcccatcaaaattcagcggcaatagatctgggacagatttcactctcaccatcaacaacctgcagcctgaagattttgtaacttattactgccaccagtatagtaattaccctctcactttcggcggagggaccaaggtggagatcaaa

SEQ ID NO: 27084 - protein, 107 aa, synthetic construct
  REGION 1..107: note = Description of Artificial Sequence: Synthetic polypeptide
DIQMTQSPSSLSASVGDRVTITCRASQGISNHLAWFQQKPGKAPKSLIHAASSLQSGVPSKFSGNRSGTDFTLTINNLQPEDFVTYYCHQYSNYPLTFGGGTKVEIK

SEQ ID NO: 27085 - DNA, 321 bp, synthetic construct
  misc_feature 1..321: note = Description of Artificial Sequence: Synthetic polynucleotide
  source 1..321: mol_type = other DNA
gacatccagatgacccagtctccatcctcactgtctgcatctgtaggagacagagtcaccatcacttgtcgggcgagtcagggcattggcaagtatttagcctggtttcagcagaaaccagggaaagcccctaagtccctgatctctgctgcatccagtgtgctaagtggggtcccatcaaagttcagcggcagtggatctgggacagatttcactctcaccatcagcagccttcagcctgaagattttgccacttattactgccaaaagtatgatacttacccattcactttcggccctgggaccaaagtggatatcaaa

SEQ ID NO: 27086 - protein, 107 aa, synthetic construct
  REGION 1..107: note = Description of Artificial Sequence: Synthetic polypeptide
DIQMTQSPSSLSASVGDRVTITCRASQGIGKYLAWFQQKPGKAPKSLISAASSVLSGVPSKFSGSGSGTDFTLTISSLQPEDFATYYCQKYDTYPFTFGPGTKVDIK

SEQ ID NO: 27087 - DNA, 321 bp, synthetic construct
  misc_feature 1..321: note = Description of Artificial Sequence: Synthetic polynucleotide
  source 1..321: mol_type = other DNA
gacatccatatgacccagtctccatcctcactgtctgcatctgtaggagacagagtcaccatcacttgtcgggcgagtcaggccattaggaattatttagcctggtgtcagcagaaaccagggaaagcccctaagaccctgatctatgctgcatccagtttgcaaagtggggtcccatcaaagttcagcggcagtggatctgggacagatttcactctcaccatcagcagcctgcagcctgaagattttgcaacttattactgccaacagtatagtaattaccctctcactttcggcggagggaccaaggtggagatcaaa

SEQ ID NO: 27088 - protein, 107 aa, synthetic construct
  REGION 1..107: note = Description of Artificial Sequence: Synthetic polypeptide
DIHMTQSPSSLSASVGDRVTITCRASQAIRNYLAWCQQKPGKAPKTLIYAASSLQSGVPSKFSGSGSGTDFTLTISSLQPEDFATYYCQQYSNYPLTFGGGTKVEIK

SEQ ID NO: 27089 - DNA, 321 bp, synthetic construct
  misc_feature 1..321: note = Description of Artificial Sequence: Synthetic polynucleotide
  source 1..321: mol_type = other DNA
gacatccggatgacccagtctccatcctcactgtctgcatctgtaggagacagagtcaccatcacttgtcgggcgagtcaggccattgggaaacatttagcctggtttcagcagaggcctgggaaagcccctaagtccctgatctatgctgcatccagattgcaaagtggggtcccatcaaagttcagcggcagtggatctgggacagatttcactctcaccatcagcagcctgcagcctgaagatcttgcaacttattactgtcaacactatagtaattatccgctcactttcggcggagggaccaaggtggagatcaaa

SEQ ID NO: 27090 - protein, 107 aa, synthetic construct
  REGION 1..107: note = Description of Artificial Sequence: Synthetic polypeptide
DIRMTQSPSSLSASVGDRVTITCRASQAIGKHLAWFQQRPGKAPKSLIYAASRLQSGVPSKFSGSGSGTDFTLTISSLQPEDLATYYCQHYSNYPLTFGGGTKVEIK

SEQ ID NO: 27091 - DNA, 321 bp, synthetic construct
  misc_feature 1..321: note = Description of Artificial Sequence: Synthetic polynucleotide
  source 1..321: mol_type = other DNA
gacatccagatgacccagtctccatcctcactgtctgcatctgtaggagacagagtcaccatcacttgtcgggcgagtcagggcattagcaatcatttagcctggtttcagcagaaaccagggaaagcccctaagtccctgatctatgctgcatccagtttgcaaagtggggtcccatcaaagttcagcggcagtggatctgggacagatttcactctcaccatcagcagcctgcagcctgaagattttgcaacttattactgccaacagtatagtaattaccctctcactttcggcggagggaccaaggtggagatcaaa

SEQ ID NO: 27092 - protein, 107 aa, synthetic construct
  REGION 1..107: note = Description of Artificial Sequence: Synthetic polypeptide
DIQMTQSPSSLSASVGDRVTITCRASQGISNHLAWFQQKPGKAPKSLIYAASSLQSGVPSKFSGSGSGTDFTLTISSLQPEDFATYYCQQYSNYPLTFGGGTKVEIK

SEQ ID NO: 27093 - DNA, 339 bp, synthetic construct
  misc_feature 1..339: note = Description of Artificial Sequence: Synthetic polynucleotide
  source 1..339: mol_type = other DNA
gacatcgtgatgacccagtctccagactccctggctgtgtctctgggcgagagggccaccatcaactgcaagtccagccagaatgttttagacatctccaacaataagaattccttaggttggttccagcagaaaccaggtcagcctcccaagctgctcattaactgggcatctacccgggaatccggggtccctgaccgcttcagtggcagcgggtctgggacagatttcactctcaccatcagcagcctgcagactgaagatgtggcagtttatcactgtcagcaatattataacattcctccgacgttcggccgagggaccaaggtggaaatcaaa

SEQ ID NO: 27094 - protein, 113 aa, synthetic construct
  REGION 1..113: note = Description of Artificial Sequence: Synthetic polypeptide
DIVMTQSPDSLAVSLGERATINCKSSQNVLDISNNKNSLGWFQQKPGQPPKLLINWASTRESGVPDRFSGSGSGTDFTLTISSLQTEDVAVYHCQQYYNIPPTFGRGTKVEIK

SEQ ID NO: 27095 - DNA, 339 bp, synthetic construct
  misc_feature 1..339: note = Description of Artificial Sequence: Synthetic polynucleotide
  source 1..339: mol_type = other DNA
gacatcgtgatgacccagtctccagactccctggctgtgtctctgggcgagagggccaccatcacctgcaagtccagccagaatgttttaaagacctccaacaataggaactacttagcttggtaccagcagaaaccaggacagcctcctaaggtgctcatttactgggcatctacccgggaatccggggtccctgaccgattcagtggcagcgggtctgggacagatttcactctcatcatcagcagcctgcaggctgaagatgtggcagtttattactgtcaccaatattatagtattccgtggaccttcggccaagggaccaaggtggaaatcaag

SEQ ID NO: 27096 - protein, 113 aa, synthetic construct
  REGION 1..113: note = Description of Artificial Sequence: Synthetic polypeptide
DIVMTQSPDSLAVSLGERATITCKSSQNVLKTSNNRNYLAWYQQKPGQPPKVLIYWASTRESGVPDRFSGSGSGTDFTLIISSLQAEDVAVYYCHQYYSIPWTFGQGTKVEIK

SEQ ID NO: 27097 - DNA, 321 bp, synthetic construct
  misc_feature 1..321: note = Description of Artificial Sequence: Synthetic polynucleotide
  source 1..321: mol_type = other DNA
gacatccagatgacccagtctccatcctcactgtctgcatctgttggagacagagtcaccataacttgtcgggcgagtcagggcattggcaattatttagcctggtttcagcagaaaccaggtaaagtccctaagtccctgatctatgctgcatccagtttgcaaagtggggtcccatcaaagttcagcggcagtggatctgggacagatttcactctcaccatcagcagcctgcagcctgaagattttacaacttattactgccaacaatatatgacttacccaatcactttcggccctgggaccaaagtggatatcaaa

SEQ ID NO: 27098 - protein, 107 aa, synthetic construct
  REGION 1..107: note = Description of Artificial Sequence: Synthetic polypeptide
DIQMTQSPSSLSASVGDRVTITCRASQGIGNYLAWFQQKPGKVPKSLIYAASSLQSGVPSKFSGSGSGTDFTLTISSLQPEDFTTYYCQQYMTYPITFGPGTKVDIK

SEQ ID NO: 27099 - DNA, 321 bp, synthetic construct
  misc_feature 1..321: note = Description of Artificial Sequence: Synthetic polynucleotide
  source 1..321: mol_type = other DNA
gacatccagatgacccagtctccatcctcactgtctgcatctgtaggagacagagtcaccatcacttgtcgggcgagtcagggcattagcaattatttagcctggtttcagcagaaaccagggaaagcccctaagtccctgatctatgctgcatccagtttgcaaagtggggtcccatcaaagttcagcggcagtggatctgggacagatttcactctcaccatcagcagcctgcagcctgaagattttgcaacttattactgccaacagtatcttacttacccattcactttcggccctgggaccaaagtggatatcaaa

SEQ ID NO: 27100 - protein, 107 aa, synthetic construct
  REGION 1..107: note = Description of Artificial Sequence: Synthetic polypeptide
DIQMTQSPSSLSASVGDRVTITCRASQGISNYLAWFQQKPGKAPKSLIYAASSLQSGVPSKFSGSGSGTDFTLTISSLQPEDFATYYCQQYLTYPFTFGPGTKVDIK

SEQ ID NO: 27101 - DNA, 321 bp, synthetic construct
  misc_feature 1..321: note = Description of Artificial Sequence: Synthetic polynucleotide
  source 1..321: mol_type = other DNA
gaaattgtgctgactcagtctccagactttcagtctgtgactccaaaggagaaagtcaccatcacctgccgggccagtcagagcattggtgttagcttacactggtaccagcagaaaccagatcagtctccacaactcctcatcaagtatgcttcccagtccttctcaggggtcccctcgaggttcagtggcagtggatctgggacagatttcaccctcaccatcaatagcctggaagctgaagatgctgcaacgtattactgtcatcagagtcgtagtttaccattcactttcggccctgggtccaaagtggatatcaaa

SEQ ID NO: 27102 - protein, 107 aa, synthetic construct
  REGION 1..107: note = Description of Artificial Sequence: Synthetic polypeptide
EIVLTQSPDFQSVTPKEKVTITCRASQSIGVSLHWYQQKPDQSPQLLIKYASQSFSGVPSRFSGSGSGTDFTLTINSLEAEDAATYYCHQSRSLPFTFGPGSKVDIK

SEQ ID NO: 27103 - DNA, 321 bp, synthetic construct; identical to SEQ ID NO: 27091
  misc_feature 1..321: note = Description of Artificial Sequence: Synthetic polynucleotide
  source 1..321: mol_type = other DNA

SEQ ID NO: 27104 - protein, 107 aa, synthetic construct; identical to SEQ ID NO: 27092
  REGION 1..107: note = Description of Artificial Sequence: Synthetic polypeptide

SEQ ID NO: 27105 - DNA, 321 bp, synthetic construct; identical to SEQ ID NO: 25705
  misc_feature 1..321: note = Description of Artificial Sequence: Synthetic polynucleotide
  source 1..321: mol_type = other DNA

SEQ ID NO: 27106 - protein, 107 aa, synthetic construct; identical to SEQ ID NO: 24168
  REGION 1..107: note = Description of Artificial Sequence: Synthetic polypeptide

SEQ ID NO: 27107 - DNA, 321 bp, synthetic construct
  misc_feature 1..321: note = Description of Artificial Sequence: Synthetic polynucleotide
  source 1..321: mol_type = other DNA
gacatccagatgaccctgtgtccatcttccccgcctgcatctgttggagacagagtcaccatcacttgccgggcaagtcagggcattagaaatgatttaggctggtatcagcagaaaccagggaaagcccctaagcgcctgatctatgctgcatccagtttgcaaagtggggtcccatcaaggttcagcggcagtggatctgggacagaattcattctcacaatcagcagcctgcagcctgaagattttgcaacttattactgtctactgcataatagttaccctcggacgttcggccaagggaccaaggtggaaatcaaa

SEQ ID NO: 27108 - protein, 107 aa, synthetic construct
  REGION 1..107: note = Description of Artificial Sequence: Synthetic polypeptide
DIQMTLCPSSPPASVGDRVTITCRASQGIRNDLGWYQQKPGKAPKRLIYAASSLQSGVPSRFSGSGSGTEFILTISSLQPEDFATYYCLLHNSYPRTFGQGTKVEIK

SEQ ID NO: 27109 - DNA, 321 bp, synthetic construct
  misc_feature 1..321: note = Description of Artificial Sequence: Synthetic polynucleotide
  source 1..321: mol_type = other DNA
gacatccagatgacccagtctccatcttccccgcctgcatctgtaggagacagagtcaccatcacttgccgggcaagtcagggcattagaaatgatttaggctggtatcagcagaaaccagggaaagcccctaagcgccttatctatgctgcatccagtttgcaaagtggggtcccatcaaggttcagcggcagtggatctgggacagaattcattctcacaatcagcagcctgcagcctgaagattttgcaacttattactgtgtaatgcattatagttaccctcggacgttcggccaagggaccaaggtggaaatcaaa

SEQ ID NO: 27110 - protein, 107 aa, synthetic construct
  REGION 1..107: note = Description of Artificial Sequence: Synthetic polypeptide
DIQMTQSPSSPPASVGDRVTITCRASQGIRNDLGWYQQKPGKAPKRLIYAASSLQSGVPSRFSGSGSGTEFILTISSLQPEDFATYYCVMHYSYPRTFGQGTKVEIK

SEQ ID NO: 27111 - DNA, 321 bp, synthetic construct
  misc_feature 1..321: note = Description of Artificial Sequence: Synthetic polynucleotide
  source 1..321: mol_type = other DNA
gacatccagatgacccagtctccatcctccccgcctgcatctgtaggagacagagtcaccatcacttgccgggcaagtcagggcattagaaatgatttaggctggtatcagcagaaaccagggaaagcccctaagcgccttatctatgctgcatccagtttgcaaagtggggtcccatcaaggttcagcggcagtggatctgggacagaattcactctcacaatcagcagcctgcagcctgaagattttgcaacttattactgtgtaatgcataatagttaccctcggacgttcggccaagggaccaaggtggaaatcaaa

SEQ ID NO: 27112 - protein, 107 aa, synthetic construct
  REGION 1..107: note = Description of Artificial Sequence: Synthetic polypeptide
DIQMTQSPSSPPASVGDRVTITCRASQGIRNDLGWYQQKPGKAPKRLIYAASSLQSGVPSRFSGSGSGTEFTLTISSLQPEDFATYYCVMHNSYPRTFGQGTKVEIK

SEQ ID NO: 27113 - DNA, 321 bp, synthetic construct
  misc_feature 1..321: note = Description of Artificial Sequence: Synthetic polynucleotide
  source 1..321: mol_type = other DNA
gacatccagatgacccagtctccatcctcactgtctgcatctgtaggagacagagtcaccatcacttgtcgggcgagtcagggcattagcaatcatttagcctggtttcagcagaaaccagggaaagcccctaagtccctgatccatgctgcatccagtttgcaaagtggggtcccatcaaaattcagcggcaatagatctgggacagatttcactctcaccatcaacaacctgcagcctgaagattttgtaacttattactgccagcagtatattaattaccctctcactttcggcggagggaccaaggtggagatcaaa

SEQ ID NO: 27114 - protein, 107 aa, synthetic construct
  REGION 1..107: note = Description of Artificial Sequence: Synthetic polypeptide
DIQMTQSPSSLSASVGDRVTITCRASQGISNHLAWFQQKPGKAPKSLIHAASSLQSGVPSKFSGNRSGTDFTLTINNLQPEDFVTYYCQQYINYPLTFGGGTKVEIK

SEQ ID NO: 27115 - DNA, 321 bp, synthetic construct
  misc_feature 1..321: note = Description of Artificial Sequence: Synthetic polynucleotide
  source 1..321: mol_type = other DNA
gacatccagatgacccagtctccatcctcactgtctgcatctgtaggagacagagtcaccatcacttgtcgggcgagtcagggcattagcaatcatttagcctggtttcagcagaaaccagggaaagcccctaagtccctgatctatgctgcatccagtttgcatagtggggtcccatcaaagttcagcggcagtagatctgggacagatttcactctcaccatcagcagcctgcagcctgaagattttgcaacttattactgccaacagtatgttacttaccctctcactttcggcggagggaccaaggtggagatcaaa

SEQ ID NO: 27116 - protein, 107 aa, synthetic construct
  REGION 1..107: note = Description of Artificial Sequence: Synthetic polypeptide
DIQMTQSPSSLSASVGDRVTITCRASQGISNHLAWFQQKPGKAPKSLIYAASSLHSGVPSKFSGSRSGTDFTLTISSLQPEDFATYYCQQYVTYPLTFGGGTKVEIK

SEQ ID NO: 27117 - DNA, 321 bp, synthetic construct
  misc_feature 1..321: note = Description of Artificial Sequence: Synthetic polynucleotide
  source 1..321: mol_type = other DNA
gaaattgtgctgactcagtctccagactttcagtctgtgactccaaaggagaaagtcaccatcacctgccgggccagtcagagcatcggtgttagcttacactggtaccagcagaaaccagatcagtctccacagctcctcatcaagtatgcttcccagtccctctcaggggtcccctcgaggttcagtggcagtggatctgggacagatttcaccctcaccatcaatagcctggaagctgaagatgctgcaacgtattactgtcatcagagtcgcagtttaccattcactttcggccctgggtccaaagtggatatcaaa

SEQ ID NO: 27118 - protein, 107 aa, synthetic construct
  REGION 1..107: note = Description of Artificial Sequence: Synthetic polypeptide
EIVLTQSPDFQSVTPKEKVTITCRASQSIGVSLHWYQQKPDQSPQLLIKYASQSLSGVPSRFSGSGSGTDFTLTINSLEAEDAATYYCHQSRSLPFTFGPGSKVDIK

SEQ ID NO: 27119 - DNA, 324 bp, synthetic construct
  misc_feature 1..324: note = Description of Artificial Sequence: Synthetic polynucleotide
  source 1..324: mol_type = other DNA
gaaattgtgttgacgcagtctccaggcaccctgtctttgtctccaggggaaagagtcaccctctcctgcagggccagtcagaggattaccaccaacttcttagcttggtaccagcagaaacctggccaggctcccaggctcctcatctatggtgcatccagcagggccactggcatcccagacaggttcagtggcagtgggtctgggacagacttcactctcaccatcagcagactggagtctgaagattttgcagtttattactgtcagcagtatgttagttcattgctcactttcggcggagggaccaaggtggagatcaaa

SEQ ID NO: 27120 - protein, 108 aa, synthetic construct
  REGION 1..108: note = Description of Artificial Sequence: Synthetic polypeptide
EIVLTQSPGTLSLSPGERVTLSCRASQRITTNFLAWYQQKPGQAPRLLIYGASSRATGIPDRFSGSGSGTDFTLTISRLESEDFAVYYCQQYVSSLLTFGGGTKVEIK

SEQ ID NO: 27121 - DNA, 321 bp, synthetic construct
  misc_feature 1..321: note = Description of Artificial Sequence: Synthetic polynucleotide
  source 1..321: mol_type = other DNA
gacatccagatgacccagtgtccatcttccccgcctgcatctgtaggagacagagtcaccatcacttgccgggcaagtcagggcattagaaatgatttaggctggtatcagcagaaaccagggaaagcccctaagcgccttatctatgctgcatccagtttgcaaagtggggtcccatcaaggttcagcggcagtggatctgggacagaattcattctcacaatcagcagcgtgcagcgtgaagattttgcaacttattactgtgtaatgcattatagttaccctcggacgttcggccaagggaccaaggtggaaatcaaa

SEQ ID NO: 27122 - protein, 107 aa, synthetic construct
  REGION 1..107: note = Description of Artificial Sequence: Synthetic polypeptide
DIQMTQCPSSPPASVGDRVTITCRASQGIRNDLGWYQQKPGKAPKRLIYAASSLQSGVPSRFSGSGSGTEFILTISSVQREDFATYYCVMHYSYPRTFGQGTKVEIK

SEQ ID NO: 27123 - DNA, 321 bp, synthetic construct
  misc_feature 1..321: note = Description of Artificial Sequence: Synthetic polynucleotide
  source 1..321: mol_type = other DNA
gacatccagatgacccagtctccatcctcactgtctgcatctgtaggagacagaatcaccatcacttgtcggacgagtcaggacattggcaattatttagcctggtttcagcagaaaccagggaaagcccctaagtccctgatctatgctgcatccagtttacagagtggggtcccatcaaagttcagcggcagtagatctgggacagatttcactctcaccatcagcagcctgcagtctgaagattttgcaacttattactgccaacagtatgttacttacccgctcactttcggcggagggaccaaggtggagatcaaa

SEQ ID NO: 27124 - protein, 107 aa, synthetic construct
  REGION 1..107: note = Description of Artificial Sequence: Synthetic polypeptide
DIQMTQSPSSLSASVGDRITITCRTSQDIGNYLAWFQQKPGKAPKSLIYAASSLQSGVPSKFSGSRSGTDFTLTISSLQSEDFATYYCQQYVTYPLTFGGGTKVEIK

SEQ ID NO: 27125 - DNA, 324 bp, synthetic construct
  misc_feature 1..324: note = Description of Artificial Sequence: Synthetic polynucleotide
  source 1..324: mol_type = other DNA
gaaattgtgttgacgcagtctccaggcaccctgtctttgtctccaggggaaagagccaccctctcctgcagggccagtcagagtgttagcagcagcttcttagcttggtaccagcagaaacctggccaggctcccaggctcctcatgtatggtgcatccagcagggccattggcatcccagacaggttcagtggcagtgggtctgggacagacttcactctcaccatcagcagactggagcctgaagattttgcagtgtattactgtcagcagtatgttagctcaccgctcactttcggcggagggaccaaggtggagatcaaa

SEQ ID NO: 27126 - protein, 108 aa, synthetic construct
  REGION 1..108: note = Description of Artificial Sequence: Synthetic polypeptide
EIVLTQSPGTLSLSPGERATLSCRASQSVSSSFLAWYQQKPGQAPRLLMYGASSRAIGIPDRFSGSGSGTDFTLTISRLEPEDFAVYYCQQYVSSPLTFGGGTKVEIK

SEQ ID NO: 27127 - DNA, 321 bp, synthetic construct
  misc_feature 1..321: note = Description of Artificial Sequence: Synthetic polynucleotide
  source 1..321: mol_type = other DNA
gaaatagtgatgacggagtctccagccaccctgtctgtgtctccaggggaaagagccaccctctcctgcagggccagtcagagtgttaacaacaacttagcctggtaccggcagaaacctggccaggctcccaggctcctcatctatggtgcatccaccagggccactggtatcccacccaggttcagtggcagtgggtctgggacagagttcactctctccatcagcagcctgcagtctgaagattttgcagtttattactgtcagcagtataatgactggccgtgcagttttggccaggggaccaaactggagatcaga

SEQ ID NO: 27128 - protein, 107 aa, synthetic construct
  REGION 1..107: note = Description of Artificial Sequence: Synthetic polypeptide
EIVMTESPATLSVSPGERATLSCRASQSVNNNLAWYRQKPGQAPRLLIYGASTRATGIPPRFSGSGSGTEFTLSISSLQSEDFAVYYCQQYNDWPCSFGQGTKLEIR

SEQ ID NO: 27129 - DNA, 324 bp, synthetic construct
  misc_feature 1..324: note = Description of Artificial Sequence: Synthetic polynucleotide
  source 1..324: mol_type = other DNA
gaagttgtgttgacgcagtctccaggcaccctgtctttgtctccaggggaaagagccaccctctcctgcagggccagtcagagtgttagcagcagcttcttagcctggtaccagcagaaacctggccaggctcccaggctcctcatctatggtacatccaccagggccactggcatccctgacaggttcagtggcagtgggtctgggacagacttcattctcaccatcagcagactggagcctgaagattttgcagtatattactgtcaacagtatgataggtcaccattcactttcggccctgggaccaaagtggatatcaaa

SEQ ID NO: 27130 - protein, 108 aa, synthetic construct
  REGION 1..108: note = Description of Artificial Sequence: Synthetic polypeptide
EVVLTQSPGTLSLSPGERATLSCRASQSVSSSFLAWYQQKPGQAPRLLIYGTSTRATGIPDRFSGSGSGTDFILTISRLEPEDFAVYYCQQYDRSPFTFGPGTKVDIK

SEQ ID NO: 27131 - DNA, 321 bp, synthetic construct
  misc_feature 1..321: note = Description of Artificial Sequence: Synthetic polynucleotide
  source 1..321: mol_type = other DNA
gacatccagatgacccagtctccatcttccctgcctgcatctgtaggagacagagtcaccatcacttgccgggcaagtcagggcattagaaatgatttaggctggtatcagcagaaaccagggaaagcccctaagcgccttatctatgctgcatccagtttgcaaagtggggtcccatcaaggttcagcggcagtggatctgggacagaattcattctcacaatcagcagcctgcagcctgaagattttgcaacttattactgtctaatgcattatagttaccctcggacgttcggccaagggaccaaggtggaaatcaaa

SEQ ID NO: 27132 - protein, 107 aa, synthetic construct
  REGION 1..107: note = Description of Artificial Sequence: Synthetic polypeptide
DIQMTQSPSSLPASVGDRVTITCRASQGIRNDLGWYQQKPGKAPKRLIYAASSLQSGVPSRFSGSGSGTEFILTISSLQPEDFATYYCLMHYSYPRTFGQGTKVEIK

SEQ ID NO: 27133 - DNA, 321 bp, synthetic construct
  misc_feature 1..321: note = Description of Artificial Sequence: Synthetic polynucleotide
  source 1..321: mol_type = other DNA
gacatccagatgaccctgtctccatcttccctgcctgcatctgtaggagacagagtcaccatcacttgccgggcaagtcagggcattagaaatgatttaggctggtatcagcagaaaccagggaaagcccctaagcgccttatctatggtgcatccagtttgcaaagtggggtcccatcaaggttcagcggcagtggatctgggacagaattcattctcacaatcagcagcctgcagcctgaagattttgcaacttattactgtgtaatgcataatagttaccctcggacgttcggccaagggaccaaggtggaaatcaaa

SEQ ID NO: 27134 - protein, 107 aa, synthetic construct
  REGION 1..107: note = Description of Artificial Sequence: Synthetic polypeptide
DIQMTLSPSSLPASVGDRVTITCRASQGIRNDLGWYQQKPGKAPKRLIYGASSLQSGVPSRFSGSGSGTEFILTISSLQPEDFATYYCVMHNSYPRTFGQGTKVEIK

SEQ ID NO: 27135 - DNA, 321 bp, synthetic construct
  misc_feature 1..321: note = Description of Artificial Sequence: Synthetic polynucleotide
  source 1..321: mol_type = other DNA
gaaattgtgctgactcagtctccagactttaagtctgtgactccaaaggagaaagtcaccatcacctgccgggccagtcagagcattggtagtagcttacactggtaccagcagaaaccagatcagtctccaaagctcctcgtcaagtatgcttcccagtccttctcaggggtcccctcgaggttcagtggcagtggatctgggacagatttcaccctcaccatcaacagcctggaggctgaagatggtgcaacgtattactgtcatcagagtagaagtttaccgtggacgttcggccaagggaccaaggtggaaatcaaa

SEQ ID NO: 27136 - protein, 107 aa, synthetic construct
  REGION 1..107: note = Description of Artificial Sequence: Synthetic polypeptide
EIVLTQSPDFKSVTPKEKVTITCRASQSIGSSLHWYQQKPDQSPKLLVKYASQSFSGVPSRFSGSGSGTDFTLTINSLEAEDGATYYCHQSRSLPWTFGQGTKVEIK

SEQ ID NO: 27137 - DNA, 321 bp, synthetic construct
  misc_feature 1..321: note = Description of Artificial Sequence: Synthetic polynucleotide
  source 1..321: mol_type = other DNA
gacatccagatgacccagtgtccatcttccccgcctgcatttgtaggagacagagtcaccatcacttgccgggcaagtcagggcattagaaatgatttaggctggtatcagcagaaaccagggaaagcccctaagcgccttatctgtgctgcatccagtttgcaaagtggggtcccatcaaggttcagcggcagtggatctgggacagaattcattctcacaatcagcagcctgcagcctgaagattttgcaacttattactgtgtaatgcataatagttaccctcggacgttcggccaagggaccaaggtggaaatcaaa

SEQ ID NO: 27138 - protein, 107 aa, synthetic construct
  REGION 1..107: note = Description of Artificial Sequence: Synthetic polypeptide
DIQMTQCPSSPPAFVGDRVTITCRASQGIRNDLGWYQQKPGKAPKRLICAASSLQSGVPSRFSGSGSGTEFILTISSLQPEDFATYYCVMHNSYPRTFGQGTKVEIK

SEQ ID NO: 27139 - DNA, 321 bp, synthetic construct
  misc_feature 1..321: note = Description of Artificial Sequence: Synthetic polynucleotide
  source 1..321: mol_type = other DNA
gacatcctgatgacccagtctccatcctcactgtctgcatctgtaggagacagagtcaccatcacttgtcgggcgagtcagggcattggcaattatttagcctggtttcagcagagaccagggaaagcccctaagtccctgatctatgctgcatccagtttgcaaagtggggtcccatcaaagttcagcggcactcgatctgggacagatttcactctcaccatcagcagcctgcagcctgacgattttgcaacttattactgccaacagtatgttaattaccctctcactttcggcggagggaccaaggtggagatcaac

SEQ ID NO: 27140 - protein, 107 aa, synthetic construct
  REGION 1..107: note = Description of Artificial Sequence: Synthetic polypeptide
DILMTQSPSSLSASVGDRVTITCRASQGIGNYLAWFQQRPGKAPKSLIYAASSLQSGVPSKFSGTRSGTDFTLTISSLQPDDFATYYCQQYVNYPLTFGGGTKVEIN

SEQ ID NO: 27141 - DNA, 321 bp, synthetic construct
  misc_feature 1..321: note = Description of Artificial Sequence: Synthetic polynucleotide
  source 1..321: mol_type = other DNA
gacatccggatgacccagtctccatcctcactgtctgcatctgtaggagacagagtcaccatcacttgtcgggcgagtcaggccattgggaaacatttagcctggtttcagcagaggcctgggaaagcccctaagtccctgatctatgctgcatccagattgcaaagtggggtcccatcaaagttcagcggcagtggatctgggacagatttcactctcaccatcagcagcgtgcagcctgaagatcttgcaacttattaccgtcaacacaccagtaaatctccagtgcagcttgtcggaggcaccaaggtggagatcaca

SEQ ID NO: 27142 - protein, 107 aa, synthetic construct
  REGION 1..107: note = Description of Artificial Sequence: Synthetic polypeptide
DIRMTQSPSSLSASVGDRVTITCRASQAIGKHLAWFQQRPGKAPKSLIYAASRLQSGVPSKFSGSGSGTDFTLTISSVQPEDLATYYRQHTSKSPVQLVGGTKVEIT

SEQ ID NO: 27143 - DNA, 321 bp, synthetic construct
  misc_feature 1..321: note = Description of Artificial Sequence: Synthetic polynucleotide
  source 1..321: mol_type = other DNA
gacatccagatgacccagtctccatcttccccgcctgcatctgtaggagacagagtcaccatcacttgccgggcaagtcagggcattagaaatgatttaggctggtatcagcagaaaccagggaaagcccctaagcgccttatctatgctgcatccagtttgcaaagtggggtcccatcaaggttcagcggcagtggatctgggacagaattcattctcactatcagcagcctgcagcctgaagattttgcaacttattactgtgtaatgcataatagttaccctcggacgttcggccaagggaccaaggtggaaatcaaa

SEQ ID NO: 27144 - protein, 107 aa, synthetic construct
  REGION 1..107: note = Description of Artificial Sequence: Synthetic polypeptide
DIQMTQSPSSPPASVGDRVTITCRASQGIRNDLGWYQQKPGKAPKRLIYAASSLQSGVPSRFSGSGSGTEFILTISSLQPEDFATYYCVMHNSYPRTFGQGTKVEIK

SEQ ID NO: 27145 - DNA, 321 bp, synthetic construct
  misc_feature 1..321: note = Description of Artificial Sequence: Synthetic polynucleotide
  source 1..321: mol_type = other DNA
gacatccagatgacccagtctccatcttccccgcctgcatctgtaggagacagagtcaccatcacttgccgggcaagtcagggcattagaaatgatttaggctggtatcagcagaaaccagggaaagcccctaagcgccttatctatgctgcatccagtttgcaaagtggggtcccatcaaggttcagcggcagtggatctgggacagaattcattctcacaatcagcagcctgcagcctgaagattttgcaacttattactgtctaatgcattatagttaccctcggacgttcggccaagggaccaaggtggaaatcaaa

SEQ ID NO: 27146 - protein, 107 aa, synthetic construct
  REGION 1..107: note = Description of Artificial Sequence: Synthetic polypeptide
DIQMTQSPSSPPASVGDRVTITCRASQGIRNDLGWYQQKPGKAPKRLIYAASSLQSGVPSRFSGSGSGTEFILTISSLQPEDFATYYCLMHYSYPRTFGQGTKVEIK

SEQ ID NO: 27147 - DNA, 321 bp, synthetic construct
  misc_feature 1..321: note = Description of Artificial Sequence: Synthetic polynucleotide
  source 1..321: mol_type = other DNA
gacatccagatgacccagtgtccatcttccccgcctgcatttgtaggagacagagtcaccatcacttgccgggcaagtcagggcattagaaatgatttaggctggtatcagcagaaaccagggaaagcccctaagcgccttatctatgctgcatccagtttgcaaagtggggtcccatcaaggttcagcggcagtggatctgggacagaattcattctcacaatcagcagcgtgcagcgtgaagattttgcaacttattactgtgtaatgcattatagttaccctcggacgttcggccaagggaccaaggtggaaatcaaa

SEQ ID NO: 27148 - protein, 107 aa, synthetic construct
  REGION 1..107: note = Description of Artificial Sequence: Synthetic polypeptide
DIQMTQCPSSPPAFVGDRVTITCRASQGIRNDLGWYQQKPGKAPKRLIYAASSLQSGVPSRFSGSGSGTEFILTISSVQREDFATYYCVMHYSYPRTFGQGTKVEIK

SEQ ID NO: 27149 - DNA, 321 bp, synthetic construct
  misc_feature 1..321: note = Description of Artificial Sequence: Synthetic polynucleotide
  source 1..321: mol_type = other DNA
gacatccagatgacccagtctccatcctcacagtctgcatctgtaggagacagagtcaccatcacttgtcgggcgagtcagggcattagcaattatttagactggtttcagcagaaaccagggaaagcccctaagtccctgatctattctgcatccaatttgcaaagtggggtcccatcaaagttcagcggcagtagatctgggacagatttcactctcaccatcagcagcctgcagcctgaagattttgcaacttattactgccaacactatagtaattacccgctcactttcggcggagggaccaaggtggagatcaaa

SEQ ID NO: 27150 - protein, 107 aa, synthetic construct
  REGION 1..107: note = Description of Artificial Sequence: Synthetic polypeptide
DIQMTQSPSSQSASVGDRVTITCRASQGISNYLDWFQQKPGKAPKSLIYSASNLQSGVPSKFSGSRSGTDFTLTISSLQPEDFATYYCQHYSNYPLTFGGGTKVEIK

SEQ ID NO: 27151 - DNA, 324 bp, synthetic construct
  misc_feature 1..324: note = Description of Artificial Sequence: Synthetic polynucleotide
  source 1..324: mol_type = other DNA
gaaattgtgttgacgcagtctccaggcaccctgtctttgtctccaggggaaagagccaccctctcctgcagggccagtcagagtattagccgcagccacttagtctggtaccagcagaaacctaaccaggctcccaggctcctcctctatgttacatccagcagggccactggcatcccagacaggtttagtggcagtgggtctgggacagacttcactctcaccatcagaagtctggagcctgaagattttgcaatgtattactgtcagcagtatggtagctcaccgtggacgttcggccaagggaccaaggtggaaatcaaa

SEQ ID NO: 27152 - protein, 108 aa, synthetic construct
  REGION 1..108: note = Description of Artificial Sequence: Synthetic polypeptide
EIVLTQSPGTLSLSPGERATLSCRASQSISRSHLVWYQQKPNQAPRLLLYVTSSRATGIPDRFSGSGSGTDFTLTIRSLEPEDFAMYYCQQYGSSPWTFGQGTKVEIK

SEQ ID NO: 27153 - DNA, 321 bp, synthetic construct
  misc_feature 1..321: note = Description of Artificial Sequence: Synthetic polynucleotide
  source 1..321: mol_type = other DNA
gacatccagatgaccctgtctccatcttccccgcctgcatttgtaggagacagagtcaccatcactcgccgggcaagtcagggcattagaaatgatttaggctggtatcagcagaaaccagggaaagcccctaagcgccttatatgtggtgcatccagtttgcaaagtggggtcccatcaaggttcagcggcagtggatctgggacagaattcattctcacaatcagcagcctgcagcgtgaagattttgcaacttattactgtgtaatgcataatagttaccctcggacgttcggccaagggaccaaggtggaaatcaaa

SEQ ID NO: 27154 - protein, 107 aa, synthetic construct
  REGION 1..107: note = Description of Artificial Sequence: Synthetic polypeptide
DIQMTLSPSSPPAFVGDRVTITRRASQGIRNDLGWYQQKPGKAPKRLICGASSLQSGVPSRFSGSGSGTEFILTISSLQREDFATYYCVMHNSYPRTFGQGTKVEIK

SEQ ID NO: 27155 - DNA, 321 bp, synthetic construct
  misc_feature 1..321: note = Description of Artificial Sequence: Synthetic polynucleotide
  source 1..321: mol_type = other DNA
gacatccagatgacccagtctccatcttccgtgtctgcatctgtaggagacagagtcaccatcacttgtcgggcgagtcagggtattagcagctggttagcctggtatcagcagaaaccagggaaagcccctaagctcctgatctatactgcatccaatttgcaaagtggggtcccatcaaggttcagcggcagtggatctgggacagatttcactctcaccatcagcagcctgcagcctgaagattttgcaacttactattgtcaacaggctaacagtttcccattcactttcggccctgggaccaaagtggatatcaaa

SEQ ID NO: 27156 - protein, 107 aa, synthetic construct
  REGION 1..107: note = Description of Artificial Sequence: Synthetic polypeptide
DIQMTQSPSSVSASVGDRVTITCRASQGISSWLAWYQQKPGKAPKLLIYTASNLQSGVPSRFSGSGSGTDFTLTISSLQPEDFATYYCQQANSFPFTFGPGTKVDIK

SEQ ID NO: 27157 - DNA, 321 bp, synthetic construct
  misc_feature 1..321: note = Description of Artificial Sequence: Synthetic polynucleotide
  source 1..321: mol_type = other DNA
gacatccagatgacccagtctccatcctcactgtctggatctgtaggagacagagtcaccatcacttgtcgggcgagtcagggcattagcaattatttagcctggtttcagcagaaaccagggaaagcccctaaatccctgatctatgctgcatccaatttacaaagtggggtcccatcaaagttcagcggcagtagatctgggacagatttcactctcaccatcagcagcctgcagcctgaagattttgcaacttattactgccaacagtatatgacttacccgctcactttcggcggagggaccagggtggagatcaaa

SEQ ID NO: 27158 - protein, 107 aa, synthetic construct
  REGION 1..107: note = Description of Artificial Sequence: Synthetic polypeptide
DIQMTQSPSSLSGSVGDRVTITCRASQGISNYLAWFQQKPGKAPKSLIYAASNLQSGVPSKFSGSRSGTDFTLTISSLQPEDFATYYCQQYMTYPLTFGGGTRVEIK

SEQ ID NO: 27159 - DNA, 321 bp, synthetic construct
  misc_feature 1..321: note = Description of Artificial Sequence: Synthetic polynucleotide
  source 1..321: mol_type = other DNA
gacatccagatgacccagtctccatcttccgtgtctgcatctgtaggagacagagtcaccatcacttgtcgggcgagtcagggtattagcagctggttagcctggtatcagcagaaaccagggaaagcccctaagctcctgatctatactgcatccaatttgcaaagtggggtcccatcaaggttcagcggcagtggatctgggacagatttcactctcaccatcagcagcctgcagcgtgaagattttgcaacttactattgtcaacaggctaacagtttcccattcactttcggccctgggaccaaagtggatatcaaa

SEQ ID NO: 27160 - protein, 107 aa, synthetic construct
  REGION 1..107: note = Description of Artificial Sequence: Synthetic polypeptide
DIQMTQSPSSVSASVGDRVTITCRASQGISSWLAWYQQKPGKAPKLLIYTASNLQSGVPSRFSGSGSGTDFTLTISSLQREDFATYYCQQANSFPFTFGPGTKVDIK

SEQ ID NO: 27161 - DNA, 321 bp, synthetic construct
  misc_feature 1..321: note = Description of Artificial Sequence: Synthetic polynucleotide
  source 1..321: mol_type = other DNA
gacatccagatgacccagtctccatcttccgtgtctgcatctgtaggagacagagtcaccatcacttgtcgggcgagtcagggtattagcagctggttagcctggtatcagcagaaaccagggaaagcccctaagctcttgatctatactgcatccaatttgcaaagtggggtcccatcaaggttcagcggcagtggatctgggacagatttcactctcaccatcagcagcctgcagcctgaagattttgcaacttactattgtcaacaggctaacagtttcccattcactttcggccgtgggaccaaagtggatatcaaa

SEQ ID NO: 27162 - protein, 107 aa, synthetic construct
  REGION 1..107: note = Description of Artificial Sequence: Synthetic polypeptide
DIQMTQSPSSVSASVGDRVTITCRASQGISSWLAWYQQKPGKAPKLLIYTASNLQSGVPSRFSGSGSGTDFTLTISSLQPEDFATYYCQQANSFPFTFGRGTKVDIK

SEQ ID NO: 27163 - DNA, 339 bp, synthetic construct
  misc_feature 1..339: note = Description of Artificial Sequence: Synthetic polynucleotide
  source 1..339: mol_type = other DNA
gacatcgtgatgacccagtctccagactccctggctgtgtctctgggcgagagggccaccatcaactgcaagtccagccagagtgttttgaaaagttccaaccataggaactacttagcttggtaccaacagaaaccagggcagcctcctcagcttctcatttactgggcatctacccgggaaaccggggtccctgaccgattcagtggcagcgggtctgggacagatttcactctcaccatcagcagccttcaggctgaagatgtgtcagtttattcctgtcagcaatattcttctattccgtggacgttcggccaagggaccaaggtggaaatcaat

SEQ ID NO: 27164 - protein, 113 aa, synthetic construct
  REGION 1..113: note = Description of Artificial Sequence: Synthetic polypeptide
DIVMTQSPDSLAVSLGERATINCKSSQSVLKSSNHRNYLAWYQQKPGQPPQLLIYWASTRETGVPDRFSGSGSGTDFTLTISSLQAEDVSVYSCQQYSSIPWTFGQGTKVEIN

SEQ ID NO: 27165 - DNA, 321 bp, synthetic construct
  misc_feature 1..321: note = Description of Artificial Sequence: Synthetic polynucleotide
  source 1..321: mol_type = other DNA
gacatccagatgacccagtctccatcctcactgtctgcatctgtaggagacagagtcaccatcacttgtcgggcgagtcagggcattagcaattatttggcctggtttcagcagaaaccagggaaagcccctaagtccctgatctacgctgcatccagtttgcaaagtggggtcccatcaaagttcagcggcagtggatctgggacagatttcactctcaccatcagtagcctgcagcctgaagattttgcaacttattactgcctatattatcttaattatccgctcactttcggcggagggaccaaggtggagatcaaa

SEQ ID NO: 27166 - protein, 107 aa, synthetic construct
  REGION 1..107: note = Description of Artificial Sequence: Synthetic polypeptide
DIQMTQSPSSLSASVGDRVTITCRASQGISNYLAWFQQKPGKAPKSLIYAASSLQSGVPSKFSGSGSGTDFTLTISSLQPEDFATYYCLYYLNYPLTFGGGTKVEIK

SEQ ID NO: 27167 - DNA, 321 bp, synthetic construct
  misc_feature 1..321: note = Description of Artificial Sequence: Synthetic polynucleotide
  source 1..321: mol_type = other DNA
gacatccagatgacccattctccatcctccctgtctgcatctgtaggagacagagtcaccatcacttgccgggcaagtcagaacattagtaattatgttaattggtatcagcagaaaccagggaaagcccctaagttcctgatctatactgcatcgagtttgcaaagtggggtctcgtcacggttcagtggcagtggatctgggacagatttcactctcaccatcagcagtgtgcaccgtgacgattttgcaatttactattgtcagcagtattactttaccccattcactttcggccgtgggaccaaagtggatatcaaa

SEQ ID NO: 27168 - protein, 107 aa, synthetic construct
  REGION 1..107: note = Description of Artificial Sequence: Synthetic polypeptide
DIQMTHSPSSLSASVGDRVTITCRASQNISNYVNWYQQKPGKAPKFLIYTASSLQSGVSSRFSGSGSGTDFTLTISSVHRDDFAIYYCQQYYFTPFTFGRGTKVDIK

SEQ ID NO: 27169 - DNA, 324 bp, synthetic construct
  misc_feature 1..324: note = Description of Artificial Sequence: Synthetic polynucleotide
  source 1..324: mol_type = other DNA
gaaattgtgttgacgcagtctccaggcaccctgtctttgtctccaggggaaagagccaccctctcctgcagggccagtcagagtgtttacagcaactacttagcctggtaccagcagaaacctggccaggctcccaggctcctcatctatggtgcatcaagcagggccactggcatcccagacaggttcggtggcagtgggtctgggacagacttcactctcgccataagcagactggagcctgaagactttacaatatattactgtcagcagtatgaagactcaccgtggacgttcggccaagggaccaaggtggaaatcaaa

SEQ ID NO: 27170 - protein, 108 aa, synthetic construct
  REGION 1..108: note = Description of Artificial Sequence: Synthetic polypeptide
EIVLTQSPGTLSLSPGERATLSCRASQSVYSNYLAWYQQKPGQAPRLLIYGASSRATGIPDRFGGSGSGTDFTLAISRLEPEDFTIYYCQQYEDSPWTFGQGTKVEIK

SEQ ID NO: 27171 - DNA, 321 bp, synthetic construct
  misc_feature 1..321: note = Description of Artificial Sequence: Synthetic polynucleotide
  source 1..321: mol_type = other DNA
gacatccagatgacccagtctccatcttccgtgtctgcatctgtaggagacagagtcaccatcacttgtcgggcgagtcagggtattagcagctggttagcctggtatcagcagaaaccagggaaagcccctaagctcctgatctatactgcatccaatttgcaaagtggggtcccatcaaggttcagcggcagtggatctgggacagatttcactctcaccatcagcagcgtgcagcctgaagattttgcaacttactattgtcaacaggctaacagtttcccattcactttcggccctgggaccaaagtggatatcaaa

SEQ ID NO: 27172 - protein, 107 aa, synthetic construct
  REGION 1..107: note = Description of Artificial Sequence: Synthetic polypeptide
DIQMTQSPSSVSASVGDRVTITCRASQGISSWLAWYQQKPGKAPKLLIYTASNLQSGVPSRFSGSGSGTDFTLTISSVQPEDFATYYCQQANSFPFTFGPGTKVDIK

SEQ ID NO: 27173 - DNA, 321 bp, synthetic construct
  misc_feature 1..321: note = Description of Artificial Sequence: Synthetic polynucleotide
  source 1..321: mol_type = other DNA
gacatccagatgacccattctccatcttccctgtctgcatctgtaggagacagagtcaccatcacttgccgggcaagtcagaacattagtaattatgttaattggtatcagcagaaaccagggaaagcccctaagttcctgatctatattgcatcgagtttgcaaagtggggtctcgtcacggttcagtggcagtggatctgggacagatttcactctcaccatcagcagtgtgcaccgtgacgattttgcaatttactactgtcagcagtattactttaccccattcactttcggccgtgggaccaaagtggatatcaaa

SEQ ID NO: 27174 - protein, 107 aa, synthetic construct
  REGION 1..107: note = Description of Artificial Sequence: Synthetic polypeptide
DIQMTHSPSSLSASVGDRVTITCRASQNISNYVNWYQQKPGKAPKFLIYIASSLQSGVSSRFSGSGSGTDFTLTISSVHRDDFAIYYCQQYYFTPFTFGRGTKVDIK

SEQ ID NO: 27175 - DNA, 321 bp, synthetic construct
  misc_feature 1..321: note = Description of Artificial Sequence: Synthetic polynucleotide
  source 1..321: mol_type = other DNA
gacatccagatgacccagtctccatcctcactgtctgcatctgtaggagacagagtcaccatcacttgtcgggcgagtcagggcattagcaattatttggcctggtttcagcagaaaccagggaaagcccctaagtccctgatctacgctgcatccagtttgcaaagtggggtcccatcaaagttcagcggcagtggatctgggacagatttcactctcaccatcagcagcctgcagcctgaagattttgcaacttattactgcctacattatcttaattacccgctcactttcggcggagggaccagggtggagatcaaa

SEQ ID NO: 27176 - protein, 107 aa, synthetic construct
  REGION 1..107: note = Description of Artificial Sequence: Synthetic polypeptide
DIQMTQSPSSLSASVGDRVTITCRASQGISNYLAWFQQKPGKAPKSLIYAASSLQSGVPSKFSGSGSGTDFTLTISSLQPEDFATYYCLHYLNYPLTFGGGTRVEIK

SEQ ID NO: 27177 - DNA, 321 bp, synthetic construct
  misc_feature 1..321: note = Description of Artificial Sequence: Synthetic polynucleotide
  source 1..321: mol_type = other DNA
gacatccagatgactcagtgtccatcttccgtgtctgcatctgtaggagacagagtcaccatcacttgtcgggtgagtcagggtattagcagctggttagcctggtatcagcagaaaccagggaaagcccttaagctcgtgatctatactgcatccaatttgcaaagtggggtcccatcaaggttcagcggcagtggatctgggacagatttcactctcaccatcagcagcgtgcagcgtgaagattttgcaacttactattgtcaacaggataacagtttcccattcactttcggccgagggaccaaagtggatatcaaa

SEQ ID NO: 27178 - protein, 107 aa, synthetic construct
  REGION 1..107: note = Description of Artificial Sequence: Synthetic polypeptide
DIQMTQCPSSVSASVGDRVTITCRVSQGISSWLAWYQQKPGKALKLVIYTASNLQSGVPSRFSGSGSGTDFTLTISSVQREDFATYYCQQDNSFPFTFGRGTKVDIK

SEQ ID NO: 27179 - DNA, 339 bp, synthetic construct
  misc_feature 1..339: note = Description of Artificial Sequence: Synthetic polynucleotide
  source 1..339: mol_type = other DNA
gacatcgtgatgacccagtctccagactccctggctgtgtctctgggcgagagggccaccatcaactgcaagtccagccagagtattttactcagctccaacaataagaactacttagcttggcaccagcagaaaccaggacagcctcctaagctgctcatttactgggcatctacccgggaatccggggtccctgaccgattcagtggcagcgggtctgggacagatttcactctcaccatcagcagcctgcaggctgaagatgtggcagtttattactgtctgcaatattttagtactccgtggacgttcggccaagggaccaaggtggaaatcaaa

SEQ ID NO: 27180 - protein, 113 aa, synthetic construct
  REGION 1..113: note = Description of Artificial Sequence: Synthetic polypeptide
DIVMTQSPDSLAVSLGERATINCKSSQSILLSSNNKNYLAWHQQKPGQPPKLLIYWASTRESGVPDRFSGSGSGTDFTLTISSLQAEDVAVYYCLQYFSTPWTFGQGTKVEIK

SEQ ID NO: 27181 - DNA, 321 bp, synthetic construct
  misc_feature 1..321: note = Description of Artificial Sequence: Synthetic polynucleotide
  source 1..321: mol_type = other DNA
gacatccagatgacccagtctccatcctcactgtctgcatctgtaggagacagagtcaccatcacttgtcgggcgagtcagggcattagtaattatttggcctggtttcagcagaaaccagggaaagcccctaagtccctgatctacgctgcatccaatttgcaaagtggggtcccatcaaagttcagcggcagtgggtctgggacagatttcactctcaccatcagcagcctgcagcctgaagattttgcaacttattactgcctacattatcttaattacccactcactttcggcggagggaccaaggtggagatcaaa

SEQ ID NO: 27182 - protein, 107 aa, synthetic construct
  REGION 1..107: note = Description of Artificial Sequence: Synthetic polypeptide
DIQMTQSPSSLSASVGDRVTITCRASQGISNYLAWFQQKPGKAPKSLIYAASNLQSGVPSKFSGSGSGTDFTLTISSLQPEDFATYYCLHYLNYPLTFGGGTKVEIK

SEQ ID NO: 27183 - DNA, 321 bp, synthetic construct
  misc_feature 1..321: note = Description of Artificial Sequence: Synthetic polynucleotide
  source 1..321: mol_type = other DNA
gacatccagatgacccagtctccatcctccctgtctgcatctgtaggagacagagtcaccatcacttgccgggcaagtcagggcattgaaaatgatttaggctggtatcagcagaagccagggaaagcccctaagcgcctgatctatgctgcatccagtttgcaaagtggggtcccatcaaggttcagcggcagtggatctgggacagaattcactctcacaatcagcagcctgcagcctgaagattttgcaacttattactgtctacagcataatagttacccgctcactttcggcggtgggaccaaggtggagatcaaa

SEQ ID NO: 27184 - protein, 107 aa, synthetic construct
  REGION 1..107: note = Description of Artificial Sequence: Synthetic polypeptide
DIQMTQSPSSLSASVGDRVTITCRASQGIENDLGWYQQKPGKAPKRLIYAASSLQSGVPSRFSGSGSGTEFTLTISSLQPEDFATYYCLQHNSYPLTFGGGTKVEIK

SEQ ID NO: 27185 - DNA, 321 bp, synthetic construct
  misc_feature 1..321: note = Description of Artificial Sequence: Synthetic polynucleotide
  source 1..321: mol_type = other DNA
gacatccagatgacccagtctccatcctccctgtctgcatctgtgggagacagagtcaccatcacttgccgggcaagtcagggcattagtaatgatttaggctggtatcagcagaagccagggaaagcccctaagcgcctgatctatgctgcatccagtttgcaaagtggggtcccatcaaggttcagcggcagtggatctgggacagaattcactctcacaatcagcagcctgcagcctgaagattttgcaacttatcactgtctacagcataatagttatcctcctactttcggcggagggaccaaggtggagatcaaa

SEQ ID NO: 27186 - protein, 107 aa, synthetic construct
  REGION 1..107: note = Description of Artificial Sequence: Synthetic polypeptide
DIQMTQSPSSLSASVGDRVTITCRASQGISNDLGWYQQKPGKAPKRLIYAASSLQSGVPSRFSGSGSGTEFTLTISSLQPEDFATYHCLQHNSYPPTFGGGTKVEIK

SEQ ID NO: 27187 - DNA, 321 bp, synthetic construct
  misc_feature 1..321: note = Description of Artificial Sequence: Synthetic polynucleotide
  source 1..321: mol_type = other DNA
gccatccagatgacccagtctccatcctccctgtctgcatctgtaggagacagagtcaccatcacttgccgggcaagtcagggcattagagatgatttaggctggtatcagcagaaaccagggaaagcccctaagcgcctgatctatgctgcatccagtttgcaaagtggggtcccgtcaaggatcagcggcagtggatctgggacagaattcactctcacaatcagcagcctgcagcctgaagattttgcaatttattactgtctacagcattatagttaccctcggacgttcggccaagggaccaaggtggaaatcaaa

SEQ ID NO: 27188 - protein, 107 aa, synthetic construct
  REGION 1..107: note = Description of Artificial Sequence: Synthetic polypeptide
AIQMTQSPSSLSASVGDRVTITCRASQGIRDDLGWYQQKPGKAPKRLIYAASSLQSGVPSRISGSGSGTEFTLTISSLQPEDFAIYYCLQHYSYPRTFGQGTKVEIK

SEQ ID NO: 27189 - DNA, 336 bp, synthetic construct
  misc_feature 1..336: note = Description of Artificial Sequence: Synthetic polynucleotide
  source 1..336: mol_type = other DNA
gatattgtgatgacccagactccactctctctgtccgtcacccctggacagccggcctccatctcctgcaagtctggtcagagcctcctgcatagtgatggaaagacctttttgtcttggtacctgcagaagccaggccagcctccacagctcctgatctatgaaatttccaaccggttctctggagtgccagataggttcagtggcagcgggtcagggacagatttcacactgaaaatcagccgggtggaggctgaggatgttgggattttttactgcatgcaaagtacacagcttcctcggacgttcggccaagggaccaaggtggaaatcaaa

SEQ ID NO: 27190 - protein, 112 aa, synthetic construct
  REGION 1..112: note = Description of Artificial Sequence: Synthetic polypeptide
DIVMTQTPLSLSVTPGQPASISCKSGQSLLHSDGKTFLSWYLQKPGQPPQLLIYEISNRFSGVPDRFSGSGSGTDFTLKISRVEAEDVGIFYCMQSTQLPRTFGQGTKVEIK

SEQ ID NO: 27191 - DNA, 321 bp, synthetic construct
  misc_feature 1..321: note = Description of Artificial Sequence: Synthetic polynucleotide
  source 1..321: mol_type = other DNA
gacatccagatgacccagtctccatcctccctgtctgcatctgtaggagacagagtcaccatcacttgccgggcaagtcaggacattagaaatgatttaggctggtatcagcagaaaccagggaaagcccctaagcgcctgatctatgctacatccagtttgcaaagtggggtcccatcaaggttcagcggcagtggatctgggacagaattcactctcacaatcagcagcctgcagcctgaagattttgcaacttattactgtctacagcataatagttacccgctcactttcggcggagggaccaaggtggagatcaaa

SEQ ID NO: 27192 - protein, 107 aa, synthetic construct
  REGION 1..107: note = Description of Artificial Sequence: Synthetic polypeptide
DIQMTQSPSSLSASVGDRVTITCRASQDIRNDLGWYQQKPGKAPKRLIYATSSLQSGVPSRFSGSGSGTEFTLTISSLQPEDFATYYCLQHNSYPLTFGGGTKVEIK

SEQ ID NO: 27193 - DNA, 321 bp, synthetic construct
  misc_feature 1..321: note = Description of Artificial Sequence: Synthetic polynucleotide
  source 1..321: mol_type = other DNA
gacatccagatgacccagtctccatcctccctgtctgcatctgtaggagacagagtcaccatcacttgccgggcaagtcagggcattagaaatgatttaggctggtatcaacagaaaccagggaaagcccctgagcgcctgatctatgctgcatccagtttgcaaagtggggtcccatcaaggttcagcggcagtggatctgggacagaattcactctcacaatcagcagcctgcagcctgaagattttgcaacttattactgtcttcagcattataattaccctcgggcgttcggccaagggaccaaggtggaaatcaaa

SEQ ID NO: 27194 - protein, 107 aa, synthetic construct
  REGION 1..107: note = Description of Artificial Sequence: Synthetic polypeptide
DIQMTQSPSSLSASVGDRVTITCRASQGIRNDLGWYQQKPGKAPERLIYAASSLQSGVPSRFSGSGSGTEFTLTISSLQPEDFATYYCLQHYNYPRAFGQGTKVEIK

SEQ ID NO: 27195 - DNA, 339 bp, synthetic construct
  misc_feature 1..339: note = Description of Artificial Sequence: Synthetic polynucleotide
  source 1..339: mol_type = other DNA
gacatcgtgatgacccagtctccagactccctggctgtgtctctgggcgagagggccaccatcaactgcaagtccagccagagtgttttatacagctccaacaatttcaactacttaacttggtatcagcagaaaccaggacagcctcctaagttgctcatttactgggcatctacccgggaatccggggtccctgaccgattcagtggcagcgggtctgggacagatttcactctcaccatcaacagcctgcaggctgaagatgtggcagtttattactgtcagcaatattatagtactcctccgacgttcggccaagggaccaaggtggaaatcaaa

SEQ ID NO: 27196 - protein, 113 aa, synthetic construct
  REGION 1..113: note = Description of Artificial Sequence: Synthetic polypeptide
DIVMTQSPDSLAVSLGERATINCKSSQSVLYSSNNFNYLTWYQQKPGQPPKLLIYWASTRESGVPDRFSGSGSGTDFTLTINSLQAEDVAVYYCQQYYSTPPTFGQGTKVEIK

SEQ ID NO: 27197 - DNA, 321 bp, synthetic construct
  misc_feature 1..321: note = Description of Artificial Sequence: Synthetic polynucleotide
  source 1..321: mol_type = other DNA
gacatccagatgacccagtctccatcttccgtgtctgcatctgtaggagacagagtcaccatcacttgtcgggcgagtcagggtattagcagctggttagcctggtatcagcagaaaccagggaaagcccctaagctcctgatctatgctgcatccagtttgcaaagtggggtcccatcaaggttcagcggcagtggatctgggacagatttcactctcaccatcagcagcctgcagcctgaagattttgcaacttactattgtcaacaggctaacagtttcccgtggacgttcggcccagggaccaaggtggaaatcaaa

SEQ ID NO: 27198 - protein, 107 aa, synthetic construct
  REGION 1..107: note = Description of Artificial Sequence: Synthetic polypeptide
DIQMTQSPSSVSASVGDRVTITCRASQGISSWLAWYQQKPGKAPKLLIYAASSLQSGVPSRFSGSGSGTDFTLTISSLQPEDFATYYCQQANSFPWTFGPGTKVEIK

SEQ ID NO: 27199 - DNA, 336 bp, synthetic construct
  misc_feature 1..336: note = Description of Artificial Sequence: Synthetic polynucleotide
  source 1..336: mol_type = other DNA
gatattgtgatgacccagactccactctctctgtccgtcacccctggacagccggcctccatctcctgcaagtctagtcagagcctcctgcatagtgatggaaagacctttttgtattggttcctgcagaagccaggccagcctccacagctcctgatctatgaaatttccaaccggttctctggagtgccagataggttcagtggcagcgggtcagggacagatttcacactgaaaatcagccgggtggaggctgaggatgttgggatttattactgcatgcaaagtacacagcttcctcggacgttcggccaagggaccaaggtggaaatcaaa

SEQ ID NO: 27200 - protein, 112 aa, synthetic construct
  REGION 1..112: note = Description of Artificial Sequence: Synthetic polypeptide
DIVMTQTPLSLSVTPGQPASISCKSSQSLLHSDGKTFLYWFLQKPGQPPQLLIYEISNRFSGVPDRFSGSGSGTDFTLKISRVEAEDVGIYYCMQSTQLPRTFGQGTKVEIK

SEQ ID NO: 27201 - DNA, 339 bp, synthetic construct
  misc_feature 1..339: note = Description of Artificial Sequence: Synthetic polynucleotide
  source 1..339: mol_type = other DNA
gacatcgtgatgacccagtctccagactccctggctgtttctctgggcgagagggccgccatcaactgcaagtccagccagagtgttttatacagctccaacaataagaactacttagcttggtaccagcagaaaccaggacagcctcctaagctgctcatttattggtcgtctacccggaaatccggggtccctgaccgattcagtggcagcgggtctgggacagatttcactctcaccatcagcagcctgcaggctgaagatgtggcagtttattactgtcagcaatattttagtactcctccgacgttcggccaagggaccaaggtggaaatcaaa

SEQ ID NO: 27202 - protein, 113 aa, synthetic construct
  REGION 1..113: note = Description of Artificial Sequence: Synthetic polypeptide
DIVMTQSPDSLAVSLGERAAINCKSSQSVLYSSNNKNYLAWYQQKPGQPPKLLIYWSSTRKSGVPDRFSGSGSGTDFTLTISSLQAEDVAVYYCQQYFSTPPTFGQGTKVEIK

SEQ ID NO: 27203 - DNA, 339 bp, synthetic construct
  misc_feature 1..339: note = Description of Artificial Sequence: Synthetic polynucleotide
  source 1..339: mol_type = other DNA
gacatcgtgatgacccagtctccagactccctggctgcgtctctgggcgagagggccaccatcacctgcaagtccagccagagtgttttatacaattccaacaataagaactacttagcttggtaccagcagaaaccaggacagcctcctaagctgctcatttactgggcatctacccgggagtccggggtccctgaccgattcagtggcagcgggtctgggacagatttcactctcaccatcagcagcctgcaggctgaagatgtggcaatttattactgtcaacaatattatattaatccgtgcagttttggccaggggaccaggctggagatcaaa

SEQ ID NO: 27204 - protein, 113 aa, synthetic construct
  REGION 1..113: note = Description of Artificial Sequence: Synthetic polypeptide
DIVMTQSPDSLAASLGERATITCKSSQSVLYNSNNKNYLAWYQQKPGQPPKLLIYWASTRESGVPDRFSGSGSGTDFTLTISSLQAEDVAIYYCQQYYINPCSFGQGTRLEIK

SEQ ID NO: 27205 - DNA, 321 bp, synthetic construct
  misc_feature 1..321: note = Description of Artificial Sequence: Synthetic polynucleotide
  source 1..321: mol_type = other DNA
gacatcctgatgacccagtctccatcctccctgtctgcatctgtaggagacagagtcaccatcacttgccgggcaagtcagggcattagaaatgatttaggctggtatcagcagaaaccagggaaagcccctaagcgcctgatctatgctgcatccagtttacaaagtggggtcccatcgcggttcagcggcagtggatctgggacagaattcactctcacaatcagcagcctgcagcctgaagattttgcaacttattactgtctacaacataatagttacccgctcacttttggcggagggaccaaggtggagatcaaa

SEQ ID NO: 27206 - protein, 107 aa, synthetic construct
  REGION 1..107: note = Description of Artificial Sequence: Synthetic polypeptide
DILMTQSPSSLSASVGDRVTITCRASQGIRNDLGWYQQKPGKAPKRLIYAASSLQSGVPSRFSGSGSGTEFTLTISSLQPEDFATYYCLQHNSYPLTFGGGTKVEIK

SEQ ID NO: 27207 - DNA, 336 bp, synthetic construct
  misc_feature 1..336: note = Description of Artificial Sequence: Synthetic polynucleotide
  source 1..336: mol_type = other DNA
gattttgtgatgacccagactccactctctctgtccgtcacccctggacagccggcctccatctcctgcaagtctagtcagagcctcctgcatagtgatggaaagacctttttgtattggtacctgcagaagccaggccagcctccacagctcctgatctatgaaatttccaaccggttctctggagtgccagataggttcagtggcagcgggtcagggacagatttcacactgaaaatcagccgggtggaggctgaggatgttgggatttattactgcatgcaaagtacacagcttcctcggacgttcggccaagggaccaaggtggaaatcaaa

SEQ ID NO: 27208 - protein, 112 aa, synthetic construct
  REGION 1..112: note = Description of Artificial Sequence: Synthetic polypeptide
DFVMTQTPLSLSVTPGQPASISCKSSQSLLHSDGKTFLYWYLQKPGQPPQLLIYEISNRFSGVPDRFSGSGSGTDFTLKISRVEAEDVGIYYCMQSTQLPRTFGQGTKVEIK

SEQ ID NO: 27209 - DNA, 339 bp, synthetic construct
  misc_feature 1..339: note = Description of Artificial Sequence: Synthetic polynucleotide
  source 1..339: mol_type = other DNA
aacatcgtgatgacccagtctccagactccctggctgtgtctctggacgagagggccaccatcaactgcaagtccagccagagtgttttatccagctccaacaatcacaactacttagcttggtaccagcagaaaccaggacagcctcctaagatgctcatttactgggcatctacccgggaatccggggtccctgaccgattcagtggcagcgggtctgggacagatttcactctcaccatcagcagcctgcaggctgaagatgtggcagtttattactgtcagcaatattatactactccgtgcagttttggccaggggaccaagctggagatcaaa

SEQ ID NO: 27210 - protein, 113 aa, synthetic construct
  REGION 1..113: note = Description of Artificial Sequence: Synthetic polypeptide
NIVMTQSPDSLAVSLDERATINCKSSQSVLSSSNNHNYLAWYQQKPGQPPKMLIYWASTRESGVPDRFSGSGSGTDFTLTISSLQAEDVAVYYCQQYYTTPCSFGQGTKLEIK

SEQ ID NO: 27211 - DNA, 336 bp, synthetic construct
  misc_feature 1..336: note = Description of Artificial Sequence: Synthetic polynucleotide
  source 1..336: mol_type = other DNA
gatattgtgatgacccagactccactctctctgtccgtcacccctggacagccggcctccatctcctgcaagtctagtcagagcctcctgcatagtgatggaaagacctttttgtattggtacctgcagaagccaggccagcctccacagctcctgatctatgaaatttccaaccggttctctggagtgccagataggttcagtggcagcgggtcagggacagatttcacactgaaaatcagccgggtggaggctgaggatgttgggatttattactgcatgcaaagtacacagcttcctcggacgttcggccaagggaccaaggtggaaatcaaa

SEQ ID NO: 27212 - protein, 112 aa, synthetic construct
  REGION 1..112: note = Description of Artificial Sequence: Synthetic polypeptide
DIVMTQTPLSLSVTPGQPASISCKSSQSLLHSDGKTFLYWYLQKPGQPPQLLIYEISNRFSGVPDRFSGSGSGTDFTLKISRVEAEDVGIYYCMQSTQLPRTFGQGTKVEIK

SEQ ID NO: 27213 - DNA, 321 bp, synthetic construct
  misc_feature 1..321: note = Description of Artificial Sequence: Synthetic polynucleotide
  source 1..321: mol_type = other DNA
gacatccagatgacccagtctccatcctccctgtctgcatctgtaggagacagagtcaccatcacttgccgggcaagtcagggcattagagatgatttaggctggtatcagcagataccagggaaagcccctaagcgcctgatctatgctgcatccagtttgcaaagtggggtcccatcaaggttcagcggcagtggatctgggacagaattcactctcacaatcagcagcctgcagcctgaagattttgcaacttattactgtctgcagcattatagttaccctcggacgttcggccaagggaccaaggtggaaatcaaa

SEQ ID NO: 27214 - protein, 107 aa, synthetic construct
  REGION 1..107: note = Description of Artificial Sequence: Synthetic polypeptide
DIQMTQSPSSLSASVGDRVTITCRASQGIRDDLGWYQQIPGKAPKRLIYAASSLQSGVPSRFSGSGSGTEFTLTISSLQPEDFATYYCLQHYSYPRTFGQGTKVEIK

SEQ ID NO: 27215 - DNA, 327 bp, synthetic construct
  misc_feature 1..327: note = Description of Artificial Sequence: Synthetic polynucleotide
  source 1..327: mol_type = other DNA
gaaattgtgctgacgcagtctccaggcaccctgtctttgtctccaggggaaagagccaccctctcctgcagggccagtcagaatcttagcagcagctacttaggctggtaccagcagaaacctggccaggctcccagactcctcatctatgatacatccagcagggccactggcatcccagacaggttcagtggcagtgggtctgggacagacttcactctcaccatcagcagactggagcctgaagattttgcagtgtattactgtcaggagtatggtagctcactcatgtgcagttttggccaggggaccaagctggagatcaaa

SEQ ID NO: 27216 - protein, 109 aa, synthetic construct
  REGION 1..109: note = Description of Artificial Sequence: Synthetic polypeptide
EIVLTQSPGTLSLSPGERATLSCRASQNLSSSYLGWYQQKPGQAPRLLIYDTSSRATGIPDRFSGSGSGTDFTLTISRLEPEDFAVYYCQEYGSSLMCSFGQGTKLEIK

SEQ ID NO: 27217 - DNA, 339 bp, synthetic construct
  misc_feature 1..339: note = Description of Artificial Sequence: Synthetic polynucleotide
  source 1..339: mol_type = other DNA
gacatcgtgatgacccagtctccagactccctggctgtgtctctgggcgagagggccaccatcaactgcaagtccagccagagtgttttatatagctccaacaataagaactacttagcttggtaccagcagaaaccaggacagcctcctaaactactcatttactgggcatctacccgggaatccggggtccctgaccgattcactggcagcgggtctgggacagatttcactctcaccatcagctgcgtgcagccggaagatgtggcagtttattactgtcaccaatatcataattctcctcccactttcggccacgggaccgaagtggatatcaaa

SEQ ID NO: 27218 - protein, 113 aa, synthetic construct
  REGION 1..113: note = Description of Artificial Sequence: Synthetic polypeptide
DIVMTQSPDSLAVSLGERATINCKSSQSVLYSSNNKNYLAWYQQKPGQPPKLLIYWASTRESGVPDRFTGSGSGTDFTLTISCVQPEDVAVYYCHQYHNSPPTFGHGTEVDIK

SEQ ID NO: 27219 - DNA, 336 bp, synthetic construct; identical to SEQ ID NO: 27211
  misc_feature 1..336: note = Description of Artificial Sequence: Synthetic polynucleotide
  source 1..336: mol_type = other DNA

SEQ ID NO: 27220 - protein, 112 aa, synthetic construct; identical to SEQ ID NO: 27212
  REGION 1..112: note = Description of Artificial Sequence: Synthetic polypeptide

SEQ ID NO: 27221 - DNA, 339 bp, synthetic construct
  misc_feature 1..339: note = Description of Artificial Sequence: Synthetic polynucleotide
  source 1..339: mol_type = other DNA
gacatcgtgatgacccagtctccagactccctggctgtgtctctgggcgagagggccaccatcaactgcaagtccagccagaatgttttatacaactccaacaataacaactacttagcttggtaccagcagaaaccaggacagcctcctaacctgctcatttactgggcatctacccgggaatccggggtccctgaccgattcagtggcagcgggtctgggacagatttcactctcaccatcagcagcctgcaggctgaagatgtggcagtttatttctgtcagcaatattatagttctcctccgacgttcggccaagggaccaaggtggaaatcaac

SEQ ID NO: 27222 - protein, 113 aa, synthetic construct
  REGION 1..113: note = Description of Artificial Sequence: Synthetic polypeptide
DIVMTQSPDSLAVSLGERATINCKSSQNVLYNSNNNNYLAWYQQKPGQPPNLLIYWASTRESGVPDRFSGSGSGTDFTLTISSLQAEDVAVYFCQQYYSSPPTFGQGTKVEIN

SEQ ID NO: 27223 - DNA, 321 bp, synthetic construct
  misc_feature 1..321: note = Description of Artificial Sequence: Synthetic polynucleotide
  source 1..321: mol_type = other DNA
gacatccagatgacccagtctccatcctccctgtctgcatctgtaggagacagagtcatcatcacttgccgggcaagtcagggcatgagaaaagatttaggctggtatcagcagaaaccagggaaagcccctaagcgcctgatctatgctgcaaccagtttgcaaagtggggtcccatcaaggttcagcggcagtggatctgggacagaattcactctcacaatcagcagcctgcagcctgaagattttgcaacttattactgtctacagcataatagttatccattcactttcggccctgggaccaaagtggatatcaaa

SEQ ID NO: 27224 - protein, 107 aa, synthetic construct
  REGION 1..107: note = Description of Artificial Sequence: Synthetic polypeptide
DIQMTQSPSSLSASVGDRVIITCRASQGMRKDLGWYQQKPGKAPKRLIYAATSLQSGVPSRFSGSGSGTEFTLTISSLQPEDFATYYCLQHNSYPFTFGPGTKVDIK

SEQ ID NO: 27225 - DNA, 321 bp, synthetic construct
  misc_feature 1..321: note = Description of Artificial Sequence: Synthetic polynucleotide
  source 1..321: mol_type = other DNA
gacatccagatgacccagtctccatcctccctgtctgcatctgtaggagacagagtcaccatcacttgccgggcaagtcagggcattagaaatgatttaggctggtatcagcagaaaccagggaaagcccctaagcgcctgatctatgctgcatccagtttacaaagtggggtcccatcaaggttcagcggcagtggatctgggacagaattcactctcacaatcagcagcctgcagcctgaagattttgcaacttattgctgtcttcagcataatacttacccattcactttcggccctgggaccaaagtggatatcaaa

SEQ ID NO: 27226 - protein, 107 aa, synthetic construct
  REGION 1..107: note = Description of Artificial Sequence: Synthetic polypeptide
DIQMTQSPSSLSASVGDRVTITCRASQGIRNDLGWYQQKPGKAPKRLIYAASSLQSGVPSRFSGSGSGTEFTLTISSLQPEDFATYCCLQHNTYPFTFGPGTKVDIK

SEQ ID NO: 27227 - DNA, 324 bp, synthetic construct
  misc_feature 1..324: note = Description of Artificial Sequence: Synthetic polynucleotide
  source 1..324: mol_type = other DNA
gaaattgtgttgacgcagtctccaggcaccctgtctttgtctccaggggaaagagccaccctctcctgcagggccagtcagagtgtttacagcagctacttagcctggtaccagcagaaacctggccaggctcccaggctcctcatctatggtgcatccagcagggccactggcatcccagacaggttcagtggcagtgggtctgggacagacttcactctcaccatcagcagactggagcctgaagattttgcagtatattactgtcagcagtatggtacctcacctcggacgttcggccaagggaccaaggtggaaatcaaa

SEQ ID NO: 27228 - protein, 108 aa, synthetic construct
  REGION 1..108: note = Description of Artificial Sequence: Synthetic polypeptide
EIVLTQSPGTLSLSPGERATLSCRASQSVYSSYLAWYQQKPGQAPRLLIYGASSRATGIPDRFSGSGSGTDFTLTISRLEPEDFAVYYCQQYGTSPRTFGQGTKVEIK

SEQ ID NO: 27229 - DNA, 321 bp, synthetic construct
  misc_feature 1..321: note = Description of Artificial Sequence: Synthetic polynucleotide
  source 1..321: mol_type = other DNA
gacatccagatgacccagtctccatcctccctgtctgcatctgtaggagacagagtcaccatcacttgccgggcaagtcagggcattagaaatgatttaggctggtatcagcagaaaccagggaaagcccctaagcgcctgatatatgctgcatccagtttgctaggtggtgtcccatcaagattcagcggcagtggatctgggacagaattcactctcacaatcagcagcctgcagcctgaagattttgcaacttattactgtctacaacataatagttacccattcactttcggccctgggaccaaggtggatatcaaa

SEQ ID NO: 27230 - protein, 107 aa, synthetic construct
  REGION 1..107: note = Description of Artificial Sequence: Synthetic polypeptide
DIQMTQSPSSLSASVGDRVTITCRASQGIRNDLGWYQQKPGKAPKRLIYAASSLLGGVPSRFSGSGSGTEFTLTISSLQPEDFATYYCLQHNSYPFTFGPGTKVDIK

SEQ ID NO: 27231 - DNA, 339 bp, synthetic construct
  misc_feature 1..339: note = Description of Artificial Sequence: Synthetic polynucleotide
  source 1..339: mol_type = other DNA
gacatcgtgatgacccagtctccagattccctggctgtgtctctgggcgagagggccaccatcaactgcaagtccagccagagtgttttatacagctccaacaataacaactacttagcttggtaccaacaaaaaccaggacagcctcctaagctgctcattttctgggcatctacccgggaatccggggtccctgaccgattcagtggcagcgggtctgggacagatttcactctcaccatcagcagcctgcaggctgaagatgtggcagtttattactgtcaacactccaagagtattcctggtaagtttgggcaggggatcaaactggagatccaa

SEQ ID NO: 27232 - protein, 113 aa, synthetic construct
  REGION 1..113: note = Description of Artificial Sequence: Synthetic polypeptide
DIVMTQSPDSLAVSLGERATINCKSSQSVLYSSNNNNYLAWYQQKPGQPPKLLIFWASTRESGVPDRFSGSGSGTDFTLTISSLQAEDVAVYYCQHSKSIPGKFGQGIKLEIQ

SEQ ID NO: 27233 - DNA, 339 bp, synthetic construct
  misc_feature 1..339: note = Description of Artificial Sequence: Synthetic polynucleotide
  source 1..339: mol_type = other DNA
gacatcgtgatgacccagtctccagactccctggctgtgtctctgggcgagagggccaccatcaactgcaagtccagccagagtgttttatacagctccaacaattacaactacttagcttggtaccagcagagaccaggacagcctcctaagctgctcatttactgggcttctacccgggaatccggggtccctgaccgattcagtggcagcgggtctgggccagatttcactctcaccatcagcagcctgcaggctgaagatgtggcagtttattactgtcagcaatattatactactcctccgacgttcggccaagggaccaaggtggaaatcaaa

SEQ ID NO: 27234 - protein, 113 aa, synthetic construct
  REGION 1..113: note = Description of Artificial Sequence: Synthetic polypeptide
DIVMTQSPDSLAVSLGERATINCKSSQSVLYSSNNYNYLAWYQQRPGQPPKLLIYWASTRESGVPDRFSGSGSGPDFTLTISSLQAEDVAVYYCQQYYTTPPTFGQGTKVEIK

SEQ ID NO: 27235 - DNA, 339 bp, synthetic construct
  misc_feature 1..339: note = Description of Artificial Sequence: Synthetic polynucleotide
  source 1..339: mol_type = other DNA
gacatcgtgatgacccagtctccagactccctggctgtgtctctgggcgagagggccaccatcaactgcaagtccagccagagtgttttatacagctccaacaatcagaactacttagcttggtaccagcagaaaccaggacagcctcctaggctgctcatttactggacatctacccgggaatccggggtccctgaccgattcagtggcagcgggtctgggacagatttcactctcaccatcagcaacctgcaggctgaagatgtggctgtttattactgtcagcaatattatattactccgtgcagttttggccaggggaccaaactggagatcaaa

SEQ ID NO: 27236 - protein, 113 aa, synthetic construct
  REGION 1..113: note = Description of Artificial Sequence: Synthetic polypeptide
DIVMTQSPDSLAVSLGERATINCKSSQSVLYSSNNQNYLAWYQQKPGQPPRLLIYWTSTRESGVPDRFSGSGSGTDFTLTISNLQAEDVAVYYCQQYYITPCSFGQGTKLEIK

SEQ ID NO: 27237 - DNA, 339 bp, synthetic construct
  misc_feature 1..339: note = Description of Artificial Sequence: Synthetic polynucleotide
  source 1..339: mol_type = other DNA
gacatcgtgatgacccagtctccagactccctggctgtgtctctgggcgagagggccaccatcaactgcaagtccagccagagtgttttatacaactccaacaataacaactacttagcttggtaccagcagaaaccaggacagcctcctaacctgctcatttactgggcatctacccgggaatccggggtccctgaccgattcagtggcagcgggtctgggacagatttcactctcaccatcagcagcctgcagactgaagatgtggcagtttattactgtcagcaatattatattactccgtgcagttttggccaggggaccaagctggagatcaaa

SEQ ID NO: 27238 - protein, 113 aa, synthetic construct
  REGION 1..113: note = Description of Artificial Sequence: Synthetic polypeptide
DIVMTQSPDSLAVSLGERATINCKSSQSVLYNSNNNNYLAWYQQKPGQPPNLLIYWASTRESGVPDRFSGSGSGTDFTLTISSLQTEDVAVYYCQQYYITPCSFGQGTKLEIK

SEQ ID NO: 27239 - DNA, 336 bp, synthetic construct
  misc_feature 1..336: note = Description of Artificial Sequence: Synthetic polynucleotide
  source 1..336: mol_type = other DNA
gatattgtgatgacccagactccactctctctgtccgtcacccctggacagccggcctccatctcctgcaagtctagtcagagcctcctgcatggtgatggaaagacctatttgtattggtacctgcagaggccaggccagcctccacagctcctgatcaatgaagtttccatccggttctctggagtgccagataggttcagtggcagcgggtcagggacagatttcacactgaaaatcagccgggtggaggctgaggatgttggggtttactactgcatgcaaagtatacagattccgtggacgttcggccaggggaccaaggtggacatcaaa

SEQ ID NO: 27240 - protein, 112 aa, synthetic construct
  REGION 1..112: note = Description of Artificial Sequence: Synthetic polypeptide
DIVMTQTPLSLSVTPGQPASISCKSSQSLLHGDGKTYLYWYLQRPGQPPQLLINEVSIRFSGVPDRFSGSGSGTDFTLKISRVEAEDVGVYYCMQSIQIPWTFGQGTKVDIK

SEQ ID NO: 27241 - DNA, 336 bp, synthetic construct
  misc_feature 1..336: note = Description of Artificial Sequence: Synthetic polynucleotide
  source 1..336: mol_type = other DNA
gatattgtgatgacccagactccactctctctgtccgtcacccctggacagccggcctccatctcctgcaagtctagtcagagcctcctacatggtgatggaaagacctatttgtattggtacctgcagaagccaggccagcctccacagctcctgatctatgaagtttccaaccggttctctggagtgccagataggttcagtggcagcgggtcagggacagatttcacactgaaaatcagccgggtggaggctgaggatgttggggtttattactgcatgcaaagtatacagattccgtggacgttcggccaagggaccaaggtggagatcaaa

SEQ ID NO: 27242 - protein, 112 aa, synthetic construct
  REGION 1..112: note = Description of Artificial Sequence: Synthetic polypeptide
DIVMTQTPLSLSVTPGQPASISCKSSQSLLHGDGKTYLYWYLQKPGQPPQLLIYEVSNRFSGVPDRFSGSGSGTDFTLKISRVEAEDVGVYYCMQSIQIPWTFGQGTKVEIK

SEQ ID NO: 27243 - DNA, 321 bp, synthetic construct
  misc_feature 1..321: note = Description of Artificial Sequence: Synthetic polynucleotide
  source 1..321: mol_type = other DNA
gacatccagatgacccagtctccatcctccctgtctgcatctataggagacagagtcaccatcacttgccgggcaagtcagggcattagaaatgatttaggctggtatcagcagaaaccagggaaagcccctaagcgcctgatctatgctgcatccagtttgcaaagtgggctcccatcaaggttcagcggcagtggatctgggacagaattcactctcacaatcagcaacctgcagcctgaagattttgcaacttattactgtctacagcattataattaccctcgggcgttcggccaagggaccaaggtggaaatccaa

SEQ ID NO: 27244 - protein, 107 aa, synthetic construct
  REGION 1..107: note = Description of Artificial Sequence: Synthetic polypeptide
DIQMTQSPSSLSASIGDRVTITCRASQGIRNDLGWYQQKPGKAPKRLIYAASSLQSGLPSRFSGSGSGTEFTLTISNLQPEDFATYYCLQHYNYPRAFGQGTKVEIQ

SEQ ID NO: 27245 - DNA, 339 bp, synthetic construct
  misc_feature 1..339: note = Description of Artificial Sequence: Synthetic polynucleotide
  source 1..339: mol_type = other DNA
gacatcgtgatgacccagtctccagactccctggctgtgtctctgggcgagagggccaccatcaactgcaggtccagccagagtattttatacatctccaacaataagaactacttagcttggtaccagcagaaaccaggacagcctcctaagatgctcatttactgggcatctacccgggaatccggggtccctgaccgattcagtggcagcgggtctgggacagatttcactctcaccatcagcagcctgcaggctgaagatgtggcagtttattactgtcagcaatattatagttctccgtgcagttttggccaggggaccaagctggagatcaaa

SEQ ID NO: 27246 - protein, 113 aa, synthetic construct
  REGION 1..113: note = Description of Artificial Sequence: Synthetic polypeptide
DIVMTQSPDSLAVSLGERATINCRSSQSILYISNNKNYLAWYQQKPGQPPKMLIYWASTRESGVPDRFSGSGSGTDFTLTISSLQAEDVAVYYCQQYYSSPCSFGQGTKLEIK

SEQ ID NO: 27247 - DNA, 339 bp, synthetic construct
  misc_feature 1..339: note = Description of Artificial Sequence: Synthetic polynucleotide
  source 1..339: mol_type = other DNA
gacatcgtgatgacccagtctccagactccctggctgtgtctctgggcgagagggccaccatcaactgcaagtccagccagagtattttatacagctccaacaattacaactacttagcttggtaccagcagaagccaggacagcctcctaagctgctcatttactgggcttctacccgggaatccggggtccctgaccgattcagtggcagcgggtctgggccagatttcactctcaccatcagcagcctgcaggctgaagatgtggcagtttattactgtcagcaatattatactactcctccgacgttcggccaagggaccaaggtggaaatcaaa

SEQ ID NO: 27248 - protein, 113 aa, synthetic construct
  REGION 1..113: note = Description of Artificial Sequence: Synthetic polypeptide
DIVMTQSPDSLAVSLGERATINCKSSQSILYSSNNYNYLAWYQQKPGQPPKLLIYWASTRESGVPDRFSGSGSGPDFTLTISSLQAEDVAVYYCQQYYTTPPTFGQGTKVEIK

SEQ ID NO: 27249 - DNA, 336 bp, synthetic construct
  misc_feature 1..336: note = Description of Artificial Sequence: Synthetic polynucleotide
  source 1..336: mol_type = other DNA
gatattgtgatgacccagactccactctctctgtccgtcacccctggacagccggcctccatctcctgcaagtctagtcagagcctcctgcatggtgatggaaagacctatttgtattggtaccagcagaagccaggccagcctccacagatcctgatctatgaagtttccaaccggttctctggagtgccagataggttcagtggcagcgggtcagggacagacttcacactgaaaatcagccgggtggaggctgaggatgttggggtttattactgcatgcaaagtatacaggttccgtggacgttcggccaagggaccaaggtggagatcaaa

SEQ ID NO: 27250 - protein, 112 aa, synthetic construct
  REGION 1..112: note = Description of Artificial Sequence: Synthetic polypeptide
DIVMTQTPLSLSVTPGQPASISCKSSQSLLHGDGKTYLYWYQQKPGQPPQILIYEVSNRFSGVPDRFSGSGSGTDFTLKISRVEAEDVGVYYCMQSIQVPWTFGQGTKVEIK

SEQ ID NO: 27251 - DNA, 321 bp, synthetic construct
  misc_feature 1..321: note = Description of Artificial Sequence: Synthetic polynucleotide
  source 1..321: mol_type = other DNA
gacatccagatgacccagtctccatcctccctgtctgcatctgttggagacagagtcaccatcacttgccgggcaagtcagggcattgggaatgatttaggctggtatcagcagaaaccagggaaagcccctaagcgcctgatctatgctgcctccagtttgcaaagtggggtcccatcaaggttcagcggcagtgtatctgggacagaattcattctcacaatcagcagcctgcagcctgaagattttgcaacttattactgtctacatcattatagttaccctcggacgttcggccaggggaccaaggtggaaatcaaa

SEQ ID NO: 27252 - protein, 107 aa, synthetic construct
  REGION 1..107: note = Description of Artificial Sequence: Synthetic polypeptide
DIQMTQSPSSLSASVGDRVTITCRASQGIGNDLGWYQQKPGKAPKRLIYAASSLQSGVPSRFSGSVSGTEFILTISSLQPEDFATYYCLHHYSYPRTFGQGTKVEIK

SEQ ID NO: 27253 - DNA, 336 bp, synthetic construct; identical to SEQ ID NO: 27211
  misc_feature 1..336: note = Description of Artificial Sequence: Synthetic polynucleotide
  source 1..336: mol_type = other DNA

SEQ ID NO: 27254 - protein, 112 aa, synthetic construct; identical to SEQ ID NO: 27212
  REGION 1..112: note = Description of Artificial Sequence: Synthetic polypeptide

SEQ ID NO: 27255 - DNA, 321 bp, synthetic construct; identical to SEQ ID NO: 24295
  misc_feature 1..321: note = Description of Artificial Sequence: Synthetic polynucleotide
  source 1..321: mol_type = other DNA

SEQ ID NO: 27256 - protein, 107 aa, synthetic construct; identical to SEQ ID NO: 24296
  REGION 1..107: note = Description of Artificial Sequence: Synthetic polypeptide

SEQ ID NO: 27257 - DNA, 336 bp, synthetic construct; identical to SEQ ID NO: 27211
  misc_feature 1..336: note = Description of Artificial Sequence: Synthetic polynucleotide
  source 1..336: mol_type = other DNA

SEQ ID NO: 27258 - protein, 112 aa, synthetic construct; identical to SEQ ID NO: 27212
  REGION 1..112: note = Description of Artificial Sequence: Synthetic polypeptide

SEQ ID NO: 27259 - DNA, 336 bp, synthetic construct
  misc_feature 1..336: note = Description of Artificial Sequence: Synthetic polynucleotide
  source 1..336: mol_type = other DNA
gatattgtgatgacccagactccactctctctgtccgtcatccctggacagccggcctccatctcctgcaagtctagtcagagcctcctgcatagtgatggaaagacctttttgtattggtacctgcagaggccaggccagcctccacagctcctgatctatgaagtttccaaccggttctctggagtgccagataggttcagtggcagcgggtcagggacagatttcacactgaaaatcagccgggtggaggctgaggatgttgggatttattactgcatgcaaagtacacagcttcctcggacgttcggccaagggaccaaggtggaaatcaaa

SEQ ID NO: 27260 - protein, 112 aa, synthetic construct
  REGION 1..112: note = Description of Artificial Sequence: Synthetic polypeptide
DIVMTQTPLSLSVIPGQPASISCKSSQSLLHSDGKTFLYWYLQRPGQPPQLLIYEVSNRFSGVPDRFSGSGSGTDFTLKISRVEAEDVGIYYCMQSTQLPRTFGQGTKVEIK

SEQ ID NO: 27261 - DNA, 336 bp, synthetic construct
  misc_feature 1..336: note = Description of Artificial Sequence: Synthetic polynucleotide
  source 1..336: mol_type = other DNA
gatattgtgatgacccagactccactctctctgtccgtcacccctggacagccggcctccatctcctgcaagtctagtcagagcctcctgcatagtgatggaaagacctttttgtattggtacctgcagaagccaggccagcctccacagctcctgatctatgaaatttccaaccggttctctggggtgccagataggttcagtggcagcgggtcagggacagatttcacactgaaaatcagccgagtggaggctgaggatgttgggatttattactgcatgcaaagtacacagcttcctcggacgttcggccaagggaccaaggtggaaatcaaa

SEQ ID NO: 27262 - protein, 112 aa, synthetic construct; identical to SEQ ID NO: 27212
  REGION 1..112: note = Description of Artificial Sequence: Synthetic polypeptide

SEQ ID NO: 27263 - DNA, 339 bp, synthetic construct
  misc_feature 1..339: note = Description of Artificial Sequence: Synthetic polynucleotide
  source 1..339: mol_type = other DNA
gacatcgtgatgacccagtctccagactccctggctgtgtctctgggcgagagggccaccatcaactgcaagtccagccagaatgttttacacagctccaacagtaataactacttagtttggtaccagcagaaaccaggacagcctcctaaactgctcatttactgggcatctacccgggaatccggggtccctgaccgattcagaggcagcgggtctgggacagatttcactctcaccatcagcagcctgcaggctgaagatgtggcagtttattactgtcagcaatattataaaactccgtggacgttcggccaagggaccaaggtggaaatcaaa

SEQ ID NO: 27264 - protein, 113 aa, synthetic construct
  REGION 1..113: note = Description of Artificial Sequence: Synthetic polypeptide
DIVMTQSPDSLAVSLGERATINCKSSQNVLHSSNSNNYLVWYQQKPGQPPKLLIYWASTRESGVPDRFRGSGSGTDFTLTISSLQAEDVAVYYCQQYYKTPWTFGQGTKVEIK

SEQ ID NO: 27265 - DNA, 336 bp, synthetic construct
  misc_feature 1..336: note = Description of Artificial Sequence: Synthetic polynucleotide
  source 1..336: mol_type = other DNA
gatattgtgatgacccagactccactctctctgtccgtcacccctggacagccggcctccatctcctgcaagtctagtcagagcctcctgcatagtgatggaaagacctttttgtattggtacctgcacaagccaggccagcctccacacctcctgatctatgaaatttccaaccggttctctggagtgccagataggttcagtggcagcgggtcagggacagatttcacactgaaaatcagccgggtggaggctgaggatgttgggatttattactgcatgcaaagtacacagcttcctcggacgttcggccaagggaccaaggtggaaatcaaa

SEQ ID NO: 27266 - protein, 112 aa, synthetic construct
  REGION 1..112: note = Description of Artificial Sequence: Synthetic polypeptide
DIVMTQTPLSLSVTPGQPASISCKSSQSLLHSDGKTFLYWYLHKPGQPPHLLIYEISNRFSGVPDRFSGSGSGTDFTLKISRVEAEDVGIYYCMQSTQLPRTFGQGTKVEIK

SEQ ID NO: 27267 - DNA, 321 bp, synthetic construct
  misc_feature 1..321: note = Description of Artificial Sequence: Synthetic polynucleotide
  source 1..321: mol_type = other DNA
gacatccagatgacccagtctccatcctccctgtctgcatctgtaggagacagagtcaccatcacttgccggacaagtcagggcattagaaatgatttaggctggtatcagcagaaaccagggaaagcccctaagcgcctgatctatgctgcatccagtttgcaaagtggggtcccatcaaggttcagtggcagtggatctgggacagatttcactctcacaatcagcagcctgcagcctgaagattttgcaacttattactgtctacagcattatagttaccctcggacgttcggccaagggaccaaggtggaaatcaaa

SEQ ID NO: 27268 - protein, 107 aa, synthetic construct
  REGION 1..107: note = Description of Artificial Sequence: Synthetic polypeptide
DIQMTQSPSSLSASVGDRVTITCRTSQGIRNDLGWYQQKPGKAPKRLIYAASSLQSGVPSRFSGSGSGTDFTLTISSLQPEDFATYYCLQHYSYPRTFGQGTKVEIK

SEQ ID NO: 27269 - DNA, 339 bp, synthetic construct
  misc_feature 1..339: note = Description of Artificial Sequence: Synthetic polynucleotide
  source 1..339: mol_type = other DNA
gacatcgtgatgacccagtctccagactccctggctgtgtctctcggcgagagggccaccatcaactgcaagtccagccagaatgttttatacagttccaacaataacaactacttagcttggtaccagcagacacctggacagcctcctaagctgctcttttactgggcatctacccggaaatccggggtccctgaccgattcagtggcagcgggtctgggacagatttcactctcaccatcagcagcctgcaggctgaagatgtggcagtttattactgtcagcaatattatagtagtcctccgacgttcggccaagggaccaaggtggaaatcaaa

SEQ ID NO: 27270 - protein, 113 aa, synthetic construct
  REGION 1..113: note = Description of Artificial Sequence: Synthetic polypeptide
DIVMTQSPDSLAVSLGERATINCKSSQNVLYSSNNNNYLAWYQQTPGQPPKLLFYWASTRKSGVPDRFSGSGSGTDFTLTISSLQAEDVAVYYCQQYYSSPPTFGQGTKVEIK

SEQ ID NO: 27271 - DNA, 336 bp, synthetic construct
  misc_feature 1..336: note = Description of Artificial Sequence: Synthetic polynucleotide
  source 1..336: mol_type = other DNA
gatattgtgatgacccagactccactctctctgtccgtcacccctggacagccggcctccatctcctgcaagtctagtaagaccctcctgcatagtgatggaaagacctttttgtattggtacctgcagaagccaggccagcctccacagcccctgatctatgaaatttccaaccggttctctggagtgccagataggttcagtggcagcgggtcagggacagatttcacactgaaaatcagccgggtggaggctgaggatgttgggatttattactgcatgcaaagtacacagcttcctcggacgttcggccaagggaccaaggtggaaatcaaa

SEQ ID NO: 27272 - protein, 112 aa, synthetic construct
  REGION 1..112: note = Description of Artificial Sequence: Synthetic polypeptide
DIVMTQTPLSLSVTPGQPASISCKSSKTLLHSDGKTFLYWYLQKPGQPPQPLIYEISNRFSGVPDRFSGSGSGTDFTLKISRVEAEDVGIYYCMQSTQLPRTFGQGTKVEIK

SEQ ID NO: 27273 - DNA, 336 bp, synthetic construct; identical to SEQ ID NO: 27211
  misc_feature 1..336: note = Description of Artificial Sequence: Synthetic polynucleotide
  source 1..336: mol_type = other DNA

SEQ ID NO: 27274 - protein, 112 aa, synthetic construct; identical to SEQ ID NO: 27212
  REGION 1..112: note = Description of Artificial Sequence: Synthetic polypeptide

SEQ ID NO: 27275 - DNA, 336 bp, synthetic construct; identical to SEQ ID NO: 27211
  misc_feature 1..336: note = Description of Artificial Sequence: Synthetic polynucleotide
  source 1..336: mol_type = other DNA

SEQ ID NO: 27276 - protein, 112 aa, synthetic construct; identical to SEQ ID NO: 27212
  REGION 1..112: note = Description of Artificial Sequence: Synthetic polypeptide

SEQ ID NO: 27277 - DNA, 321 bp, synthetic construct
  misc_feature 1..321: note = Description of Artificial Sequence: Synthetic polynucleotide
  source 1..321: mol_type = other DNA
gacatccagatgacccagtctccatcctccctgtctgcatctgtaggagacagagtcaccatcacttgccgggcaagtcagggcattagaaatgatttaggctggtatcagcagaaaccagggaaagcccctaagcgcctgatctatgctgcatccagtttgcaaagtggggtcccatcaaggttcagcggcagtggatctgggacagaattcactctcacaatcagcagcctgcagcctgcagattttgcaacttattactgtctacaccataatagttacccattcactttcggccctgggaccaaagtggatatcaaa

SEQ ID NO: 27278 - protein, 107 aa, synthetic construct
  REGION 1..107: note = Description of Artificial Sequence: Synthetic polypeptide
DIQMTQSPSSLSASVGDRVTITCRASQGIRNDLGWYQQKPGKAPKRLIYAASSLQSGVPSRFSGSGSGTEFTLTISSLQPADFATYYCLHHNSYPFTFGPGTKVDIK

SEQ ID NO: 27279 - DNA, 321 bp, synthetic construct
  misc_feature 1..321: note = Description of Artificial Sequence: Synthetic polynucleotide
  source 1..321: mol_type = other DNA
gacatcctgatgacccagtctccatcttccgtgtctgcatctgtaggagacagagtcaccatcacttgtcgggcgagtcagggtattatcaactggttagcctggtatcagcagaaaccagggaaagcccctaagctcctgatctatgctgcatccagtttgcaaagtggggtcccatcaaggttcagcggcagtggatctgggacagatttcactctcaccatcagcagcctgcagcctgaagattttgcaatttactattgtcaacaggctaacagtttcccgtggacgttcggccaagggaccaaggtggaaatcaaa

SEQ ID NO: 27280 - protein, 107 aa, synthetic construct
  REGION 1..107: note = Description of Artificial Sequence: Synthetic polypeptide
DILMTQSPSSVSASVGDRVTITCRASQGIINWLAWYQQKPGKAPKLLIYAASSLQSGVPSRFSGSGSGTDFTLTISSLQPEDFAIYYCQQANSFPWTFGQGTKVEIK

SEQ ID NO: 27281 - DNA, 321 bp, synthetic construct
  misc_feature 1..321: note = Description of Artificial Sequence: Synthetic polynucleotide
  source 1..321: mol_type = other DNA
gacatccagatgacccagtctccatcctccctgtctgcatctgtaggagacagagtcaccatcacttgccgggcaagtcaggacattagaaatgatttaggctggtatcagcagaaaccagggaaagcccctaagcgcctgatctatgctgcatccagtttgcaaagtggggtcccatcaaggttcagcggcagtggatctgggacagaattcactctcacaatcagcagcctgcagcctgaagattttgcaacttattactgtctacagcataatagttacccattcactttcggccctgggaccaaagtggatatcaaa

SEQ ID NO: 27282 - protein, 107 aa, synthetic construct
  REGION 1..107: note = Description of Artificial Sequence: Synthetic polypeptide
DIQMTQSPSSLSASVGDRVTITCRASQDIRNDLGWYQQKPGKAPKRLIYAASSLQSGVPSRFSGSGSGTEFTLTISSLQPEDFATYYCLQHNSYPFTFGPGTKVDIK

SEQ ID NO: 27283 - DNA, 339 bp, synthetic construct
  misc_feature 1..339: note = Description of Artificial Sequence: Synthetic polynucleotide
  source 1..339: mol_type = other DNA
gacatcgtgatgacccagtctccagactccctgactgtgtctctgggcgagagggccaccatcaactgcaagtccagccagagtgttttatacagctccaacgataagaactacttagcttggtaccagcagaaaccaggacagcctcctaagatgctcatttactgggcatctacccgggaatccggggtccctgaccgattcagtggcagcgggtctgggacagatttcactctcaccatcagcagcctgcaggctgaagatgtggcagtttattactgtcagcaatattatattactccgtgcagttttggccaggggaccaagctggagatcaaa

SEQ ID NO: 27284 - protein, 113 aa, synthetic construct
  REGION 1..113: note = Description of Artificial Sequence: Synthetic polypeptide
DIVMTQSPDSLTVSLGERATINCKSSQSVLYSSNDKNYLAWYQQKPGQPPKMLIYWASTRESGVPDRFSGSGSGTDFTLTISSLQAEDVAVYYCQQYYITPCSFGQGTKLEIK

SEQ ID NO: 27285 - DNA, 339 bp, synthetic construct
  misc_feature 1..339: note = Description of Artificial Sequence: Synthetic polynucleotide
  source 1..339: mol_type = other DNA
gacatcgtgatgacccagtctccagactccctggctgtgtctctgggcgagagggccaccatcaactgcaggtccagccagattgttttatccgactccaacaataacaactacttagcttggtaccagcagaaaccaggacagcctcctaacctgctcatttactgggcatctacccgggaatccggggtccctgaccgattcagtggcagcgggtctgggacagatttcactctcaccatcagcagcctgcaggctgaagatgtggcagtttatttctgtcagcaatattatagttctcctccgacgttcggccaagggaccaaggtggaaatcaaa

SEQ ID NO: 27286 - protein, 113 aa, synthetic construct
  REGION 1..113: note = Description of Artificial Sequence: Synthetic polypeptide
DIVMTQSPDSLAVSLGERATINCRSSQIVLSDSNNNNYLAWYQQKPGQPPNLLIYWASTRESGVPDRFSGSGSGTDFTLTISSLQAEDVAVYFCQQYYSSPPTFGQGTKVEIK

SEQ ID NO: 27287 - DNA, 336 bp, synthetic construct
  misc_feature 1..336: note = Description of Artificial Sequence: Synthetic polynucleotide
  source 1..336: mol_type = other DNA
gatattgtgatgacccagactccactctctctgtccgtcacccctggacagccggcctccatctcctgcaagtctagtcagagcctcctgcatagtgatggaaagacctttttgtattggtatctgcagaagccaggccagcccccacagctcctgatctatgaaatttccaaccggttctctggggtgccagataggttcagtggcagcgggtcagggacagatttcacactgaaaatcagtcgagtggaggctgaggatgttgggatttattactgcatgcaaagtacacagcttcctcggacgttcggccaagggaccagggtggaaatcaaa

SEQ ID NO: 27288 - protein, 112 aa, synthetic construct
  REGION 1..112: note = Description of Artificial Sequence: Synthetic polypeptide
DIVMTQTPLSLSVTPGQPASISCKSSQSLLHSDGKTFLYWYLQKPGQPPQLLIYEISNRFSGVPDRFSGSGSGTDFTLKISRVEAEDVGIYYCMQSTQLPRTFGQGTRVEIK

SEQ ID NO: 27289 - DNA, 339 bp, synthetic construct
  misc_feature 1..339: note = Description of Artificial Sequence: Synthetic polynucleotide
  source 1..339: mol_type = other DNA
gacatcgtgatgacccagtctccagactccctggctgtgtctctgggcgagagggccaccatcaactgcaagtccagccagagtgttttacacagctccaacaataacaactacttagcttggtatcagcagaaaccaggacagcctcctaagctgctcatttactggggatctacccgggaatccggggtccctgaccgattcagtggcagcgggtctgggacagatttcactctcaccatcagcagcctgcaggctgaagatgtggcagtttattactgtcagcaatattatagtgctccgtacagttttggccaggggaccaagttggagatcaaa

SEQ ID NO: 27290 - protein, 113 aa, synthetic construct
  REGION 1..113: note = Description of Artificial Sequence: Synthetic polypeptide
DIVMTQSPDSLAVSLGERATINCKSSQSVLHSSNNNNYLAWYQQKPGQPPKLLIYWGSTRESGVPDRFSGSGSGTDFTLTISSLQAEDVAVYYCQQYYSAPYSFGQGTKLEIK

SEQ ID NO: 27291 - DNA, 339 bp, synthetic construct
  misc_feature 1..339: note = Description of Artificial Sequence: Synthetic polynucleotide
  source 1..339: mol_type = other DNA
gacatcgtgatgacccagtctccagactccctggctgtgtctctggacgagagggccaccatcaactgcaagtccagccagagtgttttacacagttccaacaataataactacttagcttggtaccagcagaagccaggacagcctcctaagctgctcatttactgggcatctacccgggaatccgggatccctgaccgattcagtggcagcgggtctgggacagatttcactctcaccatcagcagcctgcaggctgaggatgtggcagtttattactgtcagcaatattataatactccgtgcagttttggccaggggaccaagctggagatcaaa

SEQ ID NO: 27292 - protein, 113 aa, synthetic construct
  REGION 1..113: note = Description of Artificial Sequence: Synthetic polypeptide
DIVMTQSPDSLAVSLDERATINCKSSQSVLHSSNNNNYLAWYQQKPGQPPKLLIYWASTRESGIPDRFSGSGSGTDFTLTISSLQAEDVAVYYCQQYYNTPCSFGQGTKLEIK

SEQ ID NO: 27293 - DNA, 336 bp, synthetic construct
  misc_feature 1..336: note = Description of Artificial Sequence: Synthetic polynucleotide
  source 1..336: mol_type = other DNA
gatgttgtgatgactcagtctccactctccctgcccgtcacccctggagagccggcctccatctcctgctggtctagtcagagcctcctgcatagtaatggatacaactatttggattggtacctgcagaagccagggcagtctccacaggtcctgatctatttgggttctaatcgggcctccggggtccctgacaggttcagtggcagtggatcaggcacagattttacactgaaaatcagcagagtggaggctgaggatgttggggtttattactgcatgcaagctctacaaactcctctcaccttcggccaagggacacgactggagattaaa

SEQ ID NO: 27294 - protein, 112 aa, synthetic construct
  REGION 1..112: note = Description of Artificial Sequence: Synthetic polypeptide
DVVMTQSPLSLPVTPGEPASISCWSSQSLLHSNGYNYLDWYLQKPGQSPQVLIYLGSNRASGVPDRFSGSGSGTDFTLKISRVEAEDVGVYYCMQALQTPLTFGQGTRLEIK

SEQ ID NO: 27295 - DNA, 321 bp, synthetic construct; identical to SEQ ID NO: 24295
  misc_feature 1..321: note = Description of Artificial Sequence: Synthetic polynucleotide
  source 1..321: mol_type = other DNA

SEQ ID NO: 27296 - protein, 107 aa, synthetic construct; identical to SEQ ID NO: 24296
  REGION 1..107: note = Description of Artificial Sequence: Synthetic polypeptide

SEQ ID NO: 27297 - DNA, 318 bp, synthetic construct
  misc_feature 1..318: note = Description of Artificial Sequence: Synthetic polynucleotide
  source 1..318: mol_type = other DNA
tcctatgagctgactcagccaccctcagtgtccgtgtccccaggacagacagccagcatcacctgctctggagataaattgggggataaatatgcttcctggtatcagcagaagccaggccagtcccctgtgctggtcatctatcaagatagcaagcggccctcagggatccctgagcgattctctggctccaactctgggaacacagccactctgaccatcagcgggatccaggctatggatgaggctgactattactgtcaggcgtgggacagcagcactgtggtattcggcggagggaccaagctgaccgtccta

SEQ ID NO: 27298 - protein, 106 aa, synthetic construct
  REGION 1..106: note = Description of Artificial Sequence: Synthetic polypeptide
SYELTQPPSVSVSPGQTASITCSGDKLGDKYASWYQQKPGQSPVLVIYQDSKRPSGIPERFSGSNSGNTATLTISGIQAMDEADYYCQAWDSSTVVFGGGTKLTVL

SEQ ID NO: 27299 - DNA, 318 bp, synthetic construct
  misc_feature 1..318: note = Description of Artificial Sequence: Synthetic polynucleotide
  source 1..318: mol_type = other DNA
tcctatgaactgactcagccaccctcagtgtccgtgtccccaggacagacagccagcatcacctgctctggagataaattgggggataaatatgcttcctggtatcagcagaagccaggccagtcccctgtgctggtcatctatcaagatagcaagcggccctcagggatccctgagcgattctctggctccaactctgggaacacagccactctgaccatcagcgggatccaggctatggatgaggctgactattactgtcaggcgtgggacagcagcactgtggtattcggcggagggaccaagctgaccgtccta

SEQ ID NO: 27300 - protein, 106 aa, synthetic construct; identical to SEQ ID NO: 27298
  REGION 1..106: note = Description of Artificial Sequence: Synthetic polypeptide

SEQ ID NO: 27301 - DNA, 318 bp, synthetic construct; identical to SEQ ID NO: 27297
  misc_feature 1..318: note = Description of Artificial Sequence: Synthetic polynucleotide
  source 1..318: mol_type = other DNA

SEQ ID NO: 27302 - protein, 106 aa, synthetic construct; identical to SEQ ID NO: 27298
  REGION 1..106: note = Description of Artificial Sequence: Synthetic polypeptide

SEQ ID NO: 27303 - DNA, 330 bp, synthetic construct
  misc_feature 1..330: note = Description of Artificial Sequence: Synthetic polynucleotide
  source 1..330: mol_type = other DNA
cagtctgtactgactcagccaccctcaacgtctgggacccccgggcagagggtcaccatctcttgttctggaagcagctcctacatcggaagtaatactgtagactggtaccagcagctcccaggaacggcccccaaactcctcatctatagtaataatcagcggccctcaggggtccctgaccgattctctggctccaagtctggcacctcagcctccctggccatcagtgggctccagtctgaggatgaggctgattattactgtgcagcatgggatgacagccttaatggcgtggtattcggcggagggaccaaactgaccgtccta

SEQ ID NO: 27304 - protein, 110 aa, synthetic construct
  REGION 1..110: note = Description of Artificial Sequence: Synthetic polypeptide
QSVLTQPPSTSGTPGQRVTISCSGSSSYIGSNTVDWYQQLPGTAPKLLIYSNNQRPSGVPDRFSGSKSGTSASLAISGLQSEDEADYYCAAWDDSLNGVVFGGGTKLTVL

SEQ ID NO: 27305 - DNA, 318 bp, synthetic construct
  misc_feature 1..318: note = Description of Artificial Sequence: Synthetic polynucleotide
  source 1..318: mol_type = other DNA
tcctatgagttgactcagccaccctcagtgtccgtgtccccaggacagacagccagcatcacctgctctggagataaattgggggataaatttgcttgctggtatcagcagaaaccaggccagtcccctgtactggtcatctatcaagataggaagcggccctcagggatccctgagcgattctctggctccaactctgggaacacagccactctgaccatcagcgggacccaggctatggatgaggctgactattactgtcaggcgtgggacaggaacaccgctgtcttcggaactgggaccaaggtcaccgtccta

SEQ ID NO: 27306 - protein, 106 aa, synthetic construct
  REGION 1..106: note = Description of Artificial Sequence: Synthetic polypeptide
SYELTQPPSVSVSPGQTASITCSGDKLGDKFACWYQQKPGQSPVLVIYQDRKRPSGIPERFSGSNSGNTATLTISGTQAMDEADYYCQAWDRNTAVFGTGTKVTVL

SEQ ID NO: 27307 - DNA, 318 bp, synthetic construct
  misc_feature 1..318: note = Description of Artificial Sequence: Synthetic polynucleotide
  source 1..318: mol_type = other DNA
tcctatgagctgactcagccaccctcagtgtccgtgtccccaggacagacagccagcatcacctgctctggagataaattgggggataaatatgcttcctggtatcagcagaagccaggccagtcccctgtgctggtcatctatcaagatagcaagcgcccctcagggatccctgagcgattctctggctccaactctgggaacacagccactctgaccatcagcgggatccaggctatggatgaggctgactattactgtcaggcgtgggacagcagcactgtggtattcggcggagggaccaagctgaccgtccta

SEQ ID NO: 27308 - protein, 106 aa, synthetic construct; identical to SEQ ID NO: 27298
  REGION 1..106: note = Description of Artificial Sequence: Synthetic polypeptide

SEQ ID NO: 27309 - DNA, 321 bp, synthetic construct
  misc_feature 1..321: note = Description of Artificial Sequence: Synthetic polynucleotide
  source 1..321: mol_type = other DNA
tcctatgaactgactcagccaccctcagtgtccgtgtccccaggacagacagccagtatcacctgctctggagataaattgggggataaatatgtttgctggtatcagcagaagccaggccagtcccctgagctggtcatctatcaagataggaagcggccctcagggatccctgagcgattctctggctccaactctgggaacacagccactctgaccatcagcgggacccaggctatggatgaggctgactattactgtcaggcgtggggcagtaacactgctgtggtattcggcggagggaccaagctgaccgtccta

SEQ ID NO: 27310 - protein, 107 aa, synthetic construct
  REGION 1..107: note = Description of Artificial Sequence: Synthetic polypeptide
SYELTQPPSVSVSPGQTASITCSGDKLGDKYVCWYQQKPGQSPELVIYQDRKRPSGIPERFSGSNSGNTATLTISGTQAMDEADYYCQAWGSNTAVVFGGGTKLTVL

SEQ ID NO: 27311 - DNA, 321 bp, synthetic construct
  misc_feature 1..321: note = Description of Artificial Sequence: Synthetic polynucleotide
  source 1..321: mol_type = other DNA
tcctatgagctgactcagccgccctcagtgtccgtgtccccaggacagacagccagcatcacctgctctggagataaattgggggataaatatgtttcctggtatcagcagaggccaggccagtcccctgtgctggtcatctatcaagataggaagcggccctcagggatccctgagcgattctctggctccaactctgggaacacagccactctgaccatcagcgggaccctggctgtggatgaggctgactattactgtctggcgtgggacagcagcacttttgtggtattcggcggagggaccaagttgaccgtccta

SEQ ID NO: 27312 - protein, 107 aa, synthetic construct
  REGION 1..107: note = Description of Artificial Sequence: Synthetic polypeptide
SYELTQPPSVSVSPGQTASITCSGDKLGDKYVSWYQQRPGQSPVLVIYQDRKRPSGIPERFSGSNSGNTATLTISGTLAVDEADYYCLAWDSSTFVVFGGGTKLTVL

SEQ ID NO: 27313 - DNA, 321 bp, synthetic construct
  misc_feature 1..321: note = Description of Artificial Sequence: Synthetic polynucleotide
  source 1..321: mol_type = other DNA
tcctatgagctgactcagccaccctcagtgtccgtgtccccaggacagacagccagcatcacctcctctggagataaattgggtaataaatatgtttgctggtatcagcagaggccaggccagtcccctgtgctggtcatctatcaagatagcaagcggccctcagggatccctgagcgattctctggctccaactccgggaacacagccactctgaccatcagcgggacccaggctatggatgaggctgactattactgtcaggcgtgggacaggaacacttatgtggtgttcggcggagggaccaagctgaccgtccta

SEQ ID NO: 27314 - protein, 107 aa, synthetic construct
  REGION 1..107: note = Description of Artificial Sequence: Synthetic polypeptide
SYELTQPPSVSVSPGQTASITSSGDKLGNKYVCWYQQRPGQSPVLVIYQDSKRPSGIPERFSGSNSGNTATLTISGTQAMDEADYYCQAWDRNTYVVFGGGTKLTVL

SEQ ID NO: 27315 - DNA, 318 bp, synthetic construct
  misc_feature 1..318: note = Description of Artificial Sequence: Synthetic polynucleotide
  source 1..318: mol_type = other DNA
tcctatgagctgactcagccaccctcagtgtccgtgtccccaggacagacagccagcatcacctgttctggagatgaattggggaataaatatgcttgctggtatcagcagaagccaggccagtcccctgtgctggtcatctatcaagatagcaagcggccctcagggatccctgagcgattctctggctccaactctgggaacacagccactctgaccatcagcgggacccaggctatggatgaggctgactattactgtcaggcgtggcacagcagcactgtggtattcggcggagggaccaagctgaccgtccta

SEQ ID NO: 27316 - protein, 106 aa, synthetic construct
  REGION 1..106: note = Description of Artificial Sequence: Synthetic polypeptide
SYELTQPPSVSVSPGQTASITCSGDELGNKYACWYQQKPGQSPVLVIYQDSKRPSGIPERFSGSNSGNTATLTISGTQAMDEADYYCQAWHSSTVVFGGGTKLTVL

SEQ ID NO: 27317 - DNA, 318 bp, synthetic construct
  misc_feature 1..318: note = Description of Artificial Sequence: Synthetic polynucleotide
  source 1..318: mol_type = other DNA
tcctatgagctgactcagccaccctcagtgtccgtgtccccaggacagacagccagcatcacctgctctggagataaattgggggataaatatgcttgctggtatcagcagaagccaggccagtcccctgtgctggtcatctatcaagataggaagcggccctcagggatccctgagcgattctctggctccaactctgggaacacagccactctgaccattagcgggacccaggctatggatgaggctgactattactgtcaggcgtggcacagcagtactgtggtattcggcggagggaccaagctgaccgtccta

SEQ ID NO: 27318 - protein, 106 aa, synthetic construct
  REGION 1..106: note = Description of Artificial Sequence: Synthetic polypeptide
SYELTQPPSVSVSPGQTASITCSGDKLGDKYACWYQQKPGQSPVLVIYQDRKRPSGIPERFSGSNSGNTATLTISGTQAMDEADYYCQAWHSSTVVFGGGTKLTVL

SEQ ID NO: 27319 - DNA, 318 bp, synthetic construct
  misc_feature 1..318: note = Description of Artificial Sequence: Synthetic polynucleotide
  source 1..318: mol_type = other DNA
tcctatgagctgactcagccaccctcagtgtccgtgtccccaggacagacagccagcatcacctgctctggagataaattgggggataaatatgcttcctggtatcagcagaagccaggccagtcccctgtgttggtcatctatcaagatagcaagcggccctcagggatccctgagcgattctctggctccaactctgggaacacagccactctgaccatcagcgggatccaggctatggatgaggctgactattactgtcaggcgtgggacagcagcactgtggtattcggcggagggaccaagctgaccgtccta

SEQ ID NO: 27320 - protein, 106 aa, synthetic construct; identical to SEQ ID NO: 27298
  REGION 1..106: note = Description of Artificial Sequence: Synthetic polypeptide

SEQ ID NO: 27321 - DNA, 318 bp, synthetic construct
  misc_feature 1..318: note = Description of Artificial Sequence: Synthetic polynucleotide
  source 1..318: mol_type = other DNA
tcctatgagctgactcagccaccctcagtgtccgtgtccccaggacagacagccagcatcacctgctctggagataaattgggggataaatatgcttcctggtatcagcagaagccaggccagtcccctgtgctggtcatctatcaagatagcaagcggccctcagggatccctgagcgattctctggctccaactctgggaacgcagccactctgaccatcagcgggatccaggctatggatgaggctgactattactgtcaggcgtgggacagcagcactgtggtattcggcggagggaccaagctgaccgtccta

SEQ ID NO: 27322 - protein, 106 aa, synthetic construct
  REGION 1..106: note = Description of Artificial Sequence: Synthetic polypeptide
SYELTQPPSVSVSPGQTASITCSGDKLGDKYASWYQQKPGQSPVLVIYQDSKRPSGIPERFSGSNSGNAATLTISGIQAMDEADYYCQAWDSSTVVFGGGTKLTVL

SEQ ID NO: 27323 - DNA, 330 bp, synthetic construct
  misc_feature 1..330: note = Description of Artificial Sequence: Synthetic polynucleotide
  source 1..330: mol_type = other DNA
cagtctgtgttgactcagccaccctcagcgtctgggacccccgggcagagggtcaccatctcttgttctggaagcagctccaacatcggaagttatgctgtaaactggtatcagcagctcccaggaacggcccccaaactcctcatttatagtaataatcaccggccctcaggggtccctgaccgattctctggctccaagtctggcacctcagcctccctggccatcagtgggctccagtctgaggatgaggctgattattactgtgaagcatgggatgacagcctgaatggtccggtattcggcggagggaccaagctgaccgtccta

SEQ ID NO: 27324 - protein, 110 aa, synthetic construct
  REGION 1..110: note = Description of Artificial Sequence: Synthetic polypeptide
QSVLTQPPSASGTPGQRVTISCSGSSSNIGSYAVNWYQQLPGTAPKLLIYSNNHRPSGVPDRFSGSKSGTSASLAISGLQSEDEADYYCEAWDDSLNGPVFGGGTKLTVL

SEQ ID NO: 27325 - DNA, 330 bp, synthetic construct
  misc_feature 1..330: note = Description of Artificial Sequence: Synthetic polynucleotide
  source 1..330: mol_type = other DNA
cagtctgtgctgactcagccaccctcagcgtctgggacccccgggcagagggtcaccatctcttgttctggaagcagctccaacatcggaagtaattctataaactggtaccagcaactcccaagaacggcccccaaactcctcatctatagtaatgatcagcggccctcaggggtccctgaccgattctctggctccaagtctggcacctcagcctccctggccatcagtgggctccagtctgaggatgaggctgattattactgtgcagcatgggatgacagcctgaacggcgtggtattcggcggagggaccaagctgaccgtccta

SEQ ID NO: 27326 - protein, 110 aa, synthetic construct
  REGION 1..110: note = Description of Artificial Sequence: Synthetic polypeptide
QSVLTQPPSASGTPGQRVTISCSGSSSNIGSNSINWYQQLPRTAPKLLIYSNDQRPSGVPDRFSGSKSGTSASLAISGLQSEDEADYYCAAWDDSLNGVVFGGGTKLTVL

SEQ ID NO: 27327 - DNA, 330 bp, synthetic construct
  misc_feature 1..330: note = Description of Artificial Sequence: Synthetic polynucleotide
  source 1..330: mol_type = other DNA
cagtctgtgctgactcagccaccctcagcgtctgggacccccgggcagagggtcaccatctcttgttctggaagcagctccaacatcggaagtaatgctgtaaactggtaccagcagctcccaggaacggcccccaaactcctcatctatagtaataatcagcggccctcaggggtccctgaccggttctctggctccaagtctggcacctcagcctccctggccatcagtgggctccagtctgaggatgaggctgattattactgtgcagcatgggatgacagcctgaatggcgtggtattcggcggagggaccaagctgaccgtccta

SEQ ID NO: 27328 - protein, 110 aa, synthetic construct
  REGION 1..110: note = Description of Artificial Sequence: Synthetic polypeptide
QSVLTQPPSASGTPGQRVTISCSGSSSNIGSNAVNWYQQLPGTAPKLLIYSNNQRPSGVPDRFSGSKSGTSASLAISGLQSEDEADYYCAAWDDSLNGVVFGGGTKLTVL

SEQ ID NO: 27329 - DNA, 318 bp, synthetic construct; identical to SEQ ID NO: 27297
  misc_feature 1..318: note = Description of Artificial Sequence: Synthetic polynucleotide
  source 1..318: mol_type = other DNA

SEQ ID NO: 27330 - protein, 106 aa, synthetic construct; identical to SEQ ID NO: 27298
  REGION 1..106: note = Description of Artificial Sequence: Synthetic polypeptide

SEQ ID NO: 27331 - DNA, 321 bp, synthetic construct
  misc_feature 1..321: note = Description of Artificial Sequence: Synthetic polynucleotide
  source 1..321: mol_type = other DNA
tcctatgagctgactcagccgccctcagtgtccgtgtccccaggacagacagccagcatcacctgctctggagataaattgggggataaatatgtttcctggtatcagcagaagccaggccagtcccctatactggtcatctatcaagataggaagcggccctcagggacccctgagcgattctctggctccaactctgggaacacagccactctgaccatcagcgggacccaggctatggatgaggctgattattactgtctggcgtgggacagcagcacttttgtggtattcggcggagggaccaagttgaccgtccta

SEQ ID NO: 27332 - protein, 107 aa, synthetic construct
  REGION 1..107: note = Description of Artificial Sequence: Synthetic polypeptide
SYELTQPPSVSVSPGQTASITCSGDKLGDKYVSWYQQKPGQSPILVIYQDRKRPSGTPERFSGSNSGNTATLTISGTQAMDEADYYCLAWDSSTFVVFGGGTKLTVL

SEQ ID NO: 27333 - DNA, 318 bp, synthetic construct
  misc_feature 1..318: note = Description of Artificial Sequence: Synthetic polynucleotide
  source 1..318: mol_type = other DNA
tcctatgagctgactcagccaccctcagtgtccgtgtccccaggacagacagccagcatcacctgttctggagataaattggggaataaatatgtttgctggtatcagcagaagccaggccagtcccctgtgctggtcatctatcaagatagcaagcggccctcagggatccctgagcgattctctggctccaactctgggaacacagccactctgaccatcagcgggacccaggctatggatgaggctgactattactgtcaggcgtggcacagcagcactgtggtattcggcggagggaccaagctgaccgtccta

SEQ ID NO: 27334 - protein, 106 aa, synthetic construct
  REGION 1..106: note = Description of Artificial Sequence: Synthetic polypeptide
SYELTQPPSVSVSPGQTASITCSGDKLGNKYVCWYQQKPGQSPVLVIYQDSKRPSGIPERFSGSNSGNTATLTISGTQAMDEADYYCQAWHSSTVVFGGGTKLTVL

SEQ ID NO: 27335 - DNA, 318 bp, synthetic construct
  misc_feature 1..318: note = Description of Artificial Sequence: Synthetic polynucleotide
  source 1..318: mol_type = other DNA
tcctatgagctgactcagccaccctcagtgtccgtgtccccaggacagacagccagcatcacctgctctggagataaattgggggataaatttgcttcctggtatcagcagaagccaggccagtcccctgtgctggtcatctatcaagatagcaagcggccctcagggatccctgagcgattctctggctccaactctgggaacacagccactctgaccatcagcgggatccaggctatggatgaggctgactattactgtcaggcgtgggacagcagcactgtggtattcggcggagggaccaagctgaccgtccta

SEQ ID NO: 27336 - protein, 106 aa, synthetic construct
  REGION 1..106: note = Description of Artificial Sequence: Synthetic polypeptide
SYELTQPPSVSVSPGQTASITCSGDKLGDKFASWYQQKPGQSPVLVIYQDSKRPSGIPERFSGSNSGNTATLTISGIQAMDEADYYCQAWDSSTVVFGGGTKLTVL

SEQ ID NO: 27337 - DNA, 330 bp, synthetic construct; identical to SEQ ID NO: 27327
  misc_feature 1..330: note = Description of Artificial Sequence: Synthetic polynucleotide
  source 1..330: mol_type = other DNA

SEQ ID NO: 27338 - protein, 110 aa, synthetic construct; identical to SEQ ID NO: 27328
  REGION 1..110: note = Description of Artificial Sequence: Synthetic polypeptide

SEQ ID NO: 27339 - DNA, 318 bp, synthetic construct
  misc_feature 1..318: note = Description of Artificial Sequence: Synthetic polynucleotide
  source 1..318: mol_type = other DNA
tcctatgaactgactcagccaccctcagtgtccgtgtccccaggacagacagccagcatcacctgctctggatataaattggggtataaatatgtttgctggtatcagcagaagccaggccagtcccctgtactggtcatctttcaaaataaccagcggccctcagggatccctgagcgattctctggctccaactctgggaacacagcctctctgaccatcagcgggacccaggctatggatgaggctgactattactgtcaggcgtgggacagcagcactgtggtattcggcggagggaccaagctgaccgtccta

SEQ ID NO: 27340 - protein, 106 aa, synthetic construct
  REGION 1..106: note = Description of Artificial Sequence: Synthetic polypeptide
SYELTQPPSVSVSPGQTASITCSGYKLGYKYVCWYQQKPGQSPVLVIFQNNQRPSGIPERFSGSNSGNTASLTISGTQAMDEADYYCQAWDSSTVVFGGGTKLTVL

SEQ ID NO: 27341 - DNA, 318 bp, synthetic construct
  misc_feature 1..318: note = Description of Artificial Sequence: Synthetic polynucleotide
  source 1..318: mol_type = other DNA
tcctatgagctgactcagccaccctcagtgtccgtgtccccaggacagacagccagcatcacctgctctggaaataaattgggggataaatatgcttcctggtatcagcagaagccaggccagtcccctgtgctggtcatctatcaagatagcaagcggccctcagggatccctgagcgattctctggctccaagtctgggaacacagccactctgaccatcagcgggatccaggctatggatgaggctgactattactgtcaggcgtgggacagcagcactgtggtattcggcggagggaccaagctgaccgtccca

SEQ ID NO: 27342 - protein, 106 aa, synthetic construct
  REGION 1..106: note = Description of Artificial Sequence: Synthetic polypeptide
SYELTQPPSVSVSPGQTASITCSGNKLGDKYASWYQQKPGQSPVLVIYQDSKRPSGIPERFSGSKSGNTATLTISGIQAMDEADYYCQAWDSSTVVFGGGTKLTVP

SEQ ID NO: 27343 - DNA, 345 bp, synthetic construct
  misc_feature 1..345: note = Description of Artificial Sequence: Synthetic polynucleotide
  source 1..345: mol_type = other DNA
caggctgtgtcgactcagccgtcttccctctctgcatctcctggagcatcagccagtctcacctgcaccttacgcagtggcatcactgttactacctataggatatactggtaccagcagaagccagggagtcctccccagtttctcctgcggtacacatcagactcagataaacaccagggctctggagtccccagccgcttctctggatccaaagatgcttcggccaatgcagggattttattcatctctgggctccagtctgaggatgaggctgactattactgtatgatttggcacagcagcgcttgggtgttcggcggagggaccaagctgaccgtccta

SEQ ID NO: 27344 - protein, 115 aa, synthetic construct
  REGION 1..115: note = Description of Artificial Sequence: Synthetic polypeptide
QAVSTQPSSLSASPGASASLTCTLRSGITVTTYRIYWYQQKPGSPPQFLLRYTSDSDKHQGSGVPSRFSGSKDASANAGILFISGLQSEDEADYYCMIWHSSAWVFGGGTKLTVL

SEQ ID NO: 27345 - DNA, 318 bp, synthetic construct
  misc_feature 1..318: note = Description of Artificial Sequence: Synthetic polynucleotide
  source 1..318: mol_type = other DNA
tcctatgagctgactcagccaccctcagtgtccgtgtccccaggacagacagccagcatcacctgctctggagataaattgggggataaatatgcttcctggtatcagcagaagccaggccagtcccctgtgctggtcatctatcaagataacaagcggccctcagggatccctgagcgattctctggctccaactctgggaacacagccactctgaccatcggcgggatccaggctatggatgaggctgactattactgtcaggcgtgggacagcagcactgtggtattcggcggagggaccaagctgaccgtccta

SEQ ID NO: 27346 - protein, 106 aa, synthetic construct
  REGION 1..106: note = Description of Artificial Sequence: Synthetic polypeptide
SYELTQPPSVSVSPGQTASITCSGDKLGDKYASWYQQKPGQSPVLVIYQDNKRPSGIPERFSGSNSGNTATLTIGGIQAMDEADYYCQAWDSSTVVFGGGTKLTVL

SEQ ID NO: 27347 - DNA, 321 bp, synthetic construct
  misc_feature 1..321: note = Description of Artificial Sequence: Synthetic polynucleotide
  source 1..321: mol_type = other DNA
tcctatgaactgactcagccgccctcagtgtccgtgtccccaggacagacagccagcatcacctgctctggagataaattggggaataaatatgtttcctggtatcagcagaagccaggccagtcccctgtgctggtcatctatcaagatagcaggcggccctcagggatccctgagcgattctctggctccaactctgggaacacagccactctgaccatcagcgggacccaggctatggatgaggctgactattactgtctggcgtgggacagcagcacttttgtggtcttcggcggagggaccaagttgaccgtccta

SEQ ID NO: 27348 - protein, 107 aa, synthetic construct
  REGION 1..107: note = Description of Artificial Sequence: Synthetic polypeptide
SYELTQPPSVSVSPGQTASITCSGDKLGNKYVSWYQQKPGQSPVLVIYQDSRRPSGIPERFSGSNSGNTATLTISGTQAMDEADYYCLAWDSSTFVVFGGGTKLTVL

SEQ ID NO: 27349 - DNA, 318 bp, synthetic construct
  misc_feature 1..318: note = Description of Artificial Sequence: Synthetic polynucleotide
  source 1..318: mol_type = other DNA
tcctatgagctgactcagccaccctcagtgtccgtgtccccaggacagacagccagcatcacctgctctggagatgaattggggaataaatatgcttgctggtatcagcagaagccaggccagtcccctgtgctggtcatctatcaagataacaagcggccctcagggatccctgagcgattctctggctccagctctgggaacacagccactctgaccatcagcgggacccaggctatggatgaggctgactattactgtcaggcgtggcacagcagcactgtggtattcggcggagggaccaagctgaccgtccta

SEQ ID NO: 27350 - protein, 106 aa, synthetic construct
  REGION 1..106: note = Description of Artificial Sequence: Synthetic polypeptide
SYELTQPPSVSVSPGQTASITCSGDELGNKYACWYQQKPGQSPVLVIYQDNKRPSGIPERFSGSSSGNTATLTISGTQAMDEADYYCQAWHSSTVVFGGGTKLTVL

SEQ ID NO: 27351 - DNA, 318 bp, synthetic construct
  misc_feature 1..318: note = Description of Artificial Sequence: Synthetic polynucleotide
  source 1..318: mol_type = other DNA
tcctatgagctgactcagccaccctcagtgtccgtgtccccaggacagacagccagcatcacctgctctggagataaattgggggataaatatgcttcctggtatcagcagaagccaggccagtcccctgtgctggtcatctgtcaagatagcaagcggccctcagggatccctgagcgattctctggctccaactctgggaacacagccactctgaccatcagcgggatccaggctatggatgaggctgactattgctgtcaggcgtgggacagcagcactgtggtattcggcggagggaccaagctgaccgtccta

SEQ ID NO: 27352 - protein, 106 aa, synthetic construct
  REGION 1..106: note = Description of Artificial Sequence: Synthetic polypeptide
SYELTQPPSVSVSPGQTASITCSGDKLGDKYASWYQQKPGQSPVLVICQDSKRPSGIPERFSGSNSGNTATLTISGIQAMDEADYCCQAWDSSTVVFGGGTKLTVL

SEQ ID NO: 27353 - DNA, 330 bp, synthetic construct
  misc_feature 1..330: note = Description of Artificial Sequence: Synthetic polynucleotide
  source 1..330: mol_type = other DNA
cagtctgtgctgactcagccaccctcagcgtctgggacccccgggcagagggtcaccatctcttgttctggaagcagctccaacatcggaagtaatgctgtaaactggtaccagcagctcccaggaacggcccccaaactcctcatctatagtaatagtcagcggccctcaggggtccctgaccggttctctggctccaagtctggcacctcagcctccctggccatcagtgggctccagtctgaggatgaggctgattatttctgtgcagcatgggatgacagcctgaatggcgtggtattcggcggagggaccaagctgaccgtccta

SEQ ID NO: 27354 - protein, 110 aa, synthetic construct
  REGION 1..110: note = Description of Artificial Sequence: Synthetic polypeptide
QSVLTQPPSASGTPGQRVTISCSGSSSNIGSNAVNWYQQLPGTAPKLLIYSNSQRPSGVPDRFSGSKSGTSASLAISGLQSEDEADYFCAAWDDSLNGVVFGGGTKLTVL

SEQ ID NO: 27355 - DNA, 318 bp, synthetic construct
  misc_feature 1..318: note = Description of Artificial Sequence: Synthetic polynucleotide
  source 1..318: mol_type = other DNA
tcctatgagctgactcagccaccctcagtgtccgtgtccccaggacagacagccagcatcacctgctctggagataaattgggggataaatatgcttcctggtatcagcagaagccaggccagtcccctgtgctggtcatctatcaagatagcaagcggccctcagggatccctgagcgattctctggctccaactctgggaacacagccactctgaccatcagcgggatccaggctatggatgaggctgacttttactgtcaggcgtgggacagcagcactgtggtattcggcggagggaccaagctgaccgtccta

SEQ ID NO: 27356 - protein, 106 aa, synthetic construct
  REGION 1..106: note = Description of Artificial Sequence: Synthetic polypeptide
SYELTQPPSVSVSPGQTASITCSGDKLGDKYASWYQQKPGQSPVLVIYQDSKRPSGIPERFSGSNSGNTATLTISGIQAMDEADFYCQAWDSSTVVFGGGTKLTVL

SEQ ID NO: 27357 - DNA, 318 bp, synthetic construct
  misc_feature 1..318: note = Description of Artificial Sequence: Synthetic polynucleotide
  source 1..318: mol_type = other DNA
tcttatgagctgactcagccaccctcagtgtccgtgtccccaggacagacagccagcatcacctgctctggagataaattgggggataaatatgtttgctggtatcagcagaagccaggccagtcccctgtgctggtcatctatcaagatcgcaagcggccctcagggatccctgagcgattctctggctccaactctgggaacacagccactctgaccatcagcgggacccaggctatggatgaggctgactattactgtcaggcgtggcacagcagcactgtggtattcggcggagggaccaagctgaccgtccta

SEQ ID NO: 27358 - protein, 106 aa, synthetic construct
  REGION 1..106: note = Description of Artificial Sequence: Synthetic polypeptide
SYELTQPPSVSVSPGQTASITCSGDKLGDKYVCWYQQKPGQSPVLVIYQDRKRPSGIPERFSGSNSGNTATLTISGTQAMDEADYYCQAWHSSTVVFGGGTKLTVL

SEQ ID NO: 27359 - DNA, 318 bp, synthetic construct
  misc_feature 1..318: note = Description of Artificial Sequence: Synthetic polynucleotide
  source 1..318: mol_type = other DNA
tcctatgagctgactcagccaccctcagtgtccgtgtccccaggacagacagccagcatcgcctgctctggagataaattgggggataaatatgcttcctggtatcaacagaagccaggccagtcccctgtgctggtcatctatcaagatagcaagcggccctcagggatccctgagcgattctctggctccaactctgggaacacagccactctgaccatcagcgggatccaggctatggatgaggctgactattactgtcaggcgtgggacagcagcactgtggtattcggcggagggaccaagctgaccgtccta

SEQ ID NO: 27360 - protein, 106 aa, synthetic construct
  REGION 1..106: note = Description of Artificial Sequence: Synthetic polypeptide
SYELTQPPSVSVSPGQTASIACSGDKLGDKYASWYQQKPGQSPVLVIYQDSKRPSGIPERFSGSNSGNTATLTISGIQAMDEADYYCQAWDSSTVVFGGGTKLTVL

SEQ ID NO: 27361 - DNA, 318 bp, synthetic construct
  misc_feature 1..318: note = Description of Artificial Sequence: Synthetic polynucleotide
  source 1..318: mol_type = other DNA
tcctatgagctgactcagccaccctcagtgtccgtgtccccaggacagacagccagcatcacctgctctggagataaattgggggataaatatgcttgctggtatcagcagaagccaggccagtcccctgtgctggtcatctatcaagataccaagcggccctcagggatccctgagcgattctctggctccaactctgggaacacagccactctgaccatcagcgggacccaggctatggatgaggctgactattactgtcaggcgtgggacagcagcacttatgtcttcggaactgggaccaaggtcaccgtccta

SEQ ID NO: 27362 - protein, 106 aa, synthetic construct
  REGION 1..106: note = Description of Artificial Sequence: Synthetic polypeptide
SYELTQPPSVSVSPGQTASITCSGDKLGDKYACWYQQKPGQSPVLVIYQDTKRPSGIPERFSGSNSGNTATLTISGTQAMDEADYYCQAWDSSTYVFGTGTKVTVL

SEQ ID NO: 27363 - DNA, 318 bp, synthetic construct
  misc_feature 1..318: note = Description of Artificial Sequence: Synthetic polynucleotide
  source 1..318: mol_type = other DNA
tcctatgacctgactcagccaccctcagtgtccgtgtccccaggacagacagccagcatcacctgctctggagataaattgggggataaatatgcttcctggtatcagcagaagccaggccagtcccctgtgctggtcatctatcaagatagcaagcggccctcagggatccctgagcgattctctggctccaactctgggaacacagccactctgaccatcagcgggatccaggctatggatgaggctgactattactgtcaggcgtgggacagcagcactgtggtattcggcggagggaccaagctgaccgtccta

SEQ ID NO: 27364 - protein, 106 aa, synthetic construct
  REGION 1..106: note = Description of Artificial Sequence: Synthetic polypeptide
SYDLTQPPSVSVSPGQTASITCSGDKLGDKYASWYQQKPGQSPVLVIYQDSKRPSGIPERFSGSNSGNTATLTISGIQAMDEADYYCQAWDSSTVVFGGGTKLTVL

SEQ ID NO: 27365 - DNA, 318 bp, synthetic construct
  misc_feature 1..318: note = Description of Artificial Sequence: Synthetic polynucleotide
  source 1..318: mol_type = other DNA
tcctatgagctgactcagccaccctcagtgtccgtgtccccaggacagacagccagcatcgcctgctctggagataatttgggggataaatatgcttcctggtatcaacagaagccaggccagtcccctgtgctggtcatctatcaagatagcaagcggccctcagggatccctgagcgattctctggctccaactctgggaacacagccactctgaccatcagcgggatccaggctatggatgaggctgactattactgtcaggcgtgggacagcagcactgtggtattcggcggagggaccaagctgaccgtccta

SEQ ID NO: 27366 - protein, 106 aa, synthetic construct
  REGION 1..106: note = Description of Artificial Sequence: Synthetic polypeptide
SYELTQPPSVSVSPGQTASIACSGDNLGDKYASWYQQKPGQSPVLVIYQDSKRPSGIPERFSGSNSGNTATLTISGIQAMDEADYYCQAWDSSTVVFGGGTKLTVL

SEQ ID NO: 27367 - DNA, 318 bp, synthetic construct
  misc_feature 1..318: note = Description of Artificial Sequence: Synthetic polynucleotide
  source 1..318: mol_type = other DNA
tcctatgagatgactcagccaccctcagtgtccgtgtccccaggacagacagccatcatcacctgctctggagataaattgggggataaatatgcttgctggtatcaacagaagccaggccagtcccctgtgctggtcatctatcaagattccaagcggccctcagggatccctgagcgattctctggctccaactctgggaacacagccactctgaccatcagcgggacccaggctatggatgaggctgactattactgtcaggcgtgggacagcagcacttatgtcttcggaactgggaccaaggtcaccgtccta

SEQ ID NO: 27368 - protein, 106 aa, synthetic construct
  REGION 1..106: note = Description of Artificial Sequence: Synthetic polypeptide
SYEMTQPPSVSVSPGQTAIITCSGDKLGDKYACWYQQKPGQSPVLVIYQDSKRPSGIPERFSGSNSGNTATLTISGTQAMDEADYYCQAWDSSTYVFGTGTKVTVL

SEQ ID NO: 27369 - DNA, 318 bp, synthetic construct
  misc_feature 1..318: note = Description of Artificial Sequence: Synthetic polynucleotide
  source 1..318: mol_type = other DNA
tcctatgagctgactcagccaccctcagtgtccgtgtccccaggacagacagccagcatcacctgctctggagataaattgggggataaatatgcttcctggtatcagcagaagccaggccagtcccctgtgctggtcatctatcaagatagcaagcggccctcagggatccctgagcgattctctggctccaactctgggaacacagccactctgaccatcagcgggatccaggctctggatgaggctgactattactgtcaggcgtgggacaacagcactgtggtattcggcggagggaccaagctgaccgtccta

SEQ ID NO: 27370 - protein, 106 aa, synthetic construct
  REGION 1..106: note = Description of Artificial Sequence: Synthetic polypeptide
SYELTQPPSVSVSPGQTASITCSGDKLGDKYASWYQQKPGQSPVLVIYQDSKRPSGIPERFSGSNSGNTATLTISGIQALDEADYYCQAWDNSTVVFGGGTKLTVL

SEQ ID NO: 27371 - DNA, 318 bp, synthetic construct; identical to SEQ ID NO: 27297
  misc_feature 1..318: note = Description of Artificial Sequence: Synthetic polynucleotide
  source 1..318: mol_type = other DNA

SEQ ID NO: 27372 - protein, 106 aa, synthetic construct; identical to SEQ ID NO: 27298
  REGION 1..106: note = Description of Artificial Sequence: Synthetic polypeptide

SEQ ID NO: 27373 - DNA, 318 bp, synthetic construct
  misc_feature 1..318: note = Description of Artificial Sequence: Synthetic polynucleotide
  source 1..318: mol_type = other DNA
tcctatgagctgactcagccaccctcagtgtccgtgtccccaggacagacagccagcatcacctgctctggcgataaattgggaaataaatatgcttgctggtatcagcagaagccaggccagtcccctgtgctggtcatctatcaagataccaagcggccctcagggatccctgagcgattctctggctccaactctgggaacacagccactctgaccatcagcgggacccaggctatggatgaggctgactattactgtcaggcgtgggacagcagcacttatgtcttcggaactgggaccaaggtcaccgtccta

SEQ ID NO: 27374 - protein, 106 aa, synthetic construct
  REGION 1..106: note = Description of Artificial Sequence: Synthetic polypeptide
SYELTQPPSVSVSPGQTASITCSGDKLGNKYACWYQQKPGQSPVLVIYQDTKRPSGIPERFSGSNSGNTATLTISGTQAMDEADYYCQAWDSSTYVFGTGTKVTVL

SEQ ID NO: 27375 - DNA, 318 bp, synthetic construct
  misc_feature 1..318: note = Description of Artificial Sequence: Synthetic polynucleotide
  source 1..318: mol_type = other DNA
tcctatgagctgactcagccaccctcagtgtccgtgtccccagggcagacagccagcatcacctgctctggagataaattgggggataaatatgcttgctggtatcagcagaagccaggccagtcccctgtgctggtcatctatcaagataccaagcggccctcagggatccctgagcgattctctggctccaactctgggaacacagccactctgaccatcagcgggacccaggctatggatgaggctgactattactgtcaggcgtgggacagcagcacttatgtcttcggaactgggaccaaggtcaccgtccta

SEQ ID NO: 27376 - protein, 106 aa, synthetic construct; identical to SEQ ID NO: 27362
  REGION 1..106: note = Description of Artificial Sequence: Synthetic polypeptide

SEQ ID NO: 27377 - DNA, 321 bp, synthetic construct
  misc_feature 1..321: note = Description of Artificial Sequence: Synthetic polynucleotide
  source 1..321: mol_type = other DNA
tcctatgagctgactcagccaccctcagtgtccgtgtccccaggacagacagccagcatcacctgctctggaagtaaattgggtaataaatatgtttgctggtatcagcagaggccaggccagtcccctgtactggtcatctatcaagataacaagcggccctcagggatccctgagcgattctctggctccaactccggaaacacagccactctgaccatcagcgggacccaggctatggatgaggctggctattactgtcaggcgtgggacagcagcacttatgtgatattcggcggagggaccaagctgaccgtccta

SEQ ID NO: 27378 - protein, 107 aa, synthetic construct
  REGION 1..107: note = Description of Artificial Sequence: Synthetic polypeptide
SYELTQPPSVSVSPGQTASITCSGSKLGNKYVCWYQQRPGQSPVLVIYQDNKRPSGIPERFSGSNSGNTATLTISGTQAMDEAGYYCQAWDSSTYVIFGGGTKLTVL

SEQ ID NO: 27379 - DNA, 318 bp, synthetic construct
  misc_feature 1..318: note = Description of Artificial Sequence: Synthetic polynucleotide
  source 1..318: mol_type = other DNA
tcctatgagctgactcagccaccctcagtgtccgtgtccccaggacagacagcgagcatcacctgctctggagataaattgggggataaatatgcttgctggtatcagcagaagccaggccagtcccctgtactggtcatctatcaagataggaagcggccctcagggatccctgagcgattctctggctccaactctgggaacacagccactctgaccatcagcgggacccaggctatggatgaggctgactattactgtcaggcgtggcacagcagtactgtggtattcggcggagggaccaaggtgaccgtccta

SEQ ID NO: 27380 - protein, 106 aa, synthetic construct
  REGION 1..106: note = Description of Artificial Sequence: Synthetic polypeptide
SYELTQPPSVSVSPGQTASITCSGDKLGDKYACWYQQKPGQSPVLVIYQDRKRPSGIPERFSGSNSGNTATLTISGTQAMDEADYYCQAWHSSTVVFGGGTKVTVL

SEQ ID NO: 27381 - DNA, 318 bp, synthetic construct
  misc_feature 1..318: note = Description of Artificial Sequence: Synthetic polynucleotide
  source 1..318: mol_type = other DNA
tcctatgagctgactcagccaccctcagtgtccgtgtccccaggacagacagccagcatcacctgctctggagataaattgggggataaatatgtttgctggtatcagcagaagccaggccagtcccctgtgttggtcatctatcaagataggaagcggccctcagggatccctgagcgattctctggctccaactctgggaacacagccactctgaccatcaccgggacccaggctatggatgaggctgactattactgtcaggcgtggcacagcagcactgtggtattcggcggagggaccaagctgaccgtccta

SEQ ID NO: 27382 - protein, 106 aa, synthetic construct
  REGION 1..106: note = Description of Artificial Sequence: Synthetic polypeptide
SYELTQPPSVSVSPGQTASITCSGDKLGDKYVCWYQQKPGQSPVLVIYQDRKRPSGIPERFSGSNSGNTATLTITGTQAMDEADYYCQAWHSSTVVFGGGTKLTVL

SEQ ID NO: 27383 - DNA, 318 bp, synthetic construct
  misc_feature 1..318: note = Description of Artificial Sequence: Synthetic polynucleotide
  source 1..318: mol_type = other DNA
tcctatgagctgactcagccaccctcagtgtccgtgtccccaggacagacagccagaatcacctgctctggagataaattgggggataaatatgcttcctggtatcagcagaagccaggccagtcccctgtgctggtcatctatcaagatagcaagcggccctcagggatccctgagcgattctctggctccaactctgggaacacagccactctgaccatcagcgggatccaggctatggatgaggctgactattactgtcaggcgtgggacagcagcactgtggtattcggcggagggaccaagctgaccgtccta

SEQ ID NO: 27384 - protein, 106 aa, synthetic construct
  REGION 1..106: note = Description of Artificial Sequence: Synthetic polypeptide
SYELTQPPSVSVSPGQTARITCSGDKLGDKYASWYQQKPGQSPVLVIYQDSKRPSGIPERFSGSNSGNTATLTISGIQAMDEADYYCQAWDSSTVVFGGGTKLTVL

SEQ ID NO: 27385 - DNA, 318 bp, synthetic construct
  misc_feature 1..318: note = Description of Artificial Sequence: Synthetic polynucleotide
  source 1..318: mol_type = other DNA
tcctatgagctgactcagccaccctcagtgtccgtgtccccaggacagacagccagcatcacctgctctggagataaattgggaaataaatatgtttgttggtatcagcagaagccaggccagtcccctgtggaagtcatctataaagatagtaagcggccctcagggatccctgagcgattctctggctccaattctgggaacacaggcactctgaccatcagcgggacccaggctatggatgaggctgactattactgtcaggcgtgggacaacagtactttagtattcggcggagggaccaagctgaccgtccta

SEQ ID NO: 27386 - protein, 106 aa, synthetic construct
  REGION 1..106: note = Description of Artificial Sequence: Synthetic polypeptide
SYELTQPPSVSVSPGQTASITCSGDKLGNKYVCWYQQKPGQSPVEVIYKDSKRPSGIPERFSGSNSGNTGTLTISGTQAMDEADYYCQAWDNSTLVFGGGTKLTVL

SEQ ID NO: 27387 - DNA, 318 bp, synthetic construct
  misc_feature 1..318: note = Description of Artificial Sequence: Synthetic polynucleotide
  source 1..318: mol_type = other DNA
tcctatgagctgactcagccaccctcagtgtccgtgtccccaggacagacagccagcatcacctgctctggagataaattgggggataaatatgcttcctggtatcagcagaagccaggtcagtcccctgtgctggtcatctatcaagatagcaagcggccctcagggatccctgagcgattctctggctccaactctgggaacacagccactctgaccatcagcgggatccaggctatggatgaggctgactattactgtcaggcgtgggacaacagcactgtggtattcggcggagggaccaagctgaccgtccta

SEQ ID NO: 27388 - protein, 106 aa, synthetic construct
  REGION 1..106: note = Description of Artificial Sequence: Synthetic polypeptide
SYELTQPPSVSVSPGQTASITCSGDKLGDKYASWYQQKPGQSPVLVIYQDSKRPSGIPERFSGSNSGNTATLTISGIQAMDEADYYCQAWDNSTVVFGGGTKLTVL

SEQ ID NO: 27389 - DNA, 318 bp, synthetic construct
  misc_feature 1..318: note = Description of Artificial Sequence: Synthetic polynucleotide
  source 1..318: mol_type = other DNA
tcctatgagctgactcagccaccctcagtgtccgtgtccccaggacagacagccagcatcacctgctctggagataaattgggggataaatatgcttgctggtatcagcagaagccaggccagtcccctgtgctggtcatctatcaagataagaagcggccctcagggatccctgagcgattctctggctccaactctgggaacatagccactctgaccatcagcgggacccaggctatggatgaggctgactattactgtcaggcgtggcacagcagtattgtggtattcggcggagggaccaagctgaccgtccta

SEQ ID NO: 27390 - protein, 106 aa, synthetic construct
  REGION 1..106: note = Description of Artificial Sequence: Synthetic polypeptide
SYELTQPPSVSVSPGQTASITCSGDKLGDKYACWYQQKPGQSPVLVIYQDKKRPSGIPERFSGSNSGNIATLTISGTQAMDEADYYCQAWHSSIVVFGGGTKLTVL

SEQ ID NO: 27391 - DNA, 330 bp, synthetic construct
  misc_feature 1..330: note = Description of Artificial Sequence: Synthetic polynucleotide
  source 1..330: mol_type = other DNA
cagtctgtactgactcagccaccctcagcgtctgggacccccgggcagagggtcaccatctcttgttctggaagcagctccaacatcggaaataatgctgtaagctggtatcagcagctcccaggaacggcccccaaactcctcatctatagtaatgatcaccggccctcaggggtccctgaccgattctctggctccaagtctggcacctcagcctccctggccatcagtgggctccagtctgaggatgaggctgattattactgtgcagcatgggatgacagcctgaagggtccggtattcggcggagggaccaagctgaccgtccta

SEQ ID NO: 27392 - protein, 110 aa, synthetic construct
  REGION 1..110: note = Description of Artificial Sequence: Synthetic polypeptide
QSVLTQPPSASGTPGQRVTISCSGSSSNIGNNAVSWYQQLPGTAPKLLIYSNDHRPSGVPDRFSGSKSGTSASLAISGLQSEDEADYYCAAWDDSLKGPVFGGGTKLTVL

SEQ ID NO: 27393 - DNA, 336 bp, synthetic construct
  misc_feature 1..336: note = Description of Artificial Sequence: Synthetic polynucleotide
  source 1..336: mol_type = other DNA
cagtctgtgctgacgcagccgccctcagtgtctggggccccagggcagagggtcaccatctcctgcactgggagcagctccaatatcggggcaggttatgatgtacactggtaccagcagcttccaggaacagcccccaaactcctcatctatggtaacagcaatcggccctcaggggtccctgaccgattctctggctccaagtctggcacctcagcctccctggccatcactggcctccaggctgaggatgaggctgattatcactgccagtcctatgacagcagcctgagtggtcctgtgatattcggcggagggaccaagctgaccgtccta

SEQ ID NO: 27394 - protein, 112 aa, synthetic construct
  REGION 1..112: note = Description of Artificial Sequence: Synthetic polypeptide
QSVLTQPPSVSGAPGQRVTISCTGSSSNIGAGYDVHWYQQLPGTAPKLLIYGNSNRPSGVPDRFSGSKSGTSASLAITGLQAEDEADYHCQSYDSSLSGPVIFGGGTKLTVL

SEQ ID NO: 27395 - DNA, 318 bp, synthetic construct
  misc_feature 1..318: note = Description of Artificial Sequence: Synthetic polynucleotide
  source 1..318: mol_type = other DNA
tcctatgagctgactcagccaccctcagtgtccgtgtccccaggacagacagccagcatcacctgctctggagataagttgggggataaatatgtttgctggtatcagcagaagccaggccagtcccctatgttggtcatctatcaagatagtaagcggccctcagggatccctgagcgattctctggctccaactctgggaacacagccactctgaccatcagcgggacccaggctatggatgaggctgactattactgtcaggcgtgggacaatagtatttatgtcttcggaactgggaccaaggtcaccgtccta

SEQ ID NO: 27396 - protein, 106 aa, synthetic construct
  REGION 1..106: note = Description of Artificial Sequence: Synthetic polypeptide
SYELTQPPSVSVSPGQTASITCSGDKLGDKYVCWYQQKPGQSPMLVIYQDSKRPSGIPERFSGSNSGNTATLTISGTQAMDEADYYCQAWDNSIYVFGTGTKVTVL

SEQ ID NO: 27397 - DNA, 318 bp, synthetic construct
  misc_feature 1..318: note = Description of Artificial Sequence: Synthetic polynucleotide
  source 1..318: mol_type = other DNA
tcctatgagctgactcagccaccctcagtgtccgtgtccccaggacagacagccagcatcacctgctctggagataaattgggggataaatatgtttgctggtatcagcagaagccaggccagtcccctgtgctggtcatctttcaagatagaaagcggccctcagggatccctgagcgattctctggctccaactctgggaacacagccactctgaccatcagcgggacccaggctatggatgaggctgactattactgtcaggcgtgggacagcagcactgtggtgttcggcggagggaccaaagttaccgtccta

SEQ ID NO: 27398 - protein, 106 aa, synthetic construct
  REGION 1..106: note = Description of Artificial Sequence: Synthetic polypeptide
SYELTQPPSVSVSPGQTASITCSGDKLGDKYVCWYQQKPGQSPVLVIFQDRKRPSGIPERFSGSNSGNTATLTISGTQAMDEADYYCQAWDSSTVVFGGGTKVTVL

SEQ ID NO: 27399 - DNA, 318 bp, synthetic construct
  misc_feature 1..318: note = Description of Artificial Sequence: Synthetic polynucleotide
  source 1..318: mol_type = other DNA
tcctatgagctgactcagccaccctcagtgtccgtgtccccaggacagacagtcagcatcacctgctctggagataaattgggggataaatatgtttcctggtatcagcagaagccaggccagtcccctgtgctggtcatctatcaagatagcaagcggccctcagggatccctgagcgattctctggctccaactctgggaacacagccactctgaccatcagcgggatccaggctatggatgaggctgactattactgtcaggcgtgggacagcagcactgtggtattcggcggagggaccaagctgaccgtccta

SEQ ID NO: 27400 - protein, 106 aa, synthetic construct
  REGION 1..106: note = Description of Artificial Sequence: Synthetic polypeptide
SYELTQPPSVSVSPGQTVSITCSGDKLGDKYVSWYQQKPGQSPVLVIYQDSKRPSGIPERFSGSNSGNTATLTISGIQAMDEADYYCQAWDSSTVVFGGGTKLTVL

SEQ ID NO: 27401 - DNA, 321 bp, synthetic construct
  misc_feature 1..321: note = Description of Artificial Sequence: Synthetic polynucleotide
  source 1..321: mol_type = other DNA
tcctatgagctgactcagccgccctcagtgtccgtgtccccaggacagacagccagcatcacctgctctggagataaattgggggataaatatgtttcctggtatcagcagaagccaggccagtcccctgtgctggtcatctatcaagataggaagcggccctcagggacccctgagcgattctctggctccaactctgggaacacagccactctgaccatcagcgggacccaggctatggatgaggctgactattactgtctggcgtgggacagcagcacttttgtggtattcggcggagggaccaagttgaccgtccta

SEQ ID NO: 27402 - protein, 107 aa, synthetic construct
  REGION 1..107: note = Description of Artificial Sequence: Synthetic polypeptide
SYELTQPPSVSVSPGQTASITCSGDKLGDKYVSWYQQKPGQSPVLVIYQDRKRPSGTPERFSGSNSGNTATLTISGTQAMDEADYYCLAWDSSTFVVFGGGTKLTVL

SEQ ID NO: 27403 - DNA, 330 bp, synthetic construct
  misc_feature 1..330: note = Description of Artificial Sequence: Synthetic polynucleotide
  source 1..330: mol_type = other DNA
cagtctgtggtgactcagccaccctcagcgtctgggacccccgggcagagggtcaccatctcttgttctggaagcagctccaacatcggaagtaatactgtaaattggtaccagcagctcccaggaacggcccccaaactcctcatctatagtagtaatcagcggccctcaggggtccctgaccgattgtctggctccaagtctggcacctcagcctccctggccatcagtgggctccagtctgaggatgaggctgattattactgtgcagcatgggatgacagcctgaatggcgtggtattcggcggagggaccaaggtgaccgtccta

SEQ ID NO: 27404 - protein, 110 aa, synthetic construct
  REGION 1..110: note = Description of Artificial Sequence: Synthetic polypeptide
QSVVTQPPSASGTPGQRVTISCSGSSSNIGSNTVNWYQQLPGTAPKLLIYSSNQRPSGVPDRLSGSKSGTSASLAISGLQSEDEADYYCAAWDDSLNGVVFGGGTKVTVL

SEQ ID NO: 27405 - DNA, 321 bp, synthetic construct
  misc_feature 1..321: note = Description of Artificial Sequence: Synthetic polynucleotide
  source 1..321: mol_type = other DNA
tcctatgacctgactcagccaccctcagtgtccgtgtccccaggacagacagccagcatcacctgctctggagataaattgggggataaatatgtttgctggtatcagcagaagccaggccagtcccctgtgctggtcatctatcaagatagtaagcggccctcagggatccctgagcgattctctggctccaactctgggaacacagccactctgaccatcaccgggacccaggctatggatgaggctaactattactgtcaggcgtgggacaacagcagctttgtgctattcggcggagggaccaagctgaccgtccta

SEQ ID NO: 27406 - protein, 107 aa, synthetic construct
  REGION 1..107: note = Description of Artificial Sequence: Synthetic polypeptide
SYDLTQPPSVSVSPGQTASITCSGDKLGDKYVCWYQQKPGQSPVLVIYQDSKRPSGIPERFSGSNSGNTATLTITGTQAMDEANYYCQAWDNSSFVLFGGGTKLTVL

SEQ ID NO: 27407 - DNA, 321 bp, synthetic construct
  misc_feature 1..321: note = Description of Artificial Sequence: Synthetic polynucleotide
  source 1..321: mol_type = other DNA
tcctatgagctgactcagccaccctcagtgaccgtgtccccaggacagacagccagcatcacctgctctggagataaattgggggataaatatgtttgctggtatcagcagaagccaggccagtcccctgtgctggtcatctatcaagatcgcaagcggccctcagggatccctgagcgattgtctggctccaactctgggaacacagccactctgaccatcagcgggacccaggctctggatgaggctgactattactgtcaggcgtggggcaacagcagctttgtggtattcggcggagggaccaagctgaccgtccta

SEQ ID NO: 27408 - protein, 107 aa, synthetic construct
  REGION 1..107: note = Description of Artificial Sequence: Synthetic polypeptide
SYELTQPPSVTVSPGQTASITCSGDKLGDKYVCWYQQKPGQSPVLVIYQDRKRPSGIPERLSGSNSGNTATLTISGTQALDEADYYCQAWGNSSFVVFGGGTKLTVL

SEQ ID NO: 27409 - DNA, 321 bp, synthetic construct
  misc_feature 1..321: note = Description of Artificial Sequence: Synthetic polynucleotide
  source 1..321: mol_type = other DNA
tcctatgagctgactcagccaccctcagtgtccgtgtccccaggacagacagccagcatcacctgctctggagataaattgggggataaatatgtttgctggtatcagcagaagccaggccagtcccctgtgttggtcatctatcaagataggaagcggccctcagggatccctgagcgattctctggctccaactctgggaacacagccactctgaccatcagcgggacccaggctctggatgaggctgactattactgtcaggcgtggggcaacagcagctttgtggtattcggcggagggaccaagctgaccgtccta

SEQ ID NO: 27410 - protein, 107 aa, synthetic construct
  REGION 1..107: note = Description of Artificial Sequence: Synthetic polypeptide
SYELTQPPSVSVSPGQTASITCSGDKLGDKYVCWYQQKPGQSPVLVIYQDRKRPSGIPERFSGSNSGNTATLTISGTQALDEADYYCQAWGNSSFVVFGGGTKLTVL

SEQ ID NO: 27411 - DNA, 321 bp, synthetic construct
  misc_feature 1..321: note = Description of Artificial Sequence: Synthetic polynucleotide
  source 1..321: mol_type = other DNA
tccgatgagctgactcagtcaccctcagtgtccgtgtccccaggacagacagccagcatcacctgctctggagataaattgggggataaatatgtttgctggtatcagcagaagccaggccagtcccctgtgttggtcatctatcaagatagcaagcggccctcagggatccctgagcgattctctggctccaactctgggaacacagccactctgaccatcagcgggacccaggctctggatgaggctgactattactgtcaggcgtggggcaacagcagctttgtggtattcggcggagggaccaagctgaccgtccta

SEQ ID NO: 27412 - protein, 107 aa, synthetic construct
  REGION 1..107: note = Description of Artificial Sequence: Synthetic polypeptide
SDELTQSPSVSVSPGQTASITCSGDKLGDKYVCWYQQKPGQSPVLVIYQDSKRPSGIPERFSGSNSGNTATLTISGTQALDEADYYCQAWGNSSFVVFGGGTKLTVL

SEQ ID NO: 27413 - DNA, 321 bp, synthetic construct
  misc_feature 1..321: note = Description of Artificial Sequence: Synthetic polynucleotide
  source 1..321: mol_type = other DNA
tcctatgagctgactcagccaccctcagtgtccgtgtccccaggacagacagccagcatcacctgctctggagatagattgggggataaatatgtttgctggtatcagcagaagccaggccagtcccctgtactggtcatctttcaagataacaagcggccctcagggatccctgagcgattctctggctccaactctgggaacacagccactctgaccatcagcgggacccaggctctggatgaggctgactattactgtcaggcgtgggtcaacaacactgcagtggttttcggcggagggaccaagctgaccgtccta

SEQ ID NO: 27414 - protein, 107 aa, synthetic construct
  REGION 1..107: note = Description of Artificial Sequence: Synthetic polypeptide
SYELTQPPSVSVSPGQTASITCSGDRLGDKYVCWYQQKPGQSPVLVIFQDNKRPSGIPERFSGSNSGNTATLTISGTQALDEADYYCQAWVNNTAVVFGGGTKLTVL

SEQ ID NO: 27415 - DNA, 321 bp, synthetic construct
  misc_feature 1..321: note = Description of Artificial Sequence: Synthetic polynucleotide
  source 1..321: mol_type = other DNA
tcctttgacctgactcagccaccctcagtgtccgtgtccccaggacagacagccagcatcacctgctctggagataaattgggggataaatatgtttgctggtatcagcagaagccaggccagtcccctgtgctggtcatctatcaagatagcaagcggccctcagggatccctgagcgaatctctggctccaactctgggaacacagccactctgaccatcagcgggacccaggctatggatgaggctgactattactgtcagacgtgggacaacagtagttttgcgcttttcggcggagggaccaagctgaccgtccta

SEQ ID NO: 27416 - protein, 107 aa, synthetic construct
  REGION 1..107: note = Description of Artificial Sequence: Synthetic polypeptide
SFDLTQPPSVSVSPGQTASITCSGDKLGDKYVCWYQQKPGQSPVLVIYQDSKRPSGIPERISGSNSGNTATLTISGTQAMDEADYYCQTWDNSSFALFGGGTKLTVL

SEQ ID NO: 27417 - DNA, 318 bp, synthetic construct
  misc_feature 1..318: note = Description of Artificial Sequence: Synthetic polynucleotide
  source 1..318: mol_type = other DNA
tcctatgagctgactcagccaccctcagtgtccgtgtccccaggacagacagccagcatcacctgctctggagataaattgggtgataaatatgcttgctggtatcagcagaagccaggccagtcccctgtgctggtcatctatcaagataccaagcggccctcagggatccctgagcgattctctggctccaactctgggaacacagccactctgaccatcagcgggacccaggctatggatgaggctgactattactgtcaggcgtgggacagcaccactctggttttcggcggagggaccaagctgaccgtccta

SEQ ID NO: 27418 - protein, 106 aa, synthetic construct
  REGION 1..106: note = Description of Artificial Sequence: Synthetic polypeptide
SYELTQPPSVSVSPGQTASITCSGDKLGDKYACWYQQKPGQSPVLVIYQDTKRPSGIPERFSGSNSGNTATLTISGTQAMDEADYYCQAWDSTTLVFGGGTKLTVL

SEQ ID NO: 27419 - DNA, 318 bp, synthetic construct
  misc_feature 1..318: note = Description of Artificial Sequence: Synthetic polynucleotide
  source 1..318: mol_type = other DNA
tcctatgagctgactcagccaccctcagtgtccgtgtccccaggacagacagccagcatcacctgctctggagataaattgggtgataaatatgcttgctggtatcagcagaagccaggccagtcccctgtgctggtcatctatcaagatagcaagcggccctcagggatccctgagcgattctctggctccaactctgggaacacagccactctgaccatcagcgggacccaggctatggatgaggctgactattactgtcaggcgtgggacagcaccactctggttttcggcggagggaccaagctgaccgtccta

SEQ ID NO: 27420 - protein, 106 aa, synthetic construct
  REGION 1..106: note = Description of Artificial Sequence: Synthetic polypeptide
SYELTQPPSVSVSPGQTASITCSGDKLGDKYACWYQQKPGQSPVLVIYQDSKRPSGIPERFSGSNSGNTATLTISGTQAMDEADYYCQAWDSTTLVFGGGTKLTVL

SEQ ID NO: 27421 - DNA, 318 bp, synthetic construct
  misc_feature 1..318: note = Description of Artificial Sequence: Synthetic polynucleotide
  source 1..318: mol_type = other DNA
tcctatgagctgagtcagccaccctcagtgtccgtgtccccaggacagacagccagcatcacctgctctggagataaattgggggataaatatgttcactggtatcagcagaagccaggccagtcccctgtgttggtcatctatcaagatagcaagcggccctcagggatccctgagcgattctctggctccaactctgggaacacagccactctgaccatcagcgggacccaggctatggatgaggctgattattactgtcaggcgtgggacaacagcactgcggtattcggcggagggaccaagttgaccgtccta

SEQ ID NO: 27422 - protein, 106 aa, synthetic construct
  REGION 1..106: note = Description of Artificial Sequence: Synthetic polypeptide
SYELSQPPSVSVSPGQTASITCSGDKLGDKYVHWYQQKPGQSPVLVIYQDSKRPSGIPERFSGSNSGNTATLTISGTQAMDEADYYCQAWDNSTAVFGGGTKLTVL

SEQ ID NO: 27423 - DNA, 318 bp, synthetic construct
  misc_feature 1..318: note = Description of Artificial Sequence: Synthetic polynucleotide
  source 1..318: mol_type = other DNA
tcctatgagctgactcagccaccctcagtgtccgtgtccccaggacagacagccagcatcacctgctctggagataaattgggggataaatatgtttgttggtatcagcagaagccaggccagtcccctttgctggtcatctataaagatatcaagcggccctcagggatccctgagcgattctctggctccaactctggtaacacagccactctgaccatcagcgggacccaggctatggatgaggctgactattactgtcaggcgtgggacaccaacactgtgatattcggcggagggaccaagctgaccgtccta

SEQ ID NO: 27424 - protein, 106 aa, synthetic construct
  REGION 1..106: note = Description of Artificial Sequence: Synthetic polypeptide
SYELTQPPSVSVSPGQTASITCSGDKLGDKYVCWYQQKPGQSPLLVIYKDIKRPSGIPERFSGSNSGNTATLTISGTQAMDEADYYCQAWDTNTVIFGGGTKLTVL

SEQ ID NO: 27425 - DNA, 318 bp, synthetic construct
  misc_feature 1..318: note = Description of Artificial Sequence: Synthetic polynucleotide
  source 1..318: mol_type = other DNA
tcctatgagctgactcagccaccctcagtgtccgtgtccccaggacagacagccagcatcacctgctctggagataaattgggggataaatatgtttgttggtatcagcggaagccaggccagtcccctgttctggtcatctatcaggattacaagcggccctcagggatccctgagcgattctctggctccaactctgggaacacagccactctgaccatcagcgggacccaggctatggatgaggctgactattactgtcaggcgtgggacaccaacactgtgcttttcggcggagggaccaagctgaccgtcctg

SEQ ID NO: 27426 - protein, 106 aa, synthetic construct
  REGION 1..106: note = Description of Artificial Sequence: Synthetic polypeptide
SYELTQPPSVSVSPGQTASITCSGDKLGDKYVCWYQRKPGQSPVLVIYQDYKRPSGIPERFSGSNSGNTATLTISGTQAMDEADYYCQAWDTNTVLFGGGTKLTVL

SEQ ID NO: 27427 - DNA, 318 bp, synthetic construct
  misc_feature 1..318: note = Description of Artificial Sequence: Synthetic polynucleotide
  source 1..318: mol_type = other DNA
gcctatgacctgactcagccaccctcagtgtccgtgtccccaggacagacagccagaatcacctgctctggagataaattggggggaaaatatgcttcctggtatcaacagaagccaggccagtcccctgtgctggtcatctatcaagataggaagcggccctcagggatccctgagcgattctctggctccaactctgggaacacagccactctgaccatcagcgggacccaggctatggatgaggctgactattactgtcaggcgtgggacaagaacactgtggtattcggcggagggaccaagctgaccgtccta

SEQ ID NO: 27428 - protein, 106 aa, synthetic construct
  REGION 1..106: note = Description of Artificial Sequence: Synthetic polypeptide
AYDLTQPPSVSVSPGQTARITCSGDKLGGKYASWYQQKPGQSPVLVIYQDRKRPSGIPERFSGSNSGNTATLTISGTQAMDEADYYCQAWDKNTVVFGGGTKLTVL

SEQ ID NO: 27429 - DNA, 318 bp, synthetic construct
  misc_feature 1..318: note = Description of Artificial Sequence: Synthetic polynucleotide
  source 1..318: mol_type = other DNA
tcctatgagctgactcagccaccctcagtgtccgtgtccccaggacagacagccagcatcacctgctctggagataaattgggggataaatatgcttgctggtatcagcagaagccaggccagtcccctgtgctggtcatctatcaagatagtaagcggccctcagggatccctgagcgattctctggctccaactctgggaacacagccactctgaccatcagcgggacccaggctatggatgaggctgactattactgtcaggcgtgggacaacagcactgcggtattcggcggagggaccaagctgaccgtccta

SEQ ID NO: 27430 - protein, 106 aa, synthetic construct
  REGION 1..106: note = Description of Artificial Sequence: Synthetic polypeptide
SYELTQPPSVSVSPGQTASITCSGDKLGDKYACWYQQKPGQSPVLVIYQDSKRPSGIPERFSGSNSGNTATLTISGTQAMDEADYYCQAWDNSTAVFGGGTKLTVL

SEQ ID NO: 27431 - DNA, 330 bp, synthetic construct
  misc_feature 1..330: note = Description of Artificial Sequence: Synthetic polynucleotide
  source 1..330: mol_type = other DNA
aattttatgctgactcagccccactctgtgtcggagtctccggggaagacggtaaccatctcctgcacccgcagcagtggcagcattaccggcaactatgtgcagtggcaccagcagcgcccgggcaattcccccaccactttgatctatgaggataaaaaaagaccctctggggtccctgatcggttctctggctccatcgacagctcctccaactctgcctccctcaccatctctggactgaagactgaggacgaggctgactattactgtcagtcttattatagcggcaattgggtgttcggcggagggaccaagctgaccgtcctg

SEQ ID NO: 27432 - protein, 110 aa, synthetic construct
  REGION 1..110: note = Description of Artificial Sequence: Synthetic polypeptide
NFMLTQPHSVSESPGKTVTISCTRSSGSITGNYVQWHQQRPGNSPTTLIYEDKKRPSGVPDRFSGSIDSSSNSASLTISGLKTEDEADYYCQSYYSGNWVFGGGTKLTVL

SEQ ID NO: 27433 - DNA, 318 bp, synthetic construct
  misc_feature 1..318: note = Description of Artificial Sequence: Synthetic polynucleotide
  source 1..318: mol_type = other DNA
tcctatgagttgagtcagccaccctcagtgtccgtgtccccaggacagacagccagcatcacctgctctggagataaattgggggataaatattcttgctggtatcagcagaagccaggccagtcccctgtgctggtcatctatcaagatagtaagcggccctcagggatccctgcacgattctctggctccaactctgggaacacagccactctgaccatcagcgggacccaggctatggatgaggctgattattactgtcaggcgtgggacagcaacactgcggtattcggcggagggaccaaactgaccgtccta

SEQ ID NO: 27434 - protein, 106 aa, synthetic construct
  REGION 1..106: note = Description of Artificial Sequence: Synthetic polypeptide
SYELSQPPSVSVSPGQTASITCSGDKLGDKYSCWYQQKPGQSPVLVIYQDSKRPSGIPARFSGSNSGNTATLTISGTQAMDEADYYCQAWDSNTAVFGGGTKLTVL

SEQ ID NO: 27435 - DNA, 318 bp, synthetic construct
  misc_feature 1..318: note = Description of Artificial Sequence: Synthetic polynucleotide
  source 1..318: mol_type = other DNA
tcctatgacctgactcagccaccctcagtgtccgtgtccccaggacagacagccagcatcacctgctctggagataaattgggggataaatatgcttgttggtatcagcagaagccaggccagtcccctatactggtcatctatcaagattacaagcggccctcagggatccctgagcgattctctggctccaactctgggaacacagccactctgaccatcagcgggacccaggctatggatgaggctgactattattgtcaggcgtgggacaacagcactatggtattcggcggagggaccaggctgaccgtccta

SEQ ID NO: 27436 - protein, 106 aa, synthetic construct
  REGION 1..106: note = Description of Artificial Sequence: Synthetic polypeptide
SYDLTQPPSVSVSPGQTASITCSGDKLGDKYACWYQQKPGQSPILVIYQDYKRPSGIPERFSGSNSGNTATLTISGTQAMDEADYYCQAWDNSTMVFGGGTRLTVL

SEQ ID NO: 27437 - DNA, 318 bp, synthetic construct
  misc_feature 1..318: note = Description of Artificial Sequence: Synthetic polynucleotide
  source 1..318: mol_type = other DNA
gcctatgacctgactcagccaccctcagtgtccgtgtccccaggacagacagccagcatcacctgctctggagataaattggggggaaaatatgcttcctggtatcaacagaagccaggccagtcccctgtgctggtcatctatcaagataggaagcggccctcagggatccctgagcgattctctggctccaactctgggaacacagccactctgaccatcagcgggacccaggctatggatgaggctgactattactgtcaggcgtgggacaagaacactgtggtattcggcggagggaccaagctgaccgtccta

SEQ ID NO: 27438 - protein, 106 aa, synthetic construct
  REGION 1..106: note = Description of Artificial Sequence: Synthetic polypeptide
AYDLTQPPSVSVSPGQTASITCSGDKLGGKYASWYQQKPGQSPVLVIYQDRKRPSGIPERFSGSNSGNTATLTISGTQAMDEADYYCQAWDKNTVVFGGGTKLTVL

SEQ ID NO: 27439 - DNA, 324 bp, synthetic construct
  misc_feature 1..324: note = Description of Artificial Sequence: Synthetic polynucleotide
  source 1..324: mol_type = other DNA
tcttctgagctgactcaggaccctgctgtgtctgtggccttgggacagacagtcaggatcacatgccaaggagacagcctcagaagctattatgcaagctggtaccagcagaagccaggacaggcccctatacttgtcatctatgctaaaaacaaccggccctcagggatcccagaccgattctctggctccaactcaggaaacacagcttccttgaccatcactggggctcaggcggaagatgaggctgactattactgtaactcccgggacagcagtggcagccatgtggtattcggcggagggaccaaactgaccgtccta

SEQ ID NO: 27440 - protein, 108 aa, synthetic construct
  REGION 1..108: note = Description of Artificial Sequence: Synthetic polypeptide
SSELTQDPAVSVALGQTVRITCQGDSLRSYYASWYQQKPGQAPILVIYAKNNRPSGIPDRFSGSNSGNTASLTITGAQAEDEADYYCNSRDSSGSHVVFGGGTKLTVL

SEQ ID NO: 27441 - DNA, 321 bp, synthetic construct
  misc_feature 1..321: note = Description of Artificial Sequence: Synthetic polynucleotide
  source 1..321: mol_type = other DNA
tcctatgagctgactcagccaccctcagtgtccgtgtccccaggacagacagccagcatcacctgctctggagataaattgggggataaatatgcttgctggtatcagcagaagccaggccagtcccctgtgctggtcatctatcaagatcgcaagcggccctcagggatccctgagcgattctctggctccaactctgggaacacagccaccctgaccatcagcgggacccaggctatggatgaggctgactattactgtcaggcgtgggacatcagcacttatgtggtattcggcggagggaccaaactgaccgtccta

SEQ ID NO: 27442 - protein, 107 aa, synthetic construct
  REGION 1..107: note = Description of Artificial Sequence: Synthetic polypeptide
SYELTQPPSVSVSPGQTASITCSGDKLGDKYACWYQQKPGQSPVLVIYQDRKRPSGIPERFSGSNSGNTATLTISGTQAMDEADYYCQAWDISTYVVFGGGTKLTVL

SEQ ID NO: 27443 - DNA, 324 bp, synthetic construct
  misc_feature 1..324: note = Description of Artificial Sequence: Synthetic polynucleotide
  source 1..324: mol_type = other DNA
tcttctgagctgactcaggaccctgctgtgtctgtggccttgggacagacagtcaggatcacatgccaaggagacagcctcagaaactattatgtaagctggtaccagcagaagccaggacaggcccctatacttgtcatctatactaaaaacagccggccctcagggatcccagaccgattctctggctccacctcaggaaacacagcttccttgaccatcactgggactcaggcggaagatgaggctgactattactgtaactcccgggacagcagtggcaaccatgtggtattcggcggagggaccaagctgaccgtccta

SEQ ID NO: 27444 - protein, 108 aa, synthetic construct
  REGION 1..108: note = Description of Artificial Sequence: Synthetic polypeptide
SSELTQDPAVSVALGQTVRITCQGDSLRNYYVSWYQQKPGQAPILVIYTKNSRPSGIPDRFSGSTSGNTASLTITGTQAEDEADYYCNSRDSSGNHVVFGGGTKLTVL

SEQ ID NO: 27445 - DNA, 324 bp, synthetic construct
  misc_feature 1..324: note = Description of Artificial Sequence: Synthetic polynucleotide
  source 1..324: mol_type = other DNA
tcttctgagctgactcaggaccctgctgtgtctgtggccttgggacagacagtcaggatcacatgccaaggagacagcctcagaaactattatgcaagctggtaccagcagaagccaggacaggcccctatacttgtcatctatactaaaaacagccggccctcagggatcccagaccgattctctggctccacctcaggaaacacagcttccttgaccatcactggggctcaggcggaagatgaggctgactattactgtaactcccgggacagcagtggcaaccatgtggtattcggcggagggaccaagctgaccgtccta

SEQ ID NO: 27446 - protein, 108 aa, synthetic construct
  REGION 1..108: note = Description of Artificial Sequence: Synthetic polypeptide
SSELTQDPAVSVALGQTVRITCQGDSLRNYYASWYQQKPGQAPILVIYTKNSRPSGIPDRFSGSTSGNTASLTITGAQAEDEADYYCNSRDSSGNHVVFGGGTKLTVL

SEQ ID NO: 27447 - DNA, 318 bp, synthetic construct
  misc_feature 1..318: note = Description of Artificial Sequence: Synthetic polynucleotide
  source 1..318: mol_type = other DNA
tcctatgagctgactcagccaccctcagtgtccgtgtccccaggacagacagccagcatcacctgctctggaaataaattggggaataaatatgtttgctggtatcagcagaggccaggccagtcccctgtgctggtcatctctcaagatagcaggcggccctcagggatccctgagcgattctctggctccaactctgggaacacagccactctgaccatcagcgggacccaggctatggatgaggctgactattactgtcaggcgtgggacagcttcactgtggtattcggcggagggaccaagctgaccgtccta

SEQ ID NO: 27448 - protein, 106 aa, synthetic construct
  REGION 1..106: note = Description of Artificial Sequence: Synthetic polypeptide
SYELTQPPSVSVSPGQTASITCSGNKLGNKYVCWYQQRPGQSPVLVISQDSRRPSGIPERFSGSNSGNTATLTISGTQAMDEADYYCQAWDSFTVVFGGGTKLTVL

SEQ ID NO: 27449 - DNA, 333 bp, synthetic construct
  misc_feature 1..333: note = Description of Artificial Sequence: Synthetic polynucleotide
  source 1..333: mol_type = other DNA
cagtctgccctgactcagcctgcctccgtgtctgggtctcctggacagtcgatcaccatctcctgcactggaaccagcagtgatgttggacgttttaaccttgtctcctggtaccaacagcacccaggctacgcccccaaactcatgatttatgaggtcagtaagcggccctcaggggtttctaatcgcttctctggctccaagtctggcaacacggcctccctgacaatctctgggctccaggctgaggacgaggctgattattactgctgctcatatgcaggtagtagcacctatgtggtattcggcggagggaccaagctgaccgtcctg

SEQ ID NO: 27450 - protein, 111 aa, synthetic construct
  REGION 1..111: note = Description of Artificial Sequence: Synthetic polypeptide
QSALTQPASVSGSPGQSITISCTGTSSDVGRFNLVSWYQQHPGYAPKLMIYEVSKRPSGVSNRFSGSKSGNTASLTISGLQAEDEADYYCCSYAGSSTYVVFGGGTKLTVL

SEQ ID NO: 27451 - DNA, 318 bp, synthetic construct; identical to SEQ ID NO: 27435
  misc_feature 1..318: note = Description of Artificial Sequence: Synthetic polynucleotide
  source 1..318: mol_type = other DNA

SEQ ID NO: 27452 - protein, 106 aa, synthetic construct; identical to SEQ ID NO: 27436
  REGION 1..106: note = Description of Artificial Sequence: Synthetic polypeptide

SEQ ID NO: 27453 - DNA, 333 bp, synthetic construct
  misc_feature 1..333: note = Description of Artificial Sequence: Synthetic polynucleotide
  source 1..333: mol_type = other DNA
cagtctgccctgactcagcctgcctccgtgtctgggtctcctggacagtcgatcaccatctcctgcactggaaccagcagtgatgttggacgttttaaccttgtctcctggtaccaacaccacccaggcaacgcccccaaactcatgatttatgaagtcagtaagcggccctcaggggtttctaatcgcttctctggctccaagtctggcaacacggcctccctgacaatctctgggctccaggctgaggacgaggctgattattactgctgctcatatgcaggtagtagcacctttgtagtattcggcggagggaccaagctgaccgtccta

SEQ ID NO: 27454 - protein, 111 aa, synthetic construct
  REGION 1..111: note = Description of Artificial Sequence: Synthetic polypeptide
QSALTQPASVSGSPGQSITISCTGTSSDVGRFNLVSWYQHHPGNAPKLMIYEVSKRPSGVSNRFSGSKSGNTASLTISGLQAEDEADYYCCSYAGSSTFVVFGGGTKLTVL

SEQ ID NO: 27455 - DNA, 324 bp, synthetic construct
  misc_feature 1..324: note = Description of Artificial Sequence: Synthetic polynucleotide
  source 1..324: mol_type = other DNA
tcttctgagctgactcaggaccctgctgtgtctgtggccttgggacagacagtcaggatcacatgccaaggagacagtctcagaaactattatgcaagctggtaccagcagaagccaggacaggcccctgtatttgtcatctatggtaaaaacaaccggccctcagggatcccagaccgattctctggctccaggtcaggaaacacagcttccttgaccatcactggggctcaggcggaagatgaggctgactattactgtaactcccgggacagcagtggtaaccattgggtgttcggcggagggaccaaactgaccgtccta

SEQ ID NO: 27456 - protein, 108 aa, synthetic construct
  REGION 1..108: note = Description of Artificial Sequence: Synthetic polypeptide
SSELTQDPAVSVALGQTVRITCQGDSLRNYYASWYQQKPGQAPVFVIYGKNNRPSGIPDRFSGSRSGNTASLTITGAQAEDEADYYCNSRDSSGNHWVFGGGTKLTVL

SEQ ID NO: 27457 - DNA, 321 bp, synthetic construct
  misc_feature 1..321: note = Description of Artificial Sequence: Synthetic polynucleotide
  source 1..321: mol_type = other DNA
tcctatgagctgactcagccaccctcagtgtccgtgtccccaggacagacagccagtatcacctgctctggagataaattgggggataaatatgtttgctggtatcaacagaggccgggccagtcccctgtgctggtcatctatcaggatagtaagcggccctcagggatccctgagcgattctctggctccaactctgggaacacagccactctgaccatccgcgggacccaggctatggatgaggctgactattactgtcaggcgtgggacagcaacactgcagtggtattcggcggagggaccaagctgaccgtccta

SEQ ID NO: 27458 - protein, 107 aa, synthetic construct
  REGION 1..107: note = Description of Artificial Sequence: Synthetic polypeptide
SYELTQPPSVSVSPGQTASITCSGDKLGDKYVCWYQQRPGQSPVLVIYQDSKRPSGIPERFSGSNSGNTATLTIRGTQAMDEADYYCQAWDSNTAVVFGGGTKLTVL

SEQ ID NO: 27459 - DNA, 330 bp, synthetic construct
  misc_feature 1..330: note = Description of Artificial Sequence: Synthetic polynucleotide
  source 1..330: mol_type = other DNA
cagtctgtgttgacgcagccgccctcagtgtctggggccccagggcagagggtcaccatctcctgcactgggagcagctccaacttcgggacagattatgatgtacactggtaccagcaatttccaggaacagcccccaaactcctcatctatggtcacagcaaccggccctcaggggtccctgaccgattttctggctccaagtctggcacctcagcctccctggccatcactgggctccaggctgaggatgaggctgattattactgccagtcctatgatagaagcctgaatgtggtcttcggcggagggaccaagctgaccgtccta

SEQ ID NO: 27460 - protein, 110 aa, synthetic construct
  REGION 1..110: note = Description of Artificial Sequence: Synthetic polypeptide
QSVLTQPPSVSGAPGQRVTISCTGSSSNFGTDYDVHWYQQFPGTAPKLLIYGHSNRPSGVPDRFSGSKSGTSASLAITGLQAEDEADYYCQSYDRSLNVVFGGGTKLTVL

SEQ ID NO: 27461 - DNA, 318 bp, synthetic construct
  misc_feature 1..318: note = Description of Artificial Sequence: Synthetic polynucleotide
  source 1..318: mol_type = other DNA
tcctatgagctgactcagacaccctcagtgtccgtgtccccaggacagacagccagcatcacctgctctggagatagattgggggataaatatgcttgctggtatcagcagaagccaggccagtcccctgtgctggtcatctatgaagataggaagcggccctcagggatccctgagcgattctctggctccaactctgggaacacagccactctgaccatcagcgggacccaggctatggatgagggtgactattactgtcaggcgtgggacagtaggaaagtggtattcggcggagggaccaagctgaccgtccta

SEQ ID NO: 27462 - protein, 106 aa, synthetic construct
  REGION 1..106: note = Description of Artificial Sequence: Synthetic polypeptide
SYELTQTPSVSVSPGQTASITCSGDRLGDKYACWYQQKPGQSPVLVIYEDRKRPSGIPERFSGSNSGNTATLTISGTQAMDEGDYYCQAWDSRKVVFGGGTKLTVL

SEQ ID NO: 27463 - DNA, 318 bp, synthetic construct
  misc_feature 1..318: note = Description of Artificial Sequence: Synthetic polynucleotide
  source 1..318: mol_type = other DNA
tcctatgaactgactcagccaccctcagtgtccgtgtccccaggacagacagccagcatcacctgctctggagataaattgggggaaaaatatgcttgctggtatcagcagaagccaggccagtcccctgtactggtcatctatcaagatagaaagcggccctcagggatccctgagcgattctctggctccaactctgggaacacagccactctgaccatcagcgggacccaggctatggatgaggctgactattactgtcaggcgtgggacagcagcactgcggtattcggcggagggaccaagctgaccgtccta

SEQ ID NO: 27464 - protein, 106 aa, synthetic construct
  REGION 1..106: note = Description of Artificial Sequence: Synthetic polypeptide
SYELTQPPSVSVSPGQTASITCSGDKLGEKYACWYQQKPGQSPVLVIYQDRKRPSGIPERFSGSNSGNTATLTISGTQAMDEADYYCQAWDSSTAVFGGGTKLTVL

SEQ ID NO: 27465 - DNA, 318 bp, synthetic construct
  misc_feature 1..318: note = Description of Artificial Sequence: Synthetic polynucleotide
  source 1..318: mol_type = other DNA
tcctatgagctgactcagccaccctcagtgtccgtgtacccaggacagacagccagcatcacctgctctggagataaattgggggataaatatgttagctggtatcaacagaagccaggccagtcccctgttctggtcatctatcaagatagcaagcggccctcagggatccctgagcgattctctggctccaactctgggaacccagcctctctgaccatcagcgggacccaggctatggatgaggctgactattactgtcaggcgtgggacatcaccactgcggtattcggcggagggaccaagctgaccgtccta

SEQ ID NO: 27466 - protein, 106 aa, synthetic construct
  REGION 1..106: note = Description of Artificial Sequence: Synthetic polypeptide
SYELTQPPSVSVYPGQTASITCSGDKLGDKYVSWYQQKPGQSPVLVIYQDSKRPSGIPERFSGSNSGNPASLTISGTQAMDEADYYCQAWDITTAVFGGGTKLTVL

SEQ ID NO: 27467 - DNA, 318 bp, synthetic construct
  misc_feature 1..318: note = Description of Artificial Sequence: Synthetic polynucleotide
  source 1..318: mol_type = other DNA
tcctatgagctgactcagacaccctcagtgtccgtgtccccaggacagacagccagcatcacctgctctggagataaattgggggataaatatgcttgctggtatcagcagaagccaggccagtcccctgtgctggtcatctatgaagataggaagcggccctcagggatccctgagcgattctctggctccaactctgggaacacagccactctgaccatcagcgggacccaggctatggatgaggctgactattactgtcaggcgtgggacagcaggaaagtggtattcggcggagggaccaagctgaccgtccta

SEQ ID NO: 27468 - protein, 106 aa, synthetic construct
  REGION 1..106: note = Description of Artificial Sequence: Synthetic polypeptide
SYELTQTPSVSVSPGQTASITCSGDKLGDKYACWYQQKPGQSPVLVIYEDRKRPSGIPERFSGSNSGNTATLTISGTQAMDEADYYCQAWDSRKVVFGGGTKLTVL

SEQ ID NO: 27469 - DNA, 330 bp, synthetic construct
  misc_feature 1..330: note = Description of Artificial Sequence: Synthetic polynucleotide
  source 1..330: mol_type = other DNA
cagtctgtgctgactcagccaccctcagcgtctgggacccccgggcagagggtcaccatctcttgttctggaagcagctccaacatcggaagtaatattgtgacctggtaccagcagctcccaggaacggcccccaaactcctcatctatagtaatgatcagcggccctcaggggtccctgaccgattctctggctccaagtctggcacctcagcctccctggccatcagtgggctccagtctgaggatgagactgattattactgtacagcatgggatgacagcctgaatggttgggtgttcggcggagggaccacgctgaccgtccta

SEQ ID NO: 27470 - protein, 110 aa, synthetic construct
  REGION 1..110: note = Description of Artificial Sequence: Synthetic polypeptide
QSVLTQPPSASGTPGQRVTISCSGSSSNIGSNIVTWYQQLPGTAPKLLIYSNDQRPSGVPDRFSGSKSGTSASLAISGLQSEDETDYYCTAWDDSLNGWVFGGGTTLTVL

SEQ ID NO: 27471 - DNA, 333 bp, synthetic construct
  misc_feature 1..333: note = Description of Artificial Sequence: Synthetic polynucleotide
  source 1..333: mol_type = other DNA
cagtctgtgctgacgcagccgccctcagtgtctggggccccagggcagagggtcaccatctcctgcactgggagcagctccaacatcggggcaggttttgaagtacactggtaccagcagcttccaggaacagcccccaaactcctcatctatggtaacagcaatcggccctcaggggtccctgaccgattctctggctccaagtctggcacctcagcctccctggccatcactgggctccaggctgaggatgaggctgattattactgccagtcctatgacagcagcctgagtggttatgtcttcggaactgggaccaaggtcaccgtccta

SEQ ID NO: 27472 - protein, 111 aa, synthetic construct
  REGION 1..111: note = Description of Artificial Sequence: Synthetic polypeptide
QSVLTQPPSVSGAPGQRVTISCTGSSSNIGAGFEVHWYQQLPGTAPKLLIYGNSNRPSGVPDRFSGSKSGTSASLAITGLQAEDEADYYCQSYDSSLSGYVFGTGTKVTVL

SEQ ID NO: 27473 - DNA, 330 bp, synthetic construct
  misc_feature 1..330: note = Description of Artificial Sequence: Synthetic polynucleotide
  source 1..330: mol_type = other DNA
cagtctgtgctgactcagccaccctcagcgtctgggacccccgggcagagggtcaccatctcttgttctggaagcagctccaacatcggaagtaatattgtgacctggtaccagcagctcccaggaacggcccccaaactcctcatctatagtaatgatcagcggccctcaggggtccctgaccgattctctggctccaagtctggcacctcagcctccctggccatcagtgggctccagtctgaggatgaggctgattattactgtgcagcatgggatgacagcctgaatggttgggtgttcggcggagggaccacgctgaccgtccta

SEQ ID NO: 27474 - protein, 110 aa, synthetic construct
  REGION 1..110: note = Description of Artificial Sequence: Synthetic polypeptide
QSVLTQPPSASGTPGQRVTISCSGSSSNIGSNIVTWYQQLPGTAPKLLIYSNDQRPSGVPDRFSGSKSGTSASLAISGLQSEDEADYYCAAWDDSLNGWVFGGGTTLTVL

SEQ ID NO: 27475 - DNA, 318 bp, synthetic construct
  misc_feature 1..318: note = Description of Artificial Sequence: Synthetic polynucleotide
  source 1..318: mol_type = other DNA
tcctatgagctgactcagccaccctcagtgttcgtgtccccaggacagacagccagcatcacctcctctggagataaattgggggataaatatgtttcctggtatcagcagaagccaggccagtcccctgtgctggtcatctatcaagatagaaagcggccctcagggatccctgagcgattctctggctccaattctgggaatacagccactctgaccatcagcgggacccaggctatggatgaggctgactattattgtcaggcgtgggacaacagcactgtggtattcggcggagggaccaagctgaccgtccta

SEQ ID NO: 27476 - protein, 106 aa, synthetic construct
  REGION 1..106: note = Description of Artificial Sequence: Synthetic polypeptide
SYELTQPPSVFVSPGQTASITSSGDKLGDKYVSWYQQKPGQSPVLVIYQDRKRPSGIPERFSGSNSGNTATLTISGTQAMDEADYYCQAWDNSTVVFGGGTKLTVL

SEQ ID NO: 27477 - DNA, 330 bp, synthetic construct
  misc_feature 1..330: note = Description of Artificial Sequence: Synthetic polynucleotide
  source 1..330: mol_type = other DNA
cagtctgccctgactcagcctgcctccgtgtctgggtctcctggacagtcgatcaccatctcctgcactggaaccagcagtgacgttggtggttataactatgtctcctggtaccaacagcacccaggcaaagcccccaaactcatgatttatgaggtcagtaatcggccctcaggggtttctaatcgcttctctggctccaagtctggcaatacggcctccctgaccatctctgggctccaggctgaggacgaggctgattattactgcaactcatatacaagcaacatcacttgggtgttcggcggagggaccaagctgaccgtccta

SEQ ID NO: 27478 - protein, 110 aa, synthetic construct
  REGION 1..110: note = Description of Artificial Sequence: Synthetic polypeptide
QSALTQPASVSGSPGQSITISCTGTSSDVGGYNYVSWYQQHPGKAPKLMIYEVSNRPSGVSNRFSGSKSGNTASLTISGLQAEDEADYYCNSYTSNITWVFGGGTKLTVL

SEQ ID NO: 27479 - DNA, 318 bp, synthetic construct
  misc_feature 1..318: note = Description of Artificial Sequence: Synthetic polynucleotide
  source 1..318: mol_type = other DNA
tcctatgagctgactcagccaccctcagtgtccgtgtccccaggacagacagccagcatcacctgctctggaactaaattgggggataaatatgtttgctggtatcaacagaagccaggccagtcccctgtgttggtcatcaatcaagatacaatgcggccctcagggatccctgagcgattctctggctccaactctgggaacacagccactctgaccatcagcgggacccaggctatggatgaggctgactattactgtcagacgtgggacagcagcactgcggttttcggcggagggaccacgctgaccgtccta

SEQ ID NO: 27480 - protein, 106 aa, synthetic construct
  REGION 1..106: note = Description of Artificial Sequence: Synthetic polypeptide
SYELTQPPSVSVSPGQTASITCSGTKLGDKYVCWYQQKPGQSPVLVINQDTMRPSGIPERFSGSNSGNTATLTISGTQAMDEADYYCQTWDSSTAVFGGGTTLTVL

SEQ ID NO: 27481 - DNA, 330 bp, synthetic construct
  misc_feature 1..330: note = Description of Artificial Sequence: Synthetic polynucleotide
  source 1..330: mol_type = other DNA
cagtctgtgctgactcagccaccctcagcgtctgggacccccgggcagagggtcaccatctcttgttctggaagcaactccaacatcggaaataatattgtcacctggtaccagcagctcccaggaacggcccccaaactcctcatctatgttaatgatcagcggccctcaggggtccctgaccgattctctggctccaagtctggcacctctgcctccctggccatcagtgggctccagtctgaggatgaggctgattattactgtgcagcatgggatgacagcctgaatggttgggtgttcggcggggggaccacgctgaccgtccta

SEQ ID NO: 27482 - protein, 110 aa, synthetic construct
  REGION 1..110: note = Description of Artificial Sequence: Synthetic polypeptide
QSVLTQPPSASGTPGQRVTISCSGSNSNIGNNIVTWYQQLPGTAPKLLIYVNDQRPSGVPDRFSGSKSGTSASLAISGLQSEDEADYYCAAWDDSLNGWVFGGGTTLTVL

SEQ ID NO: 27483 - DNA, 330 bp, synthetic construct
  misc_feature 1..330: note = Description of Artificial Sequence: Synthetic polynucleotide
  source 1..330: mol_type = other DNA
cagtctgtgctgactcagccaccctcagcgtctgggacccccgggcagagggtcaccatctcttgttctggaagcagctccaacatcggaagtcatattgttacctggtaccagcagctcccaggaacggcccccaaactcctcatctacagtaatgatcagcggccctcaggggtccctgaccgattctctggctccaagtctggcacctcagcctccctggccatcagtgggctccagtctgaggatgaggctgattattactgtgcagtatgggatgacagcctgattggttgggtgttcggcggagggaccacgctgaccgtccta

SEQ ID NO: 27484 - protein, 110 aa, synthetic construct
  REGION 1..110: note = Description of Artificial Sequence: Synthetic polypeptide
QSVLTQPPSASGTPGQRVTISCSGSSSNIGSHIVTWYQQLPGTAPKLLIYSNDQRPSGVPDRFSGSKSGTSASLAISGLQSEDEADYYCAVWDDSLIGWVFGGGTTLTVL

SEQ ID NO: 27485 - DNA, 330 bp, synthetic construct
  misc_feature 1..330: note = Description of Artificial Sequence: Synthetic polynucleotide
  source 1..330: mol_type = other DNA
cagtctgtgctgactcagccaccctcagcgtctgggacccccgggcagagggtcaccatctcttgttctggaagcagctccaacatcggaagtaatattgttacctggtaccagcagctcccaggaacggcccccaaactcctcatctatagtaataatcagcggccctcaggggtccctgaccgattctctggctccaagtctggcacctcagcctccctggccatcagtggactccagtctgaggatgaggctgattattgctgtgcagcatgggatgacagcctgaatggttgggtgttcggcggagggaccacgctgaccgtccta

SEQ ID NO: 27486 - protein, 110 aa, synthetic construct
  REGION 1..110: note = Description of Artificial Sequence: Synthetic polypeptide
QSVLTQPPSASGTPGQRVTISCSGSSSNIGSNIVTWYQQLPGTAPKLLIYSNNQRPSGVPDRFSGSKSGTSASLAISGLQSEDEADYCCAAWDDSLNGWVFGGGTTLTVL

SEQ ID NO: 27487 - DNA, 318 bp, synthetic construct
  misc_feature 1..318: note = Description of Artificial Sequence: Synthetic polynucleotide
  source 1..318: mol_type = other DNA
tcctatgagctgactcagccaccctcagcgtccgtgtccccaggacagacagccagcatcacctgctctggagataaactgggggaaaaatatgcttgctggtatcagcagaagccaggccagtcccctgtgttggtcatctatcaagataggaagcggccctcagggatccctgagcgattctctggctccaattctgggaacacagccactctgaccatcagcgggacccaggctatggatgaggctgactattactgtcaggcgtgggacagcagcactgtggtattcggcggagggaccaaactgaccgtccta

SEQ ID NO: 27488 - protein, 106 aa, synthetic construct
  REGION 1..106: note = Description of Artificial Sequence: Synthetic polypeptide
SYELTQPPSASVSPGQTASITCSGDKLGEKYACWYQQKPGQSPVLVIYQDRKRPSGIPERFSGSNSGNTATLTISGTQAMDEADYYCQAWDSSTVVFGGGTKLTVL

SEQ ID NO: 27489 - DNA, 318 bp, synthetic construct
  misc_feature 1..318: note = Description of Artificial Sequence: Synthetic polynucleotide
  source 1..318: mol_type = other DNA
tcctatgagctgactcagccaccctcagtgtccgtgtccccaggacagacagccagcatcacctgctctggagagaaattgggggaaaaatttgcttgctggtctcagcagaagccaggccagtcccctgtgttggtcatctatcaagatagcaagcggccctcagggatccctgagcgattctctggctccaactctgggaacacagccactctgaccatcagcgggacccaggctatggatgaggctgactattactgtcaggcgtgggacagcagcactgtggtattcggcggagggaccaagctgaccgtccta

SEQ ID NO: 27490 - protein, 106 aa, synthetic construct
  REGION 1..106: note = Description of Artificial Sequence: Synthetic polypeptide
SYELTQPPSVSVSPGQTASITCSGEKLGEKFACWSQQKPGQSPVLVIYQDSKRPSGIPERFSGSNSGNTATLTISGTQAMDEADYYCQAWDSSTVVFGGGTKLTVL

SEQ ID NO: 27491 - DNA, 318 bp, synthetic construct
  misc_feature 1..318: note = Description of Artificial Sequence: Synthetic polynucleotide
  source 1..318: mol_type = other DNA
tcctatgcgctgactcagccaccctcagcgtccgtgtccccaggacagacagccagcatcacctgctctggagataaactgggggaaaaatatgcttgctggtatcagcagaagccaggccagtcccctgtgttggtcatctatcaagataggaagcggccctcagggatccctgagcgattctctggctccaattctgggaacacagccactctgaccatcagcgggacccaggctatggatgaggctgactattactgtcaggcgtgggacagcagcactgtggtattcggcggagggaccaaactgaccgtccta

SEQ ID NO: 27492 - protein, 106 aa, synthetic construct
  REGION 1..106: note = Description of Artificial Sequence: Synthetic polypeptide
SYALTQPPSASVSPGQTASITCSGDKLGEKYACWYQQKPGQSPVLVIYQDRKRPSGIPERFSGSNSGNTATLTISGTQAMDEADYYCQAWDSSTVVFGGGTKLTVL

SEQ ID NO: 27493 - DNA, 315 bp, synthetic construct
  misc_feature 1..315: note = Description of Artificial Sequence: Synthetic polynucleotide
  source 1..315: mol_type = other DNA
tcctatgagctgactcagccaccctcagtgtccgtgtccccaggacagacagccaacatcacctgctctggagataaattggggaataaatatgcttgctggtatcagcagaagccaggccagtcccctgtattggtcatctatcaagataggaagcggccctcagggatccctgagcgattctctggctccaactctgggaacacagccactctgaccatcagcgggacccaggctatggatgaggctgactattactgtcaggcgtgggacagcagcactgcattcggcggagggaccaagctgaccgtcctc

SEQ ID NO: 27494 - protein, 105 aa, synthetic construct
  REGION 1..105: note = Description of Artificial Sequence: Synthetic polypeptide
SYELTQPPSVSVSPGQTANITCSGDKLGNKYACWYQQKPGQSPVLVIYQDRKRPSGIPERFSGSNSGNTATLTISGTQAMDEADYYCQAWDSSTAFGGGTKLTVL

SEQ ID NO: 27495 - DNA, 330 bp, synthetic construct
  misc_feature 1..330: note = Description of Artificial Sequence: Synthetic polynucleotide
  source 1..330: mol_type = other DNA
cagtctgtgttgacgcagccgccctcagtgtctgcggccccaggacagaaggtcaccatctcctgctctggaagcagctccaacattgggaataattatgtatcctggtaccagcagctcccaggaacagcccccaaactcctcatttatgacaataataagcgaccctcagggattcctgaccgattttctggctccaagtctggcacgtcagccaccctgggcatcaccggactccagactggggacgaggccgattattactgcggaacatgggatatcagtctgagtgttggggtattcggcggagggaccaagctgaccgtccta

SEQ ID NO: 27496 - protein, 110 aa, synthetic construct
  REGION 1..110: note = Description of Artificial Sequence: Synthetic polypeptide
QSVLTQPPSVSAAPGQKVTISCSGSSSNIGNNYVSWYQQLPGTAPKLLIYDNNKRPSGIPDRFSGSKSGTSATLGITGLQTGDEADYYCGTWDISLSVGVFGGGTKLTVL

SEQ ID NO: 27497 - DNA, 318 bp, synthetic construct
  misc_feature 1..318: note = Description of Artificial Sequence: Synthetic polynucleotide
  source 1..318: mol_type = other DNA
tcctatgaactgactcagtcaccctcggtgtccgtgtccccaggacagacagccagcatcacctgttctggagataaattgggggataaatatacttgctggtatcagaagaagccaggccagtcccctgtgctggtcatctatcaagataacaagcggccctcagggatccctgagcgattctctggctccaactctgggaacacagccactctgaccatcagcgggacccaggctatggatgaggctgactatttctgtcaggcgtggaacaactacactgtggtattcggcggagggaccaagctgaccgctcta

SEQ ID NO: 27498 - protein, 106 aa, synthetic construct
  REGION 1..106: note = Description of Artificial Sequence: Synthetic polypeptide
SYELTQSPSVSVSPGQTASITCSGDKLGDKYTCWYQKKPGQSPVLVIYQDNKRPSGIPERFSGSNSGNTATLTISGTQAMDEADYFCQAWNNYTVVFGGGTKLTAL

SEQ ID NO: 27499 - DNA, 318 bp, synthetic construct
  misc_feature 1..318: note = Description of Artificial Sequence: Synthetic polynucleotide
  source 1..318: mol_type = other DNA
tcctatgagctgactcagccaccctcagtgtccgtgtccccaggacagacagccagcatcacctgctctggagataaattgggggataaatatgcttgctggtatcagcagaagccaggccagtcccctgtgctggtcatctatcaagataggaagcggccctcagggatccctgagcgattctctggctccaactctgggaacacagccactctgaccatcagcgggacccaggctatggatgaggctgactattactgtcaggcgtgggacagcagcactgtggtattcggcggagggaccaagctgaccgtccta

SEQ ID NO: 27500 - protein, 106 aa, synthetic construct
  REGION 1..106: note = Description of Artificial Sequence: Synthetic polypeptide
SYELTQPPSVSVSPGQTASITCSGDKLGDKYACWYQQKPGQSPVLVIYQDRKRPSGIPERFSGSNSGNTATLTISGTQAMDEADYYCQAWDSSTVVFGGGTKLTVL

SEQ ID NO: 27501 - DNA, 318 bp, synthetic construct
  misc_feature 1..318: note = Description of Artificial Sequence: Synthetic polynucleotide
  source 1..318: mol_type = other DNA
tcctatgagctgactcagccaccctcagtgtccgtgtccccaggacagacagccagcatcacctgctctggagataaattgggaaataaatatgcttgctggtatcagcagaagccaggccagtcccctgtactggtcatctatcaagatagcaagcggccctcagggatccctgagcgattctctggctccaactctgggaacacagccactctgaccatcagcgggacccaggctatggatgaggctgactattactgtcaggcgtgggacagcagcactgtggtattcggcggagggaccaaactgaccgtccta

SEQ ID NO: 27502 - protein, 106 aa, synthetic construct
  REGION 1..106: note = Description of Artificial Sequence: Synthetic polypeptide
SYELTQPPSVSVSPGQTASITCSGDKLGNKYACWYQQKPGQSPVLVIYQDSKRPSGIPERFSGSNSGNTATLTISGTQAMDEADYYCQAWDSSTVVFGGGTKLTVL

SEQ ID NO: 27503 - DNA, 318 bp, synthetic construct
  misc_feature 1..318: note = Description of Artificial Sequence: Synthetic polynucleotide
  source 1..318: mol_type = other DNA
tcctatgagctgactcagccaccctcagtgtccgtgtccccaggacagacagccagcatcacctgctctggagataaattgggggataaatatgcttcctggtatcagcagaagccaggccagtcccctgtgctggtcatctatcaagataacaagcggccctcagggatccctgagcgcttctctggctccaactctgggaacacagccactctgaccatcagcgggacccaggctatggatgaggctgactattactgtcaggcgtggaacaacaacactgtaatgttcggcggagggaccaagctgaccgtccta

SEQ ID NO: 27504 - protein, 106 aa, synthetic construct
  REGION 1..106: note = Description of Artificial Sequence: Synthetic polypeptide
SYELTQPPSVSVSPGQTASITCSGDKLGDKYASWYQQKPGQSPVLVIYQDNKRPSGIPERFSGSNSGNTATLTISGTQAMDEADYYCQAWNNNTVMFGGGTKLTVL

SEQ ID NO: 27505 - DNA, 318 bp, synthetic construct
  misc_feature 1..318: note = Description of Artificial Sequence: Synthetic polynucleotide
  source 1..318: mol_type = other DNA
tcctatgaactgactcagccaccctcagtgtccgtgtccccaggacagacagccagcatcacctgctctggagataaattgggggataaatatgcttcttggtatcagcagaggccaggccagtcccctgtgttggtcatctatcaagataacaagcggccctcagggatccctgagcgattctctggctccaactctgggaacacagccactctgaccatcagcgggacccaggctatggatgaggctgactattactgtcaggcgtgggacaacaacactgtggtcttcggcggagggaccaagctgaccgtccta

SEQ ID NO: 27506 - protein, 106 aa, synthetic construct
  REGION 1..106: note = Description of Artificial Sequence: Synthetic polypeptide
SYELTQPPSVSVSPGQTASITCSGDKLGDKYASWYQQRPGQSPVLVIYQDNKRPSGIPERFSGSNSGNTATLTISGTQAMDEADYYCQAWDNNTVVFGGGTKLTVL

SEQ ID NO: 27507 - DNA, 321 bp, synthetic construct
  misc_feature 1..321: note = Description of Artificial Sequence: Synthetic polynucleotide
  source 1..321: mol_type = other DNA
tcctatgagctgactcagccaccctcagtgtccgtgtccccaggacagacagccagcatcacctgctctggagataaattgggggataaatatgcttgctggtatcagcagaagccaggccagtcccctgtgctggtcatctatcaagatagcaagcggccctcagggatccttgagcgattctctggctccaattctgggaacacagccactctgaccatcagcggaacccaggctatggatgaggctgactattactgtcaggcgtgggacagcagcacttatgtggtattcggcggagggaccaagctgaccgtccta

SEQ ID NO: 27508 - protein, 107 aa, synthetic construct
  REGION 1..107: note = Description of Artificial Sequence: Synthetic polypeptide
SYELTQPPSVSVSPGQTASITCSGDKLGDKYACWYQQKPGQSPVLVIYQDSKRPSGILERFSGSNSGNTATLTISGTQAMDEADYYCQAWDSSTYVVFGGGTKLTVL

SEQ ID NO: 27509 - DNA, 318 bp, synthetic construct; identical to SEQ ID NO: 27487
  misc_feature 1..318: note = Description of Artificial Sequence: Synthetic polynucleotide
  source 1..318: mol_type = other DNA

SEQ ID NO: 27510 - protein, 106 aa, synthetic construct; identical to SEQ ID NO: 27488
  REGION 1..106: note = Description of Artificial Sequence: Synthetic polypeptide

SEQ ID NO: 27511 - DNA, 318 bp, synthetic construct
  misc_feature 1..318: note = Description of Artificial Sequence: Synthetic polynucleotide
  source 1..318: mol_type = other DNA
tcctatgaactgactcagccaccctcagtgtccgtgtccccaggacagacagccagcatcacctgctctggaaataaattgggggataaatatgcttcttggtatcagcagaggccaggccagtcccctgtattagtcatctatcaagataacaagcggccctcagggatccctgagcgattctctggctccaactctggaaacacagccactctgaccatcagcgggacccagactatggatgaggctgactattactgtcaggcgtgggacaacaacactgtggtcttcggcggagggaccaagctgaccgtccta

SEQ ID NO: 27512 - protein, 106 aa, synthetic construct
  REGION 1..106: note = Description of Artificial Sequence: Synthetic polypeptide
SYELTQPPSVSVSPGQTASITCSGNKLGDKYASWYQQRPGQSPVLVIYQDNKRPSGIPERFSGSNSGNTATLTISGTQTMDEADYYCQAWDNNTVVFGGGTKLTVL

SEQ ID NO: 27513 - DNA, 315 bp, synthetic construct
  misc_feature 1..315: note = Description of Artificial Sequence: Synthetic polynucleotide
  source 1..315: mol_type = other DNA
tcctatgagctgactcagccaccctcagtgtccgtgtccccaggacagacagccaacatcacctgctctggagataaattggggaataaatatgcttgctggtatcagcagaagccaggccagtcccctgtattggtcatttatcaagataggaagcggccctcagggatccctgagcgattctctggctccaactctgggaacacagccattctgaccatcagcgggacccaggctatggatgaggctgactattactgtcaggcgtgggacagcagcactgctttcggcggagggaccaagctgaccgtcctc

SEQ ID NO: 27514 - protein, 105 aa, synthetic construct
  REGION 1..105: note = Description of Artificial Sequence: Synthetic polypeptide
SYELTQPPSVSVSPGQTANITCSGDKLGNKYACWYQQKPGQSPVLVIYQDRKRPSGIPERFSGSNSGNTAILTISGTQAMDEADYYCQAWDSSTAFGGGTKLTVL

SEQ ID NO: 27515 - DNA, 318 bp, synthetic construct
  misc_feature 1..318: note = Description of Artificial Sequence: Synthetic polynucleotide
  source 1..318: mol_type = other DNA
tcctatgagctgactcagccaccctcagtgtccgtgtccccaggacagacagccagcatcacctgctctggagataaattgggggaaaaatatgcttgctggtatcagcagaagccaggccagtcccctgtgttggtcatctatcaagatagcaagcggccctcagggatccctgagcgattctctggctccaattctgggaacacagccactctgaccatcagcgggacccaggctatggatgaggctgactattactgtcaggcgtgggacagcagcactgtggttttcggcggagggaccaaactgaccgtccta

SEQ ID NO: 27516 - protein, 106 aa, synthetic construct
  REGION 1..106: note = Description of Artificial Sequence: Synthetic polypeptide
SYELTQPPSVSVSPGQTASITCSGDKLGEKYACWYQQKPGQSPVLVIYQDSKRPSGIPERFSGSNSGNTATLTISGTQAMDEADYYCQAWDSSTVVFGGGTKLTVL

SEQ ID NO: 27517 - DNA, 318 bp, synthetic construct
  misc_feature 1..318: note = Description of Artificial Sequence: Synthetic polynucleotide
  source 1..318: mol_type = other DNA
tcctatgacctgactcagccaccctcagtgtccgtgtccccaggacagacagccagcatcacctgctctggagataaattggggaataaatatgcttgctggtatcagcagaagccaggccagtcccctgtggtggtcatctatcaagataggaagcggccctcagggatccctgagcgattctctggctccaattctgggaacacagccactctgaccatcagcgggacccaggctatggatgaggctgactattactgtcaggcgtgggacagcagcactgcggtattcggcggagggaccaagctgaccgtccta

SEQ ID NO: 27518 - protein, 106 aa, synthetic construct
  REGION 1..106: note = Description of Artificial Sequence: Synthetic polypeptide
SYDLTQPPSVSVSPGQTASITCSGDKLGNKYACWYQQKPGQSPVVVIYQDRKRPSGIPERFSGSNSGNTATLTISGTQAMDEADYYCQAWDSSTAVFGGGTKLTVL

SEQ ID NO: 27519 - DNA, 318 bp, synthetic construct
  misc_feature 1..318: note = Description of Artificial Sequence: Synthetic polynucleotide
  source 1..318: mol_type = other DNA
tcctatgacctgactcagccaccctcagtgtccgtgtccccaggacagacagccagcatcacctgctctggagatagattggggaataaatatgcttcctggtatcagcagaagccaggccagtcccctgtggtggtcatctatcaggataggaagcggccctcagggatccctgagcgattctctggctccaactctgggaacacagccactctgaccatcagcgggacccaggctatggatgaggctgactattactgtcaggcgtgggacagcagcactgcggtattcggcggagggaccaagctgaccgtccta

SEQ ID NO: 27520 - protein, 106 aa, synthetic construct
  REGION 1..106: note = Description of Artificial Sequence: Synthetic polypeptide
SYDLTQPPSVSVSPGQTASITCSGDRLGNKYASWYQQKPGQSPVVVIYQDRKRPSGIPERFSGSNSGNTATLTISGTQAMDEADYYCQAWDSSTAVFGGGTKLTVL

SEQ ID NO: 27521 - DNA, 318 bp, synthetic construct
  misc_feature 1..318: note = Description of Artificial Sequence: Synthetic polynucleotide
  source 1..318: mol_type = other DNA
tcctatgacctgactcagccaccctcagtgtccgtgtccccaggacagacagccagcatcacctgctctggagataaattggggaataaatatgcttgctggtatcagcagaagccaggccagtcccctgtggtggtcatctatcaagataggaagcggccctcagggatccctgagcgattctctggctccaactctgggaacacagccactctgaccatcagcgggacccaggctatggatgaggctgactattactgtcaggcgtgggacagcagcactgcggtattcggcggagggaccaagctgaccgtccta

SEQ ID NO: 27522 - protein, 106 aa, synthetic construct; identical to SEQ ID NO: 27518
  REGION 1..106: note = Description of Artificial Sequence: Synthetic polypeptide

SEQ ID NO: 27523 - DNA, 318 bp, synthetic construct; identical to SEQ ID NO: 27521
  misc_feature 1..318: note = Description of Artificial Sequence: Synthetic polynucleotide
  source 1..318: mol_type = other DNA

SEQ ID NO: 27524 - protein, 106 aa, synthetic construct; identical to SEQ ID NO: 27518
  REGION 1..106: note = Description of Artificial Sequence: Synthetic polypeptide

SEQ ID NO: 27525 - DNA, 318 bp, synthetic construct
  misc_feature 1..318: note = Description of Artificial Sequence: Synthetic polynucleotide
  source 1..318: mol_type = other DNA
tcctatgacctgactcagccaccctcagtgtccgtgtccccaggacagacagccagcatcacctgctctggagataaattggggaataaatatacttgctggtatcagcagaagccaggccagtcccctgtggtggtcatctatcaagataggaagcggccctcagggatccctgagcgattctctggctccaattctgggaacacagccactctgaccatcagcgggacccaggctatggatgaggctgactattactgtcaggcgtgggacagcagcactgcggtattcggcggagggaccaagctgaccgtccta

SEQ ID NO: 27526 - protein, 106 aa, synthetic construct
  REGION 1..106: note = Description of Artificial Sequence: Synthetic polypeptide
SYDLTQPPSVSVSPGQTASITCSGDKLGNKYTCWYQQKPGQSPVVVIYQDRKRPSGIPERFSGSNSGNTATLTISGTQAMDEADYYCQAWDSSTAVFGGGTKLTVL

SEQ ID NO: 27527 - DNA, 330 bp, synthetic construct
  misc_feature 1..330: note = Description of Artificial Sequence: Synthetic polynucleotide
  source 1..330: mol_type = other DNA
aattttatgctgactcagccccactctgtgtcggagtctccggggaagacggtaaccatctcctgcacccgcagcaatggcagcattgtcagcaactatgtgcagtggtaccagcagcgcccgggcagttcccccaccactatgatctatgaggatagccgaagaccctctggggtccctgatcggttctctggctccatcgacagctcctccaactctgcctccctcaccatctctggactgaagactgaggacgaggctgactactcctgtcagtcttatgatggcatcaatgtggtattcggcggagggaccaagctgaccgtccta

SEQ ID NO: 27528 - protein, 110 aa, synthetic construct
  REGION 1..110: note = Description of Artificial Sequence: Synthetic polypeptide
NFMLTQPHSVSESPGKTVTISCTRSNGSIVSNYVQWYQQRPGSSPTTMIYEDSRRPSGVPDRFSGSIDSSSNSASLTISGLKTEDEADYSCQSYDGINVVFGGGTKLTVL

SEQ ID NO: 27529 - DNA, 330 bp, synthetic construct
  misc_feature 1..330: note = Description of Artificial Sequence: Synthetic polynucleotide
  source 1..330: mol_type = other DNA
aattttatgctgactcagccccactctgtgtcggagtctccggggaagacggtaaccatctcctgcacccgcagcaatggcagcattgtcagcaactatgtgcagtggtaccagcagcgcccgggcagttcccccaccactgtgatctatgaggataaaagaagaccctcaggggtccctgatcggttctctggctccatcgacagctcctccaactctgcctccctcaccatctctggactgaagactgaggacgaggctgactactactgtcagtcttatgatagcatcaatgtggtattcggcggagggaccaagctgaccgtccta

SEQ ID NO: 27530 - protein, 110 aa, synthetic construct
  REGION 1..110: note = Description of Artificial Sequence: Synthetic polypeptide
NFMLTQPHSVSESPGKTVTISCTRSNGSIVSNYVQWYQQRPGSSPTTVIYEDKRRPSGVPDRFSGSIDSSSNSASLTISGLKTEDEADYYCQSYDSINVVFGGGTKLTVL

SEQ ID NO: 27531 - DNA, 318 bp, synthetic construct
  misc_feature 1..318: note = Description of Artificial Sequence: Synthetic polynucleotide
  source 1..318: mol_type = other DNA
tcctatgagctgactcagccaccctcagtgtccgtgtccccaggacagacagccagcatcacctgctctggagataaattggggaataaatatgattactggtatcagcagaagccaggccagtcccctgtgctggtcatctatcaagatagaaagcggccctcagggatccctgagcgattctctggctccaactctgggaacacagccaccctgaccatcagcgggacccaggctatggatgaggctgactattactgtcaggcgtgggacaacagcactgtggtattcggcggagggaccaaactgaccgtccta

SEQ ID NO: 27532 - protein, 106 aa, synthetic construct
  REGION 1..106: note = Description of Artificial Sequence: Synthetic polypeptide
SYELTQPPSVSVSPGQTASITCSGDKLGNKYDYWYQQKPGQSPVLVIYQDRKRPSGIPERFSGSNSGNTATLTISGTQAMDEADYYCQAWDNSTVVFGGGTKLTVL

SEQ ID NO: 27533 - DNA, 318 bp, synthetic construct
  misc_feature 1..318: note = Description of Artificial Sequence: Synthetic polynucleotide
  source 1..318: mol_type = other DNA
tcctatgacctgactcagccaccctcagtgaccgtgtccccaggacagacagccagcatcacctgctctggagataaattggggaataaatatgcttgctggtatcagcagaagccaggccagtcccctgtggtggtcatctatcaagataggaagcggccctcagggatccctgagcgattctctggctccaactctgggaacacagccactctgaccatcagcgggacccaggctatggatgaggctgactattactgtcaggcgtgggacatcaacactgcggtattcggcggagggaccaagctgaccgtccta

SEQ ID NO: 27534 - protein, 106 aa, synthetic construct
  REGION 1..106: note = Description of Artificial Sequence: Synthetic polypeptide
SYDLTQPPSVTVSPGQTASITCSGDKLGNKYACWYQQKPGQSPVVVIYQDRKRPSGIPERFSGSNSGNTATLTISGTQAMDEADYYCQAWDINTAVFGGGTKLTVL

SEQ ID NO: 27535 - DNA, 318 bp, synthetic construct
  misc_feature 1..318: note = Description of Artificial Sequence: Synthetic polynucleotide
  source 1..318: mol_type = other DNA
tcctatgaactgactcagccaccctcagtttccgtgtccccaggacagacagccagcatcacctgctctggagataaattggggtataaatatgcttggtggtatcagcagaagccaggccagtcccctgtgctggtcatctttgaagataggaagcggccctcagggatccctgagcgattctctggctccaactctgggaacacagccactctgaccatcagcgggacccaggctatggatgaggctgactattactgtcaggcgtgggacaacagcactgtggtattcggcggagggaccaggctgaccgtccta

SEQ ID NO: 27536 - protein, 106 aa, synthetic construct
  REGION 1..106: note = Description of Artificial Sequence: Synthetic polypeptide
SYELTQPPSVSVSPGQTASITCSGDKLGYKYAWWYQQKPGQSPVLVIFEDRKRPSGIPERFSGSNSGNTATLTISGTQAMDEADYYCQAWDNSTVVFGGGTRLTVL

SEQ ID NO: 27537 - DNA, 318 bp, synthetic construct
  misc_feature 1..318: note = Description of Artificial Sequence: Synthetic polynucleotide
  source 1..318: mol_type = other DNA
tcctatgagctgactcagccaccctcagtgtccgtgtccccaggacagacagccagcatcacctgctctggagataaattgggggataaatatgcttgctggtatcagcagaagccaggccagtcccctgtgttggtcatctatcaagatagcaagcggccctcagggatccctgagcgattctctggctccaactctgggaacacagccactctgaccatcagcgggacccaggctatggatgaggctgactattactgtcaggcgtgggacaacagcactgtggtattcggcggagggaccaagctgaccgtccta

SEQ ID NO: 27538 - protein, 106 aa, synthetic construct
  REGION 1..106: note = Description of Artificial Sequence: Synthetic polypeptide
SYELTQPPSVSVSPGQTASITCSGDKLGDKYACWYQQKPGQSPVLVIYQDSKRPSGIPERFSGSNSGNTATLTISGTQAMDEADYYCQAWDNSTVVFGGGTKLTVL

SEQ ID NO: 27539 - DNA, 318 bp, synthetic construct; identical to SEQ ID NO: 27531
  misc_feature 1..318: note = Description of Artificial Sequence: Synthetic polynucleotide
  source 1..318: mol_type = other DNA

SEQ ID NO: 27540 - protein, 106 aa, synthetic construct; identical to SEQ ID NO: 27532
  REGION 1..106: note = Description of Artificial Sequence: Synthetic polypeptide

SEQ ID NO: 27541 - DNA, 318 bp, synthetic construct
  misc_feature 1..318: note = Description of Artificial Sequence: Synthetic polynucleotide
  source 1..318: mol_type = other DNA
tcctatgagctgactcagccaccctcagtgtccgtgtccccaggacaggcagccagcatcacctgctctggagataaattgggggataaatatgcttggtggtatcagcagaagccaggccagtcccctgtgctggtcatctatgaagataggaagcggccctcagggatccctgagcgattctctggctccaactctgggaacacagccactctgaccatcagcgggacccaggctatggatgaggctgactattactgtcaggcgtgggacaacagcactgtggtattcggcggagggaccaagctgaccgtccta

SEQ ID NO: 27542 - protein, 106 aa, synthetic construct
  REGION 1..106: note = Description of Artificial Sequence: Synthetic polypeptide
SYELTQPPSVSVSPGQAASITCSGDKLGDKYAWWYQQKPGQSPVLVIYEDRKRPSGIPERFSGSNSGNTATLTISGTQAMDEADYYCQAWDNSTVVFGGGTKLTVL

SEQ ID NO: 27543 - DNA, 318 bp, synthetic construct
  misc_feature 1..318: note = Description of Artificial Sequence: Synthetic polynucleotide
  source 1..318: mol_type = other DNA
tcctatgagctgactcagccaccctcagtgtccgtgtctccaggacagacagccagcatcacctgctctggagataaattgggggataaatatgcttactggtatcagcagaaaccaggccagtcccctgtggtggtcatctatcaagataggaagcggccctcagggatccctgagcgattctctggctccaactctgggaacacagccactctgaccatcagcgggacccaggctatggatgaggctgactattactgtcaggcgtgggtcaacagcactgtggtattcggcggagggaccaagctgaccgtccta

SEQ ID NO: 27544 - protein, 106 aa, synthetic construct
  REGION 1..106: note = Description of Artificial Sequence: Synthetic polypeptide
SYELTQPPSVSVSPGQTASITCSGDKLGDKYAYWYQQKPGQSPVVVIYQDRKRPSGIPERFSGSNSGNTATLTISGTQAMDEADYYCQAWVNSTVVFGGGTKLTVL

SEQ ID NO: 27545 - DNA, 318 bp, synthetic construct
  misc_feature 1..318: note = Description of Artificial Sequence: Synthetic polynucleotide
  source 1..318: mol_type = other DNA
tcctatgagctgactcagccaccctcagtgtccgtgtccccaggacagacagccagcatcacctgctctggagataaattgggggataaatatgcttggtggtatcagcagaggccaggccagtcccctgtgctggtcatctatgaagataggaagcggccctcagggatccctgagcgattctctggctccaactctgggaacacagccactctgaccatcagcgggacccaggctatggatgaggctgactattactgtcaggcgtgggacaacagcactgtggtattcggcggagggaccaagctgaccgtccta

SEQ ID NO: 27546 - protein, 106 aa, synthetic construct
  REGION 1..106: note = Description of Artificial Sequence: Synthetic polypeptide
SYELTQPPSVSVSPGQTASITCSGDKLGDKYAWWYQQRPGQSPVLVIYEDRKRPSGIPERFSGSNSGNTATLTISGTQAMDEADYYCQAWDNSTVVFGGGTKLTVL

SEQ ID NO: 27547 - DNA, 318 bp, synthetic construct; identical to SEQ ID NO: 27521
  misc_feature 1..318: note = Description of Artificial Sequence: Synthetic polynucleotide
  source 1..318: mol_type = other DNA

SEQ ID NO: 27548 - protein, 106 aa, synthetic construct; identical to SEQ ID NO: 27518
  REGION 1..106: note = Description of Artificial Sequence: Synthetic polypeptide

SEQ ID NO: 27549 - DNA, 330 bp, synthetic construct
  misc_feature 1..330: note = Description of Artificial Sequence: Synthetic polynucleotide
  source 1..330: mol_type = other DNA
cagactgtggtgacccaggagccatcgttctcagtgtcccctggagggacagtcacactcacttgtggcttgagctctggctcagtctctactagttactaccccagctggtaccagcagaccccaggccaggctccacgcacgctcatctacaacacaaacactcgctcttctggggtccctgatcgcttctctggctccatccttgggaacaaagctgccctcaccatcacgggggcccaggcagatgatgaatctgattattactgtgttctatatatgggtagtgccatttgggtgttcggcggagggaccaagttgaccgtccta

SEQ ID NO: 27550 - protein, 110 aa, synthetic construct
  REGION 1..110: note = Description of Artificial Sequence: Synthetic polypeptide
QTVVTQEPSFSVSPGGTVTLTCGLSSGSVSTSYYPSWYQQTPGQAPRTLIYNTNTRSSGVPDRFSGSILGNKAALTITGAQADDESDYYCVLYMGSAIWVFGGGTKLTVL

SEQ ID NO: 27551 - DNA, 318 bp, synthetic construct
  misc_feature 1..318: note = Description of Artificial Sequence: Synthetic polynucleotide
  source 1..318: mol_type = other DNA
tcctatgacctgactcagccaccctcagtgtccgtgtccccaggacagacagccagcatcacctgctctggagataaattggggaataaatatgcttgctggtatcagcagaagccaggccagtcccctgtggtggtcatctatcaagatatgaagcggccctcagggatccctgagcgattctctggctccaactctgggaacacagccactctgaccatcagcgggacccaggctatggatgaggctgactattactgtcaggcgtgggacagcagcactgcggtattcggcggagggaccaagctgaccgtccta

SEQ ID NO: 27552 - protein, 106 aa, synthetic construct
  REGION 1..106: note = Description of Artificial Sequence: Synthetic polypeptide
SYDLTQPPSVSVSPGQTASITCSGDKLGNKYACWYQQKPGQSPVVVIYQDMKRPSGIPERFSGSNSGNTATLTISGTQAMDEADYYCQAWDSSTAVFGGGTKLTVL

SEQ ID NO: 27553 - DNA, 315 bp, synthetic construct
  misc_feature 1..315: note = Description of Artificial Sequence: Synthetic polynucleotide
  source 1..315: mol_type = other DNA
ccctatgagctgaatcagacaccctcagtgtccgtgtccccaggacagacagccagcatcacctgctctggagatagattggggactaaatttgcttgctggtatcagcagaagccaggccagtcccctgtgctggtcatttatcaagatagcaagcggccctcagggatccctgagcgattctctggctccaactctgggaacacagccactctgaccatcagcgggacccaggctatggatgaggctgactattactgtcaggcgtgggacagcagcactgtattcggcggagggaccaagctgaccgtccta

SEQ ID NO: 27554 - protein, 105 aa, synthetic construct
  REGION 1..105: note = Description of Artificial Sequence: Synthetic polypeptide
PYELNQTPSVSVSPGQTASITCSGDRLGTKFACWYQQKPGQSPVLVIYQDSKRPSGIPERFSGSNSGNTATLTISGTQAMDEADYYCQAWDSSTVFGGGTKLTVL

SEQ ID NO: 27555 - DNA, 318 bp, synthetic construct
  misc_feature 1..318: note = Description of Artificial Sequence: Synthetic polynucleotide
  source 1..318: mol_type = other DNA
tcctatgagctgactcagccaccctcagtgtccgtgtccccaggacagacagccagcatcacctgctctggagataaattgggtaataaatatgtttgttggtatcagcagaagccaggccagtcccctgtgctggtcatctatcaagataacaggcggccctcagggatccctgagcgattctctggctccaactctgggaacacagccactctgaccatcagcgggacccaggctatggatgaggctgactattactgtcaggcgtgggacagcagtcctgtgatattcggcggagggaccaaactgaccgtccta

SEQ ID NO: 27556 - protein, 106 aa, synthetic construct
  REGION 1..106: note = Description of Artificial Sequence: Synthetic polypeptide
SYELTQPPSVSVSPGQTASITCSGDKLGNKYVCWYQQKPGQSPVLVIYQDNRRPSGIPERFSGSNSGNTATLTISGTQAMDEADYYCQAWDSSPVIFGGGTKLTVL

SEQ ID NO: 27557 - DNA, 318 bp, synthetic construct
  misc_feature 1..318: note = Description of Artificial Sequence: Synthetic polynucleotide
  source 1..318: mol_type = other DNA
tcctatgagctgactcagccaccctcagtgtccgtgtccccaggacagacagccagcatcacctgctctggagatagattgggggataaatatgcttgctggtatcagcagaagccaggccagtcccctgtactggtcatctatcaagataggaagcggccctcagggatccctgagcgattctctggctccaactctgggaacacagccactctgaccatcagcgggacccaggctatggatgaggctgactattactgtcaggcgtgggacagcagtactgcggtattcggcggagggaccaagctgaccgtccta

SEQ ID NO: 27558 - protein, 106 aa, synthetic construct
  REGION 1..106: note = Description of Artificial Sequence: Synthetic polypeptide
SYELTQPPSVSVSPGQTASITCSGDRLGDKYACWYQQKPGQSPVLVIYQDRKRPSGIPERFSGSNSGNTATLTISGTQAMDEADYYCQAWDSSTAVFGGGTKLTVL

SEQ ID NO: 27559 - DNA, 330 bp, synthetic construct
  misc_feature 1..330: note = Description of Artificial Sequence: Synthetic polynucleotide
  source 1..330: mol_type = other DNA
cagactgtggtgactcaggagccctcactgactgtgtccccaggagggacagtcactctcacctgtgcttccagcactgaaacagtcaccagtggttcttatccgaactggttccagcagaaacctggacaagcacccagggcactgatttatagtacaagcaacaaacactcctggacccctgcccggttctcaggctccctccttgggggcaaagctgccctgacactgtcagatgtgcagcctgaggacgaggctgagtattactgcctgctctactatggtggtgctcaactggtattcggcggagggaccaagctgaccgtccta

SEQ ID NO: 27560 - protein, 110 aa, synthetic construct
  REGION 1..110: note = Description of Artificial Sequence: Synthetic polypeptide
QTVVTQEPSLTVSPGGTVTLTCASSTETVTSGSYPNWFQQKPGQAPRALIYSTSNKHSWTPARFSGSLLGGKAALTLSDVQPEDEAEYYCLLYYGGAQLVFGGGTKLTVL

SEQ ID NO: 27561 - DNA, 318 bp, synthetic construct
  misc_feature 1..318: note = Description of Artificial Sequence: Synthetic polynucleotide
  source 1..318: mol_type = other DNA
tcttatgagttgactcagccaccctcagagtctgtgtccccaggacagacagccagcatcacgtgctcaggagataaattggggaataaatatgtttcctggtatcagcagaagccaggccagtcccctgtgctggtcatctatcaagataacaggcggccgtcagggatccctgagcgattttctggctccaactctgggagcacagccactttgaccatcagcgggacccaggctatggatgaggctgactattactgtcaggcgtgggacagcagccctgtgatattcggcggagggaccaagctgaccgtccta

SEQ ID NO: 27562 - protein, 106 aa, synthetic construct
  REGION 1..106: note = Description of Artificial Sequence: Synthetic polypeptide
SYELTQPPSESVSPGQTASITCSGDKLGNKYVSWYQQKPGQSPVLVIYQDNRRPSGIPERFSGSNSGSTATLTISGTQAMDEADYYCQAWDSSPVIFGGGTKLTVL

SEQ ID NO: 27563 - DNA, 318 bp, synthetic construct
  misc_feature 1..318: note = Description of Artificial Sequence: Synthetic polynucleotide
  source 1..318: mol_type = other DNA
tcctatgagctgactcagccaccctcagtgtccgtgtccccaggacagacagccagcatcacctgctctggagataaattgggggataaatatgcttgctggtatcagcagaagccaggccagtcccctgtgctggtcatctatcaagatagcaagcggccctcagggatccctgagcgattctctggctccaactctgggaacacagccactctgaccatcagcgggacccaggctatggatgaggctgactattactgtcaggcgtgggacagcaccactgtggtattcggcggagggaccaagctgaccgtccta

SEQ ID NO: 27564 - protein, 106 aa, synthetic construct
  REGION 1..106: note = Description of Artificial Sequence: Synthetic polypeptide
SYELTQPPSVSVSPGQTASITCSGDKLGDKYACWYQQKPGQSPVLVIYQDSKRPSGIPERFSGSNSGNTATLTISGTQAMDEADYYCQAWDSTTVVFGGGTKLTVL

SEQ ID NO: 27565 - DNA, 330 bp, synthetic construct
  misc_feature 1..330: note = Description of Artificial Sequence: Synthetic polynucleotide
  source 1..330: mol_type = other DNA
cagactgtggtgactcaggagccctcactgactgtgtccccaggagggacagtcactctcacctgtgcttccagcactggagcagtcaccagtggttactttccaaactggttccagcagaaacctggacaagcacccagggcactgatttatagtacagacaacaaacactcctggacccctgcccggttctcaggctccctccttgggggcaaagctgccctgacactgtcaggtgtgcagcctgaggacgaggctgagtattactgcctcctctactatggtggtgctcagctgatgttcggcggagggaccaagctgaccgtccta

SEQ ID NO: 27566 - protein, 110 aa, synthetic construct
  REGION 1..110: note = Description of Artificial Sequence: Synthetic polypeptide
QTVVTQEPSLTVSPGGTVTLTCASSTGAVTSGYFPNWFQQKPGQAPRALIYSTDNKHSWTPARFSGSLLGGKAALTLSGVQPEDEAEYYCLLYYGGAQLMFGGGTKLTVL

SEQ ID NO: 27567 - DNA, 318 bp, synthetic construct
  misc_feature 1..318: note = Description of Artificial Sequence: Synthetic polynucleotide
  source 1..318: mol_type = other DNA
tcctatgagctgactcagccaccctcagtgtccgtgtccccaggacagacagccagcatcacctgctcaggagataaattggggaataaatatgtttcctggtatcagcagaagccaggccagtcccctgtgctggtcatctatcaagataacaggcggccctcagggatccctgagcgattctctggctccaactctgggagcacagccactctgaccatcagcgggacccaggctatggatgaggctgactattactgtcaggcgtgggacagcagccctgtgatattcggcggagggaccaagctgaccgtccta

SEQ ID NO: 27568 - protein, 106 aa, synthetic construct
  REGION 1..106: note = Description of Artificial Sequence: Synthetic polypeptide
SYELTQPPSVSVSPGQTASITCSGDKLGNKYVSWYQQKPGQSPVLVIYQDNRRPSGIPERFSGSNSGSTATLTISGTQAMDEADYYCQAWDSSPVIFGGGTKLTVL

SEQ ID NO: 27569 - DNA, 318 bp, synthetic construct
  misc_feature 1..318: note = Description of Artificial Sequence: Synthetic polynucleotide
  source 1..318: mol_type = other DNA
tcctatgagctgactcagccaccctcagtgtccgtgtccccaggacagacagccaacatcacctgctctggagataaattggggaataaatatgtttgctggtatcaacagaagccaggccagtcccctgtgttggtcatctatcaagataacaggcggccctcagggatccctgagcgattctctggctccaactctgggaacacagccactctgaccatcagcgggacccaggctatggatgaggctgactattactgtcaggcgtgggacagcagccctgtgatattcggcggagggaccaagctgaccgtccta

SEQ ID NO: 27570 - protein, 106 aa, synthetic construct
  REGION 1..106: note = Description of Artificial Sequence: Synthetic polypeptide
SYELTQPPSVSVSPGQTANITCSGDKLGNKYVCWYQQKPGQSPVLVIYQDNRRPSGIPERFSGSNSGNTATLTISGTQAMDEADYYCQAWDSSPVIFGGGTKLTVL

SEQ ID NO: 27571 - DNA, 315 bp, synthetic construct; identical to SEQ ID NO: 27553
  misc_feature 1..315: note = Description of Artificial Sequence: Synthetic polynucleotide
  source 1..315: mol_type = other DNA

SEQ ID NO: 27572 - protein, 105 aa, synthetic construct; identical to SEQ ID NO: 27554
  REGION 1..105: note = Description of Artificial Sequence: Synthetic polypeptide

SEQ ID NO: 27573 - DNA, 318 bp, synthetic construct
  misc_feature 1..318: note = Description of Artificial Sequence: Synthetic polynucleotide
  source 1..318: mol_type = other DNA
tcctatgagctgactcagccaccctcagtgtctgtgtccccaggacagacagtcagcatcacctgctctggagataaattggggaataaatatgtttcctggtatcagcagaagccaggccagtcccctgtgctggtcatctatcaagataacaggcggccgtcagggatccctgagcgattctctggctccaactctgggagcacagccactctgaccatcagcgggacccaggctatggatgaggctgactattactgtcaggcgtgggacagcacccctgtgatattcggcggagggaccaagctgaccgtccta

SEQ ID NO: 27574 - protein, 106 aa, synthetic construct
  REGION 1..106: note = Description of Artificial Sequence: Synthetic polypeptide
SYELTQPPSVSVSPGQTVSITCSGDKLGNKYVSWYQQKPGQSPVLVIYQDNRRPSGIPERFSGSNSGSTATLTISGTQAMDEADYYCQAWDSTPVIFGGGTKLTVL

SEQ ID NO: 27575 - DNA, 318 bp, synthetic construct
  misc_feature 1..318: note = Description of Artificial Sequence: Synthetic polynucleotide
  source 1..318: mol_type = other DNA
tcctatgcgatgactcagccaccctcaatgtccgtgtccccaggacagacagccagcatcacctgctctggaaataaattggggaatagatatgcttgctggtatcagcagaagccaggccagtcccctgtgctggtcatctatcaagatagcaagcggccctcagggatccctgagcgattctctggctccaactctgggaacatagccactctgaccatcagcgggacccaggctatggatgaggctgactattactgtcaggcgtgggacagcagcactgtggtattcggcggagggaccaagctgaccgtccta

SEQ ID NO: 27576 - protein, 106 aa, synthetic construct
  REGION 1..106: note = Description of Artificial Sequence: Synthetic polypeptide
SYAMTQPPSMSVSPGQTASITCSGNKLGNRYACWYQQKPGQSPVLVIYQDSKRPSGIPERFSGSNSGNIATLTISGTQAMDEADYYCQAWDSSTVVFGGGTKLTVL

SEQ ID NO: 27577 - DNA, 318 bp, synthetic construct
  misc_feature 1..318: note = Description of Artificial Sequence: Synthetic polynucleotide
  source 1..318: mol_type = other DNA
tcctatgagctgactcagccaccctcagtgtccgtgtccccaggacagacagccagcatcacctgctctggagataaattgggggataaatatgtttgctggtatcagcagaagccaggccagtcccctgtgttggtcatctatcaagataggaagcggccctcagggatccctgagcgattctctggctccaactctgggaacacagccactctgaccatcagcgggacccaggctatggatgaggctgactattactgtcaggcgtggcacagcagcactgtggtattcggcggagggaccaagctgaccgtccta

SEQ ID NO: 27578 - protein, 106 aa, synthetic construct; identical to SEQ ID NO: 27358
  REGION 1..106: note = Description of Artificial Sequence: Synthetic polypeptide

SEQ ID NO: 27579 - DNA, 318 bp, synthetic construct
  misc_feature 1..318: note = Description of Artificial Sequence: Synthetic polynucleotide
  source 1..318: mol_type = other DNA
tcctatgagctgactcagccaccctcagtgtccgtgtccccaggacagacagccagcatcacctgctctggagataaattgggggataaatatgcttgctggtatcagcagaagccaggccagtcccctgtgctggtcatctatcaagataagaagcggccctcagggatccctgagcgattctctggctccaactctgggaacacagccactctgaccatcagcgggacccaggttatggatgaggctgactattactgtcaggcgtgggacatcagaactgtggtattcggcggagggaccaagctgaccgtccta

SEQ ID NO: 27580 - protein, 106 aa, synthetic construct
  REGION 1..106: note = Description of Artificial Sequence: Synthetic polypeptide
SYELTQPPSVSVSPGQTASITCSGDKLGDKYACWYQQKPGQSPVLVIYQDKKRPSGIPERFSGSNSGNTATLTISGTQVMDEADYYCQAWDIRTVVFGGGTKLTVL

SEQ ID NO: 27581 - DNA, 318 bp, synthetic construct
  misc_feature 1..318: note = Description of Artificial Sequence: Synthetic polynucleotide
  source 1..318: mol_type = other DNA
tcctatgagctgactcagccaccctcagtgtccgtgtccccaggacagacagccagcatcacctgctctggagataaattgggggagaaatatgcttgctggtatcagcagaagtcaggccagtcccctgtgttggtcatctatcaagatagaaagcggccctcagggatccctgagcgattctctggctccaactctgggaacacagccactctgaccatcagcgggacccaggctatggatgaggctgactattactgtcaggcgtgggacagtagaactgcggtattcggcggagggaccaagctgaccgtccta

SEQ ID NO: 27582 - protein, 106 aa, synthetic construct
  REGION 1..106: note = Description of Artificial Sequence: Synthetic polypeptide
SYELTQPPSVSVSPGQTASITCSGDKLGEKYACWYQQKSGQSPVLVIYQDRKRPSGIPERFSGSNSGNTATLTISGTQAMDEADYYCQAWDSRTAVFGGGTKLTVL

SEQ ID NO: 27583 - DNA, 321 bp, synthetic construct
  misc_feature 1..321: note = Description of Artificial Sequence: Synthetic polynucleotide
  source 1..321: mol_type = other DNA
tcctatgagctgactcagccaccctcagtgtccgtgtccccaggacagacagccagcatcacctgctctggagataaattgggggataaatatgcttgttggtatcagcagaagccaggccagtcccctgtgttggtcatctatcaagataagaaacggccctcagggatccctgagcgattctctggctccaactctggaaacacagccactctgaccatcagcgggacccaggctatggatgaggctgactattactgtcaggcgtgggacaacagcactgctgtggtattcggcggagggaccaaactgaccgtccta

SEQ ID NO: 27584 - protein, 107 aa, synthetic construct
  REGION 1..107: note = Description of Artificial Sequence: Synthetic polypeptide
SYELTQPPSVSVSPGQTASITCSGDKLGDKYACWYQQKPGQSPVLVIYQDKKRPSGIPERFSGSNSGNTATLTISGTQAMDEADYYCQAWDNSTAVVFGGGTKLTVL

SEQ ID NO: 27585 - DNA, 330 bp, synthetic construct
  misc_feature 1..330: note = Description of Artificial Sequence: Synthetic polynucleotide
  source 1..330: mol_type = other DNA
cagactgtggtgacccaggagccatcgttctcagtgtcccctggagggacagtcacactcacttgtggcttgagctctggctcagtctctactactttctaccccagctggtaccagcagaccccaggccaggctccacgcacgctcatctacaacacaaacactcgctcttctggggtccctgatcgcttctctggctccatccttgggaacaaagctgccctcaccatcacgggggcccaggcagatgatgaatctgattattactgtgtgctttatatgggtagtggcatttgggtgttcggcggagggaccaagctgaccgtccta

SEQ ID NO: 27586 - protein, 110 aa, synthetic construct
  REGION 1..110: note = Description of Artificial Sequence: Synthetic polypeptide
QTVVTQEPSFSVSPGGTVTLTCGLSSGSVSTTFYPSWYQQTPGQAPRTLIYNTNTRSSGVPDRFSGSILGNKAALTITGAQADDESDYYCVLYMGSGIWVFGGGTKLTVL

SEQ ID NO: 27587 - DNA, 318 bp, synthetic construct
  misc_feature 1..318: note = Description of Artificial Sequence: Synthetic polynucleotide
  source 1..318: mol_type = other DNA
tcctatgagctgactcagccaccctcagtgtccgtgtccccaggacagacagccagcatcacctgctctggagataaattgggggataaatttgcttgctggtatcagcagaagccaggccagtcccctgtgctggtcatctatgaagataggaagcggccctcagggatccctgagcgattctctggctccaactctgggaacacagccactctgaccatcagcgggacccaggctatggatgaggctgactattactgtcaggcgtgggacagccgcactgtggtattcggcggagggacccagctgaccgtccta

SEQ ID NO: 27588 - protein, 106 aa, synthetic construct
  REGION 1..106: note = Description of Artificial Sequence: Synthetic polypeptide
SYELTQPPSVSVSPGQTASITCSGDKLGDKFACWYQQKPGQSPVLVIYEDRKRPSGIPERFSGSNSGNTATLTISGTQAMDEADYYCQAWDSRTVVFGGGTQLTVL

SEQ ID NO: 27589 - DNA, 318 bp, synthetic construct
  misc_feature 1..318: note = Description of Artificial Sequence: Synthetic polynucleotide
  source 1..318: mol_type = other DNA
tcctatgagctgactcagacaccctcagtgtccgtgtccccaggacagacagccagcatcacctgctctggagataaattgggggataaatatgcttgctggtatcagcagaagccaggccagtcccctgtgctggtcatctatgaagataggaagcggccctcagggatccctgaccgattctctggctccaactctgggaacacagccactctgaccatcagcgggacccaggctatggatgaggctgactattactgtcaggcgtgggacagcaggaaagtggtattcggcggagggaccaagctgaccgtccta

SEQ ID NO: 27590 - protein, 106 aa, synthetic construct
  REGION 1..106: note = Description of Artificial Sequence: Synthetic polypeptide
SYELTQTPSVSVSPGQTASITCSGDKLGDKYACWYQQKPGQSPVLVIYEDRKRPSGIPDRFSGSNSGNTATLTISGTQAMDEADYYCQAWDSRKVVFGGGTKLTVL

SEQ ID NO: 27591 - DNA, 315 bp, synthetic construct
  misc_feature 1..315: note = Description of Artificial Sequence: Synthetic polynucleotide
  source 1..315: mol_type = other DNA
tcctatgagctgactcagccaccctcagtgtccgtgtccccaggacagacagccagcatcacctgctctggagataaattggggcataaatttgtttgctggtatcagcagaagccaggccagtcccctgtgttggtcatctatcaagatcgcaagcggccctcagggatccctgagcgattctctggctccaactctgggaacacagccactctgaccatcagcgggacccaggctatggatgaggctgactattactgtcaggcgtgggacagcagcacggtattcggcggagggaccaagctgaccgtccta

SEQ ID NO: 27592 - protein, 105 aa, synthetic construct
  REGION 1..105: note = Description of Artificial Sequence: Synthetic polypeptide
SYELTQPPSVSVSPGQTASITCSGDKLGHKFVCWYQQKPGQSPVLVIYQDRKRPSGIPERFSGSNSGNTATLTISGTQAMDEADYYCQAWDSSTVFGGGTKLTVL

SEQ ID NO: 27593 - DNA, 318 bp, synthetic construct
  misc_feature 1..318: note = Description of Artificial Sequence: Synthetic polynucleotide
  source 1..318: mol_type = other DNA
tcctatgagctgactcagccaccctcagtgtccgtgtccccaggacagacagccagcatcacctgctctggagataaaatgggggaaaaatatgcttgctggtatcagcagaagccaggccagtcccctgtgctggtcatttatcaagatagaaagcggccctcagggatccctgagcgattctctggctccaactctgggaacacagccactctgaccatcagcgggacccaggctatggatgaggctgactattactgtcaggcgtgggacagcagcactgcggtattcggcggagggaccaagctgaccgtccta

SEQ ID NO: 27594 - protein, 106 aa, synthetic construct
  REGION 1..106: note = Description of Artificial Sequence: Synthetic polypeptide
SYELTQPPSVSVSPGQTASITCSGDKMGEKYACWYQQKPGQSPVLVIYQDRKRPSGIPERFSGSNSGNTATLTISGTQAMDEADYYCQAWDSSTAVFGGGTKLTVL

SEQ ID NO: 27595 - DNA, 330 bp, synthetic construct
  misc_feature 1..330: note = Description of Artificial Sequence: Synthetic polynucleotide
  source 1..330: mol_type = other DNA
cagactgtggtgactcaggagccctcactgactgtgtccccaggagggacagtcactctcacctgtgcttccagcactggagcagtcaccagtggttcctatccaaactggttccagcagaaacctggacaagcacccagggcactgatttacagtacaagtaacaaacactcctggacccctgcccggttctcaggctccctccttgggggcaaagctgccctgacactgtcaggtgtgcagcctgaggacgaggctgactattactgcctgctctactatggtggtgctcaggtggcattcggcggagggaccaagttgaccgtccta

SEQ ID NO: 27596 - protein, 110 aa, synthetic construct
  REGION 1..110: note = Description of Artificial Sequence: Synthetic polypeptide
QTVVTQEPSLTVSPGGTVTLTCASSTGAVTSGSYPNWFQQKPGQAPRALIYSTSNKHSWTPARFSGSLLGGKAALTLSGVQPEDEADYYCLLYYGGAQVAFGGGTKLTVL

SEQ ID NO: 27597 - DNA, 330 bp, synthetic construct
  misc_feature 1..330: note = Description of Artificial Sequence: Synthetic polynucleotide
  source 1..330: mol_type = other DNA
cagtctgtgttgacgcagccgccctcagtgtctgcggccccaggacagaaggtcaccatctcctgctctggaagcagctccaacattgggagtaattatgtttcctggtaccaacagctcccaggaacagcccccaaagtcctcatttatgacaataataagcgaccctcagggattcctgaccgattctctggctccaagtctggcacgtcagccaccctgggcatcaccggactccagactggggacgaggccgattattactgcggaacatgggatagcagactgaatgttggggtattcggcggagggaccaagctgaccgtccta

SEQ ID NO: 27598 - protein, 110 aa, synthetic construct
  REGION 1..110: note = Description of Artificial Sequence: Synthetic polypeptide
QSVLTQPPSVSAAPGQKVTISCSGSSSNIGSNYVSWYQQLPGTAPKVLIYDNNKRPSGIPDRFSGSKSGTSATLGITGLQTGDEADYYCGTWDSRLNVGVFGGGTKLTVL

SEQ ID NO: 27599 - DNA, 318 bp, synthetic construct
  misc_feature 1..318: note = Description of Artificial Sequence: Synthetic polynucleotide
  source 1..318: mol_type = other DNA
tcctatgagttgactcagccaccctcagtgtccgtgtccccaggacagacagccagcatcacctgctctggagataaattgggggatagatttgcttactggtatcagcagaagccaggccagtcccctgtactggtcatctatcaagatagcaagcggccctcagggatccctgagcgattctctggctccaactctgggaacacagccactctgaccatcagcgggacccaggctatggatgaggctgactattactgtaaggcgtgggacagcagcactgtggtattcggcggagggaccaagctgaccgtccta

SEQ ID NO: 27600 - protein, 106 aa, synthetic construct
  REGION 1..106: note = Description of Artificial Sequence: Synthetic polypeptide
SYELTQPPSVSVSPGQTASITCSGDKLGDRFAYWYQQKPGQSPVLVIYQDSKRPSGIPERFSGSNSGNTATLTISGTQAMDEADYYCKAWDSSTVVFGGGTKLTVL

SEQ ID NO: 27601 - DNA, 327 bp, synthetic construct
  misc_feature 1..327: note = Description of Artificial Sequence: Synthetic polynucleotide
  source 1..327: mol_type = other DNA
tcttctgagctgactcaggaccctgctgtgtctgtggccttgggacagacagtcaggatcacatgccaaggagacaaactcagaacctattatgcaagctggtaccagcagaagccaggacaggcccctgtacttgtcgtctatggaaaaaacaaccggccctcagggatcccagaccgattctctggctccagctcaggaaacacagcttccttgaccatcactggggctcaggcggaagatgaggctgactattactgtaactcccgggacagcagtggtaaccatcttgtactattcggcggagggaccaagctgaccgtccta

SEQ ID NO: 27602 - protein, 109 aa, synthetic construct
  REGION 1..109: note = Description of Artificial Sequence: Synthetic polypeptide
SSELTQDPAVSVALGQTVRITCQGDKLRTYYASWYQQKPGQAPVLVVYGKNNRPSGIPDRFSGSSSGNTASLTITGAQAEDEADYYCNSRDSSGNHLVLFGGGTKLTVL

SEQ ID NO: 27603 - DNA, 330 bp, synthetic construct
  misc_feature 1..330: note = Description of Artificial Sequence: Synthetic polynucleotide
  source 1..330: mol_type = other DNA
cagtctgtgttgacgcagccgccctcagtgtctgcggccccaggacagaaggtcaccatctcctgctctggaagcagctccaacattggaaataattatgtatcctggtaccagcagctcccaggaacagcccccaaactcctcctttatgacagtaataagcgaccctcagggattcctggccgattctctggctccaagtctggcacgtcagccaccctgggcatcaccggcctccagactggggacgaggccgattattactgcggaacatgggatagcagcctgagtactgtggtattcggcggagggaccaagctgaccgtccta

SEQ ID NO: 27604 - protein, 110 aa, synthetic construct
  REGION 1..110: note = Description of Artificial Sequence: Synthetic polypeptide
QSVLTQPPSVSAAPGQKVTISCSGSSSNIGNNYVSWYQQLPGTAPKLLLYDSNKRPSGIPGRFSGSKSGTSATLGITGLQTGDEADYYCGTWDSSLSTVVFGGGTKLTVL

SEQ ID NO: 27605 - DNA, 330 bp, synthetic construct
  misc_feature 1..330: note = Description of Artificial Sequence: Synthetic polynucleotide
  source 1..330: mol_type = other DNA
cagtctgtgttgacgcagccgccctcagtgtctgcggccccaggacagaaggtcaccatctcctgctctggaagcagctccaacattgggaataattatgtatcctggtaccagcatctcccaggaacagcccccaaactcctcatttatgacaataataagcgaccctcagggattcctgaccgattctctggctccaagtctggcacgtcagccaccctgggcatcaccggactccagactggggacgaggccgattattactgcggaacatgggatagcagcctgagtgctggggttttcggcggagggaccaagctgaccgtccta

SEQ ID NO: 27606 - protein, 110 aa, synthetic construct
  REGION 1..110: note = Description of Artificial Sequence: Synthetic polypeptide
QSVLTQPPSVSAAPGQKVTISCSGSSSNIGNNYVSWYQHLPGTAPKLLIYDNNKRPSGIPDRFSGSKSGTSATLGITGLQTGDEADYYCGTWDSSLSAGVFGGGTKLTVL

SEQ ID NO: 27607 - DNA, 327 bp, synthetic construct
  misc_feature 1..327: note = Description of Artificial Sequence: Synthetic polynucleotide
  source 1..327: mol_type = other DNA
tcttctgagctgactcaggaccctgctgtgtctgtggccttgggacagacagtcaggatcacatgccaaggagacaccctcagaccctattatgtaagctggtaccagcagaagccaggacaggcccctgtacttgtcatctatggtaaaaacaaccggccctcagggatcccagaccgattctctggctccagctcaggaaacacagcttccttgaccatcactggggctcaggcggaagatgaggctgactattactgtaactcccgggacagcagtggtaaccatcttgtggtattcggcggagggaccaagctgaccgtccta

SEQ ID NO: 27608 - protein, 109 aa, synthetic construct
  REGION 1..109: note = Description of Artificial Sequence: Synthetic polypeptide
SSELTQDPAVSVALGQTVRITCQGDTLRPYYVSWYQQKPGQAPVLVIYGKNNRPSGIPDRFSGSSSGNTASLTITGAQAEDEADYYCNSRDSSGNHLVVFGGGTKLTVL

SEQ ID NO: 27609 - DNA, 330 bp, synthetic construct
  misc_feature 1..330: note = Description of Artificial Sequence: Synthetic polynucleotide
  source 1..330: mol_type = other DNA
cagtctgtgttgacgcagccgccctcagtgtctgcggccccaggacagaaggtcaccatctcctgctctggaggcagctccaacattgggaataattatgtatcctggtttcagcagttcccaggaacagcccccaaattcctcatttatgacaataataagcgaccctcagggattcctgaccgattctctggctccaagtctggcacgtcagccaccctgggcatcaccggactccagactggtgacgaggccgattattactgcggaacatgggatcgcaccctgagtgattgggtattcggcggagggaccaagctgaccgtccta

SEQ ID NO: 27610 - protein, 110 aa, synthetic construct
  REGION 1..110: note = Description of Artificial Sequence: Synthetic polypeptide
QSVLTQPPSVSAAPGQKVTISCSGGSSNIGNNYVSWFQQFPGTAPKFLIYDNNKRPSGIPDRFSGSKSGTSATLGITGLQTGDEADYYCGTWDRTLSDWVFGGGTKLTVL

SEQ ID NO: 27611 - DNA, 330 bp, synthetic construct
  misc_feature 1..330: note = Description of Artificial Sequence: Synthetic polynucleotide
  source 1..330: mol_type = other DNA
cagtctgtgttgacgcagccgccctcagtgtctgcggccccaggacagaaggtcaccatctcctgctctggaagcagctccaacattgggagtaattatgtttcctggtaccaacagctcccaggaacagcccccaaagtcctcatttatgacaataataagcgaccctcagggattcctgaccgattctctggctccaagtctggcacgtcagccaccctgggcatcaccggactccagactggggacgaggccgattattactgcggaacatgggatggcagactgaatgttggggtattcggcggagggaccaagctgaccgtccta

SEQ ID NO: 27612 - protein, 110 aa, synthetic construct
  REGION 1..110: note = Description of Artificial Sequence: Synthetic polypeptide
QSVLTQPPSVSAAPGQKVTISCSGSSSNIGSNYVSWYQQLPGTAPKVLIYDNNKRPSGIPDRFSGSKSGTSATLGITGLQTGDEADYYCGTWDGRLNVGVFGGGTKLTVL

SEQ ID NO: 27613 - DNA, 330 bp, synthetic construct
  misc_feature 1..330: note = Description of Artificial Sequence: Synthetic polynucleotide
  source 1..330: mol_type = other DNA
cagtctgtgttgacgcagccgccctcagtgtctgcggccccaggacagaaggtcaccatctcctgctctggaagcagctccaacattgggaatcattatgtctcctggtaccagcagcttccaggaacagcccccaaactcctcatttatgacagtagtaagcgaccctcagagattcctgaccgattctctggctccaagtctggcacgtccgccaccctgggcatcaccggactccagactggggacgaggccgattattactgcggaacatgggatagtagtctgagtactgtggtattcggcggagggaccaagctgaccgtccta

SEQ ID NO: 27614 - protein, 110 aa, synthetic construct
  REGION 1..110: note = Description of Artificial Sequence: Synthetic polypeptide
QSVLTQPPSVSAAPGQKVTISCSGSSSNIGNHYVSWYQQLPGTAPKLLIYDSSKRPSEIPDRFSGSKSGTSATLGITGLQTGDEADYYCGTWDSSLSTVVFGGGTKLTVL

SEQ ID NO: 27615 - DNA, 318 bp, synthetic construct
  misc_feature 1..318: note = Description of Artificial Sequence: Synthetic polynucleotide
  source 1..318: mol_type = other DNA
tcctatgagctgactcagccaccctcagtgtccgtgtccccaggacagacagccagcatcacctgctctggagataaattgggggatagatttgcttactggtatcagcagaagccaggccagtcccctgtgctggtcatctatcaagataacaagcggccctcagggatccctgagcgattctctggctccaactctgggaacacagcctctctgaccatcagcgggacccaggctatggatgaggctgactattactgtcaggcgtgggacagcagcactgtggtattcggcggagggaccaggctgaccgtccta

SEQ ID NO: 27616 - protein, 106 aa, synthetic construct
  REGION 1..106: note = Description of Artificial Sequence: Synthetic polypeptide
SYELTQPPSVSVSPGQTASITCSGDKLGDRFAYWYQQKPGQSPVLVIYQDNKRPSGIPERFSGSNSGNTASLTISGTQAMDEADYYCQAWDSSTVVFGGGTRLTVL

SEQ ID NO: 27617 - DNA, 327 bp, synthetic construct
  misc_feature 1..327: note = Description of Artificial Sequence: Synthetic polynucleotide
  source 1..327: mol_type = other DNA
tcttctgagctgactcaggaccctgctgtgtctgtggccttgggacagacagtcaggatcacatgccaaggagacagcctcagaccctattatgcaagctggtaccagcagaagccaggacaggcccctgtacttgtcatctatggtaaaaacaaccggccctcagggatcccagaccgattctctggctccagttcaggaaacacagcttccttgaccatcactgaggctcaggcggaagatgaggctgactattactgtaactcccgggacagcagtggtaaccatcttgtggtattcggcggagggaccaagctgaccgtccta

SEQ ID NO: 27618 - protein, 109 aa, synthetic construct
  REGION 1..109: note = Description of Artificial Sequence: Synthetic polypeptide
SSELTQDPAVSVALGQTVRITCQGDSLRPYYASWYQQKPGQAPVLVIYGKNNRPSGIPDRFSGSSSGNTASLTITEAQAEDEADYYCNSRDSSGNHLVVFGGGTKLTVL

SEQ ID NO: 27619 - DNA, 330 bp, synthetic construct
  misc_feature 1..330: note = Description of Artificial Sequence: Synthetic polynucleotide
  source 1..330: mol_type = other DNA
cagtctgtgttgacgcagccgccctcagtgtctgcggccccaggacagaaggtcaccatctcctgctctggaagcagctccaacattgggagtaattatgtttcctggtaccaacagctcccaggaacagtccccaaagtcctcatttatgacaataataagcgaccctcagggattcctgaccgattctctggctccaagtctggcacgtcagccaccctgggcatcaccggactccagactggggacgaggccgattattactgcggaacatgggatagcagactgaatgttggggtattcggcggagggaccaagctgaccgtccta

SEQ ID NO: 27620 - protein, 110 aa, synthetic construct
  REGION 1..110: note = Description of Artificial Sequence: Synthetic polypeptide
QSVLTQPPSVSAAPGQKVTISCSGSSSNIGSNYVSWYQQLPGTVPKVLIYDNNKRPSGIPDRFSGSKSGTSATLGITGLQTGDEADYYCGTWDSRLNVGVFGGGTKLTVL

SEQ ID NO: 27621 - DNA, 330 bp, synthetic construct
  misc_feature 1..330: note = Description of Artificial Sequence: Synthetic polynucleotide
  source 1..330: mol_type = other DNA
cagactgtggtgactcaggagccctcactgactgtgtccccaggagggacagtcactctcacttgtgtttttagcactggagcagtcaccagtggttcctttccaaactggttccagcagaaacctggacaagcacccagggcactgatttatagtacaagcaacaaacactcctggacccctgcccggttctcaggctccctccttgggggcaaagctgccctgacactgtcaggtgtgcagcctgaggacgaggctgactattactgcctgctctactgtggtggtgctcagctggtgttcggcggagggaccaagctgaccgtccta

SEQ ID NO: 27622 - protein, 110 aa, synthetic construct
  REGION 1..110: note = Description of Artificial Sequence: Synthetic polypeptide
QTVVTQEPSLTVSPGGTVTLTCVFSTGAVTSGSFPNWFQQKPGQAPRALIYSTSNKHSWTPARFSGSLLGGKAALTLSGVQPEDEADYYCLLYCGGAQLVFGGGTKLTVL

SEQ ID NO: 27623 - DNA, 330 bp, synthetic construct
  misc_feature 1..330: note = Description of Artificial Sequence: Synthetic polynucleotide
  source 1..330: mol_type = other DNA
cagtctgtgttgacgcagccgccctcagtgtctgcggccccaggacagagggtcaccatctcctgctctggaagcagctccaaccttggaaataattttgtatcctggtaccagcagttcccaggaacagcccccaaactcctcatttatgacaattataagcgaccctcagggattcctgaccgattctctgtctccaagtctggcacgtcagccaccctgggcatcaccggactccagactggggacgaggccgattattactgcggaacatgggatagcagcctgaatactggggtattcggcggagggaccaagctgaccgtccta

SEQ ID NO: 27624 - protein, 110 aa, synthetic construct
  REGION 1..110: note = Description of Artificial Sequence: Synthetic polypeptide
QSVLTQPPSVSAAPGQRVTISCSGSSSNLGNNFVSWYQQFPGTAPKLLIYDNYKRPSGIPDRFSVSKSGTSATLGITGLQTGDEADYYCGTWDSSLNTGVFGGGTKLTVL

SEQ ID NO: 27625 - DNA, 330 bp, synthetic construct
  misc_feature 1..330: note = Description of Artificial Sequence: Synthetic polynucleotide
  source 1..330: mol_type = other DNA
cagactgtggtgactcaggagccctcactgactgtgtccccaggagggacagtcactctcacttgtgttcttagcactggagcagtcaccagtggttcctttccaaactggttccagcagaaacctggacaagcacccagggcactgatttatagtacaagcaacaaacactcctggacccctgcccggttttcaggctccctcctggggggcaaagctgccctgacactgtcaggtgtgcagcctgaggacgaggctgactattactgcatgctctactgtggtggtgctcagctggtgttcggcggagggaccaagctgaccgtccta

SEQ ID NO: 27626 - protein, 110 aa, synthetic construct
  REGION 1..110: note = Description of Artificial Sequence: Synthetic polypeptide
QTVVTQEPSLTVSPGGTVTLTCVLSTGAVTSGSFPNWFQQKPGQAPRALIYSTSNKHSWTPARFSGSLLGGKAALTLSGVQPEDEADYYCMLYCGGAQLVFGGGTKLTVL

SEQ ID NO: 27627 - DNA, 327 bp, synthetic construct
  misc_feature 1..327: note = Description of Artificial Sequence: Synthetic polynucleotide
  source 1..327: mol_type = other DNA
tcttctgagctgactcaggaccctgctgtgtctgtggccttgggacagacagtcaggatcacatgccaaggagacaccctcagaccctattatgcaagttggtaccagcagaagccaggacaggcccctgtacttgtcatctatggtaaaaacaaccggccctcagggatctcagaccgattctctggctccagctcaggaaacacagcttccttgaccatcactggggctcaggcggaagatgaggctgactattactgtaactcccgggacagcagtggtaaccatcttgtggtattcggcggagggaccaagctgaccgtccta

SEQ ID NO: 27628 - protein, 109 aa, synthetic construct
  REGION 1..109: note = Description of Artificial Sequence: Synthetic polypeptide
SSELTQDPAVSVALGQTVRITCQGDTLRPYYASWYQQKPGQAPVLVIYGKNNRPSGISDRFSGSSSGNTASLTITGAQAEDEADYYCNSRDSSGNHLVVFGGGTKLTVL

SEQ ID NO: 27629 - DNA, 327 bp, synthetic construct
  misc_feature 1..327: note = Description of Artificial Sequence: Synthetic polynucleotide
  source 1..327: mol_type = other DNA
tcttctgagctgactcaggaccctgctgtgtctgtggccttgggacagacagtcaggatcacatgccaaggagacagcctcagaccctattatgcaagctggtaccagcagaagccaggacaggcccctgtacttgtcatctatggtaaaaacaaccggccctcagggatcccagaccgattctctggctccagctcaggaaacacagcttccttgaccatcactgaggctcaggcggaagatgaggctgactattactgtaactcccgggacagctgtggtaaccatcttgtggtattcggcggagggaccaagctgaccgtccta

SEQ ID NO: 27630 - protein, 109 aa, synthetic construct
  REGION 1..109: note = Description of Artificial Sequence: Synthetic polypeptide
SSELTQDPAVSVALGQTVRITCQGDSLRPYYASWYQQKPGQAPVLVIYGKNNRPSGIPDRFSGSSSGNTASLTITEAQAEDEADYYCNSRDSCGNHLVVFGGGTKLTVL

SEQ ID NO: 27631 - DNA, 330 bp, synthetic construct
  misc_feature 1..330: note = Description of Artificial Sequence: Synthetic polynucleotide
  source 1..330: mol_type = other DNA
cagtctgtgttgacgcagccgccctcagtgtctgcggccccaggacagaaggtcaccatctcctgctctggaagcagctccaacatcgggaataattatgtatcctggtaccagcagctcccaggaacagcccccaaactcctcatttatgacaataaaaagcgaccctcagggattcctgaccgattctctggctccaagtctggcacgtcagccaccctgggcatcaccggactccagactggggacgaggccgattattactgcggaacatgggatagcagcctgagtgtttgtgtcttcggaactgggaccaaggtcaccgtccta

SEQ ID NO: 27632 - protein, 110 aa, synthetic construct
  REGION 1..110: note = Description of Artificial Sequence: Synthetic polypeptide
QSVLTQPPSVSAAPGQKVTISCSGSSSNIGNNYVSWYQQLPGTAPKLLIYDNKKRPSGIPDRFSGSKSGTSATLGITGLQTGDEADYYCGTWDSSLSVCVFGTGTKVTVL

SEQ ID NO: 27633 - DNA, 345 bp, synthetic construct
  misc_feature 1..345: note = Description of Artificial Sequence: Synthetic polynucleotide
  source 1..345: mol_type = other DNA
caggctgtgtcgactcggccgtcttccctctctgcatctcctggagcatcagccagtctcacctgcaccttacgcagtggcatcaatgttggtacctacaggatatactggtaccagcagaagccagggagtcctccccagtatctcctgaggtacaaatcagactcagataagcagcagggctctggagtccccagccgcttctctggatccaaagatgcttcggccaatgcagggattttactcatctctgggctccagtctgaggatgaggctgactattactgtatgatttggcacagcagcgctgtggtattcggcggagggaccaagctgaccgtccta

SEQ ID NO: 27634 - protein, 115 aa, synthetic construct
  REGION 1..115: note = Description of Artificial Sequence: Synthetic polypeptide
QAVSTRPSSLSASPGASASLTCTLRSGINVGTYRIYWYQQKPGSPPQYLLRYKSDSDKQQGSGVPSRFSGSKDASANAGILLISGLQSEDEADYYCMIWHSSAVVFGGGTKLTVL

SEQ ID NO: 27635 - DNA, 330 bp, synthetic construct
  misc_feature 1..330: note = Description of Artificial Sequence: Synthetic polynucleotide
  source 1..330: mol_type = other DNA
cagactgtggtgactcaggagccctcactgactgtgtccccaggagggacagtcactctcacctgtgcttccagcactggagcagtcaccagtgcttactatccaaactggttgcagcagaaacctggacaagcacccaggacactgatttatagtacaaacaacaaacactcctggacccctgcccggttctcaggctccctccttgggggcaaagctgccctgacactgtcagatgtgcagcctgaggacgaggctgagtattactgcctgatcttctatggtggtgtacatgtgatatttggcggagggaccaagctgaccgtccta

SEQ ID NO: 27636 - protein, 110 aa, synthetic construct
  REGION 1..110: note = Description of Artificial Sequence: Synthetic polypeptide
QTVVTQEPSLTVSPGGTVTLTCASSTGAVTSAYYPNWLQQKPGQAPRTLIYSTNNKHSWTPARFSGSLLGGKAALTLSDVQPEDEAEYYCLIFYGGVHVIFGGGTKLTVL

SEQ ID NO: 27637 - DNA, 330 bp, synthetic construct
  misc_feature 1..330: note = Description of Artificial Sequence: Synthetic polynucleotide
  source 1..330: mol_type = other DNA
cagtctgtgttgacgcagccgccctcagtgtctgcggccccaggacagaaggtcaccatctcctgctctggaagcagctccaacattgggaataattatgtatcctggtaccagcagctcccaggaacagcccccaaactcctcatttatgacaataataagcgaccctcaaggattcctgaccgattctctggctccaagtctggcacgtcagccaccctgggcatcaccggactccagactggggacgaggccgattattactgcggaacatgggatagcagcctgagtgctggggtattcggcggagggaccaagctgaccgtccta

SEQ ID NO: 27638 - protein, 110 aa, synthetic construct
  REGION 1..110: note = Description of Artificial Sequence: Synthetic polypeptide
QSVLTQPPSVSAAPGQKVTISCSGSSSNIGNNYVSWYQQLPGTAPKLLIYDNNKRPSRIPDRFSGSKSGTSATLGITGLQTGDEADYYCGTWDSSLSAGVFGGGTKLTVL

SEQ ID NO: 27639 - DNA, 330 bp, synthetic construct
  misc_feature 1..330: note = Description of Artificial Sequence: Synthetic polynucleotide
  source 1..330: mol_type = other DNA
cagactgtggtgactcaggagccctcactgactgtgtccccaggagggacagtcactctcacctgtgctttcagcactggatcagtcaccagtggttcctatccaaactggttccagcagaaacctggacaagcacccagggcactgatttatagtacaaacaacaaacactcctggacccctgcccggttctcaggctccctccttgggggcaaagctgccctgacactgtcaggtgtgcagcgtgaggacgaggctgagtattactgcctgctatactatggtggtgctcagctggtgttcggcggagggaccaagctgaccgtccta

SEQ ID NO: 27640 - protein, 110 aa, synthetic construct
  REGION 1..110: note = Description of Artificial Sequence: Synthetic polypeptide
QTVVTQEPSLTVSPGGTVTLTCAFSTGSVTSGSYPNWFQQKPGQAPRALIYSTNNKHSWTPARFSGSLLGGKAALTLSGVQREDEAEYYCLLYYGGAQLVFGGGTKLTVL

SEQ ID NO: 27641 - DNA, 330 bp, synthetic construct
  misc_feature 1..330: note = Description of Artificial Sequence: Synthetic polynucleotide
  source 1..330: mol_type = other DNA
cagtctgtgctgactcagccaccctcagcgtctgggacccccggacagagggtcaccatgtcttgttctggaagcagctccaacatcggaagtaatactgtaaactggtaccaacaattcccaggaacggcccccaaactcctcatctatggtaataagcagcggccctcaagggtccctgaccgattctctggctccaagtctggcacctcagcctccctggccatcagtgggctccagtctgaggatgagactgattattactgtgcagcgtgggatgacagcctgaatggttgggtgttcggcggagggaccaagctgaccgtccta

SEQ ID NO: 27642 - protein, 110 aa, synthetic construct
  REGION 1..110: note = Description of Artificial Sequence: Synthetic polypeptide
QSVLTQPPSASGTPGQRVTMSCSGSSSNIGSNTVNWYQQFPGTAPKLLIYGNKQRPSRVPDRFSGSKSGTSASLAISGLQSEDETDYYCAAWDDSLNGWVFGGGTKLTVL

SEQ ID NO: 27643 - DNA, 330 bp, synthetic construct
  misc_feature 1..330: note = Description of Artificial Sequence: Synthetic polynucleotide
  source 1..330: mol_type = other DNA
cagactgtggtgactcaggagccctcactgactgtgtccccaggagggacagtcactctcacctgtgcttccagcactggagcagtcaccagtggtaactatccacagtggttccagcagaaacctggacaagcacccagggcactgatttacagtacaaccaacagacattcctggacccctgcccggttttcaggctccctcctggggggcaaagctgccctgacactgtcaggtgtgcagcctgaggacgaggctgagtattactgcctgttctactatggtggtgctcaggtgatattcggcggagggaccaagctgaccgtccta

SEQ ID NO: 27644 - protein, 110 aa, synthetic construct
  REGION 1..110: note = Description of Artificial Sequence: Synthetic polypeptide
QTVVTQEPSLTVSPGGTVTLTCASSTGAVTSGNYPQWFQQKPGQAPRALIYSTTNRHSWTPARFSGSLLGGKAALTLSGVQPEDEAEYYCLFYYGGAQVIFGGGTKLTVL

SEQ ID NO: 27645 - DNA, 330 bp, synthetic construct
  misc_feature 1..330: note = Description of Artificial Sequence: Synthetic polynucleotide
  source 1..330: mol_type = other DNA
cagactgtggtgactcaggaaccctcactgactgtgtccccaggagggacagtcactctcacctgtgctttcagcactggaacagtcaccagtggtttctatccaaactggttccagcagaaacctggacaagcacccagggcattgatttataatacaagcaacagacactcctggacccctgcccggttctcaggctccctccttgggggcatggctgccctgacactgtcaggtgtgcagcctgaggacgaggctgattattactgcctgctgtactatggtggtgctcagctgatgttcggcggagggaccaagctgaccgtccta

SEQ ID NO: 27646 - protein, 110 aa, synthetic construct
  REGION 1..110: note = Description of Artificial Sequence: Synthetic polypeptide
QTVVTQEPSLTVSPGGTVTLTCAFSTGTVTSGFYPNWFQQKPGQAPRALIYNTSNRHSWTPARFSGSLLGGMAALTLSGVQPEDEADYYCLLYYGGAQLMFGGGTKLTVL

SEQ ID NO: 27647 - DNA, 324 bp, synthetic construct
  misc_feature 1..324: note = Description of Artificial Sequence: Synthetic polynucleotide
  source 1..324: mol_type = other DNA
tcttctgagctgactcaggaccctgctgtgtctgtggccttgggacagacagtcaggatcacatgccaaggagacagcctcagaagctattatgcaaactggtaccagcagaagccaggacaggcccctgtacttttcatctatgctaagaacaaccggccctcagggatcccagaccgattctctggctccaactcaggaaacacagcttccttgaccatcactggggctcaggcggaagatgaggctgactattactgtaattcccgggacagcagtggtaaccatctggtattcggcggagggaccaagctgaccgtccta

SEQ ID NO: 27648 - protein, 108 aa, synthetic construct
  REGION 1..108: note = Description of Artificial Sequence: Synthetic polypeptide
SSELTQDPAVSVALGQTVRITCQGDSLRSYYANWYQQKPGQAPVLFIYAKNNRPSGIPDRFSGSNSGNTASLTITGAQAEDEADYYCNSRDSSGNHLVFGGGTKLTVL

SEQ ID NO: 27649 - DNA, 318 bp, synthetic construct
  misc_feature 1..318: note = Description of Artificial Sequence: Synthetic polynucleotide
  source 1..318: mol_type = other DNA
tcctatgaactgactcagccatcctcagtgtccgtgtccccaggacagacagccagcatcacctgctctggagataaattgggggatagatttgcttgctggtatcagcagaagccaggccagtcccctgtgctggtcatctatcaagatagcaagcggccctcagggatccctgagcgattctctggctccaactctgggaacacagccactctgaccatcagcgggacccaggctatggatgaggctgactattactgtcaggcgtgggacagcagcactgcggtattcggcggagggaccaagctgaccgtccta

SEQ ID NO: 27650 - protein, 106 aa, synthetic construct
  REGION 1..106: note = Description of Artificial Sequence: Synthetic polypeptide
SYELTQPSSVSVSPGQTASITCSGDKLGDRFACWYQQKPGQSPVLVIYQDSKRPSGIPERFSGSNSGNTATLTISGTQAMDEADYYCQAWDSSTAVFGGGTKLTVL

SEQ ID NO: 27651 - DNA, 330 bp, synthetic construct
  misc_feature 1..330: note = Description of Artificial Sequence: Synthetic polynucleotide
  source 1..330: mol_type = other DNA
cagtatgtgttgacgcagccgccatcagtgtctgcggccccaggacagaaggtcaccatctcctgcttcggaggcagctccaacattgggaataattatgtatcctggttccagcagttcccaggaacagcccccaaattcctcatttatgacaataataagcgaccctcagggattcttgaccgattatctggctccaagtctggcacgtcagccaccctggacatcaccggactccagaatggggacgaggccgattattactgcggaacatgggatcgcaccatgagtgattgggtattcggcggagggaccaagctgaccgtccta

SEQ ID NO: 27652 - protein, 110 aa, synthetic construct
  REGION 1..110: note = Description of Artificial Sequence: Synthetic polypeptide
QYVLTQPPSVSAAPGQKVTISCFGGSSNIGNNYVSWFQQFPGTAPKFLIYDNNKRPSGILDRLSGSKSGTSATLDITGLQNGDEADYYCGTWDRTMSDWVFGGGTKLTVL

SEQ ID NO: 27653 - DNA, 330 bp, synthetic construct
  misc_feature 1..330: note = Description of Artificial Sequence: Synthetic polynucleotide
  source 1..330: mol_type = other DNA
cagactgtggtgactcaggagccctcactgactgtgtccccaggagggacagtcactctcacctgtgcttccagcactggagcagtcaccagtggtaactatccaaactggttccagcagaaacctggacaaacacccagggcactgatttatagtacaagcaacaaacactcctggacccctgcccggttctcaggctccctccttgggggcaaaggtgccctgacactgtcaggtgtgcagcctgaggacgaggctgagtattactgcctgatctactatggtggtgctcagctgatgttcggcggagggaccaagctgaccgtccta

SEQ ID NO: 27654 - protein, 110 aa, synthetic construct
  REGION 1..110: note = Description of Artificial Sequence: Synthetic polypeptide
QTVVTQEPSLTVSPGGTVTLTCASSTGAVTSGNYPNWFQQKPGQTPRALIYSTSNKHSWTPARFSGSLLGGKGALTLSGVQPEDEAEYYCLIYYGGAQLMFGGGTKLTVL

SEQ ID NO: 27655 - DNA, 330 bp, synthetic construct
  misc_feature 1..330: note = Description of Artificial Sequence: Synthetic polynucleotide
  source 1..330: mol_type = other DNA
cagtctgtgttgacgcagccgccctcagtgtctgcggccccaggacagaaggtcaccatctcctgctctggaagcagctccaacattgggaataattatgtatcctggtaccagcagctcccaggaacagcccccaaactcctcatttatgacaataataagcgaccctcagggattcctgaccgattctctggctccaagtctggcacgtcagccaccctgggcatcaccggactccagactggggacgaggccgattattactgcggaacatgggatagcagcctgagtgctggggttttcggcggagggaccaagctgaccgtccta

SEQ ID NO: 27656 - protein, 110 aa, synthetic construct
  REGION 1..110: note = Description of Artificial Sequence: Synthetic polypeptide
QSVLTQPPSVSAAPGQKVTISCSGSSSNIGNNYVSWYQQLPGTAPKLLIYDNNKRPSGIPDRFSGSKSGTSATLGITGLQTGDEADYYCGTWDSSLSAGVFGGGTKLTVL

SEQ ID NO: 27657 - DNA, 330 bp, synthetic construct
  misc_feature 1..330: note = Description of Artificial Sequence: Synthetic polynucleotide
  source 1..330: mol_type = other DNA
cagactgtggtgactcaggagccctcactgactgtgtccccaggagggacagtcactctcacctgtgcttccagcactggagcagtcaccagtggttcctttccaagctggttccagcagaaacctggacaagcacccagggcactgatttatagtacaagcaacagacactcctcgacccctgcccggttctcaggctccctccttgggggcaaagcagccctgacactgtcaggtgtgcagcctgaggacgaggctgactattactgcctgatctactatggtggtgctcagctggcattcggcggagggaccaagctgaccgtccta

SEQ ID NO: 27658 - protein, 110 aa, synthetic construct
  REGION 1..110: note = Description of Artificial Sequence: Synthetic polypeptide
QTVVTQEPSLTVSPGGTVTLTCASSTGAVTSGSFPSWFQQKPGQAPRALIYSTSNRHSSTPARFSGSLLGGKAALTLSGVQPEDEADYYCLIYYGGAQLAFGGGTKLTVL

SEQ ID NO: 27659 - DNA, 330 bp, synthetic construct
  misc_feature 1..330: note = Description of Artificial Sequence: Synthetic polynucleotide
  source 1..330: mol_type = other DNA
cagtctgtgttgacgcagccgccctcagtgtctgcggccccaggacagaaggtcaccatctcctgctctggaagcagctccaacattgggaataattatgtatcctggtaccagcagctcccaggaacagcccccaaactcctcatttatgacaataataagcgaccctcaaggattcctgaccgattctctggctccaagtctggcacgtcagccaccctgggcatcaccggactccagactggggaggaggccgattattactgcggaacatgggatagcagcctgagtgttggggtattcggcggagggaccaagctgaccgtctta

SEQ ID NO: 27660 - protein, 110 aa, synthetic construct
  REGION 1..110: note = Description of Artificial Sequence: Synthetic polypeptide
QSVLTQPPSVSAAPGQKVTISCSGSSSNIGNNYVSWYQQLPGTAPKLLIYDNNKRPSRIPDRFSGSKSGTSATLGITGLQTGEEADYYCGTWDSSLSVGVFGGGTKLTVL

SEQ ID NO: 27661 - DNA, 318 bp, synthetic construct
  misc_feature 1..318: note = Description of Artificial Sequence: Synthetic polynucleotide
  source 1..318: mol_type = other DNA
tcctatgagctgactcagccaccctcagtgtccgtgtccccaggacagacagccagcatcacctgctctggagataaattggggtatagatctgtttgctggtatcagcagaagccaggccagtcccctgtgctggtcatctatgaagatagcaagcgaccctcagggatccctgagcgattctctggctccaactctgggaacacagccactctgaccatcagcgggacccaggctatggatgaggctgactattactgtcaggcgtgggacagtgtcactgtggtattcggcggagggaccaagctgatcgtccta

SEQ ID NO: 27662 - protein, 106 aa, synthetic construct
  REGION 1..106: note = Description of Artificial Sequence: Synthetic polypeptide
SYELTQPPSVSVSPGQTASITCSGDKLGYRSVCWYQQKPGQSPVLVIYEDSKRPSGIPERFSGSNSGNTATLTISGTQAMDEADYYCQAWDSVTVVFGGGTKLIVL

SEQ ID NO: 27663 - DNA, 330 bp, synthetic construct
  misc_feature 1..330: note = Description of Artificial Sequence: Synthetic polynucleotide
  source 1..330: mol_type = other DNA
cagtctgtgctgactcagccaccctcagcgtctgggacccccgggcagagggtcaccatctcttgttctggaagcagctccaacatcggaagtcatactgtaaactggtaccagcaactcccaggaacggcccccaaactcctcatctataataattatcagcggccctcaggggtccctgaccgattctctggctccaagtctggcacctcagcctccctgaccatcagtgggctccagtctgaggatgaggctgattattactgtgcaacatgggatgacagcctgagtgtttgggtgttcggcggagggaccaaggtgaccgtccta

SEQ ID NO: 27664 - protein, 110 aa, synthetic construct
  REGION 1..110: note = Description of Artificial Sequence: Synthetic polypeptide
QSVLTQPPSASGTPGQRVTISCSGSSSNIGSHTVNWYQQLPGTAPKLLIYNNYQRPSGVPDRFSGSKSGTSASLTISGLQSEDEADYYCATWDDSLSVWVFGGGTKVTVL

SEQ ID NO: 27665 - DNA, 318 bp, synthetic construct
  misc_feature 1..318: note = Description of Artificial Sequence: Synthetic polynucleotide
  source 1..318: mol_type = other DNA
tcctatgagctgactcagccaccctcagtgtccgtgtccccaggacagacagccagcatcacctgctcaggagataaattggggaataaatatgcttactggtatcagcagaagccaggccagtcccctgtgctggtcatctatcaagataggaagcggccctcagggatccctgagcgattctctggctccaattctgggaacacaggcactttgaccatcagcgggacccagggtatggatgaggctgactattactgtcaggcgtgggacagaggaattgtggtattcggcggagggaccaagctgaccgtccta

SEQ ID NO: 27666 - protein, 106 aa, synthetic construct
  REGION 1..106: note = Description of Artificial Sequence: Synthetic polypeptide
SYELTQPPSVSVSPGQTASITCSGDKLGNKYAYWYQQKPGQSPVLVIYQDRKRPSGIPERFSGSNSGNTGTLTISGTQGMDEADYYCQAWDRGIVVFGGGTKLTVL

SEQ ID NO: 27667 - DNA, 330 bp, synthetic construct
  misc_feature 1..330: note = Description of Artificial Sequence: Synthetic polynucleotide
  source 1..330: mol_type = other DNA
cagtatgtgttgacgcagccgccctcagtgtctgcggccccaggacagaaggtcaccatctcctgttctggaggcagctccaacattgggaataattatgtatcctggttccagcagttcccaggaacagcccccaaattcctcatttatgacaataataagcgaccctcagggattcttgaccgattctctggctccaagtctggcacgtcagccaccctgggcatcaccggactccagactggggacgaggccgattattactgcggaacatgggatcgcaccatgagtgattgggtattcggcggagggaccaagttgaccgtccta

SEQ ID NO: 27668 - protein, 110 aa, synthetic construct
  REGION 1..110: note = Description of Artificial Sequence: Synthetic polypeptide
QYVLTQPPSVSAAPGQKVTISCSGGSSNIGNNYVSWFQQFPGTAPKFLIYDNNKRPSGILDRFSGSKSGTSATLGITGLQTGDEADYYCGTWDRTMSDWVFGGGTKLTVL

SEQ ID NO: 27669 - DNA, 330 bp, synthetic construct
  misc_feature 1..330: note = Description of Artificial Sequence: Synthetic polynucleotide
  source 1..330: mol_type = other DNA
cagactgtggtgactcaggagccctcactgactgtgtccccaggagggacagtcactctcacctgtgcttccagcactggagcagtcaccagtgcttactatccaaactggttgcagcagaaacctggacaagcacccaggacactgatttatagtacaaacaacaaacactcctggacccctgcccggttctcaggctccctccttgggggcaaagctgccctgacactgtcagatgtgcagcctgaggacgaggctgagtattactgcctgattttctatggtggtgtacatgtgatatttggcggagggaccaagctgaccgtccta

SEQ ID NO: 27670 - protein, 110 aa, synthetic construct; identical to SEQ ID NO: 27636
  REGION 1..110: note = Description of Artificial Sequence: Synthetic polypeptide

SEQ ID NO: 27671 - DNA, 330 bp, synthetic construct
  misc_feature 1..330: note = Description of Artificial Sequence: Synthetic polynucleotide
  source 1..330: mol_type = other DNA
cagtctgtgttgacgcagccgccctcagtgtctgcggccccaggacagaaggtcaccatctcctgctctggaagcagctccaacattgggaataaatatgtatcctggtaccagcagttcccaggaacagcccccaaactcctcatttatgacaataataagcgaccctcaaagattcctgaccgattctctggctccaaatctggcacgtcagccaccctgggcatcaccggactcctgactggggacgaggccgattattactgcggaatatgggatcgcagtctgagtgttatggtgttcggcggagggaccaagctgaccgtccta

SEQ ID NO: 27672 - protein, 110 aa, synthetic construct
  REGION 1..110: note = Description of Artificial Sequence: Synthetic polypeptide
QSVLTQPPSVSAAPGQKVTISCSGSSSNIGNKYVSWYQQFPGTAPKLLIYDNNKRPSKIPDRFSGSKSGTSATLGITGLLTGDEADYYCGIWDRSLSVMVFGGGTKLTVL

SEQ ID NO: 27673 - DNA, 330 bp, synthetic construct
  misc_feature 1..330: note = Description of Artificial Sequence: Synthetic polynucleotide
  source 1..330: mol_type = other DNA
cagtctgtgttgactcagccaccctcagcgtctgggacccccgggcagagggtcaccatctcttgttctggaagcagctccaacatcggaagtaatactgtaaactggtaccagcaactcccaggaacggcccccaaactcctcatttatagtaataatcagcggccctcaggggtccctgaccgattctctggctccaagtctggcacctcagcctccctggccatcagtgggctccagtctgaggatgaggctgattattactgtgcagcatgggatgacagtatgaatggtccggtgttcggcggagggaccaagctgaccgtccta

SEQ ID NO: 27674 - protein, 110 aa, synthetic construct
  REGION 1..110: note = Description of Artificial Sequence: Synthetic polypeptide
QSVLTQPPSASGTPGQRVTISCSGSSSNIGSNTVNWYQQLPGTAPKLLIYSNNQRPSGVPDRFSGSKSGTSASLAISGLQSEDEADYYCAAWDDSMNGPVFGGGTKLTVL

SEQ ID NO: 27675 - DNA, 330 bp, synthetic construct
  misc_feature 1..330: note = Description of Artificial Sequence: Synthetic polynucleotide
  source 1..330: mol_type = other DNA
cagactgtggtgactcaggagccctcactgactgtgtccccaggagggacagtcactctcacctgtgctttcagcactggatcagtcaccagtggttcctatccaaactggttccagcagaaacctggacaagcacccagggcactgatttatagtacaaacaacaaacactcctggacccctgcccggttctcaggctccctccttgggggcaaagctgccctgacactgtcaggtgtgcagcctgaggacgaggctgagtattactgcctgctctactatggtggtgctcagctggtgttcggcggagggaccaagctgaccgtccta

SEQ ID NO: 27676 - protein, 110 aa, synthetic construct
  REGION 1..110: note = Description of Artificial Sequence: Synthetic polypeptide
QTVVTQEPSLTVSPGGTVTLTCAFSTGSVTSGSYPNWFQQKPGQAPRALIYSTNNKHSWTPARFSGSLLGGKAALTLSGVQPEDEAEYYCLLYYGGAQLVFGGGTKLTVL

SEQ ID NO: 27677 - DNA, 330 bp, synthetic construct
  misc_feature 1..330: note = Description of Artificial Sequence: Synthetic polynucleotide
  source 1..330: mol_type = other DNA
cagactgtggtgactcaggagccctcactgactgtgtccccaggagggacagtcactctcacctgtgcttccagcactggagcagtcaccagtgcttactatccaaactggttgcagcagaaacctggacaagcacccaggacactgatttatagtacaagcaacaaacactcctggacccctgcccggttctcaggctccctccttgggggcaaagctgccctgacactgtcagatgtgcagcctgaggacgaggctgagtattactgcctgatcttctatggtggtgtacatgtgatatttggcggagggaccaagctgaccgtccta

SEQ ID NO: 27678 - protein, 110 aa, synthetic construct
  REGION 1..110: note = Description of Artificial Sequence: Synthetic polypeptide
QTVVTQEPSLTVSPGGTVTLTCASSTGAVTSAYYPNWLQQKPGQAPRTLIYSTSNKHSWTPARFSGSLLGGKAALTLSDVQPEDEAEYYCLIFYGGVHVIFGGGTKLTVL

SEQ ID NO: 27679 - DNA, 330 bp, synthetic construct
  misc_feature 1..330: note = Description of Artificial Sequence: Synthetic polynucleotide
  source 1..330: mol_type = other DNA
cagtctgtgttgacgcagccgccctcagtgtctgcggccccaggacagaaggtcaccatctcctgctctggaagcagctccaacatcgggaataattatatatcctggtaccagcagctcccaggaacagcccccaaactcctcatttatgacaataaaaagcgaccctcagggattcctgaccgattctctggctccaagtctggcacgtcagccaccctgggcatcaccggactccagactggggacgaggccgattattactgcggaacatgggatagcagcctgagtgtttgtgtcttcggaactgggaccaaggtcaccgtccta

SEQ ID NO: 27680 - protein, 110 aa, synthetic construct
  REGION 1..110: note = Description of Artificial Sequence: Synthetic polypeptide
QSVLTQPPSVSAAPGQKVTISCSGSSSNIGNNYISWYQQLPGTAPKLLIYDNKKRPSGIPDRFSGSKSGTSATLGITGLQTGDEADYYCGTWDSSLSVCVFGTGTKVTVL

SEQ ID NO: 27681 - DNA, 330 bp, synthetic construct
  misc_feature 1..330: note = Description of Artificial Sequence: Synthetic polynucleotide
  source 1..330: mol_type = other DNA
cagaccgtggtgactcaggagtcctcactgactgtgtccccaggagggacagtcactctcacttgtgttcttagcactggagcagtcaccagtggttcctttccaaactggttccagcagaaacctggacaagcacccagggctctgatttatagtacaagcaacaaacattcctggacccctgcccggttttcaggctccctccttgggggcaaagctgccctgacattgtcaggtgtgcagcctgaggacgaggctgattattacttcatgctttacagtggtggagctcagatggtgttcggcggagggaccaagctgaccgtccta

SEQ ID NO: 27682 - protein, 110 aa, synthetic construct
  REGION 1..110: note = Description of Artificial Sequence: Synthetic polypeptide
QTVVTQESSLTVSPGGTVTLTCVLSTGAVTSGSFPNWFQQKPGQAPRALIYSTSNKHSWTPARFSGSLLGGKAALTLSGVQPEDEADYYFMLYSGGAQMVFGGGTKLTVL

SEQ ID NO: 27683 - DNA, 330 bp, synthetic construct
  misc_feature 1..330: note = Description of Artificial Sequence: Synthetic polynucleotide
  source 1..330: mol_type = other DNA
cagtctgtgttgacgcagccgccctcagtgtctgcggccccaggacagaaggtcaccatctcctgctctggaagcagctccaacattgggaataattatgtatcctggtaccagcaactcccaggaacagcccccaaactcctcatttatgacaataataagcgcccctcagggattcctgaccgattctctggctccaagtctggcacgtcagccaccctgggcatcaccggcctccagactggggacgaggccgattattactgcggaacatgggatagcagcctgagtgcttgtgtcttcggaactgggaccaaggtcaccgtccta

SEQ ID NO: 27684 - protein, 110 aa, synthetic construct
  REGION 1..110: note = Description of Artificial Sequence: Synthetic polypeptide
QSVLTQPPSVSAAPGQKVTISCSGSSSNIGNNYVSWYQQLPGTAPKLLIYDNNKRPSGIPDRFSGSKSGTSATLGITGLQTGDEADYYCGTWDSSLSACVFGTGTKVTVL

SEQ ID NO: 27685 - DNA, 330 bp, synthetic construct
  misc_feature 1..330: note = Description of Artificial Sequence: Synthetic polynucleotide
  source 1..330: mol_type = other DNA
cagtctgtgttgactcagccaccctcagcgtctgggacccccgggcagagggtcaccatctcttgttctggaagcagctccaacatcggaagtaatactgtaaactggtaccagcagctcccaggaacggcccccaaactcctcatttatagtaataatcagcggccctcaggggtccctgaccgattctctggctccaagtctggcacctcagcctccctggccatcagtgggctccagtctgaggatgaggctgattattactgtgcagcatgggatgacagcctgaatggtccggtgttcggcggagggaccaagctgaccgtccta

SEQ ID NO: 27686 - protein, 110 aa, synthetic construct
  REGION 1..110: note = Description of Artificial Sequence: Synthetic polypeptide
QSVLTQPPSASGTPGQRVTISCSGSSSNIGSNTVNWYQQLPGTAPKLLIYSNNQRPSGVPDRFSGSKSGTSASLAISGLQSEDEADYYCAAWDDSLNGPVFGGGTKLTVL

SEQ ID NO: 27687 - DNA, 330 bp, synthetic construct
  misc_feature 1..330: note = Description of Artificial Sequence: Synthetic polynucleotide
  source 1..330: mol_type = other DNA
cagactgtggtgactcaggagccctcactgactgtgtccccaggagggacagtcactctcacctgtgcttccaacactggagcagtcaccagtggttcctatccaaactggttccagcagaaacctggacaggcacccagggcactgatttatcatacaaacaacaaacactcctggacccctgcccggttctcaggctccctccttgggggcaaagctgccctgacactgtcaggtgtgcagcctgaggacgaggctgaatattactgtctgatctactatggtggtgctcagctggtgttcggcggagggaccaagctgaccgtccta

SEQ ID NO: 27688 - protein, 110 aa, synthetic construct
  REGION 1..110: note = Description of Artificial Sequence: Synthetic polypeptide
QTVVTQEPSLTVSPGGTVTLTCASNTGAVTSGSYPNWFQQKPGQAPRALIYHTNNKHSWTPARFSGSLLGGKAALTLSGVQPEDEAEYYCLIYYGGAQLVFGGGTKLTVL

SEQ ID NO: 27689 - DNA, 330 bp, synthetic construct
  misc_feature 1..330: note = Description of Artificial Sequence: Synthetic polynucleotide
  source 1..330: mol_type = other DNA
cagtctgtgttgacgcagccgccctcagtgtctgcggccccaggacagagggtcaccatctcctgctctggaagcagctccaaccttggaaataattttgtatcctggtaccagcagttcccaggaacagcccccaaactcctcatttatgacaattataagcgaccctcagggattcctgaccgattctctgtctccaagtctggcacgtcagccaccctgggcatcaccggactccagactggggacgaggccgattattactgcggaacttgggatagcagcctgaatactggggtattcggcggagggaccaagctgaccgtccta

SEQ ID NO: 27690 - protein, 110 aa, synthetic construct; identical to SEQ ID NO: 27624
  REGION 1..110: note = Description of Artificial Sequence: Synthetic polypeptide

SEQ ID NO: 27691 - DNA, 330 bp, synthetic construct
  misc_feature 1..330: note = Description of Artificial Sequence: Synthetic polynucleotide
  source 1..330: mol_type = other DNA
cagactgtggtgactcaggagccctcactgactgtgtccccaggagggacagtcactctcacctgtgcttccaacactggagcagtcaccagtggttcctatccaaattggttacagcagaaacctggacaagcacccagggcactgatttatcatacagacaacaaacactcctggacccctgcccggttctcaggctccctccttgggggcaaagctgccctgacactgtcaggtgcgcagcctgaggacgaggctgaatattactgtctgatctactatggtggtgctcagctggtgttcggcggagggaccaagctgaccgtccta

SEQ ID NO: 27692 - protein, 110 aa, synthetic construct
  REGION 1..110: note = Description of Artificial Sequence: Synthetic polypeptide
QTVVTQEPSLTVSPGGTVTLTCASNTGAVTSGSYPNWLQQKPGQAPRALIYHTDNKHSWTPARFSGSLLGGKAALTLSGAQPEDEAEYYCLIYYGGAQLVFGGGTKLTVL

SEQ ID NO: 27693 - DNA, 330 bp, synthetic construct
  misc_feature 1..330: note = Description of Artificial Sequence: Synthetic polynucleotide
  source 1..330: mol_type = other DNA
cagactgtggtgactcaggagccctcactgactgtgtccccaggagggacagtcactctcacctgtgcttccagcactggagcagtcaccagtggttactatccaaactggttccagcagaaacctggacaagtacccagggcactgatttatagtacaaacaacaaacactcctggacccctgcccggttctcaggctccctccttgggggcaaagctgccctgacactgtcaggtgtgcagcctgaggacgaggctgactattactgcctgctctattatggtggtgctcacctggcattcggcggagggaccaagctgaccgtcctg

SEQ ID NO: 27694 - protein, 110 aa, synthetic construct
  REGION 1..110: note = Description of Artificial Sequence: Synthetic polypeptide
QTVVTQEPSLTVSPGGTVTLTCASSTGAVTSGYYPNWFQQKPGQVPRALIYSTNNKHSWTPARFSGSLLGGKAALTLSGVQPEDEADYYCLLYYGGAHLAFGGGTKLTVL

SEQ ID NO: 27695 - DNA, 318 bp, synthetic construct
  misc_feature 1..318: note = Description of Artificial Sequence: Synthetic polynucleotide
  source 1..318: mol_type = other DNA
tcctatgagctgactcagccaccctcagtgtccgtgtccccaggacagacagccagcatcacctgttctggagataaattgggggatagatttgcttgctggtatcaacagaagccaggccagtcccctgtgctggtcatctatcaagatagcaagcggccctcagggatccctgagcgattctctggctccaactctgggaacacagccactctgaccatcagcgggacccaggctatggatgaggctgactattactgtcaggcgtgggacagcagcactgtggtattcggcggagggaccaagctgaccgtccta

SEQ ID NO: 27696 - protein, 106 aa, synthetic construct
  REGION 1..106: note = Description of Artificial Sequence: Synthetic polypeptide
SYELTQPPSVSVSPGQTASITCSGDKLGDRFACWYQQKPGQSPVLVIYQDSKRPSGIPERFSGSNSGNTATLTISGTQAMDEADYYCQAWDSSTVVFGGGTKLTVL

SEQ ID NO: 27697 - DNA, 318 bp, synthetic construct
  misc_feature 1..318: note = Description of Artificial Sequence: Synthetic polynucleotide
  source 1..318: mol_type = other DNA
tcctatgagctgactcagccactctcagtgtcagtggccctgggacagacggccaggattacctgtgggggaaacaacattggaagaaaaaatgtgcactggtaccagcagaagccaggccagtcccctgtgttgatcatccatagggatagcgaccggccctctgggatccctgagcgattctctggctccaactcggggaacacggccaccctgaccatcagcagagcccaagccggggatgaggctgactattactgtcaggtgtgggacagcggcactgcggtattcggcggagggaccaagctgcccgtccta

SEQ ID NO: 27698 - protein, 106 aa, synthetic construct
  REGION 1..106: note = Description of Artificial Sequence: Synthetic polypeptide
SYELTQPLSVSVALGQTARITCGGNNIGRKNVHWYQQKPGQSPVLIIHRDSDRPSGIPERFSGSNSGNTATLTISRAQAGDEADYYCQVWDSGTAVFGGGTKLPVL

SEQ ID NO: 27699 - DNA, 318 bp, synthetic construct
  misc_feature 1..318: note = Description of Artificial Sequence: Synthetic polynucleotide
  source 1..318: mol_type = other DNA
tcctatgaactgactcagccaccctcagtgtccgtgtccccaggacagacagccagcatcacctgttctggagataaattgggggatagatttgcttgctggtatcaacagaagccaggccagtcccctgtactggtcatctatcaagataacaagcggccctcagggatccctgagcgattctctggctccaactctgggaacacagccactctgaccatcagcgggacccagtctatggatgaggctgactattactgtcaggcgtgggacagcagcactgtggtattcggcggagggaccaagctgaccgtcctg

SEQ ID NO: 27700 - protein, 106 aa, synthetic construct
  REGION 1..106: note = Description of Artificial Sequence: Synthetic polypeptide
SYELTQPPSVSVSPGQTASITCSGDKLGDRFACWYQQKPGQSPVLVIYQDNKRPSGIPERFSGSNSGNTATLTISGTQSMDEADYYCQAWDSSTVVFGGGTKLTVL

SEQ ID NO: 27701 - DNA, 318 bp, synthetic construct
  misc_feature 1..318: note = Description of Artificial Sequence: Synthetic polynucleotide
  source 1..318: mol_type = other DNA
tcctatgagctgactcagccactctcagtgtcagcggccctgggacagacggccaggattacctgtgggggaaacaacattggaagaaaaaatgtgcactggtaccagcagaagccaggccagtcccctgtgttgatcatccatagggatagcgaccggccctctgggatccctgagcgattctctggctccaactcggggaacacggccaccctgaccatcagcagagcccaagccggggatgaggctgactattactgtcaggtgtgggacagcggcactgcggtattcggcggagggaccaagctgcccgtccta

SEQ ID NO: 27702 - protein, 106 aa, synthetic construct
  REGION 1..106: note = Description of Artificial Sequence: Synthetic polypeptide
SYELTQPLSVSAALGQTARITCGGNNIGRKNVHWYQQKPGQSPVLIIHRDSDRPSGIPERFSGSNSGNTATLTISRAQAGDEADYYCQVWDSGTAVFGGGTKLPVL

SEQ ID NO: 27703 - DNA, 318 bp, synthetic construct
  misc_feature 1..318: note = Description of Artificial Sequence: Synthetic polynucleotide
  variation 143: note = a, c, t, g, unknown or other
  source 1..318: mol_type = other DNA
tcctatgaattgactcagccactctcagtgtcagtggccctgggacagacggccaggattgcctgtgggggaaacaacattggaagaaaaaatgtgcactggtaccagcagaagccaggcctggcccctgtgccggtcatccntagggatagctaccgatcttctgggatccctgacagattctctggctccaactgcgggaacacgaccaccgtgaccatcagcagagcccaagccggggaggaggcagagtattattgtcaggattgggacagcagcactgtggtgttcggcggagggaccaaactgaccgtccta

SEQ ID NO: 27704 - protein, 106 aa, synthetic construct
  REGION 1..106: note = Description of Artificial Sequence: Synthetic polypeptide
  MOD_RES 48: note = Any amino acid
SYELTQPLSVSVALGQTARIACGGNNIGRKNVHWYQQKPGLAPVPVIXRDSYRSSGIPDRFSGSNCGNTTTVTISRAQAGEEAEYYCQDWDSSTVVFGGGTKLTVL

SEQ ID NO: 27705 - DNA, 330 bp, synthetic construct
  misc_feature 1..330: note = Description of Artificial Sequence: Synthetic polynucleotide
  source 1..330: mol_type = other DNA
cagtctgtgttgacgcagccgccctcagtgtctgcggccccaggacagaaggtcaccatctcctgctctggaagcagctccaacattgggagtaattttttatcctggtaccagcagctcccaggaacagcccccaaactcctcatttatgacaataataagcgaccctcagggattcctgaccgattctctggctccaagtctggcacgtcagccaccctgggcatcaccggactccagactggggacgaggccgattattactgcggaacatgggatagcagcctgagtgctggggtattcggcggagggaccaagctgaccgtccta

SEQ ID NO: 27706 - protein, 110 aa, synthetic construct
  REGION 1..110: note = Description of Artificial Sequence: Synthetic polypeptide
QSVLTQPPSVSAAPGQKVTISCSGSSSNIGSNFLSWYQQLPGTAPKLLIYDNNKRPSGIPDRFSGSKSGTSATLGITGLQTGDEADYYCGTWDSSLSAGVFGGGTKLTVL

SEQ ID NO: 27707 - DNA, 318 bp, synthetic construct
  misc_feature 1..318: note = Description of Artificial Sequence: Synthetic polynucleotide
  source 1..318: mol_type = other DNA
tcctatgaattgactcagccactctcagtgtcagtggccctgggacagacggccaggattgcctgtgggggaaacaacattggaagaaaaaatgtgcactggtaccagcagaagccaggcctggcccctgtgccggtcatccttagggatagctaccggtcttctgggatccctgacagattctctggctccaactgggggaacacggccaccgtgaccatcagcagagcccaagccggggaggaggcagagtattattgtcaggattgggacagcagcactgtggtgttcggcggagggaccaaactgaccgtccta

SEQ ID NO: 27708 - protein, 106 aa, synthetic construct
  REGION 1..106: note = Description of Artificial Sequence: Synthetic polypeptide
SYELTQPLSVSVALGQTARIACGGNNIGRKNVHWYQQKPGLAPVPVILRDSYRSSGIPDRFSGSNWGNTATVTISRAQAGEEAEYYCQDWDSSTVVFGGGTKLTVL

SEQ ID NO: 27709 - DNA, 330 bp, synthetic construct
  misc_feature 1..330: note = Description of Artificial Sequence: Synthetic polynucleotide
  source 1..330: mol_type = other DNA
cagactgtggtgactcaggagccctcactgactgtgtccccaggagggacagtcactctcacctgtgctttcagcactggagcagtcaccagtggtaattatccaaactggttccagcagaaacctggacaagcacccagggcactgatttacagtacaagcaacaaacactcctggacccctgcccggttctcaggctccctccttgggggcaaagctgccctgacactgtcaggtgtgcagcctgaggacgaggctgaatattactgcctgctctactatggtggtgctcagctggtgttcggcggagggaccaagctgaccgtccta

SEQ ID NO: 27710 - protein, 110 aa, synthetic construct
  REGION 1..110: note = Description of Artificial Sequence: Synthetic polypeptide
QTVVTQEPSLTVSPGGTVTLTCAFSTGAVTSGNYPNWFQQKPGQAPRALIYSTSNKHSWTPARFSGSLLGGKAALTLSGVQPEDEAEYYCLLYYGGAQLVFGGGTKLTVL

SEQ ID NO: 27711 - DNA, 330 bp, synthetic construct
  misc_feature 1..330: note = Description of Artificial Sequence: Synthetic polynucleotide
  source 1..330: mol_type = other DNA
cagtctgccctgactcagcctgcctccgtgtctgggtctcctggacagtcgatcaccatctcctgcactggaaccagcagtgacgttggtggttataactatgtctcctggtaccaacaacacccaggcaaagcccccaaattcatgatttatgaggtcaggaatcggccctcaggggtttctaatcgcttctctggctccaagtctggcaacacggcctccctgaccatctctgggctccaggctgaggacgaggctgattattactgcagctcatataccagcagccgcactctggtattcggcggagggaccaagttgaccgtccta

SEQ ID NO: 27712 - protein, 110 aa, synthetic construct
  REGION 1..110: note = Description of Artificial Sequence: Synthetic polypeptide
QSALTQPASVSGSPGQSITISCTGTSSDVGGYNYVSWYQQHPGKAPKFMIYEVRNRPSGVSNRFSGSKSGNTASLTISGLQAEDEADYYCSSYTSSRTLVFGGGTKLTVL

SEQ ID NO: 27713 - DNA, 330 bp, synthetic construct
  misc_feature 1..330: note = Description of Artificial Sequence: Synthetic polynucleotide
  source 1..330: mol_type = other DNA
cagtctgccctgactcagcctgcctccgtgtctgggtctcctggacagtcgatcaccatctcctgcactggaaccagcagtgacgttggtggttataattatgtctcctggtaccaacaacacccagtcaaagcccccaaactcttgatttatgaggtcagtaatcggccctcaggggtttctaatcgcttctctggctccaagtctggcaacacggcctccctgaccatctctgggctccaggctgaggacgaggctgattattactgcaactcatatacaagcagcatcacttgggtgttcggcggagggaccaagctgaccgtccta

SEQ ID NO: 27714 - protein, 110 aa, synthetic construct
  REGION 1..110: note = Description of Artificial Sequence: Synthetic polypeptide
QSALTQPASVSGSPGQSITISCTGTSSDVGGYNYVSWYQQHPVKAPKLLIYEVSNRPSGVSNRFSGSKSGNTASLTISGLQAEDEADYYCNSYTSSITWVFGGGTKLTVL

SEQ ID NO: 27715 - DNA, 330 bp, synthetic construct
  misc_feature 1..330: note = Description of Artificial Sequence: Synthetic polynucleotide
  source 1..330: mol_type = other DNA
cagtctgccctgactcagcctgcctccgtgtctgggtctcctggacagtcgatcaccatctcctgcactggaaccagcagtgacgttggtggttataactatgtctcctggtaccaacaacacccaggcaaagcccccaaactcatgatttatgaggtcagtaatcggccctcaggggtttctaatcgcttctctggctccaagtctggcaacacggcctccctgaccatctctgggctccaggctgaggacgaggctgattattactgcggctcatatgtaaaaggcatcacttgggtgttcggcggagggaccagtctaaccgtcctc

SEQ ID NO: 27716 - protein, 110 aa, synthetic construct
  REGION 1..110: note = Description of Artificial Sequence: Synthetic polypeptide
QSALTQPASVSGSPGQSITISCTGTSSDVGGYNYVSWYQQHPGKAPKLMIYEVSNRPSGVSNRFSGSKSGNTASLTISGLQAEDEADYYCGSYVKGITWVFGGGTSLTVL

SEQ ID NO: 27717 - DNA, 330 bp, synthetic construct
  misc_feature 1..330: note = Description of Artificial Sequence: Synthetic polynucleotide
  source 1..330: mol_type = other DNA
cagtctgccctgactcagcctgcctccgtgtctgggtctcctggacagtcgatcaccatctcctgcactggaaccagtagtgacgttggtagttataactatgtctcctggtaccaacagtacccaggcaaagcccccaaactcatgatttatgaggtcagtaatcggccctcaggggtttctaatcgcttctctggctccaagtctggcaacacggcctccctgaccatctctgggctccaggctgaggacgaggctgattattactgcaactcatatacaagcagcatcacttgggtgttcggcggagggaccaagctgaccgtccta

SEQ ID NO: 27718 - protein, 110 aa, synthetic construct
  REGION 1..110: note = Description of Artificial Sequence: Synthetic polypeptide
QSALTQPASVSGSPGQSITISCTGTSSDVGSYNYVSWYQQYPGKAPKLMIYEVSNRPSGVSNRFSGSKSGNTASLTISGLQAEDEADYYCNSYTSSITWVFGGGTKLTVL

SEQ ID NO: 27719 - DNA, 318 bp, synthetic construct
  misc_feature 1..318: note = Description of Artificial Sequence: Synthetic polynucleotide
  source 1..318: mol_type = other DNA
tcctatgaactgactcagccactctcagtgtcagtggccctgggacagacggccaggattacctgtgggggaaacaacattggacgtagaaatgtgcactggtaccaacagaagccaggccaggcccctatactggtcatctatagagatcgcgaccggccctctgggatccctgagcgattctctggctccaactcggggaacacggccaccctgaccatcagcagagcccaagccggggatgaggctgactatttctgtcaggtgtgggacagcagtactgcggtgttcggcggagggaccaaactgaccgtccta

SEQ ID NO: 27720 - protein, 106 aa, synthetic construct
  REGION 1..106: note = Description of Artificial Sequence: Synthetic polypeptide
SYELTQPLSVSVALGQTARITCGGNNIGRRNVHWYQQKPGQAPILVIYRDRDRPSGIPERFSGSNSGNTATLTISRAQAGDEADYFCQVWDSSTAVFGGGTKLTVL

SEQ ID NO: 27721 - DNA, 321 bp, synthetic construct
  misc_feature 1..321: note = Description of Artificial Sequence: Synthetic polynucleotide
  source 1..321: mol_type = other DNA
tcctatgagctgacacagccaccctcggtgtcagtgtccccaggacagacggccaggatcacctgttctggagatgcattgccaaagcaatatgcttattggtaccagcagaagccaggccaggccccagtgctggtgatatataaagacagtgcgaggccctcagggatccctgagcgattctctggctcccgctcagggacaacagtcacgttgaccgtcagtggagtccaggcagaagacgaggctgactattactgtcaattagtgtacagcagtgatacttatgtcttcggaactgggaccatgctcaccgtccta

SEQ ID NO: 27722 - protein, 107 aa, synthetic construct
  REGION 1..107: note = Description of Artificial Sequence: Synthetic polypeptide
SYELTQPPSVSVSPGQTARITCSGDALPKQYAYWYQQKPGQAPVLVIYKDSARPSGIPERFSGSRSGTTVTLTVSGVQAEDEADYYCQLVYSSDTYVFGTGTMLTVL

SEQ ID NO: 27723 - DNA, 330 bp, synthetic construct
  misc_feature 1..330: note = Description of Artificial Sequence: Synthetic polynucleotide
  source 1..330: mol_type = other DNA
cagtctgccctgactcagcctgcctccgtgtctgggtctcctggacagtcgataaccatctcctgcactggaaccagcagtgacgttggtggttataactatgtctcctggtaccaacagcacccaggcaaagcccccaaactcatgatttatgaggtcagtaatcggccctcaggggtttctaatcgcttctctggctccaagtctggcaacacggcctccctgaccatctctgggctccaggctgaggacgaggctgattattactgcaactcatatacaagaagcatcacttgggtgttcggcggagggaccaagctgaccgtccta

SEQ ID NO: 27724 - protein, 110 aa, synthetic construct
  REGION 1..110: note = Description of Artificial Sequence: Synthetic polypeptide
QSALTQPASVSGSPGQSITISCTGTSSDVGGYNYVSWYQQHPGKAPKLMIYEVSNRPSGVSNRFSGSKSGNTASLTISGLQAEDEADYYCNSYTRSITWVFGGGTKLTVL

SEQ ID NO: 27725 - DNA, 330 bp, synthetic construct
  misc_feature 1..330: note = Description of Artificial Sequence: Synthetic polynucleotide
  source 1..330: mol_type = other DNA
cagactgtggtgactcaggagccctcactgactgtgtccccaggagggacagtcactctcacctgtgctttcagcactggagcagtcaccagtggtaactatccaagttggttccagcagaaacctggacaagttcccagggcactgatttatagtacaagcaacagacactcctggacccctgcccggttttctggctccctccttgggggcaaagctgccctgacactgtcaggtgtgcagcctgaggacgaggctgaatattactgcctgctctactatggtggtgctcagctggtgttcggcggagggaccaagctgaccgtccta

SEQ ID NO: 27726 - protein, 110 aa, synthetic construct
  REGION 1..110: note = Description of Artificial Sequence: Synthetic polypeptide
QTVVTQEPSLTVSPGGTVTLTCAFSTGAVTSGNYPSWFQQKPGQVPRALIYSTSNRHSWTPARFSGSLLGGKAALTLSGVQPEDEAEYYCLLYYGGAQLVFGGGTKLTVL

SEQ ID NO: 27727 - DNA, 330 bp, synthetic construct
  misc_feature 1..330: note = Description of Artificial Sequence: Synthetic polynucleotide
  source 1..330: mol_type = other DNA
cagactgtggtgactcaggagccctcactgactgtgtccccaggagggacagtcactctcacctgtggttccagcactggatcagtcaccagtggttactttccaaactggttccagcagaaacctggacaagcacccaggccactgatttatagtacaaacaacaagcactcctggacccctgcccggttctcaggctccctccttgggggcaaagctgccctgacactgtcagatgtgcagcctgaggacgaggctgactattactgcctgctctactatggtggtgctcagctggcattcggcggagggaccaaactgaccgtccta

SEQ ID NO: 27728 - protein, 110 aa, synthetic construct
  REGION 1..110: note = Description of Artificial Sequence: Synthetic polypeptide
QTVVTQEPSLTVSPGGTVTLTCGSSTGSVTSGYFPNWFQQKPGQAPRPLIYSTNNKHSWTPARFSGSLLGGKAALTLSDVQPEDEADYYCLLYYGGAQLAFGGGTKLTVL

SEQ ID NO: 27729 - DNA, 330 bp, synthetic construct
  misc_feature 1..330: note = Description of Artificial Sequence: Synthetic polynucleotide
  source 1..330: mol_type = other DNA
cagactgtggtgactcaggagccctcactgactgtgtccccaggagggacagtcactctcacctgtgcttccagcactggagcagtcaccagtggtaactatccaaactggttccagcagaaacctggacaagcacccagggcactgatttatagtacaatcaacaaacactccgggacccctgcccggtttacaggcttcctccttgggggcaaagctgccctgacactgtcaggtgtacagcctgaggacgaggctgagtattactgcctgctctactatggtggtgctcagctggcattcggcggagggaccaagctgaccgtccta

SEQ ID NO: 27730 - protein, 110 aa, synthetic construct
  REGION 1..110: note = Description of Artificial Sequence: Synthetic polypeptide
QTVVTQEPSLTVSPGGTVTLTCASSTGAVTSGNYPNWFQQKPGQAPRALIYSTINKHSGTPARFTGFLLGGKAALTLSGVQPEDEAEYYCLLYYGGAQLAFGGGTKLTVL

SEQ ID NO: 27731 - DNA, 330 bp, synthetic construct
  misc_feature 1..330: note = Description of Artificial Sequence: Synthetic polynucleotide
  source 1..330: mol_type = other DNA
cagtctgccctgactcagcctgcctccgtgtctgggtctcctggacagtcgatcaccatctcctgcactggaaccagcagtgacgttggtggttataactatgtctcctggtaccaacaacacccaggcaaagcccccaaactcatgatttatgaggtcagaaatcggccctcaggagtttctaatcgcttctctggctccaagtctggcaacacggcctccctgaccatctctgggctccaggctgaggacgaggctgattattactgcagctcatatacacgcagcatcacttgggtgttcggcggagggaccaagctgaccgtccta

SEQ ID NO: 27732 - protein, 110 aa, synthetic construct
  REGION 1..110: note = Description of Artificial Sequence: Synthetic polypeptide
QSALTQPASVSGSPGQSITISCTGTSSDVGGYNYVSWYQQHPGKAPKLMIYEVRNRPSGVSNRFSGSKSGNTASLTISGLQAEDEADYYCSSYTRSITWVFGGGTKLTVL

SEQ ID NO: 27733 - DNA, 330 bp, synthetic construct; identical to SEQ ID NO: 27715
  misc_feature 1..330: note = Description of Artificial Sequence: Synthetic polynucleotide
  source 1..330: mol_type = other DNA

SEQ ID NO: 27734 - protein, 110 aa, synthetic construct; identical to SEQ ID NO: 27716
  REGION 1..110: note = Description of Artificial Sequence: Synthetic polypeptide

SEQ ID NO: 27735 - DNA, 330 bp, synthetic construct
  misc_feature 1..330: note = Description of Artificial Sequence: Synthetic polynucleotide
  source 1..330: mol_type = other DNA
cagtctgccctgactcagcctgcctccgtgtctgggtctcctggacagtcgatcaccatctcctgcactggaaccagtagtgacgttggtggttataactatgtctcctggtaccaacagtacccaggcaaagcccccaaactcatgatttatgaggtcagtaatcggccctcaggggtttctaatcgcttctctggctccaagtctggcaacacggcctccctgaccatctctgggctccaggctgaggacgaggctgattattactgcaactcatatacaagcagcatcacttgggtgttcggcggagggaccaagctgaccgtccta

SEQ ID NO: 27736 - protein, 110 aa, synthetic construct
  REGION 1..110: note = Description of Artificial Sequence: Synthetic polypeptide
QSALTQPASVSGSPGQSITISCTGTSSDVGGYNYVSWYQQYPGKAPKLMIYEVSNRPSGVSNRFSGSKSGNTASLTISGLQAEDEADYYCNSYTSSITWVFGGGTKLTVL

SEQ ID NO: 27737 - DNA, 330 bp, synthetic construct
  misc_feature 1..330: note = Description of Artificial Sequence: Synthetic polynucleotide
  source 1..330: mol_type = other DNA
cagtctgccctgactcagcctgcctccgtgtctgggtctcctggacagtcgatcaccatctcctgcactggaaccagcagtgacgttggtggttataattatgtctcctggtaccaacagcacccaggcaaaacccccaaactcatgatttatgaggtcagtaatcggccctcaggggtttctaatcgcttctctggctccaagtctggcaacacggcctccctgaccatctctgggctccaggctgaggacgaggctgattattactgcaactcatatacaagcagcatcacttgggtgttcggcggagggaccaagctgaccgtccta

SEQ ID NO: 27738 - protein, 110 aa, synthetic construct
  REGION 1..110: note = Description of Artificial Sequence: Synthetic polypeptide
QSALTQPASVSGSPGQSITISCTGTSSDVGGYNYVSWYQQHPGKTPKLMIYEVSNRPSGVSNRFSGSKSGNTASLTISGLQAEDEADYYCNSYTSSITWVFGGGTKLTVL

SEQ ID NO: 27739 - DNA, 330 bp, synthetic construct
  misc_feature 1..330: note = Description of Artificial Sequence: Synthetic polynucleotide
  source 1..330: mol_type = other DNA
cagactgtggtgactcaggagccctcactgactgtgtccccaggagggacagtcactctcacctgtgcttccagcactggagcagtcaccagtggttactatccaaactggttccagcagaaacctggacaagcacccagggcactgatttatagtacaaacaacaaacactcctggacccctgcccggttctcaggctccctccttgggggcaaagctgccctgacactgtcaggtgtacagcctgacgacgaggctgactattactgcctgctctactatggtggtgctcaggtgggattcggcggagggaccaagctgaccgtccta

SEQ ID NO: 27740 - protein, 110 aa, synthetic construct
  REGION 1..110: note = Description of Artificial Sequence: Synthetic polypeptide
QTVVTQEPSLTVSPGGTVTLTCASSTGAVTSGYYPNWFQQKPGQAPRALIYSTNNKHSWTPARFSGSLLGGKAALTLSGVQPDDEADYYCLLYYGGAQVGFGGGTKLTVL

SEQ ID NO: 27741 - DNA, 330 bp, synthetic construct
  misc_feature 1..330: note = Description of Artificial Sequence: Synthetic polynucleotide
  source 1..330: mol_type = other DNA
cagactgtggtgactcaggagccctcactgactgtgtccccaggagggacagtcactctcacctgtgcttccagcactggagcagtcaccagtggttactatccaaactggttccagcagaaacctggacaagcacccagggcactgatttatagtacaagcaacaaacactcctggacccctgcccggttctcaggctccctccttgggggcaaagctgccctgacactgtcaggtgtgcagcctgaggacgaggctgagtattactgcctgctctactatggtggtgctcatgtggtattcggcggagggaccaagctgaccgtccta

SEQ ID NO: 27742 - protein, 110 aa, synthetic construct
  REGION 1..110: note = Description of Artificial Sequence: Synthetic polypeptide
QTVVTQEPSLTVSPGGTVTLTCASSTGAVTSGYYPNWFQQKPGQAPRALIYSTSNKHSWTPARFSGSLLGGKAALTLSGVQPEDEAEYYCLLYYGGAHVVFGGGTKLTVL

SEQ ID NO: 27743 - DNA, 330 bp, synthetic construct
  misc_feature 1..330: note = Description of Artificial Sequence: Synthetic polynucleotide
  source 1..330: mol_type = other DNA
ctgtctgccctgactcagcctgcctccgtgtctgggtctcctggacagtcgatcaccatctcctgcactggaaccagcagtgacgttggtggttataactatgtctcctggtaccaacaacacccaggcaaagcccccaaactcatgatttctgaggtcaggaatcggccctcaggggtttctaatcgcttctctggctccaagtctggcaacacggcctccctgaccatctctgggctccaggctgaggacgaggctgattattactgcaactcatatacacgcagcatcacttgggtgttcggcggagggaccaagctgaccgtccta

SEQ ID NO: 27744 - protein, 110 aa, synthetic construct
  REGION 1..110: note = Description of Artificial Sequence: Synthetic polypeptide
LSALTQPASVSGSPGQSITISCTGTSSDVGGYNYVSWYQQHPGKAPKLMISEVRNRPSGVSNRFSGSKSGNTASLTISGLQAEDEADYYCNSYTRSITWVFGGGTKLTVL

SEQ ID NO: 27745 - DNA, 330 bp, synthetic construct
  misc_feature 1..330: note = Description of Artificial Sequence: Synthetic polynucleotide
  source 1..330: mol_type = other DNA
cagtctgccctgactcagcctgcctccgtgtctgggtctcctggacagtcgatcaccatctcctgcactggaaccagcagtgacgttggtggttataactatgtctcctggtaccaacaacacccaggcaaagcccccaaactcgtgatttatgaggtccgtaatcggccctcaggggtttctactcgcttctctggctccaagtctggcaacaaggcctccctgaccatctctgggctccaggctgaggacgaggctgattattactgctgctcatatacaagaagaatcacttgggtgttcggcggagggaccaagctgaccgtcctg

SEQ ID NO: 27746 - protein, 110 aa, synthetic construct
  REGION 1..110: note = Description of Artificial Sequence: Synthetic polypeptide
QSALTQPASVSGSPGQSITISCTGTSSDVGGYNYVSWYQQHPGKAPKLVIYEVRNRPSGVSTRFSGSKSGNKASLTISGLQAEDEADYYCCSYTRRITWVFGGGTKLTVL

SEQ ID NO: 27747 - DNA, 330 bp, synthetic construct
  misc_feature 1..330: note = Description of Artificial Sequence: Synthetic polynucleotide
  source 1..330: mol_type = other DNA
cagactgtggtgactcaggagccctcactgactgtgtccccaggagggacagtcactctcacctgtggttccagcactggatcagtcaccagtggttactttccaaactggttccagcagaaacctggacaaacacccaggccactgatttatagtacaaacaacaagcactcctggacccctgcccggttctcaggctccctccttgggggcaaaactgccctgacactgtcagatgtgcagcctgaggacgaggctgactattactgcctgctctactttggtggtgctcagctggcattcggcggagggaccaaactgaccgtccta

SEQ ID NO: 27748 - protein, 110 aa, synthetic construct
  REGION 1..110: note = Description of Artificial Sequence: Synthetic polypeptide
QTVVTQEPSLTVSPGGTVTLTCGSSTGSVTSGYFPNWFQQKPGQTPRPLIYSTNNKHSWTPARFSGSLLGGKTALTLSDVQPEDEADYYCLLYFGGAQLAFGGGTKLTVL

SEQ ID NO: 27749 - DNA, 330 bp, synthetic construct
  misc_feature 1..330: note = Description of Artificial Sequence: Synthetic polynucleotide
  source 1..330: mol_type = other DNA
cagtctgccctgactcagcctgcctccgtgtctgggtctcctggacagtcgatcaccatctcctgcactggaaccagcagtgacgttggtggttataactatgtctcctggtaccaacagcacccaggcaaagcccccaaattcatgatttatgaggtcaggaatcggccctcaggggtttctaatcgcttctctggctccaagtctggcaacacggcctccctgaccatctctgggctccaggctgaggacgaggctgattattactgcagctcatataccagcagccgcactctggtattcggcggagggaccaagttgaccgtccta

SEQ ID NO: 27750 - protein, 110 aa, synthetic construct; identical to SEQ ID NO: 27712
  REGION 1..110: note = Description of Artificial Sequence: Synthetic polypeptide

SEQ ID NO: 27751 - DNA, 330 bp, synthetic construct
  misc_feature 1..330: note = Description of Artificial Sequence: Synthetic polynucleotide
  source 1..330: mol_type = other DNA
cagactgtggtgactcaggagccctcactgactgtgtccccaggagggacagtcactctcacctgtgcttccagcactggagcagtcaccagtggttactatccaaactggttccagcagaaacctggacaagcacccagggcactgatttatagtacaagcaacaaacactcctgtacccctgcccggttctcaggctccctccttgggggcaaagctgccctgacactgtcaggtgtgcagcctgaggacgaggctgagtattactgcctgctctactatggtggtgctcatgtggtattcggcggagggaccaagctgaccgtccta

SEQ ID NO: 27752 - protein, 110 aa, synthetic construct
  REGION 1..110: note = Description of Artificial Sequence: Synthetic polypeptide
QTVVTQEPSLTVSPGGTVTLTCASSTGAVTSGYYPNWFQQKPGQAPRALIYSTSNKHSCTPARFSGSLLGGKAALTLSGVQPEDEAEYYCLLYYGGAHVVFGGGTKLTVL

SEQ ID NO: 27753 - DNA, 330 bp, synthetic construct
  misc_feature 1..330: note = Description of Artificial Sequence: Synthetic polynucleotide
  source 1..330: mol_type = other DNA
cagtctgtgttgacgcagccgccctcagtgtctgcggccccaggacagaaggtcaccatctcctgctctggaagcagctccaacattgggaataattatgtatcctggtaccagcagttcccaggaacagcccccaaactcctcattcatgacaataataagcgaccctcagggattcctgaccgattctctggctccaagtctggcacgtcagccaccctgggcatcaccggactccagactggggacgaggccgattattactgcggagcatgggatagcagcctgagtgctgtggtaatcggcggagggagcaagctgaccgtccta

SEQ ID NO: 27754 - protein, 110 aa, synthetic construct
  REGION 1..110: note = Description of Artificial Sequence: Synthetic polypeptide
QSVLTQPPSVSAAPGQKVTISCSGSSSNIGNNYVSWYQQFPGTAPKLLIHDNNKRPSGIPDRFSGSKSGTSATLGITGLQTGDEADYYCGAWDSSLSAVVIGGGSKLTVL

SEQ ID NO: 27755 - DNA, 330 bp, synthetic construct
  misc_feature 1..330: note = Description of Artificial Sequence: Synthetic polynucleotide
  source 1..330: mol_type = other DNA
cagactgtggtgactcaggagccctcactgactgtgtccccaggagggacagtcactctcacctgtgcttccagcactggagcagtcaccagtggctactatccaaactggttccaacagaaacctggacaagcacccagggcactgatttatagtacaagcaataaacactcctggacccctgcccggttctcaggctccctccttgggggcaaagctgccctgacactgtcagatgtgcagcctgaggacgaggctgagtattactgcctgctctactgtgatggtgcccagctggtgttcggcggagggaccaaactgaccgtccta

SEQ ID NO: 27756 - protein, 110 aa, synthetic construct
  REGION 1..110: note = Description of Artificial Sequence: Synthetic polypeptide
QTVVTQEPSLTVSPGGTVTLTCASSTGAVTSGYYPNWFQQKPGQAPRALIYSTSNKHSWTPARFSGSLLGGKAALTLSDVQPEDEAEYYCLLYCDGAQLVFGGGTKLTVL

SEQ ID NO: 27757 - DNA, 330 bp, synthetic construct
  misc_feature 1..330: note = Description of Artificial Sequence: Synthetic polynucleotide
  source 1..330: mol_type = other DNA
cagactgtggtgactcaggagccctcactgacggtgtccccaggagggacagtcactctcacctgtgcttccagcactgaagccgtcaccagtggtaactatccaagctggttccagcagaaacctggacaagcacccagggcactgatttatagtacaagcaacaaacactccggtacccctgcccggtttacaggctccctccttgggggcaaagctgccctgacactgtcaggtgtacagcctgaggacgaggctgagtattactgcctgctctactatggtggcgctcagctggcattcggcggagggaccaagctggccgtccta

SEQ ID NO: 27758 - protein, 110 aa, synthetic construct
  REGION 1..110: note = Description of Artificial Sequence: Synthetic polypeptide
QTVVTQEPSLTVSPGGTVTLTCASSTEAVTSGNYPSWFQQKPGQAPRALIYSTSNKHSGTPARFTGSLLGGKAALTLSGVQPEDEAEYYCLLYYGGAQLAFGGGTKLAVL

SEQ ID NO: 27759 - DNA, 318 bp, synthetic construct
  misc_feature 1..318: note = Description of Artificial Sequence: Synthetic polynucleotide
  source 1..318: mol_type = other DNA
tcctatgagctgactcagccaccctcagtgtccgtgtccccaggacagacagccagcatcacctgctctggagataaattgggggataaatttgcttgctggtatcagcagaagccaggccagtcccctgtgctggtcatctatcaagatagcaagcggccctcagggatccctgagcgattctctggctccaactctgggaacacagccactctgaccatcagcgggacccaggctatggatgaggctgactattactgtcaggcgtgggacagcagcactgtggtattcggcggagggaccaagctgaccgtccta

SEQ ID NO: 27760 - protein, 106 aa, synthetic construct
  REGION 1..106: note = Description of Artificial Sequence: Synthetic polypeptide
SYELTQPPSVSVSPGQTASITCSGDKLGDKFACWYQQKPGQSPVLVIYQDSKRPSGIPERFSGSNSGNTATLTISGTQAMDEADYYCQAWDSSTVVFGGGTKLTVL

SEQ ID NO: 27761 - DNA, 330 bp, synthetic construct
  misc_feature 1..330: note = Description of Artificial Sequence: Synthetic polynucleotide
  source 1..330: mol_type = other DNA
cagtctgccctgactcagcctgcctccgtgtctgggtctcctggacagtcgatcaccatctcctgcactggaaccagcagtgacattggtggttataactatgtctcctggtaccaacaacacccaggcaaagcccccacactcatgatttatgaggtcagtaatcggccctcaggggtttctaatcgcttctctggctccaagtctggcaacacggcctccctgaccatctctgggctccaggctgaggacgaggctgattattactgcaactcatataaaaggggcagcacttgggtgttcggcggagggaccaaggtgaccgtccta

SEQ ID NO: 27762 - protein, 110 aa, synthetic construct
  REGION 1..110: note = Description of Artificial Sequence: Synthetic polypeptide
QSALTQPASVSGSPGQSITISCTGTSSDIGGYNYVSWYQQHPGKAPTLMIYEVSNRPSGVSNRFSGSKSGNTASLTISGLQAEDEADYYCNSYKRGSTWVFGGGTKVTVL

SEQ ID NO: 27763 - DNA, 330 bp, synthetic construct
  misc_feature 1..330: note = Description of Artificial Sequence: Synthetic polynucleotide
  source 1..330: mol_type = other DNA
cagactgtggtgactcaggagccctcactgactgtgtccccaggagggacagtcactctcacctgtgcttccagcactggagcagtcaccagtggttactatccaaactggttccagcagaaacctggacaagcacccagggcactgatttatagtacaaacaacaaacactcctgtggacctgcccggttttcaggctccctccttgggggcaaagctgccctgacactgtcaggtgtacagcctgacgacgaggctgactattactgcctgctctactatggtggtgctcaggtgggattcggcggagggaccaagctgaccgtccta

SEQ ID NO: 27764 - protein, 110 aa, synthetic construct
  REGION 1..110: note = Description of Artificial Sequence: Synthetic polypeptide
QTVVTQEPSLTVSPGGTVTLTCASSTGAVTSGYYPNWFQQKPGQAPRALIYSTNNKHSCGPARFSGSLLGGKAALTLSGVQPDDEADYYCLLYYGGAQVGFGGGTKLTVL

SEQ ID NO: 27765 - DNA, 330 bp, synthetic construct
  misc_feature 1..330: note = Description of Artificial Sequence: Synthetic polynucleotide
  source 1..330: mol_type = other DNA
cagtctgccctgactcagcctgcctccgtgtctgggtctcctggacagtcgatcaccatctcctgcactggaaccagcagtgacgttggtggttataattatgtctcctggtaccaacaacacccaggcaaagcccccaaactcatgatttatgaggtcagtaatcggccctcaggggtttctaatcgcttctctggctccaagtctggcaacacggcctccctgaccatctctgggctccaggctgaggacgaggctgattattactgcaactcatatacaagcagcatcacttgggtgttcggcggagggaccaagctgaccgtccta

SEQ ID NO: 27766 - protein, 110 aa, synthetic construct
  REGION 1..110: note = Description of Artificial Sequence: Synthetic polypeptide
QSALTQPASVSGSPGQSITISCTGTSSDVGGYNYVSWYQQHPGKAPKLMIYEVSNRPSGVSNRFSGSKSGNTASLTISGLQAEDEADYYCNSYTSSITWVFGGGTKLTVL

SEQ ID NO: 27767 - DNA, 330 bp, synthetic construct
  misc_feature 1..330: note = Description of Artificial Sequence: Synthetic polynucleotide
  source 1..330: mol_type = other DNA
cagactgtggtgactcaggagccctcactgactgtgtccccaggagggacagtcactctcacctgtgcttccagcactggagcagtcaccagtggttactatccaaactggttccagcagaaacctggacaagcacccagggcactgatttatagtacaaacaacaaacactcctgtacccctgcccggttctcaggctccctccttgggggcaaagctgccctgacactgtcaggtgtacagcctgacgacgaggctgactattactgcctgctctactatggtggtgctcaggtgggattcggcggagggaccaagctgaccgtccta

SEQ ID NO: 27768 - protein, 110 aa, synthetic construct
  REGION 1..110: note = Description of Artificial Sequence: Synthetic polypeptide
QTVVTQEPSLTVSPGGTVTLTCASSTGAVTSGYYPNWFQQKPGQAPRALIYSTNNKHSCTPARFSGSLLGGKAALTLSGVQPDDEADYYCLLYYGGAQVGFGGGTKLTVL

SEQ ID NO: 27769 - DNA, 330 bp, synthetic construct
  misc_feature 1..330: note = Description of Artificial Sequence: Synthetic polynucleotide
  source 1..330: mol_type = other DNA
cagactgtggtgactcaggagccctcactgactgtgtccccaggagggacagtcactctcacctgtgcttccagcactggagcagtcaccagtggctactatccaaactggttccaacagaaacctggacaagcacccagggcactgatttatagtacaagcaataaacactcctggacccctgcccggttctcaggctccctccttgggggcaaagctgccctgacactgtcagatgtgcagcctgaggacgaggctgagtattactgcctgctctactgtgatggtgctcagctggtgttcggcggagggaccaaactgaccgtccta

SEQ ID NO: 27770 - protein, 110 aa, synthetic construct; identical to SEQ ID NO: 27756
  REGION 1..110: note = Description of Artificial Sequence: Synthetic polypeptide

SEQ ID NO: 27771 - DNA, 318 bp, synthetic construct
  misc_feature 1..318: note = Description of Artificial Sequence: Synthetic polynucleotide
  source 1..318: mol_type = other DNA
tcctatgagctgactcagccactctcagtgtcagtggccctgggacagacggccaggattacctgtgggggagacaacattagaagaagaaatgtgcactggtaccagcagaagccaggccaggcccctgtgctggtcatctatagggatagcaaccggccctctgggatccctgagcgattctctggctccaactcggggaacacggccaccctgaccatcagcagagcccaagccggggatgaggctgactattactgtcaggtgtgggacagcagcactggggtgttcggcggagggaccaagctgaccgtccta

SEQ ID NO: 27772 - protein, 106 aa, synthetic construct
  REGION 1..106: note = Description of Artificial Sequence: Synthetic polypeptide
SYELTQPLSVSVALGQTARITCGGDNIRRRNVHWYQQKPGQAPVLVIYRDSNRPSGIPERFSGSNSGNTATLTISRAQAGDEADYYCQVWDSSTGVFGGGTKLTVL

SEQ ID NO: 27773 - DNA, 330 bp, synthetic construct
  misc_feature 1..330: note = Description of Artificial Sequence: Synthetic polynucleotide
  source 1..330: mol_type = other DNA
cagtctgccctgactcagcctgcctccgtgtctgggtctcctggacagtcgatcaccatctcctgcactggaaccagcagtgacgttggtggttataactatgtctcctggtaccaacaacacccaggcaaagcccccaaactcttgatttatgaggtcagtaatcggccctcaggggtttataatcgcttctctggctccaagtctggcaacacggcctccctgaccatctctgggctccaggctgaggacgaggctgattattactgcggctcatatgtaaaaggcatcacttgggtgttcggcggagggaccagtctgaccgtcctc

SEQ ID NO: 27774 - protein, 110 aa, synthetic construct
  REGION 1..110: note = Description of Artificial Sequence: Synthetic polypeptide
QSALTQPASVSGSPGQSITISCTGTSSDVGGYNYVSWYQQHPGKAPKLLIYEVSNRPSGVYNRFSGSKSGNTASLTISGLQAEDEADYYCGSYVKGITWVFGGGTSLTVL

SEQ ID NO: 27775 - DNA, 321 bp, synthetic construct
  misc_feature 1..321: note = Description of Artificial Sequence: Synthetic polynucleotide
  source 1..321: mol_type = other DNA
tcctatgagctgacacagccaccctcggtgtcagtgtccccaggacagacggccaggatcacctgctctggagatgcattgccaaagcaatatgcttattggtaccagcagaagccaggccaggccccagtgctggtgatatataaagacagtgagaggccctcagggattcctgagcgattctctggctcccgctcagggacaacagtcacgttgaccatcagaggagtccaggcagaagacgaggctgactattactgtcaattaatagtcagcagtgatacttatgtcttcggaactgggaccaaggtcaccgtccta

SEQ ID NO: 27776 - protein, 107 aa, synthetic construct
  REGION 1..107: note = Description of Artificial Sequence: Synthetic polypeptide
SYELTQPPSVSVSPGQTARITCSGDALPKQYAYWYQQKPGQAPVLVIYKDSERPSGIPERFSGSRSGTTVTLTIRGVQAEDEADYYCQLIVSSDTYVFGTGTKVTVL

SEQ ID NO: 27777 - DNA, 321 bp, synthetic construct
  misc_feature 1..321: note = Description of Artificial Sequence: Synthetic polynucleotide
  source 1..321: mol_type = other DNA
tcctatgagctgacacagccaccctcggtgtcagtgtccccaggacagacggccaggatcacctgctctggagatgcattgccaaaacaatatgcttattggtaccagcagaagccaggccaggccccagtactggtgatatataaagacagtgagaggccctcagggatccctgagcgattctctggctcccgctcagggacaacagtcacgttgaccgtcagtggagtccaggcagaagacgaggctgactattactgtcaattagtgtacagcagtgatacttatgtcttcggaactgggaccaaggtcaccgtccta

SEQ ID NO: 27778 - protein, 107 aa, synthetic construct
  REGION 1..107: note = Description of Artificial Sequence: Synthetic polypeptide
SYELTQPPSVSVSPGQTARITCSGDALPKQYAYWYQQKPGQAPVLVIYKDSERPSGIPERFSGSRSGTTVTLTVSGVQAEDEADYYCQLVYSSDTYVFGTGTKVTVL

SEQ ID NO: 27779 - DNA, 330 bp, synthetic construct
  misc_feature 1..330: note = Description of Artificial Sequence: Synthetic polynucleotide
  source 1..330: mol_type = other DNA
cagtctgtgttgacgcagccgccctcagtgtctgcggccccaggacagaaggtcaccatctcctgctctggaagcagctccaacattgggaataattatgtatcctggtaccagcagctcccaggaacagcccccaaactcctcctttatgacagtaataagcgaccctcagggattcctgcccgattctctggctccaagtctggcacgtcagccaccctgggcatcaccggactccagactggggacgaggccgattattactgcggaacatgggatagcagcctgaatactgtggtattcggcggagggaccaagctgaccgtccta

SEQ ID NO: 27780 - protein, 110 aa, synthetic construct
  REGION 1..110: note = Description of Artificial Sequence: Synthetic polypeptide
QSVLTQPPSVSAAPGQKVTISCSGSSSNIGNNYVSWYQQLPGTAPKLLLYDSNKRPSGIPARFSGSKSGTSATLGITGLQTGDEADYYCGTWDSSLNTVVFGGGTKLTVL

SEQ ID NO: 27781 - DNA, 321 bp, synthetic construct
  misc_feature 1..321: note = Description of Artificial Sequence: Synthetic polynucleotide
  source 1..321: mol_type = other DNA
tcctatgagctgacacagccaccctcggtgtcagtgtccccaggacagacggccaggatcacctgctctagagatgtattgccgaagcaatatgcttattggtaccagcagaagccaggccaggccccagtactggtgatatataaagacagtgagaggccctcagggatccctgagcgattctctggctcccgctcagggacaacagtcacgttgaccatcagaggagtccaggcagaagacgaggctgactattactgtcaattagttgtcagcagtgatacttatgtcttcggaactgggaccaaggtcaccgtccta

SEQ ID NO: 27782 - protein, 107 aa, synthetic construct
  REGION 1..107: note = Description of Artificial Sequence: Synthetic polypeptide
SYELTQPPSVSVSPGQTARITCSRDVLPKQYAYWYQQKPGQAPVLVIYKDSERPSGIPERFSGSRSGTTVTLTIRGVQAEDEADYYCQLVVSSDTYVFGTGTKVTVL

SEQ ID NO: 27783 - DNA, 330 bp, synthetic construct
  misc_feature 1..330: note = Description of Artificial Sequence: Synthetic polynucleotide
  source 1..330: mol_type = other DNA
cagtctgccctgactcagcctgcctccgtgtctgggtctcctggacagtcgatcaccatctcctgcactggaaccagcagtgacgttggtggttataattatgtctcctggtaccaacagcacccaggcaaagcccccaaactcatgatttatgaggtcagaaatcggccctcaggggtttctaaccgcttctctggctccaagtctggcaacacggcctccctgaccatctctgggctccaggctgaggacgaggctgattattactgctgctcatatacaaggagcatcacttgggtgttcggcggagggaccaagttgaccgtccta

SEQ ID NO: 27784 - protein, 110 aa, synthetic construct
  REGION 1..110: note = Description of Artificial Sequence: Synthetic polypeptide
QSALTQPASVSGSPGQSITISCTGTSSDVGGYNYVSWYQQHPGKAPKLMIYEVRNRPSGVSNRFSGSKSGNTASLTISGLQAEDEADYYCCSYTRSITWVFGGGTKLTVL

SEQ ID NO: 27785 - DNA, 330 bp, synthetic construct; identical to SEQ ID NO: 27743
  misc_feature 1..330: note = Description of Artificial Sequence: Synthetic polynucleotide
  source 1..330: mol_type = other DNA

SEQ ID NO: 27786 - protein, 110 aa, synthetic construct; identical to SEQ ID NO: 27744
  REGION 1..110: note = Description of Artificial Sequence: Synthetic polypeptide

SEQ ID NO: 27787 - DNA, 330 bp, synthetic construct
  misc_feature 1..330: note = Description of Artificial Sequence: Synthetic polynucleotide
  source 1..330: mol_type = other DNA
cagtctgccctgactcagcctgcctccgtgtctgggtctcctggacagtcgatcaccatctcctgcactggaaccagcagtgacgttggtggttataactatgtctcctggtaccaacaacacccaggcaaagcccccaaactcatgatttatgaggtcaggaatcggccctcaggggtttctaatcgcttctctggctccaagtctggcaacacggcctccctgaccatctctgggctccaggctgaggacgaggctgattattactgcaactcatatacacgcagcatcacttgggtgttcggcggagggaccaagctgaccgtccta

SEQ ID NO: 27788 - protein, 110 aa, synthetic construct
  REGION 1..110: note = Description of Artificial Sequence: Synthetic polypeptide
QSALTQPASVSGSPGQSITISCTGTSSDVGGYNYVSWYQQHPGKAPKLMIYEVRNRPSGVSNRFSGSKSGNTASLTISGLQAEDEADYYCNSYTRSITWVFGGGTKLTVL

SEQ ID NO: 27789 - DNA, 318 bp, synthetic construct
  misc_feature 1..318: note = Description of Artificial Sequence: Synthetic polynucleotide
  source 1..318: mol_type = other DNA
tcctatgagctgactcagccatcctcagtgtccgtgtccccaggacagacagccagcatcacctgctctggagataatttgggggttaaatatacttactggtatcagcagaagccaggccagtcccctgtgctagtcgtctatcaagatagcaagcggccctcagggatccctgagcgattctctggctccaactctgggaacacagccactctgaccatcagcgggacccaggctatggatgaggctgactattactgtcaggcgtgggacagcagcactgtggtattcggcggagggaccaagctgaccgtccta

SEQ ID NO: 27790 - protein, 106 aa, synthetic construct
  REGION 1..106: note = Description of Artificial Sequence: Synthetic polypeptide
SYELTQPSSVSVSPGQTASITCSGDNLGVKYTYWYQQKPGQSPVLVVYQDSKRPSGIPERFSGSNSGNTATLTISGTQAMDEADYYCQAWDSSTVVFGGGTKLTVL

SEQ ID NO: 27791 - DNA, 330 bp, synthetic construct
  misc_feature 1..330: note = Description of Artificial Sequence: Synthetic polynucleotide
  source 1..330: mol_type = other DNA
cagtctgtgctgacgcagccgccctcagtgtctggggccccagggcagagggtcaccatctcctgcactgggagcagctccaacatcggggcaggttatgatgtacactggtaccagcagcttccaggaacagcccccaaactcctcatctttggtaacagcaatcggccctcaggggtccctgaccgattctctggctccaagtctggcacctcagcctccctggccatcactgggctccaggctgaggatgaggctgattatcactgccagtcctatgacaacagcctgagtggtgtgttcggcggagggaccaagctgaccgtccta

SEQ ID NO: 27792 - protein, 110 aa, synthetic construct
  REGION 1..110: note = Description of Artificial Sequence: Synthetic polypeptide
QSVLTQPPSVSGAPGQRVTISCTGSSSNIGAGYDVHWYQQLPGTAPKLLIFGNSNRPSGVPDRFSGSKSGTSASLAITGLQAEDEADYHCQSYDNSLSGVFGGGTKLTVL

SEQ ID NO: 27793 - DNA, 321 bp, synthetic construct
  misc_feature 1..321: note = Description of Artificial Sequence: Synthetic polynucleotide
  source 1..321: mol_type = other DNA
tcctatgagctgactcagccaccctcagtgtccgtgtccccaggacagacagccagcatcacctgctctggagataaattggggaataaatatgcttgctggtatcagcagaagccaggccagtcccctgtgttggtcatctatcaagatagcaagcggccctcagggatccctgagcgattctctggctccaactctgggaacacagccactctgaccatcagcgggacccaggctatggatgaggctgactattactgtcaggcgtgggacagcaacactgcatgtgtcttcggaactgggaccaaggtcaccgtccta

SEQ ID NO: 27794 - protein, 107 aa, synthetic construct
  REGION 1..107: note = Description of Artificial Sequence: Synthetic polypeptide
SYELTQPPSVSVSPGQTASITCSGDKLGNKYACWYQQKPGQSPVLVIYQDSKRPSGIPERFSGSNSGNTATLTISGTQAMDEADYYCQAWDSNTACVFGTGTKVTVL

SEQ ID NO: 27795 - DNA, 321 bp, synthetic construct
  misc_feature 1..321: note = Description of Artificial Sequence: Synthetic polynucleotide
  source 1..321: mol_type = other DNA
tcctatgacctgactcagccaccctcagtgtccgtgtccccaggacagacagccagcatcacctgctctggagataatttggggaatagatatgcttgctggtatcagcagaagccaggccagtcccctgtactggtcatgtatcaagatcgcaagcggccctcagggatccctgagcgattctctggctccaactctgggaacacagccactctgaccatcagcgggacccaggctatggatgaggctgactattactgtcaggcgtgggacagcagaactgctgtggtattcggcggagggaccaagctgaccgtccta

SEQ ID NO: 27796 - protein, 107 aa, synthetic construct
  REGION 1..107: note = Description of Artificial Sequence: Synthetic polypeptide
SYDLTQPPSVSVSPGQTASITCSGDNLGNRYACWYQQKPGQSPVLVMYQDRKRPSGIPERFSGSNSGNTATLTISGTQAMDEADYYCQAWDSRTAVVFGGGTKLTVL

SEQ ID NO: 27797 - DNA, 318 bp, synthetic construct
  misc_feature 1..318: note = Description of Artificial Sequence: Synthetic polynucleotide
  source 1..318: mol_type = other DNA
tcctatgagctgactcagccaccctcagtgtccgtgtccccaggacagacagccagcatcacctgctctggagatacattggggggtaaatatgcttggtggtatcagcagaggccaggccagtcccctgtgctggtcatctatcaagatcgcaagcggccctcagggatccctgagcgattctctggctccagctctgggaacacagccactctgaccatcagcgggacccaggctatggatgaggctgactattactgtcaggcgtgggacaacggcgctgcggttttcggcggagggaccaagctgaccgtccta

SEQ ID NO: 27798 - protein, 106 aa, synthetic construct
  REGION 1..106: note = Description of Artificial Sequence: Synthetic polypeptide
SYELTQPPSVSVSPGQTASITCSGDTLGGKYAWWYQQRPGQSPVLVIYQDRKRPSGIPERFSGSSSGNTATLTISGTQAMDEADYYCQAWDNGAAVFGGGTKLTVL

SEQ ID NO: 27799 - DNA, 321 bp, synthetic construct
  misc_feature 1..321: note = Description of Artificial Sequence: Synthetic polynucleotide
  source 1..321: mol_type = other DNA
tcctttgagctgacacagccaccctcggtgtcagtgtccccaggacagacggccaggatcacctgctctggagatgcattgccaaggcattatgtttattggtaccagcagaacccaggccaggcccctgtgctggtgatatataaagacagtgagaggccctcagggatccctgagcgattctctggctccagctcagggacaacagtcacgttgaccatcagtggagtccaggcagaagacgaggctgactattactgtcaatcagcagacagcagtggtacttatgtcttcggaactgggaccaaggtcaccgtccta

SEQ ID NO: 27800 - protein, 107 aa, synthetic construct
  REGION 1..107: note = Description of Artificial Sequence: Synthetic polypeptide
SFELTQPPSVSVSPGQTARITCSGDALPRHYVYWYQQNPGQAPVLVIYKDSERPSGIPERFSGSSSGTTVTLTISGVQAEDEADYYCQSADSSGTYVFGTGTKVTVL

SEQ ID NO: 27801 - DNA, 330 bp, synthetic construct
  misc_feature 1..330: note = Description of Artificial Sequence: Synthetic polynucleotide
  source 1..330: mol_type = other DNA
cagtctgtgctgacgcagccgccctcagtgtctggggccccagggcagagggtcaccatctcctgcactgggagcagctccaacatcggggcaggttatgatgtacactggtaccagcagcttccaggaacagcccccaaactcctcatctatggtaacagcaatcggccctcaggggtccctgaccgattctctggctccaagtctgacacctcagcctccctggccatcactgggctccaggctgaggatgaggctgattattactgccagtcctatgacaacagcctgagtggtgtgttcggcggagggaccaagctgaccgtccta

SEQ ID NO: 27802 - protein, 110 aa, synthetic construct
  REGION 1..110: note = Description of Artificial Sequence: Synthetic polypeptide
QSVLTQPPSVSGAPGQRVTISCTGSSSNIGAGYDVHWYQQLPGTAPKLLIYGNSNRPSGVPDRFSGSKSDTSASLAITGLQAEDEADYYCQSYDNSLSGVFGGGTKLTVL

SEQ ID NO: 27803 - DNA, 318 bp, synthetic construct
  misc_feature 1..318: note = Description of Artificial Sequence: Synthetic polynucleotide
  source 1..318: mol_type = other DNA
tcctatgagctgactcagccaccctcagtgtccgtgtccccaggacagacagccagcatcacctgctctggagatacattggggggtaaatatgcttggtggtatcagcagaagccaggccagtcccctgtgctggtcatctatcaagatcgcaagcggccctcagggatccctgagcgattctctggctccagctctgggaacacagccactctgaccatcagcgggacccaggctatggatgaggctgactattactgtcaggcgtgggacaacggcgctgcggttttcggcggagggaccaagctgaccgtccta

SEQ ID NO: 27804 - protein, 106 aa, synthetic construct
  REGION 1..106: note = Description of Artificial Sequence: Synthetic polypeptide
SYELTQPPSVSVSPGQTASITCSGDTLGGKYAWWYQQKPGQSPVLVIYQDRKRPSGIPERFSGSSSGNTATLTISGTQAMDEADYYCQAWDNGAAVFGGGTKLTVL

SEQ ID NO: 27805 - DNA, 330 bp, synthetic construct; identical to SEQ ID NO: 27801
  misc_feature 1..330: note = Description of Artificial Sequence: Synthetic polynucleotide
  source 1..330: mol_type = other DNA

SEQ ID NO: 27806 - protein, 110 aa, synthetic construct; identical to SEQ ID NO: 27802
  REGION 1..110: note = Description of Artificial Sequence: Synthetic polypeptide

SEQ ID NO: 27807 - DNA, 318 bp, synthetic construct; identical to SEQ ID NO: 24733
  misc_feature 1..318: note = Description of Artificial Sequence: Synthetic polynucleotide
  source 1..318: mol_type = other DNA

SEQ ID NO: 27808 - protein, 106 aa, synthetic construct; identical to SEQ ID NO: 24734
  REGION 1..106: note = Description of Artificial Sequence: Synthetic polypeptide

SEQ ID NO: 27809 - DNA, 330 bp, synthetic construct
  misc_feature 1..330: note = Description of Artificial Sequence: Synthetic polynucleotide
  source 1..330: mol_type = other DNA
cagtctgtgctgacgcagccgccctcagtgtctggggccccagggcagagggtcaccatctcctgcactgggagcagctccaacatcggggcaggttatgatgtacactggtaccagcagcttccaggaacagcccccaaactcctcatctatggtaacagcaatcggccctcaggggtccctgaccgattctctggctccaagtctgacacctcagcctccctggccatcactgggctccaggctgaggatgaggctgattattactgccagtcctatgacaacaacctgagtggtgtgttcggcggagggaccaagctgaccgtccta

SEQ ID NO: 27810 - protein, 110 aa, synthetic construct
  REGION 1..110: note = Description of Artificial Sequence: Synthetic polypeptide
QSVLTQPPSVSGAPGQRVTISCTGSSSNIGAGYDVHWYQQLPGTAPKLLIYGNSNRPSGVPDRFSGSKSDTSASLAITGLQAEDEADYYCQSYDNNLSGVFGGGTKLTVL

SEQ ID NO: 27811 - DNA, 318 bp, synthetic construct
  misc_feature 1..318: note = Description of Artificial Sequence: Synthetic polynucleotide
  source 1..318: mol_type = other DNA
tcctatgaactgactcagccaccctcagtgtccgtgtccccaggacagacagccagcatcacctgctctggagataaattgggggataaatatgtttgttggtatcagcagaagccaggccagtcccctgtgctggtcatctatcaagatagcaagcggccctcagggatccctgagcgattctctggctccaactctgggaacacagccactctgaccatcagcgggacccaggctatggatgaggctgactattactgtcaggcgtggaacagcagcaatgtggtattcggcggagggaccaagctgaccgtccta

SEQ ID NO: 27812 - protein, 106 aa, synthetic construct
  REGION 1..106: note = Description of Artificial Sequence: Synthetic polypeptide
SYELTQPPSVSVSPGQTASITCSGDKLGDKYVCWYQQKPGQSPVLVIYQDSKRPSGIPERFSGSNSGNTATLTISGTQAMDEADYYCQAWNSSNVVFGGGTKLTVL

SEQ ID NO: 27813 - DNA, 324 bp, synthetic construct
  misc_feature 1..324: note = Description of Artificial Sequence: Synthetic polynucleotide
  source 1..324: mol_type = other DNA
tcctatgagctgacacagccaccctcggtgtcagtgtccccaggacaaacggccaggatcacctgctctggagatgcattgccaaaaaaatatgcttattggtaccagcagaagtcaggccaggcccctgtgctggtcatctatgaggacagcaaacgaccctccgggatccctgagagattctctggctccagctcagggacaatggccaccttgactatcagtggggcccaggtggaggatgaagctgactactactgtaactcaacagacagcagtggtaatcatgtggtattcggcggagggaccaagctgaccgtccta

SEQ ID NO: 27814 - protein, 108 aa, synthetic construct
  REGION 1..108: note = Description of Artificial Sequence: Synthetic polypeptide
SYELTQPPSVSVSPGQTARITCSGDALPKKYAYWYQQKSGQAPVLVIYEDSKRPSGIPERFSGSSSGTMATLTISGAQVEDEADYYCNSTDSSGNHVVFGGGTKLTVL

SEQ ID NO: 27815 - DNA, 321 bp, synthetic construct
  misc_feature 1..321: note = Description of Artificial Sequence: Synthetic polynucleotide
  source 1..321: mol_type = other DNA
gacatccagatgacccagtctccatcctcgctgtctgcatctgtaggagacagagtcaccatcacttgtcgggcgagtcagggcattaacaattatttagcctggtttcagcagaaaccaggggaagcccctaagtccctgatctatgctgcatccagtttgcgaagtggggtcccatcacagttcagcggcagtggatctggaacagatttcattctcaccatcagcagcctgcagcctgaagattttgcaacttattactgccaacagtattatagttacccattcactttcggccctgggaccaaagtggatatcaaa

SEQ ID NO: 27816 - protein, 107 aa, synthetic construct
  REGION 1..107: note = Description of Artificial Sequence: Synthetic polypeptide
DIQMTQSPSSLSASVGDRVTITCRASQGINNYLAWFQQKPGEAPKSLIYAASSLRSGVPSQFSGSGSGTDFILTISSLQPEDFATYYCQQYYSYPFTFGPGTKVDIK

SEQ ID NO: 27817 - DNA, 321 bp, synthetic construct
  misc_feature 1..321: note = Description of Artificial Sequence: Synthetic polynucleotide
  source 1..321: mol_type = other DNA
gacatccagatgacccagtctccatcctccctgtctgcatctgtaggagacagagtcaccatcacttgccgggcaagtcagggcattagaaacgatttaggctggtatcagcagaaaccagggaaagcccctaagcgcctgatctatggtgcatccagtttgcaaagtggggtcccatcaagattcagcggcagtggatctgggacagaattcactctcacaatcagcagcctgcagcctgaagattttgcagcttattactgtctacagcgtgatagttacccgttcactttcggcggagggaccaaggtggagatcaaa

SEQ ID NO: 27818 - protein, 107 aa, synthetic construct
  REGION 1..107: note = Description of Artificial Sequence: Synthetic polypeptide
DIQMTQSPSSLSASVGDRVTITCRASQGIRNDLGWYQQKPGKAPKRLIYGASSLQSGVPSRFSGSGSGTEFTLTISSLQPEDFAAYYCLQRDSYPFTFGGGTKVEIK

SEQ ID NO: 27819 - DNA, 321 bp, synthetic construct
  misc_feature 1..321: note = Description of Artificial Sequence: Synthetic polynucleotide
  source 1..321: mol_type = other DNA
gacatccagatgacccagtctccatcctcactgtctgcatctgtaggagacagagtcaccatcacttgtcgggcgagtcagggcattagccattatttagcctggtttcagcagaaaccagggaaagcccctcagtccctgatgtctgctgcatccggtttgcaaagtggggtcccttcaaagttcagcggcagtggatctgggacagatttcactctcaccatcagcagcctgcagcctgaagattttgcaacttactactgtcaacaatatcagaattaccccttcactttcggccctgggaccaaagtggatatcaaa

SEQ ID NO: 27820 - protein, 107 aa, synthetic construct
  REGION 1..107: note = Description of Artificial Sequence: Synthetic polypeptide
DIQMTQSPSSLSASVGDRVTITCRASQGISHYLAWFQQKPGKAPQSLMSAASGLQSGVPSKFSGSGSGTDFTLTISSLQPEDFATYYCQQYQNYPFTFGPGTKVDIK

SEQ ID NO: 27821 - DNA, 336 bp, synthetic construct
  misc_feature 1..336: note = Description of Artificial Sequence: Synthetic polynucleotide
  source 1..336: mol_type = other DNA
gatgttgtgatgactcagtctccactctccctgcccgtcacccttggacagccggcctccatctcctgcaggtctagtcaaagcctcgtatacagtgatggaaacacctacttgaattggtttcagcagaggccaggccaatctccaaggcgcctaatttatgaggtttctaactgggactctggggtcccaaacagattcagcggcagtgggtcaggcactgatttcacactgaaaatcagtgcggtggaggctgaggatgttggggtttattactgcgtgcaaggtacacactggcctcggacgttcggccaagggaccaaggtggaaatcaaa

SEQ ID NO: 27822 - protein, 112 aa, synthetic construct
  REGION 1..112: note = Description of Artificial Sequence: Synthetic polypeptide
DVVMTQSPLSLPVTLGQPASISCRSSQSLVYSDGNTYLNWFQQRPGQSPRRLIYEVSNWDSGVPNRFSGSGSGTDFTLKISAVEAEDVGVYYCVQGTHWPRTFGQGTKVEIK

SEQ ID NO: 27823 - DNA, 321 bp, synthetic construct
  misc_feature 1..321: note = Description of Artificial Sequence: Synthetic polynucleotide
  source 1..321: mol_type = other DNA
gaaatagtgatgacgcagtctccagccaccctgtctgtgtctccaggggaaagagccaccctctcctgcagggccagtcagagtgttagcaacgacttagcctggtaccagcagaaacctggccaggctcccaggctcctcatctatggtgcatccaccagggccactggtatcccagccaggttcagtggcggtgggtctgggacagagttcactctcaccatcagcgccctgcagtctgaacattttgcagtttattactgtcagcagtatagtaactggccattcactttcggccctgggaccaaagtggatatcaaa

SEQ ID NO: 27824 - protein, 107 aa, synthetic construct
  REGION 1..107: note = Description of Artificial Sequence: Synthetic polypeptide
EIVMTQSPATLSVSPGERATLSCRASQSVSNDLAWYQQKPGQAPRLLIYGASTRATGIPARFSGGGSGTEFTLTISALQSEHFAVYYCQQYSNWPFTFGPGTKVDIK

SEQ ID NO: 27825 - DNA, 321 bp, synthetic construct
  misc_feature 1..321: note = Description of Artificial Sequence: Synthetic polynucleotide
  source 1..321: mol_type = other DNA
gacatccagatgacccagtctccatcctccctgtctgcatctgtaggagacagagtcaccatcacttgccgggcaagtcagagcattaccagctatttaaattggtatcagcagaaaccagggaaagtccctaagctcctgatctctactgcatccagtttgcaaagtggggtcccatcaaggttcagtggcagtggatctgggacagatttcactctcaccatcagcagtctgcaacctgaagattttgcaacttactactgtcaacagagtcacagtttcccattcactttcggccctgggaccaatgtggatttcaaa

SEQ ID NO: 27826 - protein, 107 aa, synthetic construct
  REGION 1..107: note = Description of Artificial Sequence: Synthetic polypeptide
DIQMTQSPSSLSASVGDRVTITCRASQSITSYLNWYQQKPGKVPKLLISTASSLQSGVPSRFSGSGSGTDFTLTISSLQPEDFATYYCQQSHSFPFTFGPGTNVDFK

SEQ ID NO: 27827 - DNA, 321 bp, synthetic construct
  misc_feature 1..321: note = Description of Artificial Sequence: Synthetic polynucleotide
  source 1..321: mol_type = other DNA
gacattcagatgacccagtctccatcttccgtgtatgcatctgtaggagacagagtcaccatcacttgtcgtgcgagtcagggtattagcagctacttagcctggtatcagcagaaaccagggaaagcccctaagctcctgatctatgctgcatccagtttgcaaagtggggtcccatcaagattcagcggcagtgggtctgggacagatttcactctcaccatcagcagcctgcagcctgaagattttgcaacttactattgtcaacaggctaacagtttcccgctcactttcggcggagggaccaaggtggagatcaaa

SEQ ID NO: 27828 - protein, 107 aa, synthetic construct
  REGION 1..107: note = Description of Artificial Sequence: Synthetic polypeptide
DIQMTQSPSSVYASVGDRVTITCRASQGISSYLAWYQQKPGKAPKLLIYAASSLQSGVPSRFSGSGSGTDFTLTISSLQPEDFATYYCQQANSFPLTFGGGTKVEIK

SEQ ID NO: 27829 - DNA, 321 bp, synthetic construct
  misc_feature 1..321: note = Description of Artificial Sequence: Synthetic polynucleotide
  source 1..321: mol_type = other DNA
gacatccagatgacccagtctccatcttccgtgtctgcatctgtaggagacagagtcaccatcacttgtcgggcgagtcagggtattagcaggtggttagcctggtatcagcagaaaccagggaaagcccctaagctcctgatctatgctgcatccagtttgcaaagtggggtcccatcaaggttcagcggcagtggatctgggacagatttcactctcaccatcagcagcctgcagcctgaagattttgcaacttactattgtcaacaggctaacagtttcccattcactttcggccctgggaccaaagtggatatcaaa

SEQ ID NO: 27830 - protein, 107 aa, synthetic construct
  REGION 1..107: note = Description of Artificial Sequence: Synthetic polypeptide
DIQMTQSPSSVSASVGDRVTITCRASQGISRWLAWYQQKPGKAPKLLIYAASSLQSGVPSRFSGSGSGTDFTLTISSLQPEDFATYYCQQANSFPFTFGPGTKVDIK

SEQ ID NO: 27831 - DNA, 336 bp, synthetic construct
  misc_feature 1..336: note = Description of Artificial Sequence: Synthetic polynucleotide
  source 1..336: mol_type = other DNA
gatattgtgatgattcagtctccactctccctgcccgtcacccctggagagccggcctccatctcctgcaggtctagtcagagcctcctgcatagtaatggacacaactatttggattggtacctacagaagccagggcggtctccacagctcttgatctatttgggttctaatcgggcctccggggtccctgagaggttcagtggcagtggatcaggcacagattttacactgaaaatcagcagagtggaggctgaggatgttggggtttattactgcatgcaacctctacaaactccgttcactttcggcggagggaccaaggtggagatcaaa

SEQ ID NO: 27832 - protein, 112 aa, synthetic construct
  REGION 1..112: note = Description of Artificial Sequence: Synthetic polypeptide
DIVMIQSPLSLPVTPGEPASISCRSSQSLLHSNGHNYLDWYLQKPGRSPQLLIYLGSNRASGVPERFSGSGSGTDFTLKISRVEAEDVGVYYCMQPLQTPFTFGGGTKVEIK

SEQ ID NO: 27833 - DNA, 336 bp, synthetic construct
  misc_feature 1..336: note = Description of Artificial Sequence: Synthetic polynucleotide
  source 1..336: mol_type = other DNA
gatgttgtgatgactcagtctccactctccctgcccgtcacccttggacagccggcctccatctcctgcaggtctagtcaaagcctcgtatacagtgatggaaacacctacttgaattggtttcagcagaggccaggccaatctccaaggcgcctaatttataaggtttctaactgggactctggggtcccagacagattcagcggcagtgggtcaggcactgatttcacactgaaaatcagcagggtggaggctgaggatgttggggtttattactgcatgcaaggtacacactggtcgctcactttcggcggagggaccaaggtggagatcaaa

SEQ ID NO: 27834 - protein, 112 aa, synthetic construct
  REGION 1..112: note = Description of Artificial Sequence: Synthetic polypeptide
DVVMTQSPLSLPVTLGQPASISCRSSQSLVYSDGNTYLNWFQQRPGQSPRRLIYKVSNWDSGVPDRFSGSGSGTDFTLKISRVEAEDVGVYYCMQGTHWSLTFGGGTKVEIK

SEQ ID NO: 27835 - DNA, 336 bp, synthetic construct
  misc_feature 1..336: note = Description of Artificial Sequence: Synthetic polynucleotide
  source 1..336: mol_type = other DNA
gatgttgtgatgactcagtctccactctccctgcccgtcacccttggacagccggcctccatctcctgcaggtctagtcaaagcctcgtatacagtgatggaaacacctacttgaattggtttcagcagaggccaggccaatctccaaggcgcctaatttataaggtttctaactgggactctggggtcccagacagattcagcggcagtgggtcaggcactgatttcacactgaaaatcagcagggtggaggctgaggatgttggggtttattactgcatgcaaggtacacactggttgctcactttcggcggagggaccaaggtggagatcaaa

SEQ ID NO: 27836 - protein, 112 aa, synthetic construct
  REGION 1..112: note = Description of Artificial Sequence: Synthetic polypeptide
DVVMTQSPLSLPVTLGQPASISCRSSQSLVYSDGNTYLNWFQQRPGQSPRRLIYKVSNWDSGVPDRFSGSGSGTDFTLKISRVEAEDVGVYYCMQGTHWLLTFGGGTKVEIK

SEQ ID NO: 27837 - DNA, 336 bp, synthetic construct
  misc_feature 1..336: note = Description of Artificial Sequence: Synthetic polynucleotide
  source 1..336: mol_type = other DNA
gatgttgtgatgactcagtctccactctccctgcccgtcacccttggacagccggcctccatctcctgcaggtctagtcaaagcctcgtatacagtgatggaaacacctccttgaattggtttcagcagaggccaggccaatctccaaggcgcctaatttataaggtttctaactgggactctggggtcccagtcagattcagcggcagtgggtcaggcactgatttcacactgaaaatcagcagggtggaggctgaggatgttgggatttattactgcatgcaaggtacacactggcctcccactttcggcggagggaccaaggtggagatcaaa

SEQ ID NO: 27838 - protein, 112 aa, synthetic construct
  REGION 1..112: note = Description of Artificial Sequence: Synthetic polypeptide
DVVMTQSPLSLPVTLGQPASISCRSSQSLVYSDGNTSLNWFQQRPGQSPRRLIYKVSNWDSGVPVRFSGSGSGTDFTLKISRVEAEDVGIYYCMQGTHWPPTFGGGTKVEIK

SEQ ID NO: 27839 - DNA, 336 bp, synthetic construct
  misc_feature 1..336: note = Description of Artificial Sequence: Synthetic polynucleotide
  source 1..336: mol_type = other DNA
gatgttgtgatgagtcagtatccactctccctgcccgtcacctttggacagccggcctccatctcatgcaggtctagtcaaagcctcgtatacagtgatggaaacacctccttgaattggtttcagcagaggccaggccaatatccaaggcgcttaatttataaggtttctaactgggactatggggtcccagtcagattcagcggcagtgggtcaggcactgatttcacactgaaaatcagcagggtggaggctgaggatgttgggatttattactgcatgcaaggtacacactggcctcccactttcggcggagggaccaaggtggagatcaaa

SEQ ID NO: 27840 - protein, 112 aa, synthetic construct
  REGION 1..112: note = Description of Artificial Sequence: Synthetic polypeptide
DVVMSQYPLSLPVTFGQPASISCRSSQSLVYSDGNTSLNWFQQRPGQYPRRLIYKVSNWDYGVPVRFSGSGSGTDFTLKISRVEAEDVGIYYCMQGTHWPPTFGGGTKVEIK

SEQ ID NO: 27841 - DNA, 321 bp, synthetic construct
  misc_feature 1..321: note = Description of Artificial Sequence: Synthetic polynucleotide
  source 1..321: mol_type = other DNA
gacatccagatgacccagtctccatcctcactgtctgcatctgtaggagacagagtcaccatcacttgtcgggcgagtcagggcattagcaattatttagcctggtttcagcagaagccagggaaagcccctaagtccctgatctctgctgcatccagtttgcaaagtggggtcccatcaaagttcagcggcagtggatctgggacagatttcactctcaccatcagcagcctgcagcctgaagattttgcaacttattactgccaacagtataatagttacccgctcagtttcggcggagggaccaaggtggagatcaaa

SEQ ID NO: 27842 - protein, 107 aa, synthetic construct
  REGION 1..107: note = Description of Artificial Sequence: Synthetic polypeptide
DIQMTQSPSSLSASVGDRVTITCRASQGISNYLAWFQQKPGKAPKSLISAASSLQSGVPSKFSGSGSGTDFTLTISSLQPEDFATYYCQQYNSYPLSFGGGTKVEIK

SEQ ID NO: 27843 - DNA, 321 bp, synthetic construct
  misc_feature 1..321: note = Description of Artificial Sequence: Synthetic polynucleotide
  source 1..321: mol_type = other DNA
gacatccagatgacccagtctccatcctcactggctgcatctgtaggagacagagtcaccatcacttgtcgggcgagtcaggacattagcaattatttagcctggtttcagcagaaaccagggaaagcccctaagtccctgatctatgctgcatccagtttgcaaagtggggtcccatcaaggttcagcggcagtggatctgggacagatttcactctcaccatcagcagcctgcagcctgaagattttgcaacttattactgccaacagtgtgatagtttccctctcactttcggcggagggaccaaggtggagatcaaa

SEQ ID NO: 27844 - protein, 107 aa, synthetic construct
  REGION 1..107: note = Description of Artificial Sequence: Synthetic polypeptide
DIQMTQSPSSLAASVGDRVTITCRASQDISNYLAWFQQKPGKAPKSLIYAASSLQSGVPSRFSGSGSGTDFTLTISSLQPEDFATYYCQQCDSFPLTFGGGTKVEIK

SEQ ID NO: 27845 - DNA, 324 bp, synthetic construct
  misc_feature 1..324: note = Description of Artificial Sequence: Synthetic polynucleotide
  source 1..324: mol_type = other DNA
gacatccagatgacccagtctccatcctccctgtctgcatctgtaggagacagagtcaccatcacttgccgggcaagtcagggcattagaaatgatttaggctattatcagcagaaaccagggaaagcccctaagcgcctgatctatgttgcatccggtttgcaaagtggggtcccatcaaggttcagcggcagtggatctgggacagaattcactctcacaatcagcagcctgcagcctgaagattttgcaacttattactgtctacagcacaatagttaccctccgtggacgttcggccaagggaccaaggtggatatcaaa

SEQ ID NO: 27846 - protein, 108 aa, synthetic construct
  REGION 1..108: note = Description of Artificial Sequence: Synthetic polypeptide
DIQMTQSPSSLSASVGDRVTITCRASQGIRNDLGYYQQKPGKAPKRLIYVASGLQSGVPSRFSGSGSGTEFTLTISSLQPEDFATYYCLQHNSYPPWTFGQGTKVDIK

SEQ ID NO: 27847 - DNA, 321 bp, synthetic construct
  misc_feature 1..321: note = Description of Artificial Sequence: Synthetic polynucleotide
  source 1..321: mol_type = other DNA
gacatccagatgacccagtctccatcctcactgtctgcatctgtaggagacagagtcaccatcacttgtcgggcgagtcaggacattagcaattatttagcctggtttcagcagaagccagggaaagcccctaagtccctgatctattctgcatccagtttgcaaagtggggtcccatcaaagttcagcggcagtggatctgggacagatttcactctcaccatcagcagcctgcagcctgaagattttgcaacttattactgccaacaatctgatagttaccctctcactttcggcggagggaccaaggtggagatcaaa

SEQ ID NO: 27848 - protein, 107 aa, synthetic construct
  REGION 1..107: note = Description of Artificial Sequence: Synthetic polypeptide
DIQMTQSPSSLSASVGDRVTITCRASQDISNYLAWFQQKPGKAPKSLIYSASSLQSGVPSKFSGSGSGTDFTLTISSLQPEDFATYYCQQSDSYPLTFGGGTKVEIK

SEQ ID NO: 27849 - DNA, 321 bp, synthetic construct; identical to SEQ ID NO: 27847
  misc_feature 1..321: note = Description of Artificial Sequence: Synthetic polynucleotide
  source 1..321: mol_type = other DNA

SEQ ID NO: 27850 - protein, 107 aa, synthetic construct; identical to SEQ ID NO: 27848
  REGION 1..107: note = Description of Artificial Sequence: Synthetic polypeptide

SEQ ID NO: 27851 - DNA, 336 bp, synthetic construct
  misc_feature 1..336: note = Description of Artificial Sequence: Synthetic polynucleotide
  source 1..336: mol_type = other DNA
gatgttgtgatgactcagtctccactctccctgcccgtcacccttggacagccggcctccatctcctgcaggtctagtcaaagcctcgtatacagtgatggaaacacctacttgaattggtttcagcagaggccaggccaatctccaaggcgcctaatttataaggtttctaactgggactctggggtcccagacagattcagcggcagtgggtcaggcactgatttcacactgaaaatcagcagggtggaggctgaggatgttggggtttattactgcatgcaaggtacacactggcctctcactttcggcggagggaccaaggtggagatcaaa

SEQ ID NO: 27852 - protein, 112 aa, synthetic construct
  REGION 1..112: note = Description of Artificial Sequence: Synthetic polypeptide
DVVMTQSPLSLPVTLGQPASISCRSSQSLVYSDGNTYLNWFQQRPGQSPRRLIYKVSNWDSGVPDRFSGSGSGTDFTLKISRVEAEDVGVYYCMQGTHWPLTFGGGTKVEIK

SEQ ID NO: 27853 - DNA, 321 bp, synthetic construct
  misc_feature 1..321: note = Description of Artificial Sequence: Synthetic polynucleotide
  source 1..321: mol_type = other DNA
gacatccagatgacccagtctccatcctcactgtctgcatctgtaggagacagagtcaccatcacttgtcgggcgagtcaggacattagcaattatttagcctggtttcagcagaaaccagggaaagcccctaagtccctgatcttttctgcatccagtttgcaaagtggggtcccatcaaagttcagcggcagtggatctgggacagatttcactctcaccatcagcaacctgcagcctgaagattttgcaacttattactgccaacaatctaatagttaccctctcactttcggcggagggaccaaggtggagatcaaa

SEQ ID NO: 27854 - protein, 107 aa, synthetic construct
  REGION 1..107: note = Description of Artificial Sequence: Synthetic polypeptide
DIQMTQSPSSLSASVGDRVTITCRASQDISNYLAWFQQKPGKAPKSLIFSASSLQSGVPSKFSGSGSGTDFTLTISNLQPEDFATYYCQQSNSYPLTFGGGTKVEIK

SEQ ID NO: 27855 - DNA, 321 bp, synthetic construct
  misc_feature 1..321: note = Description of Artificial Sequence: Synthetic polynucleotide
  source 1..321: mol_type = other DNA
gacatccagatgacccagtctccatcctcactgtctgcatctgtaggagacagagtcaccatcacttgtcgggcgagtcagggcattagcaattatttagcctggtttcagcagaacccagggaaagcccctaagtcccttatctatgctgcatccagtttgcaaagtggggtcccatcaaagttcagcggcagtggatgtgggacagatttcactctcaccatcagcagcccgcagcctgaagatgttgcaacctattactgccaacattatcttaattaccctctcaccttcggccaagggacacgactggagattaaa

SEQ ID NO: 27856 - protein, 107 aa, synthetic construct
  REGION 1..107: note = Description of Artificial Sequence: Synthetic polypeptide
DIQMTQSPSSLSASVGDRVTITCRASQGISNYLAWFQQNPGKAPKSLIYAASSLQSGVPSKFSGSGCGTDFTLTISSPQPEDVATYYCQHYLNYPLTFGQGTRLEIK

SEQ ID NO: 27857 - DNA, 321 bp, synthetic construct
  misc_feature 1..321: note = Description of Artificial Sequence: Synthetic polynucleotide
  source 1..321: mol_type = other DNA
gacatccagatgacccagtctccatcctccctgtctgcatctgtaggagacagagtcaccatcacttgccgggcaagtcaggacattagaaatgatttaggctggtatcagcagaaaccagcgaaagcccctaagcgcctgatctatagagcatccagtttgcaaagtggggtcccatcacgcttcagcggcagtggatctgggacagaattcactctcacaatcagcagcctgcagcctgaagattttgccgcttattactgtctacagcataatagttacccgtggacgttcggccaagggaccaaggtagagatcaaa

SEQ ID NO: 27858 - protein, 107 aa, synthetic construct
  REGION 1..107: note = Description of Artificial Sequence: Synthetic polypeptide
DIQMTQSPSSLSASVGDRVTITCRASQDIRNDLGWYQQKPAKAPKRLIYRASSLQSGVPSRFSGSGSGTEFTLTISSLQPEDFAAYYCLQHNSYPWTFGQGTKVEIK

SEQ ID NO: 27859 - DNA, 321 bp, synthetic construct
  misc_feature 1..321: note = Description of Artificial Sequence: Synthetic polynucleotide
  source 1..321: mol_type = other DNA
gacaaccagatgacccagtctccatcctccctgtctgcatctgtaggagacagagtcaccatcacttgccgggcaagtcagaggtttagtaactatttaaattggtatcagcagaaaccagggaaagcccctaagctcctgatctatactgcatccagtttgcaaagtggggtcccatcaaggttcagtgccagtgtctctgggacagacttcactctcaccatcagcagtctgcaacctgaagattttgcaacttattactgtcaacagagttacagtattccgctcactttcggcggagggaccaaggtggagatcaaa

SEQ ID NO: 27860 - protein, 107 aa, synthetic construct
  REGION 1..107: note = Description of Artificial Sequence: Synthetic polypeptide
DNQMTQSPSSLSASVGDRVTITCRASQRFSNYLNWYQQKPGKAPKLLIYTASSLQSGVPSRFSASVSGTDFTLTISSLQPEDFATYYCQQSYSIPLTFGGGTKVEIK

SEQ ID NO: 27861 - DNA, 321 bp, synthetic construct
  misc_feature 1..321: note = Description of Artificial Sequence: Synthetic polynucleotide
  source 1..321: mol_type = other DNA
gacatccagatgacccagtctccatcctccctgtctgcatctgtaggagacagagtcaccatcacttgccgggcaagtcagggcattagacatgatttaggctggtatcagcagaaaccagggaaagcccctaagcgcctgatctttgctgcatccagtttgcaaagtggggtcccatctagattcagcggcagtggatctgggacagaattcactctcacaatcagcagcctgcagcctgaagattttgcaacttattactgtctacagcattatagtttccctcggacgttcggccaagggaccaaggtggaaatcaaa

SEQ ID NO: 27862 - protein, 107 aa, synthetic construct
  REGION 1..107: note = Description of Artificial Sequence: Synthetic polypeptide
DIQMTQSPSSLSASVGDRVTITCRASQGIRHDLGWYQQKPGKAPKRLIFAASSLQSGVPSRFSGSGSGTEFTLTISSLQPEDFATYYCLQHYSFPRTFGQGTKVEIK

SEQ ID NO: 27863 - DNA, 321 bp, synthetic construct
  misc_feature 1..321: note = Description of Artificial Sequence: Synthetic polynucleotide
  source 1..321: mol_type = other DNA
gacatccagatgacccagtctccatcctcccgttttgcatttgtaggagacagagtcaccatcacttgccgggcaagtcagggcattagacatgatttaggctggtatcagcagaaaccagggaaagcccttaagcgcttgatatatgctgcatccagttcgcaaagtggggtcccatcaaggttcagcggcagtggatgtgggacagaattcactctcacaatcagcagcgtgcagcgcgaagattttgcaaattattactgtgtacagcattatagtttccctcggacgttcggccaagggaccaaggtggaaatcaaa

SEQ ID NO: 27864 - protein, 107 aa, synthetic construct
  REGION 1..107: note = Description of Artificial Sequence: Synthetic polypeptide
DIQMTQSPSSRFAFVGDRVTITCRASQGIRHDLGWYQQKPGKALKRLIYAASSSQSGVPSRFSGSGCGTEFTLTISSVQREDFANYYCVQHYSFPRTFGQGTKVEIK

SEQ ID NO: 27865 - DNA, 333 bp, synthetic construct
  misc_feature 1..333: note = Description of Artificial Sequence: Synthetic polynucleotide
  source 1..333: mol_type = other DNA
gatgttgtgatgactcagtctccactctccctgcccgtcacccttggacagccggcctccatctcctgcaggtctagtcaaagcctcgtatacagtgatggaaacacctacttgaattggtttcagcagaggccaggccaatctccaaggcgcctcatttataaggtttctaactgggactctggggtcccagacagaatcagcggcagtgggtcaggcactgatttcacactgaaaatcagcagggtggaggctgaggatgttgggatttattactgcatgcaaggtgcacactggttcaccttcggccaagggacacgactggagattaaa

SEQ ID NO: 27866 - protein, 111 aa, synthetic construct
  REGION 1..111: note = Description of Artificial Sequence: Synthetic polypeptide
DVVMTQSPLSLPVTLGQPASISCRSSQSLVYSDGNTYLNWFQQRPGQSPRRLIYKVSNWDSGVPDRISGSGSGTDFTLKISRVEAEDVGIYYCMQGAHWFTFGQGTRLEIK

SEQ ID NO: 27867 - DNA, 321 bp, synthetic construct
  misc_feature 1..321: note = Description of Artificial Sequence: Synthetic polynucleotide
  source 1..321: mol_type = other DNA
gacatccagatgacccagtctccatcctccctgtctgcatctataggagacagagtcaccatcacttgccaggcgagtcaggacattttcaactatttaaattggtatcagcagaaaccagggaaagcccctaagctcctgatctacgatgcatccactttggaaacaggggtcccatcaaggttcagtggaagtggatctgggacagattttactttcaccatcagcagcctgcagcctgaagatattgcaacatattactgtcaacagtatgataatctcccgatcaccttcggccaagggacacgactggagattaaa

SEQ ID NO: 27868 - protein, 107 aa, synthetic construct
  REGION 1..107: note = Description of Artificial Sequence: Synthetic polypeptide
DIQMTQSPSSLSASIGDRVTITCQASQDIFNYLNWYQQKPGKAPKLLIYDASTLETGVPSRFSGSGSGTDFTFTISSLQPEDIATYYCQQYDNLPITFGQGTRLEIK

SEQ ID NO: 27869 - DNA, 336 bp, synthetic construct; identical to SEQ ID NO: 25765
  misc_feature 1..336: note = Description of Artificial Sequence: Synthetic polynucleotide
  source 1..336: mol_type = other DNA

SEQ ID NO: 27870 - protein, 112 aa, synthetic construct; identical to SEQ ID NO: 25766
  REGION 1..112: note = Description of Artificial Sequence: Synthetic polypeptide

SEQ ID NO: 27871 - DNA, 324 bp, synthetic construct
  misc_feature 1..324: note = Description of Artificial Sequence: Synthetic polynucleotide
  source 1..324: mol_type = other DNA
gaatttatgttgacgcagtctccaggcaccctgtattggtctccaggggaaagagccaccatctcgagcagggccagtcagagtgttagcagcagctacttagtctggtatcagcagaaacctggccaggctcccaggctcctcatctatggtgcatccaccagggccactggcatcccagacaggttcagtggcagtgggtctgggacagacttcactctcaccatcagcagactggagcctgaatattttgcagtttattactgtcagcagtatggttgctcaccgctcactttcggcggagggaccaaggtggagatcaca

SEQ ID NO: 27872 - protein, 108 aa, synthetic construct
  REGION 1..108: note = Description of Artificial Sequence: Synthetic polypeptide
EFMLTQSPGTLYWSPGERATISSRASQSVSSSYLVWYQQKPGQAPRLLIYGASTRATGIPDRFSGSGSGTDFTLTISRLEPEYFAVYYCQQYGCSPLTFGGGTKVEIT

SEQ ID NO: 27873 - DNA, 324 bp, synthetic construct
  misc_feature 1..324: note = Description of Artificial Sequence: Synthetic polynucleotide
  source 1..324: mol_type = other DNA
gaaattgtgttgacgcagtctccaggcacccggtatttgtctccaggggaaagagccaccctctcatgcagggccagtcagagtgtttacagcagctacttagcctggtaccagcagaaacctggccaggctcccaggctcctcatctatggtgcatccagccgggccactggcatcccagacaggttcagtggcagtgggtctgggacagacttcgctctcaccatcagcagactggagcctgaagattgtgcagtgtattactgtcagcactatgataactcaccgtggacgttcggccgagggaccaaggtggaaatcaaa

SEQ ID NO: 27874 - protein, 108 aa, synthetic construct
  REGION 1..108: note = Description of Artificial Sequence: Synthetic polypeptide
EIVLTQSPGTRYLSPGERATLSCRASQSVYSSYLAWYQQKPGQAPRLLIYGASSRATGIPDRFSGSGSGTDFALTISRLEPEDCAVYYCQHYDNSPWTFGRGTKVEIK

SEQ ID NO: 27875 - DNA, 321 bp, synthetic construct
  misc_feature 1..321: note = Description of Artificial Sequence: Synthetic polynucleotide
  source 1..321: mol_type = other DNA
gacatccagatgacccagtctccgtcttccgtgtctgcttctgtaggagacagagtcatcatcacttgtcgggcgagtcagggcattagcatctggttagcctggtatcagcagaaaccagggaaagcccctaagctcctgatctatgctgcatccagtttgcaaagtggggtcccattaaggttcagcggcagtggatctgggacagatttcactctcaccatcagcagcctgcagcctgaagattttgcaacttactattgtcaacaggctaaaagtttcccgctcactttcggcggagggaccaaggtggagatcaaa

SEQ ID NO: 27876 - protein, 107 aa, synthetic construct
  REGION 1..107: note = Description of Artificial Sequence: Synthetic polypeptide
DIQMTQSPSSVSASVGDRVIITCRASQGISIWLAWYQQKPGKAPKLLIYAASSLQSGVPLRFSGSGSGTDFTLTISSLQPEDFATYYCQQAKSFPLTFGGGTKVEIK

SEQ ID NO: 27877 - DNA, 324 bp, synthetic construct
  misc_feature 1..324: note = Description of Artificial Sequence: Synthetic polynucleotide
  source 1..324: mol_type = other DNA
gaaattgtgttgacgcagtctccaggcaccctgtatttgtctccaggggaaagagccaccctctcatgcagggccagtcagagtgtttacagcagctacttagcctggtaccagcagaaacctggccaggctcccaggctcatcatttatggtgcatccagccggtccactggcataccagacaggttcagtggcagtgggtgtgggacagacttcgctctcaccatcagcagagtggagcatgaagattgtgcagtgtattactgtcagcactatgataactcaccgtggacgttcggccaagggaccaaggtggaaatcaaa

SEQ ID NO: 27878 - protein, 108 aa, synthetic construct
  REGION 1..108: note = Description of Artificial Sequence: Synthetic polypeptide
EIVLTQSPGTLYLSPGERATLSCRASQSVYSSYLAWYQQKPGQAPRLIIYGASSRSTGIPDRFSGSGCGTDFALTISRVEHEDCAVYYCQHYDNSPWTFGQGTKVEIK

SEQ ID NO: 27879 - DNA, 324 bp, synthetic construct
  misc_feature 1..324: note = Description of Artificial Sequence: Synthetic polynucleotide
  source 1..324: mol_type = other DNA
gaaattgtgttgacgcagtctccaggcaccctgtatttgtctccaggggaaagagccaccctctcatgcagggccagtcagagtgtttacagcagctacttagcctggtaccagcagaaacctggccaggctcccaggctcctcatttatggtgcatccagccgggccactggcatcccagacaggttcagtggcagtgggtgtgggacagacttcgctctcaccatcagcagactggagcatgaagattttgcagtgtattactgtcagcactatgataactcaccgtggacgttcggccaagggaccaaggtggaaatcaaa

SEQ ID NO: 27880 - protein, 108 aa, synthetic construct
  REGION 1..108: note = Description of Artificial Sequence: Synthetic polypeptide
EIVLTQSPGTLYLSPGERATLSCRASQSVYSSYLAWYQQKPGQAPRLLIYGASSRATGIPDRFSGSGCGTDFALTISRLEHEDFAVYYCQHYDNSPWTFGQGTKVEIK

SEQ ID NO: 27881 - DNA, 324 bp, synthetic construct
  misc_feature 1..324: note = Description of Artificial Sequence: Synthetic polynucleotide
  source 1..324: mol_type = other DNA
gaaatagtgatgacgcagtctccagccaccctgtttgtgtctccaggggaaagagccaccctctcctgcagggccagtcagagtgttagcagaaatttagcctggttccagcagaaacctggccaggctcccaggctcctcttttatggtgcatccatcagggccactggtatcccagccaggttcagtggcagtgggtctgggacagagttcactctcaccatctacagcctgcagtatgaagattttgcagtttattactgtcagcagtataataactggcctccgctcactttcggcggagggaccaaggtggagatcaaa

SEQ ID NO: 27882 - protein, 108 aa, synthetic construct
  REGION 1..108: note = Description of Artificial Sequence: Synthetic polypeptide
EIVMTQSPATLFVSPGERATLSCRASQSVSRNLAWFQQKPGQAPRLLFYGASIRATGIPARFSGSGSGTEFTLTIYSLQYEDFAVYYCQQYNNWPPLTFGGGTKVEIK

SEQ ID NO: 27883 - DNA, 324 bp, synthetic construct
  misc_feature 1..324: note = Description of Artificial Sequence: Synthetic polynucleotide
  source 1..324: mol_type = other DNA
gaaattgcgttgacgcagtctccaggcaccctgtctttgtctccaggggaaagagccaccctctcctgcagggccagtccgagtgttgacagcagctacttagcctggtaccagcagaaacctggccaggctcccaggctcctcatctatggtgcatccagcagggcccctggcatcccagacaggttcagtggcagtgggtctgggacagacttcactctcaccatcagcagactggagcctgaagattttgcagtgtattactgtcagcagtatgaaagttcaccgtggacgttcggccaagggaccaaggtggaaatcaaa

SEQ ID NO: 27884 - protein, 108 aa, synthetic construct
  REGION 1..108: note = Description of Artificial Sequence: Synthetic polypeptide
EIALTQSPGTLSLSPGERATLSCRASPSVDSSYLAWYQQKPGQAPRLLIYGASSRAPGIPDRFSGSGSGTDFTLTISRLEPEDFAVYYCQQYESSPWTFGQGTKVEIK

SEQ ID NO: 27885 - DNA, 324 bp, synthetic construct
  misc_feature 1..324: note = Description of Artificial Sequence: Synthetic polynucleotide
  source 1..324: mol_type = other DNA
gaaattgtgttgacgcagtctccaggcaccctgtatttgtctccaggggaaagagccaccctgtcatgcagggccagtcagagtgtttacagcagctacttagcctggtaccagcagaaacctggccaggctcccaggctcctcatttatggtgcatccagccgggccactggcatcccagacaggttcagtggcagtgggtctgggacagacttcgctctcaccatcagcagagtggagcctgaagattgtgcagtgtattactgtcagcactatgataactcaccgtggacgttcggccaagggaccaaggtggaaatcaaa

SEQ ID NO: 27886 - protein, 108 aa, synthetic construct
  REGION 1..108: note = Description of Artificial Sequence: Synthetic polypeptide
EIVLTQSPGTLYLSPGERATLSCRASQSVYSSYLAWYQQKPGQAPRLLIYGASSRATGIPDRFSGSGSGTDFALTISRVEPEDCAVYYCQHYDNSPWTFGQGTKVEIK

SEQ ID NO: 27887 - DNA, 321 bp, synthetic construct
  misc_feature 1..321: note = Description of Artificial Sequence: Synthetic polynucleotide
  source 1..321: mol_type = other DNA
gacattcagatgacccaatctccatcctcccggtatgcatctgtaggagacagagtcaccatcaatagccgggcaagtcagggcataagaaatgatttaggctggtatcaacagaaaccagggaaatcccctcagcgcctgatttatgatgcatccagtttgcaaagtggggtcccatcaaggttcagcggcagtggatctgggacagaattcactctcacaatcagcagcgtgcagcctgaagattttggtgtttattactgtatacagcatagtaattacccgctcactttcggcggagggaccaaggtggagatcaaa

SEQ ID NO: 27888 - protein, 107 aa, synthetic construct
  REGION 1..107: note = Description of Artificial Sequence: Synthetic polypeptide
DIQMTQSPSSRYASVGDRVTINSRASQGIRNDLGWYQQKPGKSPQRLIYDASSLQSGVPSRFSGSGSGTEFTLTISSVQPEDFGVYYCIQHSNYPLTFGGGTKVEIK

SEQ ID NO: 27889 - DNA, 324 bp, synthetic construct
  misc_feature 1..324: note = Description of Artificial Sequence: Synthetic polynucleotide
  source 1..324: mol_type = other DNA
gaaattgtgttgacgcagtctccaggcaccctgtctttgtctccaggggaaagagccaccctctcatgcagggccagtcagagtgtttacagcagctacttagcctggtaccagcagaaacctggccaggctcccaggctcctcatttatggtgcatccagccggtccactggcatcccagacaggttcagtggcagtgggtgtgggacagacttcgctctcaccatcagcagactggagcctgaagattttgcagtgtattactgtcagcactctgataactcaccgtggacgttcggccaagggaccaaggtggaaatcaaa

SEQ ID NO: 27890 - protein, 108 aa, synthetic construct
  REGION 1..108: note = Description of Artificial Sequence: Synthetic polypeptide
EIVLTQSPGTLSLSPGERATLSCRASQSVYSSYLAWYQQKPGQAPRLLIYGASSRSTGIPDRFSGSGCGTDFALTISRLEPEDFAVYYCQHSDNSPWTFGQGTKVEIK

SEQ ID NO: 27891 - DNA, 339 bp, synthetic construct
  misc_feature 1..339: note = Description of Artificial Sequence: Synthetic polynucleotide
  source 1..339: mol_type = other DNA
gacatcgtgatgacccagtctccagacttcctggctgtgtctctgggcgagagggccaccaccaattgtaagtccagccagagtgttttacacaggtccaacaattacaactacttagcgtggtaccagcagaaaccaggacagcctcctaagctgctcatttactgggcatctacccgggaatccggggtccctgaccgattcagtggcagcgggtctgggacagatttcactctcaccatcagcagcctgcaggctgaagatgtggcagtttattactgtcagcaatattatagtactcctccgacgttcggccaagggaccaaggtggaaatcaaa

SEQ ID NO: 27892 - protein, 113 aa, synthetic construct
  REGION 1..113: note = Description of Artificial Sequence: Synthetic polypeptide
DIVMTQSPDFLAVSLGERATTNCKSSQSVLHRSNNYNYLAWYQQKPGQPPKLLIYWASTRESGVPDRFSGSGSGTDFTLTISSLQAEDVAVYYCQQYYSTPPTFGQGTKVEIK

SEQ ID NO: 27893 - DNA, 339 bp, synthetic construct
  misc_feature 1..339: note = Description of Artificial Sequence: Synthetic polynucleotide
  source 1..339: mol_type = other DNA
gacatcgtgatgacccagtgtccagactccccggctgtgtctctgggcgagagggcctccatcaattgcaagtccagccagagtattttacacagctccaacaattacaattacttagcttggtaccagcagaaaccaggacatcctcataagctgctcatttactgggcatctacccgggaatccggggtccctgaccgattcagtggcagcgggtatgggacagatttcactctaaccatcagcagcctgcaggctgaagatgtggcagtttattactgtcagcaatattatagtactccgtggacgttcggccaagggaccaaggtggaaatcaaa

SEQ ID NO: 27894 - protein, 113 aa, synthetic construct
  REGION 1..113: note = Description of Artificial Sequence: Synthetic polypeptide
DIVMTQCPDSPAVSLGERASINCKSSQSILHSSNNYNYLAWYQQKPGHPHKLLIYWASTRESGVPDRFSGSGYGTDFTLTISSLQAEDVAVYYCQQYYSTPWTFGQGTKVEIK

SEQ ID NO: 27895 - DNA, 339 bp, synthetic construct; identical to SEQ ID NO: 25719
  misc_feature 1..339: note = Description of Artificial Sequence: Synthetic polynucleotide
  source 1..339: mol_type = other DNA

SEQ ID NO: 27896 - protein, 113 aa, synthetic construct; identical to SEQ ID NO: 25720
  REGION 1..113: note = Description of Artificial Sequence: Synthetic polypeptide

SEQ ID NO: 27897 - DNA, 324 bp, synthetic construct
  misc_feature 1..324: note = Description of Artificial Sequence: Synthetic polynucleotide
  source 1..324: mol_type = other DNA
gaaattgtgttgacgcagtctccaggcaccctgtctttgtctccaggggaaagagccaccctctcatgcagggccagtcagagtgtttacagcagctacttagcctggtaccagcagaaacctggccaggctcccaggctcctcatttatggtgcatccagccgggccactggcatcccagacaggttcagtggcagtgggtgtgggacagacttcgctctcaccatcagcagactggagcctgaagattttgcagtgtattactgtcagcattatgataactcaccgtggacgttcggccaagggaccaaggtggaaatcaaa

SEQ ID NO: 27898 - protein, 108 aa, synthetic construct
  REGION 1..108: note = Description of Artificial Sequence: Synthetic polypeptide
EIVLTQSPGTLSLSPGERATLSCRASQSVYSSYLAWYQQKPGQAPRLLIYGASSRATGIPDRFSGSGCGTDFALTISRLEPEDFAVYYCQHYDNSPWTFGQGTKVEIK

SEQ ID NO: 27899 - DNA, 336 bp, synthetic construct
  misc_feature 1..336: note = Description of Artificial Sequence: Synthetic polynucleotide
  source 1..336: mol_type = other DNA
gatattgtgatgactcagtctccactctccctgcccgtcacccctggagagccggcctccatctcatgcaggtctagtcagagcctcgtgcatagtagtggatacaactatttggattggtacctgcagaagccagggcagtctccacagctcgttatctatttgggttctaatcgggcctccggggtccctgacaggttcagtggcagtggatcaggctcagattttacactgaagatcagcagagtggaggctgaggatgttggactttattactgcatgcaagctctacaccctcctctcactttcggcggagggaccaaggtggagatcaaa

SEQ ID NO: 27900 - protein, 112 aa, synthetic construct
  REGION 1..112: note = Description of Artificial Sequence: Synthetic polypeptide
DIVMTQSPLSLPVTPGEPASISCRSSQSLVHSSGYNYLDWYLQKPGQSPQLVIYLGSNRASGVPDRFSGSGSGSDFTLKISRVEAEDVGLYYCMQALHPPLTFGGGTKVEIK

SEQ ID NO: 27901 - DNA, 324 bp, synthetic construct
  misc_feature 1..324: note = Description of Artificial Sequence: Synthetic polynucleotide
  source 1..324: mol_type = other DNA
gaatttatgttgacgcagtctccaggcaccctgtctttgtctccaggggaaagagccaccctctcctgcagggccagtcagagtgttagcagcagctacttagtctggtatcagcagaaacctggccaggctcccaggctcctcatctatggtgcatccaccagggccactggcatcccagacaggttcagtggcagtgggtctgggacagacttcactctcaccatcagcagactggagcctgaatattttgcagtttattactgtcagcagtatggttgctcaccgctcactttcggcggagggaccaaggtggagatcaca

SEQ ID NO: 27902 - protein, 108 aa, synthetic construct; identical to SEQ ID NO: 25746
  REGION 1..108: note = Description of Artificial Sequence: Synthetic polypeptide

SEQ ID NO: 27903 - DNA, 339 bp, synthetic construct
  misc_feature 1..339: note = Description of Artificial Sequence: Synthetic polynucleotide
  source 1..339: mol_type = other DNA
gacatcgtgatgacccagtctccagactccctggctgtgtctctgggcgagagggccaccatcaactgcaagtccagccagagtgttttacacagctccaacaataagaactacttaacttggtaccagcagaaaccaggacagcctcataagctgctcatttactgggcatctactcgggaatccggggtccctgaccgattcagtggcagcgggtctgggacagatttcagtctcacgatcggcagcctgcaggctgaagatgtggcagtttattactgtcagcaatattatagtattcctccgacgttcggccaagggaccaaggtggaaatcaaa

SEQ ID NO: 27904 - protein, 113 aa, synthetic construct
  REGION 1..113: note = Description of Artificial Sequence: Synthetic polypeptide
DIVMTQSPDSLAVSLGERATINCKSSQSVLHSSNNKNYLTWYQQKPGQPHKLLIYWASTRESGVPDRFSGSGSGTDFSLTIGSLQAEDVAVYYCQQYYSIPPTFGQGTKVEIK

SEQ ID NO: 27905 - DNA, 321 bp, synthetic construct
  misc_feature 1..321: note = Description of Artificial Sequence: Synthetic polynucleotide
  source 1..321: mol_type = other DNA
gaaattgtgttgacgcagtctccaggcaccctgtctttgtctccaggggaaagagccaccctctcctgcagggccagtcagagttttagcagcagctacttagcctggtaccagcagaaacctggccaggctcccaggctcctcatttatggtgcatccagcagggccactggcatcccagacaggttcagtggcagtgggtctgggacagacttcactctcaccatcagcagactggagcctgaagattttgcagtgtattactgtcagcagtatggtagctcaaggacgttcggccaagggaccaaggtggaaatcaaa

SEQ ID NO: 27906 - protein, 107 aa, synthetic construct
  REGION 1..107: note = Description of Artificial Sequence: Synthetic polypeptide
EIVLTQSPGTLSLSPGERATLSCRASQSFSSSYLAWYQQKPGQAPRLLIYGASSRATGIPDRFSGSGSGTDFTLTISRLEPEDFAVYYCQQYGSSRTFGQGTKVEIK

SEQ ID NO: 27907 - DNA, 321 bp, synthetic construct; identical to SEQ ID NO: 27073
  misc_feature 1..321: note = Description of Artificial Sequence: Synthetic polynucleotide
  source 1..321: mol_type = other DNA

SEQ ID NO: 27908 - protein, 107 aa, synthetic construct; identical to SEQ ID NO: 27074
  REGION 1..107: note = Description of Artificial Sequence: Synthetic polypeptide

SEQ ID NO: 27909 - DNA, 339 bp, synthetic construct; identical to SEQ ID NO: 24515
  misc_feature 1..339: note = Description of Artificial Sequence: Synthetic polynucleotide
  source 1..339: mol_type = other DNA

SEQ ID NO: 27910 - protein, 113 aa, synthetic construct; identical to SEQ ID NO: 24516
  REGION 1..113: note = Description of Artificial Sequence: Synthetic polypeptide

SEQ ID NO: 27911 - DNA, 339 bp, synthetic construct; identical to SEQ ID NO: 24515
  misc_feature 1..339: note = Description of Artificial Sequence: Synthetic polynucleotide
  source 1..339: mol_type = other DNA

SEQ ID NO: 27912 - protein, 113 aa, synthetic construct; identical to SEQ ID NO: 24516
  REGION 1..113: note = Description of Artificial Sequence: Synthetic polypeptide

SEQ ID NO: 27913 - DNA, 339 bp, synthetic construct; identical to SEQ ID NO: 24515
  misc_feature 1..339: note = Description of Artificial Sequence: Synthetic polynucleotide
  source 1..339: mol_type = other DNA

SEQ ID NO: 27914 - protein, 113 aa, synthetic construct; identical to SEQ ID NO: 24516
  REGION 1..113: note = Description of Artificial Sequence: Synthetic polypeptide

SEQ ID NO: 27915 - DNA, 339 bp, synthetic construct; identical to SEQ ID NO: 24515
  misc_feature 1..339: note = Description of Artificial Sequence: Synthetic polynucleotide
  source 1..339: mol_type = other DNA

SEQ ID NO: 27916 - protein, 113 aa, synthetic construct; identical to SEQ ID NO: 24516
  REGION 1..113: note = Description of Artificial Sequence: Synthetic polypeptide

SEQ ID NO: 27917 - DNA, 339 bp, synthetic construct
  misc_feature 1..339: note = Description of Artificial Sequence: Synthetic polynucleotide
  source 1..339: mol_type = other DNA
gacatcgtgatgacccagtctccagactccctggctgtgtctctgggcgagagggccaccatcaagtgtaagtccagccagagtgttttatacagctcccacaataacaactacttagcttggtaccagcagaaaccaggacagcctcctaagttgctcctttactgggcatctacccgggaatccggggtccctgaccgattcagtggcagcgggtctgggacagaattcactctcaccatcagcagcctgcaggctgaagatgtggcagtttattactgtcagcagtattatagtactcctccgacgttcggccaagggaccaaggtggaaatcaaa

SEQ ID NO: 27918 - protein, 113 aa, synthetic construct
  REGION 1..113: note = Description of Artificial Sequence: Synthetic polypeptide
DIVMTQSPDSLAVSLGERATIKCKSSQSVLYSSHNNNYLAWYQQKPGQPPKLLLYWASTRESGVPDRFSGSGSGTEFTLTISSLQAEDVAVYYCQQYYSTPPTFGQGTKVEIK

SEQ ID NO: 27919 - DNA, 339 bp, synthetic construct; identical to SEQ ID NO: 27917
  misc_feature 1..339: note = Description of Artificial Sequence: Synthetic polynucleotide
  source 1..339: mol_type = other DNA

SEQ ID NO: 27920 - protein, 113 aa, synthetic construct; identical to SEQ ID NO: 27918
  REGION 1..113: note = Description of Artificial Sequence: Synthetic polypeptide

SEQ ID NO: 27921 - DNA, 339 bp, synthetic construct; identical to SEQ ID NO: 27917
  misc_feature 1..339: note = Description of Artificial Sequence: Synthetic polynucleotide
  source 1..339: mol_type = other DNA

SEQ ID NO: 27922 - protein, 113 aa, synthetic construct; identical to SEQ ID NO: 27918
  REGION 1..113: note = Description of Artificial Sequence: Synthetic polypeptide

SEQ ID NO: 27923 - DNA, 339 bp, synthetic construct; identical to SEQ ID NO: 27917
  misc_feature 1..339: note = Description of Artificial Sequence: Synthetic polynucleotide
  source 1..339: mol_type = other DNA

SEQ ID NO: 27924 - protein, 113 aa, synthetic construct; identical to SEQ ID NO: 27918
  REGION 1..113: note = Description of Artificial Sequence: Synthetic polypeptide

SEQ ID NO: 27925 - DNA, 339 bp, synthetic construct
  misc_feature 1..339: note = Description of Artificial Sequence: Synthetic polynucleotide
  source 1..339: mol_type = other DNA
gacatcgtgatgacccagtttccagactccctggctgtgtctctgggcgagagggccaccatcaagtgtaagtccagccagagtgttttatacagctcccacaataacaactacttagcttggtaccagcagaaaccaggacagcctcctaagttgctcctttactgggcatctacccgggaatccggggtccctgaccgattcagtggcagcgggtctgggacagaattcactctcaccatcagcagcctgcaggctgaagatgtggcagtttattactgtcagcagtattatagtactcctccgacgttcggccaagggaccaaggtggaaatcaaa

SEQ ID NO: 27926 - protein, 113 aa, synthetic construct
  REGION 1..113: note = Description of Artificial Sequence: Synthetic polypeptide
DIVMTQFPDSLAVSLGERATIKCKSSQSVLYSSHNNNYLAWYQQKPGQPPKLLLYWASTRESGVPDRFSGSGSGTEFTLTISSLQAEDVAVYYCQQYYSTPPTFGQGTKVEIK

SEQ ID NO: 27927 - DNA, 339 bp, synthetic construct
  misc_feature 1..339: note = Description of Artificial Sequence: Synthetic polynucleotide
  source 1..339: mol_type = other DNA
gacatcgtgatgacccagtctccagactccctggctgtgtctctgggcgagagggccaccatcaactgtaagtccagccagagtgttttatacagctcccacaataacaactacttagcttggtaccagcagaaaccaggacagcctcctaagttgctcctttactgggcatctacccgggaatccggggtccctgaccgattcagtggcagcgggtctgggacagaattcactctcaccatcagcagcctggaggctgaagatgtggcagtttattactgtcagcagtattatagtactcctccgacgttcggccaagggaccaaggtggaaatcaaa

SEQ ID NO: 27928 - protein, 113 aa, synthetic construct
  REGION 1..113: note = Description of Artificial Sequence: Synthetic polypeptide
DIVMTQSPDSLAVSLGERATINCKSSQSVLYSSHNNNYLAWYQQKPGQPPKLLLYWASTRESGVPDRFSGSGSGTEFTLTISSLEAEDVAVYYCQQYYSTPPTFGQGTKVEIK

SEQ ID NO: 27929 - DNA, 339 bp, synthetic construct
  misc_feature 1..339: note = Description of Artificial Sequence: Synthetic polynucleotide
  source 1..339: mol_type = other DNA
gacatcgtgatgacccagtctccagactccctggctgtgtctctgggcgagagggccaccatcaactgtaagtccagccagagtgttttatacagctcccacaataacaactacttagcttggtaccagcagaaaccaggacagcctcctaagttgctcctttactgggcatctacccgggaatccggggtccctgaccgattcagtggcagcgggtctgggacagaattcactctcaccatcagcagcctgcaggctgaagatgtggcagtttattactgtcagcagtattatagtactcctccgacgttcggccaagggaccaaggtggaaatcaaa

SEQ ID NO: 27930 - protein, 113 aa, synthetic construct
  REGION 1..113: note = Description of Artificial Sequence: Synthetic polypeptide
DIVMTQSPDSLAVSLGERATINCKSSQSVLYSSHNNNYLAWYQQKPGQPPKLLLYWASTRESGVPDRFSGSGSGTEFTLTISSLQAEDVAVYYCQQYYSTPPTFGQGTKVEIK

SEQ ID NO: 27931 - DNA, 339 bp, synthetic construct; identical to SEQ ID NO: 27929
  misc_feature 1..339: note = Description of Artificial Sequence: Synthetic polynucleotide
  source 1..339: mol_type = other DNA

SEQ ID NO: 27932 - protein, 113 aa, synthetic construct; identical to SEQ ID NO: 27930
  REGION 1..113: note = Description of Artificial Sequence: Synthetic polypeptide

SEQ ID NO: 27933 - DNA, 339 bp, synthetic construct
  misc_feature 1..339: note = Description of Artificial Sequence: Synthetic polynucleotide
  source 1..339: mol_type = other DNA
gacatcgtgatgacccagtctccagactccctggctgtgtctctgggcgagagggccaccatcaactgcaagtccagccagagtattttacacagctccaacaataacaactacttagcttggttccagcagaaaccaggacagcctcctaaactgctcctttactgggcatctacccgggaatccggggtccctgaccgattcagtggcagcgggtctgggacagatttcactctcaccatcagcagcctgcagcctgaagatgtggcagtttattactgtcagcaatattatagtactccagtcactttcggccctgggaccaaagtgggtatcaaa

SEQ ID NO: 27934 - protein, 113 aa, synthetic construct
  REGION 1..113: note = Description of Artificial Sequence: Synthetic polypeptide
DIVMTQSPDSLAVSLGERATINCKSSQSILHSSNNNNYLAWFQQKPGQPPKLLLYWASTRESGVPDRFSGSGSGTDFTLTISSLQPEDVAVYYCQQYYSTPVTFGPGTKVGIK

SEQ ID NO: 27935 - DNA, 339 bp, synthetic construct
  misc_feature 1..339: note = Description of Artificial Sequence: Synthetic polynucleotide
  source 1..339: mol_type = other DNA
gacatcgtgatgacccagtctccagactccctggctgtgtctctgggcgagagggccaccatcaactgcaagtccagccagagtattttacacagctccaacaataacaactacttagcttggttccagcagaaaccaggacagcctcctaaactgctcctttactgggcatctacccgggaatccggggtccctgaccgattcagtggcagcgggtctgggacagatttcactctcaccatcagcagcctgcagcctgaagatgtggcagtttattactgtcagcaatattataatgctccagtcactttcggccctgggaccaaagtgggtatcaaa

SEQ ID NO: 27936 - protein, 113 aa, synthetic construct
  REGION 1..113: note = Description of Artificial Sequence: Synthetic polypeptide
DIVMTQSPDSLAVSLGERATINCKSSQSILHSSNNNNYLAWFQQKPGQPPKLLLYWASTRESGVPDRFSGSGSGTDFTLTISSLQPEDVAVYYCQQYYNAPVTFGPGTKVGIK

SEQ ID NO: 27937 - DNA, 339 bp, synthetic construct
  misc_feature 1..339: note = Description of Artificial Sequence: Synthetic polynucleotide
  source 1..339: mol_type = other DNA
gacatcgtgatgacccagtctccagactccctggctgtgtctctgggcgagagggccaccatcaactgcaagtccagccagagtattttacacagctccaacaataacaactacttagcttggttccagcagaaaccaggacagcctcctaaactgctcctttactgggcatctacccgggaatccggggtccctgaccgattcagtggcagcgggtctgggacagatttcactctcaccatcagcagcctgcagcctgaagatgtggcagtttattactgtcagcaatattatcaaactccagtcactttcggccctgggaccaaagtgggtatcaaa

SEQ ID NO: 27938 - protein, 113 aa, synthetic construct
  REGION 1..113: note = Description of Artificial Sequence: Synthetic polypeptide
DIVMTQSPDSLAVSLGERATINCKSSQSILHSSNNNNYLAWFQQKPGQPPKLLLYWASTRESGVPDRFSGSGSGTDFTLTISSLQPEDVAVYYCQQYYQTPVTFGPGTKVGIK

SEQ ID NO: 27939 - DNA, 339 bp, synthetic construct; identical to SEQ ID NO: 25163
  misc_feature 1..339: note = Description of Artificial Sequence: Synthetic polynucleotide
  source 1..339: mol_type = other DNA

SEQ ID NO: 27940 - protein, 113 aa, synthetic construct; identical to SEQ ID NO: 25164
  REGION 1..113: note = Description of Artificial Sequence: Synthetic polypeptide

SEQ ID NO: 27941 - DNA, 339 bp, synthetic construct; identical to SEQ ID NO: 25163
  misc_feature 1..339: note = Description of Artificial Sequence: Synthetic polynucleotide
  source 1..339: mol_type = other DNA

SEQ ID NO: 27942 - protein, 113 aa, synthetic construct; identical to SEQ ID NO: 25164
  REGION 1..113: note = Description of Artificial Sequence: Synthetic polypeptide

SEQ ID NO: 27943 - DNA, 339 bp, synthetic construct; identical to SEQ ID NO: 25163
  misc_feature 1..339: note = Description of Artificial Sequence: Synthetic polynucleotide
  source 1..339: mol_type = other DNA

SEQ ID NO: 27944 - protein, 113 aa, synthetic construct; identical to SEQ ID NO: 25164
  REGION 1..113: note = Description of Artificial Sequence: Synthetic polypeptide

SEQ ID NO: 27945 - DNA, 339 bp, synthetic construct; identical to SEQ ID NO: 27933
  misc_feature 1..339: note = Description of Artificial Sequence: Synthetic polynucleotide
  source 1..339: mol_type = other DNA

SEQ ID NO: 27946 - protein, 113 aa, synthetic construct; identical to SEQ ID NO: 27934
  REGION 1..113: note = Description of Artificial Sequence: Synthetic polypeptide

SEQ ID NO: 27947 - DNA, 339 bp, synthetic construct; identical to SEQ ID NO: 27933
  misc_feature 1..339: note = Description of Artificial Sequence: Synthetic polynucleotide
  source 1..339: mol_type = other DNA

SEQ ID NO: 27948 - protein, 113 aa, synthetic construct; identical to SEQ ID NO: 27934
  REGION 1..113: note = Description of Artificial Sequence: Synthetic polypeptide

SEQ ID NO: 27949 - DNA, 339 bp, synthetic construct; identical to SEQ ID NO: 27935
  misc_feature 1..339: note = Description of Artificial Sequence: Synthetic polynucleotide
  source 1..339: mol_type = other DNA

SEQ ID NO: 27950 - protein, 113 aa, synthetic construct; identical to SEQ ID NO: 27936
  REGION 1..113: note = Description of Artificial Sequence: Synthetic polypeptide

SEQ ID NO: 27951 - DNA, 339 bp, synthetic construct; identical to SEQ ID NO: 27937
  misc_feature 1..339: note = Description of Artificial Sequence: Synthetic polynucleotide
  source 1..339: mol_type = other DNA

SEQ ID NO: 27952 - protein, 113 aa, synthetic construct; identical to SEQ ID NO: 27938
  REGION 1..113: note = Description of Artificial Sequence: Synthetic polypeptide

SEQ ID NO: 27953 - DNA, 339 bp, synthetic construct; identical to SEQ ID NO: 27937
  misc_feature 1..339: note = Description of Artificial Sequence: Synthetic polynucleotide
  source 1..339: mol_type = other DNA

SEQ ID NO: 27954 - protein, 113 aa, synthetic construct; identical to SEQ ID NO: 27938
  REGION 1..113: note = Description of Artificial Sequence: Synthetic polypeptide

SEQ ID NO: 27955 - DNA, 339 bp, synthetic construct; identical to SEQ ID NO: 27937
  misc_feature 1..339: note = Description of Artificial Sequence: Synthetic polynucleotide
  source 1..339: mol_type = other DNA

SEQ ID NO: 27956 - protein, 113 aa, synthetic construct; identical to SEQ ID NO: 27938
  REGION 1..113: note = Description of Artificial Sequence: Synthetic polypeptide

SEQ ID NO: 27957 - DNA, 339 bp, synthetic construct; identical to SEQ ID NO: 27933
  misc_feature 1..339: note = Description of Artificial Sequence: Synthetic polynucleotide
  source 1..339: mol_type = other DNA

SEQ ID NO: 27958 - protein, 113 aa, synthetic construct; identical to SEQ ID NO: 27934
  REGION 1..113: note = Description of Artificial Sequence: Synthetic polypeptide

SEQ ID NO: 27959 - DNA, 339 bp, synthetic construct
  misc_feature 1..339: note = Description of Artificial Sequence: Synthetic polynucleotide
  source 1..339: mol_type = other DNA
gacatcgtgatgacccagtctccagactccctggctgtgtctctgggcgagagggccaccatcaactgcaagtccagccagagtattttacacagctccaacaataacaactacttagcttggttccagcagaaaccaggacagcctcctaaactgctcctttactgggcatctacccgggaatccggggtccctgaccgattcagtggcagcgggtctgggacagatttcactctcaccatcagcagcctgcagcctgaagatgtggcagtttattactgtcagcaatattatagtactccagtcactttcggccaagggaccaaagtggaaatcaaa

SEQ ID NO: 27960 - protein, 113 aa, synthetic construct
  REGION 1..113: note = Description of Artificial Sequence: Synthetic polypeptide
DIVMTQSPDSLAVSLGERATINCKSSQSILHSSNNNNYLAWFQQKPGQPPKLLLYWASTRESGVPDRFSGSGSGTDFTLTISSLQPEDVAVYYCQQYYSTPVTFGQGTKVEIK

SEQ ID NO: 27961 - DNA, 339 bp, synthetic construct; identical to SEQ ID NO: 27933
  misc_feature 1..339: note = Description of Artificial Sequence: Synthetic polynucleotide
  source 1..339: mol_type = other DNA

SEQ ID NO: 27962 - protein, 113 aa, synthetic construct; identical to SEQ ID NO: 27934
  REGION 1..113: note = Description of Artificial Sequence: Synthetic polypeptide

SEQ ID NO: 27963 - DNA, 339 bp, synthetic construct; identical to SEQ ID NO: 27959
  misc_feature 1..339: note = Description of Artificial Sequence: Synthetic polynucleotide
  source 1..339: mol_type = other DNA

SEQ ID NO: 27964 - protein, 113 aa, synthetic construct; identical to SEQ ID NO: 27960
  REGION 1..113: note = Description of Artificial Sequence: Synthetic polypeptide

SEQ ID NO: 27965 - DNA, 339 bp, synthetic construct; identical to SEQ ID NO: 27959
  misc_feature 1..339: note = Description of Artificial Sequence: Synthetic polynucleotide
  source 1..339: mol_type = other DNA

SEQ ID NO: 27966 - protein, 113 aa, synthetic construct; identical to SEQ ID NO: 27960
  REGION 1..113: note = Description of Artificial Sequence: Synthetic polypeptide

SEQ ID NO: 27967 - DNA, 339 bp, synthetic construct
  misc_feature 1..339: note = Description of Artificial Sequence: Synthetic polynucleotide
  source 1..339: mol_type = other DNA
gacatcgtgatgacccagtctccagactccctggctgtgtctctgggcgagagggccaccatcaactgcaagtccagccagagtattttacacagctccaacaataacaactacttagcttggttccagcagaaaccaggacagcctcctaaactgctcctttactgggcatctacccgggaatccggggtccctgaccgattcagtggcagcgggtctgggacagatttcactctcaccatcagcagcctgcagcctgaagatgtggcagtttattactgtcagcaatattataatactccagtcactttcggccctgggaccaaagtggaaatcaaa

SEQ ID NO: 27968 - protein, 113 aa, synthetic construct
  REGION 1..113: note = Description of Artificial Sequence: Synthetic polypeptide
DIVMTQSPDSLAVSLGERATINCKSSQSILHSSNNNNYLAWFQQKPGQPPKLLLYWASTRESGVPDRFSGSGSGTDFTLTISSLQPEDVAVYYCQQYYNTPVTFGPGTKVEIK

SEQ ID NO: 27969 - DNA, 321 bp, synthetic construct; identical to SEQ ID NO: 24929
  misc_feature 1..321: note = Description of Artificial Sequence: Synthetic polynucleotide
  source 1..321: mol_type = other DNA

SEQ ID NO: 27970 - protein, 107 aa, synthetic construct; identical to SEQ ID NO: 24930
  REGION 1..107: note = Description of Artificial Sequence: Synthetic polypeptide

SEQ ID NO: 27971 - DNA, 321 bp, synthetic construct
  misc_feature 1..321: note = Description of Artificial Sequence: Synthetic polynucleotide
  source 1..321: mol_type = other DNA
gacatccagatgacccagtctccatcttccgtgtctgcatctgtaggagatagagtcaccatcacttgtcgggcgagtcagggtattagcaggtggttagcctggtatcagcagaaaccagggaaagcccctaagctcctgatctatggtgcatccagtttgcaaagtggggtcccatcaaggttcagcggcagtggatctgggacagatttcactctcaccatcagcagcctgcagcctgaagattttgcaatttattattgtcaacaggctaacagtttcccattcactttcggccaagggaccaaagtggatatcaaa

SEQ ID NO: 27972 - protein, 107 aa, synthetic construct
  REGION 1..107: note = Description of Artificial Sequence: Synthetic polypeptide
DIQMTQSPSSVSASVGDRVTITCRASQGISRWLAWYQQKPGKAPKLLIYGASSLQSGVPSRFSGSGSGTDFTLTISSLQPEDFAIYYCQQANSFPFTFGQGTKVDIK

SEQ ID NO: 27973 - DNA, 321 bp, synthetic construct
  misc_feature 1..321: note = Description of Artificial Sequence: Synthetic polynucleotide
  source 1..321: mol_type = other DNA
gacatccagatgacccagtctccatcttccgtgtctgcatctgtaggagacagagtcaccatcacttgtcgggcgagtcagggtattagcaggtggttagcctggtatcagcagaaaccagggaaagcccctaagctcctgatctatggtgcatccagtttgcaaagtggggtcccatcaaggttcagcggcagtggatctgggacagatttcactctcaccatcagcagcctgcagcctgaagattttgcaacttattattgtcaacaggctaacagtttcccattcactttcggccaagggaccaaagtggatatcaaa

SEQ ID NO: 27974 - protein, 107 aa, synthetic construct
  REGION 1..107: note = Description of Artificial Sequence: Synthetic polypeptide
DIQMTQSPSSVSASVGDRVTITCRASQGISRWLAWYQQKPGKAPKLLIYGASSLQSGVPSRFSGSGSGTDFTLTISSLQPEDFATYYCQQANSFPFTFGQGTKVDIK

SEQ ID NO: 27975 - DNA, 321 bp, synthetic construct; identical to SEQ ID NO: 24929
  misc_feature 1..321: note = Description of Artificial Sequence: Synthetic polynucleotide
  source 1..321: mol_type = other DNA

SEQ ID NO: 27976 - protein, 107 aa, synthetic construct; identical to SEQ ID NO: 24930
  REGION 1..107: note = Description of Artificial Sequence: Synthetic polypeptide

SEQ ID NO: 27977 - DNA, 321 bp, synthetic construct; identical to SEQ ID NO: 24929
  misc_feature 1..321: note = Description of Artificial Sequence: Synthetic polynucleotide
  source 1..321: mol_type = other DNA

SEQ ID NO: 27978 - protein, 107 aa, synthetic construct; identical to SEQ ID NO: 24930
  REGION 1..107: note = Description of Artificial Sequence: Synthetic polypeptide

SEQ ID NO: 27979 - DNA, 321 bp, synthetic construct; identical to SEQ ID NO: 27971
  misc_feature 1..321: note = Description of Artificial Sequence: Synthetic polynucleotide
  source 1..321: mol_type = other DNA

SEQ ID NO: 27980 - protein, 107 aa, synthetic construct; identical to SEQ ID NO: 27972
  REGION 1..107: note = Description of Artificial Sequence: Synthetic polypeptide

SEQ ID NO: 27981 - DNA, 321 bp, synthetic construct; identical to SEQ ID NO: 27971
  misc_feature 1..321: note = Description of Artificial Sequence: Synthetic polynucleotide
  source 1..321: mol_type = other DNA

SEQ ID NO: 27982 - protein, 107 aa, synthetic construct; identical to SEQ ID NO: 27972
  REGION 1..107: note = Description of Artificial Sequence: Synthetic polypeptide

SEQ ID NO: 27983 - DNA, 321 bp, synthetic construct; identical to SEQ ID NO: 27973
  misc_feature 1..321: note = Description of Artificial Sequence: Synthetic polynucleotide
  source 1..321: mol_type = other DNA

SEQ ID NO: 27984 - protein, 107 aa, synthetic construct; identical to SEQ ID NO: 27974
  REGION 1..107: note = Description of Artificial Sequence: Synthetic polypeptide

SEQ ID NO: 27985 - DNA, 321 bp, synthetic construct; identical to SEQ ID NO: 25009
  misc_feature 1..321: note = Description of Artificial Sequence: Synthetic polynucleotide
  source 1..321: mol_type = other DNA

SEQ ID NO: 27986 - protein, 107 aa, synthetic construct; identical to SEQ ID NO: 25010
  REGION 1..107: note = Description of Artificial Sequence: Synthetic polypeptide

SEQ ID NO: 27987 - DNA, 321 bp, synthetic construct; identical to SEQ ID NO: 25009
  misc_feature 1..321: note = Description of Artificial Sequence: Synthetic polynucleotide
  source 1..321: mol_type = other DNA

SEQ ID NO: 27988 - protein, 107 aa, synthetic construct; identical to SEQ ID NO: 25010
  REGION 1..107: note = Description of Artificial Sequence: Synthetic polypeptide

SEQ ID NO: 27989 - DNA, 321 bp, synthetic construct; identical to SEQ ID NO: 25009
  misc_feature 1..321: note = Description of Artificial Sequence: Synthetic polynucleotide
  source 1..321: mol_type = other DNA

SEQ ID NO: 27990 - protein, 107 aa, synthetic construct; identical to SEQ ID NO: 25010
  REGION 1..107: note = Description of Artificial Sequence: Synthetic polypeptide

SEQ ID NO: 27991 - DNA, 321 bp, synthetic construct; identical to SEQ ID NO: 25009
  misc_feature 1..321: note = Description of Artificial Sequence: Synthetic polynucleotide
  source 1..321: mol_type = other DNA

SEQ ID NO: 27992 - protein, 107 aa, synthetic construct; identical to SEQ ID NO: 25010
  REGION 1..107: note = Description of Artificial Sequence: Synthetic polypeptide

SEQ ID NO: 27993 - DNA, 321 bp, synthetic construct; identical to SEQ ID NO: 25009
  misc_feature 1..321: note = Description of Artificial Sequence: Synthetic polynucleotide
  source 1..321: mol_type = other DNA

SEQ ID NO: 27994 - protein, 107 aa, synthetic construct; identical to SEQ ID NO: 25010
  REGION 1..107: note = Description of Artificial Sequence: Synthetic polypeptide

SEQ ID NO: 27995 - DNA, 321 bp, synthetic construct; identical to SEQ ID NO: 25009
  misc_feature 1..321: note = Description of Artificial Sequence: Synthetic polynucleotide
  source 1..321: mol_type = other DNA

SEQ ID NO: 27996 - protein, 107 aa, synthetic construct; identical to SEQ ID NO: 25010
  REGION 1..107: note = Description of Artificial Sequence: Synthetic polypeptide

SEQ ID NO: 27997 - DNA, 321 bp, synthetic construct; identical to SEQ ID NO: 25009
  misc_feature 1..321: note = Description of Artificial Sequence: Synthetic polynucleotide
  source 1..321: mol_type = other DNA

SEQ ID NO: 27998 - protein, 107 aa, synthetic construct; identical to SEQ ID NO: 25010
  REGION 1..107: note = Description of Artificial Sequence: Synthetic polypeptide

SEQ ID NO: 27999 - DNA, 321 bp, synthetic construct; identical to SEQ ID NO: 25009
  misc_feature 1..321: note = Description of Artificial Sequence: Synthetic polynucleotide
  source 1..321: mol_type = other DNA

SEQ ID NO: 28000 - protein, 107 aa, synthetic construct; identical to SEQ ID NO: 25010
  REGION 1..107: note = Description of Artificial Sequence: Synthetic polypeptide

SEQ ID NO: 28001 - DNA, 321 bp, synthetic construct; identical to SEQ ID NO: 25009
  misc_feature 1..321: note = Description of Artificial Sequence: Synthetic polynucleotide
  source 1..321: mol_type = other DNA

SEQ ID NO: 28002 - protein, 107 aa, synthetic construct; identical to SEQ ID NO: 25010
  REGION 1..107: note = Description of Artificial Sequence: Synthetic polypeptide

SEQ ID NO: 28003 - DNA, 321 bp, synthetic construct; identical to SEQ ID NO: 25009
  misc_feature 1..321: note = Description of Artificial Sequence: Synthetic polynucleotide
  source 1..321: mol_type = other DNA

SEQ ID NO: 28004 - protein, 107 aa, synthetic construct; identical to SEQ ID NO: 25010
  REGION 1..107: note = Description of Artificial Sequence: Synthetic polypeptide

SEQ ID NO: 28005 - DNA, 321 bp, synthetic construct; identical to SEQ ID NO: 25009
  misc_feature 1..321: note = Description of Artificial Sequence: Synthetic polynucleotide
  source 1..321: mol_type = other DNA

SEQ ID NO: 28006 - protein, 107 aa, synthetic construct; identical to SEQ ID NO: 25010
  REGION 1..107: note = Description of Artificial Sequence: Synthetic polypeptide

SEQ ID NO: 28007 - DNA, 321 bp, synthetic construct; identical to SEQ ID NO: 25009
  misc_feature 1..321: note = Description of Artificial Sequence: Synthetic polynucleotide
  source 1..321: mol_type = other DNA

SEQ ID NO: 28008 - protein, 107 aa, synthetic construct; identical to SEQ ID NO: 25010
  REGION 1..107: note = Description of Artificial Sequence: Synthetic polypeptide

SEQ ID NO: 28009 - DNA, 321 bp, synthetic construct; identical to SEQ ID NO: 25009
  misc_feature 1..321: note = Description of Artificial Sequence: Synthetic polynucleotide
  source 1..321: mol_type = other DNA

SEQ ID NO: 28010 - protein, 107 aa, synthetic construct; identical to SEQ ID NO: 25010
  REGION 1..107: note = Description of Artificial Sequence: Synthetic polypeptide

SEQ ID NO: 28011 - DNA, 321 bp, synthetic construct; identical to SEQ ID NO: 25009
  misc_feature 1..321: note = Description of Artificial Sequence: Synthetic polynucleotide
  source 1..321: mol_type = other DNA

SEQ ID NO: 28012 - protein, 107 aa, synthetic construct; identical to SEQ ID NO: 25010
  REGION 1..107: note = Description of Artificial Sequence: Synthetic polypeptide

SEQ ID NO: 28013 - DNA, 321 bp, synthetic construct
  misc_feature 1..321: note = Description of Artificial Sequence: Synthetic polynucleotide
  source 1..321: mol_type = other DNA
gacatccagatgacccagtctccatcctccctgtctgcatctgtaggagacagagtcaccattacttgccgggcaagtcaaaacattatcagctatttaaattggtatcaacagaaaccagggaaagcccctaaattcctgatctatactgcatccagtttgcaaagtggggtcccatcaaggttcagtggcagtggatctgggacagatttcactctcaccatcagcagtctgcaacctgaagattttgcaatttactactgtcaacagacttacagtaccccgctcactttcggcggcgggaccaaggtggagatcaaa

SEQ ID NO: 28014 - protein, 107 aa, synthetic construct
  REGION 1..107: note = Description of Artificial Sequence: Synthetic polypeptide
DIQMTQSPSSLSASVGDRVTITCRASQNIISYLNWYQQKPGKAPKFLIYTASSLQSGVPSRFSGSGSGTDFTLTISSLQPEDFAIYYCQQTYSTPLTFGGGTKVEIK

SEQ ID NO: 28015 - DNA, 321 bp, synthetic construct
  misc_feature 1..321: note = Description of Artificial Sequence: Synthetic polynucleotide
  source 1..321: mol_type = other DNA
gacatccagatgacccagtctccatcctccctgtctgcatctgtaggagacagagtcaccattacttgccgggcaagtcaaaacattatcagctatttaaattggtatcaacagaaaccagggaaagcccctaaactcctgatctatactgcatccagtttgcaaagtggggtcccatcaaggttcagtggcagtggatctgggacagatttcactctcaccatcagcagtctgcaacctgaagattttgcaacttactactgtcaacagacttacagtaccccgctcactttcggcggcgggaccaaggtggagatcaaa

SEQ ID NO: 28016 - protein, 107 aa, synthetic construct
  REGION 1..107: note = Description of Artificial Sequence: Synthetic polypeptide
DIQMTQSPSSLSASVGDRVTITCRASQNIISYLNWYQQKPGKAPKLLIYTASSLQSGVPSRFSGSGSGTDFTLTISSLQPEDFATYYCQQTYSTPLTFGGGTKVEIK

SEQ ID NO: 28017 - DNA, 321 bp, synthetic construct
  misc_feature 1..321: note = Description of Artificial Sequence: Synthetic polynucleotide
  source 1..321: mol_type = other DNA
gacatccagatgacccagtctccatcctccctgtctgcatctgtaggagacagagtcaccattgcttgccgggcaagtcaaaacattatcagctatttaaattggtatcaacagaaaccagggaaagcccctaaattcctgatctatactgcatccagtttgcaaagtggggtcccatcaaggttcagtggcagtggatctgggacagatttcactctcaccatcagcagtctgcaacctgaagattttgcaatttactactgtcaacagacttacagtaccccgctcactttcggcggcgggaccaaggtggagatcaaa

SEQ ID NO: 28018 - protein, 107 aa, synthetic construct; identical to SEQ ID NO: 24908
  REGION 1..107: note = Description of Artificial Sequence: Synthetic polypeptide

SEQ ID NO: 28019 - DNA, 321 bp, synthetic construct; identical to SEQ ID NO: 28017
  misc_feature 1..321: note = Description of Artificial Sequence: Synthetic polynucleotide
  source 1..321: mol_type = other DNA

SEQ ID NO: 28020 - protein, 107 aa, synthetic construct; identical to SEQ ID NO: 24908
  REGION 1..107: note = Description of Artificial Sequence: Synthetic polypeptide

SEQ ID NO: 28021 - DNA, 321 bp, synthetic construct; identical to SEQ ID NO: 28017
  misc_feature 1..321: note = Description of Artificial Sequence: Synthetic polynucleotide
  source 1..321: mol_type = other DNA

SEQ ID NO: 28022 - protein, 107 aa, synthetic construct; identical to SEQ ID NO: 24908
  REGION 1..107: note = Description of Artificial Sequence: Synthetic polypeptide

SEQ ID NO: 28023 - DNA, 321 bp, synthetic construct; identical to SEQ ID NO: 28017
  misc_feature 1..321: note = Description of Artificial Sequence: Synthetic polynucleotide
  source 1..321: mol_type = other DNA

SEQ ID NO: 28024 - protein, 107 aa, synthetic construct; identical to SEQ ID NO: 24908
  REGION 1..107: note = Description of Artificial Sequence: Synthetic polypeptide

SEQ ID NO: 28025 - DNA, 321 bp, synthetic construct; identical to SEQ ID NO: 28017
  misc_feature 1..321: note = Description of Artificial Sequence: Synthetic polynucleotide
  source 1..321: mol_type = other DNA

SEQ ID NO: 28026 - protein, 107 aa, synthetic construct; identical to SEQ ID NO: 24908
  REGION 1..107: note = Description of Artificial Sequence: Synthetic polypeptide

SEQ ID NO: 28027 - DNA, 321 bp, synthetic construct; identical to SEQ ID NO: 28017
  misc_feature 1..321: note = Description of Artificial Sequence: Synthetic polynucleotide
  source 1..321: mol_type = other DNA

SEQ ID NO: 28028 - protein, 107 aa, synthetic construct; identical to SEQ ID NO: 24908
  REGION 1..107: note = Description of Artificial Sequence: Synthetic polypeptide

SEQ ID NO: 28029 - DNA, 321 bp, synthetic construct; identical to SEQ ID NO: 28017
  misc_feature 1..321: note = Description of Artificial Sequence: Synthetic polynucleotide
  source 1..321: mol_type = other DNA

SEQ ID NO: 28030 - protein, 107 aa, synthetic construct; identical to SEQ ID NO: 24908
  REGION 1..107: note = Description of Artificial Sequence: Synthetic polypeptide

SEQ ID NO: 28031 - DNA, 321 bp, synthetic construct; identical to SEQ ID NO: 28017
  misc_feature 1..321: note = Description of Artificial Sequence: Synthetic polynucleotide
  source 1..321: mol_type = other DNA

SEQ ID NO: 28032 - protein, 107 aa, synthetic construct; identical to SEQ ID NO: 24908
  REGION 1..107: note = Description of Artificial Sequence: Synthetic polypeptide

SEQ ID NO: 28033 - DNA, 321 bp, synthetic construct; identical to SEQ ID NO: 28017
  misc_feature 1..321: note = Description of Artificial Sequence: Synthetic polynucleotide
  source 1..321: mol_type = other DNA

SEQ ID NO: 28034 - protein, 107 aa, synthetic construct; identical to SEQ ID NO: 24908
  REGION 1..107: note = Description of Artificial Sequence: Synthetic polypeptide

SEQ ID NO: 28035 - DNA, 321 bp, synthetic construct; identical to SEQ ID NO: 28013
  misc_feature 1..321: note = Description of Artificial Sequence: Synthetic polynucleotide
  source 1..321: mol_type = other DNA

SEQ ID NO: 28036 - protein, 107 aa, synthetic construct; identical to SEQ ID NO: 28014
  REGION 1..107: note = Description of Artificial Sequence: Synthetic polypeptide

SEQ ID NO: 28037 - DNA, 321 bp, synthetic construct; identical to SEQ ID NO: 28013
  misc_feature 1..321: note = Description of Artificial Sequence: Synthetic polynucleotide
  source 1..321: mol_type = other DNA

SEQ ID NO: 28038 - protein, 107 aa, synthetic construct; identical to SEQ ID NO: 28014
  REGION 1..107: note = Description of Artificial Sequence: Synthetic polypeptide

SEQ ID NO: 28039 - DNA, 321 bp, synthetic construct; identical to SEQ ID NO: 28013
  misc_feature 1..321: note = Description of Artificial Sequence: Synthetic polynucleotide
  source 1..321: mol_type = other DNA

SEQ ID NO: 28040 - protein, 107 aa, synthetic construct; identical to SEQ ID NO: 28014
  REGION 1..107: note = Description of Artificial Sequence: Synthetic polypeptide

SEQ ID NO: 28041 - DNA, 321 bp, synthetic construct; identical to SEQ ID NO: 28015
  misc_feature 1..321: note = Description of Artificial Sequence: Synthetic polynucleotide
  source 1..321: mol_type = other DNA

SEQ ID NO: 28042 - protein, 107 aa, synthetic construct; identical to SEQ ID NO: 28016
  REGION 1..107: note = Description of Artificial Sequence: Synthetic polypeptide

SEQ ID NO: 28043 - DNA, 321 bp, synthetic construct; identical to SEQ ID NO: 28015
  misc_feature 1..321: note = Description of Artificial Sequence: Synthetic polynucleotide
  source 1..321: mol_type = other DNA

SEQ ID NO: 28044 - protein, 107 aa, synthetic construct; identical to SEQ ID NO: 28016
  REGION 1..107: note = Description of Artificial Sequence: Synthetic polypeptide

SEQ ID NO: 28045 - DNA, 321 bp, synthetic construct; identical to SEQ ID NO: 28015
  misc_feature 1..321: note = Description of Artificial Sequence: Synthetic polynucleotide
  source 1..321: mol_type = other DNA

SEQ ID NO: 28046 - protein, 107 aa, synthetic construct; identical to SEQ ID NO: 28016
  REGION 1..107: note = Description of Artificial Sequence: Synthetic polypeptide

SEQ ID NO: 28047 - DNA, 321 bp, synthetic construct; identical to SEQ ID NO: 28013
  misc_feature 1..321: note = Description of Artificial Sequence: Synthetic polynucleotide
  source 1..321: mol_type = other DNA

SEQ ID NO: 28048 - protein, 107 aa, synthetic construct; identical to SEQ ID NO: 28014
  REGION 1..107: note = Description of Artificial Sequence: Synthetic polypeptide

SEQ ID NO: 28049 - DNA, 321 bp, synthetic construct; identical to SEQ ID NO: 28017
  misc_feature 1..321: note = Description of Artificial Sequence: Synthetic polynucleotide
  source 1..321: mol_type = other DNA

SEQ ID NO: 28050 - protein, 107 aa, synthetic construct; identical to SEQ ID NO: 24908
  REGION 1..107: note = Description of Artificial Sequence: Synthetic polypeptide

SEQ ID NO: 28051 - DNA, 321 bp, synthetic construct; identical to SEQ ID NO: 28017
  misc_feature 1..321: note = Description of Artificial Sequence: Synthetic polynucleotide
  source 1..321: mol_type = other DNA

SEQ ID NO: 28052 - protein, 107 aa, synthetic construct; identical to SEQ ID NO: 24908
  REGION 1..107: note = Description of Artificial Sequence: Synthetic polypeptide

SEQ ID NO: 28053 - DNA, 321 bp, synthetic construct; identical to SEQ ID NO: 28013
  misc_feature 1..321: note = Description of Artificial Sequence: Synthetic polynucleotide
  source 1..321: mol_type = other DNA

SEQ ID NO: 28054 - protein, 107 aa, synthetic construct; identical to SEQ ID NO: 28014
  REGION 1..107: note = Description of Artificial Sequence: Synthetic polypeptide

SEQ ID NO: 28055 - DNA, 324 bp, synthetic construct
  misc_feature 1..324: note = Description of Artificial Sequence: Synthetic polynucleotide
  source 1..324: mol_type = other DNA
gaaattgtgttgacgcagtctccaggcaccctgtctttgtttccaggggaaagagccaccctctcctgcagggccagtcagagtgtgatcagcagctacttagcctggtaccagcagaaacctggccaggctcccaggctcctcatctttggtgtatctagttgggccactggcatcccagacaggttcagtggcagtgggtctgggacagacttcactctcaccatcagcagactggagcctgaagattttgcagtgtattactgtcaacaatatggtaggtcaccattcaatttcggccctgggaccaaagtggatatcaaa

SEQ ID NO: 28056 - protein, 108 aa, synthetic construct
  REGION 1..108: note = Description of Artificial Sequence: Synthetic polypeptide
EIVLTQSPGTLSLFPGERATLSCRASQSVISSYLAWYQQKPGQAPRLLIFGVSSWATGIPDRFSGSGSGTDFTLTISRLEPEDFAVYYCQQYGRSPFNFGPGTKVDIK

SEQ ID NO: 28057 - DNA, 333 bp, synthetic construct
  misc_feature 1..333: note = Description of Artificial Sequence: Synthetic polynucleotide
  source 1..333: mol_type = other DNA
cagtctgtgctgacgcagccgccctcagtgtctggggccccagggcagagggtcaccatctcctgcactgggagcagctccaacatcggggcaggttatgatgtacactggtaccagcagcttccaggaacagcccccaaactcctcatctatggtaacagcaatcggccctcaggggtccctgaccgattctctggctccaagtctggcacctcagcctccctggccatcactgggctccaggctgaggatgaggctgattattactgccagtcctatgacaacagcctgagtggttcggtattcggcggagggaccaagctgaccgtccta

SEQ ID NO: 28058 - protein, 111 aa, synthetic construct
  REGION 1..111: note = Description of Artificial Sequence: Synthetic polypeptide
QSVLTQPPSVSGAPGQRVTISCTGSSSNIGAGYDVHWYQQLPGTAPKLLIYGNSNRPSGVPDRFSGSKSGTSASLAITGLQAEDEADYYCQSYDNSLSGSVFGGGTKLTVL

SEQ ID NO: 28059 - DNA, 336 bp, synthetic construct
  misc_feature 1..336: note = Description of Artificial Sequence: Synthetic polynucleotide
  source 1..336: mol_type = other DNA
gatgttgtgatgactcagtctccactctccctgcccgtcacccttggacagccggcctccatctcctgcaggtctagtcaaagcctcgtatacagtgatggaaacacctacttgaattggtttcagcagaggccaggccaatctccaaggcgcctaatttataaggtttctaactgggactctggggtcccagacagattcagcggcagtgggtcaggcactgatttcacactgaaaatcagcagggtggaggctgaggatgttggggtttattactgcatgcaaggtacacactggccgctcactttcggcggagggaccaaggtggagatcaaa

SEQ ID NO: 28060 - protein, 112 aa, synthetic construct; identical to SEQ ID NO: 27852
  REGION 1..112: note = Description of Artificial Sequence: Synthetic polypeptide

SEQ ID NO: 28061 - DNA, 339 bp, synthetic construct; identical to SEQ ID NO: 27925
  misc_feature 1..339: note = Description of Artificial Sequence: Synthetic polynucleotide
  source 1..339: mol_type = other DNA

SEQ ID NO: 28062 - protein, 113 aa, synthetic construct; identical to SEQ ID NO: 27926
  REGION 1..113: note = Description of Artificial Sequence: Synthetic polypeptide

SEQ ID NO: 28063 - DNA, 321 bp, synthetic construct
  misc_feature 1..321: note = Description of Artificial Sequence: Synthetic polynucleotide
  source 1..321: mol_type = other DNA
gacatccagatgacccagtctccatcttccgtgtctgcatctgtaggagacagagtcaccatcacttgtcgggcgagtcagggtattagcaggtggttagcctggtatcagcagaaaccagggaaagcccctaagctcctgatctatggtgcatccagtttgcaaagtggggtcccatcaaggttcagcggcagtggatctgggacagatttcactctcaccatcagcagcctgcagcctgaagattttgcaacttattattgtcaacaggctaacagtttcccattcactttcggccctgggaccaaagtggatatcaaa

SEQ ID NO: 28064 - protein, 107 aa, synthetic construct
  REGION 1..107: note = Description of Artificial Sequence: Synthetic polypeptide
DIQMTQSPSSVSASVGDRVTITCRASQGISRWLAWYQQKPGKAPKLLIYGASSLQSGVPSRFSGSGSGTDFTLTISSLQPEDFATYYCQQANSFPFTFGPGTKVDIK

SEQ ID NO: 28065 - DNA, 321 bp, synthetic construct; identical to SEQ ID NO: 28017
  misc_feature 1..321: note = Description of Artificial Sequence: Synthetic polynucleotide
  source 1..321: mol_type = other DNA

SEQ ID NO: 28066 - protein, 107 aa, synthetic construct; identical to SEQ ID NO: 24908
  REGION 1..107: note = Description of Artificial Sequence: Synthetic polypeptide

SEQ ID NO: 28067 - DNA, 339 bp, synthetic construct; identical to SEQ ID NO: 25881
  misc_feature 1..339: note = Description of Artificial Sequence: Synthetic polynucleotide
  source 1..339: mol_type = other DNA

SEQ ID NO: 28068 - protein, 113 aa, synthetic construct; identical to SEQ ID NO: 25882
  REGION 1..113: note = Description of Artificial Sequence: Synthetic polypeptide

SEQ ID NO: 28069 - DNA, 339 bp, synthetic construct
  misc_feature 1..339: note = Description of Artificial Sequence: Synthetic polynucleotide
  source 1..339: mol_type = other DNA
gacatcgtgatgacccagtctccagactccctggctgtgtctctgggcgagagggccaccatcaactgcaagtccagccagactgtcttacacagctccaacaattataactacttagcttggtaccagcagaagccaggacagccccctaaggtgctcatttactggacatctacccgggaatccggggtccatgaccgattcagtggcagcgggtctgggacagatttcactctcaccatcagcagcctgcaggctgaagatgtggcagtttattactgtcaccaatatcttagtagtcctctgacgttcggccaagggaccaaggtggaaatcaaa

SEQ ID NO: 28070 - protein, 113 aa, synthetic construct
  REGION 1..113: note = Description of Artificial Sequence: Synthetic polypeptide
DIVMTQSPDSLAVSLGERATINCKSSQTVLHSSNNYNYLAWYQQKPGQPPKVLIYWTSTRESGVHDRFSGSGSGTDFTLTISSLQAEDVAVYYCHQYLSSPLTFGQGTKVEIK

SEQ ID NO: 28071 - DNA, 321 bp, synthetic construct
  misc_feature 1..321: note = Description of Artificial Sequence: Synthetic polynucleotide
  source 1..321: mol_type = other DNA
gagatagtgatgacgcagtctccagccaccctgtctgtgtttccaggggaaggagccaccctctcctgcagggccagtcagagtgttagcatcaacttagcctggtaccagcagaaacctggccaggctcccagactcctcatctatggtgcatccaccagggccactggtatcccagccaggttcaatgccagtgggtctgggacagagttcactctctccatcagcagcctgcagtctgaaaattttgcagtttattactgtcagcagtataatacctggcctctcactttcggcggagggaccaaggtggaaatcaaa

SEQ ID NO: 28072 - protein, 107 aa, synthetic construct
  REGION 1..107: note = Description of Artificial Sequence: Synthetic polypeptide
EIVMTQSPATLSVFPGEGATLSCRASQSVSINLAWYQQKPGQAPRLLIYGASTRATGIPARFNASGSGTEFTLSISSLQSENFAVYYCQQYNTWPLTFGGGTKVEIK

SEQ ID NO: 28073 - DNA, 321 bp, synthetic construct
  misc_feature 1..321: note = Description of Artificial Sequence: Synthetic polynucleotide
  source 1..321: mol_type = other DNA
gacatccagatgacccagtctccatcctccctgtctgcatctgtaggagacagagtcaccatcacttgccgggcaagtcagagcattaccagctatttaaattggtatcagcagaaaccagggaaagcccctaagctcctgatctatactgcatccagtttgcaaagtggggtcccatcaaggttcagtggcagtggatctgggacagatttcactctcaccatcagcagtctgcaacctgaagattttgcaacttactactgtcaacagagtcacagtttcccattcactttcggccctgggaccaaagtggatatcaaa

SEQ ID NO: 28074 - protein, 107 aa, synthetic construct
  REGION 1..107: note = Description of Artificial Sequence: Synthetic polypeptide
DIQMTQSPSSLSASVGDRVTITCRASQSITSYLNWYQQKPGKAPKLLIYTASSLQSGVPSRFSGSGSGTDFTLTISSLQPEDFATYYCQQSHSFPFTFGPGTKVDIK

SEQ ID NO: 28075 - DNA, 318 bp, synthetic construct
  misc_feature 1..318: note = Description of Artificial Sequence: Synthetic polynucleotide
  source 1..318: mol_type = other DNA
tcctatgagctgactcagccaccctcagtgtccgtgtccccaggacagacagccagcatcacctgctctggagataaattgggggataaatatgcttgctggtatcagcagaagccaggccagtcccctgtgctggtcatctatcaagatagcaagcggccctcagggatccctgagcgattctctggctccaactctgggaacacagccactctgaccatcagcgggacccaggctagggatgaggctgaatattactgtcaggcgcggaacagccgcagaggggtattcggcggagggaccaggctgaccgtccta

SEQ ID NO: 28076 - protein, 106 aa, synthetic construct
  REGION 1..106: note = Description of Artificial Sequence: Synthetic polypeptide
SYELTQPPSVSVSPGQTASITCSGDKLGDKYACWYQQKPGQSPVLVIYQDSKRPSGIPERFSGSNSGNTATLTISGTQARDEAEYYCQARNSRRGVFGGGTRLTVL

SEQ ID NO: 28077 - DNA, 318 bp, synthetic construct
  misc_feature 1..318: note = Description of Artificial Sequence: Synthetic polynucleotide
  source 1..318: mol_type = other DNA
tcctatgagctgactcagccaccctcagtgtccgtgtccccaggacagacagccagcatcacctgctctggagataaattgggggataaatatgcttcctggtatcagcagaagccaggccagtcccctgtgctggtcatctatcaagatagtaagcggccctcagggatccctgagcgattctctggctccaactctggaaacacagccactctgaccatcagcgggacccaggctatggatgaggctgactattactgtcaggcgtgggacaacagaactatggtattcggcggagggaccaagctgaccgtccta

SEQ ID NO: 28078 - protein, 106 aa, synthetic construct
  REGION 1..106: note = Description of Artificial Sequence: Synthetic polypeptide
SYELTQPPSVSVSPGQTASITCSGDKLGDKYASWYQQKPGQSPVLVIYQDSKRPSGIPERFSGSNSGNTATLTISGTQAMDEADYYCQAWDNRTMVFGGGTKLTVL

SEQ ID NO: 28079 - DNA, 330 bp, synthetic construct
  misc_feature 1..330: note = Description of Artificial Sequence: Synthetic polynucleotide
  source 1..330: mol_type = other DNA
cagtctgtgctgactcagccaccctcagcgtctgggacccccgggcagagggtcaccatctcttgttctggaagcagctccaacatcggaagtaatattgtgacctggtaccagcagctcccaggaacggcccccaaactcctcatctatagtaatgatcagcggccctcaggggtccctgaccgattctctggctccaagtctggcacctcagcctccctggccatcagtgggctccagtctgaggatgaggctgattattactgtacagcatgggatgacagcctgaatggttgggtgttcggcggagggaccacgctgaccgtccta

SEQ ID NO: 28080 - protein, 110 aa, synthetic construct
  REGION 1..110: note = Description of Artificial Sequence: Synthetic polypeptide
QSVLTQPPSASGTPGQRVTISCSGSSSNIGSNIVTWYQQLPGTAPKLLIYSNDQRPSGVPDRFSGSKSGTSASLAISGLQSEDEADYYCTAWDDSLNGWVFGGGTTLTVL

SEQ ID NO: 28081 - DNA, 330 bp, synthetic construct
  misc_feature 1..330: note = Description of Artificial Sequence: Synthetic polynucleotide
  source 1..330: mol_type = other DNA
cagtctgtgctgactcagccaccctcagcgtctgggacccccgggcagagggtcaccatctcttgttctggaagcaactccaacatcggaagtaatattgtaacctggtaccagcagctcccaggaacggcccccaaactcctcatctatagtaatgatcagcggccctcaggggtccctgaccgattctctggctccaagtctggcacctcagcctccctggccatcagtgggctccagtctgaggatgaggctgattattactgtgcagcatgggatgacagcctgaatggttgggtgttcggcggagggaccacgctgaccgtccta

SEQ ID NO: 28082 - protein, 110 aa, synthetic construct
  REGION 1..110: note = Description of Artificial Sequence: Synthetic polypeptide
QSVLTQPPSASGTPGQRVTISCSGSNSNIGSNIVTWYQQLPGTAPKLLIYSNDQRPSGVPDRFSGSKSGTSASLAISGLQSEDEADYYCAAWDDSLNGWVFGGGTTLTVL

SEQ ID NO: 28083 - DNA, 330 bp, synthetic construct
  misc_feature 1..330: note = Description of Artificial Sequence: Synthetic polynucleotide
  source 1..330: mol_type = other DNA
cagtctgtgctgactcagccaccctcagcgtctgggacccccgggcagagggtcaccatctcttgttctggaagctgctccaacatcggaagtaatattgtgacctggtaccagcagctcccaggaacggcccccaaactcctcatctatagtaatgatcagcggccctcaggggtccctgaccgattctctggctccaagtctggcacctcagcctccctggccatcagtgggctccagtctgaggatgaggctgattattactgtacagcatgggatgacagcctgaatgattgggtgttcggcggagggaccacgctgaccgtccta

SEQ ID NO: 28084 - protein, 110 aa, synthetic construct
  REGION 1..110: note = Description of Artificial Sequence: Synthetic polypeptide
QSVLTQPPSASGTPGQRVTISCSGSCSNIGSNIVTWYQQLPGTAPKLLIYSNDQRPSGVPDRFSGSKSGTSASLAISGLQSEDEADYYCTAWDDSLNDWVFGGGTTLTVL

SEQ ID NO: 28085 - DNA, 318 bp, synthetic construct
  misc_feature 1..318: note = Description of Artificial Sequence: Synthetic polynucleotide
  source 1..318: mol_type = other DNA
tcttatgagctgactcagccaccctcagagtctgtgtccccaggacagacagccagcatcacctgctcaggagataaatcggggaataaatatgtttcctggtatcagcagaagccaggccagtcccctgtgctggtcatctatcaagataacaggcggccgtcagggatccctgagcgattttctggctccaactctgggagcacagccactttgaccatcagcgggacccaggctatggatgaggctgactattactgtcaggcgtgggacagcacccctgtgatattcggcggagggaccaagctgaccgtccta

SEQ ID NO: 28086 - protein, 106 aa, synthetic construct
  REGION 1..106: note = Description of Artificial Sequence: Synthetic polypeptide
SYELTQPPSESVSPGQTASITCSGDKSGNKYVSWYQQKPGQSPVLVIYQDNRRPSGIPERFSGSNSGSTATLTISGTQAMDEADYYCQAWDSTPVIFGGGTKLTVL

SEQ ID NO: 28087 - DNA, 318 bp, synthetic construct
  misc_feature 1..318: note = Description of Artificial Sequence: Synthetic polynucleotide
  source 1..318: mol_type = other DNA
tcctatgagctgactcagccaccctcagtgtccgtgtccccaggacagacagccagcatcacctgctctggagataaattggggaataaatatgcttgctggtatcagcagaggccaggccagtcccctgtgctggtcatctatcaagatcgcaagcggccctcagggatccctgagcgattctctggctccaactctgggaacacagccactctgaccatcagcgggacccaggctatggatgaggctgactattactgtcaggcgtgggacagcagcactgtggtattcggcggagggaccaagctgaccgtccta

SEQ ID NO: 28088 - protein, 106 aa, synthetic construct
  REGION 1..106: note = Description of Artificial Sequence: Synthetic polypeptide
SYELTQPPSVSVSPGQTASITCSGDKLGNKYACWYQQRPGQSPVLVIYQDRKRPSGIPERFSGSNSGNTATLTISGTQAMDEADYYCQAWDSSTVVFGGGTKLTVL

SEQ ID NO: 28089 - DNA, 321 bp, synthetic construct
  misc_feature 1..321: note = Description of Artificial Sequence: Synthetic polynucleotide
  source 1..321: mol_type = other DNA
gacatccagatgacccagtctccatcctccctgtctgcatctgtaggagacagagtcaccatcacttgccgggcaagtcaggacattagaaaggatttaggctggtatcagcagaaaccagggaaagcccctaaccgcctgatctatgctgcatccagtttgcaaagtggggtcccatcaaggttcagcggcagtggatctgggacagaattcactctcacattcagcagcctgcagcctgaagattttgcaacttattactgtctacagcatcatagttatcctcggacgttcggccaagggaccaaggtggaaatcaaa

SEQ ID NO: 28090 - protein, 107 aa, synthetic construct; identical to SEQ ID NO: 26376
  REGION 1..107: note = Description of Artificial Sequence: Synthetic polypeptide

SEQ ID NO: 28091 - DNA, 339 bp, synthetic construct
  misc_feature 1..339: note = Description of Artificial Sequence: Synthetic polynucleotide
  source 1..339: mol_type = other DNA
gacatcgtgatgacccagtatccagactcccgggctgtgtctctgggcgagagggccaccatcaagtgcaagtccagccagagtgttttatacagctccaacaataagaactacttaacttggtaccagcagaaaccaggacagcctcccaaactgttcatttactgggcatctacccgggaatccggggttcctgaccgattcagtggcagcgggtgtgggacagatttcactctcaccatcagcagcgtgcaggccgaagatgtggcagtttattactgtcagcaatattttagtactccgtggacgttcggccaagggaccaaggtggaaatcaaa

SEQ ID NO: 28092 - protein, 113 aa, synthetic construct
  REGION 1..113: note = Description of Artificial Sequence: Synthetic polypeptide
DIVMTQYPDSRAVSLGERATIKCKSSQSVLYSSNNKNYLTWYQQKPGQPPKLFIYWASTRESGVPDRFSGSGCGTDFTLTISSVQAEDVAVYYCQQYFSTPWTFGQGTKVEIK

SEQ ID NO: 28093 - DNA, 321 bp, synthetic construct
  misc_feature 1..321: note = Description of Artificial Sequence: Synthetic polynucleotide
  source 1..321: mol_type = other DNA
gaaatagtgatgacgcagtctccagccaccctgtctgtgtctccaggggaaagagccaccctctcctgcagggccagtcagagtgttcgcagtaacttagcctggtaccagcaggaacctggccaggctcccaggctcctcatctatggtgcatccaccagggccactggtatcccagccaggttcagtggcagtgggtctgggacagaattcactctcaccatcagcagcttgcagtctgaagattttgcagtttattactgtcagcagtcttttacctggctccggacgttcggccaagggaccaaggtggaaatcaaa

SEQ ID NO: 28094 - protein, 107 aa, synthetic construct
  REGION 1..107: note = Description of Artificial Sequence: Synthetic polypeptide
EIVMTQSPATLSVSPGERATLSCRASQSVRSNLAWYQQEPGQAPRLLIYGASTRATGIPARFSGSGSGTEFTLTISSLQSEDFAVYYCQQSFTWLRTFGQGTKVEIK

SEQ ID NO: 28095 - DNA, 321 bp, synthetic construct
  misc_feature 1..321: note = Description of Artificial Sequence: Synthetic polynucleotide
  source 1..321: mol_type = other DNA
gacatccagatgacccagtctccatcctcactgtctgcatctgtaggagacagagtcaccatcacttgtcgggcgagtcagggcattagaaattatttagcctggtttcagcagaaaccagggaaagcccctaagtccctgatctatgctgcatccagtttgcaaagtggggtcccctcaaagttcagcggcagtggatctgggacagatttcactctcaccatcagcagcctgcagcctgaagattttgcaacttattactgccaacattatcttacttacccgctcactttcggcggagggaccaaggtggagatcaaa

SEQ ID NO: 28096 - protein, 107 aa, synthetic construct
  REGION 1..107: note = Description of Artificial Sequence: Synthetic polypeptide
DIQMTQSPSSLSASVGDRVTITCRASQGIRNYLAWFQQKPGKAPKSLIYAASSLQSGVPSKFSGSGSGTDFTLTISSLQPEDFATYYCQHYLTYPLTFGGGTKVEIK

SEQ ID NO: 28097 - DNA, 324 bp, synthetic construct
  misc_feature 1..324: note = Description of Artificial Sequence: Synthetic polynucleotide
  source 1..324: mol_type = other DNA
gaaattgtgttgacgcagtctccaggcatcctgtctttgtatccaggggaaagagccaccctctcctgtagggccagtcagagtgttaacagcaactatttagcctggtaccagcagagacctggccaggctcccagtctcctcatttatggggcatccagcagggccacttgcatcctggacaggttcagtggcagtgggtgtgggacagacttcactctcacgatcagcagactggagcctgaagattttgcagtgtattgctgtcagcagtatgagatctcaccgtggacgttcggccaagggaccaaggtggaaagcaaa

SEQ ID NO: 28098 - protein, 108 aa, synthetic construct
  REGION 1..108: note = Description of Artificial Sequence: Synthetic polypeptide
EIVLTQSPGILSLYPGERATLSCRASQSVNSNYLAWYQQRPGQAPSLLIYGASSRATCILDRFSGSGCGTDFTLTISRLEPEDFAVYCCQQYEISPWTFGQGTKVESK

SEQ ID NO: 28099 - DNA, 339 bp, synthetic construct
  misc_feature 1..339: note = Description of Artificial Sequence: Synthetic polynucleotide
  source 1..339: mol_type = other DNA
gacatcgtgatgacccagtctccagactccctggctgtgtctctgggcgagagggccaccatcaattgcaagtccagtcagaatattttatccagctccaacaataagaactacttaacttggtaccagcagaaaccaggacagcctcctaaaatactcatttactggacatctacccgggaatccggggtccctgaccgattcagtggcagcgggtttgggacagatttcactctcaccatcagcagcctgcaggctgaagatgtggctgtttattactgtcagcaatattttagtgttcctctgacgttcggccaagggaccaaggtggaaatcaaa

SEQ ID NO: 28100 - protein, 113 aa, synthetic construct
  REGION 1..113: note = Description of Artificial Sequence: Synthetic polypeptide
DIVMTQSPDSLAVSLGERATINCKSSQNILSSSNNKNYLTWYQQKPGQPPKILIYWTSTRESGVPDRFSGSGFGTDFTLTISSLQAEDVAVYYCQQYFSVPLTFGQGTKVEIK

SEQ ID NO: 28101 - DNA, 339 bp, synthetic construct
  misc_feature 1..339: note = Description of Artificial Sequence: Synthetic polynucleotide
  source 1..339: mol_type = other DNA
gacatcgtgatgacccagtgtccagactccctggctgtgtctctgggcgagagggccaccatcaattgcaagtccagccagagtgttttacacagctccaacaataacaactacttagcttggtaccagcagaaaccaggacagcctcataagttgctcatttactggacatctacccgggaatccggggtccctgaccgattcagtggcagcgggtatgggacagatttctctctcaccatcgccagcctgcaggctgaagatgtggcagtttattactgtcagcaatattatagtattcctctgacgttcggccaagggaccaaggtggaaatcaaa

SEQ ID NO: 28102 - protein, 113 aa, synthetic construct
  REGION 1..113: note = Description of Artificial Sequence: Synthetic polypeptide
DIVMTQCPDSLAVSLGERATINCKSSQSVLHSSNNNNYLAWYQQKPGQPHKLLIYWTSTRESGVPDRFSGSGYGTDFSLTIASLQAEDVAVYYCQQYYSIPLTFGQGTKVEIK

SEQ ID NO: 28103 - DNA, 339 bp, synthetic construct
  misc_feature 1..339: note = Description of Artificial Sequence: Synthetic polynucleotide
  source 1..339: mol_type = other DNA
gacatcgtgatgacccagtctccagactccctggctgtgtctctgggcgagagggccaccatcaactgcaagtccagccagagtgttttacacagctccaacaataagaactacttaacttggtaccagcagaaaccaggacagcctcataagctgctcatttactgggcatctactcgggaatccggggtccctgaccgattcagcggcagcgggtctgggacagatttcagtctcacgatcggcagcctgcagcatgaagatgtggcagtttattactgtcagcaatatcatagtattcctccgacgttcggccacgggaccaaggtggaaatcaaa

SEQ ID NO: 28104 - protein, 113 aa, synthetic construct
  REGION 1..113: note = Description of Artificial Sequence: Synthetic polypeptide
DIVMTQSPDSLAVSLGERATINCKSSQSVLHSSNNKNYLTWYQQKPGQPHKLLIYWASTRESGVPDRFSGSGSGTDFSLTIGSLQHEDVAVYYCQQYHSIPPTFGHGTKVEIK

SEQ ID NO: 28105 - DNA, 339 bp, synthetic construct
  misc_feature 1..339: note = Description of Artificial Sequence: Synthetic polynucleotide
  source 1..339: mol_type = other DNA
gacatcgtgctgacccagtctccagactccccggctgtgtctctgggcgagagggccaccatcaattgcaagtccagccagagtgttttatccaactcccacaataacaactacttagcttggtaccagcagagaccaggacatcctcataaactcctcattttctgggcatctacccgggaatccggggtccctgaccgattcagtggcagcgggtatgggacagatttcactctcaccatcagcagcctgcaggctgaagatgtggcagtttattactgtcagcaatattatagtactccgtgcagttttggccaggggaccaagctggagatcaaa

SEQ ID NO: 28106 - protein, 113 aa, synthetic construct
  REGION 1..113: note = Description of Artificial Sequence: Synthetic polypeptide
DIVLTQSPDSPAVSLGERATINCKSSQSVLSNSHNNNYLAWYQQRPGHPHKLLIFWASTRESGVPDRFSGSGYGTDFTLTISSLQAEDVAVYYCQQYYSTPCSFGQGTKLEIK

SEQ ID NO: 28107 - DNA, 339 bp, synthetic construct
  misc_feature 1..339: note = Description of Artificial Sequence: Synthetic polynucleotide
  source 1..339: mol_type = other DNA
gacatcgttatgacccagtgtccagactccctggctgtgtctctgggcgagagggccaccatcaattgcaagtccagccagagtgttttattcagctccaacaattataattacttagcttggtaccagcagagaccaggacagcctcataacctgctcatttactgggcatctacccgggaatccggggtccctgaccgattcagtggcagcgggtctgggacagatttcactctcaccatcagcagcctgcaggctgctgatgtggcagtttattactgtcagcaatatcatagttctcctctgacgttcggccaagggaccacggtgcaaatcaaa

SEQ ID NO: 28108 - protein, 113 aa, synthetic construct
  REGION 1..113: note = Description of Artificial Sequence: Synthetic polypeptide
DIVMTQCPDSLAVSLGERATINCKSSQSVLFSSNNYNYLAWYQQRPGQPHNLLIYWASTRESGVPDRFSGSGSGTDFTLTISSLQAADVAVYYCQQYHSSPLTFGQGTTVQIK

SEQ ID NO: 28109 - DNA, 321 bp, synthetic construct
  misc_feature 1..321: note = Description of Artificial Sequence: Synthetic polynucleotide
  source 1..321: mol_type = other DNA
gacatccagatgacccagtctccatcctaccagtctgcatctgtgggagacagagtcaccatcacttgccgggcaagtcagggcattagaaatgatttaggctggtttcagcagaaaccagggaaagcccctaagcgcctgatctatgctgcatccagtttgcaaagtggggtcccatcaaggttcagcggcagtggatctgggacagaattcactctcacaatcagcagcctgcagcctgaagattttgcaacttattactgtttacagcataatgattacccattcactttcggccctgggaccaaagtggatatcaaa

SEQ ID NO: 28110 - protein, 107 aa, synthetic construct
  REGION 1..107: note = Description of Artificial Sequence: Synthetic polypeptide
DIQMTQSPSYQSASVGDRVTITCRASQGIRNDLGWFQQKPGKAPKRLIYAASSLQSGVPSRFSGSGSGTEFTLTISSLQPEDFATYYCLQHNDYPFTFGPGTKVDIK

SEQ ID NO: 28111 - DNA, 321 bp, synthetic construct
  misc_feature 1..321: note = Description of Artificial Sequence: Synthetic polynucleotide
  source 1..321: mol_type = other DNA
gacatccagatgacccagtctccatcctccctgtctgcatctgtgggagacagagtcaccatcacttgccgggcaagtcagggcattagaaatgatttaggctggtttcagcagaaaccagggaaagcccctaagcgcctgatctatgctgcatccagtttgcaaagtggggtcccatcaaggttcagcggcagtggatctgggacagaattcactctcacaatcagcagcctgcagcctgaagattttgcaacttattactgtctacagcataatgattacccattcactttcggccctgggaccaaagtggatatcaaa

SEQ ID NO: 28112 - protein, 107 aa, synthetic construct
  REGION 1..107: note = Description of Artificial Sequence: Synthetic polypeptide
DIQMTQSPSSLSASVGDRVTITCRASQGIRNDLGWFQQKPGKAPKRLIYAASSLQSGVPSRFSGSGSGTEFTLTISSLQPEDFATYYCLQHNDYPFTFGPGTKVDIK

SEQ ID NO: 28113 - DNA, 321 bp, synthetic construct
  misc_feature 1..321: note = Description of Artificial Sequence: Synthetic polynucleotide
  source 1..321: mol_type = other DNA
gacatccagatgacccagtctccatcttccgtgtctgcatctataggagacagagtcaccatcacttgtcgggcgagtcagtttattagcagctggttagcctggtatcagcagaaaccagggaaagcccctaagctcctgatctatactgcatccagtttgcaaagtggggtcccatcaaggttcagcggcagtggatctgggacagatttcactctcaccatcagcagcctgcagcctgaagattttgcaacttactgttgtcaacaggctaacagtttcccgtggacgttcggccaagggaccaaggtggaattcaac

SEQ ID NO: 28114 - protein, 107 aa, synthetic construct
  REGION 1..107: note = Description of Artificial Sequence: Synthetic polypeptide
DIQMTQSPSSVSASIGDRVTITCRASQFISSWLAWYQQKPGKAPKLLIYTASSLQSGVPSRFSGSGSGTDFTLTISSLQPEDFATYCCQQANSFPWTFGQGTKVEFN

SEQ ID NO: 28115 - DNA, 321 bp, synthetic construct
  misc_feature 1..321: note = Description of Artificial Sequence: Synthetic polynucleotide
  source 1..321: mol_type = other DNA
gacatccagatgacccagtctccatcctccctgtctgcatctgtgggagacagagtcaccatcacttgccgggcaagtcagggcattagaaatgatttaggctggtttcagcagaaaccagggaaagcccccaagcgcctgatctatgctgcatccagattgcaaagtggggtcccatcaaggttcagcggcagtggatctgggacagaattcactctcacaatcagcagcctgcagcctgaagattttgcaacttattactgtctacagcataatgattacccattcactttcggccctgggaccaaagtggatatcaaa

SEQ ID NO: 28116 - protein, 107 aa, synthetic construct
  REGION 1..107: note = Description of Artificial Sequence: Synthetic polypeptide
DIQMTQSPSSLSASVGDRVTITCRASQGIRNDLGWFQQKPGKAPKRLIYAASRLQSGVPSRFSGSGSGTEFTLTISSLQPEDFATYYCLQHNDYPFTFGPGTKVDIK

SEQ ID NO: 28117 - DNA, 321 bp, synthetic construct
  misc_feature 1..321: note = Description of Artificial Sequence: Synthetic polynucleotide
  source 1..321: mol_type = other DNA
gacatccagatgacccagtctccatcctccctgtctgcatctgtaggagacagagtcaccatcacttgccgggcaagtcagggcattagaaatgatttaggctggtatcagcagaaaccagggaaagcccctaagcgcctgatctatgctgcatccagtttgcaaagtggggtcccatcaaggttcagcggcagtggatctgggacagaattcactctcacaatcagcagcctgcagcctgaagattttgcaacttatcactgtctacagcataatgattacccattcactttcggccctgggaccaaagtggaaatcaaa

SEQ ID NO: 28118 - protein, 107 aa, synthetic construct
  REGION 1..107: note = Description of Artificial Sequence: Synthetic polypeptide
DIQMTQSPSSLSASVGDRVTITCRASQGIRNDLGWYQQKPGKAPKRLIYAASSLQSGVPSRFSGSGSGTEFTLTISSLQPEDFATYHCLQHNDYPFTFGPGTKVEIK

SEQ ID NO: 28119 - DNA, 321 bp, synthetic construct
  misc_feature 1..321: note = Description of Artificial Sequence: Synthetic polynucleotide
  source 1..321: mol_type = other DNA
gacatccagatgacccagtctccatcttccgtgtctgcatctgtaggagacagagtcaccatcacttgtcgggcgagtcagtttattagcagctggttagcctggtatcagcagaaaccagggaaagcccctaagttcctgatctatgctgcatccagtttgcaaagtggggtcccatcaaggttcagcggcagtggatctgggacagatttcactctcaccatcagcagcctgcagcctgaagattttgcaacttactattgtcaacaggctaacagtttcccgtggacgttcggccaagggaccaaggtggaaatcaac

SEQ ID NO: 28120 - protein, 107 aa, synthetic construct
  REGION 1..107: note = Description of Artificial Sequence: Synthetic polypeptide
DIQMTQSPSSVSASVGDRVTITCRASQFISSWLAWYQQKPGKAPKFLIYAASSLQSGVPSRFSGSGSGTDFTLTISSLQPEDFATYYCQQANSFPWTFGQGTKVEIN

SEQ ID NO: 28121 - DNA, 363 bp, synthetic construct
  misc_feature 1..363: note = Description of Artificial Sequence: Synthetic polynucleotide
  source 1..363: mol_type = other DNA
caggtgcagctggtggagtctgggggaggcgtggtccagcctgggaggtccctgagactctcctgtgcagcctctggattcaccttcagtaactatggcatgcactgggtccgccaggctccaggcaaggggctggagtgggtggcagttatatcatatgttggaagtaataaatactatgcagactccgtgaagggccgattcaccatctccagagacaattccaagaacacgctgtatctgcaaatgaacaccctgagagctgaggacacggctgtgtattactgtgcgaggagaggagcagtggctccgtactacggtatggacgtctggggccaagggaccacggtcaccgtctcctca

SEQ ID NO: 28122 - protein, 121 aa, synthetic construct
  REGION 1..121: note = Description of Artificial Sequence: Synthetic polypeptide
QVQLVESGGGVVQPGRSLRLSCAASGFTFSNYGMHWVRQAPGKGLEWVAVISYVGSNKYYADSVKGRFTISRDNSKNTLYLQMNTLRAEDTAVYYCARRGAVAPYYGMDVWGQGTTVTVSS

SEQ ID NO: 28123 - DNA, 354 bp, synthetic construct
  misc_feature 1..354: note = Description of Artificial Sequence: Synthetic polynucleotide
  source 1..354: mol_type = other DNA
caggtgcagctggtgcagtctggggctgaggtgaagaagcctggggcctcagtgaaggtctcctgcaaggcttctggatacaccttcaccaattatgatatcaactgggtgcgacaggccactggacaagggcttgagtggatgggatggatgacccctaacagtggtaacacaggctatgcacagaagttccagggcagagtcaccatgaccaggaacacttccatgagcaccgcctacatggagctgagcagcctgagatctgaggactcggccgtgtattactgttcctatagcagtggctggtacatgtttgactactggggccagggaaccctggtcaccgtctcctca

SEQ ID NO: 28124 - protein, 118 aa, synthetic construct
  REGION 1..118: note = Description of Artificial Sequence: Synthetic polypeptide
QVQLVQSGAEVKKPGASVKVSCKASGYTFTNYDINWVRQATGQGLEWMGWMTPNSGNTGYAQKFQGRVTMTRNTSMSTAYMELSSLRSEDSAVYYCSYSSGWYMFDYWGQGTLVTVSS

SEQ ID NO: 28125 - DNA, 354 bp, synthetic construct
  misc_feature 1..354: note = Description of Artificial Sequence: Synthetic polynucleotide
  source 1..354: mol_type = other DNA
caggtgcagttggtgcagtctggggctgaggtgaagaagcctggggcctcagtgaaggtctcctgcaaggcttctggatacaccttcaccaattatgatatcaactgggtgcgacaggccactggacaagggcttgagtggatgggatggatgaaccctaacagtggtaacacaggctatgcacagaagttccagggcagagtcaccatgaccaggaacacctccacaagcacagcccacatggagctgagcagcctgagatctgaggacacggccgtgtattactgtgcggtctccagtggctggaactggttcgacccctggggccagggaaccctggtcaccgtctcctca

SEQ ID NO: 28126 - protein, 118 aa, synthetic construct
  REGION 1..118: note = Description of Artificial Sequence: Synthetic polypeptide
QVQLVQSGAEVKKPGASVKVSCKASGYTFTNYDINWVRQATGQGLEWMGWMNPNSGNTGYAQKFQGRVTMTRNTSTSTAHMELSSLRSEDTAVYYCAVSSGWNWFDPWGQGTLVTVSS

SEQ ID NO: 28127 - DNA, 363 bp, synthetic construct
  misc_feature 1..363: note = Description of Artificial Sequence: Synthetic polynucleotide
  source 1..363: mol_type = other DNA
caggtgcaactggtggagtctgggggaggcgtggtccagcctgggaggtccctgagactctcctgtgcagcctctggattcaccttcagtaactatggcatgcactgggtccgccaggctccaggcaaggggctggagtgggtggcagttatatcatatgatggaagtaatgaatactatgcagactccgtgaagggccgattcaccatctccagagacaattccaagaacacgctgtatctgcaaatgaacagcctgagagctgaggacacggctgtgtattactgtgcgagagatcacagatatggggttcggggaggctttgactactggggccagggaaccctggtcaccgtctcctca

SEQ ID NO: 28128 - protein, 121 aa, synthetic construct
  REGION 1..121: note = Description of Artificial Sequence: Synthetic polypeptide
QVQLVESGGGVVQPGRSLRLSCAASGFTFSNYGMHWVRQAPGKGLEWVAVISYDGSNEYYADSVKGRFTISRDNSKNTLYLQMNSLRAEDTAVYYCARDHRYGVRGGFDYWGQGTLVTVSS

SEQ ID NO: 28129 - DNA, 354 bp, synthetic construct
  misc_feature 1..354: note = Description of Artificial Sequence: Synthetic polynucleotide
  source 1..354: mol_type = other DNA
caggttcagctggtccagtctggagctgaggtgaagaagcctggggcctcagtgaaggtctcctgcaaggcttctggttacacctttgccacctatggtatcagctgggtgcgacaggcccctggacaggggcttgagtggatgggatggatcagcgcttacaatggtaacacaaactatgcacagaagctccagggcagagtcaccatgaccacagacacatccacgagcacagcctacatggagctgaggagcctgagatctgacgacacggccgtgtattactgtgcgagaggggaagcagtggctgtcttcgacccctggggccagggaaccctggtcaccgtctcctca

SEQ ID NO: 28130 - protein, 118 aa, synthetic construct
  REGION 1..118: note = Description of Artificial Sequence: Synthetic polypeptide
QVQLVQSGAEVKKPGASVKVSCKASGYTFATYGISWVRQAPGQGLEWMGWISAYNGNTNYAQKLQGRVTMTTDTSTSTAYMELRSLRSDDTAVYYCARGEAVAVFDPWGQGTLVTVSS

SEQ ID NO: 28131 - DNA, 378 bp, synthetic construct
  misc_feature 1..378: note = Description of Artificial Sequence: Synthetic polynucleotide
  source 1..378: mol_type = other DNA
caggtgcagctggtggagtctgggggaggcgtggtccagcctgggaggtccctgagactctcctgtgcagcgtctggattcaccttcagtagctatggcatgcactgggtccgccaggctccaggcaaggggctggagtgggtggcagttatatggtttgatggcagtaataaatactatgtagactccgtgaaggaccgattcaccatctccagagacaattccaagaacacgctgtatctgcaaatgaacagcctgagagccgaggacacggctgtttattactgtgcgagagatcgggtggagggttcggggactccctactactactacggtatggacgtctggggccaagggaccacggtcaccgtctcctca

SEQ ID NO: 28132 - protein, 126 aa, synthetic construct
  REGION 1..126: note = Description of Artificial Sequence: Synthetic polypeptide
QVQLVESGGGVVQPGRSLRLSCAASGFTFSSYGMHWVRQAPGKGLEWVAVIWFDGSNKYYVDSVKDRFTISRDNSKNTLYLQMNSLRAEDTAVYYCARDRVEGSGTPYYYYGMDVWGQGTTVTVSS

SEQ ID NO: 28133 - DNA, 351 bp, synthetic construct
  misc_feature 1..351: note = Description of Artificial Sequence: Synthetic polynucleotide
  source 1..351: mol_type = other DNA
caggtgcagctggtgcagtctggggctgaggtgaagaagcctggggcctcagtgaaggtctcctgcaaggcttctggatacaccttcaccggctaccatatgcactgggtgcgacaggcccctggacaagggcttgagtggatgggatggatcaaccctaacaatggtggcacaagctatgcacagaagtttcaggacagggtcaacatgaccagggacacgtccatcagcacagcctacatggagctgagcaggctgagatctgacgacacggccgtgtactactgtgcgagagatagtaggtcgtcctgggactactggggccagggaaccctggtcaccgtctcctca

SEQ ID NO: 28134 - protein, 117 aa, synthetic construct
  REGION 1..117: note = Description of Artificial Sequence: Synthetic polypeptide
QVQLVQSGAEVKKPGASVKVSCKASGYTFTGYHMHWVRQAPGQGLEWMGWINPNNGGTSYAQKFQDRVNMTRDTSISTAYMELSRLRSDDTAVYYCARDSRSSWDYWGQGTLVTVSS

SEQ ID NO: 28135 - DNA, 345 bp, synthetic construct
  misc_feature 1..345: note = Description of Artificial Sequence: Synthetic polynucleotide
  source 1..345: mol_type = other DNA
caggtgcagctgcaggagtcgggcccaggactggtgaagccttcggagaccctgtccctcaactgcactgtctctggtggctccatcaggagttactactggagctggatccggcagcccgccgggaagggactggagtggattgggcgtatctataccagtgggagcaccgactacaacccctccctcaagagtcgaatcaccatgtcagtagacacgtccaagaaccagttctctttgaagctgagctctgtgaccgccgcggacacggccgtgtattactgtgcgagagggttcggtgactgggactactggggccagggaaccctggtcaccgtctcctca

SEQ ID NO: 28136 - protein, 115 aa, synthetic construct
  REGION 1..115: note = Description of Artificial Sequence: Synthetic polypeptide
QVQLQESGPGLVKPSETLSLNCTVSGGSIRSYYWSWIRQPAGKGLEWIGRIYTSGSTDYNPSLKSRITMSVDTSKNQFSLKLSSVTAADTAVYYCARGFGDWDYWGQGTLVTVSS

SEQ ID NO: 28137 - DNA, 351 bp, synthetic construct
  misc_feature 1..351: note = Description of Artificial Sequence: Synthetic polynucleotide
  source 1..351: mol_type = other DNA
caggtgcagctggtgcagtctggggctgaggtgaagaagcctggggcctcagtgaaggtctcctgcaaggcttctggatacaccttcaccggctactatttgcactgggtgcgacaggcccctggacaagggcttgagtggatgggatggatcaaccctaatagaaatggcacaaactatgcacagaagtttcagggcagggtcaccatgaccagggacacgtccatcagcacagccttcatggagctgagcaggctgagatctgacgacacggccgtgtattactgtgcgagagacggtaccagcagctttgactactggggccagggaaccctggtcaccgtctcctca

SEQ ID NO: 28138 - protein, 117 aa, synthetic construct
  REGION 1..117: note = Description of Artificial Sequence: Synthetic polypeptide
QVQLVQSGAEVKKPGASVKVSCKASGYTFTGYYLHWVRQAPGQGLEWMGWINPNRNGTNYAQKFQGRVTMTRDTSISTAFMELSRLRSDDTAVYYCARDGTSSFDYWGQGTLVTVSS

SEQ ID NO: 28139 - DNA, 351 bp, synthetic construct
  misc_feature 1..351: note = Description of Artificial Sequence: Synthetic polynucleotide
  source 1..351: mol_type = other DNA
caggtgcagctggtgcagtctggggctgaggtgaagaagcctggggcctcagtgaaggtctcctgcaaggcttctggatacaccttcaccggctactatttgcactgggtgcgacaggcccctggacaagggcttgagtggatgggatggatcaaccctaacagaaatggcacaaactatgcacagaattttcagggcagggtcaccatgaccagggacacgtccatcagcacagcctacatggagctgagcagactgaaatctgacgacacggccgtgtattactgtgcgagagacggtaccagtagctttgactactggggccagggaaccctggtcaccgtctcctca

SEQ ID NO: 28140 - protein, 117 aa, synthetic construct
  REGION 1..117: note = Description of Artificial Sequence: Synthetic polypeptide
QVQLVQSGAEVKKPGASVKVSCKASGYTFTGYYLHWVRQAPGQGLEWMGWINPNRNGTNYAQNFQGRVTMTRDTSISTAYMELSRLKSDDTAVYYCARDGTSSFDYWGQGTLVTVSS

SEQ ID NO: 28141 - DNA, 345 bp, synthetic construct
  misc_feature 1..345: note = Description of Artificial Sequence: Synthetic polynucleotide
  source 1..345: mol_type = other DNA
caggtgcagctacaacagtggggcgcaggactgttgaagccttcggagaccctgtccctcacttgcgctgtcaatggtgggcccttcagcggttgctactggagctggatccgccagcccccagggaaggggctggagtggattggggaaatcaattatagtggaaggaccaacttcaacccgtccctcaagagtcgagtcaccatatcagttgacacgtccaagaaccagttctccctgaagctgagctctgtgaccgccgcggacacggctgtgtattactgtgcgagagactacggcggtatggacgtctggggccaagggaccacggtcaccgtctcctca

SEQ ID NO: 28142 - protein, 115 aa, synthetic construct
  REGION 1..115: note = Description of Artificial Sequence: Synthetic polypeptide
QVQLQQWGAGLLKPSETLSLTCAVNGGPFSGCYWSWIRQPPGKGLEWIGEINYSGRTNFNPSLKSRVTISVDTSKNQFSLKLSSVTAADTAVYYCARDYGGMDVWGQGTTVTVSS

SEQ ID NO: 28143 - DNA, 369 bp, synthetic construct
  misc_feature 1..369: note = Description of Artificial Sequence: Synthetic polynucleotide
  source 1..369: mol_type = other DNA
caggtgcagctggtggagtctgggggaggcgtggtccagcctgggaggtccctgagactctcctgtgcagcgtctggattcaccttcagtgactctctcatgcactgggtccgccaggctccaggcaaggggctggagtgggtggcagttatatggtatgatggaagtaataaatactatacagactccgttaagggccgattcaccatctccagagacaattccaagaacacgctgtatctgcaaatgaacagcctgagagccgaggacacggctgtgtattactgtgcgagagaaaactatagcagtggctggtacgggtacggtatggacgtctggggccaagggaccacggtcaccgtctcctca

SEQ ID NO: 28144 - protein, 123 aa, synthetic construct
  REGION 1..123: note = Description of Artificial Sequence: Synthetic polypeptide
QVQLVESGGGVVQPGRSLRLSCAASGFTFSDSLMHWVRQAPGKGLEWVAVIWYDGSNKYYTDSVKGRFTISRDNSKNTLYLQMNSLRAEDTAVYYCARENYSSGWYGYGMDVWGQGTTVTVSS

SEQ ID NO: 28145 - DNA, 363 bp, synthetic construct
  misc_feature 1..363: note = Description of Artificial Sequence: Synthetic polynucleotide
  source 1..363: mol_type = other DNA
caggtgcagctggtggagtctgggggaggcgtggtccagcctgggaggtccctgagactctcctgtgcagcgtctggattcaccttcagtagctatggcatgcactgggtccgccaggctccaggcaaggggctggagtgggtggcagttatatggtatgatggaagtaataaatactatgcagactccgtgaagggccgattcaccatctccagagacaattccaagaacacgctgtatctgcaaatgaacagcctgagagccgaggacacggctctgtattactgtgcgagaaggtatagcagcagctggtcgggcggtatggacgtctggggccaagggaccacggtcaccgtctcctca

SEQ ID NO: 28146 - protein, 121 aa, synthetic construct
  REGION 1..121: note = Description of Artificial Sequence: Synthetic polypeptide
QVQLVESGGGVVQPGRSLRLSCAASGFTFSSYGMHWVRQAPGKGLEWVAVIWYDGSNKYYADSVKGRFTISRDNSKNTLYLQMNSLRAEDTALYYCARRYSSSWSGGMDVWGQGTTVTVSS

SEQ ID NO: 28147 - DNA, 360 bp, synthetic construct
  misc_feature 1..360: note = Description of Artificial Sequence: Synthetic polynucleotide
  source 1..360: mol_type = other DNA
caggtgcagctggtggagtctgggggaggcgtggtccagcctgggaggtccctgagactctcctgtgcagcgtctggattcaccttcagtaactatggcatggactgggtccgccaggctccaggcaaggggctggagtgggtggcagttatatggtatgatggaagtaatgactactatgcagactccgtgaagggccgattcaccatctccagagacaattccaagaacacgctgtttctgcaaatgaacagcctgagagccgaggacacggctgtgtattactgtgcgagagatcgggggatcgggtacaacgatatggacgtctggggccaagggaccacggtcaccgtctcctca

SEQ ID NO: 28148 - protein, 120 aa, synthetic construct
  REGION 1..120: note = Description of Artificial Sequence: Synthetic polypeptide
QVQLVESGGGVVQPGRSLRLSCAASGFTFSNYGMDWVRQAPGKGLEWVAVIWYDGSNDYYADSVKGRFTISRDNSKNTLFLQMNSLRAEDTAVYYCARDRGIGYNDMDVWGQGTTVTVSS

SEQ ID NO: 28149 - DNA, 363 bp, synthetic construct
  misc_feature 1..363: note = Description of Artificial Sequence: Synthetic polynucleotide
  source 1..363: mol_type = other DNA
caggtgcagctggtggagtctgggggaggcgtggtccagcctgggaagtccctgagactctcctgtgctgcgtctggattcaccttcagtaactatggcttacactgggtccgccaggctccaggcaaggggctggagtgggtggcaattatatggtatgatggaagtaataaatactatgcagactccgtgaagggccgattcaccatctccagagacaattccaagaacacgctgtatctgcaaatgaacagcctgagagccgaggacacggctgtgtattactgtgcgagagatcattacgatttttggagtggtcactttgactactggggccagggaaccctggtcaccgtctcctca

SEQ ID NO: 28150 - protein, 121 aa, synthetic construct
  REGION 1..121: note = Description of Artificial Sequence: Synthetic polypeptide
QVQLVESGGGVVQPGKSLRLSCAASGFTFSNYGLHWVRQAPGKGLEWVAIIWYDGSNKYYADSVKGRFTISRDNSKNTLYLQMNSLRAEDTAVYYCARDHYDFWSGHFDYWGQGTLVTVSS

SEQ ID NO: 28151 - DNA, 351 bp, synthetic construct
  misc_feature 1..351: note = Description of Artificial Sequence: Synthetic polynucleotide
  source 1..351: mol_type = other DNA
caggtgcagctggtggagtctgggggaggcgtggtccagcctgggaggtccctgagactctcctgtgcagcgtctggattcaccttcagtagctatggcatgcactgggtccgccaggctccaggcaaggggctggagtgggtggcagttatatggtatgatgtaagtaataaatactatggagactccgtgaagggccgattcaccatctccagagacaattccaagaacacgctgtatctgcaaatgaacagcctgagagccgaggacacggctgtgtattactgtgcgagggaagtggggatgacttctgactactggggccagggaaccctggtcaccgtctcctca

SEQ ID NO: 28152 - protein, 117 aa, synthetic construct
  REGION 1..117: note = Description of Artificial Sequence: Synthetic polypeptide
QVQLVESGGGVVQPGRSLRLSCAASGFTFSSYGMHWVRQAPGKGLEWVAVIWYDVSNKYYGDSVKGRFTISRDNSKNTLYLQMNSLRAEDTAVYYCAREVGMTSDYWGQGTLVTVSS

SEQ ID NO: 28153 - DNA, 366 bp, synthetic construct
  misc_feature 1..366: note = Description of Artificial Sequence: Synthetic polynucleotide
  source 1..366: mol_type = other DNA
caggtgcagctggtgcagtctggggctgaggtgaagaagcctggggcctcagtgaaggtctcctgcaaggcttctggatacaccttcatcagttatgatatcaactgggtgcgacaggccactggacaagggcttgagtggatgggatggatgaaccctaaaaggggtaacacaggctatgcacagaagttccagggcagagtcaccatgaccagggacacctccataagcacagcctacatggagctgagcagcctgagatctgaggacacggccgtttattactgtgcgagaggagacccgtataactggaactcctacgctatggacgtctggggccaaggggccacggtcaccgtctcctca

SEQ ID NO: 28154 - protein, 122 aa, synthetic construct
  REGION 1..122: note = Description of Artificial Sequence: Synthetic polypeptide
QVQLVQSGAEVKKPGASVKVSCKASGYTFISYDINWVRQATGQGLEWMGWMNPKRGNTGYAQKFQGRVTMTRDTSISTAYMELSSLRSEDTAVYYCARGDPYNWNSYAMDVWGQGATVTVSS

SEQ ID NO: 28155 - DNA, 369 bp, synthetic construct
  misc_feature 1..369: note = Description of Artificial Sequence: Synthetic polynucleotide
  source 1..369: mol_type = other DNA
caggtgcagctggtggagtctgggggaggcgtggtccagcctgggaggtccctgagactctcctgtgcagcgtctggattcaccttcagtgactatgtcatgcactgggtccgccaggctccaggcaaggggctggagtgggtggcagttatatggtatgatggaagtaataaatactatgtagactccgtgaagggccgattcaccatctccagagacaattccaggaacacgctgtatctgcaaatgaacagcctgagagccgaggacacggctgtgtattactgtgcgagagaacggtatagcagtggcttgtacgactacggtatggacgtctggggccaagggaccacggtcaccgtctcctca

SEQ ID NO: 28156 - protein, 123 aa, synthetic construct
  REGION 1..123: note = Description of Artificial Sequence: Synthetic polypeptide
QVQLVESGGGVVQPGRSLRLSCAASGFTFSDYVMHWVRQAPGKGLEWVAVIWYDGSNKYYVDSVKGRFTISRDNSRNTLYLQMNSLRAEDTAVYYCARERYSSGLYDYGMDVWGQGTTVTVSS

SEQ ID NO: 28157 - DNA, 363 bp, synthetic construct
  misc_feature 1..363: note = Description of Artificial Sequence: Synthetic polynucleotide
  source 1..363: mol_type = other DNA
caggtgcagctggtggagtctgggggaggcgtggtccagcctgggaggtccctgagactctcctgtgcagcgtctggattcaccttcagtagctgtggcatgcactgggtccgccaggctccaggcaaggggctggaatgggtggcagctatatggtatgatggaagcaataaatactatgcagactccgtgaagggccgattcaccatctccagagacaattccaagaacacgctgtttctgcaaatgaacagcctgagagccgaggacacggctgtgtattactgtgcgagagacaaaaatataatgggagatacttggtttgacttctggggccagggaaccctggtcaccgtctcctca

SEQ ID NO: 28158 - protein, 121 aa, synthetic construct
  REGION 1..121: note = Description of Artificial Sequence: Synthetic polypeptide
QVQLVESGGGVVQPGRSLRLSCAASGFTFSSCGMHWVRQAPGKGLEWVAAIWYDGSNKYYADSVKGRFTISRDNSKNTLFLQMNSLRAEDTAVYYCARDKNIMGDTWFDFWGQGTLVTVSS

SEQ ID NO: 28159 - DNA, 357 bp, synthetic construct
  misc_feature 1..357: note = Description of Artificial Sequence: Synthetic polynucleotide
  source 1..357: mol_type = other DNA
caggtgcaactggtgcagtctggggctgaggtgaagaagcctggggcctcagtgaaggtctcctgcaaggcttctggatacaccttcaccggctactatatgcactgggtgcgacaggcccctggacaaggacttgagtggatgggatggatcaaccctaatagtggtggcacaaactttgcacagaagtttcagggcagggtcaccttgaccagggacacgtccatcaacacagcctacatggagctgagctggctgcgatctgacgacacggccgtatattactgtgcgcgtggaaagaactatggctcctactttgactactggggccagggaaccctggtcaccgtctcctcg

SEQ ID NO: 28160 - protein, 119 aa, synthetic construct
  REGION 1..119: note = Description of Artificial Sequence: Synthetic polypeptide
QVQLVQSGAEVKKPGASVKVSCKASGYTFTGYYMHWVRQAPGQGLEWMGWINPNSGGTNFAQKFQGRVTLTRDTSINTAYMELSWLRSDDTAVYYCARGKNYGSYFDYWGQGTLVTVSS

SEQ ID NO: 28161 - DNA, 345 bp, synthetic construct; identical to SEQ ID NO: 28141
  misc_feature 1..345: note = Description of Artificial Sequence: Synthetic polynucleotide
  source 1..345: mol_type = other DNA

SEQ ID NO: 28162 - protein, 115 aa, synthetic construct; identical to SEQ ID NO: 28142
  REGION 1..115: note = Description of Artificial Sequence: Synthetic polypeptide

SEQ ID NO: 28163 - DNA, 345 bp, synthetic construct
  misc_feature 1..345: note = Description of Artificial Sequence: Synthetic polynucleotide
  source 1..345: mol_type = other DNA
caggtgcagctacaacagtggggcgcaggactgttgaagccttcggagaccctgtccctcacttgcgctgtcaatggtgggcccttcagcggttgctactggagcgggatccgccagcccccagggaaggggcgggagtggattggggaaatcaattatagtggaaggaccaacttcaacccgtccctcaagagtcgagtcaccatatcagttgacacgtccaagaaccagttctccctgaagctgagctctgtgaccgccgcggacacggctgtgtattactgtgcgagagactacggcggtatggacgtctggggccaagggaccacggtcaccgtctcctca

SEQ ID NO: 28164 - protein, 115 aa, synthetic construct
  REGION 1..115: note = Description of Artificial Sequence: Synthetic polypeptide
QVQLQQWGAGLLKPSETLSLTCAVNGGPFSGCYWSGIRQPPGKGREWIGEINYSGRTNFNPSLKSRVTISVDTSKNQFSLKLSSVTAADTAVYYCARDYGGMDVWGQGTTVTVSS

SEQ ID NO: 28165 - DNA, 360 bp, synthetic construct
  misc_feature 1..360: note = Description of Artificial Sequence: Synthetic polynucleotide
  source 1..360: mol_type = other DNA
caggtgcagctggtggagtctgggggaggcgtggtccagcctgggaggtccctgagactctcctgtgcagcctctggattcaccttcagtagctatggcatgcactgggtccgccaggctccaggcaaggggctggagtgggtggcagttatatcatatgatggaggttataaaaactatgcagactccgtgaagggccgattcaccatctccagagacaattccaagaacacgctgtatctgcaaatgaatagcctgagagctgaggacacggctgtgtattactgtgcgagaggtacccacgggtactactacggtgtggacgtctggggccaagggaccacggtcaccgtctcctca

SEQ ID NO: 28166 - protein, 120 aa, synthetic construct
  REGION 1..120: note = Description of Artificial Sequence: Synthetic polypeptide
QVQLVESGGGVVQPGRSLRLSCAASGFTFSSYGMHWVRQAPGKGLEWVAVISYDGGYKNYADSVKGRFTISRDNSKNTLYLQMNSLRAEDTAVYYCARGTHGYYYGVDVWGQGTTVTVSS

SEQ ID NO: 28167 - DNA, 345 bp, synthetic construct; identical to SEQ ID NO: 28141
  misc_feature 1..345: note = Description of Artificial Sequence: Synthetic polynucleotide
  source 1..345: mol_type = other DNA

SEQ ID NO: 28168 - protein, 115 aa, synthetic construct; identical to SEQ ID NO: 28142
  REGION 1..115: note = Description of Artificial Sequence: Synthetic polypeptide

SEQ ID NO: 28169 - DNA, 366 bp, synthetic construct
  misc_feature 1..366: note = Description of Artificial Sequence: Synthetic polynucleotide
  source 1..366: mol_type = other DNA
caggtgcagctgcaggagtcgggcccaggactggtgaagccttcacagaccctgtccctcacctgcattgtctctggtggctccatgaggagtggtggtgactactggagctggatccgccagcacccagggaagggcctggagtggtttgggtacatctattacagtgggagcacctactacaacccgtccctcaagagtcgagttaccttatcagtagacacgtctaagaaccagttctccctgaagctgagctctgtgactgccgcggacacggccgtgtattactgtgcgagaatggactacagtaactactactacggtatggacgtctggggccaagggacctcggtcaccgtctcctca

SEQ ID NO: 28170 - protein, 122 aa, synthetic construct
  REGION 1..122: note = Description of Artificial Sequence: Synthetic polypeptide
QVQLQESGPGLVKPSQTLSLTCIVSGGSMRSGGDYWSWIRQHPGKGLEWFGYIYYSGSTYYNPSLKSRVTLSVDTSKNQFSLKLSSVTAADTAVYYCARMDYSNYYYGMDVWGQGTSVTVSS

SEQ ID NO: 28171 - DNA, 345 bp, synthetic construct
  misc_feature 1..345: note = Description of Artificial Sequence: Synthetic polynucleotide
  source 1..345: mol_type = other DNA
caggtgcagctccaacagtggggcgcaggactgttgaagccttcggagaccctgtccctcacttgcgctgtcaatggtgggcccttcagcggttcctactggagctggatccgccagcccccagggaaggggctggagtggattggggaaatcaattatagtggaaggaccaacttcaacccgtccctcaagagtcgagtcaccatatcagttgacacgtccaagaaccagttctccctgaagctgagctctgtgaccgccgcggacacggctgtgtattactgtgcgagagactacggcggtatggacgtctggggccaagggaccacggtcaccgtctcctca

SEQ ID NO: 28172 - protein, 115 aa, synthetic construct
  REGION 1..115: note = Description of Artificial Sequence: Synthetic polypeptide
QVQLQQWGAGLLKPSETLSLTCAVNGGPFSGSYWSWIRQPPGKGLEWIGEINYSGRTNFNPSLKSRVTISVDTSKNQFSLKLSSVTAADTAVYYCARDYGGMDVWGQGTTVTVSS

SEQ ID NO: 28173 - DNA, 369 bp, synthetic construct
  misc_feature 1..369: note = Description of Artificial Sequence: Synthetic polynucleotide
  source 1..369: mol_type = other DNA
caggtgcagctggtggagtctgggggaggcgtggtccagcctgggaggtccctgagactctcctgtgcagcgtctggattcaccttcagtagctatgtcatgcactgggtccgccaggctccaggcaaggggctggagtgggtggcagctatatggtatgatggaagtaataaatactatgcagactccgtgaagggccgattcaccatctccagagacaattccaagaacacgctggatctgcaaatgaacagcctgagagccgaggacacggctgtgtattactgtgcgagagagttgtatagcagcaactggtacgactacggtatggacgtctggggccaagggaccacggtcaccgtctcctca

SEQ ID NO: 28174 - protein, 123 aa, synthetic construct
  REGION 1..123: note = Description of Artificial Sequence: Synthetic polypeptide
QVQLVESGGGVVQPGRSLRLSCAASGFTFSSYVMHWVRQAPGKGLEWVAAIWYDGSNKYYADSVKGRFTISRDNSKNTLDLQMNSLRAEDTAVYYCARELYSSNWYDYGMDVWGQGTTVTVSS

SEQ ID NO: 28175 - DNA, 339 bp, synthetic construct
  misc_feature 1..339: note = Description of Artificial Sequence: Synthetic polynucleotide
  source 1..339: mol_type = other DNA
gaggtgcagctggtggagtctgggggaggcctggtcaagcctggggggtccctgagactctcctgtgcagcctctggattcaccttcagtagctataacatgaactgggtccgccaggctccagggaaggggctggagtgggtctcatccattagtggtagtagtagttacatatactacgcagactcagtgaagggccgattcaccatctccagagacaacgccaagaactcactgtatctgcaaatgaacagcctgagagccgaggacacggctgtgtattactgtgcgagaagcctcgacctctggggccagggaaccctggtcaccgtctcctca

SEQ ID NO: 28176 - protein, 113 aa, synthetic construct
  REGION 1..113: note = Description of Artificial Sequence: Synthetic polypeptide
EVQLVESGGGLVKPGGSLRLSCAASGFTFSSYNMNWVRQAPGKGLEWVSSISGSSSYIYYADSVKGRFTISRDNAKNSLYLQMNSLRAEDTAVYYCARSLDLWGQGTLVTVSS

SEQ ID NO: 28177 - DNA, 345 bp, synthetic construct
  misc_feature 1..345: note = Description of Artificial Sequence: Synthetic polynucleotide
  source 1..345: mol_type = other DNA
gaggtgcagttggtggagtctgggggaggcctggtcaagcctggggggtccctgagactctcctgtgcagcctctggattcaccttcagtagctatagcatgaactgggtccgccaggctccagggaaggggctggagtgggtctcatccattagtggtagtagcagttacatatactacgtagactcagtgaagggccgattcaccatctccagagacaacgccaagaactcactgtatctgcaaatgaacagcctgagagccgaggacacggctgtgtattactgtgcgagagtcaactcttttgactcctggggccagggaaccctggtcaccgtctcctca

SEQ ID NO: 28178 - protein, 115 aa, synthetic construct
  REGION 1..115: note = Description of Artificial Sequence: Synthetic polypeptide
EVQLVESGGGLVKPGGSLRLSCAASGFTFSSYSMNWVRQAPGKGLEWVSSISGSSSYIYYVDSVKGRFTISRDNAKNSLYLQMNSLRAEDTAVYYCARVNSFDSWGQGTLVTVSS

SEQ ID NO: 28179 - DNA, 366 bp, synthetic construct
  misc_feature 1..366: note = Description of Artificial Sequence: Synthetic polynucleotide
  source 1..366: mol_type = other DNA
gaggtgcagctgttggagtctgggggaggcttggtacagcctggggggtccctgagactctcctgtgcagcctctggattcacctttagcagctatgccatgagctgggtccgccaggctccagggaaggggctggagtgggtctcagttcttagtggtagtggtggtagcacattctacgcagactccgtgaagggccggttcaccatctccagagagaattccaagaacacgctgtatctgcaaatgagcagcctgagagccgaggacacggccgtatattactgtgcccgaagaggccgtgaatatagtggctacgattactttgactactggggccagggaaccctggtcaccgtctcctca

SEQ ID NO: 28180 - protein, 122 aa, synthetic construct
  REGION 1..122: note = Description of Artificial Sequence: Synthetic polypeptide
EVQLLESGGGLVQPGGSLRLSCAASGFTFSSYAMSWVRQAPGKGLEWVSVLSGSGGSTFYADSVKGRFTISRENSKNTLYLQMSSLRAEDTAVYYCARRGREYSGYDYFDYWGQGTLVTVSS

SEQ ID NO: 28181 - DNA, 354 bp, synthetic construct
  misc_feature 1..354: note = Description of Artificial Sequence: Synthetic polynucleotide
  source 1..354: mol_type = other DNA
caggtgcagctggtgcaatctggggctgaggtgaagaagcctggggcctcagtgaaggtctcctgcaaggcttctggatacaccttcaccaattatgatgtcaactgggtgcgacaggccactggacaagggcttgagtggatgggatggatgcaccctaacagtggtaacacaggctatgcacagaagttccggggcagagtcaccatgaccaggaacacctccctaagcacagtctacatggagctgagcagcctgcgatctgaggacacggccgtgtattactgtgcctatagcagtggctggtacgtttttgactactggggccagggaaccctggtcaccgtctcctca

SEQ ID NO: 28182 - protein, 118 aa, synthetic construct
  REGION 1..118: note = Description of Artificial Sequence: Synthetic polypeptide
QVQLVQSGAEVKKPGASVKVSCKASGYTFTNYDVNWVRQATGQGLEWMGWMHPNSGNTGYAQKFRGRVTMTRNTSLSTVYMELSSLRSEDTAVYYCAYSSGWYVFDYWGQGTLVTVSS

SEQ ID NO: 28183 - DNA, 354 bp, synthetic construct
  misc_feature 1..354: note = Description of Artificial Sequence: Synthetic polynucleotide
  source 1..354: mol_type = other DNA
caggtgcagctggtgcagtctggggctgaggtgaagaagcctggggcctcagtgaaggtctcctgcaaggcttctggatacaccttcaccaattatgatgtcaactgggtgcgacaggccactggacaagggcttgagtggatgggatggatgcaccctaacagtggtaacacaggctatgcacagaagttccagggcagagtcaccatgaccaggaacacctccataagcacagcctacatggagctgagcagcctgcgatctgaggacacggccgtgtattactgtgcctatagcagtggctggtacgtttttgactcctggggccagggaaccctggtcaccgtctcctca

SEQ ID NO: 28184 - protein, 118 aa, synthetic construct
  REGION 1..118: note = Description of Artificial Sequence: Synthetic polypeptide
QVQLVQSGAEVKKPGASVKVSCKASGYTFTNYDVNWVRQATGQGLEWMGWMHPNSGNTGYAQKFQGRVTMTRNTSISTAYMELSSLRSEDTAVYYCAYSSGWYVFDSWGQGTLVTVSS

SEQ ID NO: 28185 - DNA, 354 bp, synthetic construct
  misc_feature 1..354: note = Description of Artificial Sequence: Synthetic polynucleotide
  source 1..354: mol_type = other DNA
caggtgcagctggtgcagtctggggctgaggtgaagaagcctggggcctcagtgaaggtctcctgcaaggcttctggatacaccttcaccaattatgatatcaactgggtgcgacaggtcactggacaagggcttgagtggatgggatggatgcaccctaacagtggtaacacaggctatgcacagaagttccagggcagagtcaccatgaccaggaacacctccataagcacagcctacatggaactgaacagcctgagatctgaggacacggccgtgtattactgttcgcatagcagtggctggtacctctttgactactggggccagggaaccctggtcaccgtctcctca

SEQ ID NO: 28186 - protein, 118 aa, synthetic construct
  REGION 1..118: note = Description of Artificial Sequence: Synthetic polypeptide
QVQLVQSGAEVKKPGASVKVSCKASGYTFTNYDINWVRQVTGQGLEWMGWMHPNSGNTGYAQKFQGRVTMTRNTSISTAYMELNSLRSEDTAVYYCSHSSGWYLFDYWGQGTLVTVSS

SEQ ID NO: 28187 - DNA, 357 bp, synthetic construct
  misc_feature 1..357: note = Description of Artificial Sequence: Synthetic polynucleotide
  source 1..357: mol_type = other DNA
cagctgcagctgcaggagtcgggcccaggactggtgacgccttcggagaccctgtccctcacctgcactgtctctggcggctccatcagcaggagtagttactactggggctggatccgccagcccccagggaaggggctggagtggattgggagtatctattatagtgggagcgcctactccaacccgtccctcaagagtcgagtcaccatatccgtagacacgtccaagaaccagttctccctgaagctgagctctgtgaccgccgcggacacggctctgttttactgtgcgagacttgactctaactggggtcttgactactggggccagggaaccctggtcaccgtctcctca

SEQ ID NO: 28188 - protein, 119 aa, synthetic construct
  REGION 1..119: note = Description of Artificial Sequence: Synthetic polypeptide
QLQLQESGPGLVTPSETLSLTCTVSGGSISRSSYYWGWIRQPPGKGLEWIGSIYYSGSAYSNPSLKSRVTISVDTSKNQFSLKLSSVTAADTALFYCARLDSNWGLDYWGQGTLVTVSS

SEQ ID NO: 28189 - DNA, 369 bp, synthetic construct
  misc_feature 1..369: note = Description of Artificial Sequence: Synthetic polynucleotide
  source 1..369: mol_type = other DNA
caggtgcagctggtggagtctgggggaggcgtggcccagcctgggaggtccctgagactctcctgtgcagcgtctggattcaccttcagtgactatggcatgcactgggtccgccaggctccaggcaaggggctggagtgggtggcagttatatggtatgatggaagtaataagtactatgcagactccgtgaagggccgactcaccatctccagagacaattccaagaacacgctgtatctgcaaatgaacagcctgagagccgaggacacggctgtgtattactgtgcgagagagaggtatagcagtggctggtacgactacggtttggacgtctggggccaagggaccacggtcaccgtctcctca

SEQ ID NO: 28190 - protein, 123 aa, synthetic construct
  REGION 1..123: note = Description of Artificial Sequence: Synthetic polypeptide
QVQLVESGGGVAQPGRSLRLSCAASGFTFSDYGMHWVRQAPGKGLEWVAVIWYDGSNKYYADSVKGRLTISRDNSKNTLYLQMNSLRAEDTAVYYCARERYSSGWYDYGLDVWGQGTTVTVSS

SEQ ID NO: 28191 - DNA, 369 bp, synthetic construct
  misc_feature 1..369: note = Description of Artificial Sequence: Synthetic polynucleotide
  source 1..369: mol_type = other DNA
caggtgcagctggtggagtctgggggaggcgtggtccagcctgggaggtccctgagcctctcctgtgcagcgtctggattcaccttcagtagctatgtcatgcactgggtccgccaggctccaggcaaggggctggagtgggtggcagttatatggtatgatggaagtaataaatactatgcagactccgtgaagggccgattcaccatctccagagacaattccaagaacacgctgtatctgcaaatgaacagcctgagagccgaggacacggctgtgtattactgtgcgagagaacagtatagcagcagctggtacgacttcggtctggacgtctggggccaagggaccacggtcaccgtctcctca

SEQ ID NO: 28192 - protein, 123 aa, synthetic construct
  REGION 1..123: note = Description of Artificial Sequence: Synthetic polypeptide
QVQLVESGGGVVQPGRSLSLSCAASGFTFSSYVMHWVRQAPGKGLEWVAVIWYDGSNKYYADSVKGRFTISRDNSKNTLYLQMNSLRAEDTAVYYCAREQYSSSWYDFGLDVWGQGTTVTVSS

SEQ ID NO: 28193 - DNA, 372 bp, synthetic construct
  misc_feature 1..372: note = Description of Artificial Sequence: Synthetic polynucleotide
  source 1..372: mol_type = other DNA
caggtgcagctggtgcagtctggggctgaggtgaggacgcctggggcctcagtgaaggtctcctgcaaggcttctggatacaccttcaccgactattatatgcactgggtgcgacaggcccctggacaagggcttgagtggatgggatggatcaaccctaacagaggtggcacaaactatgctcagaagtttcagggcagggtcaccatgaccagggacacgtccatcagcacagcctacatggagctgagcaggctgagatctgacgacacggccgtgtattactgtgcgagagaggaggatcgcagtggctggtactactactacggtatggacgtctggggccaagggaccacggtcaccgtctcctca

SEQ ID NO: 28194 - protein, 124 aa, synthetic construct
  REGION 1..124: note = Description of Artificial Sequence: Synthetic polypeptide
QVQLVQSGAEVRTPGASVKVSCKASGYTFTDYYMHWVRQAPGQGLEWMGWINPNRGGTNYAQKFQGRVTMTRDTSISTAYMELSRLRSDDTAVYYCAREEDRSGWYYYYGMDVWGQGTTVTVSS

SEQ ID NO: 28195 - DNA, 354 bp, synthetic construct
  misc_feature 1..354: note = Description of Artificial Sequence: Synthetic polynucleotide
  source 1..354: mol_type = other DNA
cagatcaccttgaaggagtctggtcctacgctggtgaaacccacacagaccctcacgctgacctgcaccttctctgggttctcactcagcactagtggagtgggtgtgggctggatccgtcagcccccaggaaaggccctggagtggcttgcactcatttattggaaagatgatgagcgctacagcccatctctgaagagcaggctcaccatcaccaaggacacttccaaaaaccaggtggtccttacaatgaccaacatggaccctgtggacacagccacatattactgtgcacatgcagtggctgtctcctttgactactggggccagggaaccctggtcaccgtctcctca

SEQ ID NO: 28196 - protein, 118 aa, synthetic construct
  REGION 1..118: note = Description of Artificial Sequence: Synthetic polypeptide
QITLKESGPTLVKPTQTLTLTCTFSGFSLSTSGVGVGWIRQPPGKALEWLALIYWKDDERYSPSLKSRLTITKDTSKNQVVLTMTNMDPVDTATYYCAHAVAVSFDYWGQGTLVTVSS

SEQ ID NO: 28197 - DNA, 372 bp, synthetic construct
  misc_feature 1..372: note = Description of Artificial Sequence: Synthetic polynucleotide
  source 1..372: mol_type = other DNA
caggtgcagctggtgcagtctggggctgaggtgaagaagcctggggcctcagtgaaggtctcctgcaaggcttctggatacaccttcaccggctactatatgcactgggtgcgacaggcccctggacaaggacttgagtggatgggatggatcaacccttacagtggtggcacaaactatgcacagaagtttcagggcagggtcaccatgaccagggacacgtccatcagcacagcctacatggaactgagcaggctgagatctgacgacacggccgtgtattactgtgcgagagatagagcagtggctggaaactacttctactacggtatggacgtctggggccaagggaccacggtcaccgtctcctca

SEQ ID NO: 28198 - protein, 124 aa, synthetic construct
  REGION 1..124: note = Description of Artificial Sequence: Synthetic polypeptide
QVQLVQSGAEVKKPGASVKVSCKASGYTFTGYYMHWVRQAPGQGLEWMGWINPYSGGTNYAQKFQGRVTMTRDTSISTAYMELSRLRSDDTAVYYCARDRAVAGNYFYYGMDVWGQGTTVTVSS

SEQ ID NO: 28199 - DNA, 357 bp, synthetic construct
  misc_feature 1..357: note = Description of Artificial Sequence: Synthetic polynucleotide
  source 1..357: mol_type = other DNA
caactgcagctgcaggagtcgggcccgggactggtgaagccttcggagaccctgtccctcacctgcactgtctctggtggctccatcagcggtagtagttactactggggctggatccgccagcccccggggaaggggctggagtggattgggaatatctattatagtgggagcacctaccacaacccgtccctcaagagtcgagtcaccatatccgtggacacgtccaagaaccagttctccctgaagctgacctctgtgaccgccgcagacacggctgtgttttactgtgcgagacatgatttactttggtcccttgacttctggggccagggaattctggtcaccgtctcctca

SEQ ID NO: 28200 - protein, 119 aa, synthetic construct
  REGION 1..119: note = Description of Artificial Sequence: Synthetic polypeptide
QLQLQESGPGLVKPSETLSLTCTVSGGSISGSSYYWGWIRQPPGKGLEWIGNIYYSGSTYHNPSLKSRVTISVDTSKNQFSLKLTSVTAADTAVFYCARHDLLWSLDFWGQGILVTVSS

SEQ ID NO: 28201 - DNA, 354 bp, synthetic construct
  misc_feature 1..354: note = Description of Artificial Sequence: Synthetic polynucleotide
  source 1..354: mol_type = other DNA
caggtgcagctggtgcagtctggggctgaggtgaagaagcctggggcctcagtgaaggtctcctgcaaggcttctggatacaccttcaccaattatgatatcaactgggtgcgacaggcctctggacaaggacttgagtggatgggatggatgcaccctaacagtggtaacacaggctatgcacagaagttccagggcagagtcaccatgaccaggaacacctccataagcacagcctacatggagctgagcagcctgagatctgaggactcggccgtatattactgtgcgtatagtagtggctggtacaaatttgactactggagccagggaaccctggtcaccgtctcctca

SEQ ID NO: 28202 - protein, 118 aa, synthetic construct
  REGION 1..118: note = Description of Artificial Sequence: Synthetic polypeptide
QVQLVQSGAEVKKPGASVKVSCKASGYTFTNYDINWVRQASGQGLEWMGWMHPNSGNTGYAQKFQGRVTMTRNTSISTAYMELSSLRSEDSAVYYCAYSSGWYKFDYWSQGTLVTVSS

SEQ ID NO: 28203 - DNA, 342 bp, synthetic construct
  misc_feature 1..342: note = Description of Artificial Sequence: Synthetic polynucleotide
  source 1..342: mol_type = other DNA
gaggtgcagctggtggagtctgggggaggcctggtcaagcctggggggtccctgagactctcctgtgcagcctctggattcaccttcagtagctataccatgaactgggtccgccaggctccagggaaggggctggagtgggtctcatccataagtggtagtagtagttacttatactacccagactcagtgaagggccgattcaccatctccagagacaacgccaagaactctctgtatctgcaaatgaacagcctgagagccgaggacacggctgtgtattactgtgcgagagatagaggcagcagctggggccagggaaccctggtcaccgtctcctca

SEQ ID NO: 28204 - protein, 114 aa, synthetic construct
  REGION 1..114: note = Description of Artificial Sequence: Synthetic polypeptide
EVQLVESGGGLVKPGGSLRLSCAASGFTFSSYTMNWVRQAPGKGLEWVSSISGSSSYLYYPDSVKGRFTISRDNAKNSLYLQMNSLRAEDTAVYYCARDRGSSWGQGTLVTVSS

SEQ ID NO: 28205 - DNA, 342 bp, synthetic construct; identical to SEQ ID NO: 28203
  misc_feature 1..342: note = Description of Artificial Sequence: Synthetic polynucleotide
  source 1..342: mol_type = other DNA

SEQ ID NO: 28206 - protein, 114 aa, synthetic construct; identical to SEQ ID NO: 28204
  REGION 1..114: note = Description of Artificial Sequence: Synthetic polypeptide

SEQ ID NO: 28207 - DNA, 369 bp, synthetic construct
  misc_feature 1..369: note = Description of Artificial Sequence: Synthetic polynucleotide
  source 1..369: mol_type = other DNA
caggtgcagctggtggagtctgggggaggcgtggtccagcctgggaggtccctgagactctcctgtgcagcgtctggattcaccttcagtagctatgtcatgcactgggtccgccaggctccaggcaaggggctggagtgggtggcggttatatggtatgatggaagtaataaatactatgcagactccgtgaaggtccgattcaccgtctccagagacaattccaagaacacgctgtctctgcaaatgaacagcctgagagccgaggacacggctgtgtattactgtgcgagagagagatataccagtggctggtatgactacggtatggacgtctggggccaagggaccacggtcaccgtctcctca

SEQ ID NO: 28208 - protein, 123 aa, synthetic construct
  REGION 1..123: note = Description of Artificial Sequence: Synthetic polypeptide
QVQLVESGGGVVQPGRSLRLSCAASGFTFSSYVMHWVRQAPGKGLEWVAVIWYDGSNKYYADSVKVRFTVSRDNSKNTLSLQMNSLRAEDTAVYYCARERYTSGWYDYGMDVWGQGTTVTVSS

SEQ ID NO: 28209 - DNA, 369 bp, synthetic construct; identical to SEQ ID NO: 28207
  misc_feature 1..369: note = Description of Artificial Sequence: Synthetic polynucleotide
  source 1..369: mol_type = other DNA

SEQ ID NO: 28210 - protein, 123 aa, synthetic construct; identical to SEQ ID NO: 28208
  REGION 1..123: note = Description of Artificial Sequence: Synthetic polypeptide

SEQ ID NO: 28211 - DNA, 351 bp, synthetic construct
  misc_feature 1..351: note = Description of Artificial Sequence: Synthetic polynucleotide
  source 1..351: mol_type = other DNA
caggtgcagctggtacagtctggggctgaggtgaagaagcctggggcctcagtgaaggtctcctgcaaggcttctggatacaccttcaacgactactatttgcactgggtgcgacaggcccctggacaaggtcttgagtggatgggatggatccaccctaacagtggtggcacaaactatgcacagaagtttcagggcagggtcaccatgaccagggacacgtccatcagcacagcctacatggagctgagcagcctgagatctgacgacacggccgtgtattcctgtgcgagagatggtaccagctcgtttgactactggggccagggaaccctggtcaccgtctcctca

SEQ ID NO: 28212 - protein, 117 aa, synthetic construct
  REGION 1..117: note = Description of Artificial Sequence: Synthetic polypeptide
QVQLVQSGAEVKKPGASVKVSCKASGYTFNDYYLHWVRQAPGQGLEWMGWIHPNSGGTNYAQKFQGRVTMTRDTSISTAYMELSSLRSDDTAVYSCARDGTSSFDYWGQGTLVTVSS

SEQ ID NO: 28213 - DNA, 351 bp, synthetic construct; identical to SEQ ID NO: 28211
  misc_feature 1..351: note = Description of Artificial Sequence: Synthetic polynucleotide
  source 1..351: mol_type = other DNA

SEQ ID NO: 28214 - protein, 117 aa, synthetic construct; identical to SEQ ID NO: 28212
  REGION 1..117: note = Description of Artificial Sequence: Synthetic polypeptide

SEQ ID NO: 28215 - DNA, 351 bp, synthetic construct
  misc_feature 1..351: note = Description of Artificial Sequence: Synthetic polynucleotide
  source 1..351: mol_type = other DNA
caggtgcagctggtacagtctggggctgaggtgaagaagcctggggcctcagtgaaggtctcctgcaaggcttctggatacaccttcgccgactactatttgcactgggtgcgacaggcccctggacaaggtcttgagtggatgggatggatccaccctaacagtggtggcacaaactttgcacagaagtttcagggcagggtcaccatgaccagggacacgtccatcagcacagcctacctggaactgagcagtctgagatctgacgacacggccttctattactgtgcgagagatggtaccagctcgtttgactactggggccagggaaccctggtcaccgtctcctca

SEQ ID NO: 28216 - protein, 117 aa, synthetic construct
  REGION 1..117: note = Description of Artificial Sequence: Synthetic polypeptide
QVQLVQSGAEVKKPGASVKVSCKASGYTFADYYLHWVRQAPGQGLEWMGWIHPNSGGTNFAQKFQGRVTMTRDTSISTAYLELSSLRSDDTAFYYCARDGTSSFDYWGQGTLVTVSS

SEQ ID NO: 28217 - DNA, 351 bp, synthetic construct; identical to SEQ ID NO: 28215
  misc_feature 1..351: note = Description of Artificial Sequence: Synthetic polynucleotide
  source 1..351: mol_type = other DNA

SEQ ID NO: 28218 - protein, 117 aa, synthetic construct; identical to SEQ ID NO: 28216
  REGION 1..117: note = Description of Artificial Sequence: Synthetic polypeptide

SEQ ID NO: 28219 - DNA, 372 bp, synthetic construct
  misc_feature 1..372: note = Description of Artificial Sequence: Synthetic polynucleotide
  source 1..372: mol_type = other DNA
caggtgaaactggtgcagtctggggctgaggtggagaagcctggggcctcagtgaaggtctcctgcaaggcttcaggatacaccttcaccggctactatctgcactgggtgcgacaggcccctggacaagggcttgagtggatgggatggatcaaccctaacagtggtggcacaaactatgcacagaagtttcagggcagggtcaccatgaccagggacacgtccatcagcacagcctacatggagctgagcaggctgagatctgacgacacggccgtgtattactgtgcgagagtgtattactatggttcggggagttattataacgagtttgacaactggggccagggaaccctggtcaccgtctcctca

SEQ ID NO: 28220 - protein, 124 aa, synthetic construct
  REGION 1..124: note = Description of Artificial Sequence: Synthetic polypeptide
QVKLVQSGAEVEKPGASVKVSCKASGYTFTGYYLHWVRQAPGQGLEWMGWINPNSGGTNYAQKFQGRVTMTRDTSISTAYMELSRLRSDDTAVYYCARVYYYGSGSYYNEFDNWGQGTLVTVSS

SEQ ID NO: 28221 - DNA, 372 bp, synthetic construct; identical to SEQ ID NO: 28219
  misc_feature 1..372: note = Description of Artificial Sequence: Synthetic polynucleotide
  source 1..372: mol_type = other DNA

SEQ ID NO: 28222 - protein, 124 aa, synthetic construct; identical to SEQ ID NO: 28220
  REGION 1..124: note = Description of Artificial Sequence: Synthetic polypeptide

SEQ ID NO: 28223 - DNA, 372 bp, synthetic construct
  misc_feature 1..372: note = Description of Artificial Sequence: Synthetic polynucleotide
  variation 60: note = a, c, t, g, unknown or other
  source 1..372: mol_type = other DNA
caggtgcagttggtgcagtttgggggtgaggtgaagaagcctgggtcctcagtgaaggtntcctgcaaggcttcaggatacaccttcaccggytactatatgcactgggtgcgacaggcccctggacaagggcttgagtggatgggatcgatctaccgtaacagtggtggcacaaattatgcacagaagtttcagggcagggtcaccatgaccagggacaagtccatcagcaccgcctacatggagaagagcaggatcagatctgatgacacggccgtgtattactgtgcgagagccttttactatggttcggggacttattataacgaatttgactactggggccagggaaccctggtcaccgtctcctca

SEQ ID NO: 28224 - protein, 124 aa, synthetic construct
  REGION 1..124: note = Description of Artificial Sequence: Synthetic polypeptide
QVQLVQFGGEVKKPGSSVKVSCKASGYTFTGYYMHWVRQAPGQGLEWMGSIYRNSGGTNYAQKFQGRVTMTRDKSISTAYMEKSRIRSDDTAVYYCARAFYYGSGTYYNEFDYWGQGTLVTVSS

SEQ ID NO: 28225 - DNA, 360 bp, synthetic construct
  misc_feature 1..360: note = Description of Artificial Sequence: Synthetic polynucleotide
  source 1..360: mol_type = other DNA
cagatcaccttgaaggagtctggtcctacgctggtgaaacccacacagaccctcacgctgacctgcaccttctctggattctcactcagcactagtggagtgggtgtgggctggatccgtcagcccccaggaaaggccctggagtggcttgcactcatttattggaatgatgataagcgctacagcccatctctgaagagcaggctcaccatcaccaaggacacctccaaaaaccaggtggtccttacaatgaccaacatggaccctgtggacacagccacatattactgtgcagacaccggtgtcagctgctgctattttcactattggggccagggaaccctggtcaccgtctcctca

SEQ ID NO: 28226 - protein, 120 aa, synthetic construct
  REGION 1..120: note = Description of Artificial Sequence: Synthetic polypeptide
QITLKESGPTLVKPTQTLTLTCTFSGFSLSTSGVGVGWIRQPPGKALEWLALIYWNDDKRYSPSLKSRLTITKDTSKNQVVLTMTNMDPVDTATYYCADTGVSCCYFHYWGQGTLVTVSS

SEQ ID NO: 28227 - DNA, 354 bp, synthetic construct
  misc_feature 1..354: note = Description of Artificial Sequence: Synthetic polynucleotide
  source 1..354: mol_type = other DNA
cagatcaccttgaaggagtctggtcctacgctggtgaaacccacacagaccctcacgctgacctgcaccttctctgggttctcactcagcactggtggagtgggtgtgggctggatccgtcagcccccaggaaaggccctggagtggcttgtattcatttattggagtgatgataagcgctacagcccatctctgaagagcaggctctccatcaccaaggacacctccaaaaaccaggtggtccttacaatgaccaacatggaccctgtggacacagccacatattactgtgcacgtatagcagcagttgcctttgactactggggccagggaaccctggtcaccgtctcctca

SEQ ID NO: 28228 - protein, 118 aa, synthetic construct
  REGION 1..118: note = Description of Artificial Sequence: Synthetic polypeptide
QITLKESGPTLVKPTQTLTLTCTFSGFSLSTGGVGVGWIRQPPGKALEWLVFIYWSDDKRYSPSLKSRLSITKDTSKNQVVLTMTNMDPVDTATYYCARIAAVAFDYWGQGTLVTVSS

SEQ ID NO: 28229 - DNA, 384 bp, synthetic construct
  misc_feature 1..384: note = Description of Artificial Sequence: Synthetic polynucleotide
  source 1..384: mol_type = other DNA
caggtgcagctggtgcagtctggggctgaggtgaagaagcctggggcctcagtgaaggtctcctgccagggttctggatacaccttcaccggccactatatgtgctgggtgcgacaggcccctggacaagggcttgagtggatgggatggatcaaccctaatagtggtggcacaaactatgcacagaagtttcagggcagggtcaccatgaccagggacacgtccatcagcacagcctacatggagctgagcaggctgagatctgacgacacggccgtgtattactgtgcggctggatattgtagtagttccagctgctatttgcaaccgggttattacggtatggacgtctggggccaagggaccacggtcaccgtctcctca

SEQ ID NO: 28230 - protein, 128 aa, synthetic construct
  REGION 1..128: note = Description of Artificial Sequence: Synthetic polypeptide
QVQLVQSGAEVKKPGASVKVSCQGSGYTFTGHYMCWVRQAPGQGLEWMGWINPNSGGTNYAQKFQGRVTMTRDTSISTAYMELSRLRSDDTAVYYCAAGYCSSSSCYLQPGYYGMDVWGQGTTVTVSS

SEQ ID NO: 28231 - DNA, 357 bp, synthetic construct
  misc_feature 1..357: note = Description of Artificial Sequence: Synthetic polynucleotide
  source 1..357: mol_type = other DNA
cagatcaccttgaaggagtctggtcctacgctggtgaaacccacacagaccctcacgctgacctgcaccttctctgggttctcactcagcactagtggagtgggtgtgggctggatccgtcagcccccaggaaaggccctggagtgcctttcactcatttattggaatgatgataaggtctacagcccatctctgaagagcaggctcaccatcaccaagtacacctccaaaaaccaggtggtccttacaatgaccaacatggaccctgtggacacagccacatattactgtgcacacaggggacagcagctggccctcgactactggggccagggaaccctggtcaccgtctcctca

SEQ ID NO: 28232 - protein, 119 aa, synthetic construct
  REGION 1..119: note = Description of Artificial Sequence: Synthetic polypeptide
QITLKESGPTLVKPTQTLTLTCTFSGFSLSTSGVGVGWIRQPPGKALECLSLIYWNDDKVYSPSLKSRLTITKYTSKNQVVLTMTNMDPVDTATYYCAHRGQQLALDYWGQGTLVTVSS

SEQ ID NO: 28233 - DNA, 390 bp, synthetic construct
  misc_feature 1..390: note = Description of Artificial Sequence: Synthetic polynucleotide
  source 1..390: mol_type = other DNA
caggtgcagttggtggagtctgggggaggcgtggtccagcctgggaggtccctgagactctcctgtgcagcgtctggattcaccttcagtggctatggcatgcactgggtccgccaggctccaggcaaggggctggagtgggtggcagttatatggtatgatggaagtaataaatactatgcagactccgtgaagggccgattcaccatctccagagacaattccaagaacacgctgtttctgcaaatgaacagcctgagagccgaggacacggctgtgtattactgtgcgagagatagggtatattgtagtagtaccagctgctccccttactactactactacggtatggacgtctggggccaagggaccacggtcaccgtctcctca

SEQ ID NO: 28234 - protein, 130 aa, synthetic construct
  REGION 1..130: note = Description of Artificial Sequence: Synthetic polypeptide
QVQLVESGGGVVQPGRSLRLSCAASGFTFSGYGMHWVRQAPGKGLEWVAVIWYDGSNKYYADSVKGRFTISRDNSKNTLFLQMNSLRAEDTAVYYCARDRVYCSSTSCSPYYYYYGMDVWGQGTTVTVSS

SEQ ID NO: 28235 - DNA, 354 bp, synthetic construct
  misc_feature 1..354: note = Description of Artificial Sequence: Synthetic polynucleotide
  source 1..354: mol_type = other DNA
cagatcaccttgaaggagtctggtcctacgctggtgaaacccacacagaccctcacgctgacctgcaccttctctgggttctcactcaatactggtggagtgggtgtgggctggatccgtcagcccccaggaaaggccctggagtggcttgcactcatttattggaatgatgataagcgccacagcccatctctgaagagcaggctcaccatcaccaaagacacctccaaaaaccaggtggtccttacaatgacccacatggcccctgtggacacagccacatattactgtgcacaccttatagaagtggcctttgactattggggccagggaaccctggtcaccgtctcctca

SEQ ID NO: 28236 - protein, 118 aa, synthetic construct
  REGION 1..118: note = Description of Artificial Sequence: Synthetic polypeptide
QITLKESGPTLVKPTQTLTLTCTFSGFSLNTGGVGVGWIRQPPGKALEWLALIYWNDDKRHSPSLKSRLTITKDTSKNQVVLTMTHMAPVDTATYYCAHLIEVAFDYWGQGTLVTVSS

SEQ ID NO: 28237 - DNA, 372 bp, synthetic construct
  misc_feature 1..372: note = Description of Artificial Sequence: Synthetic polynucleotide
  source 1..372: mol_type = other DNA
gaggtgcagttgttggaatctgggggaggcttggtacagcctggggggtccctgagactctcctgtgcagcctctggattcacctttagcagctatgtcatgagctgggtccgccaggctccagggaaggggctggagtgggtctcaactattagtgttggtggtggtagcacatactacgcagactccgtgaagggccggttcaccatctccagagacaattccaagaccacgctgtatctgcaaatgaacagcctgagagccgaggacacggccgtatattactgtgcgaaatggggacgtggatacagctatgaatactactacggtatggacgtctggggccaagggaccacggtcaccgtctcctca

SEQ ID NO: 28238 - protein, 124 aa, synthetic construct
  REGION 1..124: note = Description of Artificial Sequence: Synthetic polypeptide
EVQLLESGGGLVQPGGSLRLSCAASGFTFSSYVMSWVRQAPGKGLEWVSTISVGGGSTYYADSVKGRFTISRDNSKTTLYLQMNSLRAEDTAVYYCAKWGRGYSYEYYYGMDVWGQGTTVTVSS

SEQ ID NO: 28239 - DNA, 372 bp, synthetic construct
  misc_feature 1..372: note = Description of Artificial Sequence: Synthetic polynucleotide
  source 1..372: mol_type = other DNA
caggtgcagctggtgcagtctggggctgaggtgaagaagcctggggcctcagtgaaggtctcctgcaaggcttctggatacaccttcaccggctactatatgcactgggtgcgacaggcccctggacaagggcttgagtggatggggtggatcaaccctaacagtggtggcacaaactatgcacagaagtttcagggcagggtcaccatgaccagggactcgtccatcaacacagcctacatggagctgagcaggctgagatctgacgacacggccgtgtattactgtgcgaggtcgtactactatggttcggggagttattataacgagtttgactactggggccagggaaccctggtcaccgtctcctca

SEQ ID NO: 28240 - protein, 124 aa, synthetic construct
  REGION 1..124: note = Description of Artificial Sequence: Synthetic polypeptide
QVQLVQSGAEVKKPGASVKVSCKASGYTFTGYYMHWVRQAPGQGLEWMGWINPNSGGTNYAQKFQGRVTMTRDSSINTAYMELSRLRSDDTAVYYCARSYYYGSGSYYNEFDYWGQGTLVTVSS

SEQ ID NO: 28241 - DNA, 351 bp, synthetic construct
  misc_feature 1..351: note = Description of Artificial Sequence: Synthetic polynucleotide
  source 1..351: mol_type = other DNA
caggtgcagctggtggagtctgggggaggcgtggtccagcctgggaggtccctgagactctcctgtgcagcgtctggattcaccttcagtgactatggcatgcactgggtccgccaggctccaggcaaggggctggagtgggtggcagtcatatggtatgatggaaataataaatactatgtagactccgtgaagggccgattcaccatctccagagacaattccaagaatacgctgtatctgcaaatgaacagcctgagagccgaggacacggctgtgtattactgtgcgagagagcttgcctggtacgaggactactggggccagggaaccctggtcaccgtctcctca

SEQ ID NO: 28242 - protein, 117 aa, synthetic construct
  REGION 1..117: note = Description of Artificial Sequence: Synthetic polypeptide
QVQLVESGGGVVQPGRSLRLSCAASGFTFSDYGMHWVRQAPGKGLEWVAVIWYDGNNKYYVDSVKGRFTISRDNSKNTLYLQMNSLRAEDTAVYYCARELAWYEDYWGQGTLVTVSS

SEQ ID NO: 28243 - DNA, 345 bp, synthetic construct
  misc_feature 1..345: note = Description of Artificial Sequence: Synthetic polynucleotide
  source 1..345: mol_type = other DNA
gaggtgcagctggtggagtctgggggaggcctggtcaagcctggggggtccctgagactctcctgtgcagcctctggattcaccttcagtagctatagcatgaactgggtccgccaggctccagggaaggggctggagtgggtctcatccattagtagtagtagtacttacatatactacgcagactcagtgaagggccgattcaccatctccagagacaacgccaagaactcactgtatctgcaaatgaacagcctgagagccgaggacacggctgtgtattactgtgcgagagtggcttcatttgactactggggccagggaaccctggtcaccgtctcctca

SEQ ID NO: 28244 - protein, 115 aa, synthetic construct
  REGION 1..115: note = Description of Artificial Sequence: Synthetic polypeptide
EVQLVESGGGLVKPGGSLRLSCAASGFTFSSYSMNWVRQAPGKGLEWVSSISSSSTYIYYADSVKGRFTISRDNAKNSLYLQMNSLRAEDTAVYYCARVASFDYWGQGTLVTVSS

SEQ ID NO: 28245 - DNA, 357 bp, synthetic construct
  misc_feature 1..357: note = Description of Artificial Sequence: Synthetic polynucleotide
  source 1..357: mol_type = other DNA
cagctgcagctgcaggagtcgggcccaggactggtgaagccttcggagaccctgtccctcacctgcactgtctctggtggctccatcagtagaagtagttactactggggctggatccgccagcccccagggagggggctggagtggattgggaatatctattatggtgggaacacctactacaacccgtccctcaagagtcgagtcaccatatccgtagacacgtccaagaaccagttctccctgaagctgagctctgtgaccgccgcagacacggctgtgtattactgtgcgagacatggaaaagactggggccttgactactggggccagggaaccctggtcaccgtctcctca

SEQ ID NO: 28246 - protein, 119 aa, synthetic construct
  REGION 1..119: note = Description of Artificial Sequence: Synthetic polypeptide
QLQLQESGPGLVKPSETLSLTCTVSGGSISRSSYYWGWIRQPPGRGLEWIGNIYYGGNTYYNPSLKSRVTISVDTSKNQFSLKLSSVTAADTAVYYCARHGKDWGLDYWGQGTLVTVSS

SEQ ID NO: 28247 - DNA, 342 bp, synthetic construct
  misc_feature 1..342: note = Description of Artificial Sequence: Synthetic polynucleotide
  source 1..342: mol_type = other DNA
gaggtgcaactggtggagtctgggggaggcctggtcaagcctggggggtccctgagactctcctgtgcagcctctggattcaccttcagtagctataccatgaactgggtccgccaggctccagggaaggggctggagtgggtctcatccattagtggtagtagtagttacatatactacgcagactcagtgaagggccgattcaccatctccagagacaacgccaagaactcactgtatttgcaaatgaacagcctgagagccgaggacacggctgtatattactgtgcgagagatcgaggctccatctggggccaagggacaatggtcaccgtctcttca

SEQ ID NO: 28248 - protein, 114 aa, synthetic construct
  REGION 1..114: note = Description of Artificial Sequence: Synthetic polypeptide
EVQLVESGGGLVKPGGSLRLSCAASGFTFSSYTMNWVRQAPGKGLEWVSSISGSSSYIYYADSVKGRFTISRDNAKNSLYLQMNSLRAEDTAVYYCARDRGSIWGQGTMVTVSS

SEQ ID NO: 28249 - DNA, 351 bp, synthetic construct
  misc_feature 1..351: note = Description of Artificial Sequence: Synthetic polynucleotide
  source 1..351: mol_type = other DNA
caggtgcagttggtggagtctgggggaggcgtggtccagcctgggaggtccctgagactctcctatacagcgtctggattcaccttcagtgactatggcatgcactgggtccgccaggctccaggcaaggggctggagtgggtggcagttatatggtttgatggaagtaataaatactatgcagactccgtgaagggccgattcaccatctccagagacaattccaagaacacgctgtatctgcaaatgaacagcctgagagccgaggacacggctgtgtattactgtgcgagagatcttggctggacggaagagtactggggccagggaaccctggtcaccgtctcctca

SEQ ID NO: 28250 - protein, 117 aa, synthetic construct
  REGION 1..117: note = Description of Artificial Sequence: Synthetic polypeptide
QVQLVESGGGVVQPGRSLRLSYTASGFTFSDYGMHWVRQAPGKGLEWVAVIWFDGSNKYYADSVKGRFTISRDNSKNTLYLQMNSLRAEDTAVYYCARDLGWTEEYWGQGTLVTVSS

SEQ ID NO: 28251 - DNA, 357 bp, synthetic construct
  misc_feature 1..357: note = Description of Artificial Sequence: Synthetic polynucleotide
  source 1..357: mol_type = other DNA
cagctgcagctgcaggagtcgggcccaggactggtgaagccttcggagaccctgtccctcacctgcactgtctctggtggctccatcagcagaagtagttactactggggctggatccgccagcccccagggaaggggctggagtggattgggaatatctattatagtgggactgcctactgtaattcgtccctcaagagtcgagtcattatatccgtagacacgtccaagaaccagttctccctgaagctgagctctgtgaccgccacagacacggctgtgtattactgtgcgagacatagtagcagctggtcccttgacaactggggccagggaaccctggtcaccgtctcctca

SEQ ID NO: 28252 - protein, 119 aa, synthetic construct
  REGION 1..119: note = Description of Artificial Sequence: Synthetic polypeptide
QLQLQESGPGLVKPSETLSLTCTVSGGSISRSSYYWGWIRQPPGKGLEWIGNIYYSGTAYCNSSLKSRVIISVDTSKNQFSLKLSSVTATDTAVYYCARHSSSWSLDNWGQGTLVTVSS

SEQ ID NO: 28253 - DNA, 351 bp, synthetic construct
  misc_feature 1..351: note = Description of Artificial Sequence: Synthetic polynucleotide
  source 1..351: mol_type = other DNA
caggtgcagctggtggagtctgggggaggcgtggtccagcctgggaggtccctgagactctcctgtgcagcgtctggattcaccttcagtgactatggcatgcactgggtccgccaggctccaggcaaggggctggagtgggtggcagttatttggtatgaagaaaataatcaatactatgcagactccgtgaagggccgattcaccatctccagagacaattccaagaacacgctgtatctgcaaatgaacagcctgagagccgaggacacggctgtgtattactgtgcgagagaactggggttccggtctgactactggggccagggaaccctggtcaccgtctcctca

SEQ ID NO: 28254 - protein, 117 aa, synthetic construct
  REGION 1..117: note = Description of Artificial Sequence: Synthetic polypeptide
QVQLVESGGGVVQPGRSLRLSCAASGFTFSDYGMHWVRQAPGKGLEWVAVIWYEENNQYYADSVKGRFTISRDNSKNTLYLQMNSLRAEDTAVYYCARELGFRSDYWGQGTLVTVSS

SEQ ID NO: 28255 - DNA, 345 bp, synthetic construct
  misc_feature 1..345: note = Description of Artificial Sequence: Synthetic polynucleotide
  source 1..345: mol_type = other DNA
gaggtgcagctggtggagtctgggggaggcctggtcaagcctggggggtccctgagactctcctgtgcagcctctggattcaccttcagtagctatagcatgaactgggtccgccaggctccagggaaggggctggagtgggtctcatccattagtggtagtagtagtctcatatactacgcagactcagtgaagggccgattcaccatctccagagacaacgccaagaactcactgtatctgcaaatgaacagcctgagagccgaggacacggctgtgtattactgtgcgagagtagcagcctttgactactggggccagggaaccctggtcaccgtctcctca

SEQ ID NO: 28256 - protein, 115 aa, synthetic construct
  REGION 1..115: note = Description of Artificial Sequence: Synthetic polypeptide
EVQLVESGGGLVKPGGSLRLSCAASGFTFSSYSMNWVRQAPGKGLEWVSSISGSSSLIYYADSVKGRFTISRDNAKNSLYLQMNSLRAEDTAVYYCARVAAFDYWGQGTLVTVSS

SEQ ID NO: 28257 - DNA, 369 bp, synthetic construct
  misc_feature 1..369: note = Description of Artificial Sequence: Synthetic polynucleotide
  source 1..369: mol_type = other DNA
caggtgcagctggtggagtctgggggaggcgtggtccagcctgggaggtccctgagactctcctgtgcagcgtctggattcaccttcagtaactgtgtcatgcactgggtccgccaggctccaggcaaggggctggagtgggtggcagttatatggtatgatggaagtaataaatactatgcagactccgtgaagggccgattcaccatctccagagacaattccaagaacacgctgtatctgcaaatgaacagcctgagagccgaggacacggctgtgtattactgtgcgagagaaaagtatagcagcagctggtacgactacggtatggacgtctggggccaagggaccacggtcaccgtctcctca

SEQ ID NO: 28258 - protein, 123 aa, synthetic construct
  REGION 1..123: note = Description of Artificial Sequence: Synthetic polypeptide
QVQLVESGGGVVQPGRSLRLSCAASGFTFSNCVMHWVRQAPGKGLEWVAVIWYDGSNKYYADSVKGRFTISRDNSKNTLYLQMNSLRAEDTAVYYCAREKYSSSWYDYGMDVWGQGTTVTVSS

SEQ ID NO: 28259 - DNA, 384 bp, synthetic construct
  misc_feature 1..384: note = Description of Artificial Sequence: Synthetic polynucleotide
  source 1..384: mol_type = other DNA
caggtacagctgcagcagtcaggtccaggactggtgaagccctcgcagaccctctcactcacctgtgccatctccggggacagtgtctctcgcaacactgctgcttggagctggatcaggcagtccccatcgagaggccttgagtggctgggaaggacatactacaggtccaagtggtataatgattatgcagtatctgtgaaaagtcgagtaaccatcaacccagacacatccaagaaccagttctccctgcagctgaactctgtgactcccgaggacacggctgtgtattactgtgcaagagtaagcagtggctggtcccatcactactactactacggtatggacgtctggggccaagggaccacggtcaccgtctcctca

SEQ ID NO: 28260 - protein, 128 aa, synthetic construct
  REGION 1..128: note = Description of Artificial Sequence: Synthetic polypeptide
QVQLQQSGPGLVKPSQTLSLTCAISGDSVSRNTAAWSWIRQSPSRGLEWLGRTYYRSKWYNDYAVSVKSRVTINPDTSKNQFSLQLNSVTPEDTAVYYCARVSSGWSHHYYYYGMDVWGQGTTVTVSS

SEQ ID NO: 28261 - DNA, 357 bp, synthetic construct
  misc_feature 1..357: note = Description of Artificial Sequence: Synthetic polynucleotide
  source 1..357: mol_type = other DNA
cagctgcagctgcaggagtcgggcccaggactggtgaagccttcggagaccctgtccctcacctgcactgtctctggcggctccatcagcagaagtagttactattggggctggatccgccagcccccagggaagggcctggagtggattgggaatatctattatagtgggagcacctactacaatccgtccctcaagagtcgagtcaccatatccgtagactcgtccaagaaccagttctccctgaacctgaactctgtgaccgccgcagacacggctgtgtattcctgtgcgagacatggaaaagactggggccttgactactggggccagggaaccctggtcaccgtctcctca

SEQ ID NO: 28262 - protein, 119 aa, synthetic construct
  REGION 1..119: note = Description of Artificial Sequence: Synthetic polypeptide
QLQLQESGPGLVKPSETLSLTCTVSGGSISRSSYYWGWIRQPPGKGLEWIGNIYYSGSTYYNPSLKSRVTISVDSSKNQFSLNLNSVTAADTAVYSCARHGKDWGLDYWGQGTLVTVSS

SEQ ID NO: 28263 - DNA, 351 bp, synthetic construct
  misc_feature 1..351: note = Description of Artificial Sequence: Synthetic polynucleotide
  source 1..351: mol_type = other DNA
caggtgcagctggtggagtctgggggaggcgtggtccagcctgggaggtccctgagactctcctgtgcagtgtctggattcaccttcagtagctatggcatgcattgggtccgccaggctccaggcaaggggctggagtgggtggcagttatatggtatgaggaaaataataaatattatgtagactccgtgaagggccgattcaccatctccagagacaattccaagagcacgctgtatctgcaaatgaacagcctgagagccgaggacacggctgtgtattactgtgtgagagagctaggcttccagtctgactactggggccagggaaccccggtcaccgtctcctca

SEQ ID NO: 28264 - protein, 117 aa, synthetic construct
  REGION 1..117: note = Description of Artificial Sequence: Synthetic polypeptide
QVQLVESGGGVVQPGRSLRLSCAVSGFTFSSYGMHWVRQAPGKGLEWVAVIWYEENNKYYVDSVKGRFTISRDNSKSTLYLQMNSLRAEDTAVYYCVRELGFQSDYWGQGTPVTVSS

SEQ ID NO: 28265 - DNA, 357 bp, synthetic construct
  misc_feature 1..357: note = Description of Artificial Sequence: Synthetic polynucleotide
  source 1..357: mol_type = other DNA
cagctgcagctgcaggagtcgggcccaggactggtgaagccttcggagaccctgtccctcacctgcactgtctctggtggctccatcagtaggagtagttattactggggctggatccgccagcccccagggaaggggctggagtggattgggaatatctattatagtgggtacacctactacaacccgtccctcaagagtcgagtcatcatatccgtagacacgtccaagaaccagttctccctgaagctgagctctgtgaccgccgcagacacggctctgtattactgtgcgagacatagtagcagttggtcccttgacgactggggccagggaaccctggtcaccgtctcctct

SEQ ID NO: 28266 - protein, 119 aa, synthetic construct
  REGION 1..119: note = Description of Artificial Sequence: Synthetic polypeptide
QLQLQESGPGLVKPSETLSLTCTVSGGSISRSSYYWGWIRQPPGKGLEWIGNIYYSGYTYYNPSLKSRVIISVDTSKNQFSLKLSSVTAADTALYYCARHSSSWSLDDWGQGTLVTVSS

SEQ ID NO: 28267 - DNA, 351 bp, synthetic construct
  misc_feature 1..351: note = Description of Artificial Sequence: Synthetic polynucleotide
  source 1..351: mol_type = other DNA
caggtgcagctggtggagtctgggggaggcgtggtccagcctgggaggtccctgagactctcctgtgcagcgtctggattcaccttcagtaactatggcatgcactgggtccgccaggctcccggcaaggggctggagtgggtggcagttatttggtatgaagaaaataatcaatactatgcagactccgtgaagggccgattcaccatctccagagacaattccaagaacacgctgtatctgcaaatgaacagcctgagagccgaggacacggctgtgtattactgtgcgagagaactggggttccggtctgactactggggccagggaaccctggtcaccgtctcctca

SEQ ID NO: 28268 - protein, 117 aa, synthetic construct
  REGION 1..117: note = Description of Artificial Sequence: Synthetic polypeptide
QVQLVESGGGVVQPGRSLRLSCAASGFTFSNYGMHWVRQAPGKGLEWVAVIWYEENNQYYADSVKGRFTISRDNSKNTLYLQMNSLRAEDTAVYYCARELGFRSDYWGQGTLVTVSS

SEQ ID NO: 28269 - DNA, 360 bp, synthetic construct
  misc_feature 1..360: note = Description of Artificial Sequence: Synthetic polynucleotide
  source 1..360: mol_type = other DNA
caggtgcagctggtggagtctgggggaggcgtggtccagcctgggaggtccctgagactctcctgtgcagcgtctggattcaccctcagtagcgatgacatgcactgggtccgccaggaaccaggcaaggggctggagtgggtggcagttatatggtttgatggaagtaataaatactatgcagactccgtgaagggccgattcatcatgtccagagacaattccaagaacaccctgtatctgcaaatgaacagcctgagagccggggacacggctgtgtattactgtgcgagagatctgatagcagcagctggtacggttgactactggggccagggaaccctggtcaccgtctcctca

SEQ ID NO: 28270 - protein, 120 aa, synthetic construct
  REGION 1..120: note = Description of Artificial Sequence: Synthetic polypeptide
QVQLVESGGGVVQPGRSLRLSCAASGFTLSSDDMHWVRQEPGKGLEWVAVIWFDGSNKYYADSVKGRFIMSRDNSKNTLYLQMNSLRAGDTAVYYCARDLIAAAGTVDYWGQGTLVTVSS

SEQ ID NO: 28271 - DNA, 384 bp, synthetic construct
  misc_feature 1..384: note = Description of Artificial Sequence: Synthetic polynucleotide
  source 1..384: mol_type = other DNA
caggtacagctgcagcagtcaggtccaggactggtgaagccctcgcagaccctctcactcacctgtgccatctccggggacagtgtctctcgcaacactgctgcttggagctggatcaggcagtccccatcgagaggccttgagtggctgggaaggacatactacaggtccaagtggtataatgattatgcagtatctgtgaaaagtcgaataaccatcaacccagacacatccaagaaccagttctccctgcagctgaactctgtgactcccgaggacacggctgtgtattactgtgcaagagtaaacagtggctggtcccatcactactactactacggtatggacgtctggggccaagggaccacggtcaccgtctcctca

SEQ ID NO: 28272 - protein, 128 aa, synthetic construct
  REGION 1..128: note = Description of Artificial Sequence: Synthetic polypeptide
QVQLQQSGPGLVKPSQTLSLTCAISGDSVSRNTAAWSWIRQSPSRGLEWLGRTYYRSKWYNDYAVSVKSRITINPDTSKNQFSLQLNSVTPEDTAVYYCARVNSGWSHHYYYYGMDVWGQGTTVTVSS

SEQ ID NO: 28273 - DNA, 357 bp, synthetic construct
  misc_feature 1..357: note = Description of Artificial Sequence: Synthetic polynucleotide
  source 1..357: mol_type = other DNA
caggtgcagctggtggagtctgggggaggcttggtcaagcctggagggtccctgagactctcctgtgcagcctctggattcaccttcagtgactactacatgagctggatccgccaggctccagggaaggggctggagtgggtttcacacattagtagtagtggtagtaccatatattacgcagactctgtgaagggccgattcaccatctccagggacaacgccaagaactcactgtatctgcaaatgaacagcctgagagccgaggacacggccgtgtattactgtgcgagatatcggaataaccggggatacttcgatctctggggccgtggcaccctggtcactgtctcttca

SEQ ID NO: 28274 - protein, 119 aa, synthetic construct
  REGION 1..119: note = Description of Artificial Sequence: Synthetic polypeptide
QVQLVESGGGLVKPGGSLRLSCAASGFTFSDYYMSWIRQAPGKGLEWVSHISSSGSTIYYADSVKGRFTISRDNAKNSLYLQMNSLRAEDTAVYYCARYRNNRGYFDLWGRGTLVTVSS

SEQ ID NO: 28275 - DNA, 363 bp, synthetic construct
  misc_feature 1..363: note = Description of Artificial Sequence: Synthetic polynucleotide
  source 1..363: mol_type = other DNA
gaggtgcagctgttggagtctgggggaggcttggtacagcctggggggtccctgagactctcctgtgcagcctctgaattcacctttagcagctatgccatgaactgggtccgccaggctccagggaaggggctggagtgggtctcagttattagtggtcgtggtggtaacacattctacgcagactccgtgaagggccggttcaccatctccagagacaattccaagaacacgctctttctgcaaatgaacagcctgagagccgaggacacggccgtatattattgtgcgtcccgtttggcagtggctggctcggaggcttttgatatctggggccaagggacaatggtcaccgtctcttca

SEQ ID NO: 28276 - protein, 121 aa, synthetic construct
  REGION 1..121: note = Description of Artificial Sequence: Synthetic polypeptide
EVQLLESGGGLVQPGGSLRLSCAASEFTFSSYAMNWVRQAPGKGLEWVSVISGRGGNTFYADSVKGRFTISRDNSKNTLFLQMNSLRAEDTAVYYCASRLAVAGSEAFDIWGQGTMVTVSS

SEQ ID NO: 28277 - DNA, 351 bp, synthetic construct
  misc_feature 1..351: note = Description of Artificial Sequence: Synthetic polynucleotide
  source 1..351: mol_type = other DNA
caggtgcagctggtggagtctgggggaggcgtggtccagcctgggaggtccctgagactctcctgtgcagcgtctggattcaccttcagtaactatggcatgcactgggtccgccaggctccagccaaggggctggagtgggtggcagttatttggtatgaagaaaataatcaatactatgcagactccgtgaagggccgattcaccatctccagagacaattccaagaacacgctgtatctgcaaatgaacagcctgagagccgaggacacggctgtgtattactgtgcgagagaactggggttccggtctgactactggggccagggaaccctggtcaccgtctcctca

SEQ ID NO: 28278 - protein, 117 aa, synthetic construct
  REGION 1..117: note = Description of Artificial Sequence: Synthetic polypeptide
QVQLVESGGGVVQPGRSLRLSCAASGFTFSNYGMHWVRQAPAKGLEWVAVIWYEENNQYYADSVKGRFTISRDNSKNTLYLQMNSLRAEDTAVYYCARELGFRSDYWGQGTLVTVSS

SEQ ID NO: 28279 - DNA, 357 bp, synthetic construct
  misc_feature 1..357: note = Description of Artificial Sequence: Synthetic polynucleotide
  source 1..357: mol_type = other DNA
cagctgcagctgcaggagtcgggcccaggactggtgaagccttcggagaccctgtccctcacctgcactgtctctggtggctccatcagtaggagtagttactactggggctggatccgccagcccccagggaaggggctggagtggattgggaatatttattatagtgggagcgcctacaacaacccgtccctcaagggtcgagtcaccatatccgtagacacgtccaagaaccagttctccctgaagctgaactctgtgaccgccgcagacacggctgtgtattactgtgggagacatggaaaagactggggccttgactactggggccagggaaccctggtcaccgtctcctca

SEQ ID NO: 28280 - protein, 119 aa, synthetic construct
  REGION 1..119: note = Description of Artificial Sequence: Synthetic polypeptide
QLQLQESGPGLVKPSETLSLTCTVSGGSISRSSYYWGWIRQPPGKGLEWIGNIYYSGSAYNNPSLKGRVTISVDTSKNQFSLKLNSVTAADTAVYYCGRHGKDWGLDYWGQGTLVTVSS

SEQ ID NO: 28281 - DNA, 351 bp, synthetic construct
  misc_feature 1..351: note = Description of Artificial Sequence: Synthetic polynucleotide
  source 1..351: mol_type = other DNA
caggtgcagttggtggagtctgggggaggcgtggtccagcctgggaggtccctgagactctcctgtgcagcgtctggattcaccttcagtaactatggcatgcactgggtccgccaggctccaggcaaggggctggagtgggtggcagttatttggtatgaagaaaataatcaatactatgcagactccgtgaagggccgattcaccgtctccagagacaattccaagaacacgctgtttctgcaaatgaacagcctgagagccgaggacacggctgtgtattactgtgcgagagaactggggttccggtctgactactggggccagggaaccctggtcaccgtctcctca

SEQ ID NO: 28282 - protein, 117 aa, synthetic construct
  REGION 1..117: note = Description of Artificial Sequence: Synthetic polypeptide
QVQLVESGGGVVQPGRSLRLSCAASGFTFSNYGMHWVRQAPGKGLEWVAVIWYEENNQYYADSVKGRFTVSRDNSKNTLFLQMNSLRAEDTAVYYCARELGFRSDYWGQGTLVTVSS

SEQ ID NO: 28283 - DNA, 357 bp, synthetic construct
  misc_feature 1..357: note = Description of Artificial Sequence: Synthetic polynucleotide
  source 1..357: mol_type = other DNA
caggtgcagctggtggagtctgggggaggcgtggtccagcctgggaggtccctgagactctcctgtgcagcgtctggattcaccttcagtagttatgacatgcactgggtccgccaggctccaggcaaggggctggagtgggtggcagttatatggtatgacggaagtgataaatactatgcagactccgtgaagggccgattcaccatctccagagacaattccaagaacacgctctttctgcaaatgaacagcctgagagccgaggacacggctgtgtattactgtgcgagagatcgggcctatagcagctcgtctgactactggggccagggaaccctggtcaccgtctcctca

SEQ ID NO: 28284 - protein, 119 aa, synthetic construct
  REGION 1..119: note = Description of Artificial Sequence: Synthetic polypeptide
QVQLVESGGGVVQPGRSLRLSCAASGFTFSSYDMHWVRQAPGKGLEWVAVIWYDGSDKYYADSVKGRFTISRDNSKNTLFLQMNSLRAEDTAVYYCARDRAYSSSSDYWGQGTLVTVSS

SEQ ID NO: 28285 - DNA, 354 bp, synthetic construct
  misc_feature 1..354: note = Description of Artificial Sequence: Synthetic polynucleotide
  source 1..354: mol_type = other DNA
caggtgcagctggtggagtctgggggaggcgtggtccagcctgggaggtccctgagactctcctgtgtagcgtctggattcaccttcagtagctatggcatgcactgggtccgccaggctccaggcaaggggctggagtggggggcagttatatggcatgatggaagtaataaatactatgcagactccgtgaagggccgattcaccatctccagagacaatgccaagaacacgctgtatctgcaaatgaacagcctgagagccgaggacacggctgtgtattactgtgcgagagatctgagtatgggcggaatggacgtctggggccaagggaccacggtcaccgtctcctca

SEQ ID NO: 28286 - protein, 118 aa, synthetic construct
  REGION 1..118: note = Description of Artificial Sequence: Synthetic polypeptide
QVQLVESGGGVVQPGRSLRLSCVASGFTFSSYGMHWVRQAPGKGLEWGAVIWHDGSNKYYADSVKGRFTISRDNAKNTLYLQMNSLRAEDTAVYYCARDLSMGGMDVWGQGTTVTVSS

SEQ ID NO: 28287 - DNA, 351 bp, synthetic construct
  misc_feature 1..351: note = Description of Artificial Sequence: Synthetic polynucleotide
  source 1..351: mol_type = other DNA
caggtgcagatggtggagtctgggggaggcgtggtccagcctgggaggtccctgagactctcttgtgaagcgtctggattcaccttcagtagctatggcatgcactgggtccgccaggctccaggcaaggggctggagtgggtggcagttatatggtatgaggaaaataataaatactatgtagactccgtgaagggccgattcaccatctccagagacaattccaagagcacgctgtatctgcaaatgaatagcctgagagccgaggacacggctgtgtattactgtgtgagagaactaggcttccagtctgactactggggccagggaaccccggtcaccgtctcctca

SEQ ID NO: 28288 - protein, 117 aa, synthetic construct
  REGION 1..117: note = Description of Artificial Sequence: Synthetic polypeptide
QVQMVESGGGVVQPGRSLRLSCEASGFTFSSYGMHWVRQAPGKGLEWVAVIWYEENNKYYVDSVKGRFTISRDNSKSTLYLQMNSLRAEDTAVYYCVRELGFQSDYWGQGTPVTVSS

SEQ ID NO: 28289 - DNA, 363 bp, synthetic construct
  misc_feature 1..363: note = Description of Artificial Sequence: Synthetic polynucleotide
  source 1..363: mol_type = other DNA
gaggtgcagctgttggagtctgggggaggcttggtacagcctggggggtccctgagactctcctgtgcagcctctgaatttacctttagcagctatgccatgaactgggtccgccaggctccagggaaggggctggagtgggtctcagttattagtggccgtggtggtaacacattctacgcagactccgtgaagggccggttcaccatctccagagacaattccaagaacacgctgtatctgcaaatgaacagcctgagagccgaggacacggccgtatattactgtgcgtcccgtttggcagtggctggctcggaggcttttgatatctggggccaagggacaatggtcaccgtctcttca

SEQ ID NO: 28290 - protein, 121 aa, synthetic construct
  REGION 1..121: note = Description of Artificial Sequence: Synthetic polypeptide
EVQLLESGGGLVQPGGSLRLSCAASEFTFSSYAMNWVRQAPGKGLEWVSVISGRGGNTFYADSVKGRFTISRDNSKNTLYLQMNSLRAEDTAVYYCASRLAVAGSEAFDIWGQGTMVTVSS

SEQ ID NO: 28291 - DNA, 351 bp, synthetic construct
  misc_feature 1..351: note = Description of Artificial Sequence: Synthetic polynucleotide
  source 1..351: mol_type = other DNA
caggtgcaactggtggagtctgggggaggcgtggtccagcctgggaggtccctgagactctcctgtgtagcgtctggattcaccttcagtgactatggcatgcactgggtccgccaggctccaggcaaggggctggagtggatggcagttatatggtatgatgtaactaataaatactatgcagactccgtgaagggccgattcaccatctccagagacaattccaagaacacgctgtatctgcaaatgaacagcctgagcgccgaggacacggctgtttattactgtgcgagagagcttggctggtacgaggactactggggccagggaaccctggtcaccgtctcctca

SEQ ID NO: 28292 - protein, 117 aa, synthetic construct
  REGION 1..117: note = Description of Artificial Sequence: Synthetic polypeptide
QVQLVESGGGVVQPGRSLRLSCVASGFTFSDYGMHWVRQAPGKGLEWMAVIWYDVTNKYYADSVKGRFTISRDNSKNTLYLQMNSLSAEDTAVYYCARELGWYEDYWGQGTLVTVSS

SEQ ID NO: 28293 - DNA, 357 bp, synthetic construct
  misc_feature 1..357: note = Description of Artificial Sequence: Synthetic polynucleotide
  source 1..357: mol_type = other DNA
caggtgcagctgcaggagtcgggcccaggactggtgaagccttcggagaccctgtccctcacctgcactgtctccggtggcgccatcagcggtagtagttactactggggctggatccgccagcccccagggaaacaactggagtggattgggaatatctattatagtgggagcacctactacaacccgtccttcaagagtcgagtcaccatatccgtagacacgtccaagaaccagttctccctgaagctgagctctgtgaccgccgaagacacggctgtctattactgtgcgagacattccagtagctggtcccttgactactggggccagggaaccctggtcaccgtctcctct

SEQ ID NO: 28294 - protein, 119 aa, synthetic construct
  REGION 1..119: note = Description of Artificial Sequence: Synthetic polypeptide
QVQLQESGPGLVKPSETLSLTCTVSGGAISGSSYYWGWIRQPPGKQLEWIGNIYYSGSTYYNPSFKSRVTISVDTSKNQFSLKLSSVTAEDTAVYYCARHSSSWSLDYWGQGTLVTVSS

SEQ ID NO: 28295 - DNA, 363 bp, synthetic construct
  misc_feature 1..363: note = Description of Artificial Sequence: Synthetic polynucleotide
  source 1..363: mol_type = other DNA
gaggtgcagctgttggagtctgggggaggcttggtacagccgggggggtccctgagactctcctgtgcagcctctggattcacctttagcagctatgccatgaactgggtccgccaggctccagggaaggggctggagtgggtctcagttattagtggtagtggtggtagcacatactacgcagactccgtgaagggccggttcaccatctccagagacaattccaagaacacgctgtatctgcaaatgaacagcctgagagccgaggacacggccgtatattactgtgcgaaaaggatagcagcagctggtacggagtacttcgatctctggggccgtggcaccctggtcactgtctcctca

SEQ ID NO: 28296 - protein, 121 aa, synthetic construct
  REGION 1..121: note = Description of Artificial Sequence: Synthetic polypeptide
EVQLLESGGGLVQPGGSLRLSCAASGFTFSSYAMNWVRQAPGKGLEWVSVISGSGGSTYYADSVKGRFTISRDNSKNTLYLQMNSLRAEDTAVYYCAKRIAAAGTEYFDLWGRGTLVTVSS

SEQ ID NO: 28297 - DNA, 351 bp, synthetic construct
  misc_feature 1..351: note = Description of Artificial Sequence: Synthetic polynucleotide
  source 1..351: mol_type = other DNA
caggtgcagctggtggagtctgggggaggcgtggtccagcctgggaggtccctgagactctcctgtgcagcgtctggattcaccttcagtaactatggcatgcactgggtccgccaggctccaggcaaggggctggagtgggtggcagttatttggtatgaagaaaataatcaatactatgcagactccgtgaagggccgattcaccatctccagagacaattccaagaacacgctgtatctgcaaatgaacagcctgagagccgaggacacggctatttattactgtgcgagagaactggggttccggtctgactactggggccagggaaccctggtcaccgtctcctca

SEQ ID NO: 28298 - protein, 117 aa, synthetic construct
  REGION 1..117: note = Description of Artificial Sequence: Synthetic polypeptide
QVQLVESGGGVVQPGRSLRLSCAASGFTFSNYGMHWVRQAPGKGLEWVAVIWYEENNQYYADSVKGRFTISRDNSKNTLYLQMNSLRAEDTAIYYCARELGFRSDYWGQGTLVTVSS

SEQ ID NO: 28299 - DNA, 336 bp, synthetic construct
  misc_feature 1..336: note = Description of Artificial Sequence: Synthetic polynucleotide
  source 1..336: mol_type = other DNA
gaggtgcagctggtggagtctgggggaggcctggtcaagcctggggggtccctgagactctcctgtgcagcctctggattcaccttcagtagctatagaatgaactggttccgccaggctccagggaaggggctggagtgggtctcatccattagtggtagtagtactgacatatactacgcagactcagtgaagggccgattcaccatctccagagacaacgccgagaactcactgtatctgcaaatgaacagcctgagagccgaggacacggctgtgtattactgtgcgagaagggacttctggggccagggaaccctggtcaccgtctcctca

SEQ ID NO: 28300 - protein, 112 aa, synthetic construct
  REGION 1..112: note = Description of Artificial Sequence: Synthetic polypeptide
EVQLVESGGGLVKPGGSLRLSCAASGFTFSSYRMNWFRQAPGKGLEWVSSISGSSTDIYYADSVKGRFTISRDNAENSLYLQMNSLRAEDTAVYYCARRDFWGQGTLVTVSS

SEQ ID NO: 28301 - DNA, 351 bp, synthetic construct
  misc_feature 1..351: note = Description of Artificial Sequence: Synthetic polynucleotide
  source 1..351: mol_type = other DNA
caggtgcagctggtggagtctgggggaggcgtggtccagcctgggaggtccctgagactctcctgtgcagcgtctggattcaccttcagtaactatggcatgaactgggtccgccaggctccaggcaaggggctggagtgggtggcagttatatggtatgatggaaataataaacactatgcagactccgtgaagggccgattcaccatctccagagacaattccaagaacacgctgtatctgcaaatgaacagcctgagagccgaggacacggctgtgtattactgtgcgagtagtgggagctacttctttgactactggggccagggaaccctggtcaccgtctcctca

SEQ ID NO: 28302 - protein, 117 aa, synthetic construct
  REGION 1..117: note = Description of Artificial Sequence: Synthetic polypeptide
QVQLVESGGGVVQPGRSLRLSCAASGFTFSNYGMNWVRQAPGKGLEWVAVIWYDGNNKHYADSVKGRFTISRDNSKNTLYLQMNSLRAEDTAVYYCASSGSYFFDYWGQGTLVTVSS

SEQ ID NO: 28303 - DNA, 351 bp, synthetic construct
  misc_feature 1..351: note = Description of Artificial Sequence: Synthetic polynucleotide
  source 1..351: mol_type = other DNA
caggtgcagctggtggagtctgggggaggcgtggtccagcctgggaagtccctgagactctcctgtgcagcgtctggattcaccttcagtgactatggcatgcactgggtccgccaggctccaggcaaggggctggagtgggtggcagttatatggtttgatggaagtaataaatactatgcagactccgtgaagggccgattcaccatctccagagacaattccaagaacacgctgtatctgcaaatgaacagcctgagagccgagggcacggctgtgtattactgtgcgagagatcttggctggacggaagaatactggggccagggaaccctggtcaccgtctcctca

SEQ ID NO: 28304 - protein, 117 aa, synthetic construct
  REGION 1..117: note = Description of Artificial Sequence: Synthetic polypeptide
QVQLVESGGGVVQPGKSLRLSCAASGFTFSDYGMHWVRQAPGKGLEWVAVIWFDGSNKYYADSVKGRFTISRDNSKNTLYLQMNSLRAEGTAVYYCARDLGWTEEYWGQGTLVTVSS

SEQ ID NO: 28305 - DNA, 351 bp, synthetic construct
  misc_feature 1..351: note = Description of Artificial Sequence: Synthetic polynucleotide
  source 1..351: mol_type = other DNA
caggtgcagctggtggagtctgggggaggcgtggtccagcctgggaggtccctgagactctcctgtgcagcgtctggattcaccttcagtgactatggcatgcactgggtccgccaggctccaggcaaggggctggagtgggtggcagttatatggtttgatggaagtaataaatactatgtagactccgtgaagggccgattcaccatctccagagacaattccaagaacacgctgtatctgcaaatgaacagcctgagagtcgaggacacggctgtgtattactgtgcgagagatcttggctggacggaagagtactggggccagggaaccctggtcaccgtctcctca

SEQ ID NO: 28306 - protein, 117 aa, synthetic construct
  REGION 1..117: note = Description of Artificial Sequence: Synthetic polypeptide
QVQLVESGGGVVQPGRSLRLSCAASGFTFSDYGMHWVRQAPGKGLEWVAVIWFDGSNKYYVDSVKGRFTISRDNSKNTLYLQMNSLRVEDTAVYYCARDLGWTEEYWGQGTLVTVSS

SEQ ID NO: 28307 - DNA, 351 bp, synthetic construct
  misc_feature 1..351: note = Description of Artificial Sequence: Synthetic polynucleotide
  source 1..351: mol_type = other DNA
gaggtgcagctggtggagtctgggggaggcttggtacagcctggggggtccctgagactcctctgtgcagcctctggaatcaccttcagtacctatagcatgaactgggtccgccaggctccagggaaggggctggagtgggtttcatacattagtaggagtagtagtaccatagactacgcagactctgtgaagggccgattcaccatctccagagacaatgccaagaactcactgtatctgcaaatgaacagcctgagagacgaggacacggctgtgtattactgtgcgagaggaggtgggagcccttttgactactggggccagggaaccctggtcaccgtctcctca

SEQ ID NO: 28308 - protein, 117 aa, synthetic construct
  REGION 1..117: note = Description of Artificial Sequence: Synthetic polypeptide
EVQLVESGGGLVQPGGSLRLLCAASGITFSTYSMNWVRQAPGKGLEWVSYISRSSSTIDYADSVKGRFTISRDNAKNSLYLQMNSLRDEDTAVYYCARGGGSPFDYWGQGTLVTVSS

SEQ ID NO: 28309 - DNA, 357 bp, synthetic construct
  misc_feature 1..357: note = Description of Artificial Sequence: Synthetic polynucleotide
  source 1..357: mol_type = other DNA
caggtgcagctggtggagtctgggggaggcgtggtccagcctgggaggtccctgagactctcctgtgcagcgtctggattcaccttcagtagctatgccatgcactgggtccgccaggctccaggcaaggggctggagtgggtggcagttatatggtttgatggaagtgataaatactatgcagactccgtgaagggccgattcaccatctccagagacaattccaagaacacgctgtatctacaaatgaacagcctgagagccgaggacacggctgtgtattactgtgcgagagatcgggcctatagtagctcgtctgactactggggccagggaaccctggtcaccgtctcctca

SEQ ID NO: 28310 - protein, 119 aa, synthetic construct
  REGION 1..119: note = Description of Artificial Sequence: Synthetic polypeptide
QVQLVESGGGVVQPGRSLRLSCAASGFTFSSYAMHWVRQAPGKGLEWVAVIWFDGSDKYYADSVKGRFTISRDNSKNTLYLQMNSLRAEDTAVYYCARDRAYSSSSDYWGQGTLVTVSS

SEQ ID NO: 28311 - DNA, 363 bp, synthetic construct
  misc_feature 1..363: note = Description of Artificial Sequence: Synthetic polynucleotide
  source 1..363: mol_type = other DNA
gaggtgcagctgttggagtctgggggaggcttggtacagcctggggggtccctgagactctcctgtgcagcctctggattcacctttagcagctatgccatgacctgggtccgccagggtccagggatggggctggagtgggtctcagttataagtggtagtggtggttacacatacaacgcggactccgtgaagggccggttcaccatctccagagacaattccaagaacacgctgtatctgcaaatgaacagcctgagagtcgaggacacggccgtatattactgtgcgtcccgtatagcagtggctggctcggaggcttttgatatctggggccaagggacaatggtcaccgtctcttca

SEQ ID NO: 28312 - protein, 121 aa, synthetic construct
  REGION 1..121: note = Description of Artificial Sequence: Synthetic polypeptide
EVQLLESGGGLVQPGGSLRLSCAASGFTFSSYAMTWVRQGPGMGLEWVSVISGSGGYTYNADSVKGRFTISRDNSKNTLYLQMNSLRVEDTAVYYCASRIAVAGSEAFDIWGQGTMVTVSS

SEQ ID NO: 28313 - DNA, 351 bp, synthetic construct
  misc_feature 1..351: note = Description of Artificial Sequence: Synthetic polynucleotide
  source 1..351: mol_type = other DNA
caggtgcagctggtggagtctgggggaggcctggtccagcctgggaggtccctgagactctcctgtgcagcgtctggattcaccttcagtaactatggcatgcactgggtccgccaggctccaggcaaggggctggagtgggtggcagttatatggtatgagggaagtaataaatattatgtagactccgtgaggggccgattcaccatctccagagacaattccaagagcacgctgtatctgcaaatgaacagcctgagagccgaggacacggctgtgtattactgtgtgagagagctaggcttccagtctgatcactggggccagggaaccccggtcaccgtctcctca

SEQ ID NO: 28314 - protein, 117 aa, synthetic construct
  REGION 1..117: note = Description of Artificial Sequence: Synthetic polypeptide
QVQLVESGGGLVQPGRSLRLSCAASGFTFSNYGMHWVRQAPGKGLEWVAVIWYEGSNKYYVDSVRGRFTISRDNSKSTLYLQMNSLRAEDTAVYYCVRELGFQSDHWGQGTPVTVSS

SEQ ID NO: 28315 - DNA, 363 bp, synthetic construct
  misc_feature 1..363: note = Description of Artificial Sequence: Synthetic polynucleotide
  source 1..363: mol_type = other DNA
gaggtgcagctgttggagtctgggggaggcttggtacagcctggggggtccctgagactctcctgtgcagcctctgaattcacctttagcagctatgccatgaactgggtccgccaggctccagggaaggggctggagtgggtctcaattattagtggtcgtggtggtaacacattctacgcagactccgtgaagggccggttcaccatctccagagacaattccaagaacacgctgtatctgcaaatgaacagcctgagagccgaggacacggccgtatattactgtgcgtcccgtttggcagtggctggctcggaggcttttgatatctggggccaagggacaatggtcaccgtctcttca

SEQ ID NO: 28316 - protein, 121 aa, synthetic construct
  REGION 1..121: note = Description of Artificial Sequence: Synthetic polypeptide
EVQLLESGGGLVQPGGSLRLSCAASEFTFSSYAMNWVRQAPGKGLEWVSIISGRGGNTFYADSVKGRFTISRDNSKNTLYLQMNSLRAEDTAVYYCASRLAVAGSEAFDIWGQGTMVTVSS

SEQ ID NO: 28317 - DNA, 363 bp, synthetic construct
  misc_feature 1..363: note = Description of Artificial Sequence: Synthetic polynucleotide
  source 1..363: mol_type = other DNA
gaggcgcagctgttggagtctgggggaggcttggaacagcctggggggtccctgagactctcctgtgcagcctctggattcacctttagcagctatgccatgagctgggtccgccaggctccagggaaggggctggagtgggtctcagttattagtggtagaggtggtaacacatactccgcagactccgtgaagggccggttcaccatctccagagacaattccaagaacacgctatatctacaaatgaacagcctgagagccgaggacacggccgtatattactgtgcgtcccgtttagcagtggctggctcggaggcttttcatatctggggccaagggacaatggtcaccgtctcttca

SEQ ID NO: 28318 - protein, 121 aa, synthetic construct
  REGION 1..121: note = Description of Artificial Sequence: Synthetic polypeptide
EAQLLESGGGLEQPGGSLRLSCAASGFTFSSYAMSWVRQAPGKGLEWVSVISGRGGNTYSADSVKGRFTISRDNSKNTLYLQMNSLRAEDTAVYYCASRLAVAGSEAFHIWGQGTMVTVSS

SEQ ID NO: 28319 - DNA, 357 bp, synthetic construct
  misc_feature 1..357: note = Description of Artificial Sequence: Synthetic polynucleotide
  source 1..357: mol_type = other DNA
cagctgcagctgcaggagtcgggcccaggactggtgaagttttcggagaccctgtccctcacctgcactgtctctggtggctccatcagcagaagtagttattactggggctggatccgccagcccccagggaaggggctggagtggatagggaatatctattatagtgggtatacctactacactccgtccctcaagagtcgagtcaccatatccgtagacacgtccaagaaccagttctccctgaagctgagctctgtgaccgccgcagacacggctgtgtattactgtgcgagacatagcaccagctggtcccttgactactggggccagggaaccctggtcaccgtctcctca

SEQ ID NO: 28320 - protein, 119 aa, synthetic construct
  REGION 1..119: note = Description of Artificial Sequence: Synthetic polypeptide
QLQLQESGPGLVKFSETLSLTCTVSGGSISRSSYYWGWIRQPPGKGLEWIGNIYYSGYTYYTPSLKSRVTISVDTSKNQFSLKLSSVTAADTAVYYCARHSTSWSLDYWGQGTLVTVSS

SEQ ID NO: 28321 - DNA, 351 bp, synthetic construct
  misc_feature 1..351: note = Description of Artificial Sequence: Synthetic polynucleotide
  source 1..351: mol_type = other DNA
gaggtgcagctggtggagtctgggggaggcttggtacagcctggggggtccctgagactctcctgtgcagcctctggattcaccttcagaagctatagcatgaactgggtccgccaggctccagggaaggggctggagtggctttcatacattagtagtagtagtggtaccatatactacgcagactctgtgaagggccgattcaccatctccagagacaacgccaggaactcactgaatctgcaaatgaacagcctgagagacgaggacacggctgtgtattactgtgcgagaggaggtgggagcccttttgactactggggccagggaatcctggtcaccgtctcctca

SEQ ID NO: 28322 - protein, 117 aa, synthetic construct
  REGION 1..117: note = Description of Artificial Sequence: Synthetic polypeptide
EVQLVESGGGLVQPGGSLRLSCAASGFTFRSYSMNWVRQAPGKGLEWLSYISSSSGTIYYADSVKGRFTISRDNARNSLNLQMNSLRDEDTAVYYCARGGGSPFDYWGQGILVTVSS

SEQ ID NO: 28323 - DNA, 351 bp, synthetic construct
  misc_feature 1..351: note = Description of Artificial Sequence: Synthetic polynucleotide
  source 1..351: mol_type = other DNA
caggtgcagctggtggagtctgggggaggcgtggtccagcctgggaggtccctgagactctcctgtgcagcgtctggattcaccttcagtagctatggcatgcactgggtccgccaggctccaggcaaggggctggagtgggtggcagttatatggtatgatgaaagtaataaatactatgcagactccgtgaagggccgattcaccatctccagagacaattccaagaacacgctgtatctgcaaatgaacagcctgagagccgaggacacggctgtatattactgtgcgagagagcttgcctggtacgaggactcctggggccagggaaccctggtcaccgtctcctca

SEQ ID NO: 28324 - protein, 117 aa, synthetic construct
  REGION 1..117: note = Description of Artificial Sequence: Synthetic polypeptide
QVQLVESGGGVVQPGRSLRLSCAASGFTFSSYGMHWVRQAPGKGLEWVAVIWYDESNKYYADSVKGRFTISRDNSKNTLYLQMNSLRAEDTAVYYCARELAWYEDSWGQGTLVTVSS

SEQ ID NO: 28325 - DNA, 336 bp, synthetic construct
  misc_feature 1..336: note = Description of Artificial Sequence: Synthetic polynucleotide
  source 1..336: mol_type = other DNA
gaggtgcaactgttggagtcggggggaggcttggtacagcctggggggtccctgagactctcctgtgcagcctctggattctcctttagtagctatgccatgacctgggtccgccaggctccagggaaggggctggagtgggtctcaactattagtggtcgtggtggtcacacatactacgcagactccgtgaggggccggttcgccatctccagagacagttccaagaacacgctgtatctgcaaatgaacagcctgagagccgaggacacggccgtatattactgtgcgaaacaggactgctggggccagggaaccctggtcaccgtctcctca

SEQ ID NO: 28326 - protein, 112 aa, synthetic construct
  REGION 1..112: note = Description of Artificial Sequence: Synthetic polypeptide
EVQLLESGGGLVQPGGSLRLSCAASGFSFSSYAMTWVRQAPGKGLEWVSTISGRGGHTYYADSVRGRFAISRDSSKNTLYLQMNSLRAEDTAVYYCAKQDCWGQGTLVTVSS

SEQ ID NO: 28327 - DNA, 351 bp, synthetic construct
  misc_feature 1..351: note = Description of Artificial Sequence: Synthetic polynucleotide
  source 1..351: mol_type = other DNA
caggtgcagttggtggagtctgggggaggcgtggtccagcctgggaggtccctgagactctcctgtgcagcgtctggattcaccttcagtgactatggcatgcactgggtccgccaggctccaggcaaggggctggagtgggtggcagttatatggtatgatgaaagtaataaacactatatagactccgtgaagggccgattcaccatctccagagacaattccaagaacacgctgtatctgcaaatgaacagcctgagagccgaggacacggctgtgtattattgcgtgagagaactggggttccggtttgactactggggccagggaaccctggtcaccgtctcctca

SEQ ID NO: 28328 - protein, 117 aa, synthetic construct
  REGION 1..117: note = Description of Artificial Sequence: Synthetic polypeptide
QVQLVESGGGVVQPGRSLRLSCAASGFTFSDYGMHWVRQAPGKGLEWVAVIWYDESNKHYIDSVKGRFTISRDNSKNTLYLQMNSLRAEDTAVYYCVRELGFRFDYWGQGTLVTVSS

SEQ ID NO: 28329 - DNA, 345 bp, synthetic construct
  misc_feature 1..345: note = Description of Artificial Sequence: Synthetic polynucleotide
  source 1..345: mol_type = other DNA
caggtgcagctggtgcagtctggggctgaggtgaagaagcctggggcctcagtgaaggtctcctgcaaggcgtctggatacaccttcaccagctatgctatcaactgggtgcgacaggccactggacaagggcttgagtggatgggatggatgaaccctaacactggtaacacaggctatgcacagaagttccagggcagagtcaccatgaccaggaacacctccataagcacagcctacatggagctgagcagcctgagatctgaggacacggccgtatatttctgtacgagaaaggctgggtttgactactggggccagggaaccctggtcaccgtctcctca

SEQ ID NO: 28330 - protein, 115 aa, synthetic construct
  REGION 1..115: note = Description of Artificial Sequence: Synthetic polypeptide
QVQLVQSGAEVKKPGASVKVSCKASGYTFTSYAINWVRQATGQGLEWMGWMNPNTGNTGYAQKFQGRVTMTRNTSISTAYMELSSLRSEDTAVYFCTRKAGFDYWGQGTLVTVSS

SEQ ID NO: 28331 - DNA, 363 bp, synthetic construct
  misc_feature 1..363: note = Description of Artificial Sequence: Synthetic polynucleotide
  source 1..363: mol_type = other DNA
gaggtgcagctgttggagtctgggggaggcttgatacagcctggggggtccctgagactctcctgtgcagcctctgaattcacctttagcagctatgccatgagctgggtccgccaggatccagggaaggggctggagtgggtctcaattattagtggtcgtgggggaaacgcattctacgcagactccgtgaagggccggttcaccatctccagagacaattccaagaacacgctgtatctgcaaatgaacagcctgagagccgaggacacggccgtatattactgtgcgtcccgtatagcagtggctggctcggaggcttttgatatctggggccaagggacaatggtcaccgtctcttca

SEQ ID NO: 28332 - protein, 121 aa, synthetic construct
  REGION 1..121: note = Description of Artificial Sequence: Synthetic polypeptide
EVQLLESGGGLIQPGGSLRLSCAASEFTFSSYAMSWVRQDPGKGLEWVSIISGRGGNAFYADSVKGRFTISRDNSKNTLYLQMNSLRAEDTAVYYCASRIAVAGSEAFDIWGQGTMVTVSS

SEQ ID NO: 28333 - DNA, 363 bp, synthetic construct
  misc_feature 1..363: note = Description of Artificial Sequence: Synthetic polynucleotide
  source 1..363: mol_type = other DNA
gaggtgcagctgttggagtctgggggaggcttggtacagcctggggggtccctgagactctcctgtgcagcctctgaattcacctttagcagctatgccatgagctgggtccgccaggctccagggacggggctggagtgggtctcaattattagtggtcgtggtggtaacacattctacgcagactccgtgaagggccggttcaccatctccagagacaattccaagaacacgctgtatctgcaaatgaacagcctgagagccgaggacacggccgtatattactgtgcgtcccgtctggcagtggctggctcggaggcttttgatatctggggccaagggacgatggtcaccgtctcttca

SEQ ID NO: 28334 - protein, 121 aa, synthetic construct
  REGION 1..121: note = Description of Artificial Sequence: Synthetic polypeptide
EVQLLESGGGLVQPGGSLRLSCAASEFTFSSYAMSWVRQAPGTGLEWVSIISGRGGNTFYADSVKGRFTISRDNSKNTLYLQMNSLRAEDTAVYYCASRLAVAGSEAFDIWGQGTMVTVSS

SEQ ID NO: 28335 - DNA, 342 bp, synthetic construct
  misc_feature 1..342: note = Description of Artificial Sequence: Synthetic polynucleotide
  source 1..342: mol_type = other DNA
gaggtgcagctggtggaggccgggggaggcctggtcaagccgggggggtccctgagactctcctgtgcagcctctggattcaccttcaccagctatagcatgaactgggtccgccaggctccagggaaggggctggagtgggtctcatccattagtgggagtagtagttacatatactacgcagactcagtgaagggccgattcaccatctccagagacaacgccaagaactcactgtatctgcaaatgaacagcctgagagccgaggacacggctgtgtattactgtgcgagagatcgtgggagctactggggccagggtaccctggtcaccgtctcctca

SEQ ID NO: 28336 - protein, 114 aa, synthetic construct
  REGION 1..114: note = Description of Artificial Sequence: Synthetic polypeptide
EVQLVEAGGGLVKPGGSLRLSCAASGFTFTSYSMNWVRQAPGKGLEWVSSISGSSSYIYYADSVKGRFTISRDNAKNSLYLQMNSLRAEDTAVYYCARDRGSYWGQGTLVTVSS

SEQ ID NO: 28337 - DNA, 357 bp, synthetic construct
  misc_feature 1..357: note = Description of Artificial Sequence: Synthetic polynucleotide
  source 1..357: mol_type = other DNA
caggtgcagctggtggagtctgggggaggcttggtcaagcctggagggtccctgagactctcctgtgcagcctctggattcaccttcagtgactattacatgagctggatccgccaggctccagggaaggggctggagtgggtttcacacattagtagtagtggtagtaccatatactacgcagactctgtgaagggccgattcaccatctccagggacaacggcgagaactcactgtatctgcaaatgaacagcctgagagccgaggacacggccgtgtattactgtgcgagatatcggaataaccgggggtacttcgatctctggggccgtggctccctggtcactgtctcctca

SEQ ID NO: 28338 - protein, 119 aa, synthetic construct
  REGION 1..119: note = Description of Artificial Sequence: Synthetic polypeptide
QVQLVESGGGLVKPGGSLRLSCAASGFTFSDYYMSWIRQAPGKGLEWVSHISSSGSTIYYADSVKGRFTISRDNGENSLYLQMNSLRAEDTAVYYCARYRNNRGYFDLWGRGSLVTVSS

SEQ ID NO: 28339 - DNA, 363 bp, synthetic construct
  misc_feature 1..363: note = Description of Artificial Sequence: Synthetic polynucleotide
  source 1..363: mol_type = other DNA
gaggtgcaactgttggagtctgggggaggcttggtacagcctggggggtccctgagactctcctgtgcagcctctggattcacctttagcagctatgccatgaactgggtccgccaggctccagggaaggggctggagtgggtctcagttattagtggtagtggtagtaacacatactacgcagactccgtgaagggccggttcaccatctccagagacaattccaagaacacgctgtatctgcaaatgaacagcctgagagccgaggacacggccgtatattactgtgcgaaaagatataccagtgactggcatgatgcttttgatatctggggccaagggacaatggtcaccgtctcttca

SEQ ID NO: 28340 - protein, 121 aa, synthetic construct
  REGION 1..121: note = Description of Artificial Sequence: Synthetic polypeptide
EVQLLESGGGLVQPGGSLRLSCAASGFTFSSYAMNWVRQAPGKGLEWVSVISGSGSNTYYADSVKGRFTISRDNSKNTLYLQMNSLRAEDTAVYYCAKRYTSDWHDAFDIWGQGTMVTVSS

SEQ ID NO: 28341 - DNA, 351 bp, synthetic construct
  misc_feature 1..351: note = Description of Artificial Sequence: Synthetic polynucleotide
  source 1..351: mol_type = other DNA
caggtgcaactggtggagtctgggggaggcgtggtccagcctgggaggtccctgagactctcctgtgcagcgtctggattcaccttcagtgactatggcatgcactgggtccgccaggctccaggcaaggggctggagtgggtggcacttatatggtatgatgtaactaataaatactatggagactccgtgaagggccgattcaccatctccagagacaattcccagaacacgctgtatctgcaactgaacagcctgagagccgaggacacggctgtgtattactgtgcgagagagcttggctggtacgaggactactggggccagggaaccctggtcaccgtctcctca

SEQ ID NO: 28342 - protein, 117 aa, synthetic construct
  REGION 1..117: note = Description of Artificial Sequence: Synthetic polypeptide
QVQLVESGGGVVQPGRSLRLSCAASGFTFSDYGMHWVRQAPGKGLEWVALIWYDVTNKYYGDSVKGRFTISRDNSQNTLYLQLNSLRAEDTAVYYCARELGWYEDYWGQGTLVTVSS

SEQ ID NO: 28343 - DNA, 342 bp, synthetic construct
  misc_feature 1..342: note = Description of Artificial Sequence: Synthetic polynucleotide
  source 1..342: mol_type = other DNA
gaggtgcagctggtggagtctgggggaggcctggtcaagcctggggggtccctgagactctcctgtgcagcctctggattcaccttcagtagctatggcttgaactgggtccgccaggctccagggaaggggctggagtgggtctcatccattagtggtagtggtagtcacatatcctacgcggactcagtgaagggccgattcaccatctccagagacaacgccaagaactcactgtatctgcaactgaacagcctgagagccgaggacacggctgtgtattactgtgcgagagatcggggcagtggctggggccagggaaccctggtcaccgtctcctca

SEQ ID NO: 28344 - protein, 114 aa, synthetic construct
  REGION 1..114: note = Description of Artificial Sequence: Synthetic polypeptide
EVQLVESGGGLVKPGGSLRLSCAASGFTFSSYGLNWVRQAPGKGLEWVSSISGSGSHISYADSVKGRFTISRDNAKNSLYLQLNSLRAEDTAVYYCARDRGSGWGQGTLVTVSS

SEQ ID NO: 28345 - DNA, 363 bp, synthetic construct
  misc_feature 1..363: note = Description of Artificial Sequence: Synthetic polynucleotide
  source 1..363: mol_type = other DNA
gaggtgcagctgttggagtctgggggaggcttggtacagcctggggggtccctgagactctcctgtgtagcctctggattcacctttagcagctatgccatgaactgggtccgccaggctccagggaaggggctggagtgggtctcagttattagtggtagtggtggtagcacatactacgcagactccgtgaagggccggttcaccatctccagagacaattccaagaacacgctgtatctgcaaatgaacaccctgagagccgaggacacggccgtatattactgtgcgaaaaggtataccagtgactggcatgatgcttttgatatctggggccaagggacaatggtcaccgtctcttca

SEQ ID NO: 28346 - protein, 121 aa, synthetic construct
  REGION 1..121: note = Description of Artificial Sequence: Synthetic polypeptide
EVQLLESGGGLVQPGGSLRLSCVASGFTFSSYAMNWVRQAPGKGLEWVSVISGSGGSTYYADSVKGRFTISRDNSKNTLYLQMNTLRAEDTAVYYCAKRYTSDWHDAFDIWGQGTMVTVSS

SEQ ID NO: 28347 - DNA, 354 bp, synthetic construct
  misc_feature 1..354: note = Description of Artificial Sequence: Synthetic polynucleotide
  source 1..354: mol_type = other DNA
caggtgcagctggtggagtctgggggaggcgtggtccagcctgggaggtccctgagactctcctgtgcagcgtctggattcaccttcagtagctatggcatgcactgggtccgccaggctccaggcaaggggctggagtgggtggcaattatatggtatgatggaagtaataaatactatgcagactccgtgaagggccgattcaccatctccagagacaattccaagaacacgctgtatctgcaaatgaacagcctgagagccgaggacacggctgtgtattactgtgcgagagatctgagtatgggcggtatggacgtctggggccaagggaccacggtcaccgtctcctca

SEQ ID NO: 28348 - protein, 118 aa, synthetic construct
  REGION 1..118: note = Description of Artificial Sequence: Synthetic polypeptide
QVQLVESGGGVVQPGRSLRLSCAASGFTFSSYGMHWVRQAPGKGLEWVAIIWYDGSNKYYADSVKGRFTISRDNSKNTLYLQMNSLRAEDTAVYYCARDLSMGGMDVWGQGTTVTVSS

SEQ ID NO: 28349 - DNA, 351 bp, synthetic construct
  misc_feature 1..351: note = Description of Artificial Sequence: Synthetic polynucleotide
  source 1..351: mol_type = other DNA
caggtgcaactggtggagtctgggggaggcgtggtccagcctgggaggtccctgagactctcctgtgcagcgtctggattcaccttcagtgactatggcatgcactgggtccgccaggctccaggcaaggggctggagtggatggcagttatatggtatgatgtaactaataaatactatgcagactccgtgaagggccgattcaccatctccagagacaattccaagaacacgctgtatctgcaaatgaacagcctgagagccgaggacacggctgtttattactgtgcgagagaggttggctggtacgaggactactggggccagggaaccctggtcaccgtctcctca

SEQ ID NO: 28350 - protein, 117 aa, synthetic construct
  REGION 1..117: note = Description of Artificial Sequence: Synthetic polypeptide
QVQLVESGGGVVQPGRSLRLSCAASGFTFSDYGMHWVRQAPGKGLEWMAVIWYDVTNKYYADSVKGRFTISRDNSKNTLYLQMNSLRAEDTAVYYCAREVGWYEDYWGQGTLVTVSS

SEQ ID NO: 28351 - DNA, 369 bp, synthetic construct
  misc_feature 1..369: note = Description of Artificial Sequence: Synthetic polynucleotide
  source 1..369: mol_type = other DNA
caggtgcaactggtggagtctgggggaggcgtggtccagcctgggaggtccctgagactctcctgtgcagcgtctggattcaccttcagtaattatgtcattcactgggtccgccaggctccaggcaagggactggagtgggtggcagttatatggtatgatggaagtaataaatactatgcagactccgtgaagggccgcttcaccatctccagagacaattccaagaacacgctgtatctgcaaatgaacagcctgagagccgaggacacggctgtgtattcctgtgcgagagagaagtatagcagcagctggtacgactacggtatggacgtctggggccaagggaccacggtcaccgtctcctca

SEQ ID NO: 28352 - protein, 123 aa, synthetic construct
  REGION 1..123: note = Description of Artificial Sequence: Synthetic polypeptide
QVQLVESGGGVVQPGRSLRLSCAASGFTFSNYVIHWVRQAPGKGLEWVAVIWYDGSNKYYADSVKGRFTISRDNSKNTLYLQMNSLRAEDTAVYSCAREKYSSSWYDYGMDVWGQGTTVTVSS

SEQ ID NO: 28353 - DNA, 351 bp, synthetic construct
  misc_feature 1..351: note = Description of Artificial Sequence: Synthetic polynucleotide
  source 1..351: mol_type = other DNA
caggtgcagctggtggagtctgggggaggcgtggtccagcctgggaggtccctgagactctcctgtgcagcgtctggattcaccttcagtagctatggcatgcactgggtccgccaggctccaggcaaggggctggagtgggtggcagttatttggtatgaagaaaataatcaatactatgcagactccgtgaagggccgattcaccatctccagagacaattccaagaacacgctgtatctgcaaatgaacagcctgagagccgacgacacggctgtgtattactgtgcgagagaactggggttccggtctgactactggggccagggaaccctggtcaccgtctcctca

SEQ ID NO: 28354 - protein, 117 aa, synthetic construct
  REGION 1..117: note = Description of Artificial Sequence: Synthetic polypeptide
QVQLVESGGGVVQPGRSLRLSCAASGFTFSSYGMHWVRQAPGKGLEWVAVIWYEENNQYYADSVKGRFTISRDNSKNTLYLQMNSLRADDTAVYYCARELGFRSDYWGQGTLVTVSS

SEQ ID NO: 28355 - DNA, 345 bp, synthetic construct
  misc_feature 1..345: note = Description of Artificial Sequence: Synthetic polynucleotide
  source 1..345: mol_type = other DNA
gaggtgcacctggtggagtctgggggaggcctggtcaagcctggggggtccctgagactctcctgtgcagcctctggattcaccttcagtagctatagcatgaactgggtccgccaggctccagggaaggggctggagtgggtctcatccattagtggtagtagtagtttcatatactacgcagactcagtgaagggccgattcaccatctccagagacaacgccaagaactcactgtatctgcaaatgaacagcctgagagccgaggacacggctgtgtattactgtgcgagagtagcagctcttgactactggggccagggaaccctggtcaccgtctcctca

SEQ ID NO: 28356 - protein, 115 aa, synthetic construct
  REGION 1..115: note = Description of Artificial Sequence: Synthetic polypeptide
EVHLVESGGGLVKPGGSLRLSCAASGFTFSSYSMNWVRQAPGKGLEWVSSISGSSSFIYYADSVKGRFTISRDNAKNSLYLQMNSLRAEDTAVYYCARVAALDYWGQGTLVTVSS

SEQ ID NO: 28357 - DNA, 339 bp, synthetic construct
  misc_feature 1..339: note = Description of Artificial Sequence: Synthetic polynucleotide
  source 1..339: mol_type = other DNA
gaggtgcagctggtggagtctgggggaggcctggtcaagcctggggggtccctaagactctcctgtgcagcctctggattcaccttcagtagctatagcgtgaactgggtccgccgggctccagggaaggggctggagtgggtctcatccattagtagtagtagtagtttcctatactacgcagactcagtgaagggccgattcaccatctccagagacaacgccaagaactcagtgtatctgcaaatgaacagcctgagagccgaggacacggctgtatattactgtgcgagaaactgggactactggggccagggaaccctggtcaccgtctcctca

SEQ ID NO: 28358 - protein, 113 aa, synthetic construct
  REGION 1..113: note = Description of Artificial Sequence: Synthetic polypeptide
EVQLVESGGGLVKPGGSLRLSCAASGFTFSSYSVNWVRRAPGKGLEWVSSISSSSSFLYYADSVKGRFTISRDNAKNSVYLQMNSLRAEDTAVYYCARNWDYWGQGTLVTVSS

SEQ ID NO: 28359 - DNA, 360 bp, synthetic construct
  misc_feature 1..360: note = Description of Artificial Sequence: Synthetic polynucleotide
  source 1..360: mol_type = other DNA
caggtgcagctggtggagtctgggggaggcgtggtccagcctgggaggtccctgagactctcctgtgcagcgtctggattcaccctcagtagcgatgacatgcactgggtccgccaggctccaggcaaggggctggagtgggtggcagttatatggtttgatggaagtaataaatactatgcagactccgtgaagggccgattcatcatctccagagacaattccaagaacacgctgtatctgcaaatgaacagcctgagagccgaggacacggctatgtattactgtgcgagagatctaatagcagcagctggtacggttgactactggggccagggaaccctggtcaccgtctcctca

SEQ ID NO: 28360 - protein, 120 aa, synthetic construct
  REGION 1..120: note = Description of Artificial Sequence: Synthetic polypeptide
QVQLVESGGGVVQPGRSLRLSCAASGFTLSSDDMHWVRQAPGKGLEWVAVIWFDGSNKYYADSVKGRFIISRDNSKNTLYLQMNSLRAEDTAMYYCARDLIAAAGTVDYWGQGTLVTVSS

SEQ ID NO: 28361 - DNA, 348 bp, synthetic construct
  misc_feature 1..348: note = Description of Artificial Sequence: Synthetic polynucleotide
  source 1..348: mol_type = other DNA
caggtgcagctggtggagtctgggggaggcgtggtccagcctgggaggtccctgagactctcctgtgttgcctctggattcaccttcagtagctatggcatgcactgggtccgccaggctccaggcaaggggctggagtgggtgacagttatatcatatgatggaagtaataaatactatgcagactccgtgaagggccgattcaccatctccagagacaattccaagaacacgctgtatctgcaaatgaacagcctgagagctgaggacacggctgtgtattactgtgcgagaggggtatggttcggggacctctggggccagggaaccctggtcaccgtctcctca

SEQ ID NO: 28362 - protein, 116 aa, synthetic construct
  REGION 1..116: note = Description of Artificial Sequence: Synthetic polypeptide
QVQLVESGGGVVQPGRSLRLSCVASGFTFSSYGMHWVRQAPGKGLEWVTVISYDGSNKYYADSVKGRFTISRDNSKNTLYLQMNSLRAEDTAVYYCARGVWFGDLWGQGTLVTVSS

SEQ ID NO: 28363 - DNA, 351 bp, synthetic construct
  misc_feature 1..351: note = Description of Artificial Sequence: Synthetic polynucleotide
  source 1..351: mol_type = other DNA
caggtgcaactggtggagtctgggggaggcgtggtccagcctgggaggtccctgagactctcctgtgcagcgtctggattcaccttcagtgactatggcatgcactgggtccgccaggctccaggcaaggggctggagtggatggcagttatatggtatgatgtaactaatgaatactatgcagactccgtgaagggccgattcaccatctccagagacaattccaagaacacgctgtatctgcaaatgaacagcctgagagccgaggacacggctgtttattactgtgcgagagagcttggctggtacgaggactactggggccagggaaccctggtcaccgtctcctca

SEQ ID NO: 28364 - protein, 117 aa, synthetic construct
  REGION 1..117: note = Description of Artificial Sequence: Synthetic polypeptide
QVQLVESGGGVVQPGRSLRLSCAASGFTFSDYGMHWVRQAPGKGLEWMAVIWYDVTNEYYADSVKGRFTISRDNSKNTLYLQMNSLRAEDTAVYYCARELGWYEDYWGQGTLVTVSS

SEQ ID NO: 28365 - DNA, 363 bp, synthetic construct
  misc_feature 1..363: note = Description of Artificial Sequence: Synthetic polynucleotide
  source 1..363: mol_type = other DNA
gaggtgcagctgttggagtctgggggaggcttggtacagcctggggggtccctgagactctcctgtgcagcctctgaattcacctttagcagctatgccatgaactgggtccgccaggctccagggaaggggctggagtgggtctcaattattagtggtcgtggtgttaacacattctacgcagactccgtgaagggccggttcaccatctccagagacaattccaagaacacgctgtatctgcaaatgaacagcctgagagccgaggacacggccgtatattactgtgcgtcccgtttggcagtggctggctcggaggcttttgatatctggggccaagggacaatggtcaccgtctcttca

SEQ ID NO: 28366 - protein, 121 aa, synthetic construct
  REGION 1..121: note = Description of Artificial Sequence: Synthetic polypeptide
EVQLLESGGGLVQPGGSLRLSCAASEFTFSSYAMNWVRQAPGKGLEWVSIISGRGVNTFYADSVKGRFTISRDNSKNTLYLQMNSLRAEDTAVYYCASRLAVAGSEAFDIWGQGTMVTVSS

SEQ ID NO: 28367 - DNA, 363 bp, synthetic construct
  misc_feature 1..363: note = Description of Artificial Sequence: Synthetic polynucleotide
  source 1..363: mol_type = other DNA
gaggtgcagctgttggagtctgggggaggcttggtacagcctggggggtccctgagactctcctgtgcagcctctggattcacctttagcagctatgccatgaactgggtccgccaggctccagggatggggctggagtgggtctcagttattagtcgtagtggtggttacacatactacgcggactccgtgaagggccggttcaccatctccagagacaattccaagaacacgctgtatctgcaaatgaacagcctgagagccgaggacacggccgtctattactgtgcgtcccgtttagcagtggctggctcggaggcttttgatatctggggccaagggacactggtcaccgtctcttca

SEQ ID NO: 28368 - protein, 121 aa, synthetic construct
  REGION 1..121: note = Description of Artificial Sequence: Synthetic polypeptide
EVQLLESGGGLVQPGGSLRLSCAASGFTFSSYAMNWVRQAPGMGLEWVSVISRSGGYTYYADSVKGRFTISRDNSKNTLYLQMNSLRAEDTAVYYCASRLAVAGSEAFDIWGQGTLVTVSS

SEQ ID NO: 28369 - DNA, 363 bp, synthetic construct
  misc_feature 1..363: note = Description of Artificial Sequence: Synthetic polynucleotide
  source 1..363: mol_type = other DNA
gaggtgcagctgttggagtctgggggagacttggtacagcctggggggtccctgagactctcctgtacagcctctggattcacctttagcagctatgccatgaactgggtccgccaggctccagggaaggggctggagtgggtctcagttattagtggtagtggtggtaacacattctacgcagactccgtgaagggccgattcaccatctccagagacaattccaagaacacgctgtttctgcacatgaacagcctgagagccgaggacacggccgtttattactgtgcgtcccgtatggcagtggctggctcggaggcttttgatatctggggccaagggacaatggtcaccgtctcttca

SEQ ID NO: 28370 - protein, 121 aa, synthetic construct
  REGION 1..121: note = Description of Artificial Sequence: Synthetic polypeptide
EVQLLESGGDLVQPGGSLRLSCTASGFTFSSYAMNWVRQAPGKGLEWVSVISGSGGNTFYADSVKGRFTISRDNSKNTLFLHMNSLRAEDTAVYYCASRMAVAGSEAFDIWGQGTMVTVSS

SEQ ID NO: 28371 - DNA, 363 bp, synthetic construct
  misc_feature 1..363: note = Description of Artificial Sequence: Synthetic polynucleotide
  source 1..363: mol_type = other DNA
gaggtgcagctgttggagtctgggggaggcttggtacagcctggggggtccctgagactctcctgtgcagcctctggattcacctttagcagctatgccatgaactgggtccgccaggctccagggaaggggctggagtgggtctcagttattagtggtagtggtggtaccacatacttcgcagactccgtgaagggccggttcaccatctccagagacaattccaagaacacgctgtatctgcaaatgaacagcctgagagccgaggacacggccgtatattactgtgcgaaaagaaatagcagtggctggcatgatgtttttgatatctggggccaagggacaaaggtcaccgtctcttca

SEQ ID NO: 28372 - protein, 121 aa, synthetic construct
  REGION 1..121: note = Description of Artificial Sequence: Synthetic polypeptide
EVQLLESGGGLVQPGGSLRLSCAASGFTFSSYAMNWVRQAPGKGLEWVSVISGSGGTTYFADSVKGRFTISRDNSKNTLYLQMNSLRAEDTAVYYCAKRNSSGWHDVFDIWGQGTKVTVSS

SEQ ID NO: 28373 - DNA, 342 bp, synthetic construct
  misc_feature 1..342: note = Description of Artificial Sequence: Synthetic polynucleotide
  source 1..342: mol_type = other DNA
gaggtgcagctggtggagtctgggggaggcctggtcaagcctggggggtccctgagactctcctgtgcagcctctggattcaccttcagtagttatagcatgaactgggtccgccaggctccagggaaggggctggagtgggtctcatccatcagtggcagtggtagtcacatatactacgcggactcagtgaagggccgattcaccatctccagagacaacgccaagaactcactgtatctgcaaatgaacagcctgagagccgaggacacggctgtgtattactgtgcgagagatcggggcagtggctggggccagggaaccctggtcaccgtctcctca

SEQ ID NO: 28374 - protein, 114 aa, synthetic construct
  REGION 1..114: note = Description of Artificial Sequence: Synthetic polypeptide
EVQLVESGGGLVKPGGSLRLSCAASGFTFSSYSMNWVRQAPGKGLEWVSSISGSGSHIYYADSVKGRFTISRDNAKNSLYLQMNSLRAEDTAVYYCARDRGSGWGQGTLVTVSS

SEQ ID NO: 28375 - DNA, 363 bp, synthetic construct
  misc_feature 1..363: note = Description of Artificial Sequence: Synthetic polynucleotide
  source 1..363: mol_type = other DNA
gaggtgcagctgttggagtctgggggaggcttggtacagcctggggggtccctgagactctcctgtgcagcctctggattcacttttagcagctatgccatgaactgggtccgccaggctccagggaaggggctggagtgggtctcagttattagtggtagtggtggtaccacatactacgcagactccgtgaagggccggttcaccatctccagagacaattccaagaacacgctgtatctgcaaatgaacaccctgagagccgaggacacggccgtatattactgtgcgaaaaggtataccagtgactggcatgatgcttttgatatctggggccaagggacaatggtcaccgtctcttca

SEQ ID NO: 28376 - protein, 121 aa, synthetic construct
  REGION 1..121: note = Description of Artificial Sequence: Synthetic polypeptide
EVQLLESGGGLVQPGGSLRLSCAASGFTFSSYAMNWVRQAPGKGLEWVSVISGSGGTTYYADSVKGRFTISRDNSKNTLYLQMNTLRAEDTAVYYCAKRYTSDWHDAFDIWGQGTMVTVSS

SEQ ID NO: 28377 - DNA, 351 bp, synthetic construct
  misc_feature 1..351: note = Description of Artificial Sequence: Synthetic polynucleotide
  source 1..351: mol_type = other DNA
caggtgcagctggtggagtctgggggaggcgtggtccagcctgggaggtccctgagactctcctgtgcagcgtctggattcaccttcagtagctatggcatgcactgggtccgccaggctccaggcaaggggctggagtgggtggcagttatgtggtatgatgaaagtaataaacactatgcagactccgtgaagggccgattcaccatctccagagacaattccaggaacacgctgtatctgcaaatgaacagcctgagagccgaggacacggctgtgtattactgtgcgagagaactggggttccggtttgactactggggccagggaaccctggtcaccgtctcctca

SEQ ID NO: 28378 - protein, 117 aa, synthetic construct
  REGION 1..117: note = Description of Artificial Sequence: Synthetic polypeptide
QVQLVESGGGVVQPGRSLRLSCAASGFTFSSYGMHWVRQAPGKGLEWVAVMWYDESNKHYADSVKGRFTISRDNSRNTLYLQMNSLRAEDTAVYYCARELGFRFDYWGQGTLVTVSS

SEQ ID NO: 28379 - DNA, 357 bp, synthetic construct
  misc_feature 1..357: note = Description of Artificial Sequence: Synthetic polynucleotide
  source 1..357: mol_type = other DNA
cagctgcagctgcaggagtcgggcccaggactggtgaagcctgcggagaccctgtccctcacctgcactgtctctggtggctccatcagcagaagtagttactactggggctggatccgccagcccccagggaaggtgctggagtggattgggagcatctattatagtgggagcacctactacaacccgtccctcaagagtcgagtcaccatatccgtcgacacgtccaagaaccagttctccctgaagctgagctctgtgaccgccgcagacacggctgagtattactgtgcgagccttagcagcagctgggacttccagcactggggccagggcaccctggtcaccgtctcctca

SEQ ID NO: 28380 - protein, 119 aa, synthetic construct
  REGION 1..119: note = Description of Artificial Sequence: Synthetic polypeptide
QLQLQESGPGLVKPAETLSLTCTVSGGSISRSSYYWGWIRQPPGKVLEWIGSIYYSGSTYYNPSLKSRVTISVDTSKNQFSLKLSSVTAADTAEYYCASLSSSWDFQHWGQGTLVTVSS

SEQ ID NO: 28381 - DNA, 345 bp, synthetic construct
  misc_feature 1..345: note = Description of Artificial Sequence: Synthetic polynucleotide
  source 1..345: mol_type = other DNA
gaggtgcagctggtggagtctgggggaggcctggtcaagcctggggggtccctgagactctcctgtgcagcctctggattcaccttcaatagctatagcatgaactgggtccgccaggctccagggaaggggctggagtgggtctcatccattagtggtagtagtagttacatatactacgcagactcagtgaagggccgattcaccatctccagagacaacgccaagaactcactgtatctgcaaatgaacagcctgagagccgaggacacggctctgtattactgtgcgagagcggctggctttgactactggggccagggaaccctggtcaccgtctcctca

SEQ ID NO: 28382 - protein, 115 aa, synthetic construct
  REGION 1..115: note = Description of Artificial Sequence: Synthetic polypeptide
EVQLVESGGGLVKPGGSLRLSCAASGFTFNSYSMNWVRQAPGKGLEWVSSISGSSSYIYYADSVKGRFTISRDNAKNSLYLQMNSLRAEDTALYYCARAAGFDYWGQGTLVTVSS

SEQ ID NO: 28383 - DNA, 342 bp, synthetic construct
  misc_feature 1..342: note = Description of Artificial Sequence: Synthetic polynucleotide
  source 1..342: mol_type = other DNA
gcggtgcagctggtggagtctgggggaggcctggtcaagcctggggggtccctgagactctcctgtgcagcctctggattcaccttcagtagctatagcatgaactgggtccgccaggctccagggaaggggctggagtgggtctcatccattagtagtagtagtagttacatatactacgcagactcagtgaagggccgattcaccatctccagagacaacgccaagaactcactgtatctgcaaatgaacagcctgagagccgaggacacggctgtgttttactgtgcgagagataggggcagcctctggggccagggaaccctggtcaccgtctcctct

SEQ ID NO: 28384 - protein, 114 aa, synthetic construct
  REGION 1..114: note = Description of Artificial Sequence: Synthetic polypeptide
AVQLVESGGGLVKPGGSLRLSCAASGFTFSSYSMNWVRQAPGKGLEWVSSISSSSSYIYYADSVKGRFTISRDNAKNSLYLQMNSLRAEDTAVFYCARDRGSLWGQGTLVTVSS

SEQ ID NO: 28385 - DNA, 351 bp, synthetic construct
  misc_feature 1..351: note = Description of Artificial Sequence: Synthetic polynucleotide
  source 1..351: mol_type = other DNA
caggtgcagctggtggagtctgggggaggcgtggtccagcctgggaggtccctgagactctcctgtgcagcgtctggattcaccttcagtagctatggcatgcactgggtccgccaggctccaggcaaggggctggagtgggtggcagttatttggtatgaagaaaataatcaatactatgcagactccgtgaagggccgattcaccatctccagagacaattccaagaacacgctgtatctgcaaatgaacagcctgagagccgaggacacggctgtgtattactgtgcgagagaagtggggttccggtctgactactggggccagggaaccctggtcaccgtctcctca

SEQ ID NO: 28386 - protein, 117 aa, synthetic construct
  REGION 1..117: note = Description of Artificial Sequence: Synthetic polypeptide
QVQLVESGGGVVQPGRSLRLSCAASGFTFSSYGMHWVRQAPGKGLEWVAVIWYEENNQYYADSVKGRFTISRDNSKNTLYLQMNSLRAEDTAVYYCAREVGFRSDYWGQGTLVTVSS

SEQ ID NO: 28387 - DNA, 345 bp, synthetic construct
  misc_feature 1..345: note = Description of Artificial Sequence: Synthetic polynucleotide
  source 1..345: mol_type = other DNA
gaggtgcagctggtggagtctgggggaggcctggtcaagcctggggggtccctgagactctcctgtgcagcctctggattcaccttcagcagctatagcatgaactgggtccgccaggctccagggaaggggctggagtgggtctcatccattagtggtagtagtagttacacatactacgcagactcagtgaagggccgattcaccatctccagagacaacgccaagaactcactgtatctgcaaatgaacagcctgagagccgaggacacggctgtgtattactgtgcgagagtagcagcccttgactcctggggccagggaaccctggtcaccgtctcctca

SEQ ID NO: 28388 - protein, 115 aa, synthetic construct
  REGION 1..115: note = Description of Artificial Sequence: Synthetic polypeptide
EVQLVESGGGLVKPGGSLRLSCAASGFTFSSYSMNWVRQAPGKGLEWVSSISGSSSYTYYADSVKGRFTISRDNAKNSLYLQMNSLRAEDTAVYYCARVAALDSWGQGTLVTVSS

SEQ ID NO: 28389 - DNA, 345 bp, synthetic construct
  misc_feature 1..345: note = Description of Artificial Sequence: Synthetic polynucleotide
  source 1..345: mol_type = other DNA
gaggtgcagctgttggagtctgggggaggcttggtacagcctggggggtccctgagactctcctgtgcagcctctggattcacctttagcagctatgttatgagctgggtccgccaggctccagggaaggggctggagtgggtctcagctatgagtggtagtggtggtagcacatattatgtagactccgtgaagggccggttcaccatctccagagacaattccaagaacacgctgtatctgcaaatgaacagcctgagagccgaggacacggccgtatattattgtgcgcgaactggggtctttgactactggggccagggaaccctggtcatcgtctcctca

SEQ ID NO: 28390 - protein, 115 aa, synthetic construct
  REGION 1..115: note = Description of Artificial Sequence: Synthetic polypeptide
EVQLLESGGGLVQPGGSLRLSCAASGFTFSSYVMSWVRQAPGKGLEWVSAMSGSGGSTYYVDSVKGRFTISRDNSKNTLYLQMNSLRAEDTAVYYCARTGVFDYWGQGTLVIVSS

SEQ ID NO: 28391 - DNA, 354 bp, synthetic construct
  misc_feature 1..354: note = Description of Artificial Sequence: Synthetic polynucleotide
  source 1..354: mol_type = other DNA
caggtgcagctggtgcagtctggggctgaggtgaagaagcctggggcctcagtgaaggtctcctgcaaggcttctggatacaccttcaccaattatgatatcaactgggtgcgacaggccactggacaagggcttgagtggatgggatggatgcaccctaacagtggtaacacaggctatgcacagaggttccagggcagagtcaccatgaccaggaacacctccataagcacagcctacatggagctgagcagcctgagatctgaggacacggccgtgtattactgtgcgacaagcagtggctgggaggtctttgactactggggccagggaaccctggtcaccgtctcctca

SEQ ID NO: 28392 - protein, 118 aa, synthetic construct
  REGION 1..118: note = Description of Artificial Sequence: Synthetic polypeptide
QVQLVQSGAEVKKPGASVKVSCKASGYTFTNYDINWVRQATGQGLEWMGWMHPNSGNTGYAQRFQGRVTMTRNTSISTAYMELSSLRSEDTAVYYCATSSGWEVFDYWGQGTLVTVSS

SEQ ID NO: 28393 - DNA, 342 bp, synthetic construct
  misc_feature 1..342: note = Description of Artificial Sequence: Synthetic polynucleotide
  source 1..342: mol_type = other DNA
gaggtgcagctggtggagtctgggggaggcctggtcaagcctggggggtccctgagactctcctgtgcagcctctggattcaccttcagtagctatagcatgaactgggtccgccaggctccagggaagggcctggagtgggtctcatccattagtggcagtagtagttacatatactacgcagactcagtgaaggcccgattcaccatctccagagacaacgccaagaactcactgtatctgcaaatgaacagcctgagagccgaggacacggctgtgtattactgtgcgagagacagaggcagtctctggggccagggaaccctggtcaccgtctcctca

SEQ ID NO: 28394 - protein, 114 aa, synthetic construct
  REGION 1..114: note = Description of Artificial Sequence: Synthetic polypeptide
EVQLVESGGGLVKPGGSLRLSCAASGFTFSSYSMNWVRQAPGKGLEWVSSISGSSSYIYYADSVKARFTISRDNAKNSLYLQMNSLRAEDTAVYYCARDRGSLWGQGTLVTVSS

SEQ ID NO: 28395 - DNA, 351 bp, synthetic construct
  misc_feature 1..351: note = Description of Artificial Sequence: Synthetic polynucleotide
  source 1..351: mol_type = other DNA
caggtgcagctggtggagtctgggggaggcgtggtccagcctgggaggtccctgagactctcctgtgcagcgtctggattcaccttcagtgactatggcatgcactgggtccgccaggctccaggcaaggggctggagtgggtggcagttatatggtttgatggaagtaataaatactatgtagactccgtgaagggccgattcaccatctccagagacgattccaagaacactctgtatctgcaaatgaacagcctgagagccgaggacacggctgtgtattactgcgcgagagatcttggctggacggaagagtactggggccagggaaccctggtcaccgtctcctca

SEQ ID NO: 28396 - protein, 117 aa, synthetic construct
  REGION 1..117: note = Description of Artificial Sequence: Synthetic polypeptide
QVQLVESGGGVVQPGRSLRLSCAASGFTFSDYGMHWVRQAPGKGLEWVAVIWFDGSNKYYVDSVKGRFTISRDDSKNTLYLQMNSLRAEDTAVYYCARDLGWTEEYWGQGTLVTVSS

SEQ ID NO: 28397 - DNA, 342 bp, synthetic construct
  misc_feature 1..342: note = Description of Artificial Sequence: Synthetic polynucleotide
  source 1..342: mol_type = other DNA
gaggtgcagctggtggagtctgggggaggcctggtcaagcctggggggtccctgagactctcctgtgcagcctctggattcaccttcagtagctatagcatgaactgggtccgccaggctccagggaaggggctggagtgggtctcatccattagcggtagtagtagttacatctactacgcagactcactgaagggccgattcaccatctccagagacaacgccaagaactcactgtatctgcaaatgaacagcctgagagccgaggacacggctgtgtattactgtgcgagagatcgtgggagctactggggccagggaaccctggtcaccgtctcctca

SEQ ID NO: 28398 - protein, 114 aa, synthetic construct
  REGION 1..114: note = Description of Artificial Sequence: Synthetic polypeptide
EVQLVESGGGLVKPGGSLRLSCAASGFTFSSYSMNWVRQAPGKGLEWVSSISGSSSYIYYADSLKGRFTISRDNAKNSLYLQMNSLRAEDTAVYYCARDRGSYWGQGTLVTVSS

SEQ ID NO: 28399 - DNA, 357 bp, synthetic construct
  misc_feature 1..357: note = Description of Artificial Sequence: Synthetic polynucleotide
  source 1..357: mol_type = other DNA
cagctgcagctgcaggagtcgggcccaggactggtgaagccttcggagaccctgtccctcacctgcactgtctctggtggctccatcagtaggagtagttactactggggctggatccgccagcccccagggaaggggctggagtggattgggaatatttattatagtgggagcacctacgacaacccgtccctcaagagtcgagtcaccatatccgtagacacgtccaagaaccagttctccctgaagctgagctctgtgaccgccgcggacacggctgtttattactgtgggagacatggaaaagactggggccttgactactggggccagggaaccctggtcaccgtctcctca

SEQ ID NO: 28400 - protein, 119 aa, synthetic construct
  REGION 1..119: note = Description of Artificial Sequence: Synthetic polypeptide
QLQLQESGPGLVKPSETLSLTCTVSGGSISRSSYYWGWIRQPPGKGLEWIGNIYYSGSTYDNPSLKSRVTISVDTSKNQFSLKLSSVTAADTAVYYCGRHGKDWGLDYWGQGTLVTVSS

SEQ ID NO: 28401 - DNA, 351 bp, synthetic construct
  misc_feature 1..351: note = Description of Artificial Sequence: Synthetic polynucleotide
  source 1..351: mol_type = other DNA
caggtgcagctggtggagtctgggggaggcgtggtccagcctgggaggtccctgagactctcctgtgcagcgtctggattcaccttcagtgactatggcatacactgggtccgccaggctccaggcaaggggctggagtgggtggcagttatatggtttgatggaagtaataaatactatgcagactccgtgaagggccgaatcaccatctctagagacaattccaagaacacgctgtatctgcaaatgaacagcctgagagccgaggacacggctgtgtattactgtgcgagagatcttggctggacggaagagtactggggccagggaaccctggtcaccgtctcctca

SEQ ID NO: 28402 - protein, 117 aa, synthetic construct
  REGION 1..117: note = Description of Artificial Sequence: Synthetic polypeptide
QVQLVESGGGVVQPGRSLRLSCAASGFTFSDYGIHWVRQAPGKGLEWVAVIWFDGSNKYYADSVKGRITISRDNSKNTLYLQMNSLRAEDTAVYYCARDLGWTEEYWGQGTLVTVSS

SEQ ID NO: 28403 - DNA, 354 bp, synthetic construct
  misc_feature 1..354: note = Description of Artificial Sequence: Synthetic polynucleotide
  source 1..354: mol_type = other DNA
caggtgcagctggtggagtctgggggaggcgtggtccagcctgggaggtccctgagactctcctgtgcagcgtctggattcaccttcagtagctatggcatgcactgggtccgccaggctccaggcaaggggctggagtggggggcagttatatggcatgatggaagtaataaatactatgcagactccgtgaagggccgattcaccatctccagagacaatgccaagaacacgctgtatctgcaaatgaacagcctgagagccgaggacacggctgtgtattactgtgcgagagatctgagtatgggcggtatggacgtctggggccaagggaccacggtcaccgtctcctca

SEQ ID NO: 28404 - protein, 118 aa, synthetic construct
  REGION 1..118: note = Description of Artificial Sequence: Synthetic polypeptide
QVQLVESGGGVVQPGRSLRLSCAASGFTFSSYGMHWVRQAPGKGLEWGAVIWHDGSNKYYADSVKGRFTISRDNAKNTLYLQMNSLRAEDTAVYYCARDLSMGGMDVWGQGTTVTVSS

SEQ ID NO: 28405 - DNA, 357 bp, synthetic construct
  misc_feature 1..357: note = Description of Artificial Sequence: Synthetic polynucleotide
  source 1..357: mol_type = other DNA
cagctgcagctgcaggagtcgggcccaggactggtgaagccttcggagaccctgtccctcacctgcactgtctctggtggctccatcagcaggagtagttactactggggctggatccgccagcccccagggaaggggctggagtggattggaaatatctattatagtgggaccacctcctacaacccgtccctcaagagtcgagtcaccatatccgttgacacgtccaggaaccagttctccctgaagctgagctctgtgaccgccgcagacacggctgtgttttactgtgcgagactcagcagcagctggtccgttgactactggggccagggaaccctggtcaccgtctcctca

SEQ ID NO: 28406 - protein, 119 aa, synthetic construct
  REGION 1..119: note = Description of Artificial Sequence: Synthetic polypeptide
QLQLQESGPGLVKPSETLSLTCTVSGGSISRSSYYWGWIRQPPGKGLEWIGNIYYSGTTSYNPSLKSRVTISVDTSRNQFSLKLSSVTAADTAVFYCARLSSSWSVDYWGQGTLVTVSS

SEQ ID NO: 28407 - DNA, 345 bp, synthetic construct
  misc_feature 1..345: note = Description of Artificial Sequence: Synthetic polynucleotide
  source 1..345: mol_type = other DNA
gaggtgcagctgttggagtctgggggaggcttggtacagcctggggggtccctgagactctcctgtacagcctctggattcacctttagcagctatgccatgaactgggtccgccaggctccagggaaggggctggagtgggtctcagctattagtggtagtggtggtttcacatactacgcagactccgtgaagggccggttcaccatctccagagacaattccaggaacacgctgtatctgcaaatgaacagcctgagagccgaggacacggccgtatattactgtgcgcgtaccagtggctttgactactggggccagggaaccctggtcaccgtctcctca

SEQ ID NO: 28408 - protein, 115 aa, synthetic construct
  REGION 1..115: note = Description of Artificial Sequence: Synthetic polypeptide
EVQLLESGGGLVQPGGSLRLSCTASGFTFSSYAMNWVRQAPGKGLEWVSAISGSGGFTYYADSVKGRFTISRDNSRNTLYLQMNSLRAEDTAVYYCARTSGFDYWGQGTLVTVSS

SEQ ID NO: 28409 - DNA, 354 bp, synthetic construct
  misc_feature 1..354: note = Description of Artificial Sequence: Synthetic polynucleotide
  source 1..354: mol_type = other DNA
caggtgcagctggtggagtctgggggaggcgtggtccagcctgggaggtccctgagactctcctgtggagcgtctggattcaccttcagtagctatggcatgcactgggtccgccaggctccaggcaaggggctggagtgggtggcagttatatggtatgatggaagtaataaatactatgcagactccgtgaagggccgattcaccatctccagagacaattccaagaacacgctgtatctgcaaatgaacagcctgagagccgaggacacggctgtgtattactgtgcgagagtagcagtggcaggcggtatggacgtctggggccaagggaccacggtcaccgtctcctca

SEQ ID NO: 28410 - protein, 118 aa, synthetic construct
  REGION 1..118: note = Description of Artificial Sequence: Synthetic polypeptide
QVQLVESGGGVVQPGRSLRLSCGASGFTFSSYGMHWVRQAPGKGLEWVAVIWYDGSNKYYADSVKGRFTISRDNSKNTLYLQMNSLRAEDTAVYYCARVAVAGGMDVWGQGTTVTVSS

SEQ ID NO: 28411 - DNA, 363 bp, synthetic construct
  misc_feature 1..363: note = Description of Artificial Sequence: Synthetic polynucleotide
  source 1..363: mol_type = other DNA
gaggtgcagctgttggagtctgggggaggcttggtacagcctggggggtccctgagactctcctgtgcagcctctggattcacctttagaagctatgccatgagctggatccgccaggctccagggagggggctggagtggtcttcagttattagtggtagtggtggtagcacatattacgcagactccgtgaagggccggttcaccatctccagagacaattccaagaacacgctgtatctgcaaatgagcagcctgagagccgaagacacggccgtatattactgtgcgaaaaggtataacagtggctggcatgatgtttttgatatctggggccaagggacaatggtcaccgtctcttca

SEQ ID NO: 28412 - protein, 121 aa, synthetic construct
  REGION 1..121: note = Description of Artificial Sequence: Synthetic polypeptide
EVQLLESGGGLVQPGGSLRLSCAASGFTFRSYAMSWIRQAPGRGLEWSSVISGSGGSTYYADSVKGRFTISRDNSKNTLYLQMSSLRAEDTAVYYCAKRYNSGWHDVFDIWGQGTMVTVSS

SEQ ID NO: 28413 - DNA, 351 bp, synthetic construct
  misc_feature 1..351: note = Description of Artificial Sequence: Synthetic polynucleotide
  source 1..351: mol_type = other DNA
caggtgcagctggtggagtctgggggaggcgtggtccagcctgggaggtccctgagactctcctgtgcagcgtctggattcaccttcagtaactatggcatgcactgggtccgccaggctccaggcaaggggctggagtgggtggcagttatatggtatgatgaaaataataaatactatgtagactccgtgaagggccgattcaccatctccagagacaactccaagaacacgctgtatctgcaaatgaacagcctgagagccgaggacacggctgtgtattactgtgcgagagagttggggttccggtctgactactggggccagggaaccctggtcaccgtctcctca

SEQ ID NO: 28414 - protein, 117 aa, synthetic construct
  REGION 1..117: note = Description of Artificial Sequence: Synthetic polypeptide
QVQLVESGGGVVQPGRSLRLSCAASGFTFSNYGMHWVRQAPGKGLEWVAVIWYDENNKYYVDSVKGRFTISRDNSKNTLYLQMNSLRAEDTAVYYCARELGFRSDYWGQGTLVTVSS

SEQ ID NO: 28415 - DNA, 363 bp, synthetic construct
  misc_feature 1..363: note = Description of Artificial Sequence: Synthetic polynucleotide
  source 1..363: mol_type = other DNA
gaggtgcagctgttggagtctgggggaggcttggtacagcctggggggtccctgagactctcctgtgcagcctctgaattcacctttagcagctatgccatgaactgggtccgccaggctccagggaaggggctggagtgggtctcagttattagtggtcgtggtggtaacacattctacgcagactccgtgaagggccggttcaccatctccagagacaattccaagaacacgctgtatctgcaaatgaacagcctgagagccgaggacacggccgtatattactgtgcgtcccgtttggcagtggctggctcggaggcttgtgatatctggggccaagggacaatggtcaccgtctcttca

SEQ ID NO: 28416 - protein, 121 aa, synthetic construct
  REGION 1..121: note = Description of Artificial Sequence: Synthetic polypeptide
EVQLLESGGGLVQPGGSLRLSCAASEFTFSSYAMNWVRQAPGKGLEWVSVISGRGGNTFYADSVKGRFTISRDNSKNTLYLQMNSLRAEDTAVYYCASRLAVAGSEACDIWGQGTMVTVSS

SEQ ID NO: 28417 - DNA, 357 bp, synthetic construct
  misc_feature 1..357: note = Description of Artificial Sequence: Synthetic polynucleotide
  source 1..357: mol_type = other DNA
caggtgcagctggtggagtctgggggaggcgtggtccagcctgggaggtccctgagactctcctgtgcagcgtctggattcaccttcagtagctatggcatgcactgggtccgccaggctccaggcaaggggctggagtgggtggcagttatgtggtatgatggaagtaataaatattatgcagactccgtgaagggccgattcaccatctccagagacaattccaagaacacgctgtatctgcaaatgaacagcctgagagccgaggacacggctgtgtattactgtgcgagagatgggggatttttggagtggttagactactggggccagggaaccctggtcaccgtctcctca

SEQ ID NO: 28418 - protein, 119 aa, synthetic construct
  REGION 1..119: note = Description of Artificial Sequence: Synthetic polypeptide
QVQLVESGGGVVQPGRSLRLSCAASGFTFSSYGMHWVRQAPGKGLEWVAVMWYDGSNKYYADSVKGRFTISRDNSKNTLYLQMNSLRAEDTAVYYCARDGGFLEWLDYWGQGTLVTVSS

SEQ ID NO: 28419 - DNA, 363 bp, synthetic construct
  misc_feature 1..363: note = Description of Artificial Sequence: Synthetic polynucleotide
  source 1..363: mol_type = other DNA
gaggtgcagctgttggagtctgggggaggcttggtgcagcctggggggtccctgagactctcctgtgcagcctctgaattcacctttagcagctatgccatgagctgggtccgccaggctccagggaaggggctggagtgggtctcaattattagtggtcgtggtactaacacattctacgcagactccgtgaagggccggttcaccatctccagagtcaattccaagaacacgctgtatctgcaaatgaacagcctgagagccgaggacacggccgtatattactgtgcgtcccgtatagcagtggctggctcggaggcttttgatatctggggccaagggacaatggtcaccgtctcttca

SEQ ID NO: 28420 - protein, 121 aa, synthetic construct
  REGION 1..121: note = Description of Artificial Sequence: Synthetic polypeptide
EVQLLESGGGLVQPGGSLRLSCAASEFTFSSYAMSWVRQAPGKGLEWVSIISGRGTNTFYADSVKGRFTISRVNSKNTLYLQMNSLRAEDTAVYYCASRIAVAGSEAFDIWGQGTMVTVSS

SEQ ID NO: 28421 - DNA, 348 bp, synthetic construct
  misc_feature 1..348: note = Description of Artificial Sequence: Synthetic polynucleotide
  source 1..348: mol_type = other DNA
caggtgcagctggtggagtctgggggaggcgtggtccagcctgggaggtccctgagactctcctgtgtagcctctggattcaccttcaggagctatggcatgcactgggtccgccaggctccaggcaaggggctggagtgggtgacaattatatcatatgatggaagtaataaatactatgcagactccgtgaagggccgattcaccatctccagagacaattccaagaacacgctgtatctgcaaatgaacagcctgagagctgaggacacggctgtatatttctgtgcgagaggggtttggttcggggacttctggggccagggaaccctggtcaccgtctcctca

SEQ ID NO: 28422 - protein, 116 aa, synthetic construct
  REGION 1..116: note = Description of Artificial Sequence: Synthetic polypeptide
QVQLVESGGGVVQPGRSLRLSCVASGFTFRSYGMHWVRQAPGKGLEWVTIISYDGSNKYYADSVKGRFTISRDNSKNTLYLQMNSLRAEDTAVYFCARGVWFGDFWGQGTLVTVSS

SEQ ID NO: 28423 - DNA, 357 bp, synthetic construct
  misc_feature 1..357: note = Description of Artificial Sequence: Synthetic polynucleotide
  source 1..357: mol_type = other DNA
cagctgcagctgcaggagtcgggcccaggactggtgaagccttcggagaccctgtccctcacctgcactgtctctggtggctccatcagcagaagtagttactactggggctggatccgccagcccccagggaagggactggagtggattgggagtatctattatagtgggagcgcccagtacaacccgtccctcaagagtcgagtcaccatatccgtcgacacgtccaagaaccagttctccctgacgctgagctctgtgaccgccgcagacacggctttatattactgtgcgagactgagcagcagctggtcttttgactactggggccagggaaccctggtcaccgtctcctca

SEQ ID NO: 28424 - protein, 119 aa, synthetic construct
  REGION 1..119: note = Description of Artificial Sequence: Synthetic polypeptide
QLQLQESGPGLVKPSETLSLTCTVSGGSISRSSYYWGWIRQPPGKGLEWIGSIYYSGSAQYNPSLKSRVTISVDTSKNQFSLTLSSVTAADTALYYCARLSSSWSFDYWGQGTLVTVSS

SEQ ID NO: 28425 - DNA, 357 bp, synthetic construct
  misc_feature 1..357: note = Description of Artificial Sequence: Synthetic polynucleotide
  source 1..357: mol_type = other DNA
cagttgcaactgcaggagtcgggcccaggactggtgaagccttcggagaccctgtccctcacctgcactgtctctggtggctccatcagtaggagtagttactactggggctggatccgccagcccccagggaaggggctggagtggattgggaatatttattatagtgggaccacttacaacaacccgtccctcaagagtcgagtcaccatatccgtagacacgtccaagaaccacttctccctgaagctgagctctgtgaccgccgcagacacggctgtgtattactgtgggagacatggaaaagactggggccttgactactggggccagggaaccctggtcaccgtctcctca

SEQ ID NO: 28426 - protein, 119 aa, synthetic construct
  REGION 1..119: note = Description of Artificial Sequence: Synthetic polypeptide
QLQLQESGPGLVKPSETLSLTCTVSGGSISRSSYYWGWIRQPPGKGLEWIGNIYYSGTTYNNPSLKSRVTISVDTSKNHFSLKLSSVTAADTAVYYCGRHGKDWGLDYWGQGTLVTVSS

SEQ ID NO: 28427 - DNA, 357 bp, synthetic construct
  misc_feature 1..357: note = Description of Artificial Sequence: Synthetic polynucleotide
  source 1..357: mol_type = other DNA
cagctgcagctgcaggagtcgggcccaggactggtgaagccctcggagaccctgtccctcacctgcactgtctctggtggcgccatcagcaggagtagttactactggggctggatccgccagcccccagggaaggggctggagtggattgggagtatctattatagtgggagcgccaactacaacccgtccctcaagagtcgagtcaccatatccgtagacacgtccaagaaccagttctccctgaagctgagctctgtgaccgccgcagacacggctgtgtattactgtgcgagactcagcagcagctggtccattgacaactggggccagggaaccctggtcaccgtctcctca

SEQ ID NO: 28428 - protein, 119 aa, synthetic construct
  REGION 1..119: note = Description of Artificial Sequence: Synthetic polypeptide
QLQLQESGPGLVKPSETLSLTCTVSGGAISRSSYYWGWIRQPPGKGLEWIGSIYYSGSANYNPSLKSRVTISVDTSKNQFSLKLSSVTAADTAVYYCARLSSSWSIDNWGQGTLVTVSS

SEQ ID NO: 28429 - DNA, 351 bp, synthetic construct
  misc_feature 1..351: note = Description of Artificial Sequence: Synthetic polynucleotide
  source 1..351: mol_type = other DNA
gaggtgcagctggtggagtctgggggaggcttggtacagcctggggggtccctgagactctcctgtgcagcctctggattcaccttcagtagctatagcatgaactgggtccgccaggctccagggaaggggctggagtgggtttcatacattagtagtagtagtagtaccatatactatgcagactctgtgaagggccgattcaccatctccagagacaatgccaagaactcactgtacctgcaaatgaacagcctgagagacgaggacacggctgtgtattactgtgcgaggtcactatggtccccctttgactactggggccagggaaccctggtcaccgtctcctca

SEQ ID NO: 28430 - protein, 117 aa, synthetic construct
  REGION 1..117: note = Description of Artificial Sequence: Synthetic polypeptide
EVQLVESGGGLVQPGGSLRLSCAASGFTFSSYSMNWVRQAPGKGLEWVSYISSSSSTIYYADSVKGRFTISRDNAKNSLYLQMNSLRDEDTAVYYCARSLWSPFDYWGQGTLVTVSS

SEQ ID NO: 28431 - DNA, 351 bp, synthetic construct
  misc_feature 1..351: note = Description of Artificial Sequence: Synthetic polynucleotide
  source 1..351: mol_type = other DNA
caggtgcagctgcaggagtcgggcccaggactggtgaagccttcggagaccctgtccctcacctgcactgtctctggtggctccatcagtagttacttctggagctggatccggcagcccgccgggaagggactggagtggattgggcgtatctataccagtgggatcaccaactacaacccctccctcaagagtcgagtcaccatgtcagtagacacgtccaagaaccagttctccctgaaactgagttctgtgaccgccgcggacacggccatatattactgtgcgagaggcccgacttcggggtggttcgacccctggggccagggaaccctggtcaccgtctcctca

SEQ ID NO: 28432 - protein, 117 aa, synthetic construct
  REGION 1..117: note = Description of Artificial Sequence: Synthetic polypeptide
QVQLQESGPGLVKPSETLSLTCTVSGGSISSYFWSWIRQPAGKGLEWIGRIYTSGITNYNPSLKSRVTMSVDTSKNQFSLKLSSVTAADTAIYYCARGPTSGWFDPWGQGTLVTVSS

SEQ ID NO: 28433 - DNA, 351 bp, synthetic construct
  misc_feature 1..351: note = Description of Artificial Sequence: Synthetic polynucleotide
  source 1..351: mol_type = other DNA
caggtgcagctggtggagtctgggggaggcgtggtccagtctgggaggtccctgagactctcctgtgcagcgtctggattcaccttcagtgactatggcatgcactgggtccgccaggctccaggcaaggggctggagtgggtggcagttatatggtttgatggaagtaataaatactatgcagactccgtgaagggccgattcaccatctccagagacaattccaagaacacgctgtatctgcaaatgaacagcctgagagccgaggacacggctgtgtattactgtgcgagagatcttggctggacggaagagtactggggccagggaaccctggtcaccgtctcctca

SEQ ID NO: 28434 - protein, 117 aa, synthetic construct
  REGION 1..117: note = Description of Artificial Sequence: Synthetic polypeptide
QVQLVESGGGVVQSGRSLRLSCAASGFTFSDYGMHWVRQAPGKGLEWVAVIWFDGSNKYYADSVKGRFTISRDNSKNTLYLQMNSLRAEDTAVYYCARDLGWTEEYWGQGTLVTVSS

SEQ ID NO: 28435 - DNA, 357 bp, synthetic construct
  misc_feature 1..357: note = Description of Artificial Sequence: Synthetic polynucleotide
  source 1..357: mol_type = other DNA
caactgcagctgcaggagtcgggcccaggactggtgaagccttcggagaccctgtccctcacctgtactgtttctggtggctccatcaacaggagtagttactactggggctggatccgccagcccccagggaaggggctggagtggattgggaatatctattatagtggggccacctattataattcgtccctcaagagtcgagtcaccatctccgtagacacgtccacgaaccagttctccctgaagctgagctctgtgaccgccgcagacacggctgtgtattactgtgcgagacatagcggcagctggtcccttgactactggggccagggaaccctggtcaccgtctcctca

SEQ ID NO: 28436 - protein, 119 aa, synthetic construct
  REGION 1..119: note = Description of Artificial Sequence: Synthetic polypeptide
QLQLQESGPGLVKPSETLSLTCTVSGGSINRSSYYWGWIRQPPGKGLEWIGNIYYSGATYYNSSLKSRVTISVDTSTNQFSLKLSSVTAADTAVYYCARHSGSWSLDYWGQGTLVTVSS

SEQ ID NO: 28437 - DNA, 369 bp, synthetic construct
  misc_feature 1..369: note = Description of Artificial Sequence: Synthetic polynucleotide
  source 1..369: mol_type = other DNA
caggtgcagctggtggagtctgggggaggcgtggtccagcctgggaggtccctgagactctcctgtgcagcgtctggattcaccttcagcgactatggcatgcactgggtccgccaggctccaggcaaggggctggagtgggtggcagttatatggtatgatggaagtaataaatactatgtagactccgtgaagggccgattcaccatctccagagacaattccaagaacacgctgtatctgcaaatgaacagcctgagagccgaggacacggctgtgtattactgtgcgagagaaaagtatagcagcagctggtacgactacggtatggacgtctggggccaagggaccacggtcaccgtctcctca

SEQ ID NO: 28438 - protein, 123 aa, synthetic construct
  REGION 1..123: note = Description of Artificial Sequence: Synthetic polypeptide
QVQLVESGGGVVQPGRSLRLSCAASGFTFSDYGMHWVRQAPGKGLEWVAVIWYDGSNKYYVDSVKGRFTISRDNSKNTLYLQMNSLRAEDTAVYYCAREKYSSSWYDYGMDVWGQGTTVTVSS

SEQ ID NO: 28439 - DNA, 357 bp, synthetic construct
  misc_feature 1..357: note = Description of Artificial Sequence: Synthetic polynucleotide
  source 1..357: mol_type = other DNA
cagctgcagctgcaggagtcgggcccaggactggtgaagccttcggagaccctgtccctcacctgcactgtctctggtggctccatcaacaggagtagttactactggggctggatccgccagcccccagggaaggggctggactggattgggaatatctattatagtgggagcacctactacaacccgtccgtcaagagtcgattcaccatatccgtagacacgtccaagaaccagttctccctgaagctgagctctgtgaccgccgcagacacggctgtgtattactgtgcgagacatggaaaagactggggccttgactactggggccagggaaccctggtcaccgtctcctca

SEQ ID NO: 28440 - protein, 119 aa, synthetic construct
  REGION 1..119: note = Description of Artificial Sequence: Synthetic polypeptide
QLQLQESGPGLVKPSETLSLTCTVSGGSINRSSYYWGWIRQPPGKGLDWIGNIYYSGSTYYNPSVKSRFTISVDTSKNQFSLKLSSVTAADTAVYYCARHGKDWGLDYWGQGTLVTVSS

SEQ ID NO: 28441 - DNA, 345 bp, synthetic construct
  misc_feature 1..345: note = Description of Artificial Sequence: Synthetic polynucleotide
  source 1..345: mol_type = other DNA
gaggtgcaactgttggagtctgggggaggcttggtacagcctggggggtccctgagactctcctgtgcagcctctggattcacctttagcagctatgccatgagctgggtccgccaggctccagggagggggctggagtgggtctcagttattagtggtagtggtggtaccacatataacacagactccgtgaagggccggttcaccatctccagagacaattccaagaacacgctatatctgcaaatgaacagcctgagagccgaggacacggccgtatattactgtgcccgcagctccttgtttgactactggggccagggaaccctggtcaccgtctcctca

SEQ ID NO: 28442 - protein, 115 aa, synthetic construct
  REGION 1..115: note = Description of Artificial Sequence: Synthetic polypeptide
EVQLLESGGGLVQPGGSLRLSCAASGFTFSSYAMSWVRQAPGRGLEWVSVISGSGGTTYNTDSVKGRFTISRDNSKNTLYLQMNSLRAEDTAVYYCARSSLFDYWGQGTLVTVSS

SEQ ID NO: 28443 - DNA, 345 bp, synthetic construct
  misc_feature 1..345: note = Description of Artificial Sequence: Synthetic polynucleotide
  source 1..345: mol_type = other DNA
gaggtgcagctgttggagtctgggggaggcttggtacagcctggggggtccctgagactctcctgtgcagcctctggattcacctttagcagctatgccatgagctgggtccgccaggctccagggaaggggctggagtgggtctcagctattagtggtagtggtggtagcacatactacgcagactccgtgaagggccggttcaccatctccagagacaattccaagaacacgctgtatctgcaaatgaacagcctgagagccgaggacacggccgtatattactgtgcggttagcagtggctggttcgcctggggccagggaaccctggtcaccgtctcctca

SEQ ID NO: 28444 - protein, 115 aa, synthetic construct
  REGION 1..115: note = Description of Artificial Sequence: Synthetic polypeptide
EVQLLESGGGLVQPGGSLRLSCAASGFTFSSYAMSWVRQAPGKGLEWVSAISGSGGSTYYADSVKGRFTISRDNSKNTLYLQMNSLRAEDTAVYYCAVSSGWFAWGQGTLVTVSS

SEQ ID NO: 28445 - DNA, 342 bp, synthetic construct
  misc_feature 1..342: note = Description of Artificial Sequence: Synthetic polynucleotide
  source 1..342: mol_type = other DNA
gaggtgcaactggtggagtctgggggaggcctggtcaagcctggggggtccctgagactctcctgtgcagcctctggattcaccttcagttcctataccatgaactgggtccgccaggctccagggaaggggctggagtgggtctcatccattagtggtagtagtagttacatatggtatgtagactcagtgaagggccgattcaccatctccagagacaacgccaagaactcactgtatctgcaaatgaacagcctgagagccgaggacacggctgtgtattactgtgcgagagatcggggcagtctctggggccagggaaccctggtcaccgtctcctca

SEQ ID NO: 28446 - protein, 114 aa, synthetic construct
  REGION 1..114: note = Description of Artificial Sequence: Synthetic polypeptide
EVQLVESGGGLVKPGGSLRLSCAASGFTFSSYTMNWVRQAPGKGLEWVSSISGSSSYIWYVDSVKGRFTISRDNAKNSLYLQMNSLRAEDTAVYYCARDRGSLWGQGTLVTVSS

SEQ ID NO: 28447 - DNA, 369 bp, synthetic construct
  misc_feature 1..369: note = Description of Artificial Sequence: Synthetic polynucleotide
  source 1..369: mol_type = other DNA
caggtgcagctggtggagtctgggggaggcgtggtccagcctgggaggtccccgagactctcctgtgcagcgtctggattcatcttcagtaactatgtcatgcactgggtccgccaggctccaggcaaggggctggagtgggtggcagttatatggtatgatggaagtaataaatactatgcagactccgtgaagggccgattcaccatctccagagacaattccaagaacacgctgtatctgcaaatgaacagcctgagagccgaggacacggctgtgtattactgtgcgagagaggaatatagtagtggctggtacgactacggtatggacgtctggggccaagggaccacggtcaccgtctcctca

SEQ ID NO: 28448 - protein, 123 aa, synthetic construct
  REGION 1..123: note = Description of Artificial Sequence: Synthetic polypeptide
QVQLVESGGGVVQPGRSPRLSCAASGFIFSNYVMHWVRQAPGKGLEWVAVIWYDGSNKYYADSVKGRFTISRDNSKNTLYLQMNSLRAEDTAVYYCAREEYSSGWYDYGMDVWGQGTTVTVSS

SEQ ID NO: 28449 - DNA, 342 bp, synthetic construct
  misc_feature 1..342: note = Description of Artificial Sequence: Synthetic polynucleotide
  source 1..342: mol_type = other DNA
gaagtgcagctggtggaatctgggggaggcctggtcaagcctggggggtccctgagactctcctgtgcagcctctggattcaccttcagtagctatagcatgaactgggtccgccaggctccagggaaggggctggagtgggtctcatccattagtagtagtagtagttacatatactacgcagactcagtgaagggccgattcaccatctccagagacaacgccaagaactcactgtatctgcaaatgaacagcctgagagccgaggacacggctgtgtattattgtgcgagagatcgtgggagctgctggggccagggaaccctggtcaccatctcctca

SEQ ID NO: 28450 - protein, 114 aa, synthetic construct
  REGION 1..114: note = Description of Artificial Sequence: Synthetic polypeptide
EVQLVESGGGLVKPGGSLRLSCAASGFTFSSYSMNWVRQAPGKGLEWVSSISSSSSYIYYADSVKGRFTISRDNAKNSLYLQMNSLRAEDTAVYYCARDRGSCWGQGTLVTISS

SEQ ID NO: 28451 - DNA, 342 bp, synthetic construct
  misc_feature 1..342: note = Description of Artificial Sequence: Synthetic polynucleotide
  source 1..342: mol_type = other DNA
gaggtgcagctggtggagtctgggggaggcctggtcaagcctggggggtccctgagactctcctgtgcagcctctggattcaccttcagtacctatagcatgaactgggtccgccaggctccagggaaggggctggagtgggtctcatccattagtagtagtagtagttacatatactacgcagactcagtgaagggccgattcaccatctccagagacaacgccaagaactcactgtatctgcaaatgaacagcctgagagccgaggacacggctatttattactgtgcgagagatcgtgggagcctctggggccagggaaccctggtcaccgtctcctca

SEQ ID NO: 28452 - protein, 114 aa, synthetic construct
  REGION 1..114: note = Description of Artificial Sequence: Synthetic polypeptide
EVQLVESGGGLVKPGGSLRLSCAASGFTFSTYSMNWVRQAPGKGLEWVSSISSSSSYIYYADSVKGRFTISRDNAKNSLYLQMNSLRAEDTAIYYCARDRGSLWGQGTLVTVSS

SEQ ID NO: 28453 - DNA, 363 bp, synthetic construct
  misc_feature 1..363: note = Description of Artificial Sequence: Synthetic polynucleotide
  source 1..363: mol_type = other DNA
gaggtgcagctgttggagtctgggggaggcttggtacagcctggggggtccctgagactctcctgtgcagcctctaaattcacctttagcagctatgccatgaactgggtccgccaggctccagggaaggggctggagtggatctcaattattagtggtcgtggtggtaacacattctacgcagactccgtgaagggccggttcaccatctccagagacaattccaagaacacgctgtatctgcaaatgaacagcctgagagccgaggacacggccgtatattactgtgcgtcccgtttggcagtggctggctcggaggcttttgatatctggggccaagggacaatggtcaccgtctcttca

SEQ ID NO: 28454 - protein, 121 aa, synthetic construct
  REGION 1..121: note = Description of Artificial Sequence: Synthetic polypeptide
EVQLLESGGGLVQPGGSLRLSCAASKFTFSSYAMNWVRQAPGKGLEWISIISGRGGNTFYADSVKGRFTISRDNSKNTLYLQMNSLRAEDTAVYYCASRLAVAGSEAFDIWGQGTMVTVSS

SEQ ID NO: 28455 - DNA, 351 bp, synthetic construct
  misc_feature 1..351: note = Description of Artificial Sequence: Synthetic polynucleotide
  source 1..351: mol_type = other DNA
caggtgcagctggtggagtctgggggaggcgtggtccagcctgggaggtccctgagactctcctgttcagcgtctggattcaccttcagtgactatggcatgcactgggtccgccaggctccaggcaaggggctggagtgggtggcagttatatggtatgatgaaagtaataaatactatgcagactccgtgaagggccgattcaccatctccagagacaattccaagaacacgctgtatctgcaaatgaacagcctgagagccgaggacacggctatgtattactgtacgagagaactggggttccggtctgactattggggccagggaaccctggtcaccgtctcctca

SEQ ID NO: 28456 - protein, 117 aa, synthetic construct
  REGION 1..117: note = Description of Artificial Sequence: Synthetic polypeptide
QVQLVESGGGVVQPGRSLRLSCSASGFTFSDYGMHWVRQAPGKGLEWVAVIWYDESNKYYADSVKGRFTISRDNSKNTLYLQMNSLRAEDTAMYYCTRELGFRSDYWGQGTLVTVSS

SEQ ID NO: 28457 - DNA, 345 bp, synthetic construct
  misc_feature 1..345: note = Description of Artificial Sequence: Synthetic polynucleotide
  source 1..345: mol_type = other DNA
gaggtgcagctgttggagtctgggggaggcttggtccaacctggggggtccctgagactctcctgtgcagcctctggattcacctttagcagctatgccatgagctgggtccgccaggctccagggaaggggctggagtgggtctcaggtattagtggtagtggaggtaacacaccctacgcagactccgtgaagggccggttcaccatctccagagacatttccaagaacacgctgtatctgcaaatgaacagcctgagagccgaagacacggccgtatattactgtgcgaaagtagtgggagctgtccactggggccggggaaccctggtcaccgtctcctca

SEQ ID NO: 28458 - protein, 115 aa, synthetic construct
  REGION 1..115: note = Description of Artificial Sequence: Synthetic polypeptide
EVQLLESGGGLVQPGGSLRLSCAASGFTFSSYAMSWVRQAPGKGLEWVSGISGSGGNTPYADSVKGRFTISRDISKNTLYLQMNSLRAEDTAVYYCAKVVGAVHWGRGTLVTVSS

SEQ ID NO: 28459 - DNA, 357 bp, synthetic construct
  misc_feature 1..357: note = Description of Artificial Sequence: Synthetic polynucleotide
  source 1..357: mol_type = other DNA
cagctgcagctgcaggagtcgggcccaggactggtgaagccttcggagaccctgtccctcacctgcactgtctctggtggctccatcagtaggagtagttactactggggctggatccgccagcccccagggaaggggctggagtggattgggaatatttattatagtgggagcacctaccacaacccgtctctcaagagtcgagtcaccatatccgtagacacgtccatgaaccagttctccctgaagttgacctctgtgaccgccgcagacacggctgtgtatttctgtgggagacatggaaaagactggggccttgactactggggccagggaaccctggtcaccgtctcctca

SEQ ID NO: 28460 - protein, 119 aa, synthetic construct
  REGION 1..119: note = Description of Artificial Sequence: Synthetic polypeptide
QLQLQESGPGLVKPSETLSLTCTVSGGSISRSSYYWGWIRQPPGKGLEWIGNIYYSGSTYHNPSLKSRVTISVDTSMNQFSLKLTSVTAADTAVYFCGRHGKDWGLDYWGQGTLVTVSS

SEQ ID NO: 28461 - DNA, 351 bp, synthetic construct
  misc_feature 1..351: note = Description of Artificial Sequence: Synthetic polynucleotide
  source 1..351: mol_type = other DNA
caggtgcagctggtggagtctgggggaggcgtggtccagcctgggaggtccctgagactctcctgtgcagcgtctggattcaccttcagtagctatggcatgcactgggtccgccaggctccaggcaaggggctggagtgggtggcagttatctggtatgatggaaataataaatactatgcagactccgtgaagggccgattcaccatctccagagacaattccaagaacacgctgtatctgcaaatgaacagcctgagagccgaggacacggctgtgtattactgtgcgagagagcttgcctggtacgaagactactggggccagggaaccctggtcaccgtctcctca

SEQ ID NO: 28462 - protein, 117 aa, synthetic construct
  REGION 1..117: note = Description of Artificial Sequence: Synthetic polypeptide
QVQLVESGGGVVQPGRSLRLSCAASGFTFSSYGMHWVRQAPGKGLEWVAVIWYDGNNKYYADSVKGRFTISRDNSKNTLYLQMNSLRAEDTAVYYCARELAWYEDYWGQGTLVTVSS

SEQ ID NO: 28463 - DNA, 366 bp, synthetic construct
  misc_feature 1..366: note = Description of Artificial Sequence: Synthetic polynucleotide
  source 1..366: mol_type = other DNA
caggtgcagctgcaggcgtcgggcccaggactggtgaagccttcacagaccctgtccctcacctgcactgtctctgatggctccatcagcagtggtggttactactggagctggatccgccagcacccagggaagggcctggagtggattgggtacatctattacagtgggagcacctactacaacccgtccctcaagagtcgagttaccatatcagtagacacgtctaagaaccagttctccctgaagctgagttctgtgactgccgcggacacggccgtatattactgtgcgagagaggacggtgccttcggctactacggtatggacgtctggggccaagggaccacggtcaccgtctcctca

SEQ ID NO: 28464 - protein, 122 aa, synthetic construct
  REGION 1..122: note = Description of Artificial Sequence: Synthetic polypeptide
QVQLQASGPGLVKPSQTLSLTCTVSDGSISSGGYYWSWIRQHPGKGLEWIGYIYYSGSTYYNPSLKSRVTISVDTSKNQFSLKLSSVTAADTAVYYCAREDGAFGYYGMDVWGQGTTVTVSS

SEQ ID NO: 28465 - DNA, 351 bp, synthetic construct
  misc_feature 1..351: note = Description of Artificial Sequence: Synthetic polynucleotide
  source 1..351: mol_type = other DNA
caggagcagctggtggagtctgggggaggcgtggtccagcctgggaggtccctgagactctcctgtgcagcgtctggattcaccttcagtagctatggcatgcactgggtccgccaggctccaggcaaggggctggagtgggtggcagttatatggtatgatgaaaataataaatactatgtagactccgtgaagggccgattcaccatctccagagacaactccaagaacacgctgtatctgcaaatgaacagcctgagagccgaggacacggctgtgtattactgtgcgagagaattggggttccggtctgactactggggccagggaaccctggtcaccgtctcctca

SEQ ID NO: 28466 - protein, 117 aa, synthetic construct
  REGION 1..117: note = Description of Artificial Sequence: Synthetic polypeptide
QEQLVESGGGVVQPGRSLRLSCAASGFTFSSYGMHWVRQAPGKGLEWVAVIWYDENNKYYVDSVKGRFTISRDNSKNTLYLQMNSLRAEDTAVYYCARELGFRSDYWGQGTLVTVSS

SEQ ID NO: 28467 - DNA, 363 bp, synthetic construct
  misc_feature 1..363: note = Description of Artificial Sequence: Synthetic polynucleotide
  source 1..363: mol_type = other DNA
caggtgcaactggtagagtctgggggaggcgtggtccagcctgggaggtccctgagactctcctgtgcagcctctggattcaccttcagtagctatggcatgcactgggtccgccaggttccaggcaaggggctggagtgggtggcaattatatcatatgctggaagtaataaatcctatgcagactccgtgaagggccgattcaccatctccagagacaattccaagaacacgctgtatctgcaaatgaacagcctgagagctgaggacacggctgtgtattactgtgtgagacggggatacagctatggcgggtacggtatggacgtctggggccaaggggccacggtcaccgtctcctca

SEQ ID NO: 28468 - protein, 121 aa, synthetic construct
  REGION 1..121: note = Description of Artificial Sequence: Synthetic polypeptide
QVQLVESGGGVVQPGRSLRLSCAASGFTFSSYGMHWVRQVPGKGLEWVAIISYAGSNKSYADSVKGRFTISRDNSKNTLYLQMNSLRAEDTAVYYCVRRGYSYGGYGMDVWGQGATVTVSS

SEQ ID NO: 28469 - DNA, 357 bp, synthetic construct
  misc_feature 1..357: note = Description of Artificial Sequence: Synthetic polynucleotide
  source 1..357: mol_type = other DNA
cagctgcagctgcaggagtcgggcccaggactggtgaagccttcggagaccctgtccctcacctgcactgtctctggtggctccatcagcaggagtagttactactggggctggatccgccagcccccagggaagggactggagtggattgggagtatctattatagtgggagcgcctcttacaacccgtccctcaagagtcgagtcaccatatccgtagacacgtccaggaaccagttctccctgaagctgagctctgtgaccgccgcagacacggctgcgtattactgtgcgagactgagcagcagctggtcttttgactactggggccagggaaccctggtcaccgtctcctca

SEQ ID NO: 28470 - protein, 119 aa, synthetic construct
  REGION 1..119: note = Description of Artificial Sequence: Synthetic polypeptide
QLQLQESGPGLVKPSETLSLTCTVSGGSISRSSYYWGWIRQPPGKGLEWIGSIYYSGSASYNPSLKSRVTISVDTSRNQFSLKLSSVTAADTAAYYCARLSSSWSFDYWGQGTLVTVSS

SEQ ID NO: 28471 - DNA, 369 bp, synthetic construct
  misc_feature 1..369: note = Description of Artificial Sequence: Synthetic polynucleotide
  source 1..369: mol_type = other DNA
caggtgcagctggtggagtctgggggaggcgtggtccagcctgggaggtccctgagactctcctgtgcagcgtctggattcaccttcagtagctatgtcatgcactgggtccgccaggctccaggcaaggggctggagtgggtggcagttatatggtatgatggaagtaataaatactatgcagactccgtgaaggtccgattcaccgtctccagagacaattccaagaacacgctgtctctgcaaatgaacagcctgagagccgaggacacggctgtgtattactgtgcgagagagagatataccagtggctggtatgactacggtatggacgtctggggccaagggaccacggtcaccgtctcctca

SEQ ID NO: 28472 - protein, 123 aa, synthetic construct; identical to SEQ ID NO: 28208
  REGION 1..123: note = Description of Artificial Sequence: Synthetic polypeptide

SEQ ID NO: 28473 - DNA, 369 bp, synthetic construct
  misc_feature 1..369: note = Description of Artificial Sequence: Synthetic polynucleotide
  source 1..369: mol_type = other DNA
gaggtgaagctgttggagtctgggggaggcttggtacagccgggggggtccctgagactctcctgtgcagcctctggattcacctttaacaactatgccatgagctgggtccgccaggctccagggaaggggctggagtgggtctcagttcttagtggtagtggtggtagcacattctacgcagactccgtgaagggccggttcaccatctccagagacaattccaagaacacgctgtatctgcaaatgagcagcctgagagccggggacacggccgtatatttctgtgcccgatattgtagtagtgccaggtgcccttatgatgcctttgatatctggggccaagggacaatggtcaccgtctcctca

SEQ ID NO: 28474 - protein, 123 aa, synthetic construct
  REGION 1..123: note = Description of Artificial Sequence: Synthetic polypeptide
EVKLLESGGGLVQPGGSLRLSCAASGFTFNNYAMSWVRQAPGKGLEWVSVLSGSGGSTFYADSVKGRFTISRDNSKNTLYLQMSSLRAGDTAVYFCARYCSSARCPYDAFDIWGQGTMVTVSS

SEQ ID NO: 28475 - DNA, 351 bp, synthetic construct
  misc_feature 1..351: note = Description of Artificial Sequence: Synthetic polynucleotide
  source 1..351: mol_type = other DNA
caggtgcagctggtggagtctgggggaggcgtggtccagcctgggaggtccctgagactctcctgtgcagcgtctggattcaccttcagtgactatggcatgcactgggtccgccaggctccaggcaaggggctggagtgggtggcagttatatggtttgatggaaataataaatactatgtagactccgtgaagggccgattcaccatctccagagacaattccaagaacacgctgtatctgcaaatgaacagcctgagagccgaggacacggctgtgtattactgtgcgagagatcttggctggacggaagagtactggggccagggaaccctggtcaccgtctcctca

SEQ ID NO: 28476 - protein, 117 aa, synthetic construct
  REGION 1..117: note = Description of Artificial Sequence: Synthetic polypeptide
QVQLVESGGGVVQPGRSLRLSCAASGFTFSDYGMHWVRQAPGKGLEWVAVIWFDGNNKYYVDSVKGRFTISRDNSKNTLYLQMNSLRAEDTAVYYCARDLGWTEEYWGQGTLVTVSS

SEQ ID NO: 28477 - DNA, 363 bp, synthetic construct
  misc_feature 1..363: note = Description of Artificial Sequence: Synthetic polynucleotide
  source 1..363: mol_type = other DNA
gaggtgcagctgttggagtctgggggaggcttggtacaggttggggggtccctgagactctcctgtgcagcctctggattcacttttagcagctatgccatgagctgggtccgccaggctccagggatggggctggagtgggtctcaattattagtggtagtggtggttacacatactacgcggactccgtgaagggccgattcaccatctccagagacaattccaagaacacgctgtatctgcaaatgaacagcctgagagccgaggacacggccgtatattattgtgcgtcccgtatagcagtggctggctcggaggcttttgatatctggggccaagggacaatggtcaccgtctcttca

SEQ ID NO: 28478 - protein, 121 aa, synthetic construct
  REGION 1..121: note = Description of Artificial Sequence: Synthetic polypeptide
EVQLLESGGGLVQVGGSLRLSCAASGFTFSSYAMSWVRQAPGMGLEWVSIISGSGGYTYYADSVKGRFTISRDNSKNTLYLQMNSLRAEDTAVYYCASRIAVAGSEAFDIWGQGTMVTVSS

SEQ ID NO: 28479 - DNA, 351 bp, synthetic construct
  misc_feature 1..351: note = Description of Artificial Sequence: Synthetic polynucleotide
  source 1..351: mol_type = other DNA
caggtgcagatggtggagtctgggggaggcgtggtccagcctgggaggtccctgagactctcctgtgcagcgtctggattcaccttcagtagctatggcatgcactgggtccgccaggctccaggcaaggggctggagtgggtggcagttatatggtatgaggaaaataataaagactatgtagactccgtgaagggccgattcaccatctccagagacaattccaagagcacgctgtatctgcaaatgaatagtctgagagccgaggacacggctgtgtattactgtgtgagagagttaggcttccagtctgactactggggccagggaaccccggtcaccgtctcctca

SEQ ID NO: 28480 - protein, 117 aa, synthetic construct
  REGION 1..117: note = Description of Artificial Sequence: Synthetic polypeptide
QVQMVESGGGVVQPGRSLRLSCAASGFTFSSYGMHWVRQAPGKGLEWVAVIWYEENNKDYVDSVKGRFTISRDNSKSTLYLQMNSLRAEDTAVYYCVRELGFQSDYWGQGTPVTVSS

SEQ ID NO: 28481 - DNA, 357 bp, synthetic construct
  misc_feature 1..357: note = Description of Artificial Sequence: Synthetic polynucleotide
  source 1..357: mol_type = other DNA
cagctgcagctgcaggagtcgggcccaggactggtgaagccttcggagaccctgtccctcacctgcactgtctctggtggctccatcagtaggagtagttactactggggctggatccgccagcccccagggcaggggctggagtggattgggaatatttattatagtgggagcacctacaacaacccgtccctcaagagtcgagtctccatatccgttgacacgtccaagaaccagttctccctgaacctgagctctgtgaccgccgcagacacggctgtgtattactgtgggagacatggaaaagactggggccttgacttctggggccagggaaccctggtcaccgtctcctca

SEQ ID NO: 28482 - protein, 119 aa, synthetic construct
  REGION 1..119: note = Description of Artificial Sequence: Synthetic polypeptide
QLQLQESGPGLVKPSETLSLTCTVSGGSISRSSYYWGWIRQPPGQGLEWIGNIYYSGSTYNNPSLKSRVSISVDTSKNQFSLNLSSVTAADTAVYYCGRHGKDWGLDFWGQGTLVTVSS

SEQ ID NO: 28483 - DNA, 369 bp, synthetic construct
  misc_feature 1..369: note = Description of Artificial Sequence: Synthetic polynucleotide
  source 1..369: mol_type = other DNA
caggtgcagttggtggagtctgggggaggcgtggtccagcctgggaggtccctgagactctcctgtgcagcgtctggattcaccttcagtagctatggcatgcactgggtccgccaggctccaggcaaggggctggagtgggtggcagttatatggtatgatggaagtaataaatactatgcagactccgtgaagggccgattcaccatctccagagacaattccaagaacacgctgtatctgcaaatgaacagcctgagagccgaggacacggctgtgtattactgtgcgagagaaaggtatagcagtggctggcacgactacggtatggacgtctggggccaagggaccacggtcaccgtctcctca

SEQ ID NO: 28484 - protein, 123 aa, synthetic construct
  REGION 1..123: note = Description of Artificial Sequence: Synthetic polypeptide
QVQLVESGGGVVQPGRSLRLSCAASGFTFSSYGMHWVRQAPGKGLEWVAVIWYDGSNKYYADSVKGRFTISRDNSKNTLYLQMNSLRAEDTAVYYCARERYSSGWHDYGMDVWGQGTTVTVSS

SEQ ID NO: 28485 - DNA, 354 bp, synthetic construct
  misc_feature 1..354: note = Description of Artificial Sequence: Synthetic polynucleotide
  source 1..354: mol_type = other DNA
caggtgcagctggtgcagtctggggctgaggtgaagaagcctggggcctcagtgaaggtctcctgcaaggcttctggataccccttcaccaattatgatatcaactgggtgcgacaggccactggacaagggcttgagtggatgggatggatgcaccctaacagtggtaacacaggctatgcacagaagttccagggcagagtcaccatgaccaggaacacctccataaacacagcctacatggaactgagcagcctgagatctgaggacacggccgtgtattactgtgcgggtagcagtggctggtactactttgactactggggccagggaaccctggtcaccgtctcctca

SEQ ID NO: 28486 - protein, 118 aa, synthetic construct
  REGION 1..118: note = Description of Artificial Sequence: Synthetic polypeptide
QVQLVQSGAEVKKPGASVKVSCKASGYPFTNYDINWVRQATGQGLEWMGWMHPNSGNTGYAQKFQGRVTMTRNTSINTAYMELSSLRSEDTAVYYCAGSSGWYYFDYWGQGTLVTVSS

SEQ ID NO: 28487 - DNA, 363 bp, synthetic construct
  misc_feature 1..363: note = Description of Artificial Sequence: Synthetic polynucleotide
  source 1..363: mol_type = other DNA
caggtgcagctggtggagtctgggggaggcgtggtccagcctgggaggtccctgagactctcctgtgcagcgtctggattcaccttcagtagctatggcatgcactgggtccgccaggctccaggcaaggggctggagtgggtggcagttatatggtatgatggaagtaataaatactatgcagactccgtgaagggccgattcaccatctccagagacaattccaagaacacgctgtatctgcaaatgaacagcctgagagccgaggacacggctgtgtattactgtgcgagaaggtatagcagcagctggtcagggggtatggacgtctggggccaagggaccacggtcaccgtctcctca

SEQ ID NO: 28488 - protein, 121 aa, synthetic construct
  REGION 1..121: note = Description of Artificial Sequence: Synthetic polypeptide
QVQLVESGGGVVQPGRSLRLSCAASGFTFSSYGMHWVRQAPGKGLEWVAVIWYDGSNKYYADSVKGRFTISRDNSKNTLYLQMNSLRAEDTAVYYCARRYSSSWSGGMDVWGQGTTVTVSS

SEQ ID NO: 28489 - DNA, 345 bp, synthetic construct
  misc_feature 1..345: note = Description of Artificial Sequence: Synthetic polynucleotide
  source 1..345: mol_type = other DNA
gaggtgcagctgttggagtctgggggaggcttggtacagcctggggggtccctgagactctcctgtgcagcctccggattcacctttagcagctatgccatgagctgggtccgccaggctccagggaaggggctggagtgggtctcagctattagtggtagtggtggttacacatactacgcagactccgtgaagggccggttcaccatctccagagacaattccgagaacacgctgtatctgcaaatgagcagcctgagagccgaggacacggccgtttattactgtgcgaaaggggggtccctcttctactggggccagggaaccctggtcaccgtctcctca

SEQ ID NO: 28490 - protein, 115 aa, synthetic construct
  REGION 1..115: note = Description of Artificial Sequence: Synthetic polypeptide
EVQLLESGGGLVQPGGSLRLSCAASGFTFSSYAMSWVRQAPGKGLEWVSAISGSGGYTYYADSVKGRFTISRDNSENTLYLQMSSLRAEDTAVYYCAKGGSLFYWGQGTLVTVSS

SEQ ID NO: 28491 - DNA, 336 bp, synthetic construct
  misc_feature 1..336: note = Description of Artificial Sequence: Synthetic polynucleotide
  source 1..336: mol_type = other DNA
gaggtgcagctgttggagtcggggggaggcttggtacagcctggggggtccctgagactctcctgtgcagcctctggattctcctttagtagctatgccatgagctgggtccgccaggctccagggaaggggctggagtgggtctcaactattagtggtcgtggtggtcacacatactacgcagactccgtgaagggccggttcgccatctccagagacagttccaagaacacgctgtatctgcaaatgaacagcctgagagccgaggacacggccgtatattactgtgcgaaacaggactgctggggccagggaaccctggtcaccgtctcctca

SEQ ID NO: 28492 - protein, 112 aa, synthetic construct
  REGION 1..112: note = Description of Artificial Sequence: Synthetic polypeptide
EVQLLESGGGLVQPGGSLRLSCAASGFSFSSYAMSWVRQAPGKGLEWVSTISGRGGHTYYADSVKGRFAISRDSSKNTLYLQMNSLRAEDTAVYYCAKQDCWGQGTLVTVSS

SEQ ID NO: 28493 - DNA, 351 bp, synthetic construct
  misc_feature 1..351: note = Description of Artificial Sequence: Synthetic polynucleotide
  source 1..351: mol_type = other DNA
caggtgcaactggtggagtctgggggaggcgtggtccagcctgggaggtccctgagactctcctgtgcagcgtctggattcaccttcagtgactatggcatgcactgggtccgccaggctccaggcaaggggctggagtggatggcagttatatggtatgatgtaactaataaatactatgcagactccgtgaagggccgattcaccatctccagagacaattccaagaacacgctgtatctggaaatgaacagcctgagagccgaggacacggctgtttattactgtgcgagagagcttggctggtacgaggactactggggccagggaaccctggtcaccgtctcctca

SEQ ID NO: 28494 - protein, 117 aa, synthetic construct
  REGION 1..117: note = Description of Artificial Sequence: Synthetic polypeptide
QVQLVESGGGVVQPGRSLRLSCAASGFTFSDYGMHWVRQAPGKGLEWMAVIWYDVTNKYYADSVKGRFTISRDNSKNTLYLEMNSLRAEDTAVYYCARELGWYEDYWGQGTLVTVSS

SEQ ID NO: 28495 - DNA, 357 bp, synthetic construct
  misc_feature 1..357: note = Description of Artificial Sequence: Synthetic polynucleotide
  source 1..357: mol_type = other DNA
cagctgcagctgcaggagtcgggcccaggactggtgaagttttcggagaccctgtccctcacctgcactgtctctggtggctccatcagcagaagtagttactactggggctggatccgccagcccccagggaaggggcaggagtggatagggaatatctattatagtgggtatagttactacaatccgtccctcaagagtcgagtcaccatatccgtagacacgtccaagaaccagttctccctgaagctgagctctgtgaccgccgcagacacggctgtgtattactgtgcgagacatagcaccagctggtcccttgactactggggccagggaaccctggtcaccgtctcctca

SEQ ID NO: 28496 - protein, 119 aa, synthetic construct
  REGION 1..119: note = Description of Artificial Sequence: Synthetic polypeptide
QLQLQESGPGLVKFSETLSLTCTVSGGSISRSSYYWGWIRQPPGKGQEWIGNIYYSGYSYYNPSLKSRVTISVDTSKNQFSLKLSSVTAADTAVYYCARHSTSWSLDYWGQGTLVTVSS

SEQ ID NO: 28497 - DNA, 354 bp, synthetic construct
  misc_feature 1..354: note = Description of Artificial Sequence: Synthetic polynucleotide
  source 1..354: mol_type = other DNA
gaggtgcagctggtggagtctgggggaggcttggtaaagcctggggggtcccttagactctcctgtgcagcctctggattcactttcagtaacgcctggatgaactgggtccgccaggctccagggaaggggctggagtgggttggccgtattaaaagcaaaactgatggtgggacaacagactacgctgcacccgtgaaaggcagattcaccatctcaagagatgattcaaaaaacacgctgtatctgcaaatgaacagcctgaaaaccgaggacacagccgtgtattactgtaccacagaaggctggaacacggactactggggccagggaaccctggtcaccgtctcctca

SEQ ID NO: 28498 - protein, 118 aa, synthetic construct
  REGION 1..118: note = Description of Artificial Sequence: Synthetic polypeptide
EVQLVESGGGLVKPGGSLRLSCAASGFTFSNAWMNWVRQAPGKGLEWVGRIKSKTDGGTTDYAAPVKGRFTISRDDSKNTLYLQMNSLKTEDTAVYYCTTEGWNTDYWGQGTLVTVSS

SEQ ID NO: 28499 - DNA, 351 bp, synthetic construct
  misc_feature 1..351: note = Description of Artificial Sequence: Synthetic polynucleotide
  source 1..351: mol_type = other DNA
caggtgcagttggtggagtctgggggaggcgtggtccagcctgggaggtccctgagactctcctgtgcagcgtctggattcaccttcagtgactatggcatgcactgggtccgccaggctccaggcaaggggctggagtgggtggcagttatatggtatgagggaagtaataaatactatgtagactccgtgaggggccgattcaccatctccagagacaattccaagagcacgctgtatctgcaaatgaacagcctgagagccgaggacacggctgtttattactgtgtgagagagctaggcttccagtctgactactggggccagggaaccccggtcaccgtctcctca

SEQ ID NO: 28500 - protein, 117 aa, synthetic construct
  REGION 1..117: note = Description of Artificial Sequence: Synthetic polypeptide
QVQLVESGGGVVQPGRSLRLSCAASGFTFSDYGMHWVRQAPGKGLEWVAVIWYEGSNKYYVDSVRGRFTISRDNSKSTLYLQMNSLRAEDTAVYYCVRELGFQSDYWGQGTPVTVSS

SEQ ID NO: 28501 - DNA, 363 bp, synthetic construct
  misc_feature 1..363: note = Description of Artificial Sequence: Synthetic polynucleotide
  source 1..363: mol_type = other DNA
gaggtgcagctgttggagtctgggggaggcttggtacagcctggggggtccctgagactctcctgtgcagcctctgaattcacctttagcagctatgccatgagctgggtccgccaggctccagggaaggggctggagtgggtctcagttattagtggtcgtggtggtaacacattctacgcagactccgtgaagggccggttcaccatctccagagacaattccaagaacacgctgtatctgcaaatgaacagcctgagagccgaggacacggccgtatattactgtgcgtcccgtatagcagtggctggctcggaggcttttgatatctggggccaagggacaatggtcaccgtctcttca

SEQ ID NO: 28502 - protein, 121 aa, synthetic construct
  REGION 1..121: note = Description of Artificial Sequence: Synthetic polypeptide
EVQLLESGGGLVQPGGSLRLSCAASEFTFSSYAMSWVRQAPGKGLEWVSVISGRGGNTFYADSVKGRFTISRDNSKNTLYLQMNSLRAEDTAVYYCASRIAVAGSEAFDIWGQGTMVTVSS

SEQ ID NO: 28503 - DNA, 357 bp, synthetic construct
  misc_feature 1..357: note = Description of Artificial Sequence: Synthetic polynucleotide
  source 1..357: mol_type = other DNA
cagctgcagctgcaggagtcgggcccaggactggtgaagccttcggagaccctgtccctcacctgcactgtctccggtggcgccatcagcggtagtaattactactggggctggatccgccagcccccagggaaggaactggagtggattggaaatatctattatagtgggagcacctactacaacccgtccctcaagagtcgagtcaccatatccgtagacacgtccaagaaccagttctccctgaagctgaggtctgtgaccgccgaagacacggctgtgtattactgtgcgagacatagcagtagctggtcccttgactactggggccagggaaccctggtcaccgtctcctca

SEQ ID NO: 28504 - protein, 119 aa, synthetic construct
  REGION 1..119: note = Description of Artificial Sequence: Synthetic polypeptide
QLQLQESGPGLVKPSETLSLTCTVSGGAISGSNYYWGWIRQPPGKELEWIGNIYYSGSTYYNPSLKSRVTISVDTSKNQFSLKLRSVTAEDTAVYYCARHSSSWSLDYWGQGTLVTVSS

SEQ ID NO: 28505 - DNA, 351 bp, synthetic construct
  misc_feature 1..351: note = Description of Artificial Sequence: Synthetic polynucleotide
  source 1..351: mol_type = other DNA
caggtgcagctggtggagtctgggggaggcgtggtccagcctgggaggtccctgagactctcctgtgtagcgtctggattcaccttcagtagctatggcatgcactgggtccgccaggctccaggcaaggggctggagtgggtggcagttatatggtatgatgaaactaataaatactatgcagactccgtgaagggccgattcaccatctccagagacaattccaagaacacgctgtatctgcaaatgaacagcctgagagccgaggacacggctatttattactgtgcgagagagcttgcctggtacgaggactactggggccagggatccctggtcaccgtctcctca

SEQ ID NO: 28506 - protein, 117 aa, synthetic construct
  REGION 1..117: note = Description of Artificial Sequence: Synthetic polypeptide
QVQLVESGGGVVQPGRSLRLSCVASGFTFSSYGMHWVRQAPGKGLEWVAVIWYDETNKYYADSVKGRFTISRDNSKNTLYLQMNSLRAEDTAIYYCARELAWYEDYWGQGSLVTVSS

SEQ ID NO: 28507 - DNA, 351 bp, synthetic construct
  misc_feature 1..351: note = Description of Artificial Sequence: Synthetic polynucleotide
  source 1..351: mol_type = other DNA
caggtgcagctggtggagtctgggggaggcgtggtccagcctgggaggtccctgagactctcctgtgcagcgtctggattcaccttcagtagctatggcatgcactgggtccgccaggctccaggcaaggggctggagtgggtggcagttatatggtatgatgtaactaataaatactatacaggctccgtgaagggccgattcaccatctccagagacaattccaagaacacgctgtatctgcaaatgaacagcctgagagccgaggacacggctgtatattactgtgcgagagaaattggctggttagatgactactggggccagggaaccctggtcaccgtctcctca

SEQ ID NO: 28508 - protein, 117 aa, synthetic construct
  REGION 1..117: note = Description of Artificial Sequence: Synthetic polypeptide
QVQLVESGGGVVQPGRSLRLSCAASGFTFSSYGMHWVRQAPGKGLEWVAVIWYDVTNKYYTGSVKGRFTISRDNSKNTLYLQMNSLRAEDTAVYYCAREIGWLDDYWGQGTLVTVSS

SEQ ID NO: 28509 - DNA, 369 bp, synthetic construct
  misc_feature 1..369: note = Description of Artificial Sequence: Synthetic polynucleotide
  source 1..369: mol_type = other DNA
caggtgcagctggtggagtctgggggaggcgtggtccagcctgggaggtccctgagactctcctgtgcagcgtctggattcaccttcagtagcgatggcatgcactgggtccgccaggctccaggcaaggggctggagtgggtggcagttatatggtatgatggaagtaataaatactatgcagactccgtgaagggccgattcaccatctccagagacaattccaagaacacgctgtatctgcaaatgaacagcctgagagccgaggacacggctgtgtattactgtgcgagagagaggtatagcagcagctggtacgactacggtatggacgtctggggccaagggaccacggtcaccgtctcctca

SEQ ID NO: 28510 - protein, 123 aa, synthetic construct
  REGION 1..123: note = Description of Artificial Sequence: Synthetic polypeptide
QVQLVESGGGVVQPGRSLRLSCAASGFTFSSDGMHWVRQAPGKGLEWVAVIWYDGSNKYYADSVKGRFTISRDNSKNTLYLQMNSLRAEDTAVYYCARERYSSSWYDYGMDVWGQGTTVTVSS

SEQ ID NO: 28511 - DNA, 345 bp, synthetic construct
  misc_feature 1..345: note = Description of Artificial Sequence: Synthetic polynucleotide
  source 1..345: mol_type = other DNA
gaggtgcagctggtggagtctgggggaggcctggtcaagcctggggggtccctgagactctcctgtgcagcctctggattcaccttcagtagctatagcatgaactgggtccgccaggctccagggaaggggctggagtgggtctcatccactagtagtagtgatagttatatatactacgcagactcagtgaagggccgattcaccatctccagagacaacgccaagaactcactgtatctgcaaatgaacagcctgagagccgaggacacggctgtgtattactgtgcgagagtggcgtcctttgactgctggggccagggaaccctggtcaccgtctcctca

SEQ ID NO: 28512 - protein, 115 aa, synthetic construct
  REGION 1..115: note = Description of Artificial Sequence: Synthetic polypeptide
EVQLVESGGGLVKPGGSLRLSCAASGFTFSSYSMNWVRQAPGKGLEWVSSTSSSDSYIYYADSVKGRFTISRDNAKNSLYLQMNSLRAEDTAVYYCARVASFDCWGQGTLVTVSS

SEQ ID NO: 28513 - DNA, 351 bp, synthetic construct
  misc_feature 1..351: note = Description of Artificial Sequence: Synthetic polynucleotide
  source 1..351: mol_type = other DNA
caggtgcagctggtggagtctgggggaggcgtggtccagcctgggaggtccctgagactctcctgtgcagcgtctggattcaccttcagtagctatggcatgcactgggtccgccaggctccaggcaaggggctggagtgggtggcagttatatggtatgatgaaaataataaatactatgcagactccgtgaagggccgattcaccatctccagagacaattccaagaacacgctgtatctgcaaatgaacagcctgagagccgaggacacggctgtgtattactgtgcgagagaattaggctggtacgacgactactggggccagggaaccctggtcaccgtctcctca

SEQ ID NO: 28514 - protein, 117 aa, synthetic construct
  REGION 1..117: note = Description of Artificial Sequence: Synthetic polypeptide
QVQLVESGGGVVQPGRSLRLSCAASGFTFSSYGMHWVRQAPGKGLEWVAVIWYDENNKYYADSVKGRFTISRDNSKNTLYLQMNSLRAEDTAVYYCARELGWYDDYWGQGTLVTVSS

SEQ ID NO: 28515 - DNA, 351 bp, synthetic construct
  misc_feature 1..351: note = Description of Artificial Sequence: Synthetic polynucleotide
  source 1..351: mol_type = other DNA
caggtgcagctggtggagtctgggggaggcgtggtccagcctgggaggtccctgagactcacctgtgcagcgtctggattcaccttcagtgactatggcatacactgggtccgccaggctccaggcaaggggctggagtgggtggcagttatatggtatgatgaaagtaataaatactatgcagactccatgaagggccgattcaccatctccagagacaattccaagaacacgctgtatctgcaaatgaacagcctgagagccgaggacacggctgtgtattactgtgcgagagaactgggaatgacgggtgactactggggccagggaaccctggtcaccgtctcctca

SEQ ID NO: 28516 - protein, 117 aa, synthetic construct
  REGION 1..117: note = Description of Artificial Sequence: Synthetic polypeptide
QVQLVESGGGVVQPGRSLRLTCAASGFTFSDYGIHWVRQAPGKGLEWVAVIWYDESNKYYADSMKGRFTISRDNSKNTLYLQMNSLRAEDTAVYYCARELGMTGDYWGQGTLVTVSS

SEQ ID NO: 28517 - DNA, 357 bp, synthetic construct
  misc_feature 1..357: note = Description of Artificial Sequence: Synthetic polynucleotide
  source 1..357: mol_type = other DNA
caggtgcagttggtggagtctgggggaggcgtggtccagcctgggaggtccctgagactctcctgtgcagcgtctggattcaccttcagtagctatggcatgcactgggtccgccaggctccaggccgggggctggaatgggtggcagttatatggtatgatggaactgataaatactatgtagactccgtgaagggccgattcaccatctccagagacaattccaagaacacgctgtatctgcaaatgaacagcctgagagccgaggactcggctgtgtattactgtgcgagagaaaatagcagctcgtactactttgactactggggccagggaaccctggtcaccgtctcctca

SEQ ID NO: 28518 - protein, 119 aa, synthetic construct
  REGION 1..119: note = Description of Artificial Sequence: Synthetic polypeptide
QVQLVESGGGVVQPGRSLRLSCAASGFTFSSYGMHWVRQAPGRGLEWVAVIWYDGTDKYYVDSVKGRFTISRDNSKNTLYLQMNSLRAEDSAVYYCARENSSSYYFDYWGQGTLVTVSS

SEQ ID NO: 28519 - DNA, 363 bp, synthetic construct
  misc_feature 1..363: note = Description of Artificial Sequence: Synthetic polynucleotide
  source 1..363: mol_type = other DNA
caggtgcagctggtggagtctgggggaggcgtggtccagcctgggaggtccctgagactctcctgtgcagcgtctggattcaccttcagtagctatggcatgcactgggtccgccaggctccaggcaaggggctggagtgggtggcagttatatggtatgatggaagtaataaatactatgcagactccgtgaagggccgattcaccatctccagagacaattccaagaacacgctgaatctgcaaatgaacagcctgagagccgaggacacgggtgtgtattactgtgcgagaagatatagcagcagctggacggggggtatggacgtctggggccaagggaccacggtcaccgtctcctca

SEQ ID NO: 28520 - protein, 121 aa, synthetic construct
  REGION 1..121: note = Description of Artificial Sequence: Synthetic polypeptide
QVQLVESGGGVVQPGRSLRLSCAASGFTFSSYGMHWVRQAPGKGLEWVAVIWYDGSNKYYADSVKGRFTISRDNSKNTLNLQMNSLRAEDTGVYYCARRYSSSWTGGMDVWGQGTTVTVSS

SEQ ID NO: 28521 - DNA, 354 bp, synthetic construct
  misc_feature 1..354: note = Description of Artificial Sequence: Synthetic polynucleotide
  source 1..354: mol_type = other DNA
caggtgctcctggtgcagtctggggctgaggtgaagaggcctggggcctcagtgaaggtctcctgcaaggcttctggatacaccttcaccaattatgatattaattgggtgcgacaggccactggacaagggcttgagtggatgggatggatgtaccctaacagtggtaacacaggctatgcacagaaattccagggcagagtcaccatgaccaggaacacctccataagcacagcctacatggagctgagcagcctgagatctgaggacacggccgtctattactgtgcgagtagcagtggctggtactactttgactactggggccagggaaccctggtcaccgtctcctca

SEQ ID NO: 28522 - protein, 118 aa, synthetic construct
  REGION 1..118: note = Description of Artificial Sequence: Synthetic polypeptide
QVLLVQSGAEVKRPGASVKVSCKASGYTFTNYDINWVRQATGQGLEWMGWMYPNSGNTGYAQKFQGRVTMTRNTSISTAYMELSSLRSEDTAVYYCASSSGWYYFDYWGQGTLVTVSS

SEQ ID NO: 28523 - DNA, 363 bp, synthetic construct
  misc_feature 1..363: note = Description of Artificial Sequence: Synthetic polynucleotide
  source 1..363: mol_type = other DNA
caggtgcagctggtggagtctgggggaggcgtggtccagcctgggaggtccctgagactctcctgtgcagcgtctggattccccttcaataactatggcatgcactgggtccgccaggctccaggcaaggggctggagtgggtgtcaattatatggtatgatggaagttataaatactatgcagactccgtgaagggccgattcaccatctccagagacaattccaagaacacgctgtatctgcaaatgaacagcctgagagccgaggacacggctgtgtattactgtgcgagagagggatacgatttttggagtggcttctttgactcctggggccagggaaccctggtcaccgtctcctca

SEQ ID NO: 28524 - protein, 121 aa, synthetic construct
  REGION 1..121: note = Description of Artificial Sequence: Synthetic polypeptide
QVQLVESGGGVVQPGRSLRLSCAASGFPFNNYGMHWVRQAPGKGLEWVSIIWYDGSYKYYADSVKGRFTISRDNSKNTLYLQMNSLRAEDTAVYYCAREGYDFWSGFFDSWGQGTLVTVSS

SEQ ID NO: 28525 - DNA, 351 bp, synthetic construct
  misc_feature 1..351: note = Description of Artificial Sequence: Synthetic polynucleotide
  source 1..351: mol_type = other DNA
caggtgcaactggtggagtctgggggaggcgtggtccagcctgggaggtccctgagactctcctgtgcagcgtctggattcaccttcagtagctatggcatgcactgggtccgccaggctccaggcaaggggctggagtgggtggcagttatatggtatgatgaaagtaataaatactatggagactccgtgaagggccgattcaccatctccagagacaattccaagaatatgctgtatctgcaaatgaacagcctgagaggcgaggacacggctctgtattactgtgcgagagaactggggttcctctctgactactggggccagggaaccctggtcaccgtctcctca

SEQ ID NO: 28526 - protein, 117 aa, synthetic construct
  REGION 1..117: note = Description of Artificial Sequence: Synthetic polypeptide
QVQLVESGGGVVQPGRSLRLSCAASGFTFSSYGMHWVRQAPGKGLEWVAVIWYDESNKYYGDSVKGRFTISRDNSKNMLYLQMNSLRGEDTALYYCARELGFLSDYWGQGTLVTVSS

SEQ ID NO: 28527 - DNA, 354 bp, synthetic construct
  misc_feature 1..354: note = Description of Artificial Sequence: Synthetic polynucleotide
  source 1..354: mol_type = other DNA
caggtgctcctggtgcagtctggggctgaggtgaagaggcctggggcctcagtgaaggtctcctgcaaggcttctggatacaccttcaccaattatgatattaattgggtgcgacaggccactggacaaggtcttgagtggatgggatggatgcaccctgacagtggtaacacaggctatgcacagaagttccagggcagagtcaccatgaccaggaacacctccataagcacggcctacatggagctgagcagcctgagatctgaggacacggccgtgtattactgtgcgagtagcagtggctggtactactttgactactggggccagggaaccctggtcaccgtctcctca

SEQ ID NO: 28528 - protein, 118 aa, synthetic construct
  REGION 1..118: note = Description of Artificial Sequence: Synthetic polypeptide
QVLLVQSGAEVKRPGASVKVSCKASGYTFTNYDINWVRQATGQGLEWMGWMHPDSGNTGYAQKFQGRVTMTRNTSISTAYMELSSLRSEDTAVYYCASSSGWYYFDYWGQGTLVTVSS

SEQ ID NO: 28529 - DNA, 363 bp, synthetic construct
  misc_feature 1..363: note = Description of Artificial Sequence: Synthetic polynucleotide
  source 1..363: mol_type = other DNA
caggtgcagctggtggagtctgggggaggcgtggtccagcctgggaggtccctgagactctcctgtgcagcgtctggattcaccttcagtagctatggcatacactgggtccgccaggctccaggcaaggggctggagtgggtggcagttatatggtatgatggaagtaataaatactatgcagactccgtgaagggccgattcaccatctccagagacaattccaagaacacgctgtatctgcaaatgaacagcctgagagccgaggacacggctgtgtattactgtgcgagaaggtatagcagcagctggtcagggggtatggacgtctggggccaagggaccacggtcaccgtctcctca

SEQ ID NO: 28530 - protein, 121 aa, synthetic construct
  REGION 1..121: note = Description of Artificial Sequence: Synthetic polypeptide
QVQLVESGGGVVQPGRSLRLSCAASGFTFSSYGIHWVRQAPGKGLEWVAVIWYDGSNKYYADSVKGRFTISRDNSKNTLYLQMNSLRAEDTAVYYCARRYSSSWSGGMDVWGQGTTVTVSS

SEQ ID NO: 28531 - DNA, 351 bp, synthetic construct
  misc_feature 1..351: note = Description of Artificial Sequence: Synthetic polynucleotide
  source 1..351: mol_type = other DNA
caggtgcagctggtggagtctgggggaggcgtggtccagcctgggaggtccctgaaactctcctgttcagcgtctggattcaccttcagtgactatggcattcactgggtccgccaggctccaggcaaggggctggagtgggtggcagttatatggtatgatgaaagtaataactactatgcagactccgtgaagggccgattcaccatctccagagacaattccaagaacacgctgtatctgcaaatgaacagcctgagagccgaggacacggctgtgtactactgtgcgagagaaattggctggttagatgactactggggccagggaacccaggtcaccgtctcctca

SEQ ID NO: 28532 - protein, 117 aa, synthetic construct
  REGION 1..117: note = Description of Artificial Sequence: Synthetic polypeptide
QVQLVESGGGVVQPGRSLKLSCSASGFTFSDYGIHWVRQAPGKGLEWVAVIWYDESNNYYADSVKGRFTISRDNSKNTLYLQMNSLRAEDTAVYYCAREIGWLDDYWGQGTQVTVSS

SEQ ID NO: 28533 - DNA, 369 bp, synthetic construct
  misc_feature 1..369: note = Description of Artificial Sequence: Synthetic polynucleotide
  source 1..369: mol_type = other DNA
gaggtgcaggtgttggagtctgggggaggcttggtacagcctggggggtccctgagactctcctgtgcagcctctggattcacctttagcagctgtgccatgaactgggtccgccaggctccagggaaggggctggagtgggtctccgctattagtggtcgtggtggtagcacattctacgcagactccgtgaagggccggttcaccatctccagagacaattccaagaacacgctgtatctgcaaatgaacagcctgagagccgaggacacggccgtatattactgtgcgaaaggggagctactagaggactactactactacggaatggacgtctggggccaagggaccacggtcaccgtctcctca

SEQ ID NO: 28534 - protein, 123 aa, synthetic construct
  REGION 1..123: note = Description of Artificial Sequence: Synthetic polypeptide
EVQVLESGGGLVQPGGSLRLSCAASGFTFSSCAMNWVRQAPGKGLEWVSAISGRGGSTFYADSVKGRFTISRDNSKNTLYLQMNSLRAEDTAVYYCAKGELLEDYYYYGMDVWGQGTTVTVSS

SEQ ID NO: 28535 - DNA, 369 bp, synthetic construct
  misc_feature 1..369: note = Description of Artificial Sequence: Synthetic polynucleotide
  source 1..369: mol_type = other DNA
gaggtgcagctgttggagtctgggggaggcttggtacagcctggggggtccctgagactctcctgtgcagcctctggattcacctttagcagctatgccatgagctgggtccgccaggctccagggaaggggctggagtgggtctccgctattagtggtcgtggtggaagcatattccacgcagactccgtgaagggccggttcaccatctccagagacaattccaagaacacgctgtatctgcaaatgaacagcctgagagccgaggacacggccgtatattactgtgtgaaaggggagctactagaggactactacttctacggtatggacgtctggggccaagggaccacggtcaccgtctcctca

SEQ ID NO: 28536 - protein, 123 aa, synthetic construct
  REGION 1..123: note = Description of Artificial Sequence: Synthetic polypeptide
EVQLLESGGGLVQPGGSLRLSCAASGFTFSSYAMSWVRQAPGKGLEWVSAISGRGGSIFHADSVKGRFTISRDNSKNTLYLQMNSLRAEDTAVYYCVKGELLEDYYFYGMDVWGQGTTVTVSS

SEQ ID NO: 28537 - DNA, 351 bp, synthetic construct
  misc_feature 1..351: note = Description of Artificial Sequence: Synthetic polynucleotide
  source 1..351: mol_type = other DNA
caggtgcagctggtggagtctgggggaggcgtggtccagcctgggaggtccctgagactctcctgtgcagcgtctggattcaccttcagtgactatggcatacactgggtccgccaggctccaggcaaggggctggagtgggtggcagttatttggtatgatggaaataataaatattatgcagactccgtgaagggccgattcaccatctccagagacaattccaagaacacgctgtatctgcaaatgaacaacctgagagccgaggacacggctgtgtattactgtgcgagagaaattggctggttagatgactactggggccagggaaccctggtcaccgtctcctca

SEQ ID NO: 28538 - protein, 117 aa, synthetic construct
  REGION 1..117: note = Description of Artificial Sequence: Synthetic polypeptide
QVQLVESGGGVVQPGRSLRLSCAASGFTFSDYGIHWVRQAPGKGLEWVAVIWYDGNNKYYADSVKGRFTISRDNSKNTLYLQMNNLRAEDTAVYYCAREIGWLDDYWGQGTLVTVSS

SEQ ID NO: 28539 - DNA, 345 bp, synthetic construct
  misc_feature 1..345: note = Description of Artificial Sequence: Synthetic polynucleotide
  source 1..345: mol_type = other DNA
gaggtgcagttggtggagtctgggggaggcttggtacagcctggggggtccctgagactctcctgtgcagcctctggattcaccttcagtagctataggatgaactgggtccgccaggctccagggaaggggctggagtgggtttcatccattagtagtagtagtagtaccatatactacgcagactctgtgaagggccgattcaccatctccagagacaatgccaagaactcactgtatctgcaaatgaacagcctgagagacgaggacacggctgtgtattactgtgcgagaacggctggttttgactactggggccagggaaccctggtcaccgtctcctca

SEQ ID NO: 28540 - protein, 115 aa, synthetic construct
  REGION 1..115: note = Description of Artificial Sequence: Synthetic polypeptide
EVQLVESGGGLVQPGGSLRLSCAASGFTFSSYRMNWVRQAPGKGLEWVSSISSSSSTIYYADSVKGRFTISRDNAKNSLYLQMNSLRDEDTAVYYCARTAGFDYWGQGTLVTVSS

SEQ ID NO: 28541 - DNA, 345 bp, synthetic construct
  misc_feature 1..345: note = Description of Artificial Sequence: Synthetic polynucleotide
  source 1..345: mol_type = other DNA
gaggtgcagctggtggagtctgggggaggcctggtcaagcctggggggtccctgagactctcctgtgcagcctctggattcaccttcagtagctatggcatgaactgggtccgccaggctccagggaaggggctggagtgggtctcatccattagtggtagtagtagttacatatactacgcggactcagtgaagggccgattcaccatctccagagacaacgccaagaactcactgtatctgcaaatgaacagcctgagagccgaggacacggctgtgtattactgtgcgagactgactacctttgacttctggggccagggaaccctggtcaccgtctcctca

SEQ ID NO: 28542 - protein, 115 aa, synthetic construct
  REGION 1..115: note = Description of Artificial Sequence: Synthetic polypeptide
EVQLVESGGGLVKPGGSLRLSCAASGFTFSSYGMNWVRQAPGKGLEWVSSISGSSSYIYYADSVKGRFTISRDNAKNSLYLQMNSLRAEDTAVYYCARLTTFDFWGQGTLVTVSS

SEQ ID NO: 28543 - DNA, 363 bp, synthetic construct
  misc_feature 1..363: note = Description of Artificial Sequence: Synthetic polynucleotide
  source 1..363: mol_type = other DNA
gaggtgcagctgctggagtctgggggaggcttggtacagcctggggggtccctgagactctcctgtgcagcctctggattcacctttagcagctatgccatgagctgggtccgccaggctccagggaagggtctggagtgggtctcagttattagtggtagtggtgttaacacattctacgcagactccgtgaagggccggttcaccatctccagagacaattccaagaacacgctgtatctgctaatgaacagcctgagagccgaggacacggccgtatattactgtgcgaaaaagatagcagtggctggtactcactactttgactactggggccagggaaccctggtcaccgtctcctca

SEQ ID NO: 28544 - protein, 121 aa, synthetic construct
  REGION 1..121: note = Description of Artificial Sequence: Synthetic polypeptide
EVQLLESGGGLVQPGGSLRLSCAASGFTFSSYAMSWVRQAPGKGLEWVSVISGSGVNTFYADSVKGRFTISRDNSKNTLYLLMNSLRAEDTAVYYCAKKIAVAGTHYFDYWGQGTLVTVSS

SEQ ID NO: 28545 - DNA, 354 bp, synthetic construct
  misc_feature 1..354: note = Description of Artificial Sequence: Synthetic polynucleotide
  source 1..354: mol_type = other DNA
caggtgcagctggtggagtctgggggaggcgtggtccagcctgggaggtccctgagactctcctgtgcagcgtctggattcaccttcagcagctatggcatgcactgggtccgccaggctccaggcaaggggctggagtgggtggcagttatatggtatgatggaagtaataaatactatgcagactccgtgaagggccgattcaccatctccagagacaattccaagaacacgctatatctacaaatgaacagcctgagagccgaggacacggctgtgtatcactgtgcgagagattcctccccctacggtatggacgtctggggccaagggaccacggtcaccgtctcctca

SEQ ID NO: 28546 - protein, 118 aa, synthetic construct
  REGION 1..118: note = Description of Artificial Sequence: Synthetic polypeptide
QVQLVESGGGVVQPGRSLRLSCAASGFTFSSYGMHWVRQAPGKGLEWVAVIWYDGSNKYYADSVKGRFTISRDNSKNTLYLQMNSLRAEDTAVYHCARDSSPYGMDVWGQGTTVTVSS

SEQ ID NO: 28547 - DNA, 351 bp, synthetic construct
  misc_feature 1..351: note = Description of Artificial Sequence: Synthetic polynucleotide
  source 1..351: mol_type = other DNA
caggtgcagctggtggagtctgggggaggcgtggtccagcctgggaggtccctgagactctcctgtgcagcgtctggattcaccttcagtagctatggcatgcactgggtccgccaggctccaggcaaggggctggagtgggtggcagttatatggtatgatgaaagtaataaatactatgcagactccgtgaagggccgattcaccatctccagagacaattccaagaacacgctgtatctgcaaatgaacagcctgagagccgaggacacggctgtgtattactgtgcgagagaattaggctggtacgacgactactggggccagggaaccctggtcaccgtctcctct

SEQ ID NO: 28548 - protein, 117 aa, synthetic construct
  REGION 1..117: note = Description of Artificial Sequence: Synthetic polypeptide
QVQLVESGGGVVQPGRSLRLSCAASGFTFSSYGMHWVRQAPGKGLEWVAVIWYDESNKYYADSVKGRFTISRDNSKNTLYLQMNSLRAEDTAVYYCARELGWYDDYWGQGTLVTVSS

SEQ ID NO: 28549 - DNA, 354 bp, synthetic construct
  misc_feature 1..354: note = Description of Artificial Sequence: Synthetic polynucleotide
  source 1..354: mol_type = other DNA
caggtgctcctggtgcagtctggggctgaggtgaagaggcctggggcctcagtgaaggtctcctgcaaggcttctggatacaccttcaccaattatgatattaattgggtgcgacaggccactggacaagggcttgagtggatgggatggatgcaccctaacagtggtaacacaggctatgcacagaaattccagggcagagtcaccatgaccaggaacacctccataagcacagcctacatggagctgagcagcctgagatctgaggacacggccgtctattactgtgcgagtagcagtggctggtactactttgactactggggccagggaaccctggtcaccgtctcctca

SEQ ID NO: 28550 - protein, 118 aa, synthetic construct
  REGION 1..118: note = Description of Artificial Sequence: Synthetic polypeptide
QVLLVQSGAEVKRPGASVKVSCKASGYTFTNYDINWVRQATGQGLEWMGWMHPNSGNTGYAQKFQGRVTMTRNTSISTAYMELSSLRSEDTAVYYCASSSGWYYFDYWGQGTLVTVSS

SEQ ID NO: 28551 - DNA, 345 bp, synthetic construct
  misc_feature 1..345: note = Description of Artificial Sequence: Synthetic polynucleotide
  source 1..345: mol_type = other DNA
gaggtgcagctgttggagtctgggggaggcctggtacagccgggggggtccctgagactctcctgtgcagcctctggattcacctttagcagctatgtcatgaactgggtccgccaggctccagggaaggggctggagtgggtctcagctattagtggtagtggtggtagcacatactacgcagactccgtgaagggccggttcaccatctccagaaacaattccaagaacacgctgtatctgcaaatgaacagcctgagagccgaggacacggccgtatattactgtgcgcgaactggggtctttgactactggggccagggaaccctggtcaccgtctcctca

SEQ ID NO: 28552 - protein, 115 aa, synthetic construct
  REGION 1..115: note = Description of Artificial Sequence: Synthetic polypeptide
EVQLLESGGGLVQPGGSLRLSCAASGFTFSSYVMNWVRQAPGKGLEWVSAISGSGGSTYYADSVKGRFTISRNNSKNTLYLQMNSLRAEDTAVYYCARTGVFDYWGQGTLVTVSS

SEQ ID NO: 28553 - DNA, 369 bp, synthetic construct
  misc_feature 1..369: note = Description of Artificial Sequence: Synthetic polynucleotide
  source 1..369: mol_type = other DNA
gaggtgcagctgttggagtctgggggaggcttggtacagcctggggggtccctgagactctcctgtgcagcctctggattcacctttagcagctatgccatgagctgggtccgccaggctccagggaaggggctggagtgggtctccgctattagtggtcgtggtggtagcacattccacgcagactccgtgaagggccggttcaccatctccagagacaattccaagaacacgctgtatctgcaaatgaacagcctgagagacgaggacacggccgtatattactgtgtgaaaggggagctactagaggactactacttctacggtatggacgtctggggccaagggaccacggtcaccgtctcctca

SEQ ID NO: 28554 - protein, 123 aa, synthetic construct
  REGION 1..123: note = Description of Artificial Sequence: Synthetic polypeptide
EVQLLESGGGLVQPGGSLRLSCAASGFTFSSYAMSWVRQAPGKGLEWVSAISGRGGSTFHADSVKGRFTISRDNSKNTLYLQMNSLRDEDTAVYYCVKGELLEDYYFYGMDVWGQGTTVTVSS

SEQ ID NO: 28555 - DNA, 348 bp, synthetic construct
  misc_feature 1..348: note = Description of Artificial Sequence: Synthetic polynucleotide
  source 1..348: mol_type = other DNA
gaggtgcagctggtggagtctgggggaggcctggtcaagcctggggggtccctgagactctcctgtgcagcctctggattcaccttcagtagctatagcatgaactgggtccgccaggctccagggaaggggctggagtgggtctcatccattagtggtagtagtagttacatatactacgcagactcagtgaagggccgattcaccatctccagagacaacgccaagaactcactgtatctgcaaatcaacagcctgagagccgaggacacggctgtgtattactgtgcgagaggcaatatagcaagggactactggggccagggaaccctggtcaccgtctcctca

SEQ ID NO: 28556 - protein, 116 aa, synthetic construct
  REGION 1..116: note = Description of Artificial Sequence: Synthetic polypeptide
EVQLVESGGGLVKPGGSLRLSCAASGFTFSSYSMNWVRQAPGKGLEWVSSISGSSSYIYYADSVKGRFTISRDNAKNSLYLQINSLRAEDTAVYYCARGNIARDYWGQGTLVTVSS

SEQ ID NO: 28557 - DNA, 351 bp, synthetic construct
  misc_feature 1..351: note = Description of Artificial Sequence: Synthetic polynucleotide
  source 1..351: mol_type = other DNA
caggtgcagctggtggagtctgggggaggcgtggtccagcctgggaggtccctgagagtctcctgtacagcgtctggattcaccctcagaaactatggcatgcactgggtccgccaggctccaggcaaggggctggagtgggtggcagttatatggtatgaggaaagtaataaatactatacagagtccgtgaagggccgattcaccatctccagagacaattccaagaacacgctgtatctgcaaatgaacagcctgagagccgaggacacggctgtgtattactgtgcgagagaactggggttcctctctgactactggggccagggaaccctggtcaccgtctcctca

SEQ ID NO: 28558 - protein, 117 aa, synthetic construct
  REGION 1..117: note = Description of Artificial Sequence: Synthetic polypeptide
QVQLVESGGGVVQPGRSLRVSCTASGFTLRNYGMHWVRQAPGKGLEWVAVIWYEESNKYYTESVKGRFTISRDNSKNTLYLQMNSLRAEDTAVYYCARELGFLSDYWGQGTLVTVSS

SEQ ID NO: 28559 - DNA, 351 bp, synthetic construct
  misc_feature 1..351: note = Description of Artificial Sequence: Synthetic polynucleotide
  source 1..351: mol_type = other DNA
caggtgcagctggtggagtctgggggaggcgtggtccagcctgggaggtccctgagactctcctgtgcagcgtctggattcaccttcagtagctatggcatgcactgggtccgccaggctccaggcaaggggctggagtgggtggcagttatatggtatgaaggaagtaataaatactatgtagactccgtgaagggccgattcaccatctccagagacaattccaagaacacgctgtatctgcaaatgaacagcctgagagccgaggacacggctgtgtattactgtgcgagagaattaggctggtacgacgactactggggccagggaaccctggtcaccgtctcctca

SEQ ID NO: 28560 - protein, 117 aa, synthetic construct
  REGION 1..117: note = Description of Artificial Sequence: Synthetic polypeptide
QVQLVESGGGVVQPGRSLRLSCAASGFTFSSYGMHWVRQAPGKGLEWVAVIWYEGSNKYYVDSVKGRFTISRDNSKNTLYLQMNSLRAEDTAVYYCARELGWYDDYWGQGTLVTVSS

SEQ ID NO: 28561 - DNA, 369 bp, synthetic construct
  misc_feature 1..369: note = Description of Artificial Sequence: Synthetic polynucleotide
  source 1..369: mol_type = other DNA
caggtgcagctggtggagtctgggggaggcgtggtccagcctgggaggtccctgagactctcctgtgcagcgtctggattcaccttcagtaactgtgtcatgcactgggtccgccaggctccaggcaaggggctggagtgggtggcagttatatggtatgatggaagtaataaatactatgcagactccgtgaagggccgattcaccatctccagagacaattccaagaacacgctgtatctgcaaatgaacagcctgagagccgaggacacggctgtgtattactgtgcgagagaggagtatagcagtggctggtacgactacggtatggacgtctggggccaagggaccacggtcaccgtctcctca

SEQ ID NO: 28562 - protein, 123 aa, synthetic construct
  REGION 1..123: note = Description of Artificial Sequence: Synthetic polypeptide
QVQLVESGGGVVQPGRSLRLSCAASGFTFSNCVMHWVRQAPGKGLEWVAVIWYDGSNKYYADSVKGRFTISRDNSKNTLYLQMNSLRAEDTAVYYCAREEYSSGWYDYGMDVWGQGTTVTVSS

SEQ ID NO: 28563 - DNA, 345 bp, synthetic construct
  misc_feature 1..345: note = Description of Artificial Sequence: Synthetic polynucleotide
  source 1..345: mol_type = other DNA
gaggtgcagctggtggagtctgggggaggcctggtcaagcctggggggtccctgagactctcctgtgcagcctctggattcaccttcagtagctatagcctgaactgggtccgccaggctccagggaaggggctggagtgggtctcatccattagtggtagtagtagtaacatatactacacagactcagtgaagggccgattcaccatctccagagacaacgccaagaactcactgtttctgcaaatgaacagcctgagagccgaggacacggctgtgtattactgtgcgagagtggcgtcctttgactactggggccagggaaccctggtcaccgtctcctca

SEQ ID NO: 28564 - protein, 115 aa, synthetic construct
  REGION 1..115: note = Description of Artificial Sequence: Synthetic polypeptide
EVQLVESGGGLVKPGGSLRLSCAASGFTFSSYSLNWVRQAPGKGLEWVSSISGSSSNIYYTDSVKGRFTISRDNAKNSLFLQMNSLRAEDTAVYYCARVASFDYWGQGTLVTVSS

SEQ ID NO: 28565 - DNA, 351 bp, synthetic construct
  misc_feature 1..351: note = Description of Artificial Sequence: Synthetic polynucleotide
  source 1..351: mol_type = other DNA
caggtgcagctggtggagtctgggggaggcgtggtccagcctgggaggtccctgagactctcctgtgcagcgtctggattcaccttcagtgactatggcatgcactgggtccgccaggctccaggcaaggggctggagtgggtgacagttatatggtatgatgcaaataataaatactatgcagactccgtgaagggccgattcaccatctccagagacaatttcaaaaacacggtgtatctgcaaatgaacagcctgagagccgaggacacggctgtgtattactgtgcgagagaaattggctggttagatgactactggggccagggaaccctggtcaccgtctcctca

SEQ ID NO: 28566 - protein, 117 aa, synthetic construct
  REGION 1..117: note = Description of Artificial Sequence: Synthetic polypeptide
QVQLVESGGGVVQPGRSLRLSCAASGFTFSDYGMHWVRQAPGKGLEWVTVIWYDANNKYYADSVKGRFTISRDNFKNTVYLQMNSLRAEDTAVYYCAREIGWLDDYWGQGTLVTVSS

SEQ ID NO: 28567 - DNA, 351 bp, synthetic construct
  misc_feature 1..351: note = Description of Artificial Sequence: Synthetic polynucleotide
  source 1..351: mol_type = other DNA
caggtgcagctggtggagtctgggggaggcgtggtccagcctgggaggtccctgagactctcctgtgcagcgtctggattcaccttcagtgactatggcatgcactgggtccgccaggctccaggcaaggggctggagtgggtgacagttatatggtataatgaaaataataaatactatgcagactccgtgaagggccgattcaccatctccagagacaattccaagaacacgctgtatctgcaaatgaacagcctgagagccgaggacacggctgtgtattactgtgcgagagaactggggatgacgggtgactcctggggccagggaaccctggtcaccgtctcctca

SEQ ID NO: 28568 - protein, 117 aa, synthetic construct
  REGION 1..117: note = Description of Artificial Sequence: Synthetic polypeptide
QVQLVESGGGVVQPGRSLRLSCAASGFTFSDYGMHWVRQAPGKGLEWVTVIWYNENNKYYADSVKGRFTISRDNSKNTLYLQMNSLRAEDTAVYYCARELGMTGDSWGQGTLVTVSS

SEQ ID NO: 28569 - DNA, 369 bp, synthetic construct
  misc_feature 1..369: note = Description of Artificial Sequence: Synthetic polynucleotide
  source 1..369: mol_type = other DNA
gaggtgcaggtgttggagtctgggggaggcttggtacagcctggggggtccctgagactctcctgtgcagcctctggattcacctttagcagctatgccatgagctgggtccgccaggctccagggaaggggctggagtgggtctccgctattagtggtcgtggtggtagcacattccacgcagactccgtgaagggccggttcaccatctccagagacaattccaagaacacgctgtatctgcaaatgaacagcctgagagccgaggacacggccgtatattactgtgtgaaaggggagctactagaggactactacttctacggtttggacgtctggggccaagggaccacggtcaccgtctcctca

SEQ ID NO: 28570 - protein, 123 aa, synthetic construct
  REGION 1..123: note = Description of Artificial Sequence: Synthetic polypeptide
EVQVLESGGGLVQPGGSLRLSCAASGFTFSSYAMSWVRQAPGKGLEWVSAISGRGGSTFHADSVKGRFTISRDNSKNTLYLQMNSLRAEDTAVYYCVKGELLEDYYFYGLDVWGQGTTVTVSS

SEQ ID NO: 28571 - DNA, 360 bp, synthetic construct
  misc_feature 1..360: note = Description of Artificial Sequence: Synthetic polynucleotide
  source 1..360: mol_type = other DNA
gaggtgcagctgttggagtctgggggagacatggtccagcctggggggtccctgagactctcctgtgcagcctccggattcacctttagcatctatgccatgagctgggtccgccaggctccagggaaggggctggagtgggtctcagttattagtggtagtggtggtagctcattctacgcagactccgtgaagggccggttcaccatctccagagacaattccaagaacacgctgtatctgcaaatgaacagcctgagagccgaggacacggccgtatattactgtacgaaagatcgggtgaaagctcatgatggttttgatatctggggccaagggacaatggtcaccgtctcttca

SEQ ID NO: 28572 - protein, 120 aa, synthetic construct
  REGION 1..120: note = Description of Artificial Sequence: Synthetic polypeptide
EVQLLESGGDMVQPGGSLRLSCAASGFTFSIYAMSWVRQAPGKGLEWVSVISGSGGSSFYADSVKGRFTISRDNSKNTLYLQMNSLRAEDTAVYYCTKDRVKAHDGFDIWGQGTMVTVSS

SEQ ID NO: 28573 - DNA, 369 bp, synthetic construct
  misc_feature 1..369: note = Description of Artificial Sequence: Synthetic polynucleotide
  source 1..369: mol_type = other DNA
gaggtgcagctgttggagtctgggggaggcttggtacagcctggggggtccctgagactctcctgtgcagcctctggattcacctttagcagctatgccatgagctgggtccgccaggctccagggaaggggctggagtgggtctccgctattagtggtcgtggtggtagcacattccacgcagactccgtgaagggccggttcaccatctccagagacaattccaagaacacgctgtatctacaactgaacagcctgagagccgatgacacggccgtatattactgtgtgaaaggggagctactagaggactactacttctacggtatggacgtctggggccaagggaccacggtcaccgtctcctca

SEQ ID NO: 28574 - protein, 123 aa, synthetic construct
  REGION 1..123: note = Description of Artificial Sequence: Synthetic polypeptide
EVQLLESGGGLVQPGGSLRLSCAASGFTFSSYAMSWVRQAPGKGLEWVSAISGRGGSTFHADSVKGRFTISRDNSKNTLYLQLNSLRADDTAVYYCVKGELLEDYYFYGMDVWGQGTTVTVSS

SEQ ID NO: 28575 - DNA, 351 bp, synthetic construct
  misc_feature 1..351: note = Description of Artificial Sequence: Synthetic polynucleotide
  source 1..351: mol_type = other DNA
caggtgcagctggtggagtctgggggaggcgtggtccagcctgggaggtccctgagactctcctgtgcagcgtctggattcaccttcagtgactatggcatgcactgggtccgccaggctccaggcaaggggctggagtgggtggcagttatatggtatgatgaaaataataaatactatgcagactccgtgaagggccgattcaccatctccagagacaattccaagaacacgctgtatctgcaaatgaacagcctgagagccgaggacacggctctgtattactgtgcgacagaactggggatgacgggtgactcctggggccagggaaccctggtcaccgtctcctca

SEQ ID NO: 28576 - protein, 117 aa, synthetic construct
  REGION 1..117: note = Description of Artificial Sequence: Synthetic polypeptide
QVQLVESGGGVVQPGRSLRLSCAASGFTFSDYGMHWVRQAPGKGLEWVAVIWYDENNKYYADSVKGRFTISRDNSKNTLYLQMNSLRAEDTALYYCATELGMTGDSWGQGTLVTVSS

SEQ ID NO: 28577 - DNA, 351 bp, synthetic construct
  misc_feature 1..351: note = Description of Artificial Sequence: Synthetic polynucleotide
  source 1..351: mol_type = other DNA
caggtgcagctggtggagtctgggggaggcgtggtccagcctgggaggtccctgagactctcctgtgcagcgtctggattcaccttcagtgactatggcatgcactgggtccgccaggctccaggcaaggggctggagtgggtggcagttatatggtatgatgaaagtaataaatactatgcagactccatgaagggccgattcaccatctccagagacaattccaagaacacgctgtatctgcaaatgaacagcctgagagccgaggacacggctgtgtattactgtgcgagagaactggggatgacgggtgactactggggccagggaaccctggtcaccgtctcctca

SEQ ID NO: 28578 - protein, 117 aa, synthetic construct
  REGION 1..117: note = Description of Artificial Sequence: Synthetic polypeptide
QVQLVESGGGVVQPGRSLRLSCAASGFTFSDYGMHWVRQAPGKGLEWVAVIWYDESNKYYADSMKGRFTISRDNSKNTLYLQMNSLRAEDTAVYYCARELGMTGDYWGQGTLVTVSS

SEQ ID NO: 28579 - DNA, 354 bp, synthetic construct
  misc_feature 1..354: note = Description of Artificial Sequence: Synthetic polynucleotide
  source 1..354: mol_type = other DNA
caggtgcagctggtgcagtctggggctgaggtgaagaagcctggggcctcagtgaaggtctcctgcaaggcttctggatacaccttcaccaattatgatatcaactgggtgcgacaggcctctggacaagggcttgagtggatgggatggatgaaccctaacagtggtaacacaggctatgcacagagattccagggcagagtcaccatgaccaggaacacctccataaacacagcctacatggagctgagcagcctgagatctgaggacacggccgtatattactgtgcgagtagcagtggctggtactactttgactactggggccagggaaccctggtcaccgtctcctca

SEQ ID NO: 28580 - protein, 118 aa, synthetic construct
  REGION 1..118: note = Description of Artificial Sequence: Synthetic polypeptide
QVQLVQSGAEVKKPGASVKVSCKASGYTFTNYDINWVRQASGQGLEWMGWMNPNSGNTGYAQRFQGRVTMTRNTSINTAYMELSSLRSEDTAVYYCASSSGWYYFDYWGQGTLVTVSS

SEQ ID NO: 28581 - DNA, 363 bp, synthetic construct
  misc_feature 1..363: note = Description of Artificial Sequence: Synthetic polynucleotide
  source 1..363: mol_type = other DNA
caggtgcagctggtggagtctgggggaggcgtggtccagcctgggaggtccctgagactctcctgtgcagcgtctggattcaccttcagtagctatggcatgcactgggtccgccaggctccaggcaaggggctggagtgggtggcagttatatggtatgatggaagtaataaatactatgcagactccgtgaagggccgattcaccatctccagagacaattccaagaacacgctgtatctgcaaatgaacagcctgagagccgaggacacggctgtgtattactgtgcgagaaggtatagcaacagctggtcagggggtatggacgtctggggccaagggaccacggtcaccgtctcctca

SEQ ID NO: 28582 - protein, 121 aa, synthetic construct
  REGION 1..121: note = Description of Artificial Sequence: Synthetic polypeptide
QVQLVESGGGVVQPGRSLRLSCAASGFTFSSYGMHWVRQAPGKGLEWVAVIWYDGSNKYYADSVKGRFTISRDNSKNTLYLQMNSLRAEDTAVYYCARRYSNSWSGGMDVWGQGTTVTVSS

SEQ ID NO: 28583 - DNA, 366 bp, synthetic construct
  misc_feature 1..366: note = Description of Artificial Sequence: Synthetic polynucleotide
  source 1..366: mol_type = other DNA
gaggtgcagctgttggagtctgggggaggcttggtacagcctggggggtccctgagattgtcctgtgcagcctctggattcacctttagcagctatgccatgagctgggtccgccaggctccagggaaggggctggagtgggtctcagctattagtggtagtggaggtaacacattctacgcagactccgtgaagggccggttcaccatctccagagacaattccaagaacacgctgtatctgcaaatgaacagcctgagagccgaggacacggccgtatattactgtgcgaaattggggcgtatagcagtgactggtccttactttgactactggggccagggaaccctggtcaccgtctcctca

SEQ ID NO: 28584 - protein, 122 aa, synthetic construct
  REGION 1..122: note = Description of Artificial Sequence: Synthetic polypeptide
EVQLLESGGGLVQPGGSLRLSCAASGFTFSSYAMSWVRQAPGKGLEWVSAISGSGGNTFYADSVKGRFTISRDNSKNTLYLQMNSLRAEDTAVYYCAKLGRIAVTGPYFDYWGQGTLVTVSS

SEQ ID NO: 28585 - DNA, 351 bp, synthetic construct
  misc_feature 1..351: note = Description of Artificial Sequence: Synthetic polynucleotide
  source 1..351: mol_type = other DNA
caggtgcagctggtggagtctgggggaggcgtggtccagcctgggaggtccctgagactctcctgtgcagcgtctggattcaccttcagtagctatggcatacactgggtccgccaggctccaggcaaggggctggagtgggtggcagttatatggtttgatggaagtaataaatactatgcagactccgtgaagggccgattcaccatctccagagacaattccaagaacacgctgtttctgcaaatgaacagcctgagagtcgaggacacggctgtgtattactgtgcgagagaaattggctggttagatgactactggggccagggaaccctggtcaccgtctcctca

SEQ ID NO: 28586 - protein, 117 aa, synthetic construct
  REGION 1..117: note = Description of Artificial Sequence: Synthetic polypeptide
QVQLVESGGGVVQPGRSLRLSCAASGFTFSSYGIHWVRQAPGKGLEWVAVIWFDGSNKYYADSVKGRFTISRDNSKNTLFLQMNSLRVEDTAVYYCAREIGWLDDYWGQGTLVTVSS

SEQ ID NO: 28587 - DNA, 351 bp, synthetic construct
  misc_feature 1..351: note = Description of Artificial Sequence: Synthetic polynucleotide
  source 1..351: mol_type = other DNA
caggtgcaactggtggagtctgggggaggcgtggtccagcctgggaggtccctgagactctcctgtgcagcgtctggattcaccttcagtagctatggcatgcactgggtccgccaggctccaggcaaggggctggagtgggtggcagttatatggtatgatgaaagtaataaatactatggagactccgtgaagggccgattcaccatctccagagacaattccaagaacacgctgtatctgcaaatgaacagcctgagaggcgaggacacggctctgtattactgtgcgagagaactggggttcctctctgactactggggccagggaaccctggtcaccgtctcctca

SEQ ID NO: 28588 - protein, 117 aa, synthetic construct
  REGION 1..117: note = Description of Artificial Sequence: Synthetic polypeptide
QVQLVESGGGVVQPGRSLRLSCAASGFTFSSYGMHWVRQAPGKGLEWVAVIWYDESNKYYGDSVKGRFTISRDNSKNTLYLQMNSLRGEDTALYYCARELGFLSDYWGQGTLVTVSS

SEQ ID NO: 28589 - DNA, 357 bp, synthetic construct
  misc_feature 1..357: note = Description of Artificial Sequence: Synthetic polynucleotide
  source 1..357: mol_type = other DNA
caggtgcagctggtggagtctgggggaggcgtggtccagcctgggaggtccctgagactctcctgtgcagcgtctggattcaccttcagttactatggcatgcactgggtccgccaggctccaggcaaggggctggagtgggtggcagttatatggcatgatggaagtaataaatactatgtagactccgtgaagggccgattcaccatctccagagacaattccaagaacacgctgtatctgcaaatgaacagcctgagagccgaggacacggctgtgtattactgtgcgagagaaaatagcagttcgtactactttgactactggggccagggaaccctggtcaccgtctcctca

SEQ ID NO: 28590 - protein, 119 aa, synthetic construct
  REGION 1..119: note = Description of Artificial Sequence: Synthetic polypeptide
QVQLVESGGGVVQPGRSLRLSCAASGFTFSYYGMHWVRQAPGKGLEWVAVIWHDGSNKYYVDSVKGRFTISRDNSKNTLYLQMNSLRAEDTAVYYCARENSSSYYFDYWGQGTLVTVSS

SEQ ID NO: 28591 - DNA, 369 bp, synthetic construct
  misc_feature 1..369: note = Description of Artificial Sequence: Synthetic polynucleotide
  source 1..369: mol_type = other DNA
gaggtgcagctgttggagtctgggggaggcttggtacagcctggggggtccctgagactctcctgtgcagcctctggattcacctttagcagctatgccatgagctgggtccgccaggctccagggaaggggctggagtgggtctccgctattagtggtcgtggtggtagcacattcaacgcagactccgtgaagggccggttcaccatctccagagacaattccaagaccacgctgtatctgcaaatgaacagcctgagagccgaggacacggccgtatattactgtgtgaaaggggagctactagaggactactacttctacggtatggacgtctggggccaagggaccacggtcaccgtctcctca

SEQ ID NO: 28592 - protein, 123 aa, synthetic construct
  REGION 1..123: note = Description of Artificial Sequence: Synthetic polypeptide
EVQLLESGGGLVQPGGSLRLSCAASGFTFSSYAMSWVRQAPGKGLEWVSAISGRGGSTFNADSVKGRFTISRDNSKTTLYLQMNSLRAEDTAVYYCVKGELLEDYYFYGMDVWGQGTTVTVSS

SEQ ID NO: 28593 - DNA, 342 bp, synthetic construct
  misc_feature 1..342: note = Description of Artificial Sequence: Synthetic polynucleotide
  source 1..342: mol_type = other DNA
gaggtgcagctggtggagtctgggggaggcctggtcaagcctggggggtccctgagactctcctgtgcagcctctggattcaccttcagtagctatagcatgaactgggtccgccaggctccagggaaggggctggagtgggtctcatcaattagtagtagtagtagttacatatactacgcagactcagtgaagggccgattcaccatctccagagacaacgccaagaactcactgtatctgcaaatgaacagcctgagagccgaggacacggctgtgtattactgtgcgagagatcgaggcagcagctggggccagggaaccctggtcaccgtctcctca

SEQ ID NO: 28594 - protein, 114 aa, synthetic construct
  REGION 1..114: note = Description of Artificial Sequence: Synthetic polypeptide
EVQLVESGGGLVKPGGSLRLSCAASGFTFSSYSMNWVRQAPGKGLEWVSSISSSSSYIYYADSVKGRFTISRDNAKNSLYLQMNSLRAEDTAVYYCARDRGSSWGQGTLVTVSS

SEQ ID NO: 28595 - DNA, 369 bp, synthetic construct
  misc_feature 1..369: note = Description of Artificial Sequence: Synthetic polynucleotide
  source 1..369: mol_type = other DNA
gaggtgcagctgttggagtctgggggaggcttggtacagcctggggggtccctgagactctcctgtgcagcctctggattcacctttagcagctatgccatgagctgggtccgccaggctccagggaaggggctggagtgggtctcagttattagtggtggtggtggtagcacatactacgcagactccgtgaagggccggttcaccatctccagagacaattccaagaacacgctgtatctgcaaatgaacagcctgagagccgaggacacggccgtatattactgtgcgaaacgtggatatagtggctacgaggacctcctctactttgactgctggggccagggaaccctggtcaccgtctcctca

SEQ ID NO: 28596 - protein, 123 aa, synthetic construct
  REGION 1..123: note = Description of Artificial Sequence: Synthetic polypeptide
EVQLLESGGGLVQPGGSLRLSCAASGFTFSSYAMSWVRQAPGKGLEWVSVISGGGGSTYYADSVKGRFTISRDNSKNTLYLQMNSLRAEDTAVYYCAKRGYSGYEDLLYFDCWGQGTLVTVSS

SEQ ID NO: 28597 - DNA, 363 bp, synthetic construct
  misc_feature 1..363: note = Description of Artificial Sequence: Synthetic polynucleotide
  source 1..363: mol_type = other DNA
caggtgcagctggtggagtctgggggaggcgtggtccagcctgggaggtccctgagactgtcctgtgcagcgtctggattcaccttcagtagctatggcatgcactgggtccgccaggctccaggcaaggggctggagtgggtggcagttatatggtatgatggaagtaataaatattatgcagactccgtgaagggccgattcaccatctccagagacaattccaataacacgctgtatctgcaaatgaacagcctgagagccgaggacacggctgtgtattactgtgcgagaaggtatagcagcagctggtcagggggtatggacgtctggggccaagggaccacggtcaccgtctcctca

SEQ ID NO: 28598 - protein, 121 aa, synthetic construct
  REGION 1..121: note = Description of Artificial Sequence: Synthetic polypeptide
QVQLVESGGGVVQPGRSLRLSCAASGFTFSSYGMHWVRQAPGKGLEWVAVIWYDGSNKYYADSVKGRFTISRDNSNNTLYLQMNSLRAEDTAVYYCARRYSSSWSGGMDVWGQGTTVTVSS

SEQ ID NO: 28599 - DNA, 354 bp, synthetic construct
  misc_feature 1..354: note = Description of Artificial Sequence: Synthetic polynucleotide
  source 1..354: mol_type = other DNA
caggtgcagctggtggagtctgggggaggcgtggtccagcctgggaggtccctgagactctcctgtgcagcgtctggattcaccttcagcagttatggcatgcactgggtccgccaggctccaggcaaggggctggagtgggtggcagttatatggtatgatggaagtaatgaatactatgcagactccgtgaagggccgattcaccatctccagagacaattccaagaacacgctatatctacaaatgaacagcctgagagccgcggacacggctgtgtattactgtgcgagagattcctccccctacggtatggacgtctggggccaagggaccacggtcaccgtctcctca

SEQ ID NO: 28600 - protein, 118 aa, synthetic construct
  REGION 1..118: note = Description of Artificial Sequence: Synthetic polypeptide
QVQLVESGGGVVQPGRSLRLSCAASGFTFSSYGMHWVRQAPGKGLEWVAVIWYDGSNEYYADSVKGRFTISRDNSKNTLYLQMNSLRAADTAVYYCARDSSPYGMDVWGQGTTVTVSS

SEQ ID NO: 28601 - DNA, 354 bp, synthetic construct
  misc_feature 1..354: note = Description of Artificial Sequence: Synthetic polynucleotide
  source 1..354: mol_type = other DNA
gaggtgcagctgttggagtctgggggaggcttggtacagccgggggggtccctgagactctcctgtgcagcctctggattcatctttagcagctatgccatgagctgggtccgccaggctccagggaaggggctggagtgggtctcagttactagtggtagtggtggtaccacattctacgcagactccgtgaagggccggttcaccatctccagagacaattccaagaacacgctttatctgcaaatgaacagcctgagagccgaggacacggccgtttattactgtgcgaaacggacccagtttgatgattttgatatctggggccaagggacaatggtcaccgtctcttca

SEQ ID NO: 28602 - protein, 118 aa, synthetic construct
  REGION 1..118: note = Description of Artificial Sequence: Synthetic polypeptide
EVQLLESGGGLVQPGGSLRLSCAASGFIFSSYAMSWVRQAPGKGLEWVSVTSGSGGTTFYADSVKGRFTISRDNSKNTLYLQMNSLRAEDTAVYYCAKRTQFDDFDIWGQGTMVTVSS

SEQ ID NO: 28603 - DNA, 351 bp, synthetic construct
  misc_feature 1..351: note = Description of Artificial Sequence: Synthetic polynucleotide
  source 1..351: mol_type = other DNA
caggtgcagctggtggagtctgggggaggcgtggtccagcctgggaggtccctgagactctcctgtgcagcgtctggattcaccttcagtgactatggcatgcactgggtccgccaggctccaggcaaggggctggagtgggtggcagttatatggtatgatgaaaataataaatactatgcagactccgtgaagggccgattcaccatctccagagacaattccaagaacacgctgtatctgcaaatgaacagcctgagagccgaggacacggctgtgtattactgtgcgagagaactggggatgacgggtgactcctggggccagggaaccctggtcaccgtctcctca

SEQ ID NO: 28604 - protein, 117 aa, synthetic construct
  REGION 1..117: note = Description of Artificial Sequence: Synthetic polypeptide
QVQLVESGGGVVQPGRSLRLSCAASGFTFSDYGMHWVRQAPGKGLEWVAVIWYDENNKYYADSVKGRFTISRDNSKNTLYLQMNSLRAEDTAVYYCARELGMTGDSWGQGTLVTVSS

SEQ ID NO: 28605 - DNA, 363 bp, synthetic construct
  misc_feature 1..363: note = Description of Artificial Sequence: Synthetic polynucleotide
  source 1..363: mol_type = other DNA
caggtgcagctggtggagtctgggggaggcgtggtccagcctgggaggtccctgagactctcctgtgcagcctctggattcaccttcagtagctatggcatgcactgggtccgccaggctccaggcaaggggctggagtgggtggcagttatatcatatggtggaagtaataaattctatgcagtctccgtgaagggccgattcaacatctccagagacaattccaagaacacgctgtatctgcaaatgaacagcctgagagctgaggacacggctgtgtattactgtgtgagaagggggtatagcagtggaggctacggtatggacgtctggggccaagggaccacggtcaccgtctcctca

SEQ ID NO: 28606 - protein, 121 aa, synthetic construct
  REGION 1..121: note = Description of Artificial Sequence: Synthetic polypeptide
QVQLVESGGGVVQPGRSLRLSCAASGFTFSSYGMHWVRQAPGKGLEWVAVISYGGSNKFYAVSVKGRFNISRDNSKNTLYLQMNSLRAEDTAVYYCVRRGYSSGGYGMDVWGQGTTVTVSS

SEQ ID NO: 28607 - DNA, 342 bp, synthetic construct
  misc_feature 1..342: note = Description of Artificial Sequence: Synthetic polynucleotide
  source 1..342: mol_type = other DNA
gaggtgcagctggtggagtctgggggaggcctggtcaagcctggggggtccctgagactctcctgtgcagcctctggattcaccttcagtagctatagcatgaactgggtccgccaggctccagggaaggggctggagtgggtctcatccattagtggtagtagtagttacatatactacgcagactcagtgaagggccgattcaccatctccagagacaacgccaagaactcactgtatctgcaaatgaacagcctgagagccgaggacacggctgtgtattactgtgcgagagatagggggagcctctggggccagggaaccctggtcaccgtctcctca

SEQ ID NO: 28608 - protein, 114 aa, synthetic construct
  REGION 1..114: note = Description of Artificial Sequence: Synthetic polypeptide
EVQLVESGGGLVKPGGSLRLSCAASGFTFSSYSMNWVRQAPGKGLEWVSSISGSSSYIYYADSVKGRFTISRDNAKNSLYLQMNSLRAEDTAVYYCARDRGSLWGQGTLVTVSS

SEQ ID NO: 28609 - DNA, 354 bp, synthetic construct
  misc_feature 1..354: note = Description of Artificial Sequence: Synthetic polynucleotide
  source 1..354: mol_type = other DNA
gaggtgcagctgttggagtctgggggaggcttggtacagcctggggggtccctgagactctcctgtgcagcctctggattcacctttagcagctgtgccatgaactgggtccgccaggctccagggaaggggctggagtgggtctcagctattagtggtagtggtggtagctcattctacgcagactccgtgaagggccggttcaccatctccagagacaattccaagaacacgctgtatctgcaaatgaacagcctgagagccgaggacacggccgtatattactgtgcgaaacggactccctatgatgtctttgatatctggggccaagggacaatggtcaccgtctcttca

SEQ ID NO: 28610 - protein, 118 aa, synthetic construct
  REGION 1..118: note = Description of Artificial Sequence: Synthetic polypeptide
EVQLLESGGGLVQPGGSLRLSCAASGFTFSSCAMNWVRQAPGKGLEWVSAISGSGGSSFYADSVKGRFTISRDNSKNTLYLQMNSLRAEDTAVYYCAKRTPYDVFDIWGQGTMVTVSS

SEQ ID NO: 28611 - DNA, 342 bp, synthetic construct
  misc_feature 1..342: note = Description of Artificial Sequence: Synthetic polynucleotide
  source 1..342: mol_type = other DNA
caggtgcagctggtggagtctgggggaggcgtggtccagcctgggaggtccctgagactctcctgtgcagcgtctggattcaccttcagtgactatggcatgcactgggtccgccaggctccagacaaggggctggagtgggtggcagttatatggtatgatgaaaatactaaatactatgcagactccgtgaagggccgattcaccatctccagagacaattccaagaacacgctgtatctgcaaatgaacagcctgagagccgaggacacggctgtgtattactgtgcgagagagtggggggactactggggccagggaaccctggtcaccgtctcctca

SEQ ID NO: 28612 - protein, 114 aa, synthetic construct
  REGION 1..114: note = Description of Artificial Sequence: Synthetic polypeptide
QVQLVESGGGVVQPGRSLRLSCAASGFTFSDYGMHWVRQAPDKGLEWVAVIWYDENTKYYADSVKGRFTISRDNSKNTLYLQMNSLRAEDTAVYYCAREWGDYWGQGTLVTVSS

SEQ ID NO: 28613 - DNA, 360 bp, synthetic construct
  misc_feature 1..360: note = Description of Artificial Sequence: Synthetic polynucleotide
  source 1..360: mol_type = other DNA
gaggtgcagctgttggagtctgggggaggcttggtacagcctggggggtccctgagactctcctgtgcagcctctggattcacctttagcagctatgccatgagctgggtccgccagactccagggcaggggctggagtgggtctcagctattagtggtagaggtggtaccacattctacgcagactccgtgaagggccggttcaccatctccagagacaattccaagaacacgctgtatctgcaaatgaacagcctgagagccgaggacacggccgtatattactgtgcgaaagacgggtacggtggtaactccttctttgactactggggccagggaaccctggtcaccgtctcctca

SEQ ID NO: 28614 - protein, 120 aa, synthetic construct
  REGION 1..120: note = Description of Artificial Sequence: Synthetic polypeptide
EVQLLESGGGLVQPGGSLRLSCAASGFTFSSYAMSWVRQTPGQGLEWVSAISGRGGTTFYADSVKGRFTISRDNSKNTLYLQMNSLRAEDTAVYYCAKDGYGGNSFFDYWGQGTLVTVSS

SEQ ID NO: 28615 - DNA, 351 bp, synthetic construct
  misc_feature 1..351: note = Description of Artificial Sequence: Synthetic polynucleotide
  source 1..351: mol_type = other DNA
caggtgcagctggtggagtctgggggaggcgtggtccagcctgggaggtccctgagactctcctgtgcagcgtctggattcaccttcagtgactatggcatgcactgggtccgccaggctccaggcaaggggctggagtgggtggcagttatatggtatgatgaaaataatgaatactatgcagactccgtgaagggccgattcaccatctccagagacaattccaagaacacgctgtatctgcaaatgaacagcctgagagccgaggacacggctgtgtattactgtgcgagagaactggggatgacgggtgactcctggggccagggaaccctggtcaccgtctcctca

SEQ ID NO: 28616 - protein, 117 aa, synthetic construct
  REGION 1..117: note = Description of Artificial Sequence: Synthetic polypeptide
QVQLVESGGGVVQPGRSLRLSCAASGFTFSDYGMHWVRQAPGKGLEWVAVIWYDENNEYYADSVKGRFTISRDNSKNTLYLQMNSLRAEDTAVYYCARELGMTGDSWGQGTLVTVSS

SEQ ID NO: 28617 - DNA, 363 bp, synthetic construct
  misc_feature 1..363: note = Description of Artificial Sequence: Synthetic polynucleotide
  source 1..363: mol_type = other DNA
caggtgcagctggtggagtctgggggaggcgtggtccagcctgggaggtccctgagactctcctgtgcagcgtctggattcaccttcagtggctatggcatgcactgggtccgccaggctccaggcaaggggctggagtgggtggcaattatatggtatgatggaagtaataaatactatgcagactccgtgaagggccgattcaccatctccagagacaattccaagaacacgctgtatctgcaaatgaacagcctgagagccgaggacacggctgtgtattactgtgcgagagagaggtacgatttttggagtggttgtatggacgtctggggccaagggaccacggtcaccgtctcctca

SEQ ID NO: 28618 - protein, 121 aa, synthetic construct
  REGION 1..121: note = Description of Artificial Sequence: Synthetic polypeptide
QVQLVESGGGVVQPGRSLRLSCAASGFTFSGYGMHWVRQAPGKGLEWVAIIWYDGSNKYYADSVKGRFTISRDNSKNTLYLQMNSLRAEDTAVYYCARERYDFWSGCMDVWGQGTTVTVSS

SEQ ID NO: 28619 - DNA, 351 bp, synthetic construct
  misc_feature 1..351: note = Description of Artificial Sequence: Synthetic polynucleotide
  source 1..351: mol_type = other DNA
caggagcagctggtggagtctgggggaggcgtggtccagcctgggaggtccctgagactctcctgtgcagcgtctggattcatcttcagtgactatggcatgcactgggtccgccaggctccaggcaaggggctggagtgggtggcagttatatggtatgatgaaaataataaatactatgtagactccgtgaggggccgattcaccatctccagagacaattccaagaacacgctgtatctgcaaatgaacagcctgagagccgaggacacggctgtgtattactgtgcgagagaactggggatgacgggtgactcctggggccagggaaccctggtcaccgtctcctca

SEQ ID NO: 28620 - protein, 117 aa, synthetic construct
  REGION 1..117: note = Description of Artificial Sequence: Synthetic polypeptide
QEQLVESGGGVVQPGRSLRLSCAASGFIFSDYGMHWVRQAPGKGLEWVAVIWYDENNKYYVDSVRGRFTISRDNSKNTLYLQMNSLRAEDTAVYYCARELGMTGDSWGQGTLVTVSS

SEQ ID NO: 28621 - DNA, 363 bp, synthetic construct
  misc_feature 1..363: note = Description of Artificial Sequence: Synthetic polynucleotide
  source 1..363: mol_type = other DNA
caggtgcagctggtggagtctgggggaggcgtggtccagcctgggaggtccctgagactctcctgtgcagcgtctggattcatcttcagtacctatggcatgcactgggtccgccaggctccaggcaaggggctggagtgggtggcagttatatggtatgatggaagtaataaatactatgcagactccgtgaagggccgattcaccatctccagagacaattccaagaacacgctgtatctgcaaatgaacagcctgagagccgaggacacggctgtgtattactgtgcgagagatcgatacgatttttggagtggttattttgactactggggccagggaaccctggtcaccgtctcctca

SEQ ID NO: 28622 - protein, 121 aa, synthetic construct
  REGION 1..121: note = Description of Artificial Sequence: Synthetic polypeptide
QVQLVESGGGVVQPGRSLRLSCAASGFIFSTYGMHWVRQAPGKGLEWVAVIWYDGSNKYYADSVKGRFTISRDNSKNTLYLQMNSLRAEDTAVYYCARDRYDFWSGYFDYWGQGTLVTVSS

SEQ ID NO: 28623 - DNA, 351 bp, synthetic construct
  misc_feature 1..351: note = Description of Artificial Sequence: Synthetic polynucleotide
  source 1..351: mol_type = other DNA
caggtgcagctggtggagtctgggggaggcgtggtccagcctgggaggtccctgagactctcctgtgcagcgtctggattcaccttcagggactatggcatacactgggtccgccaggctccaggcaaggggctggagtgggtggcagttatatggtttgatggaactaataaatactatgcagactccgtgaagggccgattcaccatctccagagacaattccaagaacacgctgtatctgcaaatgaacagcctgagagccgaagacacggctgtgtattactgtgggagagaaattggctggttagatgactactggggccagggaaccctggtcaccgtctcctca

SEQ ID NO: 28624 - protein, 117 aa, synthetic construct
  REGION 1..117: note = Description of Artificial Sequence: Synthetic polypeptide
QVQLVESGGGVVQPGRSLRLSCAASGFTFRDYGIHWVRQAPGKGLEWVAVIWFDGTNKYYADSVKGRFTISRDNSKNTLYLQMNSLRAEDTAVYYCGREIGWLDDYWGQGTLVTVSS

SEQ ID NO: 28625 - DNA, 369 bp, synthetic construct
  misc_feature 1..369: note = Description of Artificial Sequence: Synthetic polynucleotide
  source 1..369: mol_type = other DNA
gaggtgcaggtgttggagtctgggggaggcttggtacagcctggggggtccctgagactctcctgtgcagcctctggattcacctttagcagctatgccatgaactgggtccgccaggctccagggaaggggctggagtgggtctccgctattagtggtcgtggtggtagcacattctacgcagactccgagaagggccggttcaccatctccagagacaattccaagaacacgctgtatctgcaaatgaacagcctgagagccgaggacacggccctatattactgtgcgaaaggggagctattagaggactactactactacggaatggacgtctggggccaagggaccacggtcaccgtctcctca

SEQ ID NO: 28626 - protein, 123 aa, synthetic construct
  REGION 1..123: note = Description of Artificial Sequence: Synthetic polypeptide
EVQVLESGGGLVQPGGSLRLSCAASGFTFSSYAMNWVRQAPGKGLEWVSAISGRGGSTFYADSEKGRFTISRDNSKNTLYLQMNSLRAEDTALYYCAKGELLEDYYYYGMDVWGQGTTVTVSS

SEQ ID NO: 28627 - DNA, 375 bp, synthetic construct
  misc_feature 1..375: note = Description of Artificial Sequence: Synthetic polynucleotide
  source 1..375: mol_type = other DNA
caggtgcagctggtgcagtctggggctgaggtgaagaagcctggggcctcagtgaaggtctcctgcaaggcttctggatacaccttcaccgactactatatgcactgggtgcgacaggcccctggacaggggcttgagtggatgggatggatcaaccctaacagtggtggcacaaactatgcacagaagtttcagggcagggtcaccatgaccagggacacgtccattatgacagcctatatggagctgagcaggctgagatctgacgacacggccgtgtattactgtgcgagagatagtagcaatttcagcaactggtacgattactacggtatggacgtctggggccaagggaccacggtcaccgtctcctca

SEQ ID NO: 28628 - protein, 125 aa, synthetic construct
  REGION 1..125: note = Description of Artificial Sequence: Synthetic polypeptide
QVQLVQSGAEVKKPGASVKVSCKASGYTFTDYYMHWVRQAPGQGLEWMGWINPNSGGTNYAQKFQGRVTMTRDTSIMTAYMELSRLRSDDTAVYYCARDSSNFSNWYDYYGMDVWGQGTTVTVSS

SEQ ID NO: 28629 - DNA, 363 bp, synthetic construct
  misc_feature 1..363: note = Description of Artificial Sequence: Synthetic polynucleotide
  source 1..363: mol_type = other DNA
caggttcagttggtgcagtctggagctgaggtgaagaagcctggggcctcagtgaaggtctcctgcaaggcttctggttacaccttcaccagctatggtatcagctgggtgcgacaggcccctggacaagggcttgagtggatgggatggatcagcgcttacaatggtaacacaacctatgcacagaagctccggggcagagtcaccatgaccacagacacatccacgagcacagcctacatggatctgaggagcctgagatctgacgacacggccgtgtattactgtgcgagaaccgctgctgggtatagcagcagctggtttgactactggggccagggaaccctggtcaccgtctcctca

SEQ ID NO: 28630 - protein, 121 aa, synthetic construct
  REGION 1..121: note = Description of Artificial Sequence: Synthetic polypeptide
QVQLVQSGAEVKKPGASVKVSCKASGYTFTSYGISWVRQAPGQGLEWMGWISAYNGNTTYAQKLRGRVTMTTDTSTSTAYMDLRSLRSDDTAVYYCARTAAGYSSSWFDYWGQGTLVTVSS

SEQ ID NO: 28631 - DNA, 369 bp, synthetic construct
  misc_feature 1..369: note = Description of Artificial Sequence: Synthetic polynucleotide
  source 1..369: mol_type = other DNA
caggtgcagctggtggagtctgggggaggcgtggtccagcctgggaggtccctgagactctcctgtgcagcgtctggattcaccttcagtaactgtgtcatgcactgggtccgccaggctccaggcaaggggctggagtgggtggcagttatatggtatgatggaagtaataaatactatgcagactccgtgaagggccgattcaccatctccagagacaattccaagaacacgctgtatctgcaaatgaacagcctgagagccgaggacacggctgtgtattactgtgcgagagaggagtatagcagtggctggtacgactacggtatggacgtctggggccaagggaccatggtcaccgtctcctca

SEQ ID NO: 28632 - protein, 123 aa, synthetic construct
  REGION 1..123: note = Description of Artificial Sequence: Synthetic polypeptide
QVQLVESGGGVVQPGRSLRLSCAASGFTFSNCVMHWVRQAPGKGLEWVAVIWYDGSNKYYADSVKGRFTISRDNSKNTLYLQMNSLRAEDTAVYYCAREEYSSGWYDYGMDVWGQGTMVTVSS

SEQ ID NO: 28633 - DNA, 351 bp, synthetic construct
  misc_feature 1..351: note = Description of Artificial Sequence: Synthetic polynucleotide
  source 1..351: mol_type = other DNA
caggtgcagctggtggagtctgggggaggcgtggtccagcctgggaggtccctgagactctcctgtgcagcgtctggattcaccttcagtgactatggcatgcactgggtccgccaggctccaggcaaggggctggagtgggtggcagttatatggtatgatgaaaataataaatcctatgcagactccgtgaagggccgattcaccatctccagagacaattccaagaacacgctgtatctgcaaatgaacagcctgagagccgaggacacggctgtgtattactgtgcgagagaactggggatgacgggtgactcctggggccagggaaccctggtcaccgtctcctca

SEQ ID NO: 28634 - protein, 117 aa, synthetic construct
  REGION 1..117: note = Description of Artificial Sequence: Synthetic polypeptide
QVQLVESGGGVVQPGRSLRLSCAASGFTFSDYGMHWVRQAPGKGLEWVAVIWYDENNKSYADSVKGRFTISRDNSKNTLYLQMNSLRAEDTAVYYCARELGMTGDSWGQGTLVTVSS

SEQ ID NO: 28635 - DNA, 363 bp, synthetic construct
  misc_feature 1..363: note = Description of Artificial Sequence: Synthetic polynucleotide
  source 1..363: mol_type = other DNA
caggttcagttggtgcagtctggagctgaggtgaagaagcctggggcctcagtgaaggtctcctgcaaggcttctgattacaccttcaccagctatggtatcagctgggtgcgacaggcccctggacaagggcttgagtggatgggatggatcagcgcttacaatggtaacacaacctatgcacagaagctccggggcagagtcaccatgaccacagacacatccacgagcacagcctacatggatctgaggagcctgagatctgacgacacggccgtgtattactgtgcgagaaccgctgctgggtatagcagcagctggtttgactactggggccagggaaccctggtcaccgtctcctca

SEQ ID NO: 28636 - protein, 121 aa, synthetic construct
  REGION 1..121: note = Description of Artificial Sequence: Synthetic polypeptide
QVQLVQSGAEVKKPGASVKVSCKASDYTFTSYGISWVRQAPGQGLEWMGWISAYNGNTTYAQKLRGRVTMTTDTSTSTAYMDLRSLRSDDTAVYYCARTAAGYSSSWFDYWGQGTLVTVSS

SEQ ID NO: 28637 - DNA, 351 bp, synthetic construct
  misc_feature 1..351: note = Description of Artificial Sequence: Synthetic polynucleotide
  source 1..351: mol_type = other DNA
caggtgcagctggtggagtctgggggaggcgtggtccagcctgggaggtccctgagactctcctgtgcagcgtctggattcaccttcagtgactatggcatgcactgggtccgccaggctccaggcaaggggctggagtgggtggcagttatatggtatgatgaaactaataaatactatgcagactccgtgaagggccgattcaccatctccagagacaattccaagaacacgctgtatctgcaaatgaacagcctgagagccgaggacacggctgtgtattactgtgcgagagaactggggatgacgagtgactactggggccagggaaccctggtcaccgtctcctca

SEQ ID NO: 28638 - protein, 117 aa, synthetic construct
  REGION 1..117: note = Description of Artificial Sequence: Synthetic polypeptide
QVQLVESGGGVVQPGRSLRLSCAASGFTFSDYGMHWVRQAPGKGLEWVAVIWYDETNKYYADSVKGRFTISRDNSKNTLYLQMNSLRAEDTAVYYCARELGMTSDYWGQGTLVTVSS

SEQ ID NO: 28639 - DNA, 351 bp, synthetic construct
  misc_feature 1..351: note = Description of Artificial Sequence: Synthetic polynucleotide
  source 1..351: mol_type = other DNA
caggtgcagctggtggaatctgggggaggcgtggtccagcctgggaggtccctgagactctcctgtgcagcgtctggattcaccttcagtagctatggcatgcactgggtccgccaggctccaggcaaggggctggagtgggtggcagttatatggtatgatgtaagtaataaatactatgcagactccgtgaagggccgattcaccatctccagagacaattccaagaacacgctgtatctgcaaatgaacagcctgagagccgaggacacggctgtgtattactgtgcgagagaaatgggctggtacgatgactactggggccagggaaccctggtcaccgtctcctca

SEQ ID NO: 28640 - protein, 117 aa, synthetic construct
  REGION 1..117: note = Description of Artificial Sequence: Synthetic polypeptide
QVQLVESGGGVVQPGRSLRLSCAASGFTFSSYGMHWVRQAPGKGLEWVAVIWYDVSNKYYADSVKGRFTISRDNSKNTLYLQMNSLRAEDTAVYYCAREMGWYDDYWGQGTLVTVSS

SEQ ID NO: 28641 - DNA, 369 bp, synthetic construct
  misc_feature 1..369: note = Description of Artificial Sequence: Synthetic polynucleotide
  source 1..369: mol_type = other DNA
gaggtgcaggtgttggagtctgggggaggcttggtacagcctggggggtccctgagactctcctgtgcagcctctggattcacctttagcagctatgccatgaactgggtccgccaggctccagggaaggggctggagtgggtctccgctattagtggtcgtggtggtaacacattctacgcagactccgtgaagggccggttcaccatctccagagacaattccaagaacacgctgtatctgcaaatgaacagcctgagagccgaggacacggccgtatattactgtgcgaaaggggagttactagaggactactactactacggaatggacgtctggggccaagggaccacggtcaccgtctcctca

SEQ ID NO: 28642 - protein, 123 aa, synthetic construct
  REGION 1..123: note = Description of Artificial Sequence: Synthetic polypeptide
EVQVLESGGGLVQPGGSLRLSCAASGFTFSSYAMNWVRQAPGKGLEWVSAISGRGGNTFYADSVKGRFTISRDNSKNTLYLQMNSLRAEDTAVYYCAKGELLEDYYYYGMDVWGQGTTVTVSS

SEQ ID NO: 28643 - DNA, 369 bp, synthetic construct
  misc_feature 1..369: note = Description of Artificial Sequence: Synthetic polynucleotide
  source 1..369: mol_type = other DNA
gaggtgcagctgttggagtctgggggaggcttgctacagcctggggggtccctgagactctcctgtgcagcctctggattcacctttaatagctatgccatgagctgggtccgccaggctccagggaaggggctggagtgggtctcctctattagtggtcgtggtggtagcacattccacgcagactccgtgaagggccggttcaccatctccagagacaattccaggaacacgctgtatctgcaaatgaacagcctgagagccgaggacacggccgtatattactgtgtgaaaggggagctactagaggactactacttctacggtatggacgtctggggccaagggaccacggtcaccgtctcctca

SEQ ID NO: 28644 - protein, 123 aa, synthetic construct
  REGION 1..123: note = Description of Artificial Sequence: Synthetic polypeptide
EVQLLESGGGLLQPGGSLRLSCAASGFTFNSYAMSWVRQAPGKGLEWVSSISGRGGSTFHADSVKGRFTISRDNSRNTLYLQMNSLRAEDTAVYYCVKGELLEDYYFYGMDVWGQGTTVTVSS

SEQ ID NO: 28645 - DNA, 363 bp, synthetic construct
  misc_feature 1..363: note = Description of Artificial Sequence: Synthetic polynucleotide
  source 1..363: mol_type = other DNA
caggtgcagctggtggagtctgggggaggcgtggtccagcctgggaggtccctgagactctcctgtgcagcctctggattcaccttcagtagctatggcatgcactgggtccgccgggctccaggcaaggggctggagtgggtggcaattatatcatatggtggaagtaataacttctatgcagactccgtgaagggccgattcaccatctccagagacaattccaagaacacgctgtatctgcaaatgaacagcctgagagctgaggacacggctgtgtattactgtgcgagaagggggtatagcagtggaggctacggtatggacgtctggggccaagggaccacggtcaccgtctcctca

SEQ ID NO: 28646 - protein, 121 aa, synthetic construct
  REGION 1..121: note = Description of Artificial Sequence: Synthetic polypeptide
QVQLVESGGGVVQPGRSLRLSCAASGFTFSSYGMHWVRRAPGKGLEWVAIISYGGSNNFYADSVKGRFTISRDNSKNTLYLQMNSLRAEDTAVYYCARRGYSSGGYGMDVWGQGTTVTVSS

SEQ ID NO: 28647 - DNA, 345 bp, synthetic construct
  misc_feature 1..345: note = Description of Artificial Sequence: Synthetic polynucleotide
  source 1..345: mol_type = other DNA
caggtgcagctggtgcagtctggggctgaggtgaagaagcctggggcctcagtgaaggtctcctgtaaggcttctggatacaccttcaccagttatgatatcaactgggtgcgacaggccactggtcaagggcttgagtggatgggatggatgaaccctaacagtggtaacacaggctatgcacagaagttccagggcagagtcaccatgaccaggaacacctccataagcacagcctacatggagctgagcagcctgggatctgaggacacggccgtgtattactgtgcgagaaagaaggctaacgactactggggccagggaaccctggtcaccgtctcctca

SEQ ID NO: 28648 - protein, 115 aa, synthetic construct
  REGION 1..115: note = Description of Artificial Sequence: Synthetic polypeptide
QVQLVQSGAEVKKPGASVKVSCKASGYTFTSYDINWVRQATGQGLEWMGWMNPNSGNTGYAQKFQGRVTMTRNTSISTAYMELSSLGSEDTAVYYCARKKANDYWGQGTLVTVSS

SEQ ID NO: 28649 - DNA, 357 bp, synthetic construct
  misc_feature 1..357: note = Description of Artificial Sequence: Synthetic polynucleotide
  source 1..357: mol_type = other DNA
caggtgcagctggtggagtctgggggaggcgtggtccagcctgggaggtccctgagactctcctgtgcagcgtctggattcaccttcagttactatggcatgcactgggtccgccaggctccaggcaaggggctggagtgggtggcagttatatggcatgatggaagtaataaatactatgtagactccgtgaagggccgattcaccatctccagagacaattccaagaacacgctgtatctgcaaatgaacagcctgagagccgaggacacggctgtgtattactgtgcgagagaaaatagcagttcgttctactttgactactggggccagggaaccctggtcaccgtctcctca

SEQ ID NO: 28650 - protein, 119 aa, synthetic construct
  REGION 1..119: note = Description of Artificial Sequence: Synthetic polypeptide
QVQLVESGGGVVQPGRSLRLSCAASGFTFSYYGMHWVRQAPGKGLEWVAVIWHDGSNKYYVDSVKGRFTISRDNSKNTLYLQMNSLRAEDTAVYYCARENSSSFYFDYWGQGTLVTVSS

SEQ ID NO: 28651 - DNA, 369 bp, synthetic construct
  misc_feature 1..369: note = Description of Artificial Sequence: Synthetic polynucleotide
  source 1..369: mol_type = other DNA
gaggtgcagctggtggagtctgggggaggcttggtacagcctggggggtccctgagactctcctgtgcagcctctggattcacctttagcagctatgccatgagctgggtccgccaggctccagggaaggggctggagtgggtctccgctattagtggtcgtggtggtagcacattccacgcagactccgtgaagggccggttcaccatctccagagacaattccaagaacacgctgtatctgcaaatgaacagcctgagagccgaggacacggccgtatattactgtgtgaaaggggagctactagaggactactacttctacggtatggacgtctggggccaagggaccacggtcaccgtctcctca

SEQ ID NO: 28652 - protein, 123 aa, synthetic construct
  REGION 1..123: note = Description of Artificial Sequence: Synthetic polypeptide
EVQLVESGGGLVQPGGSLRLSCAASGFTFSSYAMSWVRQAPGKGLEWVSAISGRGGSTFHADSVKGRFTISRDNSKNTLYLQMNSLRAEDTAVYYCVKGELLEDYYFYGMDVWGQGTTVTVSS

SEQ ID NO: 28653 - DNA, 369 bp, synthetic construct
  misc_feature 1..369: note = Description of Artificial Sequence: Synthetic polynucleotide
  source 1..369: mol_type = other DNA
gaggtgcagctggtggagtctgggggaggcttggtacagcctggggggtccctgagactctcctgtgcagcctctggattcacctttagcagctatgccatgaactgggtccgccaggctccagggaaggggctggagtgggtctccgctattagtggtcgtggtggtagcacattccacgcagactccgtgaagggccggttcaccatctccagagacaattccaagaacacgctgtatctgcaaatgaacagcctgagagccgaggacacggccgtatattactgtgtgaaaggggagctattagaggactactacttctacggtatggacgtctggggccaagggaccacggtcaccgtctcctca

SEQ ID NO: 28654 - protein, 123 aa, synthetic construct
  REGION 1..123: note = Description of Artificial Sequence: Synthetic polypeptide
EVQLVESGGGLVQPGGSLRLSCAASGFTFSSYAMNWVRQAPGKGLEWVSAISGRGGSTFHADSVKGRFTISRDNSKNTLYLQMNSLRAEDTAVYYCVKGELLEDYYFYGMDVWGQGTTVTVSS

SEQ ID NO: 28655 - DNA, 351 bp, synthetic construct
  misc_feature 1..351: note = Description of Artificial Sequence: Synthetic polynucleotide
  source 1..351: mol_type = other DNA
caggtgcagctggtggagtctgggggaggcgtggtccagcctgggaggtccctgagactctcctgtgcagcgtctggattcaccttcagtgactatggcatgcactgggtccgccaggctccagccaaggggctggagtgggtggcagttatatggtatgatagaaataataaatactatgcagactccgtgaagggccgattcaccatctccagagacaattccaagaacacgctgtatctgcaaatgaacagcctgagagccgaggacacggctgtatattactgtgcgagagaaatgggctggtacgatgactactggggccagggaaccctggtcaccgtctcctca

SEQ ID NO: 28656 - protein, 117 aa, synthetic construct
  REGION 1..117: note = Description of Artificial Sequence: Synthetic polypeptide
QVQLVESGGGVVQPGRSLRLSCAASGFTFSDYGMHWVRQAPAKGLEWVAVIWYDRNNKYYADSVKGRFTISRDNSKNTLYLQMNSLRAEDTAVYYCAREMGWYDDYWGQGTLVTVSS

SEQ ID NO: 28657 - DNA, 369 bp, synthetic construct
  misc_feature 1..369: note = Description of Artificial Sequence: Synthetic polynucleotide
  source 1..369: mol_type = other DNA
gaggtgcagttgttggagtctgggggaggcttggtacagtctggggggtccctgagactctcctgtgaagcctcaggattcatctttagcagctatgccatgaactgggtccgccaggttccagggaaggggctggagtgggtctcagctattagtcgtcgtggtggtagcacattctacgcagactccgtgaagggccggttcaccatttccagagacaattccaagaacacgctgtatctgcaaatgaacagcctgagagccgaggacacggccgtatatttctgtgcgaaaggggaactactagaggactactcctactacggtatcgacgtctggggccaggggaccacggtcaccgtctcctca

SEQ ID NO: 28658 - protein, 123 aa, synthetic construct
  REGION 1..123: note = Description of Artificial Sequence: Synthetic polypeptide
EVQLLESGGGLVQSGGSLRLSCEASGFIFSSYAMNWVRQVPGKGLEWVSAISRRGGSTFYADSVKGRFTISRDNSKNTLYLQMNSLRAEDTAVYFCAKGELLEDYSYYGIDVWGQGTTVTVSS

SEQ ID NO: 28659 - DNA, 345 bp, synthetic construct
  misc_feature 1..345: note = Description of Artificial Sequence: Synthetic polynucleotide
  source 1..345: mol_type = other DNA
gaggtgcagctggtggagtctgggggaggcctggtcaagcctggggggtccctgagactctcctgtgcagcctctggattcaccttcagtagctatagcatgaactgggtccgccaggctccagggaaggggctggagtgggtctcatccattagtggtagtagtagttacatatactacgcagactcagtgaagggccgattcaccatctccagagacaacgccaagaactcactgtatctgcaaatgagcagcctgagagccgaggacacggctgtgtactactgtgcgagaacaaacggtatggacgtctggggccaagggaccacggttaccgtctcctca

SEQ ID NO: 28660 - protein, 115 aa, synthetic construct
  REGION 1..115: note = Description of Artificial Sequence: Synthetic polypeptide
EVQLVESGGGLVKPGGSLRLSCAASGFTFSSYSMNWVRQAPGKGLEWVSSISGSSSYIYYADSVKGRFTISRDNAKNSLYLQMSSLRAEDTAVYYCARTNGMDVWGQGTTVTVSS

SEQ ID NO: 28661 - DNA, 351 bp, synthetic construct
  misc_feature 1..351: note = Description of Artificial Sequence: Synthetic polynucleotide
  source 1..351: mol_type = other DNA
caggtgcagctggtgcagtctggggctgaggtgaagaagcctggggcctcagtgaaggtctcctgcaaggcttctggatacaccttcaccggctaccatatgcactgggtgcgacaggcccctggacaagggcttgactggatgggatggatcaaccctaacagtggtggcacaaactatgcacagaagtttcagggcagggtcaccatgaccagggacacgtccatcagcacagcctatatggagctgagcaggctgagatctgacgacacggccgtgtattactgtgcgagagacggtaccagctcctttgactactggggccagggaaccctggtcaccgtctcctca

SEQ ID NO: 28662 - protein, 117 aa, synthetic construct
  REGION 1..117: note = Description of Artificial Sequence: Synthetic polypeptide
QVQLVQSGAEVKKPGASVKVSCKASGYTFTGYHMHWVRQAPGQGLDWMGWINPNSGGTNYAQKFQGRVTMTRDTSISTAYMELSRLRSDDTAVYYCARDGTSSFDYWGQGTLVTVSS

SEQ ID NO: 28663 - DNA, 345 bp, synthetic construct
  misc_feature 1..345: note = Description of Artificial Sequence: Synthetic polynucleotide
  source 1..345: mol_type = other DNA
gaggtgcagctggtggagtctgggggaggcctggtcaagcctggggggtccctgagactctcctgtgcagcctctggattcaccttcagtagttataccatgagctgggtccgccaggctccagggaaggggctggagtgggtctcatccattagtggtagtagtaattacatatactacgcagactcagtgaagggccgattcaccatctccagagacaacgccaagaactcactgtatctgcaaatgaacagcctgagagccgaggacacggctgtgtattactgtgcgagattaactggttttgactactggggccagggaaccctggtcaccgtctcctca

SEQ ID NO: 28664 - protein, 115 aa, synthetic construct
  REGION 1..115: note = Description of Artificial Sequence: Synthetic polypeptide
EVQLVESGGGLVKPGGSLRLSCAASGFTFSSYTMSWVRQAPGKGLEWVSSISGSSNYIYYADSVKGRFTISRDNAKNSLYLQMNSLRAEDTAVYYCARLTGFDYWGQGTLVTVSS

SEQ ID NO: 28665 - DNA, 351 bp, synthetic construct
  misc_feature 1..351: note = Description of Artificial Sequence: Synthetic polynucleotide
  source 1..351: mol_type = other DNA
caggtgcagttggtgcagtctgggactgaggtgaagaagcctggggcctcagtgaaggtctcctgcaaggcttctggatacaccttcaccggcgattatatgcactgggtgcgacaggcccctggacaagggcttgagtggatgggatggatcagccctaaaaatggtggcacaaactatgcacagaagtttcagggcagggtcaccatgaccagggacacgtccatcagcacagcctacatggagctgaacaggctgagatctgacgacacggccgtgtattactgtgcgagagatggaactgggtcctttgactactggggccagggaaccctggtcaccgtctcctca

SEQ ID NO: 28666 - protein, 117 aa, synthetic construct
  REGION 1..117: note = Description of Artificial Sequence: Synthetic polypeptide
QVQLVQSGTEVKKPGASVKVSCKASGYTFTGDYMHWVRQAPGQGLEWMGWISPKNGGTNYAQKFQGRVTMTRDTSISTAYMELNRLRSDDTAVYYCARDGTGSFDYWGQGTLVTVSS

SEQ ID NO: 28667 - DNA, 351 bp, synthetic construct
  misc_feature 1..351: note = Description of Artificial Sequence: Synthetic polynucleotide
  source 1..351: mol_type = other DNA
caggtgcagctggtgcagtctggggctgaggtgaagaagcctggggcctcaatgaaggtctcctgcaaggcttctggatacaccttcaccgactatcatatgcactgggtgcgacaggcccctggacaagggcttgagtggatgggatggatcaaccctaataggggtggcacaaactatgcacagaagtttcaggacagggtcaccatgaccagggacacgtccatcagcacagcctacatggaactgagcaggctgagatctgacgacacggccgtgtatttctgtgcgagagatggaactgggtcctttgactactggggccagggaaccctggtcaccgtctcctca

SEQ ID NO: 28668 - protein, 117 aa, synthetic construct
  REGION 1..117: note = Description of Artificial Sequence: Synthetic polypeptide
QVQLVQSGAEVKKPGASMKVSCKASGYTFTDYHMHWVRQAPGQGLEWMGWINPNRGGTNYAQKFQDRVTMTRDTSISTAYMELSRLRSDDTAVYFCARDGTGSFDYWGQGTLVTVSS

SEQ ID NO: 28669 - DNA, 354 bp, synthetic construct
  misc_feature 1..354: note = Description of Artificial Sequence: Synthetic polynucleotide
  source 1..354: mol_type = other DNA
caggtgcagctggtgcagtctggggctgaggtgaagaagcctggggcctcagtgaaggtctcctgcaaggcttctggatacaccttcaccaattatgacattaactgggtgcgacaggccactggacaagggcttgagtggatgggatggatgcaccctaacagtggtaacacaggctttgcacagaagttccggggcagagtcaccatgaccagaaacacctccataagcacagcctacatggaactgagcagcctgagatctgaggacacggccgtgtattactgtgcgagcagcagtggctggtacttttttgactactggggccagggaaccctggtcaccgtctcctca

SEQ ID NO: 28670 - protein, 118 aa, synthetic construct
  REGION 1..118: note = Description of Artificial Sequence: Synthetic polypeptide
QVQLVQSGAEVKKPGASVKVSCKASGYTFTNYDINWVRQATGQGLEWMGWMHPNSGNTGFAQKFRGRVTMTRNTSISTAYMELSSLRSEDTAVYYCASSSGWYFFDYWGQGTLVTVSS

SEQ ID NO: 28671 - DNA, 345 bp, synthetic construct
  misc_feature 1..345: note = Description of Artificial Sequence: Synthetic polynucleotide
  source 1..345: mol_type = other DNA
gaggtgcagctgttagagtctgggggaggcttggtacagcctggggggtccctgagactctcctgtgcagcctctggattcacctttagcagctatgtcataaactgggtccgccaggctccagggaaggggctggagtgggtctcagctattagtggtagtggtgttagcacatactacgcagactccgtgaagggccggttcaccatctccagagacaattccaagaacacgctgtatctgcaaatgaacagcctgagagccgaggacacggccgtatattactgtgcgagaacttccctctttgactactggggccagggaaccctggtcaccgtctcctca

SEQ ID NO: 28672 - protein, 115 aa, synthetic construct
  REGION 1..115: note = Description of Artificial Sequence: Synthetic polypeptide
EVQLLESGGGLVQPGGSLRLSCAASGFTFSSYVINWVRQAPGKGLEWVSAISGSGVSTYYADSVKGRFTISRDNSKNTLYLQMNSLRAEDTAVYYCARTSLFDYWGQGTLVTVSS

SEQ ID NO: 28673 - DNA, 357 bp, synthetic construct
  misc_feature 1..357: note = Description of Artificial Sequence: Synthetic polynucleotide
  source 1..357: mol_type = other DNA
caggtgcagttggtggaatctgggggaggcgtggtccagcctgggaggtccctgagactctcctgtgcagcgtctggattcaccttcagtcactatggcatgcactgggtccgccaggctccaggcaaggggctggagtgggtggcagttatatggtatgatggaagtaataaatactatgcagactccgtgaagggccgattcaccatctccagagacaattccaagaacacgctgtatctgcaaatgaacagcctgagagccgaggacacggctgtgtattactgtgcgagagaaaatagcagctcgtactactttgactactggggccagggaaccctggtcaccgtctcctca

SEQ ID NO: 28674 - protein, 119 aa, synthetic construct
  REGION 1..119: note = Description of Artificial Sequence: Synthetic polypeptide
QVQLVESGGGVVQPGRSLRLSCAASGFTFSHYGMHWVRQAPGKGLEWVAVIWYDGSNKYYADSVKGRFTISRDNSKNTLYLQMNSLRAEDTAVYYCARENSSSYYFDYWGQGTLVTVSS

SEQ ID NO: 28675 - DNA, 357 bp, synthetic construct
  misc_feature 1..357: note = Description of Artificial Sequence: Synthetic polynucleotide
  source 1..357: mol_type = other DNA
cagctgcagctgcaggagtcgggcccaggactggtgaagccttcggagaccctgtccctcacctgcactgtctctggtggctccatcagtagaagtagttactactggggctggatccgccagtccccagggaaggggctggagtggattgggagtatctattatagtgggagcaccgcctacaatccgtccctcaagagtcgagtcaccatatccgtagacacgtccaagaaccaggtctccctgaagctgagctccgtgaccgccgcagacacggctgtgtattactgtgcgagactgagcagcagctggtcttttgactactggggccagggaaccctggtcaccgtctcctca

SEQ ID NO: 28676 - protein, 119 aa, synthetic construct
  REGION 1..119: note = Description of Artificial Sequence: Synthetic polypeptide
QLQLQESGPGLVKPSETLSLTCTVSGGSISRSSYYWGWIRQSPGKGLEWIGSIYYSGSTAYNPSLKSRVTISVDTSKNQVSLKLSSVTAADTAVYYCARLSSSWSFDYWGQGTLVTVSS

SEQ ID NO: 28677 - DNA, 369 bp, synthetic construct
  misc_feature 1..369: note = Description of Artificial Sequence: Synthetic polynucleotide
  source 1..369: mol_type = other DNA
gaggtgcagctgtcggagtctgggggaggcttggtacagcctggggggtccctgagactctcctgtgcagcctctggattcacctttagcagctatgccatgaactgggtccgccaggctccagggaaggggctggagtgggtctccgctattagtggtcgtggtggtagcacattccacgcagactccgtgaagggccggttcaccatctccagagacaattccaagaacacgctgtatctgcaaatgaacagcctgagagccgaggacacggccgtatattactgtgtgaaaggggagttagtagaggactactacttctacggtatggacgtctggggccaagggaccacggtcaccgtctcctca

SEQ ID NO: 28678 - protein, 123 aa, synthetic construct
  REGION 1..123: note = Description of Artificial Sequence: Synthetic polypeptide
EVQLSESGGGLVQPGGSLRLSCAASGFTFSSYAMNWVRQAPGKGLEWVSAISGRGGSTFHADSVKGRFTISRDNSKNTLYLQMNSLRAEDTAVYYCVKGELVEDYYFYGMDVWGQGTTVTVSS

SEQ ID NO: 28679 - DNA, 351 bp, synthetic construct
  misc_feature 1..351: note = Description of Artificial Sequence: Synthetic polynucleotide
  source 1..351: mol_type = other DNA
caggtgcagctggtgcagtctggggctgacgtgaagaagcctggggcctcagtgaaggtctcctgcaaggcttctggatacaccttcaccgactaccatatacactgggtgcgacaggcccctggacaagggcttgagtggatgggatggatcaaccctaacaatggtggcacacactatgcacaggagtttcagggcagggtcaccatgaccagggacacgtccatcagcacagcctacatggagctgagtagcctgagatctgacgacacggccgtgtattactgtgcgagagatggaactgggtcctttgactactggggccagggaaccctggtcaccgtctcctca

SEQ ID NO: 28680 - protein, 117 aa, synthetic construct
  REGION 1..117: note = Description of Artificial Sequence: Synthetic polypeptide
QVQLVQSGADVKKPGASVKVSCKASGYTFTDYHIHWVRQAPGQGLEWMGWINPNNGGTHYAQEFQGRVTMTRDTSISTAYMELSSLRSDDTAVYYCARDGTGSFDYWGQGTLVTVSS

SEQ ID NO: 28681 - DNA, 357 bp, synthetic construct
  misc_feature 1..357: note = Description of Artificial Sequence: Synthetic polynucleotide
  source 1..357: mol_type = other DNA
caggtgcagttggtggagtctgggggaggcgtggtccagcctgggaggtccctgagactctcctgtgcagcgtctggattcaccttcagtaactatggcatgcactgggtccgccaggctccaggcaaggggctggagtgggtggcagttatatggcatgatggaagtaataaatactatggagactccgtgaagggccgattcaccatctccagagacaattccaagaacacactgtatctgcaaatgaacagcctgagagccgaggacacggctgtgtattactgtgcgagagaaaatagcagctcgtactactttgactactggggccagggaaccctggtcaccgtctcctca

SEQ ID NO: 28682 - protein, 119 aa, synthetic construct
  REGION 1..119: note = Description of Artificial Sequence: Synthetic polypeptide
QVQLVESGGGVVQPGRSLRLSCAASGFTFSNYGMHWVRQAPGKGLEWVAVIWHDGSNKYYGDSVKGRFTISRDNSKNTLYLQMNSLRAEDTAVYYCARENSSSYYFDYWGQGTLVTVSS

SEQ ID NO: 28683 - DNA, 369 bp, synthetic construct
  misc_feature 1..369: note = Description of Artificial Sequence: Synthetic polynucleotide
  source 1..369: mol_type = other DNA
gaggtgcagctgttggagtctgggggaggcttgctacagccgggggggtccctgagactctcctgtgcagcctctggattcacctttagcagctatgccatgagctgggtccgccaggctccagggaaggggctggagtgggtctcttctattagtggtcgtggtggtagcacattccacgcagactccgtgaagggccggttcaccatctccagagacaattccaagaacacgctgtatctgcaaatgaacagcctgagagccgaggacacggccgtatattactgtgtgaagggggagctacttgaggactactacttctacggtatggacgtctggggccaagggaccacggtcaccgtctcctca

SEQ ID NO: 28684 - protein, 123 aa, synthetic construct
  REGION 1..123: note = Description of Artificial Sequence: Synthetic polypeptide
EVQLLESGGGLLQPGGSLRLSCAASGFTFSSYAMSWVRQAPGKGLEWVSSISGRGGSTFHADSVKGRFTISRDNSKNTLYLQMNSLRAEDTAVYYCVKGELLEDYYFYGMDVWGQGTTVTVSS

SEQ ID NO: 28685 - DNA, 369 bp, synthetic construct
  misc_feature 1..369: note = Description of Artificial Sequence: Synthetic polynucleotide
  source 1..369: mol_type = other DNA
gaggtgcagctgttggagtctgggggaggcttggtacagcctggggggtccctgagactctcctgtgcagcctctggattcacctttagcagctgtgccatgagctgggtccgccaggctccagggaaggggctggagtgggtctccgctattagtggtcgtggtggtagcacattccacgcagactccgtgaagggccggttcaccatctccagagacaattccaagaacacgctgtatctgcaaatgaacagcctgagagccgaggacacggccgtatattactgtgtgaaaggggaactactagaggactactacttctacggtatggacgtctggggccaagggaccacggtcaccgtctcctca

SEQ ID NO: 28686 - protein, 123 aa, synthetic construct
  REGION 1..123: note = Description of Artificial Sequence: Synthetic polypeptide
EVQLLESGGGLVQPGGSLRLSCAASGFTFSSCAMSWVRQAPGKGLEWVSAISGRGGSTFHADSVKGRFTISRDNSKNTLYLQMNSLRAEDTAVYYCVKGELLEDYYFYGMDVWGQGTTVTVSS

SEQ ID NO: 28687 - DNA, 369 bp, synthetic construct
  misc_feature 1..369: note = Description of Artificial Sequence: Synthetic polynucleotide
  source 1..369: mol_type = other DNA
gaggtgcagctgttggagtctgggggaggcttggtacagcctggggggtccctgagactctcctgtgcagcctctggattcacctttaacaactatgccatgaactgggtccgccaggctccagggaaggggctggagtgggtctcagctattagtcgtcgtggtggtagcacattctacgcagactccgtgaagggccggttcaccatctccagagacaattccaagaacactctgtatctccaaatgaacagcctgagagccgaggacacggccgtatattactgtgcgaaaggggagctactagaggactactactacttcgctatggacgtctggggccaagggaccacggtcaccgtctcctca

SEQ ID NO: 28688 - protein, 123 aa, synthetic construct
  REGION 1..123: note = Description of Artificial Sequence: Synthetic polypeptide
EVQLLESGGGLVQPGGSLRLSCAASGFTFNNYAMNWVRQAPGKGLEWVSAISRRGGSTFYADSVKGRFTISRDNSKNTLYLQMNSLRAEDTAVYYCAKGELLEDYYYFAMDVWGQGTTVTVSS

SEQ ID NO: 28689 - DNA, 375 bp, synthetic construct
  misc_feature 1..375: note = Description of Artificial Sequence: Synthetic polynucleotide
  source 1..375: mol_type = other DNA
caggtgcagctggtgcagtctggggctgaggtgaagaagcctggggcctcagtgaaggtctcctgcaaggcttctggatacaccttcaccggctactatatgcactgggtgcgacaggcccctggacaggggcttgagtggatgggatggatcaaccctaacagtggtggcacaaactatgcacagaagtttcagggcagggtcaccatgaccagggacacgtccatcagcacagcctacatggagctgagcaggctgagatctgacgacacggccgtgtattactgtgcgagagatattagtaatttcagcagctggtacgattactacgctatggacgtctggggccaagggaccacggtcaccgtctcctca

SEQ ID NO: 28690 - protein, 125 aa, synthetic construct
  REGION 1..125: note = Description of Artificial Sequence: Synthetic polypeptide
QVQLVQSGAEVKKPGASVKVSCKASGYTFTGYYMHWVRQAPGQGLEWMGWINPNSGGTNYAQKFQGRVTMTRDTSISTAYMELSRLRSDDTAVYYCARDISNFSSWYDYYAMDVWGQGTTVTVSS

SEQ ID NO: 28691 - DNA, 369 bp, synthetic construct
  misc_feature 1..369: note = Description of Artificial Sequence: Synthetic polynucleotide
  source 1..369: mol_type = other DNA
gaggtgcagctgttggagtctgggggaggcttggtacagcctggggggtccctgagactctcctgtgcagcctctggattcacctttagcagctatgccatgagctgggtccgccaggctccagggaaggggctggagtgggtctccgctattagtggtcgtggtggtagcacattccacgcagactccgtgaagggccggttcaccatctccagagacaattccaagaacacgctgtatctgcaaatgaacagcctgagagccgaggacacggccgtatattactgtgtgaaaggggagctactagaggactactacttctacggtatggacgtctggggccaaggggccacggtcaccgtctcctca

SEQ ID NO: 28692 - protein, 123 aa, synthetic construct
  REGION 1..123: note = Description of Artificial Sequence: Synthetic polypeptide
EVQLLESGGGLVQPGGSLRLSCAASGFTFSSYAMSWVRQAPGKGLEWVSAISGRGGSTFHADSVKGRFTISRDNSKNTLYLQMNSLRAEDTAVYYCVKGELLEDYYFYGMDVWGQGATVTVSS

SEQ ID NO: 28693 - DNA, 351 bp, synthetic construct
  misc_feature 1..351: note = Description of Artificial Sequence: Synthetic polynucleotide
  source 1..351: mol_type = other DNA
caggtgcagttggcgcagtctggggctgaggtgaagaagcctggggcctcagtgaaggtctcctgcaaggcttctggatacaccttcaccggctactatatgcactgggtgcgacaggcccctggacaagggcttgagtggatggggtggatcagccctaacaatggtggcacaaactatgcacagaagtttcagggcagggtcaccatgaccagggacacgtccatcagcacagcctacatggagctgagcaggctgagatctgacgacacggccgtgtattactgtgcgagagatggaactgggtcctttgactactggggccagggaaccctggtcaccgtctcctca

SEQ ID NO: 28694 - protein, 117 aa, synthetic construct
  REGION 1..117: note = Description of Artificial Sequence: Synthetic polypeptide
QVQLAQSGAEVKKPGASVKVSCKASGYTFTGYYMHWVRQAPGQGLEWMGWISPNNGGTNYAQKFQGRVTMTRDTSISTAYMELSRLRSDDTAVYYCARDGTGSFDYWGQGTLVTVSS

SEQ ID NO: 28695 - DNA, 360 bp, synthetic construct
  misc_feature 1..360: note = Description of Artificial Sequence: Synthetic polynucleotide
  source 1..360: mol_type = other DNA
gaggtgcagctgttggagtctgggggagacatggtccagcctggggggtccctgagactctcctgtgcagcctccggattcacctttagcagctatgccatgagctgggtccgccaggctccagggaaggggctggagtgggtctcagttattagtggtagtggtggtagctcattctacgcagactccgtgaagggccggttcaccatctccagagacaattccaagaacacgctgtatctgcaaatgaacagcctgagggccgaggacacggccgtatattactgtgcgaaagatcgggtgagagctcatgatggttttgatatctggggccaagggacaatggtcaccgtctcttca

SEQ ID NO: 28696 - protein, 120 aa, synthetic construct
  REGION 1..120: note = Description of Artificial Sequence: Synthetic polypeptide
EVQLLESGGDMVQPGGSLRLSCAASGFTFSSYAMSWVRQAPGKGLEWVSVISGSGGSSFYADSVKGRFTISRDNSKNTLYLQMNSLRAEDTAVYYCAKDRVRAHDGFDIWGQGTMVTVSS

SEQ ID NO: 28697 - DNA, 351 bp, synthetic construct
  misc_feature 1..351: note = Description of Artificial Sequence: Synthetic polynucleotide
  source 1..351: mol_type = other DNA
caggtgcagctggtgcagtctggggctgaggtgaagaagcctggggcctcagtgaaggtctcctgcagggcttctggatacaccttcaccgactaccatattcactgggtgcgacaggcccctggacaagggcttgagtggatgggatggatcaaccctaacaatggtggcacacactatgcacagaagtttcagggcagggtcaccatgaccagggacacgtccatcagcacagcctacatggagctgagcaggctgagatctgacgacacggccgtgtattattgtgcgagagatggaactgggtcctttgactactggggccagggaaacctggtcaccgtctcctca

SEQ ID NO: 28698 - protein, 117 aa, synthetic construct
  REGION 1..117: note = Description of Artificial Sequence: Synthetic polypeptide
QVQLVQSGAEVKKPGASVKVSCRASGYTFTDYHIHWVRQAPGQGLEWMGWINPNNGGTHYAQKFQGRVTMTRDTSISTAYMELSRLRSDDTAVYYCARDGTGSFDYWGQGNLVTVSS

SEQ ID NO: 28699 - DNA, 369 bp, synthetic construct
  misc_feature 1..369: note = Description of Artificial Sequence: Synthetic polynucleotide
  source 1..369: mol_type = other DNA
gaggtgcagctgttggagtctgggggaggcttggtacagcctggggggtccctgagactctcctgtgcagcctctggattcacctttagcagctatgccatgaactgggtccgccaggctccaggggaggggctggagtgggtctccgctattagtggtcgtggtggtagcacattctacgcagactccgtgaagggccggttcaccatctccagagacaattccaagaacacgctgtttctgcaaatgaacagcctgagagccgaggacacggccgtttattactgtgcgaaaggggagctactagaggactactactactacggtatggacgtctggggccaagggaccacggtcaccgtctcctca

SEQ ID NO: 28700 - protein, 123 aa, synthetic construct
  REGION 1..123: note = Description of Artificial Sequence: Synthetic polypeptide
EVQLLESGGGLVQPGGSLRLSCAASGFTFSSYAMNWVRQAPGEGLEWVSAISGRGGSTFYADSVKGRFTISRDNSKNTLFLQMNSLRAEDTAVYYCAKGELLEDYYYYGMDVWGQGTTVTVSS

SEQ ID NO: 28701 - DNA, 345 bp, synthetic construct
  misc_feature 1..345: note = Description of Artificial Sequence: Synthetic polynucleotide
  source 1..345: mol_type = other DNA
gaggttcaactggtggagtctggggggggcctggtcaagcctggggggtccctgagactctcctgtgcagcctctggattcaccttcagtagttatagcatgaactgggtccgccaggctccagggaaggggctggagtgggtctcgtccattagtggtactggtagtttcatatactacgcagactcagtgaagggccgattcaccatctccagagacaacgccaagaaatcagtgtatctgcaaatgaacagcctgagagccgaggacacggctgtgtattactgtgcgagagtctctggctttgactactggggccagggaaccctggtcaccgtctcctca

SEQ ID NO: 28702 - protein, 115 aa, synthetic construct
  REGION 1..115: note = Description of Artificial Sequence: Synthetic polypeptide
EVQLVESGGGLVKPGGSLRLSCAASGFTFSSYSMNWVRQAPGKGLEWVSSISGTGSFIYYADSVKGRFTISRDNAKKSVYLQMNSLRAEDTAVYYCARVSGFDYWGQGTLVTVSS

SEQ ID NO: 28703 - DNA, 357 bp, synthetic construct
  misc_feature 1..357: note = Description of Artificial Sequence: Synthetic polynucleotide
  source 1..357: mol_type = other DNA
caggtgcagttggtggagtctgggggaggcgtggtccagcctgggaggtccctgagactctcctgtgcagcgtctggattcaccttcagtaactatggcatgcactgggtccgccaggctccaggcaaggggctggagtgggtggcagttatatggcatgatggaagtaataaatactatgcagactccgtgaagggccgattcaccatctccagagacaattccaagaacacgctgtatctgcaaatgaacagcctgagagccgaggacacggctgtgtattactgtgcgagagaaaatagcagctcgtactactttgactactggggccagggaaccctggtcaccgtctcctca

SEQ ID NO: 28704 - protein, 119 aa, synthetic construct
  REGION 1..119: note = Description of Artificial Sequence: Synthetic polypeptide
QVQLVESGGGVVQPGRSLRLSCAASGFTFSNYGMHWVRQAPGKGLEWVAVIWHDGSNKYYADSVKGRFTISRDNSKNTLYLQMNSLRAEDTAVYYCARENSSSYYFDYWGQGTLVTVSS

SEQ ID NO: 28705 - DNA, 369 bp, synthetic construct
  misc_feature 1..369: note = Description of Artificial Sequence: Synthetic polynucleotide
  source 1..369: mol_type = other DNA
gaggttcaattgttggagtctgggggaggcttggtacagcctggggggtccctgagactctcctgtgcagcctctggattcacctttagcaactatgccatgagctgggtccgccaggctccagggaaggggctggagtgggtctcagctattagtcgtcgtggtggtagcacattctacgcagactccgtgaagggccagttcaccatttccagagacaattccaagaacacgctgtatctgcaaatgaacagcctgagagccgaggacacggccgtgtattactgtgcgaaaggggagctactagaggactactcctactacggtatggacgtctggggccaggggaccacggtcaccgtctcctca

SEQ ID NO: 28706 - protein, 123 aa, synthetic construct
  REGION 1..123: note = Description of Artificial Sequence: Synthetic polypeptide
EVQLLESGGGLVQPGGSLRLSCAASGFTFSNYAMSWVRQAPGKGLEWVSAISRRGGSTFYADSVKGQFTISRDNSKNTLYLQMNSLRAEDTAVYYCAKGELLEDYSYYGMDVWGQGTTVTVSS

SEQ ID NO: 28707 - DNA, 369 bp, synthetic construct
  misc_feature 1..369: note = Description of Artificial Sequence: Synthetic polynucleotide
  source 1..369: mol_type = other DNA
gaggtgcaactgttggagtctgggggaggcttggtacagcctggggggtccctgagactctcctgtgcagcctctggattcacctttagcagctatgccatgagctgggtccgccaggctccagggaaggggctggagtgggtctccgctattagtggtcgtggtggtagcacattccacgcagactccgtgaagggccggttcaccatctccagagacaattccaacaacacgctgtatctgcaaatgaacagcctgagagccgaggacacggccgtatattactgtgtgaaaggggagttactagaggactactacttctacggtatggacgtctggggccaaggggccacggtcaccgtctcctca

SEQ ID NO: 28708 - protein, 123 aa, synthetic construct
  REGION 1..123: note = Description of Artificial Sequence: Synthetic polypeptide
EVQLLESGGGLVQPGGSLRLSCAASGFTFSSYAMSWVRQAPGKGLEWVSAISGRGGSTFHADSVKGRFTISRDNSNNTLYLQMNSLRAEDTAVYYCVKGELLEDYYFYGMDVWGQGATVTVSS

SEQ ID NO: 28709 - DNA, 369 bp, synthetic construct
  misc_feature 1..369: note = Description of Artificial Sequence: Synthetic polynucleotide
  source 1..369: mol_type = other DNA
gaggtgcagctgttggagtctgggggaggcttggtacagcctggggggtccctgagactctcctgtgcagcctctggattcacctttagcagctatgccatgagctgggtccgccaggctccagggaaggggctggagtgggtctccgctattagtggtcgtggtggtagcacattccacgcagactccatgaagggccggttcaccatctccagagacaattccaagaacacgctgtatctgcaaatgaacagcctgagagccgaggacacggccgtatattactgtgtgaaaggggagctactagaggactactacttctacggtatggacgtctggggccaagggaccacggtcaccgtctcctca

SEQ ID NO: 28710 - protein, 123 aa, synthetic construct
  REGION 1..123: note = Description of Artificial Sequence: Synthetic polypeptide
EVQLLESGGGLVQPGGSLRLSCAASGFTFSSYAMSWVRQAPGKGLEWVSAISGRGGSTFHADSMKGRFTISRDNSKNTLYLQMNSLRAEDTAVYYCVKGELLEDYYFYGMDVWGQGTTVTVSS

SEQ ID NO: 28711 - DNA, 342 bp, synthetic construct
  misc_feature 1..342: note = Description of Artificial Sequence: Synthetic polynucleotide
  source 1..342: mol_type = other DNA
gaggtgcaactggtggagtctgggggaggcctggtcaagccgggggggtccctgagactctcctgtgcagcctctggattcaccttcagtagctataccatgaactgggtccgccaggctccagggaaggggctgcagtgggtctcatccattagtggtagtagtagttacatatactacgcggactcagtgaagggccgattcaccatctccagagacaacgccaagaactcactgtttctgcaaatgaacagcctgagagccgaggacacggctatcttttactgtgcgcgagatcggggggggacctggggccagggaaccctggtcaccgtctcctca

SEQ ID NO: 28712 - protein, 114 aa, synthetic construct
  REGION 1..114: note = Description of Artificial Sequence: Synthetic polypeptide
EVQLVESGGGLVKPGGSLRLSCAASGFTFSSYTMNWVRQAPGKGLQWVSSISGSSSYIYYADSVKGRFTISRDNAKNSLFLQMNSLRAEDTAIFYCARDRGGTWGQGTLVTVSS

SEQ ID NO: 28713 - DNA, 351 bp, synthetic construct
  misc_feature 1..351: note = Description of Artificial Sequence: Synthetic polynucleotide
  source 1..351: mol_type = other DNA
caggtgcagctggtgcagtctggggctgacgtgaagaagcctggggcctcagtgaaggtctcctgcaaggcttctggatacaccttcaccgactaccatatacactgggtgcgacaggcccctggacaagggcttgagtggatgggatggatcaaccctaacaatggtggcacacactatgcacaggagtttcagggcagggtcaccatgaccagggacacgtccatcagcacagcctacatggaactgagtagcctgagatctgacgacacggccgtgtatcactgtgcgagagatggaactgggtcctttgactactggggccagggaaccctggtcaccgtctcctca

SEQ ID NO: 28714 - protein, 117 aa, synthetic construct
  REGION 1..117: note = Description of Artificial Sequence: Synthetic polypeptide
QVQLVQSGADVKKPGASVKVSCKASGYTFTDYHIHWVRQAPGQGLEWMGWINPNNGGTHYAQEFQGRVTMTRDTSISTAYMELSSLRSDDTAVYHCARDGTGSFDYWGQGTLVTVSS

SEQ ID NO: 28715 - DNA, 357 bp, synthetic construct
  misc_feature 1..357: note = Description of Artificial Sequence: Synthetic polynucleotide
  source 1..357: mol_type = other DNA
caggtgcagttggtggagtctgggggaggcgtggtccagcctgggaggtccctgagactctcctgtgcagcgtctggattcaccttcagtaactatgtcatgcactgggtccgccaggctccaggcaaggggctggagtgggtggcacttatatggtatgatggaagtaataaatactatgcagactccgtgaagggccgattcaccatctccagagacaattccaagaacacgctgtatctgcaaatgaacagcctgagagccgaggacacggctgtgtattactgtgcgagagaaaatagcagctcgtactactttgactactggggccagggaaccctggtcaccgtctcctca

SEQ ID NO: 28716 - protein, 119 aa, synthetic construct
  REGION 1..119: note = Description of Artificial Sequence: Synthetic polypeptide
QVQLVESGGGVVQPGRSLRLSCAASGFTFSNYVMHWVRQAPGKGLEWVALIWYDGSNKYYADSVKGRFTISRDNSKNTLYLQMNSLRAEDTAVYYCARENSSSYYFDYWGQGTLVTVSS

SEQ ID NO: 28717 - DNA, 357 bp, synthetic construct
  misc_feature 1..357: note = Description of Artificial Sequence: Synthetic polynucleotide
  source 1..357: mol_type = other DNA
caggtgcagttggtggagtctgggggaggcgtggtccagcctgggaggtccctgagactctcctgtgcagcgtctggattcaccttcagtaactatggcatgcactgggtccgccaggctccaggcaaggggctggagtgggtggcagttatatggtatgatggaagtaataaatactatgcagactccgtgaagggccgattcaccatctccagagacaattccaagaacacgctgtatctgcaaatgaacagcctgagagccgaggacacggctgtgtattactgtgcgagagaaaatagcagctcgtactactttgactactggggccagggaaccctggtcaccgtctcctca

SEQ ID NO: 28718 - protein, 119 aa, synthetic construct
  REGION 1..119: note = Description of Artificial Sequence: Synthetic polypeptide
QVQLVESGGGVVQPGRSLRLSCAASGFTFSNYGMHWVRQAPGKGLEWVAVIWYDGSNKYYADSVKGRFTISRDNSKNTLYLQMNSLRAEDTAVYYCARENSSSYYFDYWGQGTLVTVSS

SEQ ID NO: 28719 - DNA, 363 bp, synthetic construct
  misc_feature 1..363: note = Description of Artificial Sequence: Synthetic polynucleotide
  source 1..363: mol_type = other DNA
caggtgcagctggtggagtctgggggaggcgtggtccagcctgggaggtccctgagactctcctgtgcagcctctggattcaccttcagtagctatggcatgcactgggtccgccaggctccaggcaaggggctggagtgggtggcagttatatcatatggtggaagtaataaatactatgcagactccgtgaagggccgattcaccatctccagagacaattccaagaacacgctgtatctgcaaatgaacagcctgagagctgaggacacggctgtgtattactgtgtgagaagggggtatagcagtggaggctacggtatggacgtctggggccaagggaccacggtcaccgtctcctca

SEQ ID NO: 28720 - protein, 121 aa, synthetic construct
  REGION 1..121: note = Description of Artificial Sequence: Synthetic polypeptide
QVQLVESGGGVVQPGRSLRLSCAASGFTFSSYGMHWVRQAPGKGLEWVAVISYGGSNKYYADSVKGRFTISRDNSKNTLYLQMNSLRAEDTAVYYCVRRGYSSGGYGMDVWGQGTTVTVSS

SEQ ID NO: 28721 - DNA, 351 bp, synthetic construct
  misc_feature 1..351: note = Description of Artificial Sequence: Synthetic polynucleotide
  source 1..351: mol_type = other DNA
caggtgcagctggtgcagtctggggctgaggtgaagaagcctggggcctcagtgaaggtctcctgcaaggcttctggatacaccttcaccgactactatatacactgggtgcgacaggcccctggacaagggcttgagtggatgggatggatcaaccctaataggggtggcacaaactatgcacagaagtttcagggcagggtcaccatgaccagggacacgtccatcagcacagcctacatggaactgagcaggctgagatctgacgacacggccgtgtattactgtgcgagagatggaactgggtcctttgactactggggccagggaaccctggtcaccgtctcctca

SEQ ID NO: 28722 - protein, 117 aa, synthetic construct
  REGION 1..117: note = Description of Artificial Sequence: Synthetic polypeptide
QVQLVQSGAEVKKPGASVKVSCKASGYTFTDYYIHWVRQAPGQGLEWMGWINPNRGGTNYAQKFQGRVTMTRDTSISTAYMELSRLRSDDTAVYYCARDGTGSFDYWGQGTLVTVSS

SEQ ID NO: 28723 - DNA, 345 bp, synthetic construct
  misc_feature 1..345: note = Description of Artificial Sequence: Synthetic polynucleotide
  source 1..345: mol_type = other DNA
gaggtgcagctggtggagtctgggggaggcctggtcaagcctggggggtccctgagactctcctgtgcagcctctggattcaccttcagtagctatggcatgaactgggtccgccaggctccagggaaggggctggagtgggtctcatccattagtggtagtagtacttacatatactacgcagactcagtgaagggccgattcaccatctccagagacaacgccaagaactcactgtatctgcaaatgaacagcctgagagccgaggacacggctgtgtattactgtgcgagaacaaacggtatggacgtctggggccaagggaccacggtcaccgtctcctca

SEQ ID NO: 28724 - protein, 115 aa, synthetic construct
  REGION 1..115: note = Description of Artificial Sequence: Synthetic polypeptide
EVQLVESGGGLVKPGGSLRLSCAASGFTFSSYGMNWVRQAPGKGLEWVSSISGSSTYIYYADSVKGRFTISRDNAKNSLYLQMNSLRAEDTAVYYCARTNGMDVWGQGTTVTVSS

SEQ ID NO: 28725 - DNA, 354 bp, synthetic construct
  misc_feature 1..354: note = Description of Artificial Sequence: Synthetic polynucleotide
  source 1..354: mol_type = other DNA
caggtgcagctggtgcagtctggggctgaggtgaagaagcctggggcctcagtgaaggtctcctgcaaggcttctggatacaccttcaccaattatgacattaactgggtgcgacaggccactggacaagggcttgagtgggtgggatggctgcaccctaacagtggtaccacaggctttgcacagaagttccggggcagagtcaccatgaccagaaacacctccataagcacagcctacttggaactgagcagcctgagatctgaggacacggccgtgtattactgtgcgagcagcagtggctggtacttttttgactactggggccagggaaccctggtcaccgtctcctca

SEQ ID NO: 28726 - protein, 118 aa, synthetic construct
  REGION 1..118: note = Description of Artificial Sequence: Synthetic polypeptide
QVQLVQSGAEVKKPGASVKVSCKASGYTFTNYDINWVRQATGQGLEWVGWLHPNSGTTGFAQKFRGRVTMTRNTSISTAYLELSSLRSEDTAVYYCASSSGWYFFDYWGQGTLVTVSS

SEQ ID NO: 28727 - DNA, 369 bp, synthetic construct
  misc_feature 1..369: note = Description of Artificial Sequence: Synthetic polynucleotide
  source 1..369: mol_type = other DNA
gaggtgcagctgttggagtctgggggaggcttggtacagcctggggggtccctgagactctcctgtgcagcctctggattcacctttagcagctatgccatgagctgggtccgccaggctccagggaaggggctggagtgggtctccgctattagtggtcgtggtggtagcacattccacgcagactccgtgaagggccggttcaccatctccagagacaattccaagaacacgctgtatctgcaaattaacagcctgagagccgaggacacggccgtatattactgtgtgaaaggggagctactagaggactactacttctacggtatggacgtctggggccaagggaccacggtcaccgtctcctca

SEQ ID NO: 28728 - protein, 123 aa, synthetic construct
  REGION 1..123: note = Description of Artificial Sequence: Synthetic polypeptide
EVQLLESGGGLVQPGGSLRLSCAASGFTFSSYAMSWVRQAPGKGLEWVSAISGRGGSTFHADSVKGRFTISRDNSKNTLYLQINSLRAEDTAVYYCVKGELLEDYYFYGMDVWGQGTTVTVSS

SEQ ID NO: 28729 - DNA, 345 bp, synthetic construct
  misc_feature 1..345: note = Description of Artificial Sequence: Synthetic polynucleotide
  source 1..345: mol_type = other DNA
caggtgcagctggtgcagtctggggctgaggtgaagaagcctggggcctcagtgaaggtctcctgcaaggcttctggatacaccttcaccagttatgatatcaactgggtgcgacaggccactggacaagggcttgagtggatgggatggatgaaccctaacagtggtaacacaggctatgcacagaagttccagggcagagtcaccatgaccaggaacacctccataagcacagcctacatggagctgagcagcctgagatctgaggacacggccgtgtattactgtgcgagaaagaagtctaacgactactggggccagggaaccctggtcaccgtctcctca

SEQ ID NO: 28730 - protein, 115 aa, synthetic construct
  REGION 1..115: note = Description of Artificial Sequence: Synthetic polypeptide
QVQLVQSGAEVKKPGASVKVSCKASGYTFTSYDINWVRQATGQGLEWMGWMNPNSGNTGYAQKFQGRVTMTRNTSISTAYMELSSLRSEDTAVYYCARKKSNDYWGQGTLVTVSS

SEQ ID NO: 28731 - DNA, 369 bp, synthetic construct
  misc_feature 1..369: note = Description of Artificial Sequence: Synthetic polynucleotide
  source 1..369: mol_type = other DNA
gaggtgcagctgttggagtctgggggaggcttggtacagcctggggggtccctgagactctcctgtgcagcctctggattcacctttaacaactatgccatgaactgggtccgccaggctccagggaaggggctggagtgggtctcagctattagtcgtcgtggtggtaacacattctacgcagactccgtgaagggccggttcaccatctccagagacaattccaagaacacgctgtatctccaaatgaacagcctgagagccgaggacacggccgtatattactgtgcgaaaggggagctactagaggactactactactacgctatggacgtctggggccaagggaccacggtcaccgtctcctca

SEQ ID NO: 28732 - protein, 123 aa, synthetic construct
  REGION 1..123: note = Description of Artificial Sequence: Synthetic polypeptide
EVQLLESGGGLVQPGGSLRLSCAASGFTFNNYAMNWVRQAPGKGLEWVSAISRRGGNTFYADSVKGRFTISRDNSKNTLYLQMNSLRAEDTAVYYCAKGELLEDYYYYAMDVWGQGTTVTVSS

SEQ ID NO: 28733 - DNA, 354 bp, synthetic construct
  misc_feature 1..354: note = Description of Artificial Sequence: Synthetic polynucleotide
  source 1..354: mol_type = other DNA
caggtgcagctggtggagtctgggggaggcgtggtccagcctgggaggtccctgagactctcctgtgcagcgtctggattcaccttcagcagctatggcatgcactgggtccgccaggctccaggcaaggggctggagtgggtggcagttatatggtatgatggaagtaataaatattatgcagactccgtgaagggccgattcaccatctccagagacaattccaagaacacgctatatctacaaatgaacagcctgagagccgaggacacggctgtgtattactgtgcgagagattcctccccctacggtatggacgtctggggccaagggaccacggtcaccgtctcctca

SEQ ID NO: 28734 - protein, 118 aa, synthetic construct
  REGION 1..118: note = Description of Artificial Sequence: Synthetic polypeptide
QVQLVESGGGVVQPGRSLRLSCAASGFTFSSYGMHWVRQAPGKGLEWVAVIWYDGSNKYYADSVKGRFTISRDNSKNTLYLQMNSLRAEDTAVYYCARDSSPYGMDVWGQGTTVTVSS

SEQ ID NO: 28735 - DNA, 390 bp, synthetic construct
  misc_feature 1..390: note = Description of Artificial Sequence: Synthetic polynucleotide
  source 1..390: mol_type = other DNA
caggtgcagctggtggagtctgggggaggcgtggtccagcctgggaggtccctgagactctcctgtgcagcgtctggattcaccttcagtggctatggcatgcactgggtccgccaggctccaggcaaggggctggagtgggtggcaattatatggtatgatggaagtaaaaaatacaatgcagactccgtgaagggccgattcaccatctccagagacaattccaagaacacgctgtatctgcaaatgaacagcctgagagccgaggacacggctgtgtattactgtgcgagagatagggtatattgtagtagtaccagctgctccccttactactactactacggtatggacgtctggggccaagggaccacggtcaccgtctcctca

SEQ ID NO: 28736 - protein, 130 aa, synthetic construct
  REGION 1..130: note = Description of Artificial Sequence: Synthetic polypeptide
QVQLVESGGGVVQPGRSLRLSCAASGFTFSGYGMHWVRQAPGKGLEWVAIIWYDGSKKYNADSVKGRFTISRDNSKNTLYLQMNSLRAEDTAVYYCARDRVYCSSTSCSPYYYYYGMDVWGQGTTVTVSS

SEQ ID NO: 28737 - DNA, 372 bp, synthetic construct
  misc_feature 1..372: note = Description of Artificial Sequence: Synthetic polynucleotide
  source 1..372: mol_type = other DNA
caggtgcagctggtgcagtctggggctgaggtgaagaagcctggggcctcagtgaaggtctcctgcaaggcttctggatacaccttcaccggctactatatgcactgggtgcgacaggcccctggacaagggcttgagtggatgggatggatcaaccctaacagtgatggcactaactatgcacagaagtttcagggcagggtcaccatgaccagggacacgtccatcagcacagcctacatggagctgaacaggctgagatctgacgacacggccgtgtattactgtgcgagggggttttactatggttcggggagttattataacgacctcgacccctggggccagggaaccctggtcaccgtctcctca

SEQ ID NO: 28738 - protein, 124 aa, synthetic construct
  REGION 1..124: note = Description of Artificial Sequence: Synthetic polypeptide
QVQLVQSGAEVKKPGASVKVSCKASGYTFTGYYMHWVRQAPGQGLEWMGWINPNSDGTNYAQKFQGRVTMTRDTSISTAYMELNRLRSDDTAVYYCARGFYYGSGSYYNDLDPWGQGTLVTVSS

SEQ ID NO: 28739 - DNA, 369 bp, synthetic construct
  misc_feature 1..369: note = Description of Artificial Sequence: Synthetic polynucleotide
  source 1..369: mol_type = other DNA
caggtgcacctggtggagtctgggggaggcgtggtccagcctgggaggtccctgagactctcctgtgcagcctctggattcaccttcagttactatggcatgcactgggtccgccaggctccaggcaaggggctggagtgggtggcagttatatcatatgatggaagtaataaatactatgcagactccgtgaagggccgattcaccatctccagagacaattccaagaacacgctgcatctgcaaatgaacagcctgagagctgaggacacggctgtgtattactgtgcgagagatcggagggggggctatggagtccccgatgcttttgatatctggggccaagggacaatggtcaccgtctcttca

SEQ ID NO: 28740 - protein, 123 aa, synthetic construct
  REGION 1..123: note = Description of Artificial Sequence: Synthetic polypeptide
QVHLVESGGGVVQPGRSLRLSCAASGFTFSYYGMHWVRQAPGKGLEWVAVISYDGSNKYYADSVKGRFTISRDNSKNTLHLQMNSLRAEDTAVYYCARDRRGGYGVPDAFDIWGQGTMVTVSS

SEQ ID NO: 28741 - DNA, 390 bp, synthetic construct
  misc_feature 1..390: note = Description of Artificial Sequence: Synthetic polynucleotide
  source 1..390: mol_type = other DNA
caggtgcagttggtggagtctgggggaggcgtggtccagactgggaggtccctgagactctcctgtgcagcctctggattcaccttcagtggctatggcatgcactgggtccgccaggctccaggcaaggggctggagtgggtgtcagttatatcatatgatggaagtaataaatactatgcagactccgtgaagggccgattcaccatctccagagacaattccaagaacacgctgtatctgcaaatgaacagcctgagagctgaggacacggctgtgtattactgtgcgagagatcgggtctattgtagtagtaccagctgcgtcccttactacgactactacggtatggacgtctggggccaagggaccacggtcaccgtctcctca

SEQ ID NO: 28742 - protein, 130 aa, synthetic construct
  REGION 1..130: note = Description of Artificial Sequence: Synthetic polypeptide
QVQLVESGGGVVQTGRSLRLSCAASGFTFSGYGMHWVRQAPGKGLEWVSVISYDGSNKYYADSVKGRFTISRDNSKNTLYLQMNSLRAEDTAVYYCARDRVYCSSTSCVPYYDYYGMDVWGQGTTVTVSS

SEQ ID NO: 28743 - DNA, 387 bp, synthetic construct
  misc_feature 1..387: note = Description of Artificial Sequence: Synthetic polynucleotide
  source 1..387: mol_type = other DNA
caggtgcagctggtggagtctgggggaggcgtggtccagcctgggaggtccctgagactctcctgtgcagcgtctggattcaccttcagtagctatggcatgcactgggtccgccaggctccaggcaaggggctggagtgggtggcagttatatggtatgatggaagtaataaatactatgcagactccgtgaagggccgattcaccatctccagagacaattccaagaacacgctgtatctgcaaatgaacagcctgagagccgaggacacggctgtgtattactgtgcgagagaggattcctattgtagtagtaccagctgcccttactactactactacggtatggacgtctggggccaagggaccacggtcaccgtctcctca

SEQ ID NO: 28744 - protein, 129 aa, synthetic construct
  REGION 1..129: note = Description of Artificial Sequence: Synthetic polypeptide
QVQLVESGGGVVQPGRSLRLSCAASGFTFSSYGMHWVRQAPGKGLEWVAVIWYDGSNKYYADSVKGRFTISRDNSKNTLYLQMNSLRAEDTAVYYCAREDSYCSSTSCPYYYYYGMDVWGQGTTVTVSS

SEQ ID NO: 28745 - DNA, 372 bp, synthetic construct
  misc_feature 1..372: note = Description of Artificial Sequence: Synthetic polynucleotide
  source 1..372: mol_type = other DNA
caggtgcagctggtgcagtctggggctgaggtgaagaagcctggggcctcagtgaaggtctcctgcaaggcttctggatacaccttcaccggctactatatgcactgggtgcgacaggcccctggacaagggcttgagtggatgggatggatcaaccctaacagtggtggcacaaactatgcacagaagtttcagggcagggtcaccatgaccagggacacgtccatcagcacagcctacatggagctgagcaggctgagatctgacgacacggccgtgtattactgtgcgagggggtattactatggttcggggagttattataacgacctcgacccctggggtcagggaaccctggtcaccgtctcctca

SEQ ID NO: 28746 - protein, 124 aa, synthetic construct
  REGION 1..124: note = Description of Artificial Sequence: Synthetic polypeptide
QVQLVQSGAEVKKPGASVKVSCKASGYTFTGYYMHWVRQAPGQGLEWMGWINPNSGGTNYAQKFQGRVTMTRDTSISTAYMELSRLRSDDTAVYYCARGYYYGSGSYYNDLDPWGQGTLVTVSS

SEQ ID NO: 28747 - DNA, 372 bp, synthetic construct
  misc_feature 1..372: note = Description of Artificial Sequence: Synthetic polynucleotide
  source 1..372: mol_type = other DNA
gaggtgcagctgttggagtctgggggaggcttggtacagccgggggggtccctgagactctcctgtgcagcctctggattcacctttagcagctatgccatgagctgggtccgccaggctccagggaaggggctggagtgggtctcaactcttagtggtcgtggtggtagcacatactacgcagactccgtgaagggccggtccaccatctccagagacaattccaagaacacgctgtatctgcaaatgagcagcctgagagccgaggacacggccgtatattactgtgcgaaatggggacgtggatacagctatgagtactactacggtatggacgtctggggccaagggaccacggtcaccgtctcctca

SEQ ID NO: 28748 - protein, 124 aa, synthetic construct
  REGION 1..124: note = Description of Artificial Sequence: Synthetic polypeptide
EVQLLESGGGLVQPGGSLRLSCAASGFTFSSYAMSWVRQAPGKGLEWVSTLSGRGGSTYYADSVKGRSTISRDNSKNTLYLQMSSLRAEDTAVYYCAKWGRGYSYEYYYGMDVWGQGTTVTVSS

SEQ ID NO: 28749 - DNA, 372 bp, synthetic construct
  misc_feature 1..372: note = Description of Artificial Sequence: Synthetic polynucleotide
  source 1..372: mol_type = other DNA
caggtgcaactggtgcagtctggggctgaggtgaagaagcctggggcctcagtgaaggtctcctgcaaggcttctggatacaccttcaccggctactatatgcactgggtgcgacaggcccctggacaagggcttgagtggatgggatggatcaaccctaacagtggtggcacaaactctgcacagaagtttcagggcagggtcaccatgaccagggacacgtccatcagcacagcctacatggagctgagcaggctgagatctgacgacacggccgtatattactgtgcgaggtcctattactatggttcggggagttattataacgagtttgactactggggccagggaaccctggtcaccgtctcctca

SEQ ID NO: 28750 - protein, 124 aa, synthetic construct
  REGION 1..124: note = Description of Artificial Sequence: Synthetic polypeptide
QVQLVQSGAEVKKPGASVKVSCKASGYTFTGYYMHWVRQAPGQGLEWMGWINPNSGGTNSAQKFQGRVTMTRDTSISTAYMELSRLRSDDTAVYYCARSYYYGSGSYYNEFDYWGQGTLVTVSS

SEQ ID NO: 28751 - DNA, 354 bp, synthetic construct
  misc_feature 1..354: note = Description of Artificial Sequence: Synthetic polynucleotide
  source 1..354: mol_type = other DNA
cagatcaccttgaaggagtctggtcttacgctgatgaaacccacacagaccctcacgctgacctgcaccttctctgggttctcactcagcactggtggagtgggtgtgggctggatccgtcagcccccaggaaaggccctggagtggcttgcactcatttattggcatgatgataagcgctacagtccatctctgaggagcaggctcaccatcaccaaggacacctccaaaaaccaggtggtccttacaatgaccaacatggaccctgtggacacagccacatattactgtgcacgtatagtagcagttgcctttgactactggggccagggaaccctgatcaccgtctcctca

SEQ ID NO: 28752 - protein, 118 aa, synthetic construct
  REGION 1..118: note = Description of Artificial Sequence: Synthetic polypeptide
QITLKESGLTLMKPTQTLTLTCTFSGFSLSTGGVGVGWIRQPPGKALEWLALIYWHDDKRYSPSLRSRLTITKDTSKNQVVLTMTNMDPVDTATYYCARIVAVAFDYWGQGTLITVSS

SEQ ID NO: 28753 - DNA, 387 bp, synthetic construct
  misc_feature 1..387: note = Description of Artificial Sequence: Synthetic polynucleotide
  source 1..387: mol_type = other DNA
caggtgcagttggtgcagtctggggctgaggtgaagaagcctggggcctcagtgaaggtctcctgcaaggcttctggatacaccttcaccggctactatatgcactgggtgcgacaggcccctggacaagggcttgagtggatgggatggatcaaccctaacagtggtggcacaaagtatgcacagaagtttcagggcagggtcaccatgaccagggacacgtccatcagcacagcctacatggagctgaacaggctgagatctgacgacacggccgtgtattactgtgcgagagagaggtgtagtactaccagttgctatttaggaattacgggctactacggtatggacgtctggggccaagggaccacggtcaccgtctcctca

SEQ ID NO: 28754 - protein, 129 aa, synthetic construct
  REGION 1..129: note = Description of Artificial Sequence: Synthetic polypeptide
QVQLVQSGAEVKKPGASVKVSCKASGYTFTGYYMHWVRQAPGQGLEWMGWINPNSGGTKYAQKFQGRVTMTRDTSISTAYMELNRLRSDDTAVYYCARERCSTTSCYLGITGYYGMDVWGQGTTVTVSS

SEQ ID NO: 28755 - DNA, 354 bp, synthetic construct
  misc_feature 1..354: note = Description of Artificial Sequence: Synthetic polynucleotide
  source 1..354: mol_type = other DNA
cagatcaccttgagggagtctggtcctacgctggtgaaacccacacagaccctcacgctgacctgcaccttctctgggttctcactcagcactagtggagtgggtgtgggctggatccgtcagcccccaggaaaggccctggagtggcttgcactcatttattggaatgatgataagcgctacagcccatctctgaagagcagactcaccatcaccaaggacacctccaaaaaccaggtggtccttacaatgaccaacatggaccctgtggacacagccacatattactgtgcacacttaatagcagtgacttttgactcctggggccagggatccctggtcaccgtctcctca

SEQ ID NO: 28756 - protein, 118 aa, synthetic construct
  REGION 1..118: note = Description of Artificial Sequence: Synthetic polypeptide
QITLRESGPTLVKPTQTLTLTCTFSGFSLSTSGVGVGWIRQPPGKALEWLALIYWNDDKRYSPSLKSRLTITKDTSKNQVVLTMTNMDPVDTATYYCAHLIAVTFDSWGQGSLVTVSS

SEQ ID NO: 28757 - DNA, 378 bp, synthetic construct
  misc_feature 1..378: note = Description of Artificial Sequence: Synthetic polynucleotide
  source 1..378: mol_type = other DNA
caggtgcagctggtggagtctgggggaggcgtggtccagcctgggaggtccctgagactctcctgtgcagcgtctggattcaccttcagtagctatggcatgcactgggtccgccaggctccaggcaaggggctggagtgggtggcagttatatggaatgatggaagtaataaatactatgcagactccgtgaagggccgattcaccatctccagagacaattccaagaacacgctgtatctgcaaatgaacagcctgagagccgaggacacggctgtgtattactgtgcgagagatcgggtagcagcagctggtaccccctactactactacggtatggacgtctggggccaagggaccacggtcaccgtctcctca

SEQ ID NO: 28758 - protein, 126 aa, synthetic construct
  REGION 1..126: note = Description of Artificial Sequence: Synthetic polypeptide
QVQLVESGGGVVQPGRSLRLSCAASGFTFSSYGMHWVRQAPGKGLEWVAVIWNDGSNKYYADSVKGRFTISRDNSKNTLYLQMNSLRAEDTAVYYCARDRVAAAGTPYYYYGMDVWGQGTTVTVSS

SEQ ID NO: 28759 - DNA, 390 bp, synthetic construct
  misc_feature 1..390: note = Description of Artificial Sequence: Synthetic polynucleotide
  source 1..390: mol_type = other DNA
gaggtgcagctggtggagtctgggggaggcttggtaaagcctggggggtcccttagactctcctgtgcagcctctggattcactttcagtaacgcctggatgaactgggtccgccaggctccagggaaggggctggagtgggttggccgtattaaaagcaaaactgatggtgggacaacagactacgctgcacccgtgaaaggcagattcaccatctcaagagatgattcaaaaaacacgctgtatctgcaaatgcacagcctgaaaaccgaggacacagccgtgtattactgtaccacagatacgggtcctatagcagctcgtctcgcttactactactactacgctatggacgtctggggccaagggaccacggtcaccgtctcctca

SEQ ID NO: 28760 - protein, 130 aa, synthetic construct
  REGION 1..130: note = Description of Artificial Sequence: Synthetic polypeptide
EVQLVESGGGLVKPGGSLRLSCAASGFTFSNAWMNWVRQAPGKGLEWVGRIKSKTDGGTTDYAAPVKGRFTISRDDSKNTLYLQMHSLKTEDTAVYYCTTDTGPIAARLAYYYYYAMDVWGQGTTVTVSS

SEQ ID NO: 28761 - DNA, 384 bp, synthetic construct
  misc_feature 1..384: note = Description of Artificial Sequence: Synthetic polynucleotide
  source 1..384: mol_type = other DNA
gaggtgcagctgttggagtctgggggaggcttggtacagcctgaggggtccctgagactctcctgtgcagcctctggattcacctttagcagctatgccatgagctgggtccgccaggctccagggaaggggctggagtgggtctcaggtattagtggtagtggtggtagcacatactacgcagactccgtgaagggccggttcaccatctccagagacaattccaagaacacgctgtgtctgcacatgaacagcctgagagccgaggacacggccgtatattactgtgcgaaagaatattgtggtggtgactgctattccccttactactactactacggtatggacgtctggggccaagggaccacggtcaccgtctcctca

SEQ ID NO: 28762 - protein, 128 aa, synthetic construct
  REGION 1..128: note = Description of Artificial Sequence: Synthetic polypeptide
EVQLLESGGGLVQPEGSLRLSCAASGFTFSSYAMSWVRQAPGKGLEWVSGISGSGGSTYYADSVKGRFTISRDNSKNTLCLHMNSLRAEDTAVYYCAKEYCGGDCYSPYYYYYGMDVWGQGTTVTVSS

SEQ ID NO: 28763 - DNA, 390 bp, synthetic construct
  misc_feature 1..390: note = Description of Artificial Sequence: Synthetic polynucleotide
  source 1..390: mol_type = other DNA
caggtgcagctggtggagtctgggggaggcgtggtccagcctgggaggtccctgagactctcctgtgcagcgtctggattcaccttcagtggctatggcctgcactgggtccgccaggctccaggcaaggggctggagtgggtggcacttatatggtatgatggaaataatacatactatgcagactccgtgaagggccgattcaccatctccagagacaattccaagaacacgctgtatctgcaaatgaacagcctgagagccgaagacacggctgtgtattactgtgcgagagatagggtatattgtagtagtaccagctgctccccttactactactactacggtatggacgtctggggccaagggaccacggtcaccgtctcctca

SEQ ID NO: 28764 - protein, 130 aa, synthetic construct
  REGION 1..130: note = Description of Artificial Sequence: Synthetic polypeptide
QVQLVESGGGVVQPGRSLRLSCAASGFTFSGYGLHWVRQAPGKGLEWVALIWYDGNNTYYADSVKGRFTISRDNSKNTLYLQMNSLRAEDTAVYYCARDRVYCSSTSCSPYYYYYGMDVWGQGTTVTVSS

SEQ ID NO: 28765 - DNA, 372 bp, synthetic construct
  misc_feature 1..372: note = Description of Artificial Sequence: Synthetic polynucleotide
  source 1..372: mol_type = other DNA
caggtgaagctggtgcagtctggggctgaggtgaagaagcctggggcctcagtgaaggtctcctgcaaggcttcaggatacaccttcaccggctactatatgcactgggtgcgacaggcccctggacaagggcttgagtggatgggatggatcaaccctaaaagtggtggcacaaattatgcacagaagtttcagggcagggtcaccatgaccagggacacgtccatcagcacagtctacatggagccgagcaggctgagatctgacgacacggccgtgtattactgtgcgagagtgtattaccatggttcggggagttattataacgagtttgattattggggccagggaaccctggtcaccgtctcctca

SEQ ID NO: 28766 - protein, 124 aa, synthetic construct
  REGION 1..124: note = Description of Artificial Sequence: Synthetic polypeptide
QVKLVQSGAEVKKPGASVKVSCKASGYTFTGYYMHWVRQAPGQGLEWMGWINPKSGGTNYAQKFQGRVTMTRDTSISTVYMEPSRLRSDDTAVYYCARVYYHGSGSYYNEFDYWGQGTLVTVSS

SEQ ID NO: 28767 - DNA, 384 bp, synthetic construct
  misc_feature 1..384: note = Description of Artificial Sequence: Synthetic polynucleotide
  source 1..384: mol_type = other DNA
gaggtgcagctgttggagtctgggggaggcttggtacagcctgaggggtccctgagactctcctgtgcagcctctggattcacctttagcagctatgccatgagctgggtccgccaggctccagggaaggggctggagtgggtctcagctattagtggtagtggtagtagcacatactacgcagactccgtgaagggccggttcaccatctccagagacaattccaagaacacgctgtgtctgcaaatgaacagcctgagagccgaggacacggccgtatattactgtgcgaaagaatattgtggtggtgactgctattccccttactactactactacggtatggacgtctggggccaagggaccacggtcaccgtctcctca

SEQ ID NO: 28768 - protein, 128 aa, synthetic construct
  REGION 1..128: note = Description of Artificial Sequence: Synthetic polypeptide
EVQLLESGGGLVQPEGSLRLSCAASGFTFSSYAMSWVRQAPGKGLEWVSAISGSGSSTYYADSVKGRFTISRDNSKNTLCLQMNSLRAEDTAVYYCAKEYCGGDCYSPYYYYYGMDVWGQGTTVTVSS

SEQ ID NO: 28769 - DNA, 390 bp, synthetic construct
  misc_feature 1..390: note = Description of Artificial Sequence: Synthetic polynucleotide
  source 1..390: mol_type = other DNA
caggtgcagttggtggagtctgggggaggcgtggtccagcctgggaggtccctgagactctcctgtgcagcgtctggattcaccttcggtagctatggcatgcactgggtccgccaggctccaggcaaggggctggagtgggtggcacttatatggtatgatggaagtaataaatactatgcagactccgtgaagggccgattcaccatctccagagacaattccaagaacacgctgtatctgcaaatgaacagcctgagagccgaggacacggctgtgtattactgtgcgagagatcgggtatcttgtagtagttccagctgctatccttactactactactacggtatggacgtctggggccaagggaccacggtcaccgtctcctca

SEQ ID NO: 28770 - protein, 130 aa, synthetic construct
  REGION 1..130: note = Description of Artificial Sequence: Synthetic polypeptide
QVQLVESGGGVVQPGRSLRLSCAASGFTFGSYGMHWVRQAPGKGLEWVALIWYDGSNKYYADSVKGRFTISRDNSKNTLYLQMNSLRAEDTAVYYCARDRVSCSSSSCYPYYYYYGMDVWGQGTTVTVSS

SEQ ID NO: 28771 - DNA, 372 bp, synthetic construct
  misc_feature 1..372: note = Description of Artificial Sequence: Synthetic polynucleotide
  source 1..372: mol_type = other DNA
caggtgcagctggtgcagtctggggctgaggtgaagaagcctggggcctcagtgaaggtctcctgcaaggcttctggatacaccttcaccggctactatatgcactgggtgcgacaggcccctggacaagggcttgagtggatgggatggatcaaccctaacagtggtggcgcaaactatgcacagaagtttcagggcagggtcaccatgaccagggacacgtccatcagcacagcctacatggagctgagcaggctgagatctgacgacacggccgtgtatttctgtgcgaggtcgttttactatggttcggggacttattataacgagtttgactactggggccagggaaccctggtcaccgtctcctca

SEQ ID NO: 28772 - protein, 124 aa, synthetic construct
  REGION 1..124: note = Description of Artificial Sequence: Synthetic polypeptide
QVQLVQSGAEVKKPGASVKVSCKASGYTFTGYYMHWVRQAPGQGLEWMGWINPNSGGANYAQKFQGRVTMTRDTSISTAYMELSRLRSDDTAVYFCARSFYYGSGTYYNEFDYWGQGTLVTVSS

SEQ ID NO: 28773 - DNA, 372 bp, synthetic construct
  misc_feature 1..372: note = Description of Artificial Sequence: Synthetic polynucleotide
  source 1..372: mol_type = other DNA
caggtgcagctggtgcagtctggggctgaggtgaagaagcctggggcctcagtgaaggtctcctgcaaggcttctggatacaccttcaccgggcactatatgcactgggtgcgacaggcccctggacaaggacttgagtggatgggatggatcaaccctaacagtggtggcacaaactatgcacagaagtttcagggcagggtcaccatgaccagggacacgtccatcagcacagcctacatggagctgagcaggctgagatctgacgacacggccgtgtattactgtgcgaggtcgtattactatggttcggggacttattataacgagtttgactactggggccagggaaccctggtcaccgtctcctca

SEQ ID NO: 28774 - protein, 124 aa, synthetic construct
  REGION 1..124: note = Description of Artificial Sequence: Synthetic polypeptide
QVQLVQSGAEVKKPGASVKVSCKASGYTFTGHYMHWVRQAPGQGLEWMGWINPNSGGTNYAQKFQGRVTMTRDTSISTAYMELSRLRSDDTAVYYCARSYYYGSGTYYNEFDYWGQGTLVTVSS

SEQ ID NO: 28775 - DNA, 372 bp, synthetic construct
  misc_feature 1..372: note = Description of Artificial Sequence: Synthetic polynucleotide
  source 1..372: mol_type = other DNA
caggtgcagctggtgcagtctggggctgaggtgaagaagcctggggcctcagtgaaggtctcctgcaaggcttctggatacaccttcaccggctactatatgcactgggtgcgacaggcccctggacaagggcttgagtggatgggatggatcaaccctaacagtggtggcacaaactatgcacagaagtttcagggcagggtcaccatgaccagggacacgtccatcagcacagcctacatggagctgagcaggctgagatcggacgacacggccgtgtattactgtgcgagagcgaattactatggttcggggagttattataacgactttgactactggggccagggaaccctggtcaccgtctcctca

SEQ ID NO: 28776 - protein, 124 aa, synthetic construct
  REGION 1..124: note = Description of Artificial Sequence: Synthetic polypeptide
QVQLVQSGAEVKKPGASVKVSCKASGYTFTGYYMHWVRQAPGQGLEWMGWINPNSGGTNYAQKFQGRVTMTRDTSISTAYMELSRLRSDDTAVYYCARANYYGSGSYYNDFDYWGQGTLVTVSS

SEQ ID NO: 28777 - DNA, 354 bp, synthetic construct
  misc_feature 1..354: note = Description of Artificial Sequence: Synthetic polynucleotide
  source 1..354: mol_type = other DNA
cagatcaccttgaaggagtctggtcctacgctggtgaaacccacacagaccctcacgctgacctgcaccttctctggattctcactcagcactggtggagtgggtgtgggctggatccgtcagcccccaggaaaggccctggagtggcttgcactcatttattggcatgatgataagcgctacagtccctctctgaagagcaggctcgccatcaccaaggacacctccaaaaaccaggtggtccttacaattaccaacatggaccctgtggacacagccacatattactgtgctcacttaatagcagtggcttttgactattggggccagggaaccctggtcaccgtctcctca

SEQ ID NO: 28778 - protein, 118 aa, synthetic construct
  REGION 1..118: note = Description of Artificial Sequence: Synthetic polypeptide
QITLKESGPTLVKPTQTLTLTCTFSGFSLSTGGVGVGWIRQPPGKALEWLALIYWHDDKRYSPSLKSRLAITKDTSKNQVVLTITNMDPVDTATYYCAHLIAVAFDYWGQGTLVTVSS

SEQ ID NO: 28779 - DNA, 372 bp, synthetic construct
  misc_feature 1..372: note = Description of Artificial Sequence: Synthetic polynucleotide
  source 1..372: mol_type = other DNA
caggtgcagctggtgcagtctggggctgaggtgaagaagcctggggcctcagtgaaggtctcctgcaaggcttctggatacaccttcagcggctactatatgcactgggtgcgacaggcccctggacaaggacttgagtggatgggatggatcaaccctaacaatggtggcacacactatgcacagaagtttcagggcagggtcaccatgaccagggacacgtccatccgcacagcctccatggagctgagcaggctgagatctgacgacacggccgtgtatttctgtgcgaggggatattattatgcttcggggagttattataacgacctcgacccctggggccagggaaccctggtcaccgtctcctca

SEQ ID NO: 28780 - protein, 124 aa, synthetic construct
  REGION 1..124: note = Description of Artificial Sequence: Synthetic polypeptide
QVQLVQSGAEVKKPGASVKVSCKASGYTFSGYYMHWVRQAPGQGLEWMGWINPNNGGTHYAQKFQGRVTMTRDTSIRTASMELSRLRSDDTAVYFCARGYYYASGSYYNDLDPWGQGTLVTVSS

SEQ ID NO: 28781 - DNA, 372 bp, synthetic construct
  misc_feature 1..372: note = Description of Artificial Sequence: Synthetic polynucleotide
  source 1..372: mol_type = other DNA
caggtgcagctggtgcagtctggggctgaggtgaagaagcctggggcctcagtgaaggtctcctgcaaggcttctggatacaccttcaccggctactatatgtactgggtgcgacaggcccctggacaagggcttgagtggatgggatggatcaaccctaacagtggtggcacaaactatgcacagaagtttcagggcagggtcaccatgaccagggacacgtccatcagcacagcctacatggagctgagcaggctgagatctgacgacacggccgtttattactgtgcgaggtcgtatttttatggttcggggagttattataacgagtttgactactggggccagggaaccctggtcaccgtctcctca

SEQ ID NO: 28782 - protein, 124 aa, synthetic construct
  REGION 1..124: note = Description of Artificial Sequence: Synthetic polypeptide
QVQLVQSGAEVKKPGASVKVSCKASGYTFTGYYMYWVRQAPGQGLEWMGWINPNSGGTNYAQKFQGRVTMTRDTSISTAYMELSRLRSDDTAVYYCARSYFYGSGSYYNEFDYWGQGTLVTVSS

SEQ ID NO: 28783 - DNA, 354 bp, synthetic construct
  misc_feature 1..354: note = Description of Artificial Sequence: Synthetic polynucleotide
  source 1..354: mol_type = other DNA
cagatcaccttgaaggagtctggtccttcgctggtgaagcccacacagaccctcacgctgacctgcaccttctctggattctcactcagcactagtggagtgggtgtgggctggatccgtcagccccccggaaaggccctggagtggcttgcactcatttattgggatgatgataagcgctacagcccatctctgaagagcaggctcaccatcaccaaggacacctccaaaaaccaggtggtcctgacaatgaccaacatggaccctgtggacacagccacatattcctgtgcacacattatagcagtggcttttgactactggggccagggaaccctggtcaccgtctcctca

SEQ ID NO: 28784 - protein, 118 aa, synthetic construct
  REGION 1..118: note = Description of Artificial Sequence: Synthetic polypeptide
QITLKESGPSLVKPTQTLTLTCTFSGFSLSTSGVGVGWIRQPPGKALEWLALIYWDDDKRYSPSLKSRLTITKDTSKNQVVLTMTNMDPVDTATYSCAHIIAVAFDYWGQGTLVTVSS

SEQ ID NO: 28785 - DNA, 354 bp, synthetic construct
  misc_feature 1..354: note = Description of Artificial Sequence: Synthetic polynucleotide
  source 1..354: mol_type = other DNA
cagatcaccttgaaggagtctggtcctacgctggtgaaacccacacagaccctcacgctgacctgcaccttctctgggttctccctcaacactggtggagtgggtgtgggctggatccgtcagcccccaggaaaggccctggagtggcttgcactcatttattggaatgatgatgagcgctacagcccatctctgaagagcaggctcaccatcaccaaggacacctccaaaaaccaggtggtccttacaatgaccaacatggaccctttggacacagcctcatattactgtgcacacttaatagcagtttcctttgactactggggccagggagccctggtcaccgtctcctca

SEQ ID NO: 28786 - protein, 118 aa, synthetic construct
  REGION 1..118: note = Description of Artificial Sequence: Synthetic polypeptide
QITLKESGPTLVKPTQTLTLTCTFSGFSLNTGGVGVGWIRQPPGKALEWLALIYWNDDERYSPSLKSRLTITKDTSKNQVVLTMTNMDPLDTASYYCAHLIAVSFDYWGQGALVTVSS

SEQ ID NO: 28787 - DNA, 372 bp, synthetic construct
  misc_feature 1..372: note = Description of Artificial Sequence: Synthetic polynucleotide
  source 1..372: mol_type = other DNA
caggtgaagctggtgcagtctggggctgaggtgaagaagcctggggcctcagtgaaggtctcctgcaaggcttcaggatacaccttcaccggctactatatgcactgggtgcgacaggcccctggacaagggcttgagtggatgggatggatcaaccctaacagtggtggcacaaactatgcacagaagtttcagggcagggtcaccatgaccagggacacgtccatcagcacagcctacatggagctgagcaggctgagatctgacgacacggccgtgtattactgtgcgagagtgtattactatggttcggggagttattataacgagtttgactactggggccagggaaccctggtcaccgtctcctca

SEQ ID NO: 28788 - protein, 124 aa, synthetic construct
  REGION 1..124: note = Description of Artificial Sequence: Synthetic polypeptide
QVKLVQSGAEVKKPGASVKVSCKASGYTFTGYYMHWVRQAPGQGLEWMGWINPNSGGTNYAQKFQGRVTMTRDTSISTAYMELSRLRSDDTAVYYCARVYYYGSGSYYNEFDYWGQGTLVTVSS

SEQ ID NO: 28789 - DNA, 372 bp, synthetic construct
  misc_feature 1..372: note = Description of Artificial Sequence: Synthetic polynucleotide
  source 1..372: mol_type = other DNA
caggtgcagctggtgcagtctggggctgaggtgaagaagcctggggcctcagtgaaggtctcctgcaaggcttctggatacaccttcaccggctactatatacactgggtgcgacaggcccctggacaaggacttgagtggatgggatggatcaaccctaacagtggtggcacagactatgcacagaagtttcagggcagggtcaccatgaccagggacacgtccatcagcacagcctacatggagctgagcaggctgagatctgacgacacggccgtgtattactgtgcgaggtcgtattactatggttcggggacttattataacgagtttgactactggggccagggaaccctggtcaccgtctcctca

SEQ ID NO: 28790 - protein, 124 aa, synthetic construct
  REGION 1..124: note = Description of Artificial Sequence: Synthetic polypeptide
QVQLVQSGAEVKKPGASVKVSCKASGYTFTGYYIHWVRQAPGQGLEWMGWINPNSGGTDYAQKFQGRVTMTRDTSISTAYMELSRLRSDDTAVYYCARSYYYGSGTYYNEFDYWGQGTLVTVSS

SEQ ID NO: 28791 - DNA, 372 bp, synthetic construct
  misc_feature 1..372: note = Description of Artificial Sequence: Synthetic polynucleotide
  source 1..372: mol_type = other DNA
gaggtgcagttgttggagtctgggggaggcttggtacagcctggggggtccctgagactctcctgtgcagcctctggattcacctttagcagctatgccatgagctgggtccgccaggctccagggaaggggctggagtgggtctcagctattagtggtggtggtggtagcacatactacgcagactccgtgaagggccgggtcaccatctccagagacaattccaagaacacgctgtatctgcaaatgaacagcctgagagccgaggacacggccgtatattactgtgcgaaatggggacgtggatacaactatgagtactactacggtatggacgtctggggccaagggaccacggtcaccgtctcctca

SEQ ID NO: 28792 - protein, 124 aa, synthetic construct
  REGION 1..124: note = Description of Artificial Sequence: Synthetic polypeptide
EVQLLESGGGLVQPGGSLRLSCAASGFTFSSYAMSWVRQAPGKGLEWVSAISGGGGSTYYADSVKGRVTISRDNSKNTLYLQMNSLRAEDTAVYYCAKWGRGYNYEYYYGMDVWGQGTTVTVSS

SEQ ID NO: 28793 - DNA, 387 bp, synthetic construct
  misc_feature 1..387: note = Description of Artificial Sequence: Synthetic polynucleotide
  source 1..387: mol_type = other DNA
caggtgcagctggtgcagtctggggctgaggtgaagaagcctggggcctcagtgaaggtctcctgcaaggcttctggatacaccttcaccggctactatgtgcactgggtgcgacaggcccctggacaagggcttgagtggatgggatggatcaaccctaacagtggtggcacaaactatgcacagaagtttcagggcagggtcaccatgaccagggacacgtccatcagcacagcctacatggagctgagcaggctgagatctgacgacacggccgtgtattactgtgcgagagagaggtgtagtactaccagctgctatttaggaattacgggctactacggtatggacgtctggggccaagggaccacggtcaccgtctcctca

SEQ ID NO: 28794 - protein, 129 aa, synthetic construct
  REGION 1..129: note = Description of Artificial Sequence: Synthetic polypeptide
QVQLVQSGAEVKKPGASVKVSCKASGYTFTGYYVHWVRQAPGQGLEWMGWINPNSGGTNYAQKFQGRVTMTRDTSISTAYMELSRLRSDDTAVYYCARERCSTTSCYLGITGYYGMDVWGQGTTVTVSS

SEQ ID NO: 28795 - DNA, 384 bp, synthetic construct
  misc_feature 1..384: note = Description of Artificial Sequence: Synthetic polynucleotide
  source 1..384: mol_type = other DNA
gaggtgcagctgttggagtctgggggaggcttggtacagcctgaggggtccctgagactctcctgtgcagcctctggattcacctttagcagctatgccatgagctgggtccgccaggctccagggaaggggctggagtgggtctcagctattagtggtagtggtggtagcacatactacgcagactccgtgaagggccggttcaccatctccagagacaattccaagaacacgctgtgtctgcaaatgaacagcctgagagccgaggacacggccgtatattactgtgcgaaagaatattgtggtggtgactgctattccccttactactactactacggtatggacgtctggggccaagggaccacggtcaccgtctcctca

SEQ ID NO: 28796 - protein, 128 aa, synthetic construct
  REGION 1..128: note = Description of Artificial Sequence: Synthetic polypeptide
EVQLLESGGGLVQPEGSLRLSCAASGFTFSSYAMSWVRQAPGKGLEWVSAISGSGGSTYYADSVKGRFTISRDNSKNTLCLQMNSLRAEDTAVYYCAKEYCGGDCYSPYYYYYGMDVWGQGTTVTVSS

SEQ ID NO: 28797 - DNA, 354 bp, synthetic construct
  misc_feature 1..354: note = Description of Artificial Sequence: Synthetic polynucleotide
  source 1..354: mol_type = other DNA
caggtgcagctggtgcagtctggggctgaggtgcagaagcctggggcctcagtgaaggtctcctgcaaggcttctggatacaccttcaccaattatgatatcaactgggtgcgacaggccactggacaagggcttgagtggatgggctggatgaaccctaacagtggtaacacaggctatgcacagaggttccagggcagagtcaccatgaccaggaacacctccataagcgcagcctacatggagctgagcagcctgagatctgaggacacggccgtatattactgtgcgagtagcagtggctggtactactttgactactggggccagggaaccctggtcaccgtctcctca

SEQ ID NO: 28798 - protein, 118 aa, synthetic construct
  REGION 1..118: note = Description of Artificial Sequence: Synthetic polypeptide
QVQLVQSGAEVQKPGASVKVSCKASGYTFTNYDINWVRQATGQGLEWMGWMNPNSGNTGYAQRFQGRVTMTRNTSISAAYMELSSLRSEDTAVYYCASSSGWYYFDYWGQGTLVTVSS

SEQ ID NO: 28799 - DNA, 372 bp, synthetic construct
  misc_feature 1..372: note = Description of Artificial Sequence: Synthetic polynucleotide
  source 1..372: mol_type = other DNA
caggtgaaactggtgcagtctggggctgaggtgaagaagcctggggcctcagtgaaggtctcctgcaaggcttcaggatacaccttcaccggctactatatgcactgggtgcgacaggcccctggacaagggcttgagtggatgggatggatcaaccctaacagtggtggcacaaactatgcacagaagtttcagggcagggtcaccatgaccagggacacgtccatcagcacagcctacatggagctgagcaggctgagatctgacgacacggccgtgtattactgtgcgagagtgtatttctatggttcggggagttattataacgagtttgactactggggccagggaaccctggtcaccgtctcctca

SEQ ID NO: 28800 - protein, 124 aa, synthetic construct
  REGION 1..124: note = Description of Artificial Sequence: Synthetic polypeptide
QVKLVQSGAEVKKPGASVKVSCKASGYTFTGYYMHWVRQAPGQGLEWMGWINPNSGGTNYAQKFQGRVTMTRDTSISTAYMELSRLRSDDTAVYYCARVYFYGSGSYYNEFDYWGQGTLVTVSS

SEQ ID NO: 28801 - DNA, 354 bp, synthetic construct
  misc_feature 1..354: note = Description of Artificial Sequence: Synthetic polynucleotide
  source 1..354: mol_type = other DNA
gaggtgcagctggtggagtctgggggaggcttggtaaagcctggggggtcccttagactctcctgtgcagcctctggagtcactttcagtaccgcctggatgaactgggtccgccaggctccagggaaggggctggagtgggttggccggattaaaaacaaaattgatggtgggacaacagactacgttgcacccgtgaaaggcagattcaccatctcaagagatgattcaaaaaacacgctgtatctgcaaatgaacagcctgaaaaccgaggacacagccgtatattactgtaccacagaaggctggaacacggactactggggccagggaaccctggtcaccgtctcctca

SEQ ID NO: 28802 - protein, 118 aa, synthetic construct
  REGION 1..118: note = Description of Artificial Sequence: Synthetic polypeptide
EVQLVESGGGLVKPGGSLRLSCAASGVTFSTAWMNWVRQAPGKGLEWVGRIKNKIDGGTTDYVAPVKGRFTISRDDSKNTLYLQMNSLKTEDTAVYYCTTEGWNTDYWGQGTLVTVSS

SEQ ID NO: 28803 - DNA, 357 bp, synthetic construct
  misc_feature 1..357: note = Description of Artificial Sequence: Synthetic polynucleotide
  source 1..357: mol_type = other DNA
cagctgcagctgcaggagtcgggcccaggactggtgaagccttcggagaccctgtccctcacctgcactgtctctggtggctccatcaacagaagtagttattactggggctggatccgccagcccccagggaaggggctggagtggattgggaatatctattatagtgggaccacctactacaacccgtccctcaagagtcgagtcaccatatccgtagacacgtccaagaaccagttctccctgaacctgagctctgtgaccgccgcagacacggctgtatattcctgtgcgagacatggaaaagactggggccttgactactggggccagggaaccctggtcaccgtctcctca

SEQ ID NO: 28804 - protein, 119 aa, synthetic construct
  REGION 1..119: note = Description of Artificial Sequence: Synthetic polypeptide
QLQLQESGPGLVKPSETLSLTCTVSGGSINRSSYYWGWIRQPPGKGLEWIGNIYYSGTTYYNPSLKSRVTISVDTSKNQFSLNLSSVTAADTAVYSCARHGKDWGLDYWGQGTLVTVSS

SEQ ID NO: 28805 - DNA, 357 bp, synthetic construct
  misc_feature 1..357: note = Description of Artificial Sequence: Synthetic polynucleotide
  source 1..357: mol_type = other DNA
cagctgcagctgcaggagtcgggcccaggactggtgaagccttcggagaccctgtccctcacctgcactgtctctggtggctccatcagcagaagtagttactactggggctggatccgccagcccccagggaaggggctggagtggattgggaatatctattatagtgggatcccctactacaacccgtccctcaagagtcgggtcaacatatccgtagacacgtccaagaaccagttctccctgaagctgaactctgtgaccgccgcagacacggctgtgtattactgtgcgagacacagcagcagctggtctcttgactactggggccagggaaccctagtcaccgtctcctca

SEQ ID NO: 28806 - protein, 119 aa, synthetic construct
  REGION 1..119: note = Description of Artificial Sequence: Synthetic polypeptide
QLQLQESGPGLVKPSETLSLTCTVSGGSISRSSYYWGWIRQPPGKGLEWIGNIYYSGIPYYNPSLKSRVNISVDTSKNQFSLKLNSVTAADTAVYYCARHSSSWSLDYWGQGTLVTVSS

SEQ ID NO: 28807 - DNA, 354 bp, synthetic construct
  misc_feature 1..354: note = Description of Artificial Sequence: Synthetic polynucleotide
  source 1..354: mol_type = other DNA
gaggtgcagctggtggagtctgggggaggcctggtcaagcctggggggtccctgagactctcctgtgcagcctctggattcaccttcagtagctataccatgaactgggtccgccaggctccagggaaggggctggagtgggtctcatccattagtggtagtggtagttacatatactacgcagactcagtgaagggccgattcaccatctccagagacaacgccaagaactcactgtatctgcaaatgaacagcctgagagccgaggacacggctgtgtattactgtgcgagagggagcagctcgtccgggtttgactactggggccagggaaccctggtcaccgtctcctca

SEQ ID NO: 28808 - protein, 118 aa, synthetic construct
  REGION 1..118: note = Description of Artificial Sequence: Synthetic polypeptide
EVQLVESGGGLVKPGGSLRLSCAASGFTFSSYTMNWVRQAPGKGLEWVSSISGSGSYIYYADSVKGRFTISRDNAKNSLYLQMNSLRAEDTAVYYCARGSSSSGFDYWGQGTLVTVSS

SEQ ID NO: 28809 - DNA, 363 bp, synthetic construct
  misc_feature 1..363: note = Description of Artificial Sequence: Synthetic polynucleotide
  source 1..363: mol_type = other DNA
gaggtgcaggtgttggagtctgggggaggcttggtacagccgggggggtccctgagactctcctgtgcagcctctggactcacctttagcagctctgccatgagctgggtccgccaggctccagggaaggggctggagtgggtctcagctattagtggtcgtggtggtaacacattctacacagactccgtgaagggccggttcaccatttccagagacaattccaagaacacgctgtatctgcaaatgaacagcctgagagccgaggacacggccgtatattactgtgcgaaactggggaaagactactactactacggtatggacgtctggggccaagggaccacggtcaccgtctcctca

SEQ ID NO: 28810 - protein, 121 aa, synthetic construct
  REGION 1..121: note = Description of Artificial Sequence: Synthetic polypeptide
EVQVLESGGGLVQPGGSLRLSCAASGLTFSSSAMSWVRQAPGKGLEWVSAISGRGGNTFYTDSVKGRFTISRDNSKNTLYLQMNSLRAEDTAVYYCAKLGKDYYYYGMDVWGQGTTVTVSS

SEQ ID NO: 28811 - DNA, 351 bp, synthetic construct
  misc_feature 1..351: note = Description of Artificial Sequence: Synthetic polynucleotide
  source 1..351: mol_type = other DNA
caggtgcagctggtggagtctgggggaggcgtggtccagcctgggaggtccctgagactctcctgtgcagcgtctggattcaccttcagtgactatggcatgcactgggtccgccaggctccaggcaaggggctggagtgggtggcagttatatggtttgatggaagtaataaatactatgcagactccgtgaagggccgattcaccatctccagagacaattccaagaacacgctgtatctgcaaatgaacagcctgagagccgaggacacggctgtgtatgactgtgcgagagatcttggctggacggaagagtactggggccagggaaccctggtcaccgtctcctca

SEQ ID NO: 28812 - protein, 117 aa, synthetic construct
  REGION 1..117: note = Description of Artificial Sequence: Synthetic polypeptide
QVQLVESGGGVVQPGRSLRLSCAASGFTFSDYGMHWVRQAPGKGLEWVAVIWFDGSNKYYADSVKGRFTISRDNSKNTLYLQMNSLRAEDTAVYDCARDLGWTEEYWGQGTLVTVSS

SEQ ID NO: 28813 - DNA, 357 bp, synthetic construct
  misc_feature 1..357: note = Description of Artificial Sequence: Synthetic polynucleotide
  source 1..357: mol_type = other DNA
caactgcagctgcaggagtcgggcccaggactggtgaagccttcggagaccctgtccctcacctgcactgtctctggtggctccatcagcaggagtagttactactggggctggatccgccagcccccagggaaggggctggagtggattgggaatatctattatagtggggccacctactacaacccgtccctcaagagtcgagtcaccatctccgtagacacgtccacgaaccagttctccctgaagctgagctctgtgaccgccgcagacacggctgtgtattactgtgcgagacatagcggcagctggtcccttgactactggggccagggaaccctggtcaccgtctcctca

SEQ ID NO: 28814 - protein, 119 aa, synthetic construct
  REGION 1..119: note = Description of Artificial Sequence: Synthetic polypeptide
QLQLQESGPGLVKPSETLSLTCTVSGGSISRSSYYWGWIRQPPGKGLEWIGNIYYSGATYYNPSLKSRVTISVDTSTNQFSLKLSSVTAADTAVYYCARHSGSWSLDYWGQGTLVTVSS

SEQ ID NO: 28815 - DNA, 357 bp, synthetic construct
  misc_feature 1..357: note = Description of Artificial Sequence: Synthetic polynucleotide
  source 1..357: mol_type = other DNA
cagctgcagctgcaggagtcgggcccaggactggtgaagccttcggagaccctgtccctcacctgcactgtctctggtggctccatcagcagaagtagttcctactggggctggatccgccagcccccagggaaggggctggagtggattggaaatatctattatagtgggagcgcctactacattccgtccctcaagagtcgagtcaccatatccgtagccacgtccaagaaccagttctccctgaacctgacctctgtgaccgccgcagacacggctgtgtattactgtgcgcgacacagcagcagctggtctcttgactgctggggccagggaaccctggtcaccgtctcctca

SEQ ID NO: 28816 - protein, 119 aa, synthetic construct
  REGION 1..119: note = Description of Artificial Sequence: Synthetic polypeptide
QLQLQESGPGLVKPSETLSLTCTVSGGSISRSSSYWGWIRQPPGKGLEWIGNIYYSGSAYYIPSLKSRVTISVATSKNQFSLNLTSVTAADTAVYYCARHSSSWSLDCWGQGTLVTVSS

SEQ ID NO: 28817 - DNA, 351 bp, synthetic construct
  misc_feature 1..351: note = Description of Artificial Sequence: Synthetic polynucleotide
  source 1..351: mol_type = other DNA
caggtgcagctggtggagtctgggggaggcgtggtccagcctgggaggtccctgagactctcctgtgcagcgtctggattcaccttcagtagctatggcatgcactgggtccgccaggctccaggcaaggggctggagtgggtggcagttatttggtatgatagaagtaataactactatgcagactccgtgaagggccgattcaccatctccagagacaattccaagaatacgctgtatctgcaaatgaacagcctgagagccgaggacacggctgtgtattactgtgcgagagaactggggttccggtctgactactggggccagggaaccctggtcaccgtctcctca

SEQ ID NO: 28818 - protein, 117 aa, synthetic construct
  REGION 1..117: note = Description of Artificial Sequence: Synthetic polypeptide
QVQLVESGGGVVQPGRSLRLSCAASGFTFSSYGMHWVRQAPGKGLEWVAVIWYDRSNNYYADSVKGRFTISRDNSKNTLYLQMNSLRAEDTAVYYCARELGFRSDYWGQGTLVTVSS

SEQ ID NO: 28819 - DNA, 351 bp, synthetic construct
  misc_feature 1..351: note = Description of Artificial Sequence: Synthetic polynucleotide
  source 1..351: mol_type = other DNA
caggtgcagctggtggagtctgggggaggcgtggtccagcctgggaggtccctgagactctcctgtccagcgtctggattcaccttcagtgactttggcatgcactgggtccgccaggctccaggcaaggggctggagtgggtggcagttatttggtatgaagaaaataatcaatactatgcagactccgtgaagggccgattcaccatctccagagacaattccaagaacacgctgtatctgcaaatgaacagcctgagagccgaggacacggctgtgtattactgtgcgagagagctggggttccggtctgactactggggccagggaaccctggtcaccgtctcctca

SEQ ID NO: 28820 - protein, 117 aa, synthetic construct
  REGION 1..117: note = Description of Artificial Sequence: Synthetic polypeptide
QVQLVESGGGVVQPGRSLRLSCPASGFTFSDFGMHWVRQAPGKGLEWVAVIWYEENNQYYADSVKGRFTISRDNSKNTLYLQMNSLRAEDTAVYYCARELGFRSDYWGQGTLVTVSS

SEQ ID NO: 28821 - DNA, 351 bp, synthetic construct
  misc_feature 1..351: note = Description of Artificial Sequence: Synthetic polynucleotide
  source 1..351: mol_type = other DNA
caggtgcagctggtggagtctgggggaggcgtggtccagcctgggaggtccctgagactctcctgtgcagcgtctggattcaccttcagtaactatggcatgcactgggtccgccaggctccaggcaaggggctggaatgggtggcagttatatggtatgaggaaagtaataaatactatacagactccgtgaagggccgattcaccatctccagagacaattccaagaacacgctgtatctgcaaatgaacagcctgagacccgaggacacggctgtgtattactgtgcgagagaagtgggattcactgaggactactggggccagggaaccctggtcaccgtctcctca

SEQ ID NO: 28822 - protein, 117 aa, synthetic construct
  REGION 1..117: note = Description of Artificial Sequence: Synthetic polypeptide
QVQLVESGGGVVQPGRSLRLSCAASGFTFSNYGMHWVRQAPGKGLEWVAVIWYEESNKYYTDSVKGRFTISRDNSKNTLYLQMNSLRPEDTAVYYCAREVGFTEDYWGQGTLVTVSS

SEQ ID NO: 28823 - DNA, 363 bp, synthetic construct
  misc_feature 1..363: note = Description of Artificial Sequence: Synthetic polynucleotide
  source 1..363: mol_type = other DNA
gaggtgcagctgttggagtctgggggaggcttggtacagcctggggggtccctgagactctcctgtgcagcctctgaattcacctttagcagctatgccatgagctgggtccgccaggctccagggaaggggctggagtgggtctcaattattagtggtcgtggtggtaacacattctacgcagactccgtgaagggccggttcaccatctccagagacaattccaagaacactctgtatctgcaaatgaacagcctgagagccgaggacacggccgtatattactgtgcgtcccgtgtagcagtggctggctcggaggcttttgctatctggggccaagggacaatggtcaccgtctcttca

SEQ ID NO: 28824 - protein, 121 aa, synthetic construct
  REGION 1..121: note = Description of Artificial Sequence: Synthetic polypeptide
EVQLLESGGGLVQPGGSLRLSCAASEFTFSSYAMSWVRQAPGKGLEWVSIISGRGGNTFYADSVKGRFTISRDNSKNTLYLQMNSLRAEDTAVYYCASRVAVAGSEAFAIWGQGTMVTVSS

SEQ ID NO: 28825 - DNA, 351 bp, synthetic construct
  misc_feature 1..351: note = Description of Artificial Sequence: Synthetic polynucleotide
  source 1..351: mol_type = other DNA
caggtgcagctggtggagtctgggggaggcgtggtccagcctgggaggtccctgagactctcctgtgcagcgtctggattcaccttcagtaactatggcatgcactgggtccgccaggctccaggcaaggggctggagtgggtggcagttatttggtatgaagaaaataatcaatactatgcagactccgtgaagggccgattcaccatctccagagacaattccaagaacacgctgtatctgcaaatgaacagcctgagagccgaggacacggctgtttattactgtacgagagaactggggttccggtctgactactggggccagggaaccctggtcaccgtctcctca

SEQ ID NO: 28826 - protein, 117 aa, synthetic construct
  REGION 1..117: note = Description of Artificial Sequence: Synthetic polypeptide
QVQLVESGGGVVQPGRSLRLSCAASGFTFSNYGMHWVRQAPGKGLEWVAVIWYEENNQYYADSVKGRFTISRDNSKNTLYLQMNSLRAEDTAVYYCTRELGFRSDYWGQGTLVTVSS

SEQ ID NO: 28827 - DNA, 351 bp, synthetic construct
  misc_feature 1..351: note = Description of Artificial Sequence: Synthetic polynucleotide
  source 1..351: mol_type = other DNA
caggtgcagctggtggagtctgggggaggcgtggtccagcctgggaggtccctgagactctcctgtgcagcgtctggattcaccttcagtgactatggcatgcactgggtccgccaggctccaggcaaggggctggagtgggtggcagttatttggtatgaagacaataatcaatactatgcagactccgtgaagggccgattcaccatctccagagacaattccaagaacacgctgtatctgcaaatgaacagcctgagagccgaggacacggctgtgtattactgtgcgagagaactggggttccggtctgactactggggccagggaaccctggtcaccgtctcctca

SEQ ID NO: 28828 - protein, 117 aa, synthetic construct
  REGION 1..117: note = Description of Artificial Sequence: Synthetic polypeptide
QVQLVESGGGVVQPGRSLRLSCAASGFTFSDYGMHWVRQAPGKGLEWVAVIWYEDNNQYYADSVKGRFTISRDNSKNTLYLQMNSLRAEDTAVYYCARELGFRSDYWGQGTLVTVSS

SEQ ID NO: 28829 - DNA, 351 bp, synthetic construct
  misc_feature 1..351: note = Description of Artificial Sequence: Synthetic polynucleotide
  source 1..351: mol_type = other DNA
caggtgcagctggtggagtctgggggaggcgtggtccagcctgggaggtccctgagactctcctgtgcagcgtctggattcaccttcagtagctatggcatgcactgggtccgccaggctccaggcaaggggctggagtgggtggcagttatttggtatgaagaaaataatcaatactatgcagactccgtgaagggccgattcaccatctccagagacaattccaagaacacgctgtatctgcaaatgaacagcctgagagccgaggacacggctgtgtattactgtgcgagagaactggggttccggtctgactactggggccagggaaccctggtcaccgtctcctca

SEQ ID NO: 28830 - protein, 117 aa, synthetic construct
  REGION 1..117: note = Description of Artificial Sequence: Synthetic polypeptide
QVQLVESGGGVVQPGRSLRLSCAASGFTFSSYGMHWVRQAPGKGLEWVAVIWYEENNQYYADSVKGRFTISRDNSKNTLYLQMNSLRAEDTAVYYCARELGFRSDYWGQGTLVTVSS

SEQ ID NO: 28831 - DNA, 357 bp, synthetic construct
  misc_feature 1..357: note = Description of Artificial Sequence: Synthetic polynucleotide
  source 1..357: mol_type = other DNA
cagctgcagctgcaggagtcggggccaggactggtgaagccttcggagaccctgtccctcacctgcactgtctctggtggctccatcaacagaagtagttattactggggttggatccgccagcccccagggaaggggctggagtggattgggaatatctattatagtgggaccacctactacaacccgtccctcaagagtcgagtcaccatatccgtagacacgtccaagaaccagttctccctgaacctgagctctgtgaccgccgcagacacggctgtatattcctgtgcgagacatggaaaagactggggccttgactactggggccagggagccctggtcaccgtctcctca

SEQ ID NO: 28832 - protein, 119 aa, synthetic construct
  REGION 1..119: note = Description of Artificial Sequence: Synthetic polypeptide
QLQLQESGPGLVKPSETLSLTCTVSGGSINRSSYYWGWIRQPPGKGLEWIGNIYYSGTTYYNPSLKSRVTISVDTSKNQFSLNLSSVTAADTAVYSCARHGKDWGLDYWGQGALVTVSS

SEQ ID NO: 28833 - DNA, 345 bp, synthetic construct
  misc_feature 1..345: note = Description of Artificial Sequence: Synthetic polynucleotide
  source 1..345: mol_type = other DNA
gaggtgcagctggtggagtctgggggaggcctggtcaagcctggggggtccctgagactctcctgtgcagcctctggattcaccttcagtagctataccatgaactgggtccgccaggctccagggaaggggctggagtgggtctcatccattagtggtagtggtagttacatatactacgcagactcagtgaagggccgattcaccatctccagagacaacgccaagaactcactgtatctgcaaatgaacgccctgagagccgaggacacggctgtgtattactgtgcgagagtggcttcatttgactactggggccagggaaccctggtcaccgtctcctca

SEQ ID NO: 28834 - protein, 115 aa, synthetic construct
  REGION 1..115: note = Description of Artificial Sequence: Synthetic polypeptide
EVQLVESGGGLVKPGGSLRLSCAASGFTFSSYTMNWVRQAPGKGLEWVSSISGSGSYIYYADSVKGRFTISRDNAKNSLYLQMNALRAEDTAVYYCARVASFDYWGQGTLVTVSS

SEQ ID NO: 28835 - DNA, 351 bp, synthetic construct
  misc_feature 1..351: note = Description of Artificial Sequence: Synthetic polynucleotide
  source 1..351: mol_type = other DNA
ctggtgcagctggtggagtctgggggaggcgtggtccagcctgggaagtccctgagactctcctgtgcagcgtctggattcaccttcagtgactatggcatacactgggtccgccaggctccaggcaaggggctggagtgggtggcagtcatttggtttgatggaagtaataaatactatgcagactccgtgaagggccgattcaccatctccagcgacaattccaaaaacacgctgtatctgcaaatgaacagcctgagagccgaggacacggctgtgtattactgtgcgagagatcttggctggacggaagagtactggggccagggaaccctggtcaccgtctcctca

SEQ ID NO: 28836 - protein, 117 aa, synthetic construct
  REGION 1..117: note = Description of Artificial Sequence: Synthetic polypeptide
LVQLVESGGGVVQPGKSLRLSCAASGFTFSDYGIHWVRQAPGKGLEWVAVIWFDGSNKYYADSVKGRFTISSDNSKNTLYLQMNSLRAEDTAVYYCARDLGWTEEYWGQGTLVTVSS

SEQ ID NO: 28837 - DNA, 354 bp, synthetic construct; identical to SEQ ID NO: 28403
  misc_feature 1..354: note = Description of Artificial Sequence: Synthetic polynucleotide
  source 1..354: mol_type = other DNA

SEQ ID NO: 28838 - protein, 118 aa, synthetic construct; identical to SEQ ID NO: 28404
  REGION 1..118: note = Description of Artificial Sequence: Synthetic polypeptide

SEQ ID NO: 28839 - DNA, 354 bp, synthetic construct
  misc_feature 1..354: note = Description of Artificial Sequence: Synthetic polynucleotide
  source 1..354: mol_type = other DNA
caggtgcagctggtggagtctgggggaggcgtggtccagcctgggaggtccctgagactctcctgtgcagcgtctggattcaacttcagtaactatggcatgcactgggtccgccaggctccaggcaaggggctggagtgggtggcagtcatatggcatgatggaagtaataaatactatgtagactccgtgaagggccgattcaccatctccagagacaattccaagaacacggtgtatctgcaaatgaacagcctgagagccgaggacacggctgtgtattactgtgcgagagatgagaggctggggatttttgactactggggccagggaaccctggtcaccgtctcctca

SEQ ID NO: 28840 - protein, 118 aa, synthetic construct
  REGION 1..118: note = Description of Artificial Sequence: Synthetic polypeptide
QVQLVESGGGVVQPGRSLRLSCAASGFNFSNYGMHWVRQAPGKGLEWVAVIWHDGSNKYYVDSVKGRFTISRDNSKNTVYLQMNSLRAEDTAVYYCARDERLGIFDYWGQGTLVTVSS

SEQ ID NO: 28841 - DNA, 363 bp, synthetic construct
  misc_feature 1..363: note = Description of Artificial Sequence: Synthetic polynucleotide
  source 1..363: mol_type = other DNA
gaggtgcagctgttggagtctgggggaggcttggtacagcctggggggtccctgagactctcctgtgcagcctctggattcacctttagcggctatgccatgaactgggtccgccaggctccagggatggggctggagtgggtctcagttattagtcgtagtggtggttacacatactacgcggactccgtgaagggccggttcaccatctccagagacaattccaagaacacgctgtatctgcaaatgaacagcctgagagccgaggacacggccgtctattactgtgcgtcccgtttagcagtggctggctcggaggcttttgatatctggggccaagggacaatggtcaccgtctcttca

SEQ ID NO: 28842 - protein, 121 aa, synthetic construct
  REGION 1..121: note = Description of Artificial Sequence: Synthetic polypeptide
EVQLLESGGGLVQPGGSLRLSCAASGFTFSGYAMNWVRQAPGMGLEWVSVISRSGGYTYYADSVKGRFTISRDNSKNTLYLQMNSLRAEDTAVYYCASRLAVAGSEAFDIWGQGTMVTVSS

SEQ ID NO: 28843 - DNA, 354 bp, synthetic construct
  misc_feature 1..354: note = Description of Artificial Sequence: Synthetic polynucleotide
  source 1..354: mol_type = other DNA
caggtgcagctggtggagtctgggggaggcgtggtccagcctgggaggtccctgagactctcctgtgcagcgtctggattcaccttcagtagctatggcatgcactgggtccgccaggctccaggcaaggggctggagtgggtggcagttatatggcatgatgaaagtaataaatactatacagactccgtgaagggccgattcaccatctccagagacaattccaagaacacgctgtatctgcaaatgaacagcctgagagccgaggacacggctgtgtattactgtgcgagagacgagaggctggggatttttgactactggggccagggaaccctggtcaccgtctcctca

SEQ ID NO: 28844 - protein, 118 aa, synthetic construct
  REGION 1..118: note = Description of Artificial Sequence: Synthetic polypeptide
QVQLVESGGGVVQPGRSLRLSCAASGFTFSSYGMHWVRQAPGKGLEWVAVIWHDESNKYYTDSVKGRFTISRDNSKNTLYLQMNSLRAEDTAVYYCARDERLGIFDYWGQGTLVTVSS

SEQ ID NO: 28845 - DNA, 351 bp, synthetic construct
  misc_feature 1..351: note = Description of Artificial Sequence: Synthetic polynucleotide
  source 1..351: mol_type = other DNA
caggtgcagctggtggagtctgggggaggcgtggtccagcctgggaggtccctgagactctcctgttcagcgtctggattcaccttcagtgactatggcatgcactgggtccgccaggctccaggcaaggggctggagtgggtggcagttatatggtatgatgaaaataataaatactatgcagactccgtgaagggccgattcaccatctccagagacaattccaagaacacgctgtatctgcaaatgaacagcctgagagccgaggacacggctgtgtattactgtgcgagagaactggggttccggtctgactactggggccagggaaccctggtcaccgtctcctca

SEQ ID NO: 28846 - protein, 117 aa, synthetic construct
  REGION 1..117: note = Description of Artificial Sequence: Synthetic polypeptide
QVQLVESGGGVVQPGRSLRLSCSASGFTFSDYGMHWVRQAPGKGLEWVAVIWYDENNKYYADSVKGRFTISRDNSKNTLYLQMNSLRAEDTAVYYCARELGFRSDYWGQGTLVTVSS

SEQ ID NO: 28847 - DNA, 351 bp, synthetic construct
  misc_feature 1..351: note = Description of Artificial Sequence: Synthetic polynucleotide
  source 1..351: mol_type = other DNA
caggtgcagctggtggagtctgggggaggcgtggtccagcctgggaggtccctgagactctcctgtgcagcgtctggattcaccttcagtgactatggcatgcactgggtccgccaggctccaggcaaggggctggagtgggtggcagttatatggtatgacgaaagtaataaatactatgaagactccgtgaagggccgattcaccatctccagagacaattccaagaacacgctgtatctgcaaatgaaaagcctgagagccgaggacacgggtgtgtattactgtgcgagagaagtgggattccggtctgactactggggccagggaaccctggtcaccgtctcctca

SEQ ID NO: 28848 - protein, 117 aa, synthetic construct
  REGION 1..117: note = Description of Artificial Sequence: Synthetic polypeptide
QVQLVESGGGVVQPGRSLRLSCAASGFTFSDYGMHWVRQAPGKGLEWVAVIWYDESNKYYEDSVKGRFTISRDNSKNTLYLQMKSLRAEDTGVYYCAREVGFRSDYWGQGTLVTVSS

SEQ ID NO: 28849 - DNA, 363 bp, synthetic construct
  misc_feature 1..363: note = Description of Artificial Sequence: Synthetic polynucleotide
  source 1..363: mol_type = other DNA
gaggtgcagctgttggagtctgggggaggcttggtacagcctggggggtccctgagactctcctgtgcagcctctgaattcacctttagcagctatgccatgagctgggtccgccaggctccagggaaggggctggagtgggtctcagttattagtggtcgtggtgttaacacattctacgcagactccgtgaagggccggttcaccatctccagagacaattccaagaacacgctgtatctgcaaatgaacagcctgagagccgaggacacggccgtatattactgtgcgtcccgtatagcagtggctggctcggaggcttttgatatctggggccaagggacaatggtcaccgtctcttca

SEQ ID NO: 28850 - protein, 121 aa, synthetic construct
  REGION 1..121: note = Description of Artificial Sequence: Synthetic polypeptide
EVQLLESGGGLVQPGGSLRLSCAASEFTFSSYAMSWVRQAPGKGLEWVSVISGRGVNTFYADSVKGRFTISRDNSKNTLYLQMNSLRAEDTAVYYCASRIAVAGSEAFDIWGQGTMVTVSS

SEQ ID NO: 28851 - DNA, 369 bp, synthetic construct
  misc_feature 1..369: note = Description of Artificial Sequence: Synthetic polynucleotide
  source 1..369: mol_type = other DNA
caggtgcaactggtggagtctgggggaggcgtggtccagcctgggaggtccctgagactctcctgtgcagcgtctggattcaccttcagtagctatgtcctgcactgggtccgccaggctccaggcaaggggctggagtgggtggcagttatatggtatgatggaagtaataaatactatgcagactccgtgaagggccgattcaccatctccagagacaattccaagaacacgctatatctgcaaatgaacagcctgagagccgaggacacggctgtttattactgtgcgcgagaaaagtataccagcagctggtacgactacggtatggacgtctggggccaagggaccacggtcaccgtctcctca

SEQ ID NO: 28852 - protein, 123 aa, synthetic construct
  REGION 1..123: note = Description of Artificial Sequence: Synthetic polypeptide
QVQLVESGGGVVQPGRSLRLSCAASGFTFSSYVLHWVRQAPGKGLEWVAVIWYDGSNKYYADSVKGRFTISRDNSKNTLYLQMNSLRAEDTAVYYCAREKYTSSWYDYGMDVWGQGTTVTVSS

SEQ ID NO: 28853 - DNA, 351 bp, synthetic construct
  misc_feature 1..351: note = Description of Artificial Sequence: Synthetic polynucleotide
  source 1..351: mol_type = other DNA
caggtgcagctggtggagtctgggggaggcgtggtccagcctgggaggtccctgagactctcctgtgcagcgtctggattcaccttcagtgactttggcatgcactgggtccgccaggctccaggcaaggggctggagtgggtggcagttatttggtatgaagaaaataatcaatactatgcagactccgtgaagggccgattcaccatctccagagacaattccaagaacacgctgtatctgcaaatgaacagcctgagagccgaggacacggctttttattactgtgcgagagagctggggttccggtctgactactggggccagggaaccctggtcaccgtctcctca

SEQ ID NO: 28854 - protein, 117 aa, synthetic construct
  REGION 1..117: note = Description of Artificial Sequence: Synthetic polypeptide
QVQLVESGGGVVQPGRSLRLSCAASGFTFSDFGMHWVRQAPGKGLEWVAVIWYEENNQYYADSVKGRFTISRDNSKNTLYLQMNSLRAEDTAFYYCARELGFRSDYWGQGTLVTVSS

SEQ ID NO: 28855 - DNA, 354 bp, synthetic construct
  misc_feature 1..354: note = Description of Artificial Sequence: Synthetic polynucleotide
  source 1..354: mol_type = other DNA
caggtgcagctggtggagtctgggggaggcgtggtccagcctgggaggtccctgagactctcctgtgcagcgtctggattcaccttcagtagctatggcatgcactgggtccgccaggctccaggcaaggggctggagtgggtggcagttatatggcatgatgaaactaataaatactatgcagattccgtgaagggccgattcaccatctccagagacaattccaagaacacgctgtctctgcaaatgaacagcctgagagccgaggacacggctgtgtattactgtgcgagagacgagaggctggggatttttgactactggggccagggaaccctggtcaccgtctcctca

SEQ ID NO: 28856 - protein, 118 aa, synthetic construct
  REGION 1..118: note = Description of Artificial Sequence: Synthetic polypeptide
QVQLVESGGGVVQPGRSLRLSCAASGFTFSSYGMHWVRQAPGKGLEWVAVIWHDETNKYYADSVKGRFTISRDNSKNTLSLQMNSLRAEDTAVYYCARDERLGIFDYWGQGTLVTVSS

SEQ ID NO: 28857 - DNA, 342 bp, synthetic construct
  misc_feature 1..342: note = Description of Artificial Sequence: Synthetic polynucleotide
  source 1..342: mol_type = other DNA
gaggtgcagctgttggagtctgggggaggcttggtacagcctggggggtccctgagactctcctgtgcagcctctggattcacctttagcagctatgacatgagctgggtccgccaggctccaggaaaggggctggagtgggtctcaactattagtggtagtggtggtatcacatactacgcagactccgtgaagggccggttcaccatctccagagacaattccaagaaaacgctgtatctgcaaatgaacagcctgagagccgaggacacggccgtatatttctgtgcgagagatcggggcagcgtctggggccagggaaccctggtcaccgtctcctca

SEQ ID NO: 28858 - protein, 114 aa, synthetic construct
  REGION 1..114: note = Description of Artificial Sequence: Synthetic polypeptide
EVQLLESGGGLVQPGGSLRLSCAASGFTFSSYDMSWVRQAPGKGLEWVSTISGSGGITYYADSVKGRFTISRDNSKKTLYLQMNSLRAEDTAVYFCARDRGSVWGQGTLVTVSS

SEQ ID NO: 28859 - DNA, 357 bp, synthetic construct
  misc_feature 1..357: note = Description of Artificial Sequence: Synthetic polynucleotide
  source 1..357: mol_type = other DNA
cagctgcagctgcaggagtcgggcccaggactggtgaagccttcggagaccctgtccctcacctgcactgtctctggtggctccatcagtaggagtagttactactggggctggatccggcagcccccagggaaggggctggagtggattgggaatatctattatagtgggagcacctactacaacccgtccgtcaagagtcgagtcaccatatccgtagacacgtccaagaaccagttctccctgaagctgagtactgtgaccgccgcagacacggctgtgtattactgtgcgagacatggaaaagactggggccttgaagactggggccagggaaccctggtcaccgtctcctca

SEQ ID NO: 28860 - protein, 119 aa, synthetic construct
  REGION 1..119: note = Description of Artificial Sequence: Synthetic polypeptide
QLQLQESGPGLVKPSETLSLTCTVSGGSISRSSYYWGWIRQPPGKGLEWIGNIYYSGSTYYNPSVKSRVTISVDTSKNQFSLKLSTVTAADTAVYYCARHGKDWGLEDWGQGTLVTVSS

SEQ ID NO: 28861 - DNA, 351 bp, synthetic construct
  misc_feature 1..351: note = Description of Artificial Sequence: Synthetic polynucleotide
  source 1..351: mol_type = other DNA
caggtgcagctggtggagtctgggggaggcgtggtccagcctgggaggtccctgagactctcctgtgcagcgtctggattcaccttcagtaactatggcatgcactgggtccgccaggctccaggcaaggggctggagtgggtggcagttatttggtatgaagaaaataatcaatactatgcagactccgtgaagggccgattcaccatctccagagacaattccaagaacacgctgtatctgcaaatgaacagcctgacagccgaggacacggctgtttattacagtccgagagaaatggggttcctgtctgactactggggccagggaaccctggtcaccgtctcctca

SEQ ID NO: 28862 - protein, 117 aa, synthetic construct
  REGION 1..117: note = Description of Artificial Sequence: Synthetic polypeptide
QVQLVESGGGVVQPGRSLRLSCAASGFTFSNYGMHWVRQAPGKGLEWVAVIWYEENNQYYADSVKGRFTISRDNSKNTLYLQMNSLTAEDTAVYYSPREMGFLSDYWGQGTLVTVSS

SEQ ID NO: 28863 - DNA, 351 bp, synthetic construct
  misc_feature 1..351: note = Description of Artificial Sequence: Synthetic polynucleotide
  source 1..351: mol_type = other DNA
caggtgcaggtggtggagtctgggggaggcgtggtccagcctgggaggtccctgagactctcctgtgcagcgtctggattcaccttcagtgactatggcatgcactgggtccgccaggctccaggcaaggggctggagtgggtggcagttatatggtttgatggaagtaataaatactatgcagactccgtgaagggccgattcaccatctccagagacaattccaagaacacgctgtatctgcaaatgaacagtctgagagccgaggacacggctgtgtattactgtgcgagagatcttggctggacggaagagtactggggccagggaaccccggtcaccgtctcctca

SEQ ID NO: 28864 - protein, 117 aa, synthetic construct
  REGION 1..117: note = Description of Artificial Sequence: Synthetic polypeptide
QVQVVESGGGVVQPGRSLRLSCAASGFTFSDYGMHWVRQAPGKGLEWVAVIWFDGSNKYYADSVKGRFTISRDNSKNTLYLQMNSLRAEDTAVYYCARDLGWTEEYWGQGTPVTVSS

SEQ ID NO: 28865 - DNA, 363 bp, synthetic construct
  misc_feature 1..363: note = Description of Artificial Sequence: Synthetic polynucleotide
  source 1..363: mol_type = other DNA
gaggtgcagctgttggagtctgggggaggcttggtacagcctggggggtccctgagactctcctgtgcagcctctggattcacctttagcagctatgccatgaactgggtccgccaggctccagggaaggggctggagtgggtctcagttattagtggtagtggtggtagcacatactacgcagactccgtgaagggccggttcaccatctccagagacaattccaagaacacgctgtatttgcaaatgaacaccctgagagccgaggacacggccgtatattactgtgcgaaaaggtataccagtgactggcatgatgcttttgatatctggggccaagggacaatggtcaccgtctcttca

SEQ ID NO: 28866 - protein, 121 aa, synthetic construct
  REGION 1..121: note = Description of Artificial Sequence: Synthetic polypeptide
EVQLLESGGGLVQPGGSLRLSCAASGFTFSSYAMNWVRQAPGKGLEWVSVISGSGGSTYYADSVKGRFTISRDNSKNTLYLQMNTLRAEDTAVYYCAKRYTSDWHDAFDIWGQGTMVTVSS

SEQ ID NO: 28867 - DNA, 357 bp, synthetic construct
  misc_feature 1..357: note = Description of Artificial Sequence: Synthetic polynucleotide
  source 1..357: mol_type = other DNA
cagctgcatctgcaggagtcgggcccaggactggtgaagccttcggagaccctgtccctcacctgcactgtctctggtggctccatcagcagaagtagttactactggggctggatccgccagcccccagggaaggggctggagtggattgggagtatctattatagtgggagcgcccagtacaacccgtccctcaagagtcgagtcaccatatccgtagacacgaccaagaaccagttctccctgacgctgagctctgtgaccgccgcagacacggctgtatattactgtgcgagactgagcagcagctggtcttttgactactggggccagggaaccctggtcaccgtctcctca

SEQ ID NO: 28868 - protein, 119 aa, synthetic construct
  REGION 1..119: note = Description of Artificial Sequence: Synthetic polypeptide
QLHLQESGPGLVKPSETLSLTCTVSGGSISRSSYYWGWIRQPPGKGLEWIGSIYYSGSAQYNPSLKSRVTISVDTTKNQFSLTLSSVTAADTAVYYCARLSSSWSFDYWGQGTLVTVSS

SEQ ID NO: 28869 - DNA, 351 bp, synthetic construct
  misc_feature 1..351: note = Description of Artificial Sequence: Synthetic polynucleotide
  source 1..351: mol_type = other DNA
caggtgcagttggtggagtctgggggaaccgtggtccagcctgggaggtccctgagactctcctgtgcagcgtctggattcaccttcagtagctatggcatgcactgggtccgccaggctccaggcaaggggctggagtgggtggcagttatatggtatgaggaaaataataaacactatgcagactccgtgaagggccgattcaccatctccagagacaattccaagaacacgctgtatctgcaaatgaacagcctgagagccgaggacacggctgtgtattactgtgcgagagagctggggttcctctctgactactggggccagggaaccctggtcaccgtctcctca

SEQ ID NO: 28870 - protein, 117 aa, synthetic construct
  REGION 1..117: note = Description of Artificial Sequence: Synthetic polypeptide
QVQLVESGGTVVQPGRSLRLSCAASGFTFSSYGMHWVRQAPGKGLEWVAVIWYEENNKHYADSVKGRFTISRDNSKNTLYLQMNSLRAEDTAVYYCARELGFLSDYWGQGTLVTVSS

SEQ ID NO: 28871 - DNA, 351 bp, synthetic construct
  misc_feature 1..351: note = Description of Artificial Sequence: Synthetic polynucleotide
  source 1..351: mol_type = other DNA
caggtgcagttggtggagtctgggggaggcgtggtccagcctgggaggtccctgagactctcctgtgcagcgtctggattcaccttcagtaactatggcatgcactgggtccgccaggctccaggcaaggggctggagtgggtggcagttatatggtatgaaggaagtaatcaatactatggagactccgtgaagggccgattcaccatctccagagacaattccaagaacacggtgtatctgcaaatgcacagcctgagagccgaggacacggctgtgtattactgtgcgagagagctggggttcctctctgactactggggccagggaaccctggtcaccgtctcctca

SEQ ID NO: 28872 - protein, 117 aa, synthetic construct
  REGION 1..117: note = Description of Artificial Sequence: Synthetic polypeptide
QVQLVESGGGVVQPGRSLRLSCAASGFTFSNYGMHWVRQAPGKGLEWVAVIWYEGSNQYYGDSVKGRFTISRDNSKNTVYLQMHSLRAEDTAVYYCARELGFLSDYWGQGTLVTVSS

SEQ ID NO: 28873 - DNA, 354 bp, synthetic construct
  misc_feature 1..354: note = Description of Artificial Sequence: Synthetic polynucleotide
  source 1..354: mol_type = other DNA
caactgcagctgcaggagtcgggcccaggactggtgaagccttcggagaccctgtccctcacctgcactgtctctggtggctccatcagacctaattactactggggctggatccgccagcccccagggaaggggctggagtggattggtagtatctattatagtggaagcacctcctacaacccgtccctcaacagtcgagtcaccatatccgtggacacgtccaagaaccagttctccctgaagctgaactctgtgaccgccgcagacacggctgtgtattactgtgcgagactaagcagcaactgggactttgacaactggggccagggaaccctggtcaccgtctcctca

SEQ ID NO: 28874 - protein, 118 aa, synthetic construct
  REGION 1..118: note = Description of Artificial Sequence: Synthetic polypeptide
QLQLQESGPGLVKPSETLSLTCTVSGGSIRPNYYWGWIRQPPGKGLEWIGSIYYSGSTSYNPSLNSRVTISVDTSKNQFSLKLNSVTAADTAVYYCARLSSNWDFDNWGQGTLVTVSS

SEQ ID NO: 28875 - DNA, 363 bp, synthetic construct
  misc_feature 1..363: note = Description of Artificial Sequence: Synthetic polynucleotide
  source 1..363: mol_type = other DNA
gaggtgcagctgttggagtctgggggaaccttggtacagcctggggggtccctgagactctcctgtgcagcctctgaattcacctttagcagctatgtcatgagctgggtccgccaggctccagggaaggggctggagtgggtctcaattattagtggtcgtggtggtaacacattctacgcagactccgtgaagggccggttcaccatctccagagacaattccaagaacacgctgtatctgcaaatgaacagcctgagagccgaggacacggccttatattactgtgcgtcccgtttagcagtggctggctcggaggcttttgatatctggggccaagggacaatggtcaccgtctcttca

SEQ ID NO: 28876 - protein, 121 aa, synthetic construct
  REGION 1..121: note = Description of Artificial Sequence: Synthetic polypeptide
EVQLLESGGTLVQPGGSLRLSCAASEFTFSSYVMSWVRQAPGKGLEWVSIISGRGGNTFYADSVKGRFTISRDNSKNTLYLQMNSLRAEDTALYYCASRLAVAGSEAFDIWGQGTMVTVSS

SEQ ID NO: 28877 - DNA, 360 bp, synthetic construct
  misc_feature 1..360: note = Description of Artificial Sequence: Synthetic polynucleotide
  source 1..360: mol_type = other DNA
caggtgcagctgcaggagtcgggcccaggactggtgaagccttcggagaccctgtccctcacctgtagtgtctctggtgactccatcagtagttactcctggagctggatccggcagcccgccgggaagggactggaatggattgggcgtatctataccagtgggagcaccaactacatcccctccctcaagagtcgaatcaccatgtcagtagacacgtccaagaagcagttctccctgaagctgagctctgtgaccgccgcggacacggccgtgtattactgtgcgagagatttgaagagcagtggctgccttttctttgactactggggccagggaaccctggtcaccgtctcctca

SEQ ID NO: 28878 - protein, 120 aa, synthetic construct
  REGION 1..120: note = Description of Artificial Sequence: Synthetic polypeptide
QVQLQESGPGLVKPSETLSLTCSVSGDSISSYSWSWIRQPAGKGLEWIGRIYTSGSTNYIPSLKSRITMSVDTSKKQFSLKLSSVTAADTAVYYCARDLKSSGCLFFDYWGQGTLVTVSS

SEQ ID NO: 28879 - DNA, 363 bp, synthetic construct
  misc_feature 1..363: note = Description of Artificial Sequence: Synthetic polynucleotide
  source 1..363: mol_type = other DNA
caggtgcagctggtggagtctgggggaggcgtggtccagcctgggaggtccctgagactctcctgtgcagcctctggatttaccttcagtagctatggcatgcactgggtccgccagactccaggcaaggggctggagtgggtggcaattatatcatatgttggaaagaataaatattatgcagactccgtgaagggccgattcaccatctccagagacaattccaagaacacgctgtatctgcaaatgaacagcctgagagctgaggacacggctgtgtattactgtgcgagacggggaaacagctatggcgggtacggtatggacgtctggggccaagggactacggtcaccgtctcctca

SEQ ID NO: 28880 - protein, 121 aa, synthetic construct
  REGION 1..121: note = Description of Artificial Sequence: Synthetic polypeptide
QVQLVESGGGVVQPGRSLRLSCAASGFTFSSYGMHWVRQTPGKGLEWVAIISYVGKNKYYADSVKGRFTISRDNSKNTLYLQMNSLRAEDTAVYYCARRGNSYGGYGMDVWGQGTTVTVSS

SEQ ID NO: 28881 - DNA, 345 bp, synthetic construct
  misc_feature 1..345: note = Description of Artificial Sequence: Synthetic polynucleotide
  source 1..345: mol_type = other DNA
gaggtgcagctggtggagtctgggggaggcctggtcaagcctggggggtccctgagactctcctgtgcagcctctggattcaccttcagtagctatagcatgaactgggtccgccaggctccagggaaggggctggagtgggtctcatccattagtggtagtagtacttacatatactacgcagactcagtgaagggccgattcaccatctccagagacaacgccaagaactcactgtatctgcaaatgaacagcctgagagccgaggacacggctgtgttttactgtgcgagagtggcttcatttgactactggggccagggaaccctggtcaccgtctcctca

SEQ ID NO: 28882 - protein, 115 aa, synthetic construct
  REGION 1..115: note = Description of Artificial Sequence: Synthetic polypeptide
EVQLVESGGGLVKPGGSLRLSCAASGFTFSSYSMNWVRQAPGKGLEWVSSISGSSTYIYYADSVKGRFTISRDNAKNSLYLQMNSLRAEDTAVFYCARVASFDYWGQGTLVTVSS

SEQ ID NO: 28883 - DNA, 345 bp, synthetic construct
  misc_feature 1..345: note = Description of Artificial Sequence: Synthetic polynucleotide
  source 1..345: mol_type = other DNA
gaggtgcagctggtggagtctgggggaggcctggtcaagcctggggggtccctgagactctcctgtgcagcctctggattcaccttcagtagctatagcatgaactgggtccgccaggctccagggaaggggctggagtgggtctcatccattagtggtagtagtacttacatatactacgcagactcagtgaagggccgaatcgccatctccagagacaacgccaagaactcgctgtatctgcaaatgaacagcctgagagccgaggacacggctgtatattactgtgcgagagtggcttcatttgactactggggccagggaaccctggtcaccgtctcctca

SEQ ID NO: 28884 - protein, 115 aa, synthetic construct
  REGION 1..115: note = Description of Artificial Sequence: Synthetic polypeptide
EVQLVESGGGLVKPGGSLRLSCAASGFTFSSYSMNWVRQAPGKGLEWVSSISGSSTYIYYADSVKGRIAISRDNAKNSLYLQMNSLRAEDTAVYYCARVASFDYWGQGTLVTVSS

SEQ ID NO: 28885 - DNA, 363 bp, synthetic construct
  misc_feature 1..363: note = Description of Artificial Sequence: Synthetic polynucleotide
  source 1..363: mol_type = other DNA
gaggtgcagttgttggagtctgggggaggcttggtacagcctggggggtccctgagactctcctgtgcagcctctgaattcacctttagcagctatgccatgagctgggtccgccaggctccagggaaggggctggagtgggtctcaattattagtggtcgtggtggtaacacattctacgcagactccgtgaagggccggttcaccatctccagagacaattccaagaacacgctgtatctgcaaatgaacagcctgagagccgaggacacggccgtatattactgtgcgtcccgtatagcagtggctggctcggaggcttttgctatctggggccaagggacaatggtcaccgtctcttca

SEQ ID NO: 28886 - protein, 121 aa, synthetic construct
  REGION 1..121: note = Description of Artificial Sequence: Synthetic polypeptide
EVQLLESGGGLVQPGGSLRLSCAASEFTFSSYAMSWVRQAPGKGLEWVSIISGRGGNTFYADSVKGRFTISRDNSKNTLYLQMNSLRAEDTAVYYCASRIAVAGSEAFAIWGQGTMVTVSS

SEQ ID NO: 28887 - DNA, 354 bp, synthetic construct
  misc_feature 1..354: note = Description of Artificial Sequence: Synthetic polynucleotide
  source 1..354: mol_type = other DNA
caggtgcagctggtggagtcggggggaggcgtggtccagcctgggaggtccctgagactctcctgtgcagcgtctggattcaacttcagtaactatggcatgcactgggtccgccaggttccaggcaaggggctggagtgggtggcagttatatggcatgatggaagtaataaatactatgtagactccgtgaagggccgattcaccatctccagagacaattccaagaacacgctgtctctgcaaatgaacagcctgagagccgaggacacggctgtgtattgctgtgcgagagatgagaggctggggatttttgactactggggccagggaaccctggtcaccgtctcctca

SEQ ID NO: 28888 - protein, 118 aa, synthetic construct
  REGION 1..118: note = Description of Artificial Sequence: Synthetic polypeptide
QVQLVESGGGVVQPGRSLRLSCAASGFNFSNYGMHWVRQVPGKGLEWVAVIWHDGSNKYYVDSVKGRFTISRDNSKNTLSLQMNSLRAEDTAVYCCARDERLGIFDYWGQGTLVTVSS

SEQ ID NO: 28889 - DNA, 369 bp, synthetic construct
  misc_feature 1..369: note = Description of Artificial Sequence: Synthetic polynucleotide
  source 1..369: mol_type = other DNA
caggtgcagctggtggagtctgggggaggcgtggtccagcctgggaggtccctgagactctcctgtgcagcgtctggattcaccttcagtgactatggcatgcactgggtccgccaggctccaggcaaggggctggagtgggtggcagttatatggtatgatggaagtaataaatactatgcagactccgtgaagggccgattcaccatctccagagacaattccaagaacacgctctatctgcaaatgaacagcctgagagccgaggacacggctgtgtattactgtgcgagagagaagtatagcagcagctggtacgactacggtatggacgtctggggccaagggaccacggtcaccgtctcctca

SEQ ID NO: 28890 - protein, 123 aa, synthetic construct
  REGION 1..123: note = Description of Artificial Sequence: Synthetic polypeptide
QVQLVESGGGVVQPGRSLRLSCAASGFTFSDYGMHWVRQAPGKGLEWVAVIWYDGSNKYYADSVKGRFTISRDNSKNTLYLQMNSLRAEDTAVYYCAREKYSSSWYDYGMDVWGQGTTVTVSS

SEQ ID NO: 28891 - DNA, 357 bp, synthetic construct
  misc_feature 1..357: note = Description of Artificial Sequence: Synthetic polynucleotide
  source 1..357: mol_type = other DNA
caggtgcagctggtggagtctgggggaggcgtggtccagcctgggaggtccctgagactctcctgtgcagcgtctggattcaccttcagtacctataacatgcactgggtccgccaggctccaggcaaggggctggagtgggtggcagttatatggtatgatggaagtgatagatactctgcagactccgtgaagggccgattcaccatctcccgagacaattccaagaacacgctgtatctgcaaatgaacagcctgagagccgaggacacggctgtgtattactgtgcgagagatcgggcctatagcagctcgtctgacttctggggccagggaaccctggtcaccgtctcctca

SEQ ID NO: 28892 - protein, 119 aa, synthetic construct
  REGION 1..119: note = Description of Artificial Sequence: Synthetic polypeptide
QVQLVESGGGVVQPGRSLRLSCAASGFTFSTYNMHWVRQAPGKGLEWVAVIWYDGSDRYSADSVKGRFTISRDNSKNTLYLQMNSLRAEDTAVYYCARDRAYSSSSDFWGQGTLVTVSS

SEQ ID NO: 28893 - DNA, 342 bp, synthetic construct
  misc_feature 1..342: note = Description of Artificial Sequence: Synthetic polynucleotide
  source 1..342: mol_type = other DNA
gaggtgcagctggtggagtctgggggaggcctggtcaagcctggggggtccctgagactctcctgtgcagcctctggattcaccttcagtagttataccatgaactgggtccgccaggctccagggaaggggctggactgggtctcatccattagtggtagtagtagttacatatactacgcggactcagtgaagggccgattcaccatctccagagacaacgccaagaactcactgtatctgcaaatgaacagcctgagagccgaggacacggctgtgtattactgtgcgagagatcggggcagtggctggggccagggaaccctggtcaccgtctcctca

SEQ ID NO: 28894 - protein, 114 aa, synthetic construct
  REGION 1..114: note = Description of Artificial Sequence: Synthetic polypeptide
EVQLVESGGGLVKPGGSLRLSCAASGFTFSSYTMNWVRQAPGKGLDWVSSISGSSSYIYYADSVKGRFTISRDNAKNSLYLQMNSLRAEDTAVYYCARDRGSGWGQGTLVTVSS

SEQ ID NO: 28895 - DNA, 369 bp, synthetic construct
  misc_feature 1..369: note = Description of Artificial Sequence: Synthetic polynucleotide
  source 1..369: mol_type = other DNA
caggtgcagctggtggagtctgggggaggcgtggtccagcctgggaggtccctgagactctcctgtgcagcgtctggattcaccttcagtaactatgtcatacactgggtccgccaggctccaggcaaggggctggagtgggtggcagttatatggtatgatggaagtaataaatactatgcagactccgtgaagggccgattcaccatctccagagacaattccaagaacacgctgtatctgcaaatgaacagcctgagagccgaggacacggctgtgtattactgtgcgagagaaaagtatagcagcagctggtacgactacggtatggacgtctggggccaagggaccacggtcaccgtctcctca

SEQ ID NO: 28896 - protein, 123 aa, synthetic construct
  REGION 1..123: note = Description of Artificial Sequence: Synthetic polypeptide
QVQLVESGGGVVQPGRSLRLSCAASGFTFSNYVIHWVRQAPGKGLEWVAVIWYDGSNKYYADSVKGRFTISRDNSKNTLYLQMNSLRAEDTAVYYCAREKYSSSWYDYGMDVWGQGTTVTVSS

SEQ ID NO: 28897 - DNA, 363 bp, synthetic construct
  misc_feature 1..363: note = Description of Artificial Sequence: Synthetic polynucleotide
  source 1..363: mol_type = other DNA
caggtgcagctggtggagtctgggggaggcgtggtccagcctgggaggtccctgagactctcctgtgcagcctctggattcaccttcagtagctatggcatgcactgggtccgccaggctccaggcaaggggctggagtgggtgtcagttatatcatatggtggaagtaataattactatgcagactccgtgaagggccgattcaccatctccagagacaattccaagaacacgctgtatctgcaaatgaacagcctgagagctgaggacacggctgtgtattactgtgtgagacggggatacagctatggcgggtacggtatggacgtctggggccaagggaccacggtcaccgtctcctca

SEQ ID NO: 28898 - protein, 121 aa, synthetic construct
  REGION 1..121: note = Description of Artificial Sequence: Synthetic polypeptide
QVQLVESGGGVVQPGRSLRLSCAASGFTFSSYGMHWVRQAPGKGLEWVSVISYGGSNNYYADSVKGRFTISRDNSKNTLYLQMNSLRAEDTAVYYCVRRGYSYGGYGMDVWGQGTTVTVSS

SEQ ID NO: 28899 - DNA, 351 bp, synthetic construct
  misc_feature 1..351: note = Description of Artificial Sequence: Synthetic polynucleotide
  source 1..351: mol_type = other DNA
caggtgcagttggtggagtctgggggaggcgtggtccagcctgggaggtccctgagactctcctgtgcagcgtctggattcaccttcagtaactatggcatgcaccgggtccgccaggctccaggcaaggggctggagtgggtggcagttatatggtatgaaggaagtaatcaatactatggagactccgtgaagggccgattcaccatctccagagacaattccaagaacacggtgtatctgcaaatgcacagcctgagagccgaggacacggctgtgtattactgtgcgagagagctggggttcctctctgattactggggccagggaaccctggtcaccgtctcctca

SEQ ID NO: 28900 - protein, 117 aa, synthetic construct
  REGION 1..117: note = Description of Artificial Sequence: Synthetic polypeptide
QVQLVESGGGVVQPGRSLRLSCAASGFTFSNYGMHRVRQAPGKGLEWVAVIWYEGSNQYYGDSVKGRFTISRDNSKNTVYLQMHSLRAEDTAVYYCARELGFLSDYWGQGTLVTVSS

SEQ ID NO: 28901 - DNA, 345 bp, synthetic construct
  misc_feature 1..345: note = Description of Artificial Sequence: Synthetic polynucleotide
  source 1..345: mol_type = other DNA
gaggtgcagctggtggagtctgggggaggcctggtcaagcctggggggtccctgagactctcctgtgcagcctctggattcaccttcagtagctatagcatgaactgggtccgccaggctccagggaaggggctggagtggatctcatccattagtggtagtagtacttacatatactacgcagactcagtgaagggccgattcaccatctccagagacaacgccaagaactcactgtatctgcaaatgaacagcctgagagccgaggacacggctgtgtattactgtgcgagagtggcttcattcgactactggggccagggaaccctggtcaccgtctcctca

SEQ ID NO: 28902 - protein, 115 aa, synthetic construct
  REGION 1..115: note = Description of Artificial Sequence: Synthetic polypeptide
EVQLVESGGGLVKPGGSLRLSCAASGFTFSSYSMNWVRQAPGKGLEWISSISGSSTYIYYADSVKGRFTISRDNAKNSLYLQMNSLRAEDTAVYYCARVASFDYWGQGTLVTVSS

SEQ ID NO: 28903 - DNA, 369 bp, synthetic construct
  misc_feature 1..369: note = Description of Artificial Sequence: Synthetic polynucleotide
  source 1..369: mol_type = other DNA
caggtgcagttggtggagtctgggggaggcgtggtccagcctgggaggtccctgagactctcctgtgcagcgtctggattcaccttcagtagctatgtcatgcactgggtccgccaggctccaggcaaggggctggagtgggtggcagttatatggtatgatggaagtaataaatactatgcagactccgtgaagggccgattcaccatctccagagacaattccaagaacacgctgtatctgcaaatgaacagcctgagagccgaggacacggctgtgtattactgtgcgagagagaagtatagcagcagctggtacgactacggtatggacgtctggggccacgggaccacggtcaccgtctcctca

SEQ ID NO: 28904 - protein, 123 aa, synthetic construct
  REGION 1..123: note = Description of Artificial Sequence: Synthetic polypeptide
QVQLVESGGGVVQPGRSLRLSCAASGFTFSSYVMHWVRQAPGKGLEWVAVIWYDGSNKYYADSVKGRFTISRDNSKNTLYLQMNSLRAEDTAVYYCAREKYSSSWYDYGMDVWGHGTTVTVSS

SEQ ID NO: 28905 - DNA, 354 bp, synthetic construct
  misc_feature 1..354: note = Description of Artificial Sequence: Synthetic polynucleotide
  source 1..354: mol_type = other DNA
caggtgcagctggtggagtctgggggaggcgtggtccagtctgggaggtccctgagactctcctgtgcagcgtctggattcaacttcagtagctatggcatgcactgggtccgccaggctccaggcaaggggctggagtgggtggcaattatatggcatgatggaagtaataaatactatgtagactccgtgaagggccgattcaccatctccagagacaattccaagaacacgctgtatctgcaaatgaacagcctgagagccgaggacacggctgtgtattactgtgcgagagatgagaggctggggatttttgactactggggccagggaaccctggtcaccgtctcctca

SEQ ID NO: 28906 - protein, 118 aa, synthetic construct
  REGION 1..118: note = Description of Artificial Sequence: Synthetic polypeptide
QVQLVESGGGVVQSGRSLRLSCAASGFNFSSYGMHWVRQAPGKGLEWVAIIWHDGSNKYYVDSVKGRFTISRDNSKNTLYLQMNSLRAEDTAVYYCARDERLGIFDYWGQGTLVTVSS

SEQ ID NO: 28907 - DNA, 351 bp, synthetic construct
  misc_feature 1..351: note = Description of Artificial Sequence: Synthetic polynucleotide
  source 1..351: mol_type = other DNA
caggtgcagctggtggagtctgggggaggcgtggtccagcctgggaggtccctgagactctcctgtgcagcgtctggattcaccttcagtagctatggcatgcactgggtccgccaggctccaggcaaggggctggagtgggtggcagttatatggtatgaggaaaataataaatactatgtagactccgtgaagggccgattcaccatctccagagacaattccaagagcacgctgtatctgcaaatgaacagcctgagagccgaggacacggctgtgtattactgtgtgagagaactaggcttccagtctgactactggggccagggaaccccggtcaccgtctcctca

SEQ ID NO: 28908 - protein, 117 aa, synthetic construct
  REGION 1..117: note = Description of Artificial Sequence: Synthetic polypeptide
QVQLVESGGGVVQPGRSLRLSCAASGFTFSSYGMHWVRQAPGKGLEWVAVIWYEENNKYYVDSVKGRFTISRDNSKSTLYLQMNSLRAEDTAVYYCVRELGFQSDYWGQGTPVTVSS

SEQ ID NO: 28909 - DNA, 354 bp, synthetic construct
  misc_feature 1..354: note = Description of Artificial Sequence: Synthetic polynucleotide
  source 1..354: mol_type = other DNA
caggtgcagctggtggagtctgggggaggcgtggtccagcctgggaggtccctgagactctcctgtgcagcgtccggattcaccttcagtagctatggcatgcactgggtccgccaggctccaggcaaggggctggagtggggggcagttatatggcatgatggaagtaataaatactatgcagactccgtgaagggccgattcaccatctccagagacaatgccaagaacacgctgtatctgcaaatgaacagcctgagagccgaggacacggctgtgtattactgtgcgagagatctgagaatgggcggtatggacgtctggggccaagggaccacggtcaccgtctcctca

SEQ ID NO: 28910 - protein, 118 aa, synthetic construct
  REGION 1..118: note = Description of Artificial Sequence: Synthetic polypeptide
QVQLVESGGGVVQPGRSLRLSCAASGFTFSSYGMHWVRQAPGKGLEWGAVIWHDGSNKYYADSVKGRFTISRDNAKNTLYLQMNSLRAEDTAVYYCARDLRMGGMDVWGQGTTVTVSS

SEQ ID NO: 28911 - DNA, 357 bp, synthetic construct
  misc_feature 1..357: note = Description of Artificial Sequence: Synthetic polynucleotide
  source 1..357: mol_type = other DNA
cagctgcagctacaggagtcgggcccaggactggtgaagccttcggagaccctgtccctcacctgcactgtctctggtggctccatcagccgtagtagttactactggggctggatccgccagcccccagggaaggggctggagtggattgggagtgtctattatagtggggccacctcctacaacccgtccctcaagagtcgagtcaccatatccgtagacacgtccaagaaccagttttccctgaagctgaactctgtgaccgccgcagacacggctttgtattactgtgtgagactaagcagcaactgggactttgactactggggccagggaaccctgttcaccgtctcctca

SEQ ID NO: 28912 - protein, 119 aa, synthetic construct
  REGION 1..119: note = Description of Artificial Sequence: Synthetic polypeptide
QLQLQESGPGLVKPSETLSLTCTVSGGSISRSSYYWGWIRQPPGKGLEWIGSVYYSGATSYNPSLKSRVTISVDTSKNQFSLKLNSVTAADTALYYCVRLSSNWDFDYWGQGTLFTVSS

SEQ ID NO: 28913 - DNA, 354 bp, synthetic construct
  misc_feature 1..354: note = Description of Artificial Sequence: Synthetic polynucleotide
  source 1..354: mol_type = other DNA
caggtgcagctggtggagtctgggggaggcgtggtccagcctgggaggtccctgcgactctcctgtgcagcgtctggattcaccttcagtagctttggcatgcactgggtccgccaggctccaggcaaggggctggagtgggtggcaattatatggcatgatggaagtaataaatactatgcagactccgtgaagggccgattcaccatctccagagacaattccaacaacacgctgtatctgcaaatgagcagcctgcgagccgaggacacggctgtgtattactgtgcgagagatctgagtatgggcggtatggacgtctggggccaagggaccacggtcaccgtctcctca

SEQ ID NO: 28914 - protein, 118 aa, synthetic construct
  REGION 1..118: note = Description of Artificial Sequence: Synthetic polypeptide
QVQLVESGGGVVQPGRSLRLSCAASGFTFSSFGMHWVRQAPGKGLEWVAIIWHDGSNKYYADSVKGRFTISRDNSNNTLYLQMSSLRAEDTAVYYCARDLSMGGMDVWGQGTTVTVSS

SEQ ID NO: 28915 - DNA, 354 bp, synthetic construct
  misc_feature 1..354: note = Description of Artificial Sequence: Synthetic polynucleotide
  source 1..354: mol_type = other DNA
caggtgcagctggtggagtctgggggaggcgtggtccagcctgggaggtccctgagactctcctgtgcagcgtctggattcaacttcagtagctatggcatgcactgggtccgccaggctccaggcaaggggctggagtgggtgtcaattatatggcatgatggaagtaataaatattatgtagactccgtgaagggccgattcaccatctccagagacaattccaagaacacgctgtatctgcaaatgaacagcctgagagccgaggacacggctgtgtattactgtgcgagagatgagaggctggggatttttgactactggggccagggaaccctggtcaccgtctcctcg

SEQ ID NO: 28916 - protein, 118 aa, synthetic construct
  REGION 1..118: note = Description of Artificial Sequence: Synthetic polypeptide
QVQLVESGGGVVQPGRSLRLSCAASGFNFSSYGMHWVRQAPGKGLEWVSIIWHDGSNKYYVDSVKGRFTISRDNSKNTLYLQMNSLRAEDTAVYYCARDERLGIFDYWGQGTLVTVSS

SEQ ID NO: 28917 - DNA, 351 bp, synthetic construct
  misc_feature 1..351: note = Description of Artificial Sequence: Synthetic polynucleotide
  source 1..351: mol_type = other DNA
caggtgcagctggtggagtctgggggaggcgtggtccagcctgggaggtccctgagactctcctgtgcagcgtctggattcaccttcagtaactatggcatgcactgggtccgccaggctccaggcaaggggctggagtgggtggcagttatatggtatgatgaaaataataaatattatatagactccgtgaagggccgattcaccatctccagagacaactccaagaacacgctgtatctgcaaatgaacagcctgagagccgaggacacggctgtgtattactgtgcgagagaattggggttccggtctgactactggggccagggaaccctggtcaccgtctcctca

SEQ ID NO: 28918 - protein, 117 aa, synthetic construct
  REGION 1..117: note = Description of Artificial Sequence: Synthetic polypeptide
QVQLVESGGGVVQPGRSLRLSCAASGFTFSNYGMHWVRQAPGKGLEWVAVIWYDENNKYYIDSVKGRFTISRDNSKNTLYLQMNSLRAEDTAVYYCARELGFRSDYWGQGTLVTVSS

SEQ ID NO: 28919 - DNA, 360 bp, synthetic construct
  misc_feature 1..360: note = Description of Artificial Sequence: Synthetic polynucleotide
  source 1..360: mol_type = other DNA
gaggtgcagctgttggagtctgggggaggcttggtacagcctggggggtccctgagactctcctgtgcagcctctggattcacctttagcagctatgccatgaactgggtccgccaggctccagggaaggggctggagtgggtctcagttattagtggtagaggtggtagtacatactacgcagactccgtgaagggccggttcaccatctccagagacaattccaagaacacgctgtatctgcaaatgaacagcctgagagccgaggacacggccgtatattactgtgcgaaaaggatagcagctggtatggagtacttcgatctctggggccgtggcaccctggtcactgtctcctca

SEQ ID NO: 28920 - protein, 120 aa, synthetic construct
  REGION 1..120: note = Description of Artificial Sequence: Synthetic polypeptide
EVQLLESGGGLVQPGGSLRLSCAASGFTFSSYAMNWVRQAPGKGLEWVSVISGRGGSTYYADSVKGRFTISRDNSKNTLYLQMNSLRAEDTAVYYCAKRIAAGMEYFDLWGRGTLVTVSS

SEQ ID NO: 28921 - DNA, 369 bp, synthetic construct
  misc_feature 1..369: note = Description of Artificial Sequence: Synthetic polynucleotide
  source 1..369: mol_type = other DNA
gaggtgcagttgttggagtctgggggaggcttggtacagccgggggggtccctgagactctcctgtgcagcctctggattcacctttagcagctatgccatgacctgggtccgccaggctccagggaaggggccggagtgggtctcagttattagtggtagtggtggtagcacattctacgcagactccgtgaagggccggttcaccatctccagagacaattccaagaacacgctttatctgcaaatgagcagcctgagagccgaggacacggccgtttatttctgtgcccgatattgtagtagtaccaggtgcccttatgatgcctttgatatctggggccaagggacaatggtcaccgtctcctca

SEQ ID NO: 28922 - protein, 123 aa, synthetic construct
  REGION 1..123: note = Description of Artificial Sequence: Synthetic polypeptide
EVQLLESGGGLVQPGGSLRLSCAASGFTFSSYAMTWVRQAPGKGPEWVSVISGSGGSTFYADSVKGRFTISRDNSKNTLYLQMSSLRAEDTAVYFCARYCSSTRCPYDAFDIWGQGTMVTVSS

SEQ ID NO: 28923 - DNA, 354 bp, synthetic construct
  misc_feature 1..354: note = Description of Artificial Sequence: Synthetic polynucleotide
  source 1..354: mol_type = other DNA
caggtgcaactggtgcagtctgggcctgaggtgaagaagcctggggcctcagtgaaggtctcctgcaaggcttctggatacaccttcaccaattatgatatcaactgggtgcgacaggccactggacaagggcttgagtggatgggatggatgcaccctaacagtggtgccaccggctatgcacagaggttccagggcagagtcaccatgaccaggaacacctccataagcacagcctacatggagctgagcagcctgagatctgaggacacggccgtgtattactgtgcgacaagcagtggctgggaggtctttgactactggggccagggaaccctggtcaccgtctcctca

SEQ ID NO: 28924 - protein, 118 aa, synthetic construct
  REGION 1..118: note = Description of Artificial Sequence: Synthetic polypeptide
QVQLVQSGPEVKKPGASVKVSCKASGYTFTNYDINWVRQATGQGLEWMGWMHPNSGATGYAQRFQGRVTMTRNTSISTAYMELSSLRSEDTAVYYCATSSGWEVFDYWGQGTLVTVSS

SEQ ID NO: 28925 - DNA, 345 bp, synthetic construct
  misc_feature 1..345: note = Description of Artificial Sequence: Synthetic polynucleotide
  source 1..345: mol_type = other DNA
gaggtgcagctggtggagtctgggggaggcctggtcaagcctggggggtccctgagactctcctgtgcagcctctggattcaccttcagtagttataccatgaactgggtccgccaggctccagggaaggggctggagtgggtctcatccattagtggtagtggtagttacatatactacgcagactcagtgaagggccgattcaccatgtccagagacaacgccaagaactcactgtatctgcaaatgaacagcctgagagccgaggacacggctgtgtattactgtgcgagagtagcagcctttgactcctggggccagggaaccctggtctccgtctcctca

SEQ ID NO: 28926 - protein, 115 aa, synthetic construct
  REGION 1..115: note = Description of Artificial Sequence: Synthetic polypeptide
EVQLVESGGGLVKPGGSLRLSCAASGFTFSSYTMNWVRQAPGKGLEWVSSISGSGSYIYYADSVKGRFTMSRDNAKNSLYLQMNSLRAEDTAVYYCARVAAFDSWGQGTLVSVSS

SEQ ID NO: 28927 - DNA, 342 bp, synthetic construct
  misc_feature 1..342: note = Description of Artificial Sequence: Synthetic polynucleotide
  source 1..342: mol_type = other DNA
gaggtgcagctggtggagtctgggggaggcctggtcaagcctggggggtccctgagactctcctgtgcagcctctggattcaccttcagcagctatagcatgaactgggtccgccaggctccagggaaggggctggagtgggtctcatccattagtggtagtagtacttacaaatactacgcagactcagtgaagggccgattcaccatctccagagacaacgccaagaactcactgtatctgcaaatgaacagcctgagaaccgaggacacggctgtgtattactgtgcgagagatcgtgggagctactggggccagggaacccaggtcaccgtctcctca

SEQ ID NO: 28928 - protein, 114 aa, synthetic construct
  REGION 1..114: note = Description of Artificial Sequence: Synthetic polypeptide
EVQLVESGGGLVKPGGSLRLSCAASGFTFSSYSMNWVRQAPGKGLEWVSSISGSSTYKYYADSVKGRFTISRDNAKNSLYLQMNSLRTEDTAVYYCARDRGSYWGQGTQVTVSS

SEQ ID NO: 28929 - DNA, 351 bp, synthetic construct
  misc_feature 1..351: note = Description of Artificial Sequence: Synthetic polynucleotide
  source 1..351: mol_type = other DNA
caggtgcagctggtggagtctgggggaggcgtggtccagcctgggaggtccctaagactctcctgtgcagcgtctggattcaccttcagtgactatggcatgcactgggtccgccaggctccaggcaaggggctggagtgggtggcagttatatggtttgatggaagtaataaatactatgtagactccgtgaagggccgattcaccatctccagagacaattccaagaacacgctgtatctgcaaatgagcagcctgagagccgaggacacggctgtgtattactgtgcgagagatcttggctggacggaagagtactggggccagggaaccctggtcaccgtctcctca

SEQ ID NO: 28930 - protein, 117 aa, synthetic construct
  REGION 1..117: note = Description of Artificial Sequence: Synthetic polypeptide
QVQLVESGGGVVQPGRSLRLSCAASGFTFSDYGMHWVRQAPGKGLEWVAVIWFDGSNKYYVDSVKGRFTISRDNSKNTLYLQMSSLRAEDTAVYYCARDLGWTEEYWGQGTLVTVSS

SEQ ID NO: 28931 - DNA, 369 bp, synthetic construct
  misc_feature 1..369: note = Description of Artificial Sequence: Synthetic polynucleotide
  source 1..369: mol_type = other DNA
caggtgcagctggtggagtctgggggaggcgtggtccagcctgggaggtccctgagactctcctgtgcagcgtctggattcaccttcagtagctatgtcatgcactgggtccgccaggctccaggcaaggggctggagtgggtggcagttatatggtatgatggaagtaataaatactatgcagactccgtgaagggccgattcaccatctccagagacaattccaagaacacgctgtatctgcaaatgaacagcctgagagccgaggacacggctgtgtattactgtgcgagagagagatatagcagtggctggtatgactacggtttggacgtctggggccaagggaccacggtcaccgtctcctca

SEQ ID NO: 28932 - protein, 123 aa, synthetic construct
  REGION 1..123: note = Description of Artificial Sequence: Synthetic polypeptide
QVQLVESGGGVVQPGRSLRLSCAASGFTFSSYVMHWVRQAPGKGLEWVAVIWYDGSNKYYADSVKGRFTISRDNSKNTLYLQMNSLRAEDTAVYYCARERYSSGWYDYGLDVWGQGTTVTVSS

SEQ ID NO: 28933 - DNA, 345 bp, synthetic construct
  misc_feature 1..345: note = Description of Artificial Sequence: Synthetic polynucleotide
  source 1..345: mol_type = other DNA
gaggtgcagctggtggagtctgggggaggcctggtcaagcctggggggtccctgagactctcctgtgcagcctctggattcaccttcagtagctataacatgaactgggtccgccaggctccagggaaggggctggagtgggtctcatccattagtagtagtagtagttacatatactacgcagactcagtgaagggccgattcaccatctccagagacaacgccaagaactcactgtatctgcaaatgaacagcctgagagccgaggacacggctgtgtattactgtgcgagagttaacctctttgactactggggccagggaaccctggtcaccgtctcctca

SEQ ID NO: 28934 - protein, 115 aa, synthetic construct
  REGION 1..115: note = Description of Artificial Sequence: Synthetic polypeptide
EVQLVESGGGLVKPGGSLRLSCAASGFTFSSYNMNWVRQAPGKGLEWVSSISSSSSYIYYADSVKGRFTISRDNAKNSLYLQMNSLRAEDTAVYYCARVNLFDYWGQGTLVTVSS

SEQ ID NO: 28935 - DNA, 351 bp, synthetic construct
  misc_feature 1..351: note = Description of Artificial Sequence: Synthetic polynucleotide
  source 1..351: mol_type = other DNA
caggtgcagctggtacagtctggggctgaggtgaagaagcctggggcctcagtgaaggtctcctgcaaggcttctggatacaccttcaccgactactatttgcactgggtgcgacaggcccctggacaaggtcttgagtggatgggatggatccaccctaacagtggtggcacaaactatgcacagaagtttcagggcagggtcaccatgaccagggacacgtccatcagcacagcctacatggggctgagcagtctgagatctgacgacacggccgtgtattactgtgcgagagatggtaccagctcgtttgactactggggccagggaaccctggtcaccgtctcctca

SEQ ID NO: 28936 - protein, 117 aa, synthetic construct
  REGION 1..117: note = Description of Artificial Sequence: Synthetic polypeptide
QVQLVQSGAEVKKPGASVKVSCKASGYTFTDYYLHWVRQAPGQGLEWMGWIHPNSGGTNYAQKFQGRVTMTRDTSISTAYMGLSSLRSDDTAVYYCARDGTSSFDYWGQGTLVTVSS

SEQ ID NO: 28937 - DNA, 369 bp, synthetic construct
  misc_feature 1..369: note = Description of Artificial Sequence: Synthetic polynucleotide
  source 1..369: mol_type = other DNA
gaggtgaagctgttggagtctgggggaggcttggtacagccgggggggtccctgagactctcctgtgcagcctctggattcaccttcagcagctatgccatgagctgggtccgccaggctccagggaaggggctggagtgggtctcagttcttagtggtagtggtggtagcacattctacgcagactccgtgaagggccggttcaccatctccagagacaattccaagaacacgctgtatctgcaaatgagcagcctgagagccggggacacggccgtatatttctgtgcccgatattgtagtagtgccaggtgcccttatgatgcctttgatatctggggccaagggacaatggtcaccgtctcctca

SEQ ID NO: 28938 - protein, 123 aa, synthetic construct
  REGION 1..123: note = Description of Artificial Sequence: Synthetic polypeptide
EVKLLESGGGLVQPGGSLRLSCAASGFTFSSYAMSWVRQAPGKGLEWVSVLSGSGGSTFYADSVKGRFTISRDNSKNTLYLQMSSLRAGDTAVYFCARYCSSARCPYDAFDIWGQGTMVTVSS

SEQ ID NO: 28939 - DNA, 354 bp, synthetic construct
  misc_feature 1..354: note = Description of Artificial Sequence: Synthetic polynucleotide
  source 1..354: mol_type = other DNA
gaggtgcagctggtggagtctgggggaggcctggtcaagcctggggggtccttgagactctcctgtgcagcctctggattcacattcagtagctataccatgaactgggtccgccaggctccagggaaggggctggagtgggtctcatccattagtggtagtagtagttacatatactacgcagactcagtgaagggccgattcaccatctccagagccaacgccaagaactcattgtatctgcaaatgaacagcctgagagccgaggacacggctgtgtattactgtgcgagagggagcagctcgtccggctttgactactggggccagggaaccctggtcaccgtctcctca

SEQ ID NO: 28940 - protein, 118 aa, synthetic construct
  REGION 1..118: note = Description of Artificial Sequence: Synthetic polypeptide
EVQLVESGGGLVKPGGSLRLSCAASGFTFSSYTMNWVRQAPGKGLEWVSSISGSSSYIYYADSVKGRFTISRANAKNSLYLQMNSLRAEDTAVYYCARGSSSSGFDYWGQGTLVTVSS

SEQ ID NO: 28941 - DNA, 351 bp, synthetic construct
  misc_feature 1..351: note = Description of Artificial Sequence: Synthetic polynucleotide
  source 1..351: mol_type = other DNA
caggtgcaactggtggagtctgggggaggcgtggtccagcctgggaggtccctgagactctcctgtgcagcgtcaggattcaccttcagtgactatggcatgcactgggtccgccaggctccaggcaaggggctggagtggatggcagttatatggtatgatgtaactaataaatactatgcagactccgtgaagggccgattcaccatctccagagacaattccaagaacacgctgtatctgcaactgaacagcctgagagccgaggacacggctgtttattactgtgcgagagaacttggctggtacgaggactactggggccagggaaccctggtcaccgtctcctca

SEQ ID NO: 28942 - protein, 117 aa, synthetic construct
  REGION 1..117: note = Description of Artificial Sequence: Synthetic polypeptide
QVQLVESGGGVVQPGRSLRLSCAASGFTFSDYGMHWVRQAPGKGLEWMAVIWYDVTNKYYADSVKGRFTISRDNSKNTLYLQLNSLRAEDTAVYYCARELGWYEDYWGQGTLVTVSS

SEQ ID NO: 28943 - DNA, 357 bp, synthetic construct
  misc_feature 1..357: note = Description of Artificial Sequence: Synthetic polynucleotide
  source 1..357: mol_type = other DNA
cagctgcagctgcaggagtcgggcccaggactggtgaagccttcggagaccctgtccctcacctgcactgtctctggtggctccatcagcagaagtagttactactggggctggatccgccagcccccagggaaggggctggagtggattgggaatatctattatagtgggagcacctactacatcccgtccctcaagagtcgagtcaccatatccgttgacacgtccaagaaccagttctccctgaaactgagctctgtgaccgccgcagacacggctgtgtattactgtgcgagacacagtaccagctggtctcttgaccactggggccagggaaccctggtcaccgtctcctca

SEQ ID NO: 28944 - protein, 119 aa, synthetic construct
  REGION 1..119: note = Description of Artificial Sequence: Synthetic polypeptide
QLQLQESGPGLVKPSETLSLTCTVSGGSISRSSYYWGWIRQPPGKGLEWIGNIYYSGSTYYIPSLKSRVTISVDTSKNQFSLKLSSVTAADTAVYYCARHSTSWSLDHWGQGTLVTVSS

SEQ ID NO: 28945 - DNA, 354 bp, synthetic construct
  misc_feature 1..354: note = Description of Artificial Sequence: Synthetic polynucleotide
  source 1..354: mol_type = other DNA
caggtgcagctggtggagtctgggggaggcgtggtccagcctgggaggtccctgagactctcctgtgcagcgtctggattcatcttcagtagctatggcatgcactgggtccgccaggctccaggcaaggggctggagtgggtggcaattatatggtatgatggaagtaataaatactatgcagactccgtgaagggccgattcaccatctccagagacaattccaagaacacgctgtatctgcaaatgaacagcctgagagccgaggacacggctatgtattactgtgcgagagatctgagtatgggcggtatggacgtctggggccaagggaccacggtcaccgtctcctca

SEQ ID NO: 28946 - protein, 118 aa, synthetic construct
  REGION 1..118: note = Description of Artificial Sequence: Synthetic polypeptide
QVQLVESGGGVVQPGRSLRLSCAASGFIFSSYGMHWVRQAPGKGLEWVAIIWYDGSNKYYADSVKGRFTISRDNSKNTLYLQMNSLRAEDTAMYYCARDLSMGGMDVWGQGTTVTVSS

SEQ ID NO: 28947 - DNA, 369 bp, synthetic construct
  misc_feature 1..369: note = Description of Artificial Sequence: Synthetic polynucleotide
  source 1..369: mol_type = other DNA
caggtgcagctggtggagtctgggggaggcgtggtccagcctgggaggtccctgagactctcctgtgcagcgtctggattcaccttcagtagctgtgtcatgcactgggtccgccaggctccaggcaaggggctggagtgggtggcagttatatggtatgatggaagtaataaatactatgcagactccgtgaagggccgattcaccatctccagagacaattccaataacacgctgtatctgcaaatgaacagcctgagagccgaggacacggctgtgtattactgtgcgagagaaaggtataccagtggctggcacgactacggtatggacgtctggggccaagggaccacggtcaccgtctcctcg

SEQ ID NO: 28948 - protein, 123 aa, synthetic construct
  REGION 1..123: note = Description of Artificial Sequence: Synthetic polypeptide
QVQLVESGGGVVQPGRSLRLSCAASGFTFSSCVMHWVRQAPGKGLEWVAVIWYDGSNKYYADSVKGRFTISRDNSNNTLYLQMNSLRAEDTAVYYCARERYTSGWHDYGMDVWGQGTTVTVSS

SEQ ID NO: 28949 - DNA, 345 bp, synthetic construct
  misc_feature 1..345: note = Description of Artificial Sequence: Synthetic polynucleotide
  source 1..345: mol_type = other DNA
gaggtgcagctgtgggagtctgggggaggcttggtacagcctggggggtccctgagactctcctgtgcagcctccggattcacctttagcagctatgccatgaactgggtccgccaggctccagggaaggggctggagtgggtctcagctattagtggtagtggtggttacacatactacgcagactccgtgaagggccggttcaccatctcccgagacaattccaagaacacgctgtatctgcaaatgagcagcctgagagccgaggacacggccgtttattactgtgcgaaaggggggtccctcttctactggggccagggaaccttggtcaccgtctcttca

SEQ ID NO: 28950 - protein, 115 aa, synthetic construct
  REGION 1..115: note = Description of Artificial Sequence: Synthetic polypeptide
EVQLWESGGGLVQPGGSLRLSCAASGFTFSSYAMNWVRQAPGKGLEWVSAISGSGGYTYYADSVKGRFTISRDNSKNTLYLQMSSLRAEDTAVYYCAKGGSLFYWGQGTLVTVSS

SEQ ID NO: 28951 - DNA, 369 bp, synthetic construct
  misc_feature 1..369: note = Description of Artificial Sequence: Synthetic polynucleotide
  source 1..369: mol_type = other DNA
caggtgcagctggtggagtctgggggaggcgtggtccagcctgggaggtccctgagactctcctgtgcagcgtctggactcaccttcagtaactatgtcatgcactgggtccgccaggctccaggcaaggggctggagtgggtggctgttatatggtatgatggaagtaataaatactatgcagactccgtgaagggccgattcaccatctccagagacaattccaagaacacgttgtatctgcaaatgaacagcctgagagccgaggacacggctgtgtattactgtgcgagagagaagtatagcagcagctggtacgactacggtatggacgtctggggccaagggaccacggtcaccgtctcctca

SEQ ID NO: 28952 - protein, 123 aa, synthetic construct
  REGION 1..123: note = Description of Artificial Sequence: Synthetic polypeptide
QVQLVESGGGVVQPGRSLRLSCAASGLTFSNYVMHWVRQAPGKGLEWVAVIWYDGSNKYYADSVKGRFTISRDNSKNTLYLQMNSLRAEDTAVYYCAREKYSSSWYDYGMDVWGQGTTVTVSS

SEQ ID NO: 28953 - DNA, 351 bp, synthetic construct
  misc_feature 1..351: note = Description of Artificial Sequence: Synthetic polynucleotide
  source 1..351: mol_type = other DNA
caggtgcagctggtggagtctgggggaggcgtggtccagcctgggaagtccctgagactctcctgtgcagcgtctggattcaccttcagtaactatggcatgcactgggtccgccaggctccaggcaaggggctggaatgggtggcagttatttggtatgaagaaaataatcaatactatgcagactccgtgaagggccgattcaccatctccagagacaattccaagaacacgctgtatctgcaaatgaacagcctgagagccgaggacacggctgtgtattactgtgcgagagaactggggttccggtctgactactggggccagggaaccctggtcaccgtctcctca

SEQ ID NO: 28954 - protein, 117 aa, synthetic construct
  REGION 1..117: note = Description of Artificial Sequence: Synthetic polypeptide
QVQLVESGGGVVQPGKSLRLSCAASGFTFSNYGMHWVRQAPGKGLEWVAVIWYEENNQYYADSVKGRFTISRDNSKNTLYLQMNSLRAEDTAVYYCARELGFRSDYWGQGTLVTVSS

SEQ ID NO: 28955 - DNA, 351 bp, synthetic construct
  misc_feature 1..351: note = Description of Artificial Sequence: Synthetic polynucleotide
  source 1..351: mol_type = other DNA
caggtgcagctggtggagtctgggggaggcgtggtccagcctgggaggtccctgagactctcctgtgcagcgtctggattcaccttcagtgactatggcatgcactgggtccgccaggctccaggcaaggggctggagtgggtggcagttatatggtatgatgaaaataataaatactatgtagactccgtgaagggccgattcaccatctccagagacaactccaagaacacgctgtatctgcaaatgaacagcctgagagccgaggacacggctgtatattattgtgcgagagaattggggttccggtctgactactggggccagggaaccctggtcaccgtctcctca

SEQ ID NO: 28956 - protein, 117 aa, synthetic construct
  REGION 1..117: note = Description of Artificial Sequence: Synthetic polypeptide
QVQLVESGGGVVQPGRSLRLSCAASGFTFSDYGMHWVRQAPGKGLEWVAVIWYDENNKYYVDSVKGRFTISRDNSKNTLYLQMNSLRAEDTAVYYCARELGFRSDYWGQGTLVTVSS

SEQ ID NO: 28957 - DNA, 369 bp, synthetic construct; identical to SEQ ID NO: 28903
  misc_feature 1..369: note = Description of Artificial Sequence: Synthetic polynucleotide
  source 1..369: mol_type = other DNA

SEQ ID NO: 28958 - protein, 123 aa, synthetic construct; identical to SEQ ID NO: 28904
  REGION 1..123: note = Description of Artificial Sequence: Synthetic polypeptide

SEQ ID NO: 28959 - DNA, 363 bp, synthetic construct
  misc_feature 1..363: note = Description of Artificial Sequence: Synthetic polynucleotide
  source 1..363: mol_type = other DNA
gaggtgcagctgttggagtctgggggaggcttggtacagcctggggggtccctgagactctcctgtgcagcctctgaattcacctttagcagctatgccatgaactgggtccgccaggctccagggaaggggctggagtgggtctcagttattagtggtcgtggtggtaacacattctacgcagactccgtgaagggccggttcaccatctccagagacaattccaagaacacgctgtatctgcaaatgaacagcctgagagccgaggacacggccgtatatttctgtgcgtcccgtttggcagtggctggctcggaggcttttgatatctggggccaagggacaatggtcaccgtctcttca

SEQ ID NO: 28960 - protein, 121 aa, synthetic construct
  REGION 1..121: note = Description of Artificial Sequence: Synthetic polypeptide
EVQLLESGGGLVQPGGSLRLSCAASEFTFSSYAMNWVRQAPGKGLEWVSVISGRGGNTFYADSVKGRFTISRDNSKNTLYLQMNSLRAEDTAVYFCASRLAVAGSEAFDIWGQGTMVTVSS

SEQ ID NO: 28961 - DNA, 342 bp, synthetic construct
  misc_feature 1..342: note = Description of Artificial Sequence: Synthetic polynucleotide
  source 1..342: mol_type = other DNA
gaggtgcagctggtggagtctgggggaggcctggtcaagcctggggggtccctgagactctcctgtgcagcctctggattcaccttcagtagctatagcatgaactgggtccgccaggctccagggaaggggctggagtgggtctcatccattagtagtagtagtagttacatatactacgcagactcagtgaagggccgattcaccatctccagagacaacgccaagaactcactgtatctgcaaatgaacagcctgagagccgaggacacggctgtgtattactgtgcgagagatcgtgggagcctctggggccagggaaccctggtcaccgtctcctca

SEQ ID NO: 28962 - protein, 114 aa, synthetic construct
  REGION 1..114: note = Description of Artificial Sequence: Synthetic polypeptide
EVQLVESGGGLVKPGGSLRLSCAASGFTFSSYSMNWVRQAPGKGLEWVSSISSSSSYIYYADSVKGRFTISRDNAKNSLYLQMNSLRAEDTAVYYCARDRGSLWGQGTLVTVSS

SEQ ID NO: 28963 - DNA, 351 bp, synthetic construct
  misc_feature 1..351: note = Description of Artificial Sequence: Synthetic polynucleotide
  source 1..351: mol_type = other DNA
caggtgcagctggtggagtctgggggaggcgtggtccagcctgggaggtccctgagactctcctgtgcagcgtctggattcaccttcagtagctatggcatgcactgggtccgccaggctccaggcaaggggctggagtgggtggcagttatatggtatgatgttactaataaaaagtatgcagactccgtgaagggccgattcaccatctccagagacaattccaagaacacgctgtatctgcaaatgaacagcctgacaccagagaacacgggtggatatgagaaccagagagaaaaggggggtctatttgactactggggccagggaaccctggtcaccgtctcctca

SEQ ID NO: 28964 - protein, 117 aa, synthetic construct
  REGION 1..117: note = Description of Artificial Sequence: Synthetic polypeptide
QVQLVESGGGVVQPGRSLRLSCAASGFTFSSYGMHWVRQAPGKGLEWVAVIWYDVTNKKYADSVKGRFTISRDNSKNTLYLQMNSLTPENTGGYENQREKGGLFDYWGQGTLVTVSS

SEQ ID NO: 28965 - DNA, 369 bp, synthetic construct
  misc_feature 1..369: note = Description of Artificial Sequence: Synthetic polynucleotide
  source 1..369: mol_type = other DNA
caggtgcagctggtggagtctgggggaggcgtggtccagcctgggaggtccctgagactctcctgtgcagcgtctggattcaccttcaataactatgtcatgcactgggtccgccaggctccaggcaaggggctggagtgggtggcagttatatggtatgatggaagtaataaatactatgcagactccgtgaagggccgattcaccatctccagagacaattccaagaacacgctgtatctgcaaatgaccagcctgagagccgaggacacggctgtgtattactgtgcgagagagaagtatagcagcaactggtacgactacggtatggacgtctggggccaagggaccacggtcaccgtctcctca

SEQ ID NO: 28966 - protein, 123 aa, synthetic construct
  REGION 1..123: note = Description of Artificial Sequence: Synthetic polypeptide
QVQLVESGGGVVQPGRSLRLSCAASGFTFNNYVMHWVRQAPGKGLEWVAVIWYDGSNKYYADSVKGRFTISRDNSKNTLYLQMTSLRAEDTAVYYCAREKYSSNWYDYGMDVWGQGTTVTVSS

SEQ ID NO: 28967 - DNA, 345 bp, synthetic construct
  misc_feature 1..345: note = Description of Artificial Sequence: Synthetic polynucleotide
  source 1..345: mol_type = other DNA
gaggtgcagctggtggagtctgggggaggcctggtcaagcctggggggtccctgagactctcctgtgcagcctctggattcaccttcagtagctatagcatgaactgggtccgccaggctccagggaaggggctggagtgggtctcatccattagtagtagtagtagttacatatactacgcagactcagtgaagggccgattcaccatctccagagacaacgccaagaactcactgtatctgcaaatgaacagcctgagaaccgaggacacggctgtgtattactgtgcgagagctaacctctttgactactggggccagggaaccctggtcaccgtctcctca

SEQ ID NO: 28968 - protein, 115 aa, synthetic construct
  REGION 1..115: note = Description of Artificial Sequence: Synthetic polypeptide
EVQLVESGGGLVKPGGSLRLSCAASGFTFSSYSMNWVRQAPGKGLEWVSSISSSSSYIYYADSVKGRFTISRDNAKNSLYLQMNSLRTEDTAVYYCARANLFDYWGQGTLVTVSS

SEQ ID NO: 28969 - DNA, 357 bp, synthetic construct
  misc_feature 1..357: note = Description of Artificial Sequence: Synthetic polynucleotide
  source 1..357: mol_type = other DNA
cagctgcagctgcaggagtcgggcccaggactggtgaagccttcggagaccctgtccctcacctgcactgtctctggtggcttcatcagcaggagtacttactactggggctggatccgccagcccccagggaaggggctggagtggattgggagtatctattatagtgggagcacctcctacagcccgtccctcaagagtcgagtcaccatatccgtagacacgtccaaaaaccagttctccctgaagttgagctctgtgaccgccgcagacacggctgtgtattactgtgcgagactgaacagcagctggtcttttgactactggggccagggaaccctggtcaccgtctcctca

SEQ ID NO: 28970 - protein, 119 aa, synthetic construct
  REGION 1..119: note = Description of Artificial Sequence: Synthetic polypeptide
QLQLQESGPGLVKPSETLSLTCTVSGGFISRSTYYWGWIRQPPGKGLEWIGSIYYSGSTSYSPSLKSRVTISVDTSKNQFSLKLSSVTAADTAVYYCARLNSSWSFDYWGQGTLVTVSS

SEQ ID NO: 28971 - DNA, 351 bp, synthetic construct
  misc_feature 1..351: note = Description of Artificial Sequence: Synthetic polynucleotide
  source 1..351: mol_type = other DNA
gaggtgcagctggtggagtctgggggaggcttggtacagcctggggggtccctgagactctcctgtgcagcctctggattcaccttcagtagcaatagcatgaactgggtccgccaggctccagggaaggggctggagtgggtttcatacattagtagtagtagtagtaccatatactacgcagactctgtgaagggccgattcaccatcgccagagacaatgccaagaactcactgtatctgcaaatgaacagcctgagagacgaggacacggctgtgtattactgtgcgagaggaggtgggagcccttttgactactggggccagggaaccctggtcaccgtctcctca

SEQ ID NO: 28972 - protein, 117 aa, synthetic construct
  REGION 1..117: note = Description of Artificial Sequence: Synthetic polypeptide
EVQLVESGGGLVQPGGSLRLSCAASGFTFSSNSMNWVRQAPGKGLEWVSYISSSSSTIYYADSVKGRFTIARDNAKNSLYLQMNSLRDEDTAVYYCARGGGSPFDYWGQGTLVTVSS

SEQ ID NO: 28973 - DNA, 351 bp, synthetic construct
  misc_feature 1..351: note = Description of Artificial Sequence: Synthetic polynucleotide
  source 1..351: mol_type = other DNA
caggtgcagctggtggagtctgggggaggcgtggtccagcctgggaggtccctgagactctcctgtgcagcgtctggattcaccttcagtagctatggcatgcactgggtccgccaggctccaggcaaggggctggagtgggtggcagttatatggtatgatgaaaataataaatactatgtagactccgtgaagggccgattcaccatctccagagacaactccaagaacacgctgtatctgcaaatgaacagcctgagagccgaggacacggctgtgtattactgtgcgagagaattggggttccggtctgactactggggccagggaaccctggtcaccgtctcctca

SEQ ID NO: 28974 - protein, 117 aa, synthetic construct
  REGION 1..117: note = Description of Artificial Sequence: Synthetic polypeptide
QVQLVESGGGVVQPGRSLRLSCAASGFTFSSYGMHWVRQAPGKGLEWVAVIWYDENNKYYVDSVKGRFTISRDNSKNTLYLQMNSLRAEDTAVYYCARELGFRSDYWGQGTLVTVSS

SEQ ID NO: 28975 - DNA, 369 bp, synthetic construct
  misc_feature 1..369: note = Description of Artificial Sequence: Synthetic polynucleotide
  source 1..369: mol_type = other DNA
caggtgcagctggtggagtctgggggaggcgtggtccagcctgggaggtccctgagactctcctgtgcagcgtctggattcaccttcagtgactatgtcatgcactgggtccgccaggctccaggcaaggggctggagtgggtggcagttatatggtatgatggaagtaataaatactatgcagactccgtgaagggccgattcaccatctccagagacaattccaagaacacgctgtatctgcaaatgaacagcctgagagccgaagacacggctgtgtattactgtgcgagagagaagtatagcagcagctggtacgactacggtttggacgtctggggccaagggaccacggtcaccgtctcctca

SEQ ID NO: 28976 - protein, 123 aa, synthetic construct
  REGION 1..123: note = Description of Artificial Sequence: Synthetic polypeptide
QVQLVESGGGVVQPGRSLRLSCAASGFTFSDYVMHWVRQAPGKGLEWVAVIWYDGSNKYYADSVKGRFTISRDNSKNTLYLQMNSLRAEDTAVYYCAREKYSSSWYDYGLDVWGQGTTVTVSS

SEQ ID NO: 28977 - DNA, 351 bp, synthetic construct
  misc_feature 1..351: note = Description of Artificial Sequence: Synthetic polynucleotide
  source 1..351: mol_type = other DNA
caggtgcaactggtggagtctgggggaggcgtggtccagcctgggaggtccctgagactctcctgtgcagcgtctggattcaccttcagtgactatggcatgcactgggtccgccaggctccaggcaaggggctggagtggatggcagttatatggtatgatgtaactaataaatactatgcagactccgtgaagggccgattcaccatctccagagacaattccaagaacacgctgtatctgcaaatgaacagcctgagagccgaggacacggctgtttattactgtgcgagagagcttggctggtacgaggactactggggccagggaaccctggtcaccgtctcctca

SEQ ID NO: 28978 - protein, 117 aa, synthetic construct
  REGION 1..117: note = Description of Artificial Sequence: Synthetic polypeptide
QVQLVESGGGVVQPGRSLRLSCAASGFTFSDYGMHWVRQAPGKGLEWMAVIWYDVTNKYYADSVKGRFTISRDNSKNTLYLQMNSLRAEDTAVYYCARELGWYEDYWGQGTLVTVSS

SEQ ID NO: 28979 - DNA, 363 bp, synthetic construct
  misc_feature 1..363: note = Description of Artificial Sequence: Synthetic polynucleotide
  source 1..363: mol_type = other DNA
caggtgcagctggtggagtctgggggaggcgtggtccagcctgggaggtccctgagactctcctgtgcagcctctggattcaccttcagtagctatggcatgcactgggtccgccaggctccaggcaaggggctggagtgggtggcagttatatcatatggtggaagtaataaagactctgcagactccgtgaagggccgattcatcatctccagagacaattccaagaacacgctgtatctgcaaatgaacagcctgagagctgaggacacggctgtgtattactgtgtgagacggggatacagctatggcgggtacggtatggacgtctggggccaagggaccacggtcaccgtctcctca

SEQ ID NO: 28980 - protein, 121 aa, synthetic construct
  REGION 1..121: note = Description of Artificial Sequence: Synthetic polypeptide
QVQLVESGGGVVQPGRSLRLSCAASGFTFSSYGMHWVRQAPGKGLEWVAVISYGGSNKDSADSVKGRFIISRDNSKNTLYLQMNSLRAEDTAVYYCVRRGYSYGGYGMDVWGQGTTVTVSS

SEQ ID NO: 28981 - DNA, 357 bp, synthetic construct
  misc_feature 1..357: note = Description of Artificial Sequence: Synthetic polynucleotide
  source 1..357: mol_type = other DNA
cagctgcagctgcaggagtcgggcccaggactggtgaagccttcggagaccctgtccctcacctgcactgtctctggtggctccatcagcaggagtagttcctactggggctggatccgccagcccccagggaagggactggagtggattgggagtatctattatagtgggtacacctattacaccccgtccctcaagagtcgagtcaccatatccgtggacacgtccaagaaccagttctccctgaggctgagctctgtgaccgccgcagacacggcttcgtattactgtgcgagactgagcagcagttggtcttttgacttctggggccagggaaccctggtcaccgtctcctca

SEQ ID NO: 28982 - protein, 119 aa, synthetic construct
  REGION 1..119: note = Description of Artificial Sequence: Synthetic polypeptide
QLQLQESGPGLVKPSETLSLTCTVSGGSISRSSSYWGWIRQPPGKGLEWIGSIYYSGYTYYTPSLKSRVTISVDTSKNQFSLRLSSVTAADTASYYCARLSSSWSFDFWGQGTLVTVSS

SEQ ID NO: 28983 - DNA, 363 bp, synthetic construct
  misc_feature 1..363: note = Description of Artificial Sequence: Synthetic polynucleotide
  source 1..363: mol_type = other DNA
caggtgcagttggtggagtctgggggaggcgtggtccagcctgggaggtccctgagactctcctgtgcagcctctggattcaccttcagcagctatggcatgcactgggtccgccaggctccaggcaaggggctggagtgggtggcagttatatcatatgcgggaactaatcaatactatgcagactccgtgaagggccgattcaccatttccagagacaattccaagaacacgctctatctgcaaatgaacagcctgagagctgaggacacggctgtttattattgtgtgagacggggatacagctatggcgggtacggtatggacgtctggggccaagggaccacggtcaccgtctcctca

SEQ ID NO: 28984 - protein, 121 aa, synthetic construct
  REGION 1..121: note = Description of Artificial Sequence: Synthetic polypeptide
QVQLVESGGGVVQPGRSLRLSCAASGFTFSSYGMHWVRQAPGKGLEWVAVISYAGTNQYYADSVKGRFTISRDNSKNTLYLQMNSLRAEDTAVYYCVRRGYSYGGYGMDVWGQGTTVTVSS

SEQ ID NO: 28985 - DNA, 363 bp, synthetic construct
  misc_feature 1..363: note = Description of Artificial Sequence: Synthetic polynucleotide
  source 1..363: mol_type = other DNA
caggtgcagctggtggagtctgggggaggcgtggtccagcctgggaggtccctgagactctcctgtgcagcctctggattcaccttcagtagctatggcatgcactgggtccgccaggctccaggcaaggggctggagtgggtgtcaataatatcatatggtggacgtaataatcactatgcagactccgtgaagggccgattcaccatctccagagacaattccaagaacacgctgtatctgcaaatgaacagcctgagagctgaggacacggctgtgtattactgtgtgagacggggatacagctatggcgggtacggtatggacgtctggggccaagggaccacggtcaccgtctcctca

SEQ ID NO: 28986 - protein, 121 aa, synthetic construct
  REGION 1..121: note = Description of Artificial Sequence: Synthetic polypeptide
QVQLVESGGGVVQPGRSLRLSCAASGFTFSSYGMHWVRQAPGKGLEWVSIISYGGRNNHYADSVKGRFTISRDNSKNTLYLQMNSLRAEDTAVYYCVRRGYSYGGYGMDVWGQGTTVTVSS

SEQ ID NO: 28987 - DNA, 342 bp, synthetic construct
  misc_feature 1..342: note = Description of Artificial Sequence: Synthetic polynucleotide
  source 1..342: mol_type = other DNA
gaggtgcagctggtggagtctgggggaggcctggtcaagcctggggggtccctgagactctcctgtgcagcctctggattcaccttcagcagctatgtcatgaactgggtccgccaggctccagggaaggggctggagtgggtctcatccattagtggtagtagtacttacatatactgcgcagactcaatcaagggccgattcaccatctcccgagacaacgccaagaactctctgtatctgcaaatgaacagcctgagagccgatgacacggctgtgtattactgtgcgagagatcgaggctccatctggggccaagggacaatggtcaccgtctcttca

SEQ ID NO: 28988 - protein, 114 aa, synthetic construct
  REGION 1..114: note = Description of Artificial Sequence: Synthetic polypeptide
EVQLVESGGGLVKPGGSLRLSCAASGFTFSSYVMNWVRQAPGKGLEWVSSISGSSTYIYCADSIKGRFTISRDNAKNSLYLQMNSLRADDTAVYYCARDRGSIWGQGTMVTVSS

SEQ ID NO: 28989 - DNA, 372 bp, synthetic construct
  misc_feature 1..372: note = Description of Artificial Sequence: Synthetic polynucleotide
  source 1..372: mol_type = other DNA
caggtgcagctggtggagtctgggggaggcgtggtccagcctgggaggtccctgagactctcctgtgcagcctctggattcaccttcagtaactatggcatctactgggtccgccaggctccaggcaaggggctggagtgggtggcagttatatcatatgatggaagtaataaatactatgcagactccgtgaagggccgattcaccatctccagagacaattccaagaacacgctgtatctgcaaatgaacagcctgagagctgaggacacggctgtgtattactgtgcgagagatcggggagcagtggctgcttactactactacggtatagacgtctggggccaagggaccacggtcaccgtctcctca

SEQ ID NO: 28990 - protein, 124 aa, synthetic construct
  REGION 1..124: note = Description of Artificial Sequence: Synthetic polypeptide
QVQLVESGGGVVQPGRSLRLSCAASGFTFSNYGIYWVRQAPGKGLEWVAVISYDGSNKYYADSVKGRFTISRDNSKNTLYLQMNSLRAEDTAVYYCARDRGAVAAYYYYGIDVWGQGTTVTVSS

SEQ ID NO: 28991 - DNA, 354 bp, synthetic construct
  misc_feature 1..354: note = Description of Artificial Sequence: Synthetic polynucleotide
  source 1..354: mol_type = other DNA
caggtgcagctggtggagtctgggggaggcgtggtccagcctgggaggtccctgagactctcctgtgcagcgtctggattcaccttcagtagctatggcattcactgggtccgccaggctccaggcaaggggctggagtgggtggcagttatatggcatgatggaagtaataaatactatgcagactccgtgaagggccgattcaccatctccagagacaattccaagaacacgctgtatctgcaaatgaacagcctgagagccgaggacacggctgtgtattactgtgcgagagatctgagtatgggcggtatggacgtctggggccaagggaccacggtcaccgtctcctca

SEQ ID NO: 28992 - protein, 118 aa, synthetic construct
  REGION 1..118: note = Description of Artificial Sequence: Synthetic polypeptide
QVQLVESGGGVVQPGRSLRLSCAASGFTFSSYGIHWVRQAPGKGLEWVAVIWHDGSNKYYADSVKGRFTISRDNSKNTLYLQMNSLRAEDTAVYYCARDLSMGGMDVWGQGTTVTVSS

SEQ ID NO: 28993 - DNA, 363 bp, synthetic construct
  misc_feature 1..363: note = Description of Artificial Sequence: Synthetic polynucleotide
  source 1..363: mol_type = other DNA
gaggtgcagctgttggagtctgggggaggcttggtacagcctggggggtccctgagactctcctgtgtagcctctgaattcacctttagcagctatgtcatgaactgggtccgccaggctccagggaaggggctggagtgggtctcagttattagtggtcgtggtggtaacacattctacgcagactccgtgaagggccggttcaccatctccagagacaattccaagaacacgctgtatctgcaaatgaacagcctgagagccgaggacacggccgtatattactgtgcgtcccgtttggcagtggctggctcggaggcttttgatatctggggccaagggacaatggtcagcgtctcttca

SEQ ID NO: 28994 - protein, 121 aa, synthetic construct
  REGION 1..121: note = Description of Artificial Sequence: Synthetic polypeptide
EVQLLESGGGLVQPGGSLRLSCVASEFTFSSYVMNWVRQAPGKGLEWVSVISGRGGNTFYADSVKGRFTISRDNSKNTLYLQMNSLRAEDTAVYYCASRLAVAGSEAFDIWGQGTMVSVSS

SEQ ID NO: 28995 - DNA, 354 bp, synthetic construct
  misc_feature 1..354: note = Description of Artificial Sequence: Synthetic polynucleotide
  source 1..354: mol_type = other DNA
caggtgcagctggtggagtctgggggaggcgtggtccagcctgggaggtccctgagactctcctgtgcagcgtctggattcaccttcagtagctatggcatgcactgggtccgccaggctccaggcaaggggctggagtgggtggcagttatatggcatgatggaagtaataaatactatgcagactccgtgaagggccgattcaccatctccagagacaattccaagaacacgctgtatctgcaaatgaacagcctgagagccgaggacacggctgtgtattactgtgcgagagatctgagtatgggcggtatggacgtctggggccaagggaccacggtcaccgtctcctca

SEQ ID NO: 28996 - protein, 118 aa, synthetic construct
  REGION 1..118: note = Description of Artificial Sequence: Synthetic polypeptide
QVQLVESGGGVVQPGRSLRLSCAASGFTFSSYGMHWVRQAPGKGLEWVAVIWHDGSNKYYADSVKGRFTISRDNSKNTLYLQMNSLRAEDTAVYYCARDLSMGGMDVWGQGTTVTVSS

SEQ ID NO: 28997 - DNA, 345 bp, synthetic construct
  misc_feature 1..345: note = Description of Artificial Sequence: Synthetic polynucleotide
  source 1..345: mol_type = other DNA
gaggtgcagctgttggagtctgggggaggcttggtacagccgggggggtccctgagactctcctgtgcaacctcaggattcacctttagcagctatgtcatgagctgggtccgccaggctccagggaaggggctggagtgggtctcaggtattagtggtagtggtggtagcacaaacaacgcagactccgtgaagggccggttcaccatctccagagacaattccaagaacacgctgtatctgcaagtgaacagcctgagagccgaggacacggccgtatattactgtgcccgcagctccttgtttgactactggggccagggaaccctggtcaccgtctcctca

SEQ ID NO: 28998 - protein, 115 aa, synthetic construct
  REGION 1..115: note = Description of Artificial Sequence: Synthetic polypeptide
EVQLLESGGGLVQPGGSLRLSCATSGFTFSSYVMSWVRQAPGKGLEWVSGISGSGGSTNNADSVKGRFTISRDNSKNTLYLQVNSLRAEDTAVYYCARSSLFDYWGQGTLVTVSS

SEQ ID NO: 28999 - DNA, 351 bp, synthetic construct
  misc_feature 1..351: note = Description of Artificial Sequence: Synthetic polynucleotide
  source 1..351: mol_type = other DNA
caggtgcagctggtggagtctgggggaggcgtggtccagcctgggaggtccctgagactctcctgtgcagcgtctggattcaccttcagtaactatggcatgcactgggtccgccaggctccaggcaaggggctggagtgggtggcagttatatggtatgatgaaagtaataaatactatgaagactccgtgaagggccgattcaccatctccagagacaattccaagaacacgctgtatctgcaaatgaacagcctgagagccgaggacacggctgtgtattactgtgtgagggaagtggggtttctttctgactactggggccagggaatcctggtcaccgtctcctca

SEQ ID NO: 29000 - protein, 117 aa, synthetic construct
  REGION 1..117: note = Description of Artificial Sequence: Synthetic polypeptide
QVQLVESGGGVVQPGRSLRLSCAASGFTFSNYGMHWVRQAPGKGLEWVAVIWYDESNKYYEDSVKGRFTISRDNSKNTLYLQMNSLRAEDTAVYYCVREVGFLSDYWGQGILVTVSS

SEQ ID NO: 29001 - DNA, 363 bp, synthetic construct
  misc_feature 1..363: note = Description of Artificial Sequence: Synthetic polynucleotide
  source 1..363: mol_type = other DNA
gaggtgcagctgttggagtctgggggaggcttggtacagcctggggggtccctgagactctcctgtgcagcctctggattcacctttagcagctatgccatgaactgggtccgccaggctccagggatggggctggagtgggtctcagttattagtcgtagtggtggttacacatactacgcggactccgtgaagggccggttcaccatctccagagacaattccaagaacacgctgtatctgcaaatgaacagcctgagagccgaggacacggccgtctattactgtgcgtcccgtttagcagtggctggctcggaggcttttgatatctggggccaagggacaatggtcaccgtctcttca

SEQ ID NO: 29002 - protein, 121 aa, synthetic construct
  REGION 1..121: note = Description of Artificial Sequence: Synthetic polypeptide
EVQLLESGGGLVQPGGSLRLSCAASGFTFSSYAMNWVRQAPGMGLEWVSVISRSGGYTYYADSVKGRFTISRDNSKNTLYLQMNSLRAEDTAVYYCASRLAVAGSEAFDIWGQGTMVTVSS

SEQ ID NO: 29003 - DNA, 351 bp, synthetic construct
  misc_feature 1..351: note = Description of Artificial Sequence: Synthetic polynucleotide
  source 1..351: mol_type = other DNA
caggtgcagctggtggagtctgggggaggcgtggtccagcctgggaggtccctgagactctcctgtgcagcgtctggattcaccttcagtagctatggcatgcactgggtccgccaggctccaggcaaggggctggagtgggtggcagttatatggtatgatgaaagtaataaatactatgcagactccgtgaagggccgattcaccatctccagagacaattccaagaacacgctgtatctgcaaatgaacagcctgagagccgaggacacggctgtgtattactgtgcgagggaactggggtttctctctgactactggggccagggaaccctggtcaccgtctcctca

SEQ ID NO: 29004 - protein, 117 aa, synthetic construct
  REGION 1..117: note = Description of Artificial Sequence: Synthetic polypeptide
QVQLVESGGGVVQPGRSLRLSCAASGFTFSSYGMHWVRQAPGKGLEWVAVIWYDESNKYYADSVKGRFTISRDNSKNTLYLQMNSLRAEDTAVYYCARELGFLSDYWGQGTLVTVSS

SEQ ID NO: 29005 - DNA, 345 bp, synthetic construct
  misc_feature 1..345: note = Description of Artificial Sequence: Synthetic polynucleotide
  source 1..345: mol_type = other DNA
gaggtgcaactgttggagtctgggggaggcttggtacagcctggggggtccctgagactctcctgtgcagcctctggattcacctttagcagctatgtcatgacctgggtccgccaggctccagggaaggggctggagtgggtctcaactattagtggtagtggtggttggacatattatgcagactccgtgaagggccggttcaccatttccagagacaattccaagaacacgctgtatctgcaaatgaacagcctgagagccgaggacacggccgaatattactgtgcccgcagctccttgtttgactattggggccagggaaccctggtcaccgtctcctca

SEQ ID NO: 29006 - protein, 115 aa, synthetic construct
  REGION 1..115: note = Description of Artificial Sequence: Synthetic polypeptide
EVQLLESGGGLVQPGGSLRLSCAASGFTFSSYVMTWVRQAPGKGLEWVSTISGSGGWTYYADSVKGRFTISRDNSKNTLYLQMNSLRAEDTAEYYCARSSLFDYWGQGTLVTVSS

SEQ ID NO: 29007 - DNA, 363 bp, synthetic construct
  misc_feature 1..363: note = Description of Artificial Sequence: Synthetic polynucleotide
  source 1..363: mol_type = other DNA
caggtgcagctggtagagtctgggggaggcgtggtccagcctgggaggtccctgagactctcctgtgcagcctctggattcaccttcagtagctatggcatgcactgggtccgccaggctccaggcaaggggctggagtgggtggcaattatatcatatgctggaagtaataaatcctatgcagactccgtgaagggccgattcaccatctccagagacaattccaagaacatgctgtatctgcaaatgaatagcctgagagctgaggacacggctgtgtattactgtgtgagacggggatacagctatggcgggtacggtatggacgtctggggccaaggggccacggtcaccgtctcctca

SEQ ID NO: 29008 - protein, 121 aa, synthetic construct
  REGION 1..121: note = Description of Artificial Sequence: Synthetic polypeptide
QVQLVESGGGVVQPGRSLRLSCAASGFTFSSYGMHWVRQAPGKGLEWVAIISYAGSNKSYADSVKGRFTISRDNSKNMLYLQMNSLRAEDTAVYYCVRRGYSYGGYGMDVWGQGATVTVSS

SEQ ID NO: 29009 - DNA, 345 bp, synthetic construct
  misc_feature 1..345: note = Description of Artificial Sequence: Synthetic polynucleotide
  source 1..345: mol_type = other DNA
gaggtgcagttggtggagtctgggggaggcctggtcaagcctggggggtccctgagactctcctgtgtagcctctggattcaccttcagtagctatagcatgaactgggtccgccaggctccagggaaggggctggagtgggtctcatccattagtggtagtagtagttacatatactacgcagactcagtgaagggccgattcaccatctccagagacaacgccaagaactcactgtttctgcaaatgaacagcctgagagccgaggacacggctgtgtattactgtgcgagagttaacaactttgactactggggccagggaaccctggtcaccgtctcctca

SEQ ID NO: 29010 - protein, 115 aa, synthetic construct
  REGION 1..115: note = Description of Artificial Sequence: Synthetic polypeptide
EVQLVESGGGLVKPGGSLRLSCVASGFTFSSYSMNWVRQAPGKGLEWVSSISGSSSYIYYADSVKGRFTISRDNAKNSLFLQMNSLRAEDTAVYYCARVNNFDYWGQGTLVTVSS

SEQ ID NO: 29011 - DNA, 363 bp, synthetic construct
  misc_feature 1..363: note = Description of Artificial Sequence: Synthetic polynucleotide
  source 1..363: mol_type = other DNA
caggtgcagctggtggagtctgggggaggcgtggtccagcctgggaggtccctgagactctcctgtgcagcctctggattcaccttcagtaattatggcatgcactgggtccgccaggctccaggcaaggggctggagtgggtggcaattatatcatatgctggaagtaataaatactatgcagactccgtgaagggccgattcaccatctccagagacaattccaagaacacgctgtatctgcaaatgaacagcctgagagctgaggacacggctgtgtattactgtgtgagacgtataacagctcgtctctactacggtatggacgtctggggccaagggaccacggtcaccgtctcctca

SEQ ID NO: 29012 - protein, 121 aa, synthetic construct
  REGION 1..121: note = Description of Artificial Sequence: Synthetic polypeptide
QVQLVESGGGVVQPGRSLRLSCAASGFTFSNYGMHWVRQAPGKGLEWVAIISYAGSNKYYADSVKGRFTISRDNSKNTLYLQMNSLRAEDTAVYYCVRRITARLYYGMDVWGQGTTVTVSS

SEQ ID NO: 29013 - DNA, 357 bp, synthetic construct
  misc_feature 1..357: note = Description of Artificial Sequence: Synthetic polynucleotide
  source 1..357: mol_type = other DNA
cagctgcagctgcaggagtcgggcccaggactggtgaggccttcggagaccctgtccctcacctgcactgtctctggtggctccatcagtaggagtagttactactggggctggatccgccagcccccaggaaaggggctggagtggattgggaatatttattatagtgggagcacctacgacaacccgtccctcaagagtcgagtcaccatatccgtagacacgtccaagaaccagttctccctgaagctgagctctgtgaccgccgcggacacggctgtttattactgtgggagacatggaaaagactggggccttgactactggggccagggaaccctggtcaccgtctcctca

SEQ ID NO: 29014 - protein, 119 aa, synthetic construct
  REGION 1..119: note = Description of Artificial Sequence: Synthetic polypeptide
QLQLQESGPGLVRPSETLSLTCTVSGGSISRSSYYWGWIRQPPGKGLEWIGNIYYSGSTYDNPSLKSRVTISVDTSKNQFSLKLSSVTAADTAVYYCGRHGKDWGLDYWGQGTLVTVSS

SEQ ID NO: 29015 - DNA, 369 bp, synthetic construct
  misc_feature 1..369: note = Description of Artificial Sequence: Synthetic polynucleotide
  source 1..369: mol_type = other DNA
caggtgcagctggtggagtctgggggaggcgtggtccagcctgggaggtccctgagactctcctgtgcagcgtctggattcaccttcagtaactatgtcatgcactgggtccgccaggctccaggcaaggggctggagtgggtggcagttatatggtatgatggaagtaataaatactatgcagactccgtgaagggccgattcaccatctccagagacaattccaagaacacgctgtatctgcaaatgaacagcctgagagccgaggacacggctgtgtattactgtacgagagaggtatatagcagtggctggtacgactacggtatggacgtctggggccaagggaccacggtcaccgtctcctca

SEQ ID NO: 29016 - protein, 123 aa, synthetic construct
  REGION 1..123: note = Description of Artificial Sequence: Synthetic polypeptide
QVQLVESGGGVVQPGRSLRLSCAASGFTFSNYVMHWVRQAPGKGLEWVAVIWYDGSNKYYADSVKGRFTISRDNSKNTLYLQMNSLRAEDTAVYYCTREVYSSGWYDYGMDVWGQGTTVTVSS

SEQ ID NO: 29017 - DNA, 363 bp, synthetic construct
  misc_feature 1..363: note = Description of Artificial Sequence: Synthetic polynucleotide
  source 1..363: mol_type = other DNA
gaggtgcagctgttggagtctgggggaggcttggtacagcctggggggtccctgagactctcctgtgcagcctctgaattcacctttagcagctatgccatgaactgggtccgccaggctccagggaaggggctggagtgggtctcagttattagtggtcgtggtattaacacattctacgcagactccgtgaagggccggttcaccatttccagagacaattccaagaacacgctgtatctgcaaatgaacagcctgagagccgaggacacggccgtatattactgtgcgtcccgtttagcagtggctggctcggaggcttttgatatctggggccaagggacaatggtcaccgtctcttca

SEQ ID NO: 29018 - protein, 121 aa, synthetic construct
  REGION 1..121: note = Description of Artificial Sequence: Synthetic polypeptide
EVQLLESGGGLVQPGGSLRLSCAASEFTFSSYAMNWVRQAPGKGLEWVSVISGRGINTFYADSVKGRFTISRDNSKNTLYLQMNSLRAEDTAVYYCASRLAVAGSEAFDIWGQGTMVTVSS

SEQ ID NO: 29019 - DNA, 357 bp, synthetic construct
  misc_feature 1..357: note = Description of Artificial Sequence: Synthetic polynucleotide
  source 1..357: mol_type = other DNA
cagctgcagctgcaggagtcgggcccaggactggtgaagccttcggagaccctgtccctcacctgcactgtctctggtggctccatcagtaggagtagttactactggggctggatccgccagcccccagggatggggctggaatggattgggaatatttattatagtgggaacacctacaacaacccgtccctcaagagtcgagtcaccatatccgtagacacgtccaagaaccagttctccctgaagctgaactctgtgaccgccgcagacacggctgtgtattactgtgggagacatggaaaagactggggccttgactactggggccagggaaccctggtcatcgtctcctca

SEQ ID NO: 29020 - protein, 119 aa, synthetic construct
  REGION 1..119: note = Description of Artificial Sequence: Synthetic polypeptide
QLQLQESGPGLVKPSETLSLTCTVSGGSISRSSYYWGWIRQPPGMGLEWIGNIYYSGNTYNNPSLKSRVTISVDTSKNQFSLKLNSVTAADTAVYYCGRHGKDWGLDYWGQGTLVIVSS

SEQ ID NO: 29021 - DNA, 363 bp, synthetic construct
  misc_feature 1..363: note = Description of Artificial Sequence: Synthetic polynucleotide
  source 1..363: mol_type = other DNA
caggtgcagctggtggagtctgggggaggcgtggtccagcctgggaggtccctgagactctcctgtgcagcctctggattcaccttcagtagctatggcatgcactgggtccgccaggctccaggcaaggggctggagtgggtggcaattatatcatatgttggaaataataaatactatgcagactccgtgaagggccgattcaccatctccagagacaattccaagaacacgctgtatctgcaaatgaacagcctgagagttgaggacacggctgtgtattactgtgcgagacggggatacagctatggcgggtacggtatggacgtctggggccaagggaccacggtcaccgtctcctca

SEQ ID NO: 29022 - protein, 121 aa, synthetic construct
  REGION 1..121: note = Description of Artificial Sequence: Synthetic polypeptide
QVQLVESGGGVVQPGRSLRLSCAASGFTFSSYGMHWVRQAPGKGLEWVAIISYVGNNKYYADSVKGRFTISRDNSKNTLYLQMNSLRVEDTAVYYCARRGYSYGGYGMDVWGQGTTVTVSS

SEQ ID NO: 29023 - DNA, 357 bp, synthetic construct
  misc_feature 1..357: note = Description of Artificial Sequence: Synthetic polynucleotide
  source 1..357: mol_type = other DNA
cagctgcagctgcaggagtcgggcccaggactggtgaagcctgcggagaccctgtccctcacctgcactgtctctggtggctccatcagcagaagtagttactactggggctggatccgccagcccccagggaaggggctggagtggattgggagtatctattatagtgggagcacctactacaacccgtccctcaagagtcgagtcaccatatccgtggacacgtccaagaaccagttctccctgaagctgagctctgtgaccgccgcagacacggctgtgtattactgtgcgagccttagcagcagctgggacttccagcactggggccagggcaccctggtcaccgtctcctca

SEQ ID NO: 29024 - protein, 119 aa, synthetic construct
  REGION 1..119: note = Description of Artificial Sequence: Synthetic polypeptide
QLQLQESGPGLVKPAETLSLTCTVSGGSISRSSYYWGWIRQPPGKGLEWIGSIYYSGSTYYNPSLKSRVTISVDTSKNQFSLKLSSVTAADTAVYYCASLSSSWDFQHWGQGTLVTVSS

SEQ ID NO: 29025 - DNA, 363 bp, synthetic construct
  misc_feature 1..363: note = Description of Artificial Sequence: Synthetic polynucleotide
  source 1..363: mol_type = other DNA
gaggtgcagctgttggagtctgggggaggcttggtacagcctggggggtccctgagactctcctgtgcagcctctggattcacctttagcaactatgccatgaactgggtccgccaggctccagggaaggggctggagtgggtctcagctattagtggtggtggtggtaacacattctacgcagactccgtgaagggccggttcaccatctccagagacaattccaagaacacgctgtatctgcaaatgaacggcctgagagccgaggacacggccgtatattactgtgcgtcccgtatagcagtggctggctcggaggcttttgctatctggggccaagggacattggtcaccgtctcttca

SEQ ID NO: 29026 - protein, 121 aa, synthetic construct
  REGION 1..121: note = Description of Artificial Sequence: Synthetic polypeptide
EVQLLESGGGLVQPGGSLRLSCAASGFTFSNYAMNWVRQAPGKGLEWVSAISGGGGNTFYADSVKGRFTISRDNSKNTLYLQMNGLRAEDTAVYYCASRIAVAGSEAFAIWGQGTLVTVSS

SEQ ID NO: 29027 - DNA, 357 bp, synthetic construct
  misc_feature 1..357: note = Description of Artificial Sequence: Synthetic polynucleotide
  source 1..357: mol_type = other DNA
cagctgcatctgcaggagtcgggcccaggactggtgaagccttcggagaccctgtccctcacctgcactgtctctggtgcctccatcagcagaagtagttactactggggctggatccgccagcccccagggaaggggctggagtggattgggagtatttattatagtgggagcgcccagtacaacccgtccctcaagagtcgagtcaccatatccgtagacacgtccaagaaccagttctccctgacgctgagctctgtgaccgccgcagacacggctgtatattactgtgcgagactgagcagcagctggtcttttgactactggggccagggaaccctggtcaccgtctcctca

SEQ ID NO: 29028 - protein, 119 aa, synthetic construct
  REGION 1..119: note = Description of Artificial Sequence: Synthetic polypeptide
QLHLQESGPGLVKPSETLSLTCTVSGASISRSSYYWGWIRQPPGKGLEWIGSIYYSGSAQYNPSLKSRVTISVDTSKNQFSLTLSSVTAADTAVYYCARLSSSWSFDYWGQGTLVTVSS

SEQ ID NO: 29029 - DNA, 348 bp, synthetic construct
  misc_feature 1..348: note = Description of Artificial Sequence: Synthetic polynucleotide
  source 1..348: mol_type = other DNA
gaggtgcaactggtggagtctgggggaggcttggtacagcctggggggtccctgagactctcctgtgtagtctctggattcaccttcagtagccagagcatgaactgggtccgccaggctccagggaaggggctggagtgggtctcatacattagtattagtagtaccatatactatgcagactctgtgaagggccgattcaccatctccagagacaatgccaagaactcactgtatctgcaaatgaacagcctgagagacgaggacacggctgtgtattactgtgcgagaggaggtgggagcccttttgactcctggggccagggaaccctggtcaccgtctcctca

SEQ ID NO: 29030 - protein, 116 aa, synthetic construct
  REGION 1..116: note = Description of Artificial Sequence: Synthetic polypeptide
EVQLVESGGGLVQPGGSLRLSCVVSGFTFSSQSMNWVRQAPGKGLEWVSYISISSTIYYADSVKGRFTISRDNAKNSLYLQMNSLRDEDTAVYYCARGGGSPFDSWGQGTLVTVSS

SEQ ID NO: 29031 - DNA, 357 bp, synthetic construct
  misc_feature 1..357: note = Description of Artificial Sequence: Synthetic polynucleotide
  source 1..357: mol_type = other DNA
cagctgcagttgcaggagtcgggcccaggactggtgaagttttcggagaccctgtccctcacctgcactgtctctggtggctccatcagcagaagtagttactactggggctggatccgccagcccccagggaaggggctggagtggatagggaatatctattatagtgggtatccctactacaatccgtccctcaagagtcgagtcaccatatccgtagacacgtccaagaaccagttctccctgaagctgagctctgtgaccgccgcagacacggctgtgtattactgtgcgagacatagcaccagctggtcccttgactactggggccagggaaccctggtcaccgtctcctca

SEQ ID NO: 29032 - protein, 119 aa, synthetic construct
  REGION 1..119: note = Description of Artificial Sequence: Synthetic polypeptide
QLQLQESGPGLVKFSETLSLTCTVSGGSISRSSYYWGWIRQPPGKGLEWIGNIYYSGYPYYNPSLKSRVTISVDTSKNQFSLKLSSVTAADTAVYYCARHSTSWSLDYWGQGTLVTVSS

SEQ ID NO: 29033 - DNA, 351 bp, synthetic construct
  misc_feature 1..351: note = Description of Artificial Sequence: Synthetic polynucleotide
  source 1..351: mol_type = other DNA
caggtgcagctggtggagtctgggggaggcgtggtccagcctgggaggtccctgagactctcctgtgaagcgtctggattcaccttcagtagctatggcatgcactgggtccgccaggctccaggcaaggggctggagtgggtggcagttatttggtatgaagaaaataatcaatactatgcagactccgtgaagggccgattcaccatctccagagacaattccaagaacacgctgtatctacaaatgaacagcctgagagccgaggacacggctgtgtattactgtgcgagagaactggggttccggtctgactactggggccagggaaccctggtcaccgtctcctca

SEQ ID NO: 29034 - protein, 117 aa, synthetic construct
  REGION 1..117: note = Description of Artificial Sequence: Synthetic polypeptide
QVQLVESGGGVVQPGRSLRLSCEASGFTFSSYGMHWVRQAPGKGLEWVAVIWYEENNQYYADSVKGRFTISRDNSKNTLYLQMNSLRAEDTAVYYCARELGFRSDYWGQGTLVTVSS

SEQ ID NO: 29035 - DNA, 339 bp, synthetic construct
  misc_feature 1..339: note = Description of Artificial Sequence: Synthetic polynucleotide
  source 1..339: mol_type = other DNA
gaggtgcagctggtggagtctgggggaggcctggtcaagcctggggggtccctgagactctcctgtgcagcctctggattcaccttcagtagctatagcatgaactgggtccgccaggctccagggaaggggctggagtgggtctcatccattagtagtagtagtagttacatatactacgcagactcagtgaagggccgattcaccatctccagagacaacgccaagaactcactgtatctgcaaatgaacagcctgagagccgaggacacggctgtgtattactgtgcgagattaggggactactggggccagggaaccctggtcgccgtctcctca

SEQ ID NO: 29036 - protein, 113 aa, synthetic construct
  REGION 1..113: note = Description of Artificial Sequence: Synthetic polypeptide
EVQLVESGGGLVKPGGSLRLSCAASGFTFSSYSMNWVRQAPGKGLEWVSSISSSSSYIYYADSVKGRFTISRDNAKNSLYLQMNSLRAEDTAVYYCARLGDYWGQGTLVAVSS

SEQ ID NO: 29037 - DNA, 357 bp, synthetic construct
  misc_feature 1..357: note = Description of Artificial Sequence: Synthetic polynucleotide
  source 1..357: mol_type = other DNA
cagctgcagctgcaggagtcgggcccaggactggtgaagccttcggagaccctgtccctcatttgtactgtctctggtggctccatcgacaggagtagttactactggggctggatccgccagcccccagggaaggggctggagtggattgggagtatctattatagtgggagcgcctatcacaacccgtccctcaagagtcgaggcaccatatccgtagatacgtccaagaaccagttctccctgaagctgagctctgtgaccgccgcagacacggctgcgtattactgtgcgagactgagcagcagctggtcctttgactactggggccagggaaccctggtcaccgtctcctct

SEQ ID NO: 29038 - protein, 119 aa, synthetic construct
  REGION 1..119: note = Description of Artificial Sequence: Synthetic polypeptide
QLQLQESGPGLVKPSETLSLICTVSGGSIDRSSYYWGWIRQPPGKGLEWIGSIYYSGSAYHNPSLKSRGTISVDTSKNQFSLKLSSVTAADTAAYYCARLSSSWSFDYWGQGTLVTVSS

SEQ ID NO: 29039 - DNA, 354 bp, synthetic construct
  misc_feature 1..354: note = Description of Artificial Sequence: Synthetic polynucleotide
  source 1..354: mol_type = other DNA
caggtgcaggtggtgcagtctggggctgaggtgaagaagcctggggcctcagtgaaggtctcctgcaaggcttctggatacaccttcaccaattatgatatcaactgggtgcgacaggccactggacaagggcttgagtggatgggatggatgaacactaacagtggtaacacaggctatgcacagaagttccagggcagagtcaccatgaccaggaacacctccataagcacagcctacatggacctgagcagcctgagatctgaggacacggccgtatattactgtgcgtatagtcatggctggttcctctttgactactggggccagggaatcctggtcaccgtctcctca

SEQ ID NO: 29040 - protein, 118 aa, synthetic construct
  REGION 1..118: note = Description of Artificial Sequence: Synthetic polypeptide
QVQVVQSGAEVKKPGASVKVSCKASGYTFTNYDINWVRQATGQGLEWMGWMNTNSGNTGYAQKFQGRVTMTRNTSISTAYMDLSSLRSEDTAVYYCAYSHGWFLFDYWGQGILVTVSS

SEQ ID NO: 29041 - DNA, 351 bp, synthetic construct
  misc_feature 1..351: note = Description of Artificial Sequence: Synthetic polynucleotide
  source 1..351: mol_type = other DNA
caggtgcagctggtggagtctgggggaggcgtggtccagcctgggaggtccctgagactctcctgtgcagcgtctggattcaccttcagtgactatggcatgcactgggtccgccaggctccaggcaaggggctggagtgggtggcagttatatggtttgatggaaataataaatactatgtagattccgtgaagggccgattcaccatctccagagacaattccaagaacacgctgtttctgcaaatgaacagcctgagagccgaggacacggctgtgtattactgtgtgagagagcttgcctggtccgaggactactggggccagggaaccctggtcaccgtctcctca

SEQ ID NO: 29042 - protein, 117 aa, synthetic construct
  REGION 1..117: note = Description of Artificial Sequence: Synthetic polypeptide
QVQLVESGGGVVQPGRSLRLSCAASGFTFSDYGMHWVRQAPGKGLEWVAVIWFDGNNKYYVDSVKGRFTISRDNSKNTLFLQMNSLRAEDTAVYYCVRELAWSEDYWGQGTLVTVSS

SEQ ID NO: 29043 - DNA, 345 bp, synthetic construct
  misc_feature 1..345: note = Description of Artificial Sequence: Synthetic polynucleotide
  source 1..345: mol_type = other DNA
gaggtgcagctggtggagtctgggggaggcctggtcaagcctggggggtccctgagactctcctgtgcagcctctggattcaccttcagtagctatagcatgaactgggtccgccaggctccagggaaggggctggagtgggtctcatccattagtggtagtagtacttacatatactacgcagactcagtgaagggccgattcaccatctccagagacaacgccaagaactcactgtatctgcaaatgaacagcctgagagccgaggacacggctgtgtattactgtgcgagagtagcagcctttgactactggggccagggaaccctggtcaccgtctcctca

SEQ ID NO: 29044 - protein, 115 aa, synthetic construct
  REGION 1..115: note = Description of Artificial Sequence: Synthetic polypeptide
EVQLVESGGGLVKPGGSLRLSCAASGFTFSSYSMNWVRQAPGKGLEWVSSISGSSTYIYYADSVKGRFTISRDNAKNSLYLQMNSLRAEDTAVYYCARVAAFDYWGQGTLVTVSS

SEQ ID NO: 29045 - DNA, 339 bp, synthetic construct
  misc_feature 1..339: note = Description of Artificial Sequence: Synthetic polynucleotide
  source 1..339: mol_type = other DNA
gaggtgcagctggtggagtctgggggaggcctggtcaagccgggggggtccctgagactctcctgtgcagcctctggattcaccttcagtagctatagcatgaactgggtccgccaggctccagggaaggggctggagtgggtctcatccattagtagtagtaataattacatatactacgcagactcagtgaagggccgattcaccatctccagagacaacgccaagaactcactgtatctgcaaatgaacagcctgagagccgaggactcggctgtgtattactgtgcgagattaggggtctactggggccagggaaccctggtcaccgtctcctca

SEQ ID NO: 29046 - protein, 113 aa, synthetic construct
  REGION 1..113: note = Description of Artificial Sequence: Synthetic polypeptide
EVQLVESGGGLVKPGGSLRLSCAASGFTFSSYSMNWVRQAPGKGLEWVSSISSSNNYIYYADSVKGRFTISRDNAKNSLYLQMNSLRAEDSAVYYCARLGVYWGQGTLVTVSS

SEQ ID NO: 29047 - DNA, 357 bp, synthetic construct
  misc_feature 1..357: note = Description of Artificial Sequence: Synthetic polynucleotide
  source 1..357: mol_type = other DNA
cagctgcagctgcaggagtcgggcccaggactggtgaagccttcggagaccctgtccctcacctgcactgtctctggtggctccatcagcagaagtagttactactggggctggatccgccagcccccagggaaggggctggagtggattgggaatatctattatagtgggagcacctacaacaacccgtccctcaagagtcgagtcaccatatccgtagacacgtccaagaaccagttctccctgaagctgagctctgtgaccgccgcagacacggctgtgtattactgtgcgagacagggcagtggctgggaggttgactactggggccagggaaccctggtcaccgtctcctca

SEQ ID NO: 29048 - protein, 119 aa, synthetic construct
  REGION 1..119: note = Description of Artificial Sequence: Synthetic polypeptide
QLQLQESGPGLVKPSETLSLTCTVSGGSISRSSYYWGWIRQPPGKGLEWIGNIYYSGSTYNNPSLKSRVTISVDTSKNQFSLKLSSVTAADTAVYYCARQGSGWEVDYWGQGTLVTVSS

SEQ ID NO: 29049 - DNA, 357 bp, synthetic construct
  misc_feature 1..357: note = Description of Artificial Sequence: Synthetic polynucleotide
  source 1..357: mol_type = other DNA
cagctgcagttgcaggagtcgggcccaggactggtgaagttttcggagaccctgtccctcacctgcactgtctctggtggctccatcagcagaagtagttactactggggctggatccgccagcccccagggaaggggctggagtggatagggaatatctattatagtgggtatccctactacaatccgtccctcaagagtcgagtcaccatatccatagacacgtccaagaaccagttctccctgaagctgagctctgtgaccgccgcagacacggctgtgtattactgtgcgagacatagcaccagctggtcccttgactactggggccagggaaccctggtcaccgtctcctca

SEQ ID NO: 29050 - protein, 119 aa, synthetic construct
  REGION 1..119: note = Description of Artificial Sequence: Synthetic polypeptide
QLQLQESGPGLVKFSETLSLTCTVSGGSISRSSYYWGWIRQPPGKGLEWIGNIYYSGYPYYNPSLKSRVTISIDTSKNQFSLKLSSVTAADTAVYYCARHSTSWSLDYWGQGTLVTVSS

SEQ ID NO: 29051 - DNA, 363 bp, synthetic construct
  misc_feature 1..363: note = Description of Artificial Sequence: Synthetic polynucleotide
  source 1..363: mol_type = other DNA
gaggtgcagctgttggagtctgggggaggcttggtacagcctggggggtccctgagactctcctgtgcagcctctgaattcacctttagcagctatgccatgagctgggtccgccaggctccagggaaggggctggagtgggtctcaattattagtggtcgtggtggtaacacattctacgcagactccgtgaagggccggttcaccatctccagagacaattccaagaacacgctgtatctgcaaatgaacagcctgagagccgaggacacggccgtatattactgtgcgtcccgtatggcagtggctggctcggaggcttttgatatctggggccaagggacaatggtcaccgtctcttca

SEQ ID NO: 29052 - protein, 121 aa, synthetic construct
  REGION 1..121: note = Description of Artificial Sequence: Synthetic polypeptide
EVQLLESGGGLVQPGGSLRLSCAASEFTFSSYAMSWVRQAPGKGLEWVSIISGRGGNTFYADSVKGRFTISRDNSKNTLYLQMNSLRAEDTAVYYCASRMAVAGSEAFDIWGQGTMVTVSS

SEQ ID NO: 29053 - DNA, 357 bp, synthetic construct
  misc_feature 1..357: note = Description of Artificial Sequence: Synthetic polynucleotide
  source 1..357: mol_type = other DNA
cagctgcagctgcaggagtcgggcccaggactggtgaagccttcggagaccctgtccctcacctgcactgtctctggtggctccatcagtaggagtagttactactggggctggatccgccagcccccagggaaggggctggaatggattggaaatatttattatagtgggagcacctacaccaacccgtccctcaagagtcgagtcaccatatccgtagacacgtccaagaaccacttctccctgaagctgagctctgtgaccgccgcagacacggctgtgtattactgtgggagacatggaaaagactggggccttgacaactggggccagggaaccctggtcaccgtctcctca

SEQ ID NO: 29054 - protein, 119 aa, synthetic construct
  REGION 1..119: note = Description of Artificial Sequence: Synthetic polypeptide
QLQLQESGPGLVKPSETLSLTCTVSGGSISRSSYYWGWIRQPPGKGLEWIGNIYYSGSTYTNPSLKSRVTISVDTSKNHFSLKLSSVTAADTAVYYCGRHGKDWGLDNWGQGTLVTVSS

SEQ ID NO: 29055 - DNA, 363 bp, synthetic construct
  misc_feature 1..363: note = Description of Artificial Sequence: Synthetic polynucleotide
  source 1..363: mol_type = other DNA
caggtgcagctggtagagtctgggggaggcgtggtccagcctgggaggtccctgagactctcctgtgtagcctctggattcaccttcagtagctatggcatgcactgggtccgccaggctccaggcaaggggctggagtgggtggcagttatatcatatgctggaattaataaatcctatgcagactccgtgaagggccgattcaccatctccagagacaattccaataacacgctgtatctgcaaatgaacagcctgagagctgaggacacggctgtgtattactgtgtgagacggggatacagctatggcgggtatggtatggacgtctggggccaaggggccacggtcaccgtctcctca

SEQ ID NO: 29056 - protein, 121 aa, synthetic construct
  REGION 1..121: note = Description of Artificial Sequence: Synthetic polypeptide
QVQLVESGGGVVQPGRSLRLSCVASGFTFSSYGMHWVRQAPGKGLEWVAVISYAGINKSYADSVKGRFTISRDNSNNTLYLQMNSLRAEDTAVYYCVRRGYSYGGYGMDVWGQGATVTVSS

SEQ ID NO: 29057 - DNA, 354 bp, synthetic construct
  misc_feature 1..354: note = Description of Artificial Sequence: Synthetic polynucleotide
  source 1..354: mol_type = other DNA
caggtgcagctggtggagtctgggggaggcgtggtccagcctgggaggtccctgagactctcctgtgcagcgtctggattcaccttcagtagctatggcatgcactgggtccgccaggctccaggcaaggggctggagtgggtggcagttatatggcatgatggaagtaataaatactatgtagactccgtgaagggccgattcaccatctccagagacaattccaagaacacgctgaatctgcaaatgaacagcctgagagccgaggacacggctgtgtattactgtgcgagagatctgagtatgggcggtatggacgtctggggccaagggaccacggtcaccgtctcctca

SEQ ID NO: 29058 - protein, 118 aa, synthetic construct
  REGION 1..118: note = Description of Artificial Sequence: Synthetic polypeptide
QVQLVESGGGVVQPGRSLRLSCAASGFTFSSYGMHWVRQAPGKGLEWVAVIWHDGSNKYYVDSVKGRFTISRDNSKNTLNLQMNSLRAEDTAVYYCARDLSMGGMDVWGQGTTVTVSS

SEQ ID NO: 29059 - DNA, 354 bp, synthetic construct
  misc_feature 1..354: note = Description of Artificial Sequence: Synthetic polynucleotide
  source 1..354: mol_type = other DNA
caggtgcagctggtgcagtctggggctgaggtgaagaagcctggggcctcagtgaaggtctcctgcaaggcttctggatacaccttcaccaattatgatatcaactgggtgcgacaggccgctggacaagggcttgagtggatgggatggatgcaccctaacagtggtaacacaggctatgcacagaagttccagggcagagtcaccatgaccaggaacacctccagaagcacagcctacatggagctgagcagcctgagatctgaggacacggccgtgtactactgtgcgtatagcagtggctggtacttctttgactactggggccagggaaccctggtcaccgtctcctca

SEQ ID NO: 29060 - protein, 118 aa, synthetic construct
  REGION 1..118: note = Description of Artificial Sequence: Synthetic polypeptide
QVQLVQSGAEVKKPGASVKVSCKASGYTFTNYDINWVRQAAGQGLEWMGWMHPNSGNTGYAQKFQGRVTMTRNTSRSTAYMELSSLRSEDTAVYYCAYSSGWYFFDYWGQGTLVTVSS

SEQ ID NO: 29061 - DNA, 363 bp, synthetic construct
  misc_feature 1..363: note = Description of Artificial Sequence: Synthetic polynucleotide
  source 1..363: mol_type = other DNA
gaggtgcagctgttggagtctgggggagacttggttcagcctggggggtccctgagactctcctgtgcagcctctgaattcacctttagcagctatgccatgagctgggtccgccaggctccagggaaggggctggagtggatctcagttattagtggtcgtggtgttaacacattctacgcagactccgtgaagggccggttcaccatctccagagacaattccaagaacacgctctatctacaaatgaacagcctgagagccgaggacacggccgtatattactgtgcgtcccgtatcgcagtggctggctcggaggcttttgatatctggggccaagggacaatggtcaccgtctcttca

SEQ ID NO: 29062 - protein, 121 aa, synthetic construct
  REGION 1..121: note = Description of Artificial Sequence: Synthetic polypeptide
EVQLLESGGDLVQPGGSLRLSCAASEFTFSSYAMSWVRQAPGKGLEWISVISGRGVNTFYADSVKGRFTISRDNSKNTLYLQMNSLRAEDTAVYYCASRIAVAGSEAFDIWGQGTMVTVSS

SEQ ID NO: 29063 - DNA, 351 bp, synthetic construct
  misc_feature 1..351: note = Description of Artificial Sequence: Synthetic polynucleotide
  source 1..351: mol_type = other DNA
caggtgcagctggtggagtctgggggaggcgtggtccagcctgggaggtccctgagactctcctgtgcagcgtctggattcaccttcagtgactatggcatgcactgggtccgccaggctccaggcaaggggctggagtgggtgacagttatatggtatgatgaaagtaataaatactatgcagactccgtgaagggccgattcaccatctccagagacgattccaaaaacacgctgtatctgcaaatgaacagtctgagagccgaggacacggctgtgtattactgtgcgagagagcttgcctggtacgaggactactggggccagggaaccctggtcaccgtctcctca

SEQ ID NO: 29064 - protein, 117 aa, synthetic construct
  REGION 1..117: note = Description of Artificial Sequence: Synthetic polypeptide
QVQLVESGGGVVQPGRSLRLSCAASGFTFSDYGMHWVRQAPGKGLEWVTVIWYDESNKYYADSVKGRFTISRDDSKNTLYLQMNSLRAEDTAVYYCARELAWYEDYWGQGTLVTVSS

SEQ ID NO: 29065 - DNA, 351 bp, synthetic construct
  misc_feature 1..351: note = Description of Artificial Sequence: Synthetic polynucleotide
  source 1..351: mol_type = other DNA
caggtgcagctggtggagtctgggggaggcctggtccagcctgggaggtccctgagactctcctgtgcagcgtctggattcaccttcagtagctatggcatgcactgggtccgccaggctccaggcaaggggctggagtgggtggcagttatttggtatgaggaaagtaataaatactatgtagactccgtgaggggccgattcaccatctccagagacaattccaagagcacgctgtatctgcaaatgaacagcctgagagccgaggacacggctgtgtattactgtgtgagagaactaggcttccagtctgacttctggggccagggaaccccggtcaccgtctcctca

SEQ ID NO: 29066 - protein, 117 aa, synthetic construct
  REGION 1..117: note = Description of Artificial Sequence: Synthetic polypeptide
QVQLVESGGGLVQPGRSLRLSCAASGFTFSSYGMHWVRQAPGKGLEWVAVIWYEESNKYYVDSVRGRFTISRDNSKSTLYLQMNSLRAEDTAVYYCVRELGFQSDFWGQGTPVTVSS

SEQ ID NO: 29067 - DNA, 351 bp, synthetic construct
  misc_feature 1..351: note = Description of Artificial Sequence: Synthetic polynucleotide
  source 1..351: mol_type = other DNA
caggtgcagctggtggagtctgggggaggcgtggtccagcctgggaggtccctgagactctcctgtgcagcgtctggattcaccttcagtgactatggcatgcactgggtccgccaggctccaggcaaggggctggagtgggtggcagttatatggtatgatggaaataataattactatgcagactccgtgaagggccgattcaccatctccagagacaattccaagaacacgctgtatctgcaaatgaacagcctgagagccgaggacacggctgtgtattactgtgcgagagagcttgcctggtacgaggacttctggggccagggaaccctggtcaccgtctcctca

SEQ ID NO: 29068 - protein, 117 aa, synthetic construct
  REGION 1..117: note = Description of Artificial Sequence: Synthetic polypeptide
QVQLVESGGGVVQPGRSLRLSCAASGFTFSDYGMHWVRQAPGKGLEWVAVIWYDGNNNYYADSVKGRFTISRDNSKNTLYLQMNSLRAEDTAVYYCARELAWYEDFWGQGTLVTVSS

SEQ ID NO: 29069 - DNA, 351 bp, synthetic construct
  misc_feature 1..351: note = Description of Artificial Sequence: Synthetic polynucleotide
  source 1..351: mol_type = other DNA
caggtgcagctggtggagtctgggggaggcgtggtccagcctgggaggtccctgagactctcctgtgcagcgtctggattcaccttcagtaactatggcatgcactgggtccgccaggctccaggcaaggggctggagtgggtggcagttatatggtatgatgtaagtaataaatactatgcagactccgtgaagggccgattcaccatctccagagacaattccaagaacatgttgtatctgcaaatgaacagcctgagagccgaggacacggctgtgtattactgtgcgcgagaaatgggctggaccgatgactgctggggccagggaaccctggtcaccgtctcctca

SEQ ID NO: 29070 - protein, 117 aa, synthetic construct
  REGION 1..117: note = Description of Artificial Sequence: Synthetic polypeptide
QVQLVESGGGVVQPGRSLRLSCAASGFTFSNYGMHWVRQAPGKGLEWVAVIWYDVSNKYYADSVKGRFTISRDNSKNMLYLQMNSLRAEDTAVYYCAREMGWTDDCWGQGTLVTVSS

SEQ ID NO: 29071 - DNA, 351 bp, synthetic construct
  misc_feature 1..351: note = Description of Artificial Sequence: Synthetic polynucleotide
  source 1..351: mol_type = other DNA
caggtgcagctggtggagtctgggggaggcgtggtccagcctgggaggtccctgagactctcctgtgcagcgtctggattcaccttcactgactatggcatgcactgggtccgccaggctccaggcaaggggctggagtgggtggcagttatttggtatgatgaaaataatgaatactatgcagactccgtgaagggccgattcaccatctccagagccaattccaagaacacgctgtatctgcaaatgaacagcctgagagccgaggacacggctgtgtattactgtgcgagagagcttgcctggtacgaggactactggggccagggaaccctggtcaccgtctcctca

SEQ ID NO: 29072 - protein, 117 aa, synthetic construct
  REGION 1..117: note = Description of Artificial Sequence: Synthetic polypeptide
QVQLVESGGGVVQPGRSLRLSCAASGFTFTDYGMHWVRQAPGKGLEWVAVIWYDENNEYYADSVKGRFTISRANSKNTLYLQMNSLRAEDTAVYYCARELAWYEDYWGQGTLVTVSS

SEQ ID NO: 29073 - DNA, 372 bp, synthetic construct
  misc_feature 1..372: note = Description of Artificial Sequence: Synthetic polynucleotide
  source 1..372: mol_type = other DNA
caggtgcagctggtgcagtctggggctgaggtgaagaagcctggggcctcagtgaaggtctcctgcaaggcttctggatacaccttcaccggctactatatgcactgggtgcgacaggcccctggacaagggcttgagtggatgggatggatcaaccctaacagtggtggcacaaactatgtacagaagtttcagggcagggtcaccatgaccagggacacgtccatcagcacagcctgcatggagctgagcaggctgaaatctgacgacacggccgtgtatttctgtgcgaggtcgtttttctatggttcggggagttattataacgaatttgactactggggccagggaaccctggtcaccgtctcctca

SEQ ID NO: 29074 - protein, 124 aa, synthetic construct
  REGION 1..124: note = Description of Artificial Sequence: Synthetic polypeptide
QVQLVQSGAEVKKPGASVKVSCKASGYTFTGYYMHWVRQAPGQGLEWMGWINPNSGGTNYVQKFQGRVTMTRDTSISTACMELSRLKSDDTAVYFCARSFFYGSGSYYNEFDYWGQGTLVTVSS

SEQ ID NO: 29075 - DNA, 372 bp, synthetic construct
  misc_feature 1..372: note = Description of Artificial Sequence: Synthetic polynucleotide
  source 1..372: mol_type = other DNA
gaggtgcagctgttggagtctgggggaggcttgatacagcctggggggtccctgagactctcctgtgcagcctctggattcacctttagtagctatgtcatgagctgggtccgccaggctccagggaaggggctggagtgggtctccactattagtgttggtggtggtaccacatactacgcagactccgtgaagggccggttcaccatctccagagacaattccaagaatacgctgtatctgcaaatgaacagcctgagagccgaggacacggccgtatattactgtgcgaaatggggacgtggcaacagctatgagtactactacggtatggacgtctggggccaagggaccacggtcaccgtctcctca

SEQ ID NO: 29076 - protein, 124 aa, synthetic construct
  REGION 1..124: note = Description of Artificial Sequence: Synthetic polypeptide
EVQLLESGGGLIQPGGSLRLSCAASGFTFSSYVMSWVRQAPGKGLEWVSTISVGGGTTYYADSVKGRFTISRDNSKNTLYLQMNSLRAEDTAVYYCAKWGRGNSYEYYYGMDVWGQGTTVTVSS

SEQ ID NO: 29077 - DNA, 360 bp, synthetic construct
  misc_feature 1..360: note = Description of Artificial Sequence: Synthetic polynucleotide
  source 1..360: mol_type = other DNA
gaggtgcagctgttggagtctgggggaggcttggtacagcctggggggtccctgagactctcctgtgcagcctctggattcacctttagaagctatgccatgagctgggtccgccaggctccagggaaggggctggagtgggtctcagttattagtggtagtggtggtaacacatacttcgcagactccgtgaagggccggttcaccatctccagagacaattccaagaacacgctgtatctgcaaatggacagcctgagagccgaggacacggccgtatattactgtgcgaaaaggggtataccagaggctgatgcttttgatatctggggccaagggacaatggtcactgtctcttca

SEQ ID NO: 29078 - protein, 120 aa, synthetic construct
  REGION 1..120: note = Description of Artificial Sequence: Synthetic polypeptide
EVQLLESGGGLVQPGGSLRLSCAASGFTFRSYAMSWVRQAPGKGLEWVSVISGSGGNTYFADSVKGRFTISRDNSKNTLYLQMDSLRAEDTAVYYCAKRGIPEADAFDIWGQGTMVTVSS

SEQ ID NO: 29079 - DNA, 369 bp, synthetic construct
  misc_feature 1..369: note = Description of Artificial Sequence: Synthetic polynucleotide
  source 1..369: mol_type = other DNA
gaggtgcagctgttggagtctgggggaggcttggaacagccgggggggtccctgagactctcctgtgcagcctctggattcacctttagcagctatgccatgagctgggtccgccaggctccagggaaggggctggagtgggtctcagttattagtggtagtggtggtaccacattctacgcagactccgtgaagggccggttcaccatctccagagacaattccaagaacacgctgtatctgcaaatgagcagcctgagagccgaggacacggccgtatatttctgtgcccgatattgtagtagtaccaggtgtccttatgatgcctttgatatctggggccaagggacaatggtcaccgtctcctca

SEQ ID NO: 29080 - protein, 123 aa, synthetic construct
  REGION 1..123: note = Description of Artificial Sequence: Synthetic polypeptide
EVQLLESGGGLEQPGGSLRLSCAASGFTFSSYAMSWVRQAPGKGLEWVSVISGSGGTTFYADSVKGRFTISRDNSKNTLYLQMSSLRAEDTAVYFCARYCSSTRCPYDAFDIWGQGTMVTVSS

SEQ ID NO: 29081 - DNA, 342 bp, synthetic construct
  misc_feature 1..342: note = Description of Artificial Sequence: Synthetic polynucleotide
  source 1..342: mol_type = other DNA
gaggtgcagctggtggagtctgggggaggcctggtcaagcctggggggtccctgagactctcctgtgcagcctctggattcaccttcagtagctatagcatgaactgggtccgccaggctccagggaaggggctggagtgggtctcatccattagtggtagtagtagttacatgtactacgcagactcagtgaagggccgattcaccatctccagagacaacgccaagaactcactgtatctgcaaatgaacagcctgcgagccgaggacacggctctgtattactgtgcgagagatcgtgggagctcctggggccagggaaccctggtcaccgtctcctca

SEQ ID NO: 29082 - protein, 114 aa, synthetic construct
  REGION 1..114: note = Description of Artificial Sequence: Synthetic polypeptide
EVQLVESGGGLVKPGGSLRLSCAASGFTFSSYSMNWVRQAPGKGLEWVSSISGSSSYMYYADSVKGRFTISRDNAKNSLYLQMNSLRAEDTALYYCARDRGSSWGQGTLVTVSS

SEQ ID NO: 29083 - DNA, 360 bp, synthetic construct
  misc_feature 1..360: note = Description of Artificial Sequence: Synthetic polynucleotide
  source 1..360: mol_type = other DNA
caggtgcagttggtgcagtctggggctgaggtgaagaagcctggggcctcagtgaaggtctcctgcaagacttctggatacaccttcaccgactattatatgcactgggtgcgacaggcccctggacaagggcttgagtggatgggatggatcaaccctaacagtggtggcacaaactatgaacagaagtttcagggcagggtcaccatgaccagggacacgtccatcagcacagcctacatggaactgagtaggctgagatctgacgacacggccgtgtattactgtgcgagtggatacagctatgggtacaactggttcgacccctggggccagggaaccctggtcaccgtctcctca

SEQ ID NO: 29084 - protein, 120 aa, synthetic construct
  REGION 1..120: note = Description of Artificial Sequence: Synthetic polypeptide
QVQLVQSGAEVKKPGASVKVSCKTSGYTFTDYYMHWVRQAPGQGLEWMGWINPNSGGTNYEQKFQGRVTMTRDTSISTAYMELSRLRSDDTAVYYCASGYSYGYNWFDPWGQGTLVTVSS

SEQ ID NO: 29085 - DNA, 345 bp, synthetic construct
  misc_feature 1..345: note = Description of Artificial Sequence: Synthetic polynucleotide
  source 1..345: mol_type = other DNA
gaggtgcagctggtggagtctgggggaggcctggtcaagcctggggggtccctgagactctcctgtgcagcctctggattcaccttcagtagctatagcatgaactgggtccgccaggctccagggagggggctggagtgggtctcatccattagtggtagtagtagttacatatactacgcagactcagtgaagggccgattcaccatcttcagagacaacgccaagaactcactgtatctgcaaatgaacagcctgagagccgaggacacggctgtgtattactgtgcgagagtggcttcatttgactactggggccagggaaccctggtcaccgtctcctca

SEQ ID NO: 29086 - protein, 115 aa, synthetic construct
  REGION 1..115: note = Description of Artificial Sequence: Synthetic polypeptide
EVQLVESGGGLVKPGGSLRLSCAASGFTFSSYSMNWVRQAPGRGLEWVSSISGSSSYIYYADSVKGRFTIFRDNAKNSLYLQMNSLRAEDTAVYYCARVASFDYWGQGTLVTVSS

SEQ ID NO: 29087 - DNA, 351 bp, synthetic construct
  misc_feature 1..351: note = Description of Artificial Sequence: Synthetic polynucleotide
  source 1..351: mol_type = other DNA
caggtgcaactggtgcagtctggggctgaggtgaagaagcctggggcctccgtgaaggtctcctgcaaggcttctggatacaccttcaccggctactatttgcactgggtgcgacaggcccctggacaagggcttgagtggctgggatggatcaaccctaacagtaatggcacaatctctgcacagaagtttcagggcagggtcaccatgaccagggacacgtccatcagcacagcctacatggagctgagcaggctgatatctgacgacacggccgtatattactgtgcgagagatggtaccagctcgcttgactactggggccagggaaccctggtcaccgtctcctca

SEQ ID NO: 29088 - protein, 117 aa, synthetic construct
  REGION 1..117: note = Description of Artificial Sequence: Synthetic polypeptide
QVQLVQSGAEVKKPGASVKVSCKASGYTFTGYYLHWVRQAPGQGLEWLGWINPNSNGTISAQKFQGRVTMTRDTSISTAYMELSRLISDDTAVYYCARDGTSSLDYWGQGTLVTVSS

SEQ ID NO: 29089 - DNA, 360 bp, synthetic construct
  misc_feature 1..360: note = Description of Artificial Sequence: Synthetic polynucleotide
  source 1..360: mol_type = other DNA
caggtgcaactggtgcagtctggggctgaggtgaagaagcctggggcctcagtgaaggtctcctgcaaggcttctggatacaccttcaccggctactatatgcactgggtgcgacaggcccctggacaagggcttgagtggatgggatggatcaatcctaacagtggtggcacaaactatgcacagaagtttcagggcagggtcaccatgaccagggacacgtccatcagcacagcctacatggagctgagcaggctgagatctgacgacacggccgtgtattactgtgcgagtggatacagctatgggtacaactggttcgacccctggggccagggaaccctggtcaccgtctcctca

SEQ ID NO: 29090 - protein, 120 aa, synthetic construct
  REGION 1..120: note = Description of Artificial Sequence: Synthetic polypeptide
QVQLVQSGAEVKKPGASVKVSCKASGYTFTGYYMHWVRQAPGQGLEWMGWINPNSGGTNYAQKFQGRVTMTRDTSISTAYMELSRLRSDDTAVYYCASGYSYGYNWFDPWGQGTLVTVSS

SEQ ID NO: 29091 - DNA, 390 bp, synthetic construct
  misc_feature 1..390: note = Description of Artificial Sequence: Synthetic polynucleotide
  source 1..390: mol_type = other DNA
gaggtgcagctggtggagtctgggggaggcttggtgaagcctggggggtcccttagactctcctgtgcagcctctggattcactttcagtaacgcctggatgaactgggtccgccaggctccagggaaggggctggagtgggttggccgtattaaaagcaaaactgatggtgggacaacagactacgctgcacccgtgaaaggcagattcaccatctcaagagatgattcaaaaaacacgctgtatctgcaaatgaacagcctgaaaaccgaggacacagccgtgtattactgtaccacagatacgggtcctatagcagctcgtctcgcttactactactattacgctatggacgtctggggccacgggaccacggtcaccgtctcctca

SEQ ID NO: 29092 - protein, 130 aa, synthetic construct
  REGION 1..130: note = Description of Artificial Sequence: Synthetic polypeptide
EVQLVESGGGLVKPGGSLRLSCAASGFTFSNAWMNWVRQAPGKGLEWVGRIKSKTDGGTTDYAAPVKGRFTISRDDSKNTLYLQMNSLKTEDTAVYYCTTDTGPIAARLAYYYYYAMDVWGHGTTVTVSS

SEQ ID NO: 29093 - DNA, 372 bp, synthetic construct
  misc_feature 1..372: note = Description of Artificial Sequence: Synthetic polynucleotide
  source 1..372: mol_type = other DNA
caggtgcagctggtgcagtctggggctgaggtgaagaaacctggggcctcagtgaaggtctcctgcaaggcttctggatacaccttcaccgactactatattcactgggtgcgacaggcccctggacaagggcttgagtggatgggatggatcaaccctaacagtggtgggacaaacaatgcacagaagtttcagggcagggtcaccatgaccagggacacgtccatcagtacagcctacatggagctgagcaggctgagatctgacgatacggccgtgtattcctgtgcgaggtcgtattactatggttcggggacttattataacgaatttgactactggggccagggaaccctggtcaccgtctcctca

SEQ ID NO: 29094 - protein, 124 aa, synthetic construct
  REGION 1..124: note = Description of Artificial Sequence: Synthetic polypeptide
QVQLVQSGAEVKKPGASVKVSCKASGYTFTDYYIHWVRQAPGQGLEWMGWINPNSGGTNNAQKFQGRVTMTRDTSISTAYMELSRLRSDDTAVYSCARSYYYGSGTYYNEFDYWGQGTLVTVSS

SEQ ID NO: 29095 - DNA, 372 bp, synthetic construct
  misc_feature 1..372: note = Description of Artificial Sequence: Synthetic polynucleotide
  source 1..372: mol_type = other DNA
gaggtgcagctgttggagtctgggggaggcttggtacagcctggggggtccctgagactctcctgtgcagcctctggattcacctttagcagctatgccatgagctgggtccgccaggctccagggaaggggctggagtgggtctcagctcttagtggtcgtggtggtagcacatactacgcagactccgtgaagggccggttcaccatctccagagacaattccaagaacacgctgtatctgcaaatgaacagcctgagagccgaggacacggccgtatattactgtgcgaaatggggacgtggatacagctatgagtactactacggtatggacgtctggggccaagggaccacggtcaccgtctcctca

SEQ ID NO: 29096 - protein, 124 aa, synthetic construct
  REGION 1..124: note = Description of Artificial Sequence: Synthetic polypeptide
EVQLLESGGGLVQPGGSLRLSCAASGFTFSSYAMSWVRQAPGKGLEWVSALSGRGGSTYYADSVKGRFTISRDNSKNTLYLQMNSLRAEDTAVYYCAKWGRGYSYEYYYGMDVWGQGTTVTVSS

SEQ ID NO: 29097 - DNA, 354 bp, synthetic construct
  misc_feature 1..354: note = Description of Artificial Sequence: Synthetic polynucleotide
  source 1..354: mol_type = other DNA
caggtgcagctggtgcagtctggggctgaggtgaagaagcctggggcctcagtgaaggtctcctgcaaggcttctggatacaccttcataaattatgatatcaactgggtgcgacaggccactggacaagggcttgagtggatgggatggatgcaccctgacagtggtaacacaggctatgcacagaagttccagggcagagtcaccatgaccaggaacacctccataagcacagcctacatggagctgagcagtttgagatctgaggacacggccgtgtattattgtgcgtatagtagtggctggtactactttgactactggggccagggaaccctggtcaccgtctcctca

SEQ ID NO: 29098 - protein, 118 aa, synthetic construct
  REGION 1..118: note = Description of Artificial Sequence: Synthetic polypeptide
QVQLVQSGAEVKKPGASVKVSCKASGYTFINYDINWVRQATGQGLEWMGWMHPDSGNTGYAQKFQGRVTMTRNTSISTAYMELSSLRSEDTAVYYCAYSSGWYYFDYWGQGTLVTVSS

SEQ ID NO: 29099 - DNA, 357 bp, synthetic construct
  misc_feature 1..357: note = Description of Artificial Sequence: Synthetic polynucleotide
  source 1..357: mol_type = other DNA
cagatcaccttgaaggagtctggtcctacgctggtgaaacccacacagaccctcacgctgacctgcaccttctctgggttctcactcagcactggtggagtgggtgtgggctggatccgtcagcccccaggaaaggccctggagtggcttgcactcatttattggaatgatgataagcgctacagcccatctctgaagagcaggctcaccatcaccagggacacctccaaaaaccaggtggtccttacaatgaccaacatggaccctgtggacacagccacatattactgtgcacacactatagcagttcgtggctttgactactggggccagggaaccctggtcaccgtctcctca

SEQ ID NO: 29100 - protein, 119 aa, synthetic construct
  REGION 1..119: note = Description of Artificial Sequence: Synthetic polypeptide
QITLKESGPTLVKPTQTLTLTCTFSGFSLSTGGVGVGWIRQPPGKALEWLALIYWNDDKRYSPSLKSRLTITRDTSKNQVVLTMTNMDPVDTATYYCAHTIAVRGFDYWGQGTLVTVSS

SEQ ID NO: 29101 - DNA, 345 bp, synthetic construct
  misc_feature 1..345: note = Description of Artificial Sequence: Synthetic polynucleotide
  source 1..345: mol_type = other DNA
gaggtgcagctggtggagtctgggggaggcctggtcaagcctggggggtccctgagactctcctgtgcagcctctggattcaccttcagtagttatagcatgaactggatccgccaggctccagggaaggggctggagtgggtctcatccattagtggtagtagtacttacatatactacgcagactcagtgaagggccgaatcgccatctccagagacaacgccaagaactcactgtatctgcaaatgaacagcctgagagccgaggacacggctgtgtattactgtgcgagagtggcttcatttgactactggggccagggaaccctggtcaccgtctcctca

SEQ ID NO: 29102 - protein, 115 aa, synthetic construct
  REGION 1..115: note = Description of Artificial Sequence: Synthetic polypeptide
EVQLVESGGGLVKPGGSLRLSCAASGFTFSSYSMNWIRQAPGKGLEWVSSISGSSTYIYYADSVKGRIAISRDNAKNSLYLQMNSLRAEDTAVYYCARVASFDYWGQGTLVTVSS

SEQ ID NO: 29103 - DNA, 351 bp, synthetic construct
  misc_feature 1..351: note = Description of Artificial Sequence: Synthetic polynucleotide
  source 1..351: mol_type = other DNA
caggtgcagctggtgcagtctggggctgaggtgaagaagcctggggcctcagtgaaggtctcctgcaaggcttctggatacaccttcaccggctactatctgcactgggtgcgacaggcccctggacaagggcttgagtggatgggatggatcaaccctaacaataatggcacaaactatgcacagaagtttcagggcagggtcaccatgaccagggacacgtccatcagcacagcctacatggagctgagccggctgagatctgacgacacggccgtgtattactgtgcgagagatggtaccagctcgtttgactactggggccagggaaccctggtcaccgtctcctca

SEQ ID NO: 29104 - protein, 117 aa, synthetic construct
  REGION 1..117: note = Description of Artificial Sequence: Synthetic polypeptide
QVQLVQSGAEVKKPGASVKVSCKASGYTFTGYYLHWVRQAPGQGLEWMGWINPNNNGTNYAQKFQGRVTMTRDTSISTAYMELSRLRSDDTAVYYCARDGTSSFDYWGQGTLVTVSS

SEQ ID NO: 29105 - DNA, 357 bp, synthetic construct
  misc_feature 1..357: note = Description of Artificial Sequence: Synthetic polynucleotide
  source 1..357: mol_type = other DNA
cagatcaccttgaaggagtctggtcctacgctggtgaaacccacacagaccctcacgctgacctgcaccttctctgggttctcactcagcactagtggagtgggtgtgggctggatccgtcagcccccaggaaaggccctggagtgcctttcactcatttattggaataatgataaggtctacagcccatctctgaagagcaggctcaccatcaccaagtacacctccaaaaaccaggtggtccttacaatgtccaacatggaccctgtggacacagccacatattactgtgcacacaggggacagcagctggccctcgactactggggccagggaaccctggtcaccgtctcctca

SEQ ID NO: 29106 - protein, 119 aa, synthetic construct
  REGION 1..119: note = Description of Artificial Sequence: Synthetic polypeptide
QITLKESGPTLVKPTQTLTLTCTFSGFSLSTSGVGVGWIRQPPGKALECLSLIYWNNDKVYSPSLKSRLTITKYTSKNQVVLTMSNMDPVDTATYYCAHRGQQLALDYWGQGTLVTVSS

SEQ ID NO: 29107 - DNA, 354 bp, synthetic construct
  misc_feature 1..354: note = Description of Artificial Sequence: Synthetic polynucleotide
  source 1..354: mol_type = other DNA
caggtgcagctgctgcagtctggggctgaggtgaagaagcctggggcctcagtgaaggtctcctgcaaggcttctggatacaccttcaccaattatgatatcaactgggtgcgacaggccactggacaagggcttgagtggatgggatggatgtaccctaacagtggtaacacgggctatgcacagaagttccagggcagagtcaccatgaccatgaacacctccataagcacagcctacatggagttgagcagcctgagatctgaggacacggccgtgtattactgtgcgattagcggtggctggtactactttgactactggggccagggaaccctggtcaccgtctcctct

SEQ ID NO: 29108 - protein, 118 aa, synthetic construct
  REGION 1..118: note = Description of Artificial Sequence: Synthetic polypeptide
QVQLLQSGAEVKKPGASVKVSCKASGYTFTNYDINWVRQATGQGLEWMGWMYPNSGNTGYAQKFQGRVTMTMNTSISTAYMELSSLRSEDTAVYYCAISGGWYYFDYWGQGTLVTVSS

SEQ ID NO: 29109 - DNA, 372 bp, synthetic construct
  misc_feature 1..372: note = Description of Artificial Sequence: Synthetic polynucleotide
  source 1..372: mol_type = other DNA
gaggtgcagctgttggagtctgggggaggcttggtacagcctggggggtccctgagactctcctgtgcagcctctggattcacctttagcagctatgccatgagctgggtccgccaggctccagggaaggggctggagtgggtctcagctattagtggtcgtggtggtagcacatactacgcagactccgtgaagggccggttcaccatctccagagacaattccaagaacacgctgtatctgcaaatgaacagcctgagagccgaggacacggccgtatattactgtgcgaaatggggacgtggatacagctatgagtactactacggtatggacgtctggggccaggggaccacggtcaccgtctcctca

SEQ ID NO: 29110 - protein, 124 aa, synthetic construct
  REGION 1..124: note = Description of Artificial Sequence: Synthetic polypeptide
EVQLLESGGGLVQPGGSLRLSCAASGFTFSSYAMSWVRQAPGKGLEWVSAISGRGGSTYYADSVKGRFTISRDNSKNTLYLQMNSLRAEDTAVYYCAKWGRGYSYEYYYGMDVWGQGTTVTVSS

SEQ ID NO: 29111 - DNA, 354 bp, synthetic construct
  misc_feature 1..354: note = Description of Artificial Sequence: Synthetic polynucleotide
  source 1..354: mol_type = other DNA
caggtgcagctggtgcagtctggggctgaggtgaagaagcctggggcctcagtgaaggtctcctgcaaggcttctggatacatcttcaccaattatgatatcaactgggtgcgacaggccactggacaagggcttgagtggatgggatggatgcaccctaacagtggtaacacaggctatgcacagaagttccagggcagagtcaccatgacctggaacacctccataagcacagccaacatggagctgagcagcctgagatctgaggacacggccgtgtattactgtgcgagtagcagtggctggtattggttcgacccctggggccagggaaccctggtcaccgtctcctca

SEQ ID NO: 29112 - protein, 118 aa, synthetic construct
  REGION 1..118: note = Description of Artificial Sequence: Synthetic polypeptide
QVQLVQSGAEVKKPGASVKVSCKASGYIFTNYDINWVRQATGQGLEWMGWMHPNSGNTGYAQKFQGRVTMTWNTSISTANMELSSLRSEDTAVYYCASSSGWYWFDPWGQGTLVTVSS

SEQ ID NO: 29113 - DNA, 354 bp, synthetic construct
  misc_feature 1..354: note = Description of Artificial Sequence: Synthetic polynucleotide
  source 1..354: mol_type = other DNA
caggtgcagctggtgcagtctggggctgaggtgaagaagcctggggcctcagtgaaggtctcctgcaaggcttctggatacaccttcaccaattatgatatcaactgggtgcgacaggccactggacaagggcttgagtggatgggatggatgaaccctaacagtggtaacacaggctatgcacagaagttccagggcagagtcaccatgaccaggaacacctccataagcacagcctacctggagctgagcagcctgagatctgaggacacggccgtgtattactgtgcggggagcaatggctggtactactttgactactggggccagggaaccctggtcaccgtctcctca

SEQ ID NO: 29114 - protein, 118 aa, synthetic construct
  REGION 1..118: note = Description of Artificial Sequence: Synthetic polypeptide
QVQLVQSGAEVKKPGASVKVSCKASGYTFTNYDINWVRQATGQGLEWMGWMNPNSGNTGYAQKFQGRVTMTRNTSISTAYLELSSLRSEDTAVYYCAGSNGWYYFDYWGQGTLVTVSS

SEQ ID NO: 29115 - DNA, 354 bp, synthetic construct
  misc_feature 1..354: note = Description of Artificial Sequence: Synthetic polynucleotide
  source 1..354: mol_type = other DNA
caggtgcagctggtgcagtctggggctgaggtgaagaagcctggggcctcagtgaaggtctcctgcaaggcttctggatacaccttcaccaattatgatatcaactgggtgcgacaggccactggacaagggcttgaatggatgggatggatgcaccctaacagtggtaacacaggctgtgcacagaagttccagggcagagtcaccatgacctggaacatgtccataagcacagcctacatggagctgagcagcctgagatctgaggacacggccgtatattactgtgcgagtagcagtggctggtactggttcgacccctggggccagggaaccctggtcaccgtctcctca

SEQ ID NO: 29116 - protein, 118 aa, synthetic construct
  REGION 1..118: note = Description of Artificial Sequence: Synthetic polypeptide
QVQLVQSGAEVKKPGASVKVSCKASGYTFTNYDINWVRQATGQGLEWMGWMHPNSGNTGCAQKFQGRVTMTWNMSISTAYMELSSLRSEDTAVYYCASSSGWYWFDPWGQGTLVTVSS

SEQ ID NO: 29117 - DNA, 351 bp, synthetic construct
  misc_feature 1..351: note = Description of Artificial Sequence: Synthetic polynucleotide
  source 1..351: mol_type = other DNA
caggtgcagttggtgcagtctgggactgaggtgaagaagcctggggcctcagtgaaggtctcctgcaaggcttctggatacaccttcaccggcgattatatgcactgggtgcgacaggcccctggacaagggcttgagtggatgggatggatcagccctaaaaatggtggcacaaactatgcacagaagtttcagggcagggtcaccatgaccagggacacgtccatcagcacagtctacatggagctgaacaggctgagatctgacgacacggccgtgtattactgtgcgagagatggaactgggtcctttgactactggggccagggaaccctagtcaccgtctcctca

SEQ ID NO: 29118 - protein, 117 aa, synthetic construct
  REGION 1..117: note = Description of Artificial Sequence: Synthetic polypeptide
QVQLVQSGTEVKKPGASVKVSCKASGYTFTGDYMHWVRQAPGQGLEWMGWISPKNGGTNYAQKFQGRVTMTRDTSISTVYMELNRLRSDDTAVYYCARDGTGSFDYWGQGTLVTVSS

SEQ ID NO: 29119 - DNA, 354 bp, synthetic construct
  misc_feature 1..354: note = Description of Artificial Sequence: Synthetic polynucleotide
  source 1..354: mol_type = other DNA
caggtgcagctggtgcagtctggggctgaggtgaagaagcctggggcctcagtgaaggtctcctgcaaggcttctggatacaccttcaccaactatgatattaactgggtgcgacaggccactggacaagggcttgagtggatgggatggatgaaccctaacagtggtaacacaggctatgcacagaagttccagggccgagtcaccatgaccaggaacacctccataagcacagcctacatggagctgagcagcctgagatctgaggacacggccgtgtattactgtgcgagcagcagtggctggtacttttttgactactggggccagggaaccctggtcaccgtctcctca

SEQ ID NO: 29120 - protein, 118 aa, synthetic construct
  REGION 1..118: note = Description of Artificial Sequence: Synthetic polypeptide
QVQLVQSGAEVKKPGASVKVSCKASGYTFTNYDINWVRQATGQGLEWMGWMNPNSGNTGYAQKFQGRVTMTRNTSISTAYMELSSLRSEDTAVYYCASSSGWYFFDYWGQGTLVTVSS

SEQ ID NO: 29121 - DNA, 354 bp, synthetic construct
  misc_feature 1..354: note = Description of Artificial Sequence: Synthetic polynucleotide
  source 1..354: mol_type = other DNA
caggtgcagctggtgcagtctggggctgaggtgaagaagcctggggcctcagtgaaggtctcctgcaaggcttctggatacaccttcaccaattatgacatcaactgggtgcgacaggccactggacaagggcttgagtggatgggatggatgcaccctaacagtggtaacacaggctttgcacagaagttccggggcagagtcaccatgaccagaaacacctccataagcacagcctacatggaactgagcagcctgagatctgaggacacggccgtgtattactgttcgagcagcagtggctggtacttttttgactactggggccagggaaccctggtcaccgtctcctca

SEQ ID NO: 29122 - protein, 118 aa, synthetic construct
  REGION 1..118: note = Description of Artificial Sequence: Synthetic polypeptide
QVQLVQSGAEVKKPGASVKVSCKASGYTFTNYDINWVRQATGQGLEWMGWMHPNSGNTGFAQKFRGRVTMTRNTSISTAYMELSSLRSEDTAVYYCSSSSGWYFFDYWGQGTLVTVSS

SEQ ID NO: 29123 - DNA, 345 bp, synthetic construct
  misc_feature 1..345: note = Description of Artificial Sequence: Synthetic polynucleotide
  source 1..345: mol_type = other DNA
gaggtgcagctggtggagtctgggggaggcctggtcaagcctggggggtccctgagactctcctgtgcagcctctggattcaccttcagtagctatagcatgaactgggtccgccaggctccagggaaggggctggagtgggtctcatccattagtggtagtagtacttacatatactacgcagactcagtgaagggccgattcaccatctccagagacaacgccaagaactcactgtatctgcaaatgaacagcctgagagccgaggacacggctgtgtattactgtgcgagagtggctggctttgactactggggccagggaaccctggtcaccgtctcctca

SEQ ID NO: 29124 - protein, 115 aa, synthetic construct
  REGION 1..115: note = Description of Artificial Sequence: Synthetic polypeptide
EVQLVESGGGLVKPGGSLRLSCAASGFTFSSYSMNWVRQAPGKGLEWVSSISGSSTYIYYADSVKGRFTISRDNAKNSLYLQMNSLRAEDTAVYYCARVAGFDYWGQGTLVTVSS

SEQ ID NO: 29125 - DNA, 369 bp, synthetic construct
  misc_feature 1..369: note = Description of Artificial Sequence: Synthetic polynucleotide
  source 1..369: mol_type = other DNA
gaggtgcagctgttggagtctgggggaggcttggcacagcctggggggtccctgagactctcctgtgcagcctctggattcacctttagcagctatgccatgagctgggtccgccaggctccagggaaggggctggagtgggtctccgctattagtggtcgtggtggtagcacattccacgcagactccgtgaagggccggttcacgatctccagagacaattccaagaacacgctgtatctgcaaatgaacagcctgagagccgaggacacggccgtatattactgtgtgaaaggggagctactagaggactactacttctacggtatggacgtctggggccaagggaccacggtcaccgtctcctca

SEQ ID NO: 29126 - protein, 123 aa, synthetic construct
  REGION 1..123: note = Description of Artificial Sequence: Synthetic polypeptide
EVQLLESGGGLAQPGGSLRLSCAASGFTFSSYAMSWVRQAPGKGLEWVSAISGRGGSTFHADSVKGRFTISRDNSKNTLYLQMNSLRAEDTAVYYCVKGELLEDYYFYGMDVWGQGTTVTVSS

SEQ ID NO: 29127 - DNA, 345 bp, synthetic construct
  misc_feature 1..345: note = Description of Artificial Sequence: Synthetic polynucleotide
  source 1..345: mol_type = other DNA
caggtgcagctggtgcagtctggggctgaggtgaagaagcctggggcctcagtgaaggtctcctgcaaggcttctggatacaccttcaccagttatgatatcaactgggtgcgacaggccactggacaagggcttgagtggatgggatggatgaaccctaacagtggtaacacaggctatgcacagaagttccagggcagagtcaccatgaccaggaacacctccataagcacagcctacatggagctgagcagcctgagatctgaggacacggccgtgtattactgtgcgcgaaagaaggctaacgactactggggccagggaaccctggtcaccgtctcctca

SEQ ID NO: 29128 - protein, 115 aa, synthetic construct
  REGION 1..115: note = Description of Artificial Sequence: Synthetic polypeptide
QVQLVQSGAEVKKPGASVKVSCKASGYTFTSYDINWVRQATGQGLEWMGWMNPNSGNTGYAQKFQGRVTMTRNTSISTAYMELSSLRSEDTAVYYCARKKANDYWGQGTLVTVSS

SEQ ID NO: 29129 - DNA, 345 bp, synthetic construct
  misc_feature 1..345: note = Description of Artificial Sequence: Synthetic polynucleotide
  source 1..345: mol_type = other DNA
gaggtgcagctggtggagtctgggggaggcctggtcaagcctggggggtccctgagactctcctgtgcagcctctggattcaccttcagtagctataacatgaactgggtccgccaggctccagggaaggggctggagtgggtctcatccattagtggtagtagtagttacatatactacgcagactcagtgaagggccgattcaccatctccagagacaacgccaagaactcactgtatctgcaaatgaacagcctgagagccgaggacacggctgtgtattactgtgcgaggttaaatggttttgactactggggccagggaaccctggtcaccgtctcctca

SEQ ID NO: 29130 - protein, 115 aa, synthetic construct
  REGION 1..115: note = Description of Artificial Sequence: Synthetic polypeptide
EVQLVESGGGLVKPGGSLRLSCAASGFTFSSYNMNWVRQAPGKGLEWVSSISGSSSYIYYADSVKGRFTISRDNAKNSLYLQMNSLRAEDTAVYYCARLNGFDYWGQGTLVTVSS

SEQ ID NO: 29131 - DNA, 369 bp, synthetic construct
  misc_feature 1..369: note = Description of Artificial Sequence: Synthetic polynucleotide
  source 1..369: mol_type = other DNA
gaggtgcagctgttggagtctgggggaggcttggtacagcctggggggtccctgagactctcctgtgcagcctctggattcacctttagcagctatgccatgagctgggtccgccaggctccagggaaggggctggagtgggtctccgctattagtggtcgtggtggtagcacattccacgcagactccgtgaagggccggttcaccatctccagagacaattccaagaacacgctgtatctgcaaatgaacagcctgagagccgaggacacggccgtatattactgtgtgaaaggggagctactagaggactactacttctacggtatggacgtctggggccaagggaccacggtcaccgtctcctca

SEQ ID NO: 29132 - protein, 123 aa, synthetic construct
  REGION 1..123: note = Description of Artificial Sequence: Synthetic polypeptide
EVQLLESGGGLVQPGGSLRLSCAASGFTFSSYAMSWVRQAPGKGLEWVSAISGRGGSTFHADSVKGRFTISRDNSKNTLYLQMNSLRAEDTAVYYCVKGELLEDYYFYGMDVWGQGTTVTVSS

SEQ ID NO: 29133 - DNA, 345 bp, synthetic construct
  misc_feature 1..345: note = Description of Artificial Sequence: Synthetic polynucleotide
  source 1..345: mol_type = other DNA
caggtgcagctggtgcagtctggggctgaggtgaagaagcctggggcctcagtgaaggtctcctgcaaggcttctggatacaccttcaccagttatgatatcagctgggtgcgactggccactggacaagggcttgagtggatgggatggatgaaccctaacagtggtaacacaggctatgcacagaagttccagggcagagtcaccatgaccaggaacacctccataagcacagcctacatggagctgagcagcctgagatctgaggacacggccgtgtattactgtgcgagaaagagggctaacgactactggggccagggaaccctggtcaccgtctcctca

SEQ ID NO: 29134 - protein, 115 aa, synthetic construct
  REGION 1..115: note = Description of Artificial Sequence: Synthetic polypeptide
QVQLVQSGAEVKKPGASVKVSCKASGYTFTSYDISWVRLATGQGLEWMGWMNPNSGNTGYAQKFQGRVTMTRNTSISTAYMELSSLRSEDTAVYYCARKRANDYWGQGTLVTVSS

SEQ ID NO: 29135 - DNA, 354 bp, synthetic construct
  misc_feature 1..354: note = Description of Artificial Sequence: Synthetic polynucleotide
  source 1..354: mol_type = other DNA
caggtgcagctggtgcagtctggggctgaggtgaagaagcctggggcctcagtgaaggtctcctgcaaggcttctggatacaccttcaccaactatgatattaactgggtgcgacaggccactggacaagggcttgagtggatgggatggatgaaccctaacagtggtaacacaggctatgcacagaagttccagggcagagtcaccatgaccaggaacacctccataagcacagcctacatggagctgaacagcctgagatctgaggacacggccgtgtattactgtgcgagcagcagtggctggtacttttttgactactggggccagggaaccctggtcaccgtctcctca

SEQ ID NO: 29136 - protein, 118 aa, synthetic construct
  REGION 1..118: note = Description of Artificial Sequence: Synthetic polypeptide
QVQLVQSGAEVKKPGASVKVSCKASGYTFTNYDINWVRQATGQGLEWMGWMNPNSGNTGYAQKFQGRVTMTRNTSISTAYMELNSLRSEDTAVYYCASSSGWYFFDYWGQGTLVTVSS

SEQ ID NO: 29137 - DNA, 369 bp, synthetic construct
  misc_feature 1..369: note = Description of Artificial Sequence: Synthetic polynucleotide
  source 1..369: mol_type = other DNA
gaggtgcagctgttggagtctgggggaggcttggtacagcctggggggtccctgagactctcctgtgcagcctctggattcacctttagcagctatgccatgagctgggtccgccaggctccagggaaggggctggagtgggtctccactattagtggtcgtggtggtagcacattccacgcagactccgtgaagggccggttcaccatctccagagacaattccaagaacacgctgtatctgcaaatgaacagcctgagagccgaagacacggccgtatattactgtgtgaaaggggagctactagaggactactacttctacggtatggacgtctggggccaagggaccacggtcaccgtctcctca

SEQ ID NO: 29138 - protein, 123 aa, synthetic construct
  REGION 1..123: note = Description of Artificial Sequence: Synthetic polypeptide
EVQLLESGGGLVQPGGSLRLSCAASGFTFSSYAMSWVRQAPGKGLEWVSTISGRGGSTFHADSVKGRFTISRDNSKNTLYLQMNSLRAEDTAVYYCVKGELLEDYYFYGMDVWGQGTTVTVSS

SEQ ID NO: 29139 - DNA, 390 bp, synthetic construct
  misc_feature 1..390: note = Description of Artificial Sequence: Synthetic polynucleotide
  source 1..390: mol_type = other DNA
gaggtgcagctggtggagtctgggggaggcttggtaaagcctggggggtcccttagactctcctgtgcagcctctggattcactttcagtaacgcccggatgaactgggtccgcctggctccagggaaggggctggagtgggttggccgtattaaaagcaaaactgatggtgggacaacagactacgctgcacccgtgaaaggcagattcaccatctcaagagatgaatcagaaaacacgctgtatctgcaaatgaacagcctgaaaaccgaggacacaggtgtgtattactgttccacagatacgggtcctatagcagctcgtctcgcttactactactactacgctatggacgtctggggccaagggaccacggtcaccgtctcctca

SEQ ID NO: 29140 - protein, 130 aa, synthetic construct
  REGION 1..130: note = Description of Artificial Sequence: Synthetic polypeptide
EVQLVESGGGLVKPGGSLRLSCAASGFTFSNARMNWVRLAPGKGLEWVGRIKSKTDGGTTDYAAPVKGRFTISRDESENTLYLQMNSLKTEDTGVYYCSTDTGPIAARLAYYYYYAMDVWGQGTTVTVSS

SEQ ID NO: 29141 - DNA, 360 bp, synthetic construct
  misc_feature 1..360: note = Description of Artificial Sequence: Synthetic polynucleotide
  source 1..360: mol_type = other DNA
cagatcaccttgaaggagtctggtcctacgctggtgaaacccacacagaccctcacgctgacctgcaccttctctgggttctcactcaccactagtggagtgggtgtgggctggatccgtcagcccccaggaaaggccctggaatggcttgcactcatttattggagtgatgataagcgctacagcccatctctgaagagcaggctcaccatcaccaaggacacctccaaaaaccaggtggtccttacaatgaccaacatggcccctgtggacacagccacatattactgtgcacacaccggttctagctgctgctattttgactactggggccagggaaccctggtcaccgtctcctca

SEQ ID NO: 29142 - protein, 120 aa, synthetic construct
  REGION 1..120: note = Description of Artificial Sequence: Synthetic polypeptide
QITLKESGPTLVKPTQTLTLTCTFSGFSLTTSGVGVGWIRQPPGKALEWLALIYWSDDKRYSPSLKSRLTITKDTSKNQVVLTMTNMAPVDTATYYCAHTGSSCCYFDYWGQGTLVTVSS

SEQ ID NO: 29143 - DNA, 351 bp, synthetic construct
  misc_feature 1..351: note = Description of Artificial Sequence: Synthetic polynucleotide
  source 1..351: mol_type = other DNA
caggtgcagctggtggagtctgggggaggcgtggtccagcctgggaggtccctgagactctcctgtgcagcgtctggattcaccttcagtaactatggcatgcactgggtccgccaggctccaggcaaggggctggagtgggtggcagttatatggtatgatgaaaataataaatactatgtagactccgtgaagggccgattcaccatctccagagacaactccaagaacacgctgtatctgcaaatgaacagcctgagagccgaggacacggctgtgtattactgtgcgagagaattggggttccggtctgactactggggccagggaaccctggtcaccgtctcctca

SEQ ID NO: 29144 - protein, 117 aa, synthetic construct; identical to SEQ ID NO: 28414
  REGION 1..117: note = Description of Artificial Sequence: Synthetic polypeptide

SEQ ID NO: 29145 - DNA, 345 bp, synthetic construct
  misc_feature 1..345: note = Description of Artificial Sequence: Synthetic polynucleotide
  source 1..345: mol_type = other DNA
gaggtgcagctggtggagtctgggggaggcctggtcaagcctggggggtccctgagactctcctgtgcagcctctggattcaccttcagtagctatagcatgaactgggtccgccaggctccagggaaggggctggagtgggtctcatccattagtggtagtagtagttacatgtactacgcagactcagtgaagggccgattcaccatctccagagacaacgccaaggactcactgtatctgcaaatgaacagcctgagagccgaggacacggctgtgtattactgtgcgagagtgaatctctttgactactggggccagggaaccctggtcaccgtctcctca

SEQ ID NO: 29146 - protein, 115 aa, synthetic construct
  REGION 1..115: note = Description of Artificial Sequence: Synthetic polypeptide
EVQLVESGGGLVKPGGSLRLSCAASGFTFSSYSMNWVRQAPGKGLEWVSSISGSSSYMYYADSVKGRFTISRDNAKDSLYLQMNSLRAEDTAVYYCARVNLFDYWGQGTLVTVSS

SEQ ID NO: 29147 - DNA, 351 bp, synthetic construct
  misc_feature 1..351: note = Description of Artificial Sequence: Synthetic polynucleotide
  source 1..351: mol_type = other DNA
caggtgcagctggtgcagtctggggctgaggtgaagaagcctggggcctcagtgaaggtctcctgcaaggcttctggatacaccttcaccgactatcatatgcactgggtgcgacaggcccctggacaagggcttgagtggatgggatggatcaaccctaataggggtggcacaaactatgcacagaagtttcaggacagggtcaccatgaccagggacacgtccatcagcacagcctacatggaactgagcaggctgagatctgacgacacggccgtctatttctgtgcgagagatggaactgggtcctttgactactggggccagggaaccctggtcaccgtctcctca

SEQ ID NO: 29148 - protein, 117 aa, synthetic construct
  REGION 1..117: note = Description of Artificial Sequence: Synthetic polypeptide
QVQLVQSGAEVKKPGASVKVSCKASGYTFTDYHMHWVRQAPGQGLEWMGWINPNRGGTNYAQKFQDRVTMTRDTSISTAYMELSRLRSDDTAVYFCARDGTGSFDYWGQGTLVTVSS

SEQ ID NO: 29149 - DNA, 339 bp, synthetic construct
  misc_feature 1..339: note = Description of Artificial Sequence: Synthetic polynucleotide
  source 1..339: mol_type = other DNA
gaggtgcagctggtggagtctgggggaggcctggtcaagcctggggggtccctgagactctcctgtgcagcctctggattcaccttcagtagctatagcatgaactgggtccgccaggctccagggaaggggctggagtgggtctcatccattagtagtagtagtagttacatatactacgcagactcagtgaagggccgattcaccatctccagagacaacgccaagaactcactgtatctgcaaatgaacagcctgagagccgaggacacggctgtgtattactgtgcgcgtctggggaactactggggccagggaaccctggtcaccgtctcctca

SEQ ID NO: 29150 - protein, 113 aa, synthetic construct
  REGION 1..113: note = Description of Artificial Sequence: Synthetic polypeptide
EVQLVESGGGLVKPGGSLRLSCAASGFTFSSYSMNWVRQAPGKGLEWVSSISSSSSYIYYADSVKGRFTISRDNAKNSLYLQMNSLRAEDTAVYYCARLGNYWGQGTLVTVSS

SEQ ID NO: 29151 - DNA, 345 bp, synthetic construct
  misc_feature 1..345: note = Description of Artificial Sequence: Synthetic polynucleotide
  source 1..345: mol_type = other DNA
gaggtgcagctggtggagtctgggggaggcctggtcaagcctggggggtccctgagactctcctgtgcagcctctggattcaccttcagtagctatagcatgaactgggtccgccaggctccagggaaggggctggagtgggtctcatccattagtggtagtagtagttacatatactacgcagactcagtgaagggccgattcaccatctccagagacaacgccaagaactcactgtatctgcaaatgaacagcctgagagccgaggacacggctgtgtattactgtgcgagagtcaacggtatggacgtctggggccaagggaccacggtcaccgtctcctca

SEQ ID NO: 29152 - protein, 115 aa, synthetic construct
  REGION 1..115: note = Description of Artificial Sequence: Synthetic polypeptide
EVQLVESGGGLVKPGGSLRLSCAASGFTFSSYSMNWVRQAPGKGLEWVSSISGSSSYIYYADSVKGRFTISRDNAKNSLYLQMNSLRAEDTAVYYCARVNGMDVWGQGTTVTVSS

SEQ ID NO: 29153 - DNA, 390 bp, synthetic construct
  misc_feature 1..390: note = Description of Artificial Sequence: Synthetic polynucleotide
  source 1..390: mol_type = other DNA
gaggtgcagctggtggagtctgggggaggcttggtaaagcctggggggtcccttagactctcctgtgcagcctctggattcactttcagtaacgcctggatgaactgggtccgcctggctccagggaaggggctggagtgggttggccgtattaaaagcaaaactgatggtgggacaacagactacgctgcacccgtgaaaggcagattcaccatctcaagagatgattcagaaaacacgttgtatctgcaaatgaacagcctgaaaaccgaggacacagccgtgtattactgttccacagatacgggtcctatagcagctcgtctcgcttactactactactacgctatggacgtctggggccaagggaccacggtcaccgtctcctca

SEQ ID NO: 29154 - protein, 130 aa, synthetic construct
  REGION 1..130: note = Description of Artificial Sequence: Synthetic polypeptide
EVQLVESGGGLVKPGGSLRLSCAASGFTFSNAWMNWVRLAPGKGLEWVGRIKSKTDGGTTDYAAPVKGRFTISRDDSENTLYLQMNSLKTEDTAVYYCSTDTGPIAARLAYYYYYAMDVWGQGTTVTVSS

SEQ ID NO: 29155 - DNA, 345 bp, synthetic construct
  misc_feature 1..345: note = Description of Artificial Sequence: Synthetic polynucleotide
  source 1..345: mol_type = other DNA
gaggtgcaactggtggagtctgggggaggcctggtcaagcctggggggtccctgagactctcctgtgcagcctctggattcaccttcagtacctataacttgaactgggtccgccaggctccagggaaggggctggagtgggtctcatccattagtggtggtgccggtcacatatattactcagactcagtgaagggccgattcaccatctccagagacaacgccaagaactcactgtatctgcaaatgaacagcctgagagccgaggacacggctgtgtattactgtgcgaggactaatgggtttgacttctggggccagggaaccctggtcaccgtctcctca

SEQ ID NO: 29156 - protein, 115 aa, synthetic construct
  REGION 1..115: note = Description of Artificial Sequence: Synthetic polypeptide
EVQLVESGGGLVKPGGSLRLSCAASGFTFSTYNLNWVRQAPGKGLEWVSSISGGAGHIYYSDSVKGRFTISRDNAKNSLYLQMNSLRAEDTAVYYCARTNGFDFWGQGTLVTVSS

SEQ ID NO: 29157 - DNA, 342 bp, synthetic construct
  misc_feature 1..342: note = Description of Artificial Sequence: Synthetic polynucleotide
  source 1..342: mol_type = other DNA
gaggtgcagctggtggagtctgggggaggcctggtcaagcctggggggtccctgagactctcctgtgcagcctctggattcaccttcagtagctatagcatgaactgggtccgccaggctccagggaaggggctggagtgggtctcatccattagtactagtactttcatatactacgcagattcagtgaagggccgattcaccatctcaagagacaacgccaagaactcactgtatctgcaaatgaacagcctgagagccgaggacacggctgtgtattactgtgcgagaaaggctgggcttgatatctggggccaagggacaatggtcaccgtctcttca

SEQ ID NO: 29158 - protein, 114 aa, synthetic construct
  REGION 1..114: note = Description of Artificial Sequence: Synthetic polypeptide
EVQLVESGGGLVKPGGSLRLSCAASGFTFSSYSMNWVRQAPGKGLEWVSSISTSTFIYYADSVKGRFTISRDNAKNSLYLQMNSLRAEDTAVYYCARKAGLDIWGQGTMVTVSS

SEQ ID NO: 29159 - DNA, 345 bp, synthetic construct
  misc_feature 1..345: note = Description of Artificial Sequence: Synthetic polynucleotide
  source 1..345: mol_type = other DNA
gaggtgcagctggtggagtctgggggaggcctggtcaagcctggggggtccctgagactctcctgtgcagcctctggattcaccttcagtagctataacataaactgggtccgccaggctccagggaaggggctggagtgggtctcatccattagtggtaatagtggttacatatactacgcagactcagtgaagggccgattcaccatctccagagacaacgccaagaactcactgtatctgcaaatgaacagcctgagagccgaggacacggctgtgtattactgtgcgcgaactaacctctttgactactggggccagggaaccctggtcaccgtctcctca

SEQ ID NO: 29160 - protein, 115 aa, synthetic construct
  REGION 1..115: note = Description of Artificial Sequence: Synthetic polypeptide
EVQLVESGGGLVKPGGSLRLSCAASGFTFSSYNINWVRQAPGKGLEWVSSISGNSGYIYYADSVKGRFTISRDNAKNSLYLQMNSLRAEDTAVYYCARTNLFDYWGQGTLVTVSS

SEQ ID NO: 29161 - DNA, 357 bp, synthetic construct
  misc_feature 1..357: note = Description of Artificial Sequence: Synthetic polynucleotide
  source 1..357: mol_type = other DNA
cagctgcagctgcaggagtcgggcccaggactggtgaagccttcggagaccctgtccctcacctgcactgtctctggtggctccatcagcagaagtagttattactggggctggatccgccagccccccgggaaggggctggactggattgggagtatctattatagtgggagcgccaactacaacccgtccctcaagagtcgagtcaccatatccgtagacacgtccaagaaccagttctccctgaaactgagttccgtgaccgccgcagacgcggctgtgtattactgtgcgagactggacaggggctggtcctttgactactggggccagggaaccctggtcaccgtctcctca

SEQ ID NO: 29162 - protein, 119 aa, synthetic construct
  REGION 1..119: note = Description of Artificial Sequence: Synthetic polypeptide
QLQLQESGPGLVKPSETLSLTCTVSGGSISRSSYYWGWIRQPPGKGLDWIGSIYYSGSANYNPSLKSRVTISVDTSKNQFSLKLSSVTAADAAVYYCARLDRGWSFDYWGQGTLVTVSS

SEQ ID NO: 29163 - DNA, 363 bp, synthetic construct
  misc_feature 1..363: note = Description of Artificial Sequence: Synthetic polynucleotide
  source 1..363: mol_type = other DNA
gaggtgcagctgttggagtctgggggaggcttggtacagcctggggggtccctgagactctcctgtgcagcctctggattcacctttagcagctatgccatgagctgggtccgccaggctccagggaaggggctggagtgggtctcagttattagtgggcgtggtggtagcacatactacgcagactccgtgaagggccggttcaccatctccagagacaattccaagaacacgctgtatctgcaaatgaacagcctgagagccgaggacacggccgtatattactgtgcgaaaagggggatagtgggagctactgaggcttttgatatctggggccaagggacaatggtcaccgtctcttca

SEQ ID NO: 29164 - protein, 121 aa, synthetic construct
  REGION 1..121: note = Description of Artificial Sequence: Synthetic polypeptide
EVQLLESGGGLVQPGGSLRLSCAASGFTFSSYAMSWVRQAPGKGLEWVSVISGRGGSTYYADSVKGRFTISRDNSKNTLYLQMNSLRAEDTAVYYCAKRGIVGATEAFDIWGQGTMVTVSS

SEQ ID NO: 29165 - DNA, 357 bp, synthetic construct
  misc_feature 1..357: note = Description of Artificial Sequence: Synthetic polynucleotide
  source 1..357: mol_type = other DNA
cagctgcagctgcaggagtcgggcccaggactggtgcagccttcggagaccctgtccctcacctgcactgtctctggtgtctccatcagtaggactagttactactggggctggctccgccagcccccagggaaggggctggagtggattggcaatatttattatagtgggagcgcctacaacaacccgtccctcaagagtcgagtcaccatatccgttgacacgtccaagaaccagttctccctgaagctgagttctgtgaccgccgcagacacggctgtgtattactgtgggagacatggacaagactggggccttgactactggggccagggaaccctggtcaccgtctcctca

SEQ ID NO: 29166 - protein, 119 aa, synthetic construct
  REGION 1..119: note = Description of Artificial Sequence: Synthetic polypeptide
QLQLQESGPGLVQPSETLSLTCTVSGVSISRTSYYWGWLRQPPGKGLEWIGNIYYSGSAYNNPSLKSRVTISVDTSKNQFSLKLSSVTAADTAVYYCGRHGQDWGLDYWGQGTLVTVSS

SEQ ID NO: 29167 - DNA, 339 bp, synthetic construct
  misc_feature 1..339: note = Description of Artificial Sequence: Synthetic polynucleotide
  source 1..339: mol_type = other DNA
gaggtgcagctggtggagtctgggggaggcctggtcaagcctggggggtccctgagactctcctgtgcagcctctggattcaccttcagtagctatagcatgaactgggtccgccaggctccagggaaggggctggagtgggtctcatccattagtagtagtagtagttacatatactacgcagactcagtgaagggccgattcaccatctccagagacaacgccaagaactcactgtatctgcaaatgaacagcctgagagccgaggacacggctgtgtattactgtgcgcgtctgggtaactactggggccagggaaccctggtcaccgtctcctca

SEQ ID NO: 29168 - protein, 113 aa, synthetic construct; identical to SEQ ID NO: 29150
  REGION 1..113: note = Description of Artificial Sequence: Synthetic polypeptide

SEQ ID NO: 29169 - DNA, 354 bp, synthetic construct
  misc_feature 1..354: note = Description of Artificial Sequence: Synthetic polynucleotide
  source 1..354: mol_type = other DNA
caggtgcagctggtgcagtctgggactgaggtgaagaagcctggggcctcagtgaaggtctcctgcaaggcttctggatacaccttcaccaattatgatatcaactgggtgcgacaggccactggacaagggcttgagtggatgggatggatgcaccctaacagtggtaacacaggctatgcacagaagttccagggcagagtcaccttgaccaggaacacctccataagcacagcctacatggaactgagcagcctgagatctgaggacacggccgtgtattactgtgcgagtagcagtggctggtactactttgactactggggccagggaaccctggtcaccgtctcctca

SEQ ID NO: 29170 - protein, 118 aa, synthetic construct
  REGION 1..118: note = Description of Artificial Sequence: Synthetic polypeptide
QVQLVQSGTEVKKPGASVKVSCKASGYTFTNYDINWVRQATGQGLEWMGWMHPNSGNTGYAQKFQGRVTLTRNTSISTAYMELSSLRSEDTAVYYCASSSGWYYFDYWGQGTLVTVSS

SEQ ID NO: 29171 - DNA, 354 bp, synthetic construct
  misc_feature 1..354: note = Description of Artificial Sequence: Synthetic polynucleotide
  source 1..354: mol_type = other DNA
caggtgcagctggtgcagtctgggactgaggtgaagaagcctggggcctcagtgaaggtctcctgcaaggcttctggatacaccttcaccaattatgatatcaactgggtgcgacaggccactggacaagggcttgagtggatgggatggatgcaccctaacagtggtaacacaggctatgcacagaagttccagggcagagtcaccttgaccagggacacctccataagcacagcctacatggaactgagcagcctgagatctgaggacacggccgtgtattactgtgcgagtagcagtggctggtactactttgactactggggccagggaaccctggtcaccgtgtcctca

SEQ ID NO: 29172 - protein, 118 aa, synthetic construct
  REGION 1..118: note = Description of Artificial Sequence: Synthetic polypeptide
QVQLVQSGTEVKKPGASVKVSCKASGYTFTNYDINWVRQATGQGLEWMGWMHPNSGNTGYAQKFQGRVTLTRDTSISTAYMELSSLRSEDTAVYYCASSSGWYYFDYWGQGTLVTVSS

SEQ ID NO: 29173 - DNA, 372 bp, synthetic construct
  misc_feature 1..372: note = Description of Artificial Sequence: Synthetic polynucleotide
  source 1..372: mol_type = other DNA
caggtgaagctggtgcagtctggggctgaggtgaagaagcctggggcctcagtgaaggtctcctgcaaggcttcaggatacaccttcaccggctactatatgcactgggtgcgacaggcccctggacaagggcttgagtggatgggatggatcaaccctaacagtggtggcacaaactatgtacagaagtttcagggcagggtcaccatgaccagggacacgtccatcagcacagcctacatggagctgagcaggctgagatctgacgacacggccgtgtattactgtgcgagagtgtattactatggttcggggagttattataacgagtttgactactggggccagggaaccctggtcaccgtctcctca

SEQ ID NO: 29174 - protein, 124 aa, synthetic construct
  REGION 1..124: note = Description of Artificial Sequence: Synthetic polypeptide
QVKLVQSGAEVKKPGASVKVSCKASGYTFTGYYMHWVRQAPGQGLEWMGWINPNSGGTNYVQKFQGRVTMTRDTSISTAYMELSRLRSDDTAVYYCARVYYYGSGSYYNEFDYWGQGTLVTVSS

SEQ ID NO: 29175 - DNA, 372 bp, synthetic construct; identical to SEQ ID NO: 29173
  misc_feature 1..372: note = Description of Artificial Sequence: Synthetic polynucleotide
  source 1..372: mol_type = other DNA

SEQ ID NO: 29176 - protein, 124 aa, synthetic construct; identical to SEQ ID NO: 29174
  REGION 1..124: note = Description of Artificial Sequence: Synthetic polypeptide

SEQ ID NO: 29177 - DNA, 354 bp, synthetic construct
  misc_feature 1..354: note = Description of Artificial Sequence: Synthetic polynucleotide
  source 1..354: mol_type = other DNA
caggtgcagctggtgcagtctggggctgaggtgaagaagcctggggcctcagtgaaggtctcctgcaaggcttctggatacaccttcaccaattatgatatcaactgggtgcgacaggccactggacaagggcctgagtggatgggatggatgcaccctaacagtggtaacacaggctatgcaaagaagttccagggcagagtcaccatgaccaggaacacctccataagcgcagcctatatggttctgagcagcctgagatctgaggacacggccgtgtattactgtgcgcttagcagtggctggtactactttgactactggggccagggaaccctggtcaccgtctcctca

SEQ ID NO: 29178 - protein, 118 aa, synthetic construct
  REGION 1..118: note = Description of Artificial Sequence: Synthetic polypeptide
QVQLVQSGAEVKKPGASVKVSCKASGYTFTNYDINWVRQATGQGPEWMGWMHPNSGNTGYAKKFQGRVTMTRNTSISAAYMVLSSLRSEDTAVYYCALSSGWYYFDYWGQGTLVTVSS

SEQ ID NO: 29179 - DNA, 354 bp, synthetic construct
  misc_feature 1..354: note = Description of Artificial Sequence: Synthetic polynucleotide
  source 1..354: mol_type = other DNA
caggtgctcctggtgcagtctggggctgaggtgaagaggcctggggcctcagtgaaggtctcctgcaaggcttctggatacaccttcaccaattatgatattaattgggtgcgacaggccactggacaagggcttgagtggatgggatggatgtaccctaacagtggtaacacaggctatgcacagaaattccagggcagagtcaccatgaccagggacacctccatcagcacagcctacatggagctgagcagcctgagatctgaggacacggccgtctattactgtgcgagtagcagtggctggtactactttgactactggggccagggaaccctggtcaccgtgtcctca

SEQ ID NO: 29180 - protein, 118 aa, synthetic construct
  REGION 1..118: note = Description of Artificial Sequence: Synthetic polypeptide
QVLLVQSGAEVKRPGASVKVSCKASGYTFTNYDINWVRQATGQGLEWMGWMYPNSGNTGYAQKFQGRVTMTRDTSISTAYMELSSLRSEDTAVYYCASSSGWYYFDYWGQGTLVTVSS

SEQ ID NO: 29181 - DNA, 354 bp, synthetic construct
  misc_feature 1..354: note = Description of Artificial Sequence: Synthetic polynucleotide
  source 1..354: mol_type = other DNA
caggtgcagctggtggagtctgggggaggcgtggtccagcctgggaggtccctgcgactctcctgtgcagcgtctggattcaccttcagtagctttggcatgcactgggtccgccaggctccaggcaaggggctggagtgggtggcaattatctggcatgatggaagtaataaatactatgcagactccgtgaagggccgattcaccatctccagagacaattccaaaaacacgctgtatctgcaaatgagcagcctgcgagccgaggacacggctgtgtattactgtgcgagagatctgagtatgggcggtatggacgtctggggccaagggaccacggtcaccgtgtcctca

SEQ ID NO: 29182 - protein, 118 aa, synthetic construct
  REGION 1..118: note = Description of Artificial Sequence: Synthetic polypeptide
QVQLVESGGGVVQPGRSLRLSCAASGFTFSSFGMHWVRQAPGKGLEWVAIIWHDGSNKYYADSVKGRFTISRDNSKNTLYLQMSSLRAEDTAVYYCARDLSMGGMDVWGQGTTVTVSS

SEQ ID NO: 29183 - DNA, 351 bp, synthetic construct
  misc_feature 1..351: note = Description of Artificial Sequence: Synthetic polynucleotide
  source 1..351: mol_type = other DNA
caggtgcagctggtgcagtctggggctgaggtgaagaagcctggggcctcagtgaaggtctcctgcaaggcttctggatacaccttcaccgcctaccatatgcactgggtgcgacaggcccctggacaaggacttgagtggatgggatggatcaaccctaacaataatggcacaaactatgcacagaagtttcagggcagggtcaccatgaccagggacacgtccatcagcacagcctacatggagctgagcaggctgagatctgacgacacggccgtttattactgtgggagagatgttaccagctcgtttgactattggggccagggaaccctggtcaccgtctcctca

SEQ ID NO: 29184 - protein, 117 aa, synthetic construct
  REGION 1..117: note = Description of Artificial Sequence: Synthetic polypeptide
QVQLVQSGAEVKKPGASVKVSCKASGYTFTAYHMHWVRQAPGQGLEWMGWINPNNNGTNYAQKFQGRVTMTRDTSISTAYMELSRLRSDDTAVYYCGRDVTSSFDYWGQGTLVTVSS

SEQ ID NO: 29185 - DNA, 351 bp, synthetic construct
  misc_feature 1..351: note = Description of Artificial Sequence: Synthetic polynucleotide
  source 1..351: mol_type = other DNA
caggtgcagctggtacagtctggggctgaggtgaagaagcctggggcctcagtgaaggtctcctgcaaggcttctggatacaccttcaccgactactatttgcactgggtgcgacaggcccctggacaaggtcttgagtggatgggatgggtccaccctaacagtggtggcacaaactttgcacagaagtttcaggacagggtcaccatgaccagggacacgtccatcagcacagcctacatggagctgagcagcctgagatctgacgacacggccatatattcctgtgcgcgagatggtaccagctcgtttgactactggggccagggaaccctggtcaccgtctcctca

SEQ ID NO: 29186 - protein, 117 aa, synthetic construct
  REGION 1..117: note = Description of Artificial Sequence: Synthetic polypeptide
QVQLVQSGAEVKKPGASVKVSCKASGYTFTDYYLHWVRQAPGQGLEWMGWVHPNSGGTNFAQKFQDRVTMTRDTSISTAYMELSSLRSDDTAIYSCARDGTSSFDYWGQGTLVTVSS

SEQ ID NO: 29187 - DNA, 354 bp, synthetic construct
  misc_feature 1..354: note = Description of Artificial Sequence: Synthetic polynucleotide
  source 1..354: mol_type = other DNA
caggtgcagctgctgcagtctggggctgaggtgaagaagcctggggcctcagtgaaggtctcctgcaaggcttctggatacaccttcaccaattatgatatcaactgggtgcgacaggccactggacaagggcttgagtggatgggatggatgtaccctaacagtggtaacacgggctatgcacagaagttccagggcagagtcaccatgaccatgaacacctccataagcacagcctacatggagttgagcagcctgagatctgaggacacggccgtgtattactgtgcgatgagcagtggctggtactactttgacttctggggccagggaaccctggtcaccgtctcctca

SEQ ID NO: 29188 - protein, 118 aa, synthetic construct
  REGION 1..118: note = Description of Artificial Sequence: Synthetic polypeptide
QVQLLQSGAEVKKPGASVKVSCKASGYTFTNYDINWVRQATGQGLEWMGWMYPNSGNTGYAQKFQGRVTMTMNTSISTAYMELSSLRSEDTAVYYCAMSSGWYYFDFWGQGTLVTVSS

SEQ ID NO: 29189 - DNA, 369 bp, synthetic construct
  misc_feature 1..369: note = Description of Artificial Sequence: Synthetic polynucleotide
  source 1..369: mol_type = other DNA
caggtgcagctggtggagtctgggggaggcgtggtccagcctgggaggtccctgagactctcctgtgcagcgtctggattcaccttcagtaactatgtcatgcactgggtccgccaggctccaggcaaggggctggagtgggtggcagttatatggtatgatggaagtaataagtactatgcagactccgtgaagggccgattcaccatctccagagacaattccaagaacacgctgtatctacaaatgaacagcctgagagccgtggacacggctgtgtattactgtgcgagagaggagtatagcagtggctggtacgactacggtatggacgtctggggccaagggaccacggtcaccgtctcctca

SEQ ID NO: 29190 - protein, 123 aa, synthetic construct
  REGION 1..123: note = Description of Artificial Sequence: Synthetic polypeptide
QVQLVESGGGVVQPGRSLRLSCAASGFTFSNYVMHWVRQAPGKGLEWVAVIWYDGSNKYYADSVKGRFTISRDNSKNTLYLQMNSLRAVDTAVYYCAREEYSSGWYDYGMDVWGQGTTVTVSS

SEQ ID NO: 29191 - DNA, 369 bp, synthetic construct
  misc_feature 1..369: note = Description of Artificial Sequence: Synthetic polynucleotide
  source 1..369: mol_type = other DNA
caggtgcagctggtggagtctgggggaggcgtggtccagcctgggaggtccctgagactctcctgtgcagcgtctggattcaccttcagtaactgtgtcatgcactgggtccgccaggctccaggcaaggggctggagtgggtggcagttatatggtatgatggaagtaataaatactatgcagactccgtgaagggccgaatcaccatctccagagacaattccaagaacacgctgtatctgcaaatgaacagcctgagagccgaggacacggctgtgtattactgtgcgagagaggagtatagcagtggctggtacgactacggtatggacgtctggggccaagggaccacggtcaccgtctcctca

SEQ ID NO: 29192 - protein, 123 aa, synthetic construct
  REGION 1..123: note = Description of Artificial Sequence: Synthetic polypeptide
QVQLVESGGGVVQPGRSLRLSCAASGFTFSNCVMHWVRQAPGKGLEWVAVIWYDGSNKYYADSVKGRITISRDNSKNTLYLQMNSLRAEDTAVYYCAREEYSSGWYDYGMDVWGQGTTVTVSS

SEQ ID NO: 29193 - DNA, 354 bp, synthetic construct
  misc_feature 1..354: note = Description of Artificial Sequence: Synthetic polynucleotide
  source 1..354: mol_type = other DNA
caggtgcagctggtggagtctgggggaggcgtggtccagcctgggaggtccctgagactctcctgtgcagcgtctggattcaacttcagtagctatggcatgcactgggtccgccaggctccaggcaaggggctggagtggatggcagttatatggtatgatggaagtaataaatactatgcagactccgtgaagggccgattcaccatctccagagacaattccaagaacacgctgtatctgcaaatgcacagcctgagagccgaggacacggctgtgtattactgtgcgagagatgagaggctggggatttttgactactggggccagggaaccctggtcaccgtctcctca

SEQ ID NO: 29194 - protein, 118 aa, synthetic construct
  REGION 1..118: note = Description of Artificial Sequence: Synthetic polypeptide
QVQLVESGGGVVQPGRSLRLSCAASGFNFSSYGMHWVRQAPGKGLEWMAVIWYDGSNKYYADSVKGRFTISRDNSKNTLYLQMHSLRAEDTAVYYCARDERLGIFDYWGQGTLVTVSS

SEQ ID NO: 29195 - DNA, 357 bp, synthetic construct
  misc_feature 1..357: note = Description of Artificial Sequence: Synthetic polynucleotide
  source 1..357: mol_type = other DNA
caggtgcagttggtggagtctgggggaggcgtggtccagcctgggaggtccctgagactctcctgtgcagcgtctggattcaccttcagtagctatggcatgcactgggtccgccaggctccaggcaagggactggagtgggtgacagttatatggcatgatggaagtaatgcatactatgcagactccgtgaagggccgattcaccatctccagagacaattccaagaacacgctgtatctgcaaatgaacagcctgagagccgaggacacggctgtgtattactgtgcgagagaaaatagcagctcgtactactttgactactggggccagggaaccctggtcaccgtctcctca

SEQ ID NO: 29196 - protein, 119 aa, synthetic construct
  REGION 1..119: note = Description of Artificial Sequence: Synthetic polypeptide
QVQLVESGGGVVQPGRSLRLSCAASGFTFSSYGMHWVRQAPGKGLEWVTVIWHDGSNAYYADSVKGRFTISRDNSKNTLYLQMNSLRAEDTAVYYCARENSSSYYFDYWGQGTLVTVSS

SEQ ID NO: 29197 - DNA, 354 bp, synthetic construct
  misc_feature 1..354: note = Description of Artificial Sequence: Synthetic polynucleotide
  source 1..354: mol_type = other DNA
caggtgcagctggtgcagtctggggctgaggtgaggaagcctggggcctcagtgaaggtctcctgcaaggcttctggatacaccttcaccaattatgatatcaactgggtgcgacaggccactggacaagggcctgagtggatgggatggatgcaccctaacagtggtaacacaggctatgcaaagaagttccagggcagagtcaccatgaccaggaacacctccataagcgcagcctatatggttctgagcagcctgagatctgaggacacggccgtgtattactgtgcgcttagcagtggctggtactactttgactactggggccagggaaccctggtcaccgtctcctca

SEQ ID NO: 29198 - protein, 118 aa, synthetic construct
  REGION 1..118: note = Description of Artificial Sequence: Synthetic polypeptide
QVQLVQSGAEVRKPGASVKVSCKASGYTFTNYDINWVRQATGQGPEWMGWMHPNSGNTGYAKKFQGRVTMTRNTSISAAYMVLSSLRSEDTAVYYCALSSGWYYFDYWGQGTLVTVSS

SEQ ID NO: 29199 - DNA, 342 bp, synthetic construct
  misc_feature 1..342: note = Description of Artificial Sequence: Synthetic polynucleotide
  source 1..342: mol_type = other DNA
gaggtgcagctggtggagtctgggggaggcctggtcaagcctggggggtccctgagactctcctgtgcagcctctggattcaccttcagtagctatagcatgaactgggtccgccaggctccagggaaggggctggagtgggtctccgccattagtggtaatagtacttacatatactacgcagactcgttgaagggccgattcaccatctccagagacaacgccaagaactcactgtttctgcaactgaacagcctgagagccgaggacacggctgtttattactgtgcgagagatcggggcagtgaatggggccagggaaccctggtcaccgtctcctca

SEQ ID NO: 29200 - protein, 114 aa, synthetic construct
  REGION 1..114: note = Description of Artificial Sequence: Synthetic polypeptide
EVQLVESGGGLVKPGGSLRLSCAASGFTFSSYSMNWVRQAPGKGLEWVSAISGNSTYIYYADSLKGRFTISRDNAKNSLFLQLNSLRAEDTAVYYCARDRGSEWGQGTLVTVSS

SEQ ID NO: 29201 - DNA, 354 bp, synthetic construct
  misc_feature 1..354: note = Description of Artificial Sequence: Synthetic polynucleotide
  source 1..354: mol_type = other DNA
gaggtgcagctgttggagtctgggggaggcttggtacagcctggggggtccctgagactctcctgtgcagcctctggattcacctttagcagctatgccatgagctgggtccgccaggctccagggaaggggctggagtgggtctcagctattagtggtcgtggtgttaacacattcgacgcagactccgtgaagggccggttcaccatctccagagacaattccaagaacacgctgtatctgcaaatgaacagcctgagagccgaggacacggccgtatattactgtgcgaaggaaaggagtgggagctattttgactactggggccagggaaccctggtcaccgtctcctca

SEQ ID NO: 29202 - protein, 118 aa, synthetic construct
  REGION 1..118: note = Description of Artificial Sequence: Synthetic polypeptide
EVQLLESGGGLVQPGGSLRLSCAASGFTFSSYAMSWVRQAPGKGLEWVSAISGRGVNTFDADSVKGRFTISRDNSKNTLYLQMNSLRAEDTAVYYCAKERSGSYFDYWGQGTLVTVSS

SEQ ID NO: 29203 - DNA, 351 bp, synthetic construct
  misc_feature 1..351: note = Description of Artificial Sequence: Synthetic polynucleotide
  source 1..351: mol_type = other DNA
caggtgcagctggtggagtctgggggaggcgtggtccagcctgggaggtccctgagactctcctgtgcagcgtctggattcaccttcagtagctatggcatacactgggtccgccaggctccaggcaaggggctggagtgggtggcagttatatggtatgatgaaaataataaatactatgcagactccgtgaagggccgattcaccatctccagagacaattccaagaacacgctgtatctgcaaatgaacagcctgagagccgaggacacggctgtgtattactgtgcgagagagctaggattttccaatgactactggggccagggaaccctggtcaccgtctcctca

SEQ ID NO: 29204 - protein, 117 aa, synthetic construct
  REGION 1..117: note = Description of Artificial Sequence: Synthetic polypeptide
QVQLVESGGGVVQPGRSLRLSCAASGFTFSSYGIHWVRQAPGKGLEWVAVIWYDENNKYYADSVKGRFTISRDNSKNTLYLQMNSLRAEDTAVYYCARELGFSNDYWGQGTLVTVSS

SEQ ID NO: 29205 - DNA, 345 bp, synthetic construct
  misc_feature 1..345: note = Description of Artificial Sequence: Synthetic polynucleotide
  source 1..345: mol_type = other DNA
gaggtgcagctggtggagtctgggggaggcctggtcaagccgggggggtccctgagactctcctgtgcagcctctggattcaccttcagtagctataccatgaactgggtccgccaggttccagggaaggggctggagtgggtctcatccattagtggaagtagtacttacatatactacgcagactcagtgaagggccgattcaccatctccagagacgacgcccagaactcactgtatctgcaaatgaacagcctgagaggcgaggacacggctgtgtattactgtgcgagggtgacctcttttgactactggggccagggagccctggtcaccgtctcctca

SEQ ID NO: 29206 - protein, 115 aa, synthetic construct
  REGION 1..115: note = Description of Artificial Sequence: Synthetic polypeptide
EVQLVESGGGLVKPGGSLRLSCAASGFTFSSYTMNWVRQVPGKGLEWVSSISGSSTYIYYADSVKGRFTISRDDAQNSLYLQMNSLRGEDTAVYYCARVTSFDYWGQGALVTVSS

SEQ ID NO: 29207 - DNA, 354 bp, synthetic construct
  misc_feature 1..354: note = Description of Artificial Sequence: Synthetic polynucleotide
  source 1..354: mol_type = other DNA
gaggtgcagctgttggagtctgggggaggcttggtacagcctggggggtccctgagactctcctgtgcagcctctggattcacctttagcagctatgccatgagctgggtccgccaggctccagggaaggggctggagtgggtctcagctattagtggtcgtggtattaacacattcgacgcagactccgtgaagggccggttcaccatctccagagacaattccaagaacacgctgtatctgcaaatgaacagcctgagagccgaggacacggccgtatattactgtgcgaaggaaaggagtgggagctattttgactactggggccagggaaccctggtcaccgtctcctca

SEQ ID NO: 29208 - protein, 118 aa, synthetic construct
  REGION 1..118: note = Description of Artificial Sequence: Synthetic polypeptide
EVQLLESGGGLVQPGGSLRLSCAASGFTFSSYAMSWVRQAPGKGLEWVSAISGRGINTFDADSVKGRFTISRDNSKNTLYLQMNSLRAEDTAVYYCAKERSGSYFDYWGQGTLVTVSS

SEQ ID NO: 29209 - DNA, 339 bp, synthetic construct
  misc_feature 1..339: note = Description of Artificial Sequence: Synthetic polynucleotide
  source 1..339: mol_type = other DNA
caggtgcagctggtggagtctgggggaggcttggtcaagcctggagggtccctgagactctcctgtgcagcctctggattcaccttcagtgactactacatgatctggatccgccaggctccagggaaggggctggagtgggtttcatacattagtagtagtggtattaccaaatactacgcagactctatgaagggccgattcaccatctccagggacaacgccaagaactcactgtatctgcaaatgaacagcctgagagccgaggacacggccgtgtattactgtgcggccgatacaatctactggggccagggaaccctggtcaccgtctcctca

SEQ ID NO: 29210 - protein, 113 aa, synthetic construct
  REGION 1..113: note = Description of Artificial Sequence: Synthetic polypeptide
QVQLVESGGGLVKPGGSLRLSCAASGFTFSDYYMIWIRQAPGKGLEWVSYISSSGITKYYADSMKGRFTISRDNAKNSLYLQMNSLRAEDTAVYYCAADTIYWGQGTLVTVSS

SEQ ID NO: 29211 - DNA, 354 bp, synthetic construct
  misc_feature 1..354: note = Description of Artificial Sequence: Synthetic polynucleotide
  source 1..354: mol_type = other DNA
caggtgcagctggtgcagtctggggctgaggtgaagaagcctggggcctcagtgaaggtctcctgcaaggcttctggatacaccttcaccaattatgatatcaactgggtgcgacaggccactggacaagggcttgagtggatgggatggatgcaccctaacagtggtaacacaggctatgcacagaagttccagggcagagtcaccatgaccaggaacacctccataagcacagcctacatggagctgagcagcctgacatctgaggacacggccgtgtattactgtgcccatagcagtggctggaccctctttgactactggggccagggaaccctggtcaccgtctccgca

SEQ ID NO: 29212 - protein, 118 aa, synthetic construct
  REGION 1..118: note = Description of Artificial Sequence: Synthetic polypeptide
QVQLVQSGAEVKKPGASVKVSCKASGYTFTNYDINWVRQATGQGLEWMGWMHPNSGNTGYAQKFQGRVTMTRNTSISTAYMELSSLTSEDTAVYYCAHSSGWTLFDYWGQGTLVTVSA

SEQ ID NO: 29213 - DNA, 354 bp, synthetic construct; identical to SEQ ID NO: 29207
  misc_feature 1..354: note = Description of Artificial Sequence: Synthetic polynucleotide
  source 1..354: mol_type = other DNA

SEQ ID NO: 29214 - protein, 118 aa, synthetic construct; identical to SEQ ID NO: 29208
  REGION 1..118: note = Description of Artificial Sequence: Synthetic polypeptide

SEQ ID NO: 29215 - DNA, 339 bp, synthetic construct
  misc_feature 1..339: note = Description of Artificial Sequence: Synthetic polynucleotide
  source 1..339: mol_type = other DNA
caggtgcagctggtggagtctgggggaggcttggtcaagcctggagggtccctgagactctcctgtgcagcctctggaatcaccttcagtgactactacatgaactggatccgccaggctccagggaaggggctggagtgggtttcatacattagtagtagtggtagaaccatattctacgcagactctttgaagggccgattcaccatctccagggacaacgccaagaactcactgtatctgcaaatgaacagcctgagagccgaggacacggccgtgtattactgtgcggccgatacaatctactggggccagggaaccctggtcaccgtctcctca

SEQ ID NO: 29216 - protein, 113 aa, synthetic construct
  REGION 1..113: note = Description of Artificial Sequence: Synthetic polypeptide
QVQLVESGGGLVKPGGSLRLSCAASGITFSDYYMNWIRQAPGKGLEWVSYISSSGRTIFYADSLKGRFTISRDNAKNSLYLQMNSLRAEDTAVYYCAADTIYWGQGTLVTVSS

SEQ ID NO: 29217 - DNA, 354 bp, synthetic construct
  misc_feature 1..354: note = Description of Artificial Sequence: Synthetic polynucleotide
  source 1..354: mol_type = other DNA
gaggtgcagctgttggagtctgggggaggcttggtacagcctggggggtccctgagactctcctgtgcagcctctggattcacctttagcagctatgccatgagttgggtccgccaggctccagggatggggctggagtgggtctcagctattagtggtagtggtagtaacacattctacgcagactccgtgaagggccggttcaccatctccagagacaattccaagaacacgctgtatctgcacatgaacagcctgagagccgaggacactgccgtatatttctgtgcgaaacgaacgccctctgatgtttttgatatctggggccaagggacaatggtcaccgtctcttca

SEQ ID NO: 29218 - protein, 118 aa, synthetic construct
  REGION 1..118: note = Description of Artificial Sequence: Synthetic polypeptide
EVQLLESGGGLVQPGGSLRLSCAASGFTFSSYAMSWVRQAPGMGLEWVSAISGSGSNTFYADSVKGRFTISRDNSKNTLYLHMNSLRAEDTAVYFCAKRTPSDVFDIWGQGTMVTVSS

SEQ ID NO: 29219 - DNA, 363 bp, synthetic construct
  misc_feature 1..363: note = Description of Artificial Sequence: Synthetic polynucleotide
  source 1..363: mol_type = other DNA
caggtgcagctggtggagtctgggggaggcgtggtccagcctgggaggtccctgagactctcctgtgcagcgtctggattctccttcagtgactatggcatgcactgggtccgccaggctccaggcaaggggctggagtgggtggcagttatatggtatgatggaagtaataaatactatgcagactccgtgaagggccgactcaccatctccagagacaattccaagaacacgctgtatctgcaaatgaacagcctgagagccgaggacacggctgtgtattactgtgcgaggcggtatgtcagaagctgggtgggaggtatggacgtctggggccaagggaccacggtcaccgtctcctca

SEQ ID NO: 29220 - protein, 121 aa, synthetic construct
  REGION 1..121: note = Description of Artificial Sequence: Synthetic polypeptide
QVQLVESGGGVVQPGRSLRLSCAASGFSFSDYGMHWVRQAPGKGLEWVAVIWYDGSNKYYADSVKGRLTISRDNSKNTLYLQMNSLRAEDTAVYYCARRYVRSWVGGMDVWGQGTTVTVSS

SEQ ID NO: 29221 - DNA, 369 bp, synthetic construct
  misc_feature 1..369: note = Description of Artificial Sequence: Synthetic polynucleotide
  source 1..369: mol_type = other DNA
caggtgcagctggtggagtctgggggaggcgtggtccagcctgggaggtccctgagactctcctgtacagcgtctggattcaccttcagtgactatggcatgcactgggtccgccaggctccaggcaaggggctggagtgggtggcagttatatggtatgatggaagtaataaatactatgcagactccgtgaagggccgattcaccatctccagagacaattccaagaacacgctgtatctgcaaatgaacagcctgagagccgaggacacggctgtgtattactgtgcgagagagaggtatagcagtggctggtacgactacggtatggacgtctggggccaagggaccacggtcaccgtctcctca

SEQ ID NO: 29222 - protein, 123 aa, synthetic construct
  REGION 1..123: note = Description of Artificial Sequence: Synthetic polypeptide
QVQLVESGGGVVQPGRSLRLSCTASGFTFSDYGMHWVRQAPGKGLEWVAVIWYDGSNKYYADSVKGRFTISRDNSKNTLYLQMNSLRAEDTAVYYCARERYSSGWYDYGMDVWGQGTTVTVSS

SEQ ID NO: 29223 - DNA, 351 bp, synthetic construct
  misc_feature 1..351: note = Description of Artificial Sequence: Synthetic polynucleotide
  source 1..351: mol_type = other DNA
caggtgcagctggtggagtctgggggaggcgtggtccagcctgggaggtccctgagactctcctgtgcagcgtctggattcaccttcagtagctatggcatgcactgggtccgccaggctccaggcaaggggctggagtgggtggcagttatatggtttgaaggaagtaataaatactatgcagattccgtgaagggccgattcaccatctccagagacaattccaagaacacgctgtatctgcaaatgagcagcctgagagccgaggacacggctgtgtattactgtgtgagagaactaggattttccaccgactactggggccagggaaccctggtcaccgtctcctca

SEQ ID NO: 29224 - protein, 117 aa, synthetic construct
  REGION 1..117: note = Description of Artificial Sequence: Synthetic polypeptide
QVQLVESGGGVVQPGRSLRLSCAASGFTFSSYGMHWVRQAPGKGLEWVAVIWFEGSNKYYADSVKGRFTISRDNSKNTLYLQMSSLRAEDTAVYYCVRELGFSTDYWGQGTLVTVSS

SEQ ID NO: 29225 - DNA, 369 bp, synthetic construct
  misc_feature 1..369: note = Description of Artificial Sequence: Synthetic polynucleotide
  source 1..369: mol_type = other DNA
caggtgcagctggtggagtctgggggaggcgtggtccagcctgggaggtccctgagactctcctgtgcagcgtctggattcaccttcagtagctatgtcatgcactgggtccgccaggctccaggcaaggggctggagtgggtggcagttatatggtatgatggaagtaataaatactatgctgactccgtgaagggccgattcaccatctccagagacaattccaagaacacgctgtatctgcaaatgaacagcctgagagccgaggacacggctgtgtattactgtgcgagagaaaggtatagcagtggcttgtacgactacggtatggacgtctggggccaagggaccacggtcaccgtctcctca

SEQ ID NO: 29226 - protein, 123 aa, synthetic construct
  REGION 1..123: note = Description of Artificial Sequence: Synthetic polypeptide
QVQLVESGGGVVQPGRSLRLSCAASGFTFSSYVMHWVRQAPGKGLEWVAVIWYDGSNKYYADSVKGRFTISRDNSKNTLYLQMNSLRAEDTAVYYCARERYSSGLYDYGMDVWGQGTTVTVSS

SEQ ID NO: 29227 - DNA, 354 bp, synthetic construct
  misc_feature 1..354: note = Description of Artificial Sequence: Synthetic polynucleotide
  source 1..354: mol_type = other DNA
gaggtgcacctgttggagtctgggggaggcttggtacagcctggggggtccctgagactctcctgtgcagcctctggattcacctttagcagctatgccatgagctgggtccgccaggctccagggaaggggctggagtgggtctcaattctcagtggtggtggtaagaccacatactacgcagactccgtgaagggccggttcaccatctccagagacaattccaagaacacgctgtttctgcaaatgaacagcctgagagccgaggacacggccgtatattactgtgcgaaacgaacgccctctgatgcttttgatatctggggccaagggacaatggtcaccgtctcttca

SEQ ID NO: 29228 - protein, 118 aa, synthetic construct
  REGION 1..118: note = Description of Artificial Sequence: Synthetic polypeptide
EVHLLESGGGLVQPGGSLRLSCAASGFTFSSYAMSWVRQAPGKGLEWVSILSGGGKTTYYADSVKGRFTISRDNSKNTLFLQMNSLRAEDTAVYYCAKRTPSDAFDIWGQGTMVTVSS

SEQ ID NO: 29229 - DNA, 369 bp, synthetic construct
  misc_feature 1..369: note = Description of Artificial Sequence: Synthetic polynucleotide
  source 1..369: mol_type = other DNA
caggtgcagctggtggagtctgggggaggcgtggtccagcctgggaggtccctgagactctcctgtgcagcgtctggattcaccttcagtagctatgtcatgcactgggtccgccaggctccaggcaaggggctggagtgggtggcagttatatggtatgatggaagtaataaatactatgcagactccgtgaagggccgattcaccatctccagagacaattccaagaacacgctgtatctgcaaatgaacagcctgagagccgaggacacggctgtgtattactgtgcgagagtcccgtatagcagcagctggtacgactacggtatggacgtctggggccaagggaccacggtcaccgtctcctca

SEQ ID NO: 29230 - protein, 123 aa, synthetic construct
  REGION 1..123: note = Description of Artificial Sequence: Synthetic polypeptide
QVQLVESGGGVVQPGRSLRLSCAASGFTFSSYVMHWVRQAPGKGLEWVAVIWYDGSNKYYADSVKGRFTISRDNSKNTLYLQMNSLRAEDTAVYYCARVPYSSSWYDYGMDVWGQGTTVTVSS

SEQ ID NO: 29231 - DNA, 345 bp, synthetic construct
  misc_feature 1..345: note = Description of Artificial Sequence: Synthetic polynucleotide
  source 1..345: mol_type = other DNA
caggtgcacctgcaggagtcgggcccaggactggtgaagccttcggagaccctgtccctcacctgcactgtctctggtggctccatcagtagttactactggagctggatccggcagcccccagggaagggactggagtggattgggtatatctattacagtggaaacaccaactacaacccctccctcaagagtcgagtcaccatatcagtagacacgtccaagaaccagttctccctgaagctgagctctgtgaccgctgcggacacggccgtgtattactgtgtgagaggggtggctataaagaactactggggccagggaatcctggtcaccgtctcctca

SEQ ID NO: 29232 - protein, 115 aa, synthetic construct
  REGION 1..115: note = Description of Artificial Sequence: Synthetic polypeptide
QVHLQESGPGLVKPSETLSLTCTVSGGSISSYYWSWIRQPPGKGLEWIGYIYYSGNTNYNPSLKSRVTISVDTSKNQFSLKLSSVTAADTAVYYCVRGVAIKNYWGQGILVTVSS

SEQ ID NO: 29233 - DNA, 351 bp, synthetic construct
  misc_feature 1..351: note = Description of Artificial Sequence: Synthetic polynucleotide
  source 1..351: mol_type = other DNA
caggtgcagctggtggagtctgggggaggcgtggtccagcctgggaggtccctgagactctcctgtgcagcgtctggattcaccttcaataactatggcatgcactgggtccgccaggctccaggcaaggggctggagtgggtggcagttatatggtatgaaggaagtaataaatactatgcagactccgtgaagggccgattcaccatctccagagacaattccaagaacacgctgtatctgcaaatgaacagcctgagagccgaggacacggctgtgtattactgtgtgagagaactggggttcctctctgactactggggccagggaaccctggtcaccgtctcctca

SEQ ID NO: 29234 - protein, 117 aa, synthetic construct
  REGION 1..117: note = Description of Artificial Sequence: Synthetic polypeptide
QVQLVESGGGVVQPGRSLRLSCAASGFTFNNYGMHWVRQAPGKGLEWVAVIWYEGSNKYYADSVKGRFTISRDNSKNTLYLQMNSLRAEDTAVYYCVRELGFLSDYWGQGTLVTVSS

SEQ ID NO: 29235 - DNA, 369 bp, synthetic construct
  misc_feature 1..369: note = Description of Artificial Sequence: Synthetic polynucleotide
  source 1..369: mol_type = other DNA
caggtgcagctggtggagtctgggggaggcgtggtccagcctgggaggtccctgagactctcctgtgcagcgtctggattcaccttcagtagctatgtcatgcactgggtccgccaggctccaggcaaggggctggagtgggtggcagttatatggtatgatggaagtaataaatactatgcagactccgtgaagggccgattcaccatctccagagacaattccaagaacacgctgtatctgcaaatgaacagcctgagagccgaggacacggctgtgtattactgtgcgagagaaccatatagcagcagctggtacgactacggtatggacgtcgggggccaagggaccacggtcaccgtctcctca

SEQ ID NO: 29236 - protein, 123 aa, synthetic construct
  REGION 1..123: note = Description of Artificial Sequence: Synthetic polypeptide
QVQLVESGGGVVQPGRSLRLSCAASGFTFSSYVMHWVRQAPGKGLEWVAVIWYDGSNKYYADSVKGRFTISRDNSKNTLYLQMNSLRAEDTAVYYCAREPYSSSWYDYGMDVGGQGTTVTVSS

SEQ ID NO: 29237 - DNA, 363 bp, synthetic construct
  misc_feature 1..363: note = Description of Artificial Sequence: Synthetic polynucleotide
  source 1..363: mol_type = other DNA
caggtgcagttggtggagtctgggggaggcgtggtccagcctgggaggtccctgagactctcctgtgtagcgtctggattcaccttcagtagctatggcatgcactgggtccgccaggctccaggcaaggggctggagtgggtggcagttatatggtatgatggaagtaataaatactatgcagactccgtgaagggccgattcaccatctccagagacaattccaagaacacgctgtatctgcaaatgaacagcctgagagccgaggacacggctgtgtattattgtgcgaggcggtatagcagcagctgggtggggggtatggacgtctggggccaagggaccacggtcaccgtctcctca

SEQ ID NO: 29238 - protein, 121 aa, synthetic construct
  REGION 1..121: note = Description of Artificial Sequence: Synthetic polypeptide
QVQLVESGGGVVQPGRSLRLSCVASGFTFSSYGMHWVRQAPGKGLEWVAVIWYDGSNKYYADSVKGRFTISRDNSKNTLYLQMNSLRAEDTAVYYCARRYSSSWVGGMDVWGQGTTVTVSS

SEQ ID NO: 29239 - DNA, 369 bp, synthetic construct
  misc_feature 1..369: note = Description of Artificial Sequence: Synthetic polynucleotide
  source 1..369: mol_type = other DNA
caggtgcagctggtggagtctgggggaggcgtggtccagcctgggaggtccctgagactctcctgtgcagcgtctggattcaccttcagtgactgtgtcatgcactgggtccgccaggctccaggcaaggggctggagtgggtggcagttatatggtatgatggaagtaataaatactatgctgactccgtgaagggccgattcaccatctccagagacaattccaagaacacgctgtatctgcaaatgaacagcctgagagccgaggacacggctgtgtattactgtgcgagagaaaggtatagcagtggcttgtacgactacggtatggacgtctggggccaagggaccacggtcaccgtctcctca

SEQ ID NO: 29240 - protein, 123 aa, synthetic construct
  REGION 1..123: note = Description of Artificial Sequence: Synthetic polypeptide
QVQLVESGGGVVQPGRSLRLSCAASGFTFSDCVMHWVRQAPGKGLEWVAVIWYDGSNKYYADSVKGRFTISRDNSKNTLYLQMNSLRAEDTAVYYCARERYSSGLYDYGMDVWGQGTTVTVSS

SEQ ID NO: 29241 - DNA, 354 bp, synthetic construct; identical to SEQ ID NO: 29201
  misc_feature 1..354: note = Description of Artificial Sequence: Synthetic polynucleotide
  source 1..354: mol_type = other DNA

SEQ ID NO: 29242 - protein, 118 aa, synthetic construct; identical to SEQ ID NO: 29202
  REGION 1..118: note = Description of Artificial Sequence: Synthetic polypeptide

SEQ ID NO: 29243 - DNA, 363 bp, synthetic construct
  misc_feature 1..363: note = Description of Artificial Sequence: Synthetic polynucleotide
  source 1..363: mol_type = other DNA
gaggtgcagctgttggagtctgggggaggcttggtacagtctggagggtccctgagactctcctgtgcagcctctggattcacctttagcagctatgccatgaactgggtccgccaggctccagggaaggggctggagtgggtctcaggtgttgttggtagtggtggtagaacatactacgcagactccgtgaagggccggttcatcatctccagagacaattccaagaacacgctgtatctgcaaatgaacagcctgagagccgaggacacggccgtatattactgtgcgaaagatcgggggcagtggctcctaggcggtatggacgtctggggccaagggaccacggtcaccgtctcctca

SEQ ID NO: 29244 - protein, 121 aa, synthetic construct
  REGION 1..121: note = Description of Artificial Sequence: Synthetic polypeptide
EVQLLESGGGLVQSGGSLRLSCAASGFTFSSYAMNWVRQAPGKGLEWVSGVVGSGGRTYYADSVKGRFIISRDNSKNTLYLQMNSLRAEDTAVYYCAKDRGQWLLGGMDVWGQGTTVTVSS

SEQ ID NO: 29245 - DNA, 372 bp, synthetic construct
  misc_feature 1..372: note = Description of Artificial Sequence: Synthetic polynucleotide
  source 1..372: mol_type = other DNA
gaggtgcagctggtggagtctgggggaggcttggtacagcctggggggtccctgagactctcctgtgcagcctctggattcaccttcagtagctatagcgtgaactgggtccgccaggctccagggaaggggctggagtgggtttcatacattagtagtagtagtagtaccatatactacgcagactctgtgaagggccgattcaccatctccagagacaatgccaagaactcactgtatctgcaaatgaacagcctgagagacgaggacacggctgtgtattactgtgcgagaagtggatacagctatgcttactactactactacggtatggacgtctggggccaagggaccacggtcaccgtctcctca

SEQ ID NO: 29246 - protein, 124 aa, synthetic construct
  REGION 1..124: note = Description of Artificial Sequence: Synthetic polypeptide
EVQLVESGGGLVQPGGSLRLSCAASGFTFSSYSVNWVRQAPGKGLEWVSYISSSSSTIYYADSVKGRFTISRDNAKNSLYLQMNSLRDEDTAVYYCARSGYSYAYYYYYGMDVWGQGTTVTVSS

SEQ ID NO: 29247 - DNA, 360 bp, synthetic construct
  misc_feature 1..360: note = Description of Artificial Sequence: Synthetic polynucleotide
  source 1..360: mol_type = other DNA
caggtgcacctggcggagtctgggggaggcgtggtccagcctgggaggtccctgagactctcctgtgaagcgtctggattcaccctcagtagcgatgacacgcactgggtccgccagcctccaggcaaggggctggagtgggtggcagttatatggtttgatgaatataataaatactatgcagactccgtgaagggccgattcaccatctccagagacaattccaagaacacgctgtatctgcaaatgaacagcctgagagccgaggacgcggctgtgtattactgtgcgagagatctaatagcagcagctgggacgggagactactggggccagggaaccctggtcaccgtctcctca

SEQ ID NO: 29248 - protein, 120 aa, synthetic construct
  REGION 1..120: note = Description of Artificial Sequence: Synthetic polypeptide
QVHLAESGGGVVQPGRSLRLSCEASGFTLSSDDTHWVRQPPGKGLEWVAVIWFDEYNKYYADSVKGRFTISRDNSKNTLYLQMNSLRAEDAAVYYCARDLIAAAGTGDYWGQGTLVTVSS

SEQ ID NO: 29249 - DNA, 339 bp, synthetic construct
  misc_feature 1..339: note = Description of Artificial Sequence: Synthetic polynucleotide
  source 1..339: mol_type = other DNA
caggtgcagctggtggagtctgggggaggcttggtcaagcctggagggtccctgagactctcctgtgcagcctctggattcacctttagtgactactacatgaactggatccgccaggctccagggaaggggctggagtgggtttcatacattagtagtagtggtattaccaaatactacgcagactctgtgaagggccgattcaccatctccagggacaacgccaagaactcactgtatctgcaaatgaacagcctgagagccgaggacacggccgtgtattactgtgcggccgatacaatctactggggccagggaaccctggtcaccgtctcctca

SEQ ID NO: 29250 - protein, 113 aa, synthetic construct
  REGION 1..113: note = Description of Artificial Sequence: Synthetic polypeptide
QVQLVESGGGLVKPGGSLRLSCAASGFTFSDYYMNWIRQAPGKGLEWVSYISSSGITKYYADSVKGRFTISRDNAKNSLYLQMNSLRAEDTAVYYCAADTIYWGQGTLVTVSS

SEQ ID NO: 29251 - DNA, 369 bp, synthetic construct; identical to SEQ ID NO: 29239
  misc_feature 1..369: note = Description of Artificial Sequence: Synthetic polynucleotide
  source 1..369: mol_type = other DNA

SEQ ID NO: 29252 - protein, 123 aa, synthetic construct; identical to SEQ ID NO: 29240
  REGION 1..123: note = Description of Artificial Sequence: Synthetic polypeptide

SEQ ID NO: 29253 - DNA, 354 bp, synthetic construct; identical to SEQ ID NO: 29217
  misc_feature 1..354: note = Description of Artificial Sequence: Synthetic polynucleotide
  source 1..354: mol_type = other DNA

SEQ ID NO: 29254 - protein, 118 aa, synthetic construct; identical to SEQ ID NO: 29218
  REGION 1..118: note = Description of Artificial Sequence: Synthetic polypeptide

SEQ ID NO: 29255 - DNA, 369 bp, synthetic construct; identical to SEQ ID NO: 29239
  misc_feature 1..369: note = Description of Artificial Sequence: Synthetic polynucleotide
  source 1..369: mol_type = other DNA

SEQ ID NO: 29256 - protein, 123 aa, synthetic construct; identical to SEQ ID NO: 29240
  REGION 1..123: note = Description of Artificial Sequence: Synthetic polypeptide

SEQ ID NO: 29257 - DNA, 354 bp, synthetic construct
  misc_feature 1..354: note = Description of Artificial Sequence: Synthetic polynucleotide
  source 1..354: mol_type = other DNA
gaggtgcagctgttggagtctgggggaggcttggtacagcctggggggtccctgagactctcctgtgcagcctctggattcacctttagcagctatgccatgagctgggtccgccaggctccagggaaggggctggagtgggtctcagctattagtggtcgtggtgttaacacattcgacgcagactccgtgaagggccggttcaccatatccagagacaattccaagaacacgctgtatctgcaaatgaacagcctgagagccgaggacacggccgtatattactgtgcgaaggaaaggagtgggagctattttgactactggggccagggaaccctggtcaccgtctcctca

SEQ ID NO: 29258 - protein, 118 aa, synthetic construct; identical to SEQ ID NO: 29202
  REGION 1..118: note = Description of Artificial Sequence: Synthetic polypeptide

SEQ ID NO: 29259 - DNA, 354 bp, synthetic construct
  misc_feature 1..354: note = Description of Artificial Sequence: Synthetic polynucleotide
  source 1..354: mol_type = other DNA
gaggtgcagctgttggagtctgggggaggcttggtacagcctggggggtccctgagactctcctgtgcagcctctggattcacctttaacagctatgccatgagctgggtccgccaggctccagggaaggggctggagtgggtctcagttattagtggtcgtggtggtaccacatactacgcagactccgtgaagggccggttcaccatctccagagacaattccaagaacacgctgtatctgcaaatgaacagcctgagagccgaggacacggccgtatattactgtgcgaaacgaacgccctctgatgcttttgatatctggggccaagggacaatggtcaccgtctcttca

SEQ ID NO: 29260 - protein, 118 aa, synthetic construct
  REGION 1..118: note = Description of Artificial Sequence: Synthetic polypeptide
EVQLLESGGGLVQPGGSLRLSCAASGFTFNSYAMSWVRQAPGKGLEWVSVISGRGGTTYYADSVKGRFTISRDNSKNTLYLQMNSLRAEDTAVYYCAKRTPSDAFDIWGQGTMVTVSS

SEQ ID NO: 29261 - DNA, 345 bp, synthetic construct; identical to SEQ ID NO: 29205
  misc_feature 1..345: note = Description of Artificial Sequence: Synthetic polynucleotide
  source 1..345: mol_type = other DNA

SEQ ID NO: 29262 - protein, 115 aa, synthetic construct; identical to SEQ ID NO: 29206
  REGION 1..115: note = Description of Artificial Sequence: Synthetic polypeptide

SEQ ID NO: 29263 - DNA, 360 bp, synthetic construct
  misc_feature 1..360: note = Description of Artificial Sequence: Synthetic polynucleotide
  source 1..360: mol_type = other DNA
caggtgcacctggcggagtctgggggaggcgtggtccagcctgggaggtccctgagactctcctgtgaagcgtctggattcaccctcagtagcgatgactcgcactgggtccgccagcctccaggcaaggggctggagtgggtggcagttatatggtttgatgaatatactaaatactatgcagactccgtgaagggccgattcaccatctccagagacaattccaagaacacgctgtatctgcaaatgaacaacctgagagccgaggacgcggctgtgtattactgtgcgagagatctaatagcagcaactgggacgggagactactggggccagggaaccctggtcaccgtctcctca

SEQ ID NO: 29264 - protein, 120 aa, synthetic construct
  REGION 1..120: note = Description of Artificial Sequence: Synthetic polypeptide
QVHLAESGGGVVQPGRSLRLSCEASGFTLSSDDSHWVRQPPGKGLEWVAVIWFDEYTKYYADSVKGRFTISRDNSKNTLYLQMNNLRAEDAAVYYCARDLIAATGTGDYWGQGTLVTVSS

SEQ ID NO: 29265 - DNA, 363 bp, synthetic construct
  misc_feature 1..363: note = Description of Artificial Sequence: Synthetic polynucleotide
  source 1..363: mol_type = other DNA
caggtgcagctggtggagtctgggggaggcgtggtccagcctgggaggtccctgagactctcctgtgcagcgtctggattcaccttcagtagctatggcatgcactgggtccgccaggctccaggcaaggggctggagtgggtggcaattatatggtatgatggaagtaataaatactatgtagactccgtgaagggccgattcaccatctccagagacaattccaagaacacgctgtatctgcaaatgaacagcctgagagccgaggacacggctgtgtattactgtgcgagagatcgatacgatttttggagtggttactttgactactggggccagggaaccctggtcaccgtctcctca

SEQ ID NO: 29266 - protein, 121 aa, synthetic construct
  REGION 1..121: note = Description of Artificial Sequence: Synthetic polypeptide
QVQLVESGGGVVQPGRSLRLSCAASGFTFSSYGMHWVRQAPGKGLEWVAIIWYDGSNKYYVDSVKGRFTISRDNSKNTLYLQMNSLRAEDTAVYYCARDRYDFWSGYFDYWGQGTLVTVSS

SEQ ID NO: 29267 - DNA, 369 bp, synthetic construct; identical to SEQ ID NO: 29225
  misc_feature 1..369: note = Description of Artificial Sequence: Synthetic polynucleotide
  source 1..369: mol_type = other DNA

SEQ ID NO: 29268 - protein, 123 aa, synthetic construct; identical to SEQ ID NO: 29226
  REGION 1..123: note = Description of Artificial Sequence: Synthetic polypeptide

SEQ ID NO: 29269 - DNA, 351 bp, synthetic construct
  misc_feature 1..351: note = Description of Artificial Sequence: Synthetic polynucleotide
  source 1..351: mol_type = other DNA
caggtgcagctggtggagtctgggggaggcgtggtccagcctgggaggtccctgagactctcctgtgcagcgtctggattcaccttcagtgattatggcatgcactgggtccgccaggctccaggcaaggggctggagtgggtggcagttatatggtttgaaggaagtaataaatactatgcagattccgtgaagggccgattcaccatctccagagacaattccaagaacacgctgtatgtgcaaatgaacagcctgagagccgaggacacggctgtgtattactgtgtgagagaactaggattttccaatgactactggggccagggaaccctggtcaccgtctcctca

SEQ ID NO: 29270 - protein, 117 aa, synthetic construct
  REGION 1..117: note = Description of Artificial Sequence: Synthetic polypeptide
QVQLVESGGGVVQPGRSLRLSCAASGFTFSDYGMHWVRQAPGKGLEWVAVIWFEGSNKYYADSVKGRFTISRDNSKNTLYVQMNSLRAEDTAVYYCVRELGFSNDYWGQGTLVTVSS

SEQ ID NO: 29271 - DNA, 369 bp, synthetic construct
  misc_feature 1..369: note = Description of Artificial Sequence: Synthetic polynucleotide
  source 1..369: mol_type = other DNA
caggtgcagctggtggagtctgggggaggcgtagtccagcctgggaggtccctgagactctcctgtgcagcgtctggattcaccttcagtagctatgtcatgcactgggtccgccaggctccaggcaaggggctggagtgggtggcagttatatggtatgatggaagtaataaatactatgcagactccgtgaagggccgattcaccatctccagagacaattccaagaacacgctgtatctgcaaatgaacagcctgagagccgaggacacggctgtgtattactgtgcgagagtcccgtatagcagcagttggtacgactacggtatggacgtctggggccaagggaccacggtcaccgtctcctca

SEQ ID NO: 29272 - protein, 123 aa, synthetic construct; identical to SEQ ID NO: 29230
  REGION 1..123: note = Description of Artificial Sequence: Synthetic polypeptide

SEQ ID NO: 29273 - DNA, 354 bp, synthetic construct; identical to SEQ ID NO: 29207
  misc_feature 1..354: note = Description of Artificial Sequence: Synthetic polynucleotide
  source 1..354: mol_type = other DNA

SEQ ID NO: 29274 - protein, 118 aa, synthetic construct; identical to SEQ ID NO: 29208
  REGION 1..118: note = Description of Artificial Sequence: Synthetic polypeptide

SEQ ID NO: 29275 - DNA, 351 bp, synthetic construct; identical to SEQ ID NO: 29203
  misc_feature 1..351: note = Description of Artificial Sequence: Synthetic polynucleotide
  source 1..351: mol_type = other DNA

SEQ ID NO: 29276 - protein, 117 aa, synthetic construct; identical to SEQ ID NO: 29204
  REGION 1..117: note = Description of Artificial Sequence: Synthetic polypeptide

SEQ ID NO: 29277 - DNA, 351 bp, synthetic construct
  misc_feature 1..351: note = Description of Artificial Sequence: Synthetic polynucleotide
  source 1..351: mol_type = other DNA
caggtgcagctggtggagtctgggggaggcgtggtccagcctgggaggtccctgagactctcctgtgcagcgtctggattcaccttcagtgattatggcatacactgggtccgccaggctccaggcaaggggctggagtgggtggcagttatatggtttgaaggaagtaataaatactatgcagattccgtgaagggccgattcaccatctccagagacaattccaagaacacgctgtatgtgcaaatgaacagcctgagagccgaggacacggctgtgtattactgtgtgagagaactaggattttccaatgactactggggccagggaaccctggtcaccgtctcctca

SEQ ID NO: 29278 - protein, 117 aa, synthetic construct
  REGION 1..117: note = Description of Artificial Sequence: Synthetic polypeptide
QVQLVESGGGVVQPGRSLRLSCAASGFTFSDYGIHWVRQAPGKGLEWVAVIWFEGSNKYYADSVKGRFTISRDNSKNTLYVQMNSLRAEDTAVYYCVRELGFSNDYWGQGTLVTVSS

SEQ ID NO: 29279 - DNA, 363 bp, synthetic construct
  misc_feature 1..363: note = Description of Artificial Sequence: Synthetic polynucleotide
  source 1..363: mol_type = other DNA
caggtgcagctggtggagtctgggggaggcgtggtccagcctgggaggtccctgagactctcctgttcagcgtctggattcaccttcagtagctatggcatgcactgggtccgccaggctccaggcaaggggctggagtgggtggcagttatatggtatgatggaagaaataaatactatgcagactccgtgaagggccgaatcaccatctccagagacaattccaagaacacgctgtatctgcaaatgaacagcctgagagccgaggacacggctgtgtattactgtgcgaggcggtatagcagcagctggatgggaggtatggacgtctggggccaagggaccacggtcaccgtctcctca

SEQ ID NO: 29280 - protein, 121 aa, synthetic construct
  REGION 1..121: note = Description of Artificial Sequence: Synthetic polypeptide
QVQLVESGGGVVQPGRSLRLSCSASGFTFSSYGMHWVRQAPGKGLEWVAVIWYDGRNKYYADSVKGRITISRDNSKNTLYLQMNSLRAEDTAVYYCARRYSSSWMGGMDVWGQGTTVTVSS

SEQ ID NO: 29281 - DNA, 339 bp, synthetic construct
  misc_feature 1..339: note = Description of Artificial Sequence: Synthetic polynucleotide
  source 1..339: mol_type = other DNA
caggtgcagctggtggagtctgggggaggcttggtcaagcctggagggtccctgagactctcctgtgcagcctctggattcaccttcagtgactactacatgaactggatccgccaggctccagggaaggggctggagtgggtttcatacattaatagtaatggttttaccatatactacgcagactctgtgaagggccgattcaccatctccagggacaacgccaagaactcactgtatctgcaaatgaacagcctgagagccgaggacacggccgtgtattactgtgcggccgatacaatctactggggccagggaaccctggtcaccgtctcctca

SEQ ID NO: 29282 - protein, 113 aa, synthetic construct
  REGION 1..113: note = Description of Artificial Sequence: Synthetic polypeptide
QVQLVESGGGLVKPGGSLRLSCAASGFTFSDYYMNWIRQAPGKGLEWVSYINSNGFTIYYADSVKGRFTISRDNAKNSLYLQMNSLRAEDTAVYYCAADTIYWGQGTLVTVSS

SEQ ID NO: 29283 - DNA, 351 bp, synthetic construct
  misc_feature 1..351: note = Description of Artificial Sequence: Synthetic polynucleotide
  source 1..351: mol_type = other DNA
caggtgcagctggtggagtcggggggaggcgtggtccagcctgggaggtccctgagactctcctgtgcagcgtctggattcaccttcagtgactatggcatgcactgggtccgccaagctccaggcaaggggctggagtgggtggcagttatatggtatgatgactataataaaaagtatgcagactccgtgaagggccgattcaccatctccagagacaatgccaagaacacgctgtatctgcaagtgaacagcctgagagtcgaagacacggctgtgtattactgtgcgacagaactggggatgctctttgactactggggccagggaaccctggtcaccgtctcctca

SEQ ID NO: 29284 - protein, 117 aa, synthetic construct
  REGION 1..117: note = Description of Artificial Sequence: Synthetic polypeptide
QVQLVESGGGVVQPGRSLRLSCAASGFTFSDYGMHWVRQAPGKGLEWVAVIWYDDYNKKYADSVKGRFTISRDNAKNTLYLQVNSLRVEDTAVYYCATELGMLFDYWGQGTLVTVSS

SEQ ID NO: 29285 - DNA, 363 bp, synthetic construct
  misc_feature 1..363: note = Description of Artificial Sequence: Synthetic polynucleotide
  source 1..363: mol_type = other DNA
caggtgcagctggtggagtctgggggaggcgtggtccagcctgggaggtccctgagactctcctgtgcagcgtctggattcaccttcagtgactatggcatgcactgggtccgccagactccaggcaaggggctggagtgggtggcagttatatggtatgatggaagtaataaatactatgcagactccgtgaagggccgattcaccatctccagagacaattccaagaacacgctgtttctgcaaatgaacagcctgagagacgaggacacggctgtgtattactgtgcgagacggtatagccgcagctgggtgggaggtatggacgtctggggccaagggaccacggtcaccgtctcctca

SEQ ID NO: 29286 - protein, 121 aa, synthetic construct
  REGION 1..121: note = Description of Artificial Sequence: Synthetic polypeptide
QVQLVESGGGVVQPGRSLRLSCAASGFTFSDYGMHWVRQTPGKGLEWVAVIWYDGSNKYYADSVKGRFTISRDNSKNTLFLQMNSLRDEDTAVYYCARRYSRSWVGGMDVWGQGTTVTVSS

SEQ ID NO: 29287 - DNA, 360 bp, synthetic construct
  misc_feature 1..360: note = Description of Artificial Sequence: Synthetic polynucleotide
  source 1..360: mol_type = other DNA
caggtgcagctggtggagtctgggggaggcgtggtccagcctgggaggtccctgagactctcctgtgcagcgtctggattcaccttcagtgacgatgacacacactgggtccgccaggctccaggcaaggggctggagtgggtggcagttatatggtttgatggaagtaataaatactatgcagactccgtgaagggccgattcaccatctccagagacaattccaagaacacgctgtatctgcaaatgaacagcctgagcgccgaggacacggctgtgtattactgtgcgagagatcttatagcagcagctggtacagttgactactggggccagggaaccctggtcaccgtctcctca

SEQ ID NO: 29288 - protein, 120 aa, synthetic construct
  REGION 1..120: note = Description of Artificial Sequence: Synthetic polypeptide
QVQLVESGGGVVQPGRSLRLSCAASGFTFSDDDTHWVRQAPGKGLEWVAVIWFDGSNKYYADSVKGRFTISRDNSKNTLYLQMNSLSAEDTAVYYCARDLIAAAGTVDYWGQGTLVTVSS

SEQ ID NO: 29289 - DNA, 363 bp, synthetic construct
  misc_feature 1..363: note = Description of Artificial Sequence: Synthetic polynucleotide
  source 1..363: mol_type = other DNA
gaggtgcagctgttggagtctgggggaggcttggtacagcctggggggtccctgagactctcctgtgcagcctctggattcacctttagtaactatgccatgagctgggtccgccaggctccagggaaggggctggagtgggtctcaggtattagtggtagtggtagtcgcacatactacgcagactccgtgaagggccggttcaccatctccagagacaattccaagaacacgctgtatctgcaaatgaacagcctgagagccgaggacacggccgtatattactgtgcgaaagatcgggggcagtggctcataggcggtatggacgtctggggccaagggaccacggtcaccgtctcctca

SEQ ID NO: 29290 - protein, 121 aa, synthetic construct
  REGION 1..121: note = Description of Artificial Sequence: Synthetic polypeptide
EVQLLESGGGLVQPGGSLRLSCAASGFTFSNYAMSWVRQAPGKGLEWVSGISGSGSRTYYADSVKGRFTISRDNSKNTLYLQMNSLRAEDTAVYYCAKDRGQWLIGGMDVWGQGTTVTVSS

SEQ ID NO: 29291 - DNA, 363 bp, synthetic construct
  misc_feature 1..363: note = Description of Artificial Sequence: Synthetic polynucleotide
  source 1..363: mol_type = other DNA
caggtgcagctggtggagtctgggggaggcgtggtccagcctgggaggtccctgagactctcctgtgcagcgtctggattcaccttcagtatctatggcatgcactgggtccgccaggctccaggcaaggggctggagtgggtggcagttatatggtatgatggaagtaataaatactatgcagactccgtgaagggccgattcaccatctccagagacaattccaagaacacgctgtatcttcaaatgaacagcctgagagccgaggacacggctgtgtattactgtgcgagacggtatagcagaagctgggtgggaggtatggacgtctggggccaagggaccacggtcaccgtctcctca

SEQ ID NO: 29292 - protein, 121 aa, synthetic construct
  REGION 1..121: note = Description of Artificial Sequence: Synthetic polypeptide
QVQLVESGGGVVQPGRSLRLSCAASGFTFSIYGMHWVRQAPGKGLEWVAVIWYDGSNKYYADSVKGRFTISRDNSKNTLYLQMNSLRAEDTAVYYCARRYSRSWVGGMDVWGQGTTVTVSS

SEQ ID NO: 29293 - DNA, 357 bp, synthetic construct
  misc_feature 1..357: note = Description of Artificial Sequence: Synthetic polynucleotide
  source 1..357: mol_type = other DNA
gaggtgcagttgttggactctgggggaggcttggtgcagcctggggggtccctgagactctcctgtgcagcctctggattcacctttagcagctatgccatgagttgggtccgccaggctccagggaaggggctggagtgggtctcagctattagtggtcgtggtggtaacacattctacgcagagtccgtgaggggccggttcaccatctccagagacaattccaagaacacgctgtatctgcaaatgaacagcctgagagccgaggacacggccgtatattactgtgcgaagattatccgggagcagtgggcctttgactactggggccagggaaccctggtcaccgtctcctca

SEQ ID NO: 29294 - protein, 119 aa, synthetic construct
  REGION 1..119: note = Description of Artificial Sequence: Synthetic polypeptide
EVQLLDSGGGLVQPGGSLRLSCAASGFTFSSYAMSWVRQAPGKGLEWVSAISGRGGNTFYAESVRGRFTISRDNSKNTLYLQMNSLRAEDTAVYYCAKIIREQWAFDYWGQGTLVTVSS

SEQ ID NO: 29295 - DNA, 339 bp, synthetic construct
  misc_feature 1..339: note = Description of Artificial Sequence: Synthetic polynucleotide
  source 1..339: mol_type = other DNA
caggtgcagctggtggagtctgggggaggcttggtcaagcctggagggtccctgagactctcctgtgcagcctctggattcaccttcagtgactactacatgatctggatccgccaggctccagggaaggggctggagtgggtttcatacattaatagtaatggttttaccaaatactacgcagactctgtgaagggccgattcaccatctccagggacaacgccaagaattcactgtatctgcaaatgaacagtctgagagccgaggacacggccgtgtattactgtgcggccgatacagtctactggggccagggaaccctggtcaccgtctcctca

SEQ ID NO: 29296 - protein, 113 aa, synthetic construct
  REGION 1..113: note = Description of Artificial Sequence: Synthetic polypeptide
QVQLVESGGGLVKPGGSLRLSCAASGFTFSDYYMIWIRQAPGKGLEWVSYINSNGFTKYYADSVKGRFTISRDNAKNSLYLQMNSLRAEDTAVYYCAADTVYWGQGTLVTVSS

SEQ ID NO: 29297 - DNA, 351 bp, synthetic construct
  misc_feature 1..351: note = Description of Artificial Sequence: Synthetic polynucleotide
  source 1..351: mol_type = other DNA
caggtgcagctggtggagtctgggggaggcgtggtccagcctgggaggtccctgagactctcctgtgcagcgtctggattcaccttcagtagctatggcatgcactgggtccgccaggctccaggcaaggggctggagtgggtggcagttgtatggtatgatgaaattaataaaaagtatgcagactccgtgaagggccgagtcaccatctccagagacaattccaagaacacgctgtatctgcaaatgaacagcctgagagccgaggacacggctatgtattactgtgcgagagaattagggtgggaggctgactactggggccagggaaccctggtcaccgtctcctca

SEQ ID NO: 29298 - protein, 117 aa, synthetic construct
  REGION 1..117: note = Description of Artificial Sequence: Synthetic polypeptide
QVQLVESGGGVVQPGRSLRLSCAASGFTFSSYGMHWVRQAPGKGLEWVAVVWYDEINKKYADSVKGRVTISRDNSKNTLYLQMNSLRAEDTAMYYCARELGWEADYWGQGTLVTVSS

SEQ ID NO: 29299 - DNA, 363 bp, synthetic construct
  misc_feature 1..363: note = Description of Artificial Sequence: Synthetic polynucleotide
  source 1..363: mol_type = other DNA
gaggtgcagctgttggagtctgggggaggcttggtacagcctggggggtccctgagactctcctgtgcagcctctagattcacctttagcagttatgccatgagctgggtccgccaggctccagggaaggggctggagtgggtctcagttattagtggtcgtggtggtagcacattctacgcagactccgtgaagggccggttcaccatctccagagacaattccaagaacacgctgtatctgcaaatgaacagcctgagagccgaggacacggccgtatattactgtgcgcgtcgtatagcagtggctgggaatgaggcttttgatatctggggccaagggacaatggtcaccgtctcttca

SEQ ID NO: 29300 - protein, 121 aa, synthetic construct
  REGION 1..121: note = Description of Artificial Sequence: Synthetic polypeptide
EVQLLESGGGLVQPGGSLRLSCAASRFTFSSYAMSWVRQAPGKGLEWVSVISGRGGSTFYADSVKGRFTISRDNSKNTLYLQMNSLRAEDTAVYYCARRIAVAGNEAFDIWGQGTMVTVSS

SEQ ID NO: 29301 - DNA, 369 bp, synthetic construct
  misc_feature 1..369: note = Description of Artificial Sequence: Synthetic polynucleotide
  source 1..369: mol_type = other DNA
caggtgcagctggtggagtctgggggaggcgtggtccagcctgggaggtctctgagactctcctgtgcagcgtctggattcaccttcagtaactatgtcatgcactgggtccgccaggctccaggcaaggggctggagtgggtggcagttatatggtatgatggaagtaataaatactatgcagactccgtgaagggccgattcaccatctccagagacaattccaagaacacgctgtatctgcaaatgaacagcctgagagccgaggacacggctgtgtattactgtgcgagagagaggtatagcagcagctggtacgactacggtctggacgtctggggccaagggaccacggtcaccgtctcctca

SEQ ID NO: 29302 - protein, 123 aa, synthetic construct
  REGION 1..123: note = Description of Artificial Sequence: Synthetic polypeptide
QVQLVESGGGVVQPGRSLRLSCAASGFTFSNYVMHWVRQAPGKGLEWVAVIWYDGSNKYYADSVKGRFTISRDNSKNTLYLQMNSLRAEDTAVYYCARERYSSSWYDYGLDVWGQGTTVTVSS

SEQ ID NO: 29303 - DNA, 363 bp, synthetic construct; identical to SEQ ID NO: 29299
  misc_feature 1..363: note = Description of Artificial Sequence: Synthetic polynucleotide
  source 1..363: mol_type = other DNA

SEQ ID NO: 29304 - protein, 121 aa, synthetic construct; identical to SEQ ID NO: 29300
  REGION 1..121: note = Description of Artificial Sequence: Synthetic polypeptide

SEQ ID NO: 29305 - DNA, 354 bp, synthetic construct
  misc_feature 1..354: note = Description of Artificial Sequence: Synthetic polynucleotide
  source 1..354: mol_type = other DNA
gaggtgcagctgttggagtctgggggaggcttggtacagccgggggggtccctgagactctcctgtgcagcctctggattcacctttagaaactctgccatgaactgggtccgccaggctccagggaaggggctggagtgggtctcagctattagtggtagtggtggtaccacattctacgcagactccgtgaagggccggttcaccatctccagagacaattccaagaacacgttgtatctgcaaataaacagcctgagagccgaggacacggccgtatattactgtgcgaaatgtgggcgggagcagtggcttgactactggggccagggaaccctggtcaccgtctcctca

SEQ ID NO: 29306 - protein, 118 aa, synthetic construct
  REGION 1..118: note = Description of Artificial Sequence: Synthetic polypeptide
EVQLLESGGGLVQPGGSLRLSCAASGFTFRNSAMNWVRQAPGKGLEWVSAISGSGGTTFYADSVKGRFTISRDNSKNTLYLQINSLRAEDTAVYYCAKCGREQWLDYWGQGTLVTVSS

SEQ ID NO: 29307 - DNA, 351 bp, synthetic construct
  misc_feature 1..351: note = Description of Artificial Sequence: Synthetic polynucleotide
  source 1..351: mol_type = other DNA
caggtgcagctggtggagtctgggggaggcgtggtccagcctgggaggtccctgagactctcctgtgcagcgtctggattcaccttcagtagctatggcatgcactgggtccgccaggccccaggcaaggggctggagtgggtggcagttatatggtatgaggaaaataagaaatactatgcagactccgtgaagggccgattcaccatctccagagacaattccaagaacacgctgtttctgcaaatgaatagcctgagagccgaggacacggctatgtatttctgtgcgagagaacttgcctggtacgaggactactggggccagggaaccctggtcaccgtctcctca

SEQ ID NO: 29308 - protein, 117 aa, synthetic construct
  REGION 1..117: note = Description of Artificial Sequence: Synthetic polypeptide
QVQLVESGGGVVQPGRSLRLSCAASGFTFSSYGMHWVRQAPGKGLEWVAVIWYEENKKYYADSVKGRFTISRDNSKNTLFLQMNSLRAEDTAMYFCARELAWYEDYWGQGTLVTVSS

SEQ ID NO: 29309 - DNA, 357 bp, synthetic construct
  misc_feature 1..357: note = Description of Artificial Sequence: Synthetic polynucleotide
  source 1..357: mol_type = other DNA
caggtgcagctggtggagtctgggggaggcttggtcaagcctggagggtccctgagactctcctgtgcagcctctggattcaccttcagtgactacttcatgacctggatccgccaggctccagggcaggggctggagtgggtttcatacattagtagtgctggtggtgccatatactacgcagactctgtgaagggccgattcaccatctccagggacaacgccaaaaactcactgtatctgcaaatgaacagcctgagagccgaggacacggccgtgtattactgtgcaatagcagtggctgcccctggtgtttttgatatctggggccaagggacaatggtcaccgtctcttca

SEQ ID NO: 29310 - protein, 119 aa, synthetic construct
  REGION 1..119: note = Description of Artificial Sequence: Synthetic polypeptide
QVQLVESGGGLVKPGGSLRLSCAASGFTFSDYFMTWIRQAPGQGLEWVSYISSAGGAIYYADSVKGRFTISRDNAKNSLYLQMNSLRAEDTAVYYCAIAVAAPGVFDIWGQGTMVTVSS

SEQ ID NO: 29311 - DNA, 351 bp, synthetic construct
  misc_feature 1..351: note = Description of Artificial Sequence: Synthetic polynucleotide
  source 1..351: mol_type = other DNA
caggtgcagctggtggagtctgggggaggcgtggtccagcctgggaggtccctgagactctcctgtgcagcgtctggattcaccttcagtgactatggcatgcactgggtccgccaggctccaggcaggggcctggagtgggtggcagttatatggtatgatgtaagtaataaatactatgtagactccgtgaagggccgattcaccatctccagagacaattccaagaacacgctgtatctgcaaatgaacagcctgagagccgaggacacggctgtgtattactgtgcgagagaactggggatgagatctgactactggggccagggaaccctggtcaccgtctcctca

SEQ ID NO: 29312 - protein, 117 aa, synthetic construct
  REGION 1..117: note = Description of Artificial Sequence: Synthetic polypeptide
QVQLVESGGGVVQPGRSLRLSCAASGFTFSDYGMHWVRQAPGRGLEWVAVIWYDVSNKYYVDSVKGRFTISRDNSKNTLYLQMNSLRAEDTAVYYCARELGMRSDYWGQGTLVTVSS

SEQ ID NO: 29313 - DNA, 357 bp, synthetic construct
  misc_feature 1..357: note = Description of Artificial Sequence: Synthetic polynucleotide
  source 1..357: mol_type = other DNA
caggtgcagctggtggagtctgggggaggcttggtcaagcctggagggtccctgagactctcctgtgcagcctctggattcaccttcagtgactacttcatgacctggatccgccaggctccagggcaggggctggagtgggtttcatacattagtagtgctggtggtgccatatactacgcagactctgtgaagggccgattcaccatctccagggacaacgccaagaactcactgtttctgcaaatgaacagcctgagagccgaggacacggccgtgtattactgtgctatagcagtggctgcccctggtgcttttgatatctggggccaagggacattggtcaccgtctcttca

SEQ ID NO: 29314 - protein, 119 aa, synthetic construct
  REGION 1..119: note = Description of Artificial Sequence: Synthetic polypeptide
QVQLVESGGGLVKPGGSLRLSCAASGFTFSDYFMTWIRQAPGQGLEWVSYISSAGGAIYYADSVKGRFTISRDNAKNSLFLQMNSLRAEDTAVYYCAIAVAAPGAFDIWGQGTLVTVSS

SEQ ID NO: 29315 - DNA, 357 bp, synthetic construct; identical to SEQ ID NO: 29313
  misc_feature 1..357: note = Description of Artificial Sequence: Synthetic polynucleotide
  source 1..357: mol_type = other DNA

SEQ ID NO: 29316 - protein, 119 aa, synthetic construct; identical to SEQ ID NO: 29314
  REGION 1..119: note = Description of Artificial Sequence: Synthetic polypeptide

SEQ ID NO: 29317 - DNA, 351 bp, synthetic construct
  misc_feature 1..351: note = Description of Artificial Sequence: Synthetic polynucleotide
  source 1..351: mol_type = other DNA
caggtgcagctggtggagtctgggggaggcgtggtccagcctgggaggtccctgagactctcctgtgcagcgtctggattcaccttcagtgactatggcatgcactgggtccgccaggctccaggcaaggggctggagtgggtggcagttatatggtatgatgaagataataaatattatgtagactccgtgaagggccgattcaccatctccagagacaattccaagaacacgctgtatctgcaaatgaacagcctgagagccgaggacacggctgtgtattactgtgcgagagaactggggttcctctctgactactggggccagggaaccctggtcaccgtctcctca

SEQ ID NO: 29318 - protein, 117 aa, synthetic construct
  REGION 1..117: note = Description of Artificial Sequence: Synthetic polypeptide
QVQLVESGGGVVQPGRSLRLSCAASGFTFSDYGMHWVRQAPGKGLEWVAVIWYDEDNKYYVDSVKGRFTISRDNSKNTLYLQMNSLRAEDTAVYYCARELGFLSDYWGQGTLVTVSS

SEQ ID NO: 29319 - DNA, 363 bp, synthetic construct
  misc_feature 1..363: note = Description of Artificial Sequence: Synthetic polynucleotide
  source 1..363: mol_type = other DNA
caggtgcagctggtggagtctgggggaggcgtggtccagcctgggaggtccctgagactctcctgtacagcgtctggattcaccttcagtagctatggcatgcactgggtccgccaggctccaggcaaggggctggagtgggtggcagttatatggtatgatggaagtaataaatactatgcagactccgtgaagggccgattcaccatctccagagacaattccaagaacacgctgtatctgcaaatgaacagcctgagagccgaggacacggctgtgtattactgtgcgagaaggtatagcagcagctggtcgggcggtatggacgtctggggccaagggaccacggtcaccgtctcctca

SEQ ID NO: 29320 - protein, 121 aa, synthetic construct
  REGION 1..121: note = Description of Artificial Sequence: Synthetic polypeptide
QVQLVESGGGVVQPGRSLRLSCTASGFTFSSYGMHWVRQAPGKGLEWVAVIWYDGSNKYYADSVKGRFTISRDNSKNTLYLQMNSLRAEDTAVYYCARRYSSSWSGGMDVWGQGTTVTVSS

SEQ ID NO: 29321 - DNA, 363 bp, synthetic construct
  misc_feature 1..363: note = Description of Artificial Sequence: Synthetic polynucleotide
  source 1..363: mol_type = other DNA
gaggtgcaactgttggagtctgggggaggcttggtacagcctggggggtccctgagactctcctgtgcagcctctggattcacctttagcagctatgccatgagctgggtccgccaggctccagggaaggggctggactgggtctcagttattagtggtagtggtggtagcacattctacgcagactccgtgaagggccggttcaccatctccagagacaattccaagagcacgctgtatctgcaaatgaacagcctgagagccgaggacacggccgtatattattgtgcgagcgctatagcagcggctggtgcccactattttgactactggggccagggaaccctggtcaccgtctcctca

SEQ ID NO: 29322 - protein, 121 aa, synthetic construct
  REGION 1..121: note = Description of Artificial Sequence: Synthetic polypeptide
EVQLLESGGGLVQPGGSLRLSCAASGFTFSSYAMSWVRQAPGKGLDWVSVISGSGGSTFYADSVKGRFTISRDNSKSTLYLQMNSLRAEDTAVYYCASAIAAAGAHYFDYWGQGTLVTVSS

SEQ ID NO: 29323 - DNA, 363 bp, synthetic construct
  misc_feature 1..363: note = Description of Artificial Sequence: Synthetic polynucleotide
  source 1..363: mol_type = other DNA
caggtgcagctggtggagtctgggggaggcgtggtccagcctgggaggtccctgagactctcctgtgcagcgtctggattcaccttcagtagttatggcatgcactgggtccgccaggctccaggcaaggggctggagtgggtggcagttatatggtatgatggaagtaataaatactatgcagactccgtgaagggccgattcaccatctccagagacaattccaagaacacgctgtatctgcaaatgaacagcctgagagccgaggacacggctgtgtattactgtgcgagaaggtatagcagcagctggtcgggcggaatggacgtctggggccaagggaccacggtcaccgtctcctca

SEQ ID NO: 29324 - protein, 121 aa, synthetic construct; identical to SEQ ID NO: 28488
  REGION 1..121: note = Description of Artificial Sequence: Synthetic polypeptide

SEQ ID NO: 29325 - DNA, 363 bp, synthetic construct
  misc_feature 1..363: note = Description of Artificial Sequence: Synthetic polynucleotide
  source 1..363: mol_type = other DNA
gaggtgcagctgttggagtctgggggaggcttggtacagcctggggggtccctgagactctcctgtgcagcctctggattcacctttagcagctatgccatgacctgggtccgccagactccagggaaggggctggagtgggtctcagctattagtggtagtggtggtaactcattctacgcagactccgtgaagggccggttcaccatctccagagacaattccgagaacacgttgtatctgcaaatgaacagcctgagagccgaggacacggccgtatattactgtgcgaaagcaagggcagtggctgggtcacactggttcgacccctggggccagggaaccctggtcaccgtctcctca

SEQ ID NO: 29326 - protein, 121 aa, synthetic construct
  REGION 1..121: note = Description of Artificial Sequence: Synthetic polypeptide
EVQLLESGGGLVQPGGSLRLSCAASGFTFSSYAMTWVRQTPGKGLEWVSAISGSGGNSFYADSVKGRFTISRDNSENTLYLQMNSLRAEDTAVYYCAKARAVAGSHWFDPWGQGTLVTVSS

SEQ ID NO: 29327 - DNA, 351 bp, synthetic construct
  misc_feature 1..351: note = Description of Artificial Sequence: Synthetic polynucleotide
  source 1..351: mol_type = other DNA
caggtgcagttggtggagtctgggggaggcgtggtccagcctgggaggtccctgagactctcctgtgcagcgtctggattcaccttcagtaactatggcatgcactgggtccgccaggctccaggcaaggggctggagtgggtggcagttatatggtttgatgtaagtaataaaaagtatgtagactccgtgaagggccgattcaccatctccagagacaattccaagaacacgctgtatctgcaaatgagcagcctgagagccgaggacacggctgtgtattattgtgcgagagatctggggatgatcgaggactactggggccagggaaccctggtcaccgtctcctca

SEQ ID NO: 29328 - protein, 117 aa, synthetic construct
  REGION 1..117: note = Description of Artificial Sequence: Synthetic polypeptide
QVQLVESGGGVVQPGRSLRLSCAASGFTFSNYGMHWVRQAPGKGLEWVAVIWFDVSNKKYVDSVKGRFTISRDNSKNTLYLQMSSLRAEDTAVYYCARDLGMIEDYWGQGTLVTVSS

SEQ ID NO: 29329 - DNA, 363 bp, synthetic construct; identical to SEQ ID NO: 28145
  misc_feature 1..363: note = Description of Artificial Sequence: Synthetic polynucleotide
  source 1..363: mol_type = other DNA

SEQ ID NO: 29330 - protein, 121 aa, synthetic construct; identical to SEQ ID NO: 28146
  REGION 1..121: note = Description of Artificial Sequence: Synthetic polypeptide

SEQ ID NO: 29331 - DNA, 363 bp, synthetic construct
  misc_feature 1..363: note = Description of Artificial Sequence: Synthetic polynucleotide
  source 1..363: mol_type = other DNA
caggtgcagctggtggagtctgggggaggcgtggtccagcctgggaggtccctgagactctcctgtgcagcgtctggattcaccttcagtagttatggcatgcactgggtccgccaggctccaggcaaggggctggagtgggtggcacttatatggtatgatggaaggaataaatactatgcagactccgtgaagggccgattcaccatctccagagacaatcccaagaacacgctgtatctgcaaatgaacagcctgagagccgaggacacggctgtgtatcactgtgcgagaaggtatagcagcagctggtcgggcggtatggacgtctggggccaagggaccacggtcaccgtctcctca

SEQ ID NO: 29332 - protein, 121 aa, synthetic construct
  REGION 1..121: note = Description of Artificial Sequence: Synthetic polypeptide
QVQLVESGGGVVQPGRSLRLSCAASGFTFSSYGMHWVRQAPGKGLEWVALIWYDGRNKYYADSVKGRFTISRDNPKNTLYLQMNSLRAEDTAVYHCARRYSSSWSGGMDVWGQGTTVTVSS

SEQ ID NO: 29333 - DNA, 351 bp, synthetic construct
  misc_feature 1..351: note = Description of Artificial Sequence: Synthetic polynucleotide
  source 1..351: mol_type = other DNA
caggtgcagctggtgcagtctggggctgaggtgaagaagcctggggcctcagtgaaggtctcctgcaaggcttctggatacaccttcaccggctaccatatgcactgggtgcgacaggcccctggacaagggcttgagtggatgggatggatcaaccctaataacaatgccacaaactatgctcagaactttcagggcagggtcaccctgaccagggacacgtccatcagcacagcctacatggagctgagcaggctgagatctgacgacacggccgtgtattactgtgcgagagacggtaccagcagctttgacttctggggccagggaaccctggtcaccgtctcctca

SEQ ID NO: 29334 - protein, 117 aa, synthetic construct
  REGION 1..117: note = Description of Artificial Sequence: Synthetic polypeptide
QVQLVQSGAEVKKPGASVKVSCKASGYTFTGYHMHWVRQAPGQGLEWMGWINPNNNATNYAQNFQGRVTLTRDTSISTAYMELSRLRSDDTAVYYCARDGTSSFDFWGQGTLVTVSS

SEQ ID NO: 29335 - DNA, 363 bp, synthetic construct
  misc_feature 1..363: note = Description of Artificial Sequence: Synthetic polynucleotide
  source 1..363: mol_type = other DNA
gaggtgcagctgttggagtctgggggaggcttggtacagcctggggggtccctgagactctcctgtacagcctctggattcacctttagcagctatgccatgagctgggtccgccaggctccagggaaggggctggagtgggtctcagttattagtggtagtggtggtaccacattctacgcagactccgtgaagggccggctcaccatctccagagacaattccaagaacacactgtatctgcaaatgaacagcctgagagccgaggacacggccgtatattactgtgcgcgtcgtatagcagtggctgggaatgatgcttttgatatctggggccaagggacaatggtcaccgtctcttca

SEQ ID NO: 29336 - protein, 121 aa, synthetic construct
  REGION 1..121: note = Description of Artificial Sequence: Synthetic polypeptide
EVQLLESGGGLVQPGGSLRLSCTASGFTFSSYAMSWVRQAPGKGLEWVSVISGSGGTTFYADSVKGRLTISRDNSKNTLYLQMNSLRAEDTAVYYCARRIAVAGNDAFDIWGQGTMVTVSS

SEQ ID NO: 29337 - DNA, 339 bp, synthetic construct
  misc_feature 1..339: note = Description of Artificial Sequence: Synthetic polynucleotide
  source 1..339: mol_type = other DNA
caggtgcagctggtggagtctgggggaggcttggtcaagcctggagggtccctgagactctcctgtgcagcctctggattcaccttcagtgactactacatgaactggatccgccaggctccagggaaggggctggagtgggtttcatacattaatagtaatggttttaccatatactacgcagactctgtgaagggccgattcaccatctccagggacaacgccaagaactcactgtatctgcaaatgaacagcctgagagccgaggacacggccgtgtattactgtgcggccgatacaatctactggggccagggaacccgggtcaccgtctcctca

SEQ ID NO: 29338 - protein, 113 aa, synthetic construct
  REGION 1..113: note = Description of Artificial Sequence: Synthetic polypeptide
QVQLVESGGGLVKPGGSLRLSCAASGFTFSDYYMNWIRQAPGKGLEWVSYINSNGFTIYYADSVKGRFTISRDNAKNSLYLQMNSLRAEDTAVYYCAADTIYWGQGTRVTVSS

SEQ ID NO: 29339 - DNA, 363 bp, synthetic construct
  misc_feature 1..363: note = Description of Artificial Sequence: Synthetic polynucleotide
  source 1..363: mol_type = other DNA
gaggtgcagctgttggagtctgggggaggcttggtacagcctggggggtccctgagactctcctgtgcagcctctagattcacctttagcagttatgccatgagctgggtccgccaggctccagggaaggggctggagtgggtctcagttattagtggtcgtggtggtaccacattctacgcagactccgtgaagggccggttcaccatctccagagacaattccaagaacacgctgtatctgcaaatgaacagcctgagagccgaggacacggccgtatattactgtgcgcgtcgtatagcagtggctgggaatgaggcttttgatatctggggccaagggacaatggtcaccgtctcttca

SEQ ID NO: 29340 - protein, 121 aa, synthetic construct
  REGION 1..121: note = Description of Artificial Sequence: Synthetic polypeptide
EVQLLESGGGLVQPGGSLRLSCAASRFTFSSYAMSWVRQAPGKGLEWVSVISGRGGTTFYADSVKGRFTISRDNSKNTLYLQMNSLRAEDTAVYYCARRIAVAGNEAFDIWGQGTMVTVSS

SEQ ID NO: 29341 - DNA, 345 bp, synthetic construct
  misc_feature 1..345: note = Description of Artificial Sequence: Synthetic polynucleotide
  source 1..345: mol_type = other DNA
gaggtgcagctggtggagtctgggggaggcctggtcaagcctggggggtccctgagactctcctgtgcagcctctggattcaccttcagtagctatagcatgaactgggtccgccaggctcctgggaaggggctggagtgggtctcatccattagtggtagtagtagttacatatactacgcagactcagtgaagggccgattcaccatctccagagacaacgccaagaactcactgtatctgcaaatgaacagcctgagagccgaggacacggctgtgtattactgtgcgagagtagcaacttttgactactggggccagggaaccctggtcaccgtctcctca

SEQ ID NO: 29342 - protein, 115 aa, synthetic construct
  REGION 1..115: note = Description of Artificial Sequence: Synthetic polypeptide
EVQLVESGGGLVKPGGSLRLSCAASGFTFSSYSMNWVRQAPGKGLEWVSSISGSSSYIYYADSVKGRFTISRDNAKNSLYLQMNSLRAEDTAVYYCARVATFDYWGQGTLVTVSS

SEQ ID NO: 29343 - DNA, 363 bp, synthetic construct
  misc_feature 1..363: note = Description of Artificial Sequence: Synthetic polynucleotide
  source 1..363: mol_type = other DNA
gaggggcagttgttggagtctgggggaggcttggtacagcctggggggtccctgagactctcctgtgcagcctctagattcacctttagcagttatgccatgagctgggtccgccaggctccagggaaggggctggagtgggtctcagttattagtggtcgtggtggtagcacattctacgcagactccgtgaagggccggttcaccatctccagagacaattccaagaacacgctgtatctgcaaatgaacagcctgagagccgaggacacggccgtatattactgtgcgcgtcgtatagcagtggctgggaatgaggcttttgatatctggggccaagggacaatggtcaccgtctcttca

SEQ ID NO: 29344 - protein, 121 aa, synthetic construct
  REGION 1..121: note = Description of Artificial Sequence: Synthetic polypeptide
EGQLLESGGGLVQPGGSLRLSCAASRFTFSSYAMSWVRQAPGKGLEWVSVISGRGGSTFYADSVKGRFTISRDNSKNTLYLQMNSLRAEDTAVYYCARRIAVAGNEAFDIWGQGTMVTVSS

SEQ ID NO: 29345 - DNA, 375 bp, synthetic construct
  misc_feature 1..375: note = Description of Artificial Sequence: Synthetic polynucleotide
  source 1..375: mol_type = other DNA
caggtgcaactggtgcagtctggggctgaggtgaagaagcctggggcctcagtgaaggtctcctgcaaggcttctggatacaccttcaccggccactatataaactgggtgcgacaggcccctggacaagggcctgagtggatggcatgggtcaaccctaacagtggtggcacaaactctgcacagaagtttcagggcagggtcaccatgaccagggacacgtccatcagcacagtctacatggagctgagcaggctgagatctgacgacacggccgtgtattactgtgcgaggggagggcagctcggcgggtttaactactactactacggtatggacgtctggggccaagggaccacggtcaccgtctcctca

SEQ ID NO: 29346 - protein, 125 aa, synthetic construct
  REGION 1..125: note = Description of Artificial Sequence: Synthetic polypeptide
QVQLVQSGAEVKKPGASVKVSCKASGYTFTGHYINWVRQAPGQGPEWMAWVNPNSGGTNSAQKFQGRVTMTRDTSISTVYMELSRLRSDDTAVYYCARGGQLGGFNYYYYGMDVWGQGTTVTVSS

SEQ ID NO: 29347 - DNA, 378 bp, synthetic construct
  misc_feature 1..378: note = Description of Artificial Sequence: Synthetic polynucleotide
  source 1..378: mol_type = other DNA
gaggtgcagctggtggagtctgggggaggcctggtcaagcctggggggtccctgagactctcctgtgcagcctctggattcaccttcagtagccatagcatgaactgggtccgccaggctccagggaaggggctggagtgggtctcatccatcagtagtagtagtaattacatatactacgcagactcagtgaagggccgattcaccatctccagagactacgccaagaactcactttatctgcaaatgaacagcctgagagccgaggacacggctgtgtattactgtgcgagagatcggagcatagtagtggctggtccctgggactactacggtatggacgtctggggccaagggaccacggtcaccgtctcctca

SEQ ID NO: 29348 - protein, 126 aa, synthetic construct
  REGION 1..126: note = Description of Artificial Sequence: Synthetic polypeptide
EVQLVESGGGLVKPGGSLRLSCAASGFTFSSHSMNWVRQAPGKGLEWVSSISSSSNYIYYADSVKGRFTISRDYAKNSLYLQMNSLRAEDTAVYYCARDRSIVVAGPWDYYGMDVWGQGTTVTVSS

SEQ ID NO: 29349 - DNA, 363 bp, synthetic construct
  misc_feature 1..363: note = Description of Artificial Sequence: Synthetic polynucleotide
  source 1..363: mol_type = other DNA
caggtgcagctggtggagtctgggggaggcgtggtccagcctgggaggtccctgagactctcctgtgcagcgtctggattcaccttcagtagctatggcatgcactgggtccgccaggctccaggcaaggggctggagtgggtggcagttatatggtatgatggaagtagtaaatactatgcagactccgtgaagggccgattcaccatctccagagacaattccaagaacacgctgtatctgcaaatgaacagcctgagagccgaggacacggctgtgtattactgtgcgagaaggtatagcagcagttggtcgggcggtatggacgtctggggccaagggaccacggtcaccgtctcctca

SEQ ID NO: 29350 - protein, 121 aa, synthetic construct
  REGION 1..121: note = Description of Artificial Sequence: Synthetic polypeptide
QVQLVESGGGVVQPGRSLRLSCAASGFTFSSYGMHWVRQAPGKGLEWVAVIWYDGSSKYYADSVKGRFTISRDNSKNTLYLQMNSLRAEDTAVYYCARRYSSSWSGGMDVWGQGTTVTVSS

SEQ ID NO: 29351 - DNA, 360 bp, synthetic construct
  misc_feature 1..360: note = Description of Artificial Sequence: Synthetic polynucleotide
  source 1..360: mol_type = other DNA
gaggtgcagctgttggagtctgggggaggcttggtacagcctggggggtccctgagtctctcctgtgcagcctctggattcacctttagaagctatgtcatgagctgggtccgccaggctccagggaaggggctggagtgggtctcagctattagtggtcgtggtagtaacacattctacacagactccgtgaagggccggttcaccatctccagagacaattccaagaacacgctgtatctgcaaatgaacagcctgagagccgaggacacggccgtatattactgtgcgaaagggataactggatcacacggtgcttttgatatctggggccaagggacaatggtcaccgtctcttca

SEQ ID NO: 29352 - protein, 120 aa, synthetic construct
  REGION 1..120: note = Description of Artificial Sequence: Synthetic polypeptide
EVQLLESGGGLVQPGGSLSLSCAASGFTFRSYVMSWVRQAPGKGLEWVSAISGRGSNTFYTDSVKGRFTISRDNSKNTLYLQMNSLRAEDTAVYYCAKGITGSHGAFDIWGQGTMVTVSS

SEQ ID NO: 29353 - DNA, 351 bp, synthetic construct
  misc_feature 1..351: note = Description of Artificial Sequence: Synthetic polynucleotide
  source 1..351: mol_type = other DNA
caggtgcagctggtggagtctgggggaggcgtggtccagcctgggaggtccctgcgactctcctgtgcagcgtctggattcaccttcagtagctatggcatgcactgggtccgccaggctccaggcaaggggctggagtgggtggcagttatatggtatgatgaaagtaataaatactatgcagactccgtgaagggccgattcaccatctccagagacaattccaagaacacgctgtatctgcaaatgaacagcctgagagccgaggacacggctgtgtattactgtgcgagggaactgggatttctctctgactactggggccagggaaccctggtcaccgtctcctca

SEQ ID NO: 29354 - protein, 117 aa, synthetic construct; identical to SEQ ID NO: 29004
  REGION 1..117: note = Description of Artificial Sequence: Synthetic polypeptide

SEQ ID NO: 29355 - DNA, 345 bp, synthetic construct
  misc_feature 1..345: note = Description of Artificial Sequence: Synthetic polynucleotide
  source 1..345: mol_type = other DNA
gaggtgcagttgttggagtctgggggaggcttggtacagcctggggggtccctgagactctcctgtgcagcctctggattcacctttagcagctatgtcatgagctgggtccgccagactccagggaaggggctggagtgggtctcaactatgagtggtagtggtggtcgcacatactacgcagactccgtgaacggccgattcaccgtctccagagacaattccaagaacacgctgtatttgcaaatgagcagcctgagagccgaggacacggccgtatattactgtgcgcgggtgactgcttttgactactggggccagggaaccctggtcaccgtctcctca

SEQ ID NO: 29356 - protein, 115 aa, synthetic construct
  REGION 1..115: note = Description of Artificial Sequence: Synthetic polypeptide
EVQLLESGGGLVQPGGSLRLSCAASGFTFSSYVMSWVRQTPGKGLEWVSTMSGSGGRTYYADSVNGRFTVSRDNSKNTLYLQMSSLRAEDTAVYYCARVTAFDYWGQGTLVTVSS

SEQ ID NO: 29357 - DNA, 363 bp, synthetic construct
  misc_feature 1..363: note = Description of Artificial Sequence: Synthetic polynucleotide
  source 1..363: mol_type = other DNA
gaggtgcagctgttggagtctgggggaggcttggtgcagcctggggggtccctgagactctcctgtgcagcctctggattcaccattagcaactatgccatgacctgggtccgccagactccagggaaggggctggagtgggtctcagttattagtgctagtggtggtaactcattctacgcagactccgtgaagggccggttcaccatctccagagacaattccgagaacacgttctatctgcaaatgaacagcctgagagccgaggacacggccgtatattactgtgcgaaagcaagggcagtggctgggtcacactggttcgacccctggggccagggaaccctggtcaccgtctcctca

SEQ ID NO: 29358 - protein, 121 aa, synthetic construct
  REGION 1..121: note = Description of Artificial Sequence: Synthetic polypeptide
EVQLLESGGGLVQPGGSLRLSCAASGFTISNYAMTWVRQTPGKGLEWVSVISASGGNSFYADSVKGRFTISRDNSENTFYLQMNSLRAEDTAVYYCAKARAVAGSHWFDPWGQGTLVTVSS

SEQ ID NO: 29359 - DNA, 342 bp, synthetic construct
  misc_feature 1..342: note = Description of Artificial Sequence: Synthetic polynucleotide
  source 1..342: mol_type = other DNA
gaggtgcagctggtggagtctgggggaggcctggtcaagcctggggggtccctgagactctcctgtgcagcctctggattcaccttcagtagctatagcatgaactgggtccgccaggctccagggaaggggctggagtgggtctcatccattagtagtagtagtagttacatatactacgcagactcagtgaagggccgattcaccatctccagagacaacgccaagaactcactgtatctgcaaatgaacagcctgagagccgaggacacggctgtgtattactgtgcgagagctcgccttgactactggggccagggaaccctggtcaccgtctcctca

SEQ ID NO: 29360 - protein, 114 aa, synthetic construct
  REGION 1..114: note = Description of Artificial Sequence: Synthetic polypeptide
EVQLVESGGGLVKPGGSLRLSCAASGFTFSSYSMNWVRQAPGKGLEWVSSISSSSSYIYYADSVKGRFTISRDNAKNSLYLQMNSLRAEDTAVYYCARARLDYWGQGTLVTVSS

SEQ ID NO: 29361 - DNA, 351 bp, synthetic construct
  misc_feature 1..351: note = Description of Artificial Sequence: Synthetic polynucleotide
  source 1..351: mol_type = other DNA
caggtgcagctggtgcagtctggggctgaggtgaagaagcctggggcctcagtgaaggtctcctgcaaggcttctggatacaccttcaccggctaccatatgcactgggtgcgacaggcccctggacaagggcttgagtggatgggatggatcaaccctaataataatgccacaaactatgctcagagctttcagggcagggtcaccctgaccagggacacgtccatcagcacagcctacatggagctgagcaggctgagatctgacgacacggccgtgtattactgtgcgagagacggtaccagcagctttgacttctggggccagggaaccctggtcaccgtctcctca

SEQ ID NO: 29362 - protein, 117 aa, synthetic construct
  REGION 1..117: note = Description of Artificial Sequence: Synthetic polypeptide
QVQLVQSGAEVKKPGASVKVSCKASGYTFTGYHMHWVRQAPGQGLEWMGWINPNNNATNYAQSFQGRVTLTRDTSISTAYMELSRLRSDDTAVYYCARDGTSSFDFWGQGTLVTVSS

SEQ ID NO: 29363 - DNA, 375 bp, synthetic construct
  misc_feature 1..375: note = Description of Artificial Sequence: Synthetic polynucleotide
  source 1..375: mol_type = other DNA
caggtgcagctggtgcagtctggggctgaggtgaagaagcctggggcctcagtgaaggtctcctgcaaggcttctggatacaccttcaccggccactatatgaactgggtgcgacaggcccctggacaaggacttgagtggatgggatgggtcaaccctaacagtggtggctcaaactctgcacagcagtttcagggcagggtcaccatgaccagggacacgtccatcagcacagtctacatggagctgagcaggctgagttctgacgacacggccgtgtattactgtgcgaggggagggcagctcggcggctttaacttctactactacggtatggacgtctggggccaagggaccacggtcaccgtctcctca

SEQ ID NO: 29364 - protein, 125 aa, synthetic construct
  REGION 1..125: note = Description of Artificial Sequence: Synthetic polypeptide
QVQLVQSGAEVKKPGASVKVSCKASGYTFTGHYMNWVRQAPGQGLEWMGWVNPNSGGSNSAQQFQGRVTMTRDTSISTVYMELSRLSSDDTAVYYCARGGQLGGFNFYYYGMDVWGQGTTVTVSS

SEQ ID NO: 29365 - DNA, 351 bp, synthetic construct
  misc_feature 1..351: note = Description of Artificial Sequence: Synthetic polynucleotide
  source 1..351: mol_type = other DNA
caggtgcagctggtgcagtctggggctgaggtgaagaagcctggggcctcagtgaaggtctcctgcaaggcttctagatacaccttcaccggctaccatatacactgggtgcgacaggcccctggacaagggcttgagtggatgggatggatcaaccctaacactaatggcacacagtatgcacagaagtttcagggccgggtcaccatgaccagggacacgtccatcagcacagcctacatggagctgagcaggctgagatctgacgacacggccgtgtattactgtgcgagagatggcacctcgtcctttgactactggggccagggaaccctggtcaccgtctcctca

SEQ ID NO: 29366 - protein, 117 aa, synthetic construct
  REGION 1..117: note = Description of Artificial Sequence: Synthetic polypeptide
QVQLVQSGAEVKKPGASVKVSCKASRYTFTGYHIHWVRQAPGQGLEWMGWINPNTNGTQYAQKFQGRVTMTRDTSISTAYMELSRLRSDDTAVYYCARDGTSSFDYWGQGTLVTVSS

SEQ ID NO: 29367 - DNA, 351 bp, synthetic construct
  misc_feature 1..351: note = Description of Artificial Sequence: Synthetic polynucleotide
  source 1..351: mol_type = other DNA
caggtgcagctggtggagtctgggggaggcgtggtccagccggggaggtccctgagactctcctgtgcagcgtctggattcaccttcagtgactatggcatgcactgggtccgccaggctccaggcaaggggctggagtgggtggcagttatatggtttgatggaaataataaatactatgcagactccgtgaagggccgattcaccatctccagagacaattccaagaacacgctgtatctgcaaatgaacagcctgagcgccgaggacacggctgtgtattactgtgcgagggagctgggatttctctctgactactggggccagggaaccctggtcaccgtctcctca

SEQ ID NO: 29368 - protein, 117 aa, synthetic construct
  REGION 1..117: note = Description of Artificial Sequence: Synthetic polypeptide
QVQLVESGGGVVQPGRSLRLSCAASGFTFSDYGMHWVRQAPGKGLEWVAVIWFDGNNKYYADSVKGRFTISRDNSKNTLYLQMNSLSAEDTAVYYCARELGFLSDYWGQGTLVTVSS

SEQ ID NO: 29369 - DNA, 363 bp, synthetic construct; identical to SEQ ID NO: 29335
  misc_feature 1..363: note = Description of Artificial Sequence: Synthetic polynucleotide
  source 1..363: mol_type = other DNA

SEQ ID NO: 29370 - protein, 121 aa, synthetic construct; identical to SEQ ID NO: 29336
  REGION 1..121: note = Description of Artificial Sequence: Synthetic polypeptide

SEQ ID NO: 29371 - DNA, 351 bp, synthetic construct
  misc_feature 1..351: note = Description of Artificial Sequence: Synthetic polynucleotide
  source 1..351: mol_type = other DNA
caggtgcagctggtggagtctgggggaggcgtggtccagccggggaggtccctgagactctcctgtgcagcgtctggattcaccttcagtgactatggcatgcactgggtccgccaggctccaggcaaggggctggagtgggtggcagttatatggtttggtggaaataataaatactatggagactccgtgaagggccgattcaccatctccagagacaattccaagaacacgctgtatctgcaaatgaacagcctgagcgccgaggacacggctgtgtattactgtgcgagggagctgggatttctctctgactactggggccagggaaccctggtcaccgtctcctca

SEQ ID NO: 29372 - protein, 117 aa, synthetic construct
  REGION 1..117: note = Description of Artificial Sequence: Synthetic polypeptide
QVQLVESGGGVVQPGRSLRLSCAASGFTFSDYGMHWVRQAPGKGLEWVAVIWFGGNNKYYGDSVKGRFTISRDNSKNTLYLQMNSLSAEDTAVYYCARELGFLSDYWGQGTLVTVSS

SEQ ID NO: 29373 - DNA, 351 bp, synthetic construct
  misc_feature 1..351: note = Description of Artificial Sequence: Synthetic polynucleotide
  source 1..351: mol_type = other DNA
caggtgcagctggtggagtctgggggaggcgtggtccagcctgggaggtccctgagactctcctgtgcagcgtctggattcaccttcagtaactttggcatgcactgggtccgccaggctccaggcaaggggctggagtgggtggcagttatatggtatgaggaaagtaataaatactatgcagactccgtgaagggccgattcaccatctccagagacaattccaagaacacgctgtatctgcaaatgaacagcctgagagccgaggacacggctgtgtattactgtgcgagagaactggggttcctctctgacttctggggccagggaaccctggtcaccgtctcctca

SEQ ID NO: 29374 - protein, 117 aa, synthetic construct
  REGION 1..117: note = Description of Artificial Sequence: Synthetic polypeptide
QVQLVESGGGVVQPGRSLRLSCAASGFTFSNFGMHWVRQAPGKGLEWVAVIWYEESNKYYADSVKGRFTISRDNSKNTLYLQMNSLRAEDTAVYYCARELGFLSDFWGQGTLVTVSS

SEQ ID NO: 29375 - DNA, 351 bp, synthetic construct
  misc_feature 1..351: note = Description of Artificial Sequence: Synthetic polynucleotide
  source 1..351: mol_type = other DNA
caggtgcagttggtgcagtctggggctgaggtgaagaagcctggggcctcagtgaaggtctcctgcaaggcttctggatacaccttcaccggctatcatatgcagtgggtgcgacaggcccctggacaagggcttgagtggatgggatggatcaaccctaacagtggtgccacaaactatgcacagaactttcagggcagggtcaccatgacccgggacacgtccatcagcacagcctacctggacctgagcaggctgagatctgacgacacggccgtgtattactgtgcgagagatggcacctcgtcctttgactactggggccagggaaccctggtcaccgtctcctca

SEQ ID NO: 29376 - protein, 117 aa, synthetic construct
  REGION 1..117: note = Description of Artificial Sequence: Synthetic polypeptide
QVQLVQSGAEVKKPGASVKVSCKASGYTFTGYHMQWVRQAPGQGLEWMGWINPNSGATNYAQNFQGRVTMTRDTSISTAYLDLSRLRSDDTAVYYCARDGTSSFDYWGQGTLVTVSS

SEQ ID NO: 29377 - DNA, 351 bp, synthetic construct
  misc_feature 1..351: note = Description of Artificial Sequence: Synthetic polynucleotide
  source 1..351: mol_type = other DNA
caggtgcagctggtggagtctgggggaggcgtggtccagcctgggaggtccctgagactctcctgtgcagcgtctggattcaccttcagtaactatggcatgcactgggtccgccaggctccaggcaaggggctggagtgggtggcagttacatggtttgatggaagtaatcaacgctatgcagactccgtgaagggccgattcaccatctccagagacatttccaagaacacgctgtatctgcaaatgaacagcctgagtgccgaggacacggctgtgtattactgtgcgagagatctggggatgatcgaggacttctggggccagggaaccctggtcaccgtctcctca

SEQ ID NO: 29378 - protein, 117 aa, synthetic construct
  REGION 1..117: note = Description of Artificial Sequence: Synthetic polypeptide
QVQLVESGGGVVQPGRSLRLSCAASGFTFSNYGMHWVRQAPGKGLEWVAVTWFDGSNQRYADSVKGRFTISRDISKNTLYLQMNSLSAEDTAVYYCARDLGMIEDFWGQGTLVTVSS

SEQ ID NO: 29379 - DNA, 354 bp, synthetic construct
  misc_feature 1..354: note = Description of Artificial Sequence: Synthetic polynucleotide
  source 1..354: mol_type = other DNA
gaggtgcagctgttggagtctgggggaggcttggtacagccgggggggtccctgagactctcctgtgcagcctctggattcacctttagcagaaatgccatgagctgggtccgccaggctccagggatggggctggagtgggtctcagctattagtggtcgtggtggtaatacattctacgcagactccgtgaagggccggttcaccgtctccagagacaattccaagaacacgctgtttctgcaaatgaacagcctgagagccgaggacacggccgtatattactgtgcgaaaaatgggcgagagcagtggcttgactactggggccagggaaccctggtcaccgtctcctca

SEQ ID NO: 29380 - protein, 118 aa, synthetic construct
  REGION 1..118: note = Description of Artificial Sequence: Synthetic polypeptide
EVQLLESGGGLVQPGGSLRLSCAASGFTFSRNAMSWVRQAPGMGLEWVSAISGRGGNTFYADSVKGRFTVSRDNSKNTLFLQMNSLRAEDTAVYYCAKNGREQWLDYWGQGTLVTVSS

SEQ ID NO: 29381 - DNA, 345 bp, synthetic construct
  misc_feature 1..345: note = Description of Artificial Sequence: Synthetic polynucleotide
  source 1..345: mol_type = other DNA
gaggtgcagctggtggagtctgggggaggcctggtcaagcctggggggtccctgagactctcctgtgcagcctctggattcaccttcagtagctataaaatgaactgggtccgccaggctccagggaaggggctggagtgggtctcatccattagtagtggtaatagttccatatactacgcagactcagtgaagggccgattcaccatctccagagacaacgccgaaaactcactgtatctgcaaatgaacagcctgagagccgaagacacggctgtgtattactgtgcgagagttagcagtaatgactactggggccagggaaccctggtcaccgtctcctca

SEQ ID NO: 29382 - protein, 115 aa, synthetic construct
  REGION 1..115: note = Description of Artificial Sequence: Synthetic polypeptide
EVQLVESGGGLVKPGGSLRLSCAASGFTFSSYKMNWVRQAPGKGLEWVSSISSGNSSIYYADSVKGRFTISRDNAENSLYLQMNSLRAEDTAVYYCARVSSNDYWGQGTLVTVSS

SEQ ID NO: 29383 - DNA, 363 bp, synthetic construct
  misc_feature 1..363: note = Description of Artificial Sequence: Synthetic polynucleotide
  source 1..363: mol_type = other DNA
caggtgcagctggtggagtctgggggaggcgtggtccagcctgggaggtccctgagactctcctgtgcagcctctggattcaccttcagtagctatggcatgcactgggtccgccaggctccaggcaaggggctggagtgggtggcaattatatcatatggaggaagtaataaatactatgcagactccgtgaagggccgattcaccatctccagagacaattccaagaatacgctgtatctgcaaatgaacagcctgagagctgatgacacggctgtgtattactgtgcgagaaggtcagcagctcggccgggctacggtatggacgtctggggccaggggaccacggtcaccgtctcctca

SEQ ID NO: 29384 - protein, 121 aa, synthetic construct
  REGION 1..121: note = Description of Artificial Sequence: Synthetic polypeptide
QVQLVESGGGVVQPGRSLRLSCAASGFTFSSYGMHWVRQAPGKGLEWVAIISYGGSNKYYADSVKGRFTISRDNSKNTLYLQMNSLRADDTAVYYCARRSAARPGYGMDVWGQGTTVTVSS

SEQ ID NO: 29385 - DNA, 351 bp, synthetic construct; identical to SEQ ID NO: 29367
  misc_feature 1..351: note = Description of Artificial Sequence: Synthetic polynucleotide
  source 1..351: mol_type = other DNA

SEQ ID NO: 29386 - protein, 117 aa, synthetic construct; identical to SEQ ID NO: 29368
  REGION 1..117: note = Description of Artificial Sequence: Synthetic polypeptide

SEQ ID NO: 29387 - DNA, 363 bp, synthetic construct
  misc_feature 1..363: note = Description of Artificial Sequence: Synthetic polynucleotide
  source 1..363: mol_type = other DNA
caggtgcagctggtggagtctgggggaggcgtggtccagcctgggaggtccctgagactctcctgtgcagcgtctggattcaccttcagtagttatggcatgcactgggtccgccaggctccaggcaaggggctggagtgggtggcacttatatggtatgatggaagtaataaataccatgcagactccgtgaagggccgattcaccatctccagagacaattccaagaacacgctgtatctgcaaatgaacagcctgagagccgaggacacggctgtgtattactgtgcgagaaggtatagcagcagctggtcgggcggtatggacgtctggggccaagggaccacggtcaccgtctcctca

SEQ ID NO: 29388 - protein, 121 aa, synthetic construct
  REGION 1..121: note = Description of Artificial Sequence: Synthetic polypeptide
QVQLVESGGGVVQPGRSLRLSCAASGFTFSSYGMHWVRQAPGKGLEWVALIWYDGSNKYHADSVKGRFTISRDNSKNTLYLQMNSLRAEDTAVYYCARRYSSSWSGGMDVWGQGTTVTVSS

SEQ ID NO: 29389 - DNA, 363 bp, synthetic construct
  misc_feature 1..363: note = Description of Artificial Sequence: Synthetic polynucleotide
  source 1..363: mol_type = other DNA
caggtgcagctggtggagtctgggggaggcgtggtccagcctgggaggtccctgagactctcctgtgcagcgtctggattcaccttcagtttctatggcatgcactgggtccgccaggctccaggcaaggggctggagtgggtggcagttatatgggacgatggaagtaataaatactatgcagactccgtgaagggccgattcaccatctccagagacaattccaagaacacgctgtttctgcaaatgatgagcctgagagccgaggacacggctgtgtattactgtgcgagagattctctgtatagcagcagctggttgtttgactactggggccagggaaccctggtcaccgtctcctca

SEQ ID NO: 29390 - protein, 121 aa, synthetic construct
  REGION 1..121: note = Description of Artificial Sequence: Synthetic polypeptide
QVQLVESGGGVVQPGRSLRLSCAASGFTFSFYGMHWVRQAPGKGLEWVAVIWDDGSNKYYADSVKGRFTISRDNSKNTLFLQMMSLRAEDTAVYYCARDSLYSSSWLFDYWGQGTLVTVSS

SEQ ID NO: 29391 - DNA, 351 bp, synthetic construct
  misc_feature 1..351: note = Description of Artificial Sequence: Synthetic polynucleotide
  source 1..351: mol_type = other DNA
caggtgcagctggtgcagtctggggctgaggtgaagaagcctggggcctcagtgaaggtctcctgcaaggcttctggatacaccttcaccggctaccatatgcagtgggtgcgacaggcccctggacaagggcttgagtggatgggatggatcaaccctaacaatggtggcacacagtatgcacagaagtttcagggccgggtcaccatgaccagggacacgtccatcagcacagcctacatggaactgagcaggctgagatctgacgacacggccgtgtattactgtgcgagagatggcacctcgtcctttgactactggggccagggaaccctggtcaccgtctcctcg

SEQ ID NO: 29392 - protein, 117 aa, synthetic construct
  REGION 1..117: note = Description of Artificial Sequence: Synthetic polypeptide
QVQLVQSGAEVKKPGASVKVSCKASGYTFTGYHMQWVRQAPGQGLEWMGWINPNNGGTQYAQKFQGRVTMTRDTSISTAYMELSRLRSDDTAVYYCARDGTSSFDYWGQGTLVTVSS

SEQ ID NO: 29393 - DNA, 345 bp, synthetic construct
  misc_feature 1..345: note = Description of Artificial Sequence: Synthetic polynucleotide
  source 1..345: mol_type = other DNA
gaggtgcagctggtggagtctgggggaggcctggtcaagcctggggggtccctgagactctcctgtgcagcctctggattcaccttcagtagctatagcatgaactgggtccgccaggctccagggaaggggctggagtgggtctcatccattagtggtagtagtacttacatatactacgcagactcagtgaagggccgattcaccgtctccagagacaacgccaagaactcactgtatctgcaagtgaacagcctgagagccgaggacacggctgtgtattactgtgcgagagtcaactcctttgactactggggccagggaaccctggtcaccgtctcctca

SEQ ID NO: 29394 - protein, 115 aa, synthetic construct
  REGION 1..115: note = Description of Artificial Sequence: Synthetic polypeptide
EVQLVESGGGLVKPGGSLRLSCAASGFTFSSYSMNWVRQAPGKGLEWVSSISGSSTYIYYADSVKGRFTVSRDNAKNSLYLQVNSLRAEDTAVYYCARVNSFDYWGQGTLVTVSS

SEQ ID NO: 29395 - DNA, 342 bp, synthetic construct
  misc_feature 1..342: note = Description of Artificial Sequence: Synthetic polynucleotide
  source 1..342: mol_type = other DNA
gaggtgcagctggtggagtctgggggaggcctggtcaagcctggggagtccctgagactctcctgtgcagcctctggattcaccttcagtagctatagcatgaactgggtccgccaggctccagggaaggggctggagtgggtctcatccattagtggtagtagtagttacatatactacgcagactcagtgaagggccgattcaccatctccagagacaacgccaagaactcactgtatctgcaaatgaacagcctgagagccgaggacacggctgtgtattactgtgcgagagatcggggcagcacctggggccagggaaccctggtcaccgtctcctca

SEQ ID NO: 29396 - protein, 114 aa, synthetic construct
  REGION 1..114: note = Description of Artificial Sequence: Synthetic polypeptide
EVQLVESGGGLVKPGESLRLSCAASGFTFSSYSMNWVRQAPGKGLEWVSSISGSSSYIYYADSVKGRFTISRDNAKNSLYLQMNSLRAEDTAVYYCARDRGSTWGQGTLVTVSS

SEQ ID NO: 29397 - DNA, 351 bp, synthetic construct
  misc_feature 1..351: note = Description of Artificial Sequence: Synthetic polynucleotide
  source 1..351: mol_type = other DNA
caggtgcagctggtggagtctgggggaggcgtggtccagcctgggaggtccctgagactctcctgtgcagcgtctggattcaccttcagtaactatggcatgcactgggtccgccaggctccaggcaaggggctggaatgggtgacagttgtatgggatgatggaagtaataaatactatgcagactccgtgaagggccgattcaccatctccagagacaattccaagaacacgctgtatctgcaaatgaacagcctgagagccgaggacacggctgtgtattactgtacgaggggccttggctttacgggagactactggggccagggagccctggtcaccgtctcctca

SEQ ID NO: 29398 - protein, 117 aa, synthetic construct
  REGION 1..117: note = Description of Artificial Sequence: Synthetic polypeptide
QVQLVESGGGVVQPGRSLRLSCAASGFTFSNYGMHWVRQAPGKGLEWVTVVWDDGSNKYYADSVKGRFTISRDNSKNTLYLQMNSLRAEDTAVYYCTRGLGFTGDYWGQGALVTVSS

SEQ ID NO: 29399 - DNA, 360 bp, synthetic construct
  misc_feature 1..360: note = Description of Artificial Sequence: Synthetic polynucleotide
  source 1..360: mol_type = other DNA
gaggtgcagttgttggagtctgggggaggcttgatacagcctggggggtccctgagactctcctgtgcagcctctggattcacctttaggagctatgccatgagctgggtccgccaggctccagggaaggggctggagtgggtctcagctattagtggtagtggtggtaacacattctacgcagactccgtgaagggccggttcaccatctccagagacaattccaagaacacgctgtatttgcaaatgaacaccctgagagccgacgacacggccgtatattactgtgcgaaaaaggtcgtggatacagccatggctcttgactactggggccagggaaccctggtcaccgtctcctca

SEQ ID NO: 29400 - protein, 120 aa, synthetic construct
  REGION 1..120: note = Description of Artificial Sequence: Synthetic polypeptide
EVQLLESGGGLIQPGGSLRLSCAASGFTFRSYAMSWVRQAPGKGLEWVSAISGSGGNTFYADSVKGRFTISRDNSKNTLYLQMNTLRADDTAVYYCAKKVVDTAMALDYWGQGTLVTVSS

SEQ ID NO: 29401 - DNA, 363 bp, synthetic construct
  misc_feature 1..363: note = Description of Artificial Sequence: Synthetic polynucleotide
  source 1..363: mol_type = other DNA
caggtgcagctggtggagtctgggggaggcgtggtccagcctgggaggtccctgagactctcctgtgcagcctctggattcaccttcagtagctatggcatgcactgggtccgccaggctccaggcaaggggccggagtgggtggcagttatatcatatggtggaagtaataaataccatgcagactccgtgaagggccgattcaccatctccagagacaattccaagaacacgctgtatctgcaaatgaacagcctgagagctgaggacacggctgtgtattactgtgcgaggcggggagcagctcgtcctggctacggtatggacgtctggggccaagggaccacggtcaccgtctcctca

SEQ ID NO: 29402 - protein, 121 aa, synthetic construct
  REGION 1..121: note = Description of Artificial Sequence: Synthetic polypeptide
QVQLVESGGGVVQPGRSLRLSCAASGFTFSSYGMHWVRQAPGKGPEWVAVISYGGSNKYHADSVKGRFTISRDNSKNTLYLQMNSLRAEDTAVYYCARRGAARPGYGMDVWGQGTTVTVSS

SEQ ID NO: 29403 - DNA, 345 bp, synthetic construct
  misc_feature 1..345: note = Description of Artificial Sequence: Synthetic polynucleotide
  source 1..345: mol_type = other DNA
gaggtgcaactgttggagtctgggggaggcttggtacagcctggggggtccctgagactctcctgtgcagcctctggattcacctttagcagctatgtcatgagctgggtccgccaggctccagggaaggggctggagtgggtctcaggtattagtggtagtggtggtcgcacatactacgcagactccgtgaagggccggttcaacatctccagagacaattccaagaacacgctgtatctgcaaatgaacagcctgagagccgaggacacggccgtctattactgtgcgagggtggccctttttgactactggggccagggaaccctggtcaccgtctcctca

SEQ ID NO: 29404 - protein, 115 aa, synthetic construct
  REGION 1..115: note = Description of Artificial Sequence: Synthetic polypeptide
EVQLLESGGGLVQPGGSLRLSCAASGFTFSSYVMSWVRQAPGKGLEWVSGISGSGGRTYYADSVKGRFNISRDNSKNTLYLQMNSLRAEDTAVYYCARVALFDYWGQGTLVTVSS

SEQ ID NO: 29405 - DNA, 360 bp, synthetic construct
  misc_feature 1..360: note = Description of Artificial Sequence: Synthetic polynucleotide
  source 1..360: mol_type = other DNA
gaggtgcagctgttggagtctgggggaggcttggtacagcctggggggtccctgagactctcctgtgcagcctctggattcacctttagcagctatgccatgaactgggtccgccaggctccagggaaggggctggagtgggtctcagctattagtggtagtggtggtgccacatactacgcagactccgtgaagggccggttcaccatctccagagacaattccaagaacacgctgtatctgcaaatgaacagcctgagagccgaggacacggccgtatattattgtgcgaaacctctagtgggagcccatgatgcttttgaaatctggggccaagggacaatggtcaccgtctcttca

SEQ ID NO: 29406 - protein, 120 aa, synthetic construct
  REGION 1..120: note = Description of Artificial Sequence: Synthetic polypeptide
EVQLLESGGGLVQPGGSLRLSCAASGFTFSSYAMNWVRQAPGKGLEWVSAISGSGGATYYADSVKGRFTISRDNSKNTLYLQMNSLRAEDTAVYYCAKPLVGAHDAFEIWGQGTMVTVSS

SEQ ID NO: 29407 - DNA, 351 bp, synthetic construct
  misc_feature 1..351: note = Description of Artificial Sequence: Synthetic polynucleotide
  source 1..351: mol_type = other DNA
caggtccagctggtggagtctgggggaggcgtggtccagcctgggaggtccctgagactctcctgtacaacgtctggattcaccttcagtgactatggcatccactgggtccgccaggctccaggcaaggggctggagtgggtggcagttatatggtatgatgaaagtaataaatactatggagactccgtgaagggccgattcgccatctccagagacaattccaagaacacgctgtatctgcaaatgaacagcctgagagccgaggacacggctgtgtattattgtgtgagagaactggggatgacgtctgactactggggccagggaaccctggtcaccgtctcctca

SEQ ID NO: 29408 - protein, 117 aa, synthetic construct
  REGION 1..117: note = Description of Artificial Sequence: Synthetic polypeptide
QVQLVESGGGVVQPGRSLRLSCTTSGFTFSDYGIHWVRQAPGKGLEWVAVIWYDESNKYYGDSVKGRFAISRDNSKNTLYLQMNSLRAEDTAVYYCVRELGMTSDYWGQGTLVTVSS

SEQ ID NO: 29409 - DNA, 363 bp, synthetic construct
  misc_feature 1..363: note = Description of Artificial Sequence: Synthetic polynucleotide
  source 1..363: mol_type = other DNA
caggtgcagctggtggagtctgggggaggcgtggtccagcctgggaggtccctgagactctcctgtgcagcctctggattcaccttcagtagctatggcatgcactgggtccgccaggctccaggcaaggggctggagtgggtggcagttatatcatatggtggaagtaataaatacgatgcagactccgtgaagggccgattcaccatctccagagacaattccaagaacacgctgtatctgcaaatgaccagcctgagagctgaggacacggctgtgtattactgtgcgagacgacgggcagctcgtccagggtacggtatggacgtctggggccaagggaccacggtcaccgtctcctca

SEQ ID NO: 29410 - protein, 121 aa, synthetic construct
  REGION 1..121: note = Description of Artificial Sequence: Synthetic polypeptide
QVQLVESGGGVVQPGRSLRLSCAASGFTFSSYGMHWVRQAPGKGLEWVAVISYGGSNKYDADSVKGRFTISRDNSKNTLYLQMTSLRAEDTAVYYCARRRAARPGYGMDVWGQGTTVTVSS

SEQ ID NO: 29411 - DNA, 351 bp, synthetic construct
  misc_feature 1..351: note = Description of Artificial Sequence: Synthetic polynucleotide
  source 1..351: mol_type = other DNA
caggtgcagctggtgcagtctggggctgaggtgaagaagcctggggcctcagtgaaggtctcctgcaaggcttctggatacaccttcaccggctaccatatgcactgggtgcgacaggcccctggacaagggcttgagtggatgggatggatcaaccctaacaataacggcacaaactatgcacagaagtttcagggcagggtcaccatgaccagggacacgtccatcagcacagcctacatggagctgaacaggctgacatctgacgacacggccgtgtattactgtgcgagagacggtaccagcagctttgactactggggccagggaaccctggtcaccgtctcctca

SEQ ID NO: 29412 - protein, 117 aa, synthetic construct
  REGION 1..117: note = Description of Artificial Sequence: Synthetic polypeptide
QVQLVQSGAEVKKPGASVKVSCKASGYTFTGYHMHWVRQAPGQGLEWMGWINPNNNGTNYAQKFQGRVTMTRDTSISTAYMELNRLTSDDTAVYYCARDGTSSFDYWGQGTLVTVSS

SEQ ID NO: 29413 - DNA, 351 bp, synthetic construct
  misc_feature 1..351: note = Description of Artificial Sequence: Synthetic polynucleotide
  source 1..351: mol_type = other DNA
caggtgcagctggtggagtctgggggaggcgtggtccagcctgggaggtccctgagactctcctgtgcagcgtctggattcaccttcagtagctatggcatgcactgggtccgccaggctccaggcaaggggctggagtgggtggcagttatatggtatgatggaagtaataaatactatgcagactccgtgaagggccgattcaccatctccagagacaattccaagaacacgctgtatctgcaaatgaacagcctgagagccgaggacacggctgtgtattactgtgcgagggcccgtattgggtactttgactcctggggccagggaaccctggtcaccgtctcctca

SEQ ID NO: 29414 - protein, 117 aa, synthetic construct
  REGION 1..117: note = Description of Artificial Sequence: Synthetic polypeptide
QVQLVESGGGVVQPGRSLRLSCAASGFTFSSYGMHWVRQAPGKGLEWVAVIWYDGSNKYYADSVKGRFTISRDNSKNTLYLQMNSLRAEDTAVYYCARARIGYFDSWGQGTLVTVSS

SEQ ID NO: 29415 - DNA, 351 bp, synthetic construct
  misc_feature 1..351: note = Description of Artificial Sequence: Synthetic polynucleotide
  source 1..351: mol_type = other DNA
caggtgcagctggtggagtctgggggaggcgtggtccagccggggaggtccctgagactctcctgtgcagcgtctggattcaccttcagtaactttggcatgcactgggtccgccaggctccaggcaaggggctggagtgggtggcagttgtatggtatgatggaaataatagatactatgcagactccgtgaagggccgattcaccatctccagagacaattccaagaacacgctctatctgcaaatgcacagcctgagagccgaggacacggctgtgtattactgtgcgagggaactgggatttctctctgacttctggggccagggaaccctggtcaccgtctcctca

SEQ ID NO: 29416 - protein, 117 aa, synthetic construct
  REGION 1..117: note = Description of Artificial Sequence: Synthetic polypeptide
QVQLVESGGGVVQPGRSLRLSCAASGFTFSNFGMHWVRQAPGKGLEWVAVVWYDGNNRYYADSVKGRFTISRDNSKNTLYLQMHSLRAEDTAVYYCARELGFLSDFWGQGTLVTVSS

SEQ ID NO: 29417 - DNA, 351 bp, synthetic construct
  misc_feature 1..351: note = Description of Artificial Sequence: Synthetic polynucleotide
  source 1..351: mol_type = other DNA
caggtgcagctggtggagtctgggggaggcgtggtccagcctgggaggtccctgagactctcctgtgcagcgtctggattcaccttcagtaactatggcatgcactgggtccgccaggctccaggcaaggggctggagtgggtggcagttacatggtttgatggaaataataactactatgcagactccgtgaagggccgattcaccatctccagagacaattccaagaacacgctgtatctgcaaatgaacagcctgagagccgaggacacggctgtgtattactgtgcgagagaactggggttcctttctgattattggggccagggaaccctggtcaccgtctcctca

SEQ ID NO: 29418 - protein, 117 aa, synthetic construct
  REGION 1..117: note = Description of Artificial Sequence: Synthetic polypeptide
QVQLVESGGGVVQPGRSLRLSCAASGFTFSNYGMHWVRQAPGKGLEWVAVTWFDGNNNYYADSVKGRFTISRDNSKNTLYLQMNSLRAEDTAVYYCARELGFLSDYWGQGTLVTVSS

SEQ ID NO: 29419 - DNA, 363 bp, synthetic construct
  misc_feature 1..363: note = Description of Artificial Sequence: Synthetic polynucleotide
  source 1..363: mol_type = other DNA
gaggtgcagctgttggagtctgggggaggcttggtacagcctggggggtccctgagactctcctgtgcagcctctggattcacctttagcacctatgccatgagttgggtccgccaggctccagggaaggggctggagtgggtctcagctattagtggtagtggtgttaacacattctacgcagactccgtgaagggccggttcaccatctccagagacaattccaagaacacgctgtttctgcaaatgaacagcctgagagccgaggacacggccgtatattactgtgcgaaactggggaaggactactactactacggtatggacgtctggggccaagggaccacggtcaccgtctcctca

SEQ ID NO: 29420 - protein, 121 aa, synthetic construct
  REGION 1..121: note = Description of Artificial Sequence: Synthetic polypeptide
EVQLLESGGGLVQPGGSLRLSCAASGFTFSTYAMSWVRQAPGKGLEWVSAISGSGVNTFYADSVKGRFTISRDNSKNTLFLQMNSLRAEDTAVYYCAKLGKDYYYYGMDVWGQGTTVTVSS

SEQ ID NO: 29421 - DNA, 342 bp, synthetic construct
  misc_feature 1..342: note = Description of Artificial Sequence: Synthetic polynucleotide
  source 1..342: mol_type = other DNA
gaggtgcagctggtggagtctgggggaggcctggtcaagcctggggggtccctgagactctcctgtgcagcctctggattcaccttcagtagctatagcatgatctgggtccgccaggctccagggaaggggctggagtgggtctcatccattagtggtactagtagttacatatactacgcagactcagtgaagggccgattcaccatctccagagacaacgccaagaactcactgtatctgcaaatgaacagcctgagagccgaggacacggctgtgtattactgtgcgggaatgactacagtaatttggggccagggaaccctggtcaccgtctcctca

SEQ ID NO: 29422 - protein, 114 aa, synthetic construct
  REGION 1..114: note = Description of Artificial Sequence: Synthetic polypeptide
EVQLVESGGGLVKPGGSLRLSCAASGFTFSSYSMIWVRQAPGKGLEWVSSISGTSSYIYYADSVKGRFTISRDNAKNSLYLQMNSLRAEDTAVYYCAGMTTVIWGQGTLVTVSS

SEQ ID NO: 29423 - DNA, 363 bp, synthetic construct
  misc_feature 1..363: note = Description of Artificial Sequence: Synthetic polynucleotide
  source 1..363: mol_type = other DNA
caggtgcagctggtggagtctgggggaggcgtggtccagcctgggaggtccctgagactctcctgtgcagcgtctggattcaccttcagtagctatggcatgcactgggtccgccaggctccaggcaaggggctggagtgggtggcagttatatggtatgatggaagtaataaatactatgcagactccgtgaagggccgattcaccatctccagagacaattccaagaacacgctgtatctgcaaatgaacagcctgagagccgaggacacggctgtgtattactgtgcgagaaggtatagcagcagctggtcgggcggtatggacgtctggggccaagggaccacggtcaccgtctcctca

SEQ ID NO: 29424 - protein, 121 aa, synthetic construct; identical to SEQ ID NO: 28488
  REGION 1..121: note = Description of Artificial Sequence: Synthetic polypeptide

SEQ ID NO: 29425 - DNA, 351 bp, synthetic construct
  misc_feature 1..351: note = Description of Artificial Sequence: Synthetic polynucleotide
  source 1..351: mol_type = other DNA
caggtccagctggtggagtctgggggaggcgtggtccagcctgggaggtccctgagactctcctgtacaacgtctggattcaccttcagtgactatggcatccactgggtccgccaggctccaggcaaggggctggactgggtggcagttatatggtatgatgaaaataataaatactatgcagactccgtgaagggccgattcgccatctccagagacaattccaagaacacgctgtatctgcaaatgaacagcctgagagccgaggacacggctgtgtattattgtgtgagagaactggggatgacgtctgactactggggccagggaaccctggtcaccgtctcctca

SEQ ID NO: 29426 - protein, 117 aa, synthetic construct
  REGION 1..117: note = Description of Artificial Sequence: Synthetic polypeptide
QVQLVESGGGVVQPGRSLRLSCTTSGFTFSDYGIHWVRQAPGKGLDWVAVIWYDENNKYYADSVKGRFAISRDNSKNTLYLQMNSLRAEDTAVYYCVRELGMTSDYWGQGTLVTVSS

SEQ ID NO: 29427 - DNA, 351 bp, synthetic construct
  misc_feature 1..351: note = Description of Artificial Sequence: Synthetic polynucleotide
  source 1..351: mol_type = other DNA
caggtgcagctggtggagtctgggggaggcgtggtccagcctgggaggtccctgagactctcctgtgcagcgtctggattcaccttcagtaactatggcatgcactgggtccgccaggctccaggcaaggggctggagtgggtggcagttatatggtatgaggaaagtaataaatactatggagactccgtgaagggccgattcaccatctccagagacaattccaagaacacgctgtatctgcaaatgaacagcctgagagccgaggacacggctgtgtattactgtgcgagagaattggggttcctctctgactactggggccagggaaccctggtcaccgtctcctca

SEQ ID NO: 29428 - protein, 117 aa, synthetic construct
  REGION 1..117: note = Description of Artificial Sequence: Synthetic polypeptide
QVQLVESGGGVVQPGRSLRLSCAASGFTFSNYGMHWVRQAPGKGLEWVAVIWYEESNKYYGDSVKGRFTISRDNSKNTLYLQMNSLRAEDTAVYYCARELGFLSDYWGQGTLVTVSS

SEQ ID NO: 29429 - DNA, 351 bp, synthetic construct
  misc_feature 1..351: note = Description of Artificial Sequence: Synthetic polynucleotide
  source 1..351: mol_type = other DNA
caggtgcagctggtgcagtctggggctgaggtgaagaagcctggggcctcagtgaaggtctcctgcaaggcttctggatacaccttcaccggctactatttccactgggtgcgacaggcccctggtcaagggcttgagtggatgggatggatccaccctaacaataatgccacaaactatgcacagaagtttcagggcagggtcaccatgaccagggacacgtccatcagcacagcctacatggagctgagcaggctgagatctgacgacacggccgtgtattactgtgcgaaggatggcagatcgtcctttgactactggggccagggaaccctggtcaccgtctcctca

SEQ ID NO: 29430 - protein, 117 aa, synthetic construct
  REGION 1..117: note = Description of Artificial Sequence: Synthetic polypeptide
QVQLVQSGAEVKKPGASVKVSCKASGYTFTGYYFHWVRQAPGQGLEWMGWIHPNNNATNYAQKFQGRVTMTRDTSISTAYMELSRLRSDDTAVYYCAKDGRSSFDYWGQGTLVTVSS

SEQ ID NO: 29431 - DNA, 363 bp, synthetic construct
  misc_feature 1..363: note = Description of Artificial Sequence: Synthetic polynucleotide
  source 1..363: mol_type = other DNA
gaggtgcaactgttggagtctgggggaggcttggtacagcctggggggtccctgagactctcctgtgcagcctctggattcacctttagcagctatgccatgagctgggtccgccaggctccagggaaggggctggagtgggtctcagctattagtggtcgtggtagtagcacattctacgcagactccgtgaagggccggttcaccatctccagagacaattccaagaacacgctgtatctgcaaatgaacagcctgagagccgaggacacggccgttttttactgtgcgaaagatcacggtatagtgggaactatttactttgactactggggccagggaaccctggtcaccgtctcctca

SEQ ID NO: 29432 - protein, 121 aa, synthetic construct
  REGION 1..121: note = Description of Artificial Sequence: Synthetic polypeptide
EVQLLESGGGLVQPGGSLRLSCAASGFTFSSYAMSWVRQAPGKGLEWVSAISGRGSSTFYADSVKGRFTISRDNSKNTLYLQMNSLRAEDTAVFYCAKDHGIVGTIYFDYWGQGTLVTVSS

SEQ ID NO: 29433 - DNA, 363 bp, synthetic construct; identical to SEQ ID NO: 29423
  misc_feature 1..363: note = Description of Artificial Sequence: Synthetic polynucleotide
  source 1..363: mol_type = other DNA

SEQ ID NO: 29434 - protein, 121 aa, synthetic construct; identical to SEQ ID NO: 28488
  REGION 1..121: note = Description of Artificial Sequence: Synthetic polypeptide

SEQ ID NO: 29435 - DNA, 363 bp, synthetic construct
  misc_feature 1..363: note = Description of Artificial Sequence: Synthetic polynucleotide
  source 1..363: mol_type = other DNA
caggtgcagctggtggagtctgggggaggcgtggtccagcctgggaggtccctgagactctcctgtgcagcgtctggattcaccttcagtagttatggcatgcactgggtccgccaggctccaggcaaggggctggagtgggtggcacttatatggtatgatggaagtaataaataccatgcagactccgtgaagggccgattcaccatctccagagacaattccaagaacacgctgtatctgcaaatgaacagcctgagagccgaggacacggctgtgtattactgcgcgagaaggtatagcagcagctggtcgggcggtatggacgtctggggccaagggaccacggtcaccgtctcctca

SEQ ID NO: 29436 - protein, 121 aa, synthetic construct; identical to SEQ ID NO: 29388
  REGION 1..121: note = Description of Artificial Sequence: Synthetic polypeptide

SEQ ID NO: 29437 - DNA, 351 bp, synthetic construct
  misc_feature 1..351: note = Description of Artificial Sequence: Synthetic polynucleotide
  source 1..351: mol_type = other DNA
caggtgcagctggtggagtctgggggaggcgtggtccagcctgggaggtccctgagactctcctgtgcagcgtctggattcaccttcagtagctatggcatgcactgggtccgccaggctccaggcaaggggctggagtgggtggcagttatatggtttgatggaaataataaatactatgaagactccgtgaagggccgattcaccatctccagagacaattccaagaacacgctgtatctgcaaatgaacagcctgagagccgaggacacggctgtgtattactgtgtgagggaactgggatttctctctgactactggggccagggaaccctggtcaccgtctcctca

SEQ ID NO: 29438 - protein, 117 aa, synthetic construct
  REGION 1..117: note = Description of Artificial Sequence: Synthetic polypeptide
QVQLVESGGGVVQPGRSLRLSCAASGFTFSSYGMHWVRQAPGKGLEWVAVIWFDGNNKYYEDSVKGRFTISRDNSKNTLYLQMNSLRAEDTAVYYCVRELGFLSDYWGQGTLVTVSS

SEQ ID NO: 29439 - DNA, 339 bp, synthetic construct
  misc_feature 1..339: note = Description of Artificial Sequence: Synthetic polynucleotide
  source 1..339: mol_type = other DNA
gaggtgcaactggtggagtctgggggaggcctggtcaagcctggggggtccctgagactctcctgtgcagcctctggattcaccttcaatagttataggatgaactgggtccgccaggctccagggaaggggctggagtgggtctcatccattagtagtagtagtaatcacatagactacgcagactcagtgaagggccgattcaccatctccagagacaacgccaaaaactcactatatttgcaaatgaacagcctgagagccgaggacacggctttatattactgtgcgagagggactgactactggggccagggaaccctggtctccgtctcctca

SEQ ID NO: 29440 - protein, 113 aa, synthetic construct
  REGION 1..113: note = Description of Artificial Sequence: Synthetic polypeptide
EVQLVESGGGLVKPGGSLRLSCAASGFTFNSYRMNWVRQAPGKGLEWVSSISSSSNHIDYADSVKGRFTISRDNAKNSLYLQMNSLRAEDTALYYCARGTDYWGQGTLVSVSS

SEQ ID NO: 29441 - DNA, 342 bp, synthetic construct
  misc_feature 1..342: note = Description of Artificial Sequence: Synthetic polynucleotide
  source 1..342: mol_type = other DNA
caggtgcagctggtggagtctgggggaggcgtggtccagcctgggaggtccctgagactctcctgtgcagcgtctggattcaccttcagtgactatggcatgcactgggtccgccaggctccaggcaaggggctggagtgggtggcagttatatggtatgatgaaaataataaatactatgcagactccgtgaagggccgattcaccatctccagagacaattccaagaacacgctgtatctgcaaatgaacagcctgagagccgaggacacggctgtgtattactgtacgagagaatggtttgactactggggccagggaaccctggtcaccgtctcctca

SEQ ID NO: 29442 - protein, 114 aa, synthetic construct
  REGION 1..114: note = Description of Artificial Sequence: Synthetic polypeptide
QVQLVESGGGVVQPGRSLRLSCAASGFTFSDYGMHWVRQAPGKGLEWVAVIWYDENNKYYADSVKGRFTISRDNSKNTLYLQMNSLRAEDTAVYYCTREWFDYWGQGTLVTVSS

SEQ ID NO: 29443 - DNA, 363 bp, synthetic construct
  misc_feature 1..363: note = Description of Artificial Sequence: Synthetic polynucleotide
  source 1..363: mol_type = other DNA
caggtgcagctggtggagtctgggggaggcgtggtccagcctgggaggtccctgagactctcctgtgcagcgtctggattcaccttcagtagctatggcatgcactgggtccgccaggctccaggcaaggggctggagtgggtggcagttatatggtatgatggaaatggcaaatattatgcagactccgtgaagggccgattcaccatctccagagacaattccaagaacacgctgtatctgcaaatgaacagcctgagagccgaggacacggctgtgtattactgtgcgagaaggtatagcagcagctggtcgggcggtatggacgtctggggccaagggaccacggtcaccgtctcctca

SEQ ID NO: 29444 - protein, 121 aa, synthetic construct
  REGION 1..121: note = Description of Artificial Sequence: Synthetic polypeptide
QVQLVESGGGVVQPGRSLRLSCAASGFTFSSYGMHWVRQAPGKGLEWVAVIWYDGNGKYYADSVKGRFTISRDNSKNTLYLQMNSLRAEDTAVYYCARRYSSSWSGGMDVWGQGTTVTVSS

SEQ ID NO: 29445 - DNA, 363 bp, synthetic construct
  misc_feature 1..363: note = Description of Artificial Sequence: Synthetic polynucleotide
  source 1..363: mol_type = other DNA
caggtgcagttggtggagtctgggggaggcgtggtccagcctgggaggtccctgagactctcctgtgcagcctctggattcaccttcagtagctatggcatgcactgggtccgccaggctccaggcaaggggctggagtgggtgtcaattatatcatatggtggaagtaataaatacgatgcagactccgtgaagggccgattcaccatctccagagacaattccaagaacacgctgtatctgcaaatgaccagcctgagagctgaggacacggctgtgtattactgtgcgagacgacgggcagctcgtccagggtacggtatggacgtctggggccaagggatcacggtcaccgtctcctca

SEQ ID NO: 29446 - protein, 121 aa, synthetic construct
  REGION 1..121: note = Description of Artificial Sequence: Synthetic polypeptide
QVQLVESGGGVVQPGRSLRLSCAASGFTFSSYGMHWVRQAPGKGLEWVSIISYGGSNKYDADSVKGRFTISRDNSKNTLYLQMTSLRAEDTAVYYCARRRAARPGYGMDVWGQGITVTVSS

SEQ ID NO: 29447 - DNA, 354 bp, synthetic construct
  misc_feature 1..354: note = Description of Artificial Sequence: Synthetic polynucleotide
  source 1..354: mol_type = other DNA
caggtgcagctggtggagtctgggggaggcgtggtccagcctgggaggtccctgagactctcctgtgcagcgtctgcattcaccttcagtagctatggcatgcactgggtccgccagactccaggcaaggggctggagtgggtggcagttatatggcatgatggaagtaataaatactatgcagactccgtgaagggccgattcaccatctccagagacaattccaagaacacgctgtatctgcaaatgaacagcctgagagccgaggacacggctgtgtattactgtgcgagagacgagcagctcgggacctttgactactggggccagggaaccctggtcaccgtctcctca

SEQ ID NO: 29448 - protein, 118 aa, synthetic construct
  REGION 1..118: note = Description of Artificial Sequence: Synthetic polypeptide
QVQLVESGGGVVQPGRSLRLSCAASAFTFSSYGMHWVRQTPGKGLEWVAVIWHDGSNKYYADSVKGRFTISRDNSKNTLYLQMNSLRAEDTAVYYCARDEQLGTFDYWGQGTLVTVSS

SEQ ID NO: 29449 - DNA, 363 bp, synthetic construct
  misc_feature 1..363: note = Description of Artificial Sequence: Synthetic polynucleotide
  source 1..363: mol_type = other DNA
gaggtgcagctgttggagtctgggggaggcttggtacagcctggggggtccctgagactctcctgtgcagcctctggattcacctttagaacctatgccatgacctgggtccgccaggctccagggaaggggctggagtgggtctcagctatcagtggtagtggtgttaactcattctacgcagactccgtgaagggccggttcaccatctccagagacaattccgagaacacgctgtatctgcaaatgaacagcctgagagccgaggacacggccgtatattactgtgcgaaagcaagggcagtggctgggtcacactggttcgacccctggggccagggaaccctggtcaccgtctcctca

SEQ ID NO: 29450 - protein, 121 aa, synthetic construct
  REGION 1..121: note = Description of Artificial Sequence: Synthetic polypeptide
EVQLLESGGGLVQPGGSLRLSCAASGFTFRTYAMTWVRQAPGKGLEWVSAISGSGVNSFYADSVKGRFTISRDNSENTLYLQMNSLRAEDTAVYYCAKARAVAGSHWFDPWGQGTLVTVSS

SEQ ID NO: 29451 - DNA, 351 bp, synthetic construct
  misc_feature 1..351: note = Description of Artificial Sequence: Synthetic polynucleotide
  source 1..351: mol_type = other DNA
caggtgcagctggtggagtctgggggaggcgtggtccagcctgggaggtccctgagactctcctgtgcagcgtctggattcaccttcagtgactatggcatgcactgggtccgccaggctccaggcaaggggctggagtgggtggcagttatatggtatgaagaaactaataaatactatgcagactccgtgaagggccgattcaccatctccagagacaattccaagaacacgctgtatctgcaaatgaacagcctgagaggcgaggacacggctgtgtattactgtgcgagagaagtggggttcctgaatgactactggggccagggaatcctggtcaccgtctcctca

SEQ ID NO: 29452 - protein, 117 aa, synthetic construct
  REGION 1..117: note = Description of Artificial Sequence: Synthetic polypeptide
QVQLVESGGGVVQPGRSLRLSCAASGFTFSDYGMHWVRQAPGKGLEWVAVIWYEETNKYYADSVKGRFTISRDNSKNTLYLQMNSLRGEDTAVYYCAREVGFLNDYWGQGILVTVSS

SEQ ID NO: 29453 - DNA, 369 bp, synthetic construct
  misc_feature 1..369: note = Description of Artificial Sequence: Synthetic polynucleotide
  source 1..369: mol_type = other DNA
caggtgcagctggtgcagtctggggctgaggtgaaggagcctggggcctcagtgaaggtttcctgcaaggcatctggatacaccttcaccagttactatatacactgggtgcgacaggcccctggacaagggcttgagtggatgggagtaatcaaccctagtaatggtagaacaagctacgcacagaagttccagggcagagtcaccatgaccagggacacgtccacgagcacagtctacatggagctgagcagcctgagatctgaggacacggccgtgtattactgtgcgagagatcgaggagatggttactacttctactacggtatggacgtctggggccaagggaccacggtcaccgtctcctca

SEQ ID NO: 29454 - protein, 123 aa, synthetic construct
  REGION 1..123: note = Description of Artificial Sequence: Synthetic polypeptide
QVQLVQSGAEVKEPGASVKVSCKASGYTFTSYYIHWVRQAPGQGLEWMGVINPSNGRTSYAQKFQGRVTMTRDTSTSTVYMELSSLRSEDTAVYYCARDRGDGYYFYYGMDVWGQGTTVTVSS

SEQ ID NO: 29455 - DNA, 372 bp, synthetic construct
  misc_feature 1..372: note = Description of Artificial Sequence: Synthetic polynucleotide
  source 1..372: mol_type = other DNA
caggtgcagctggtggagtctgggggaggcgtggtccagcctgggaggtccctgagactctcctgtgcagcctctggattcaccttcagtagctatggcatgcactgggtccgccagactccaggcaaggggctggagtgggtggcagttatatcatatgttggaagtactaaatactatgcagactccgtgaggggccgattcaccatctccagagacaattccaagaacacgctgtatctgcaaatgaacagcctgagaactgaggacacggctgtgtattactgtgcgagagggagaggtcgatatagtgactacggtcatgatgcttttgatatctggggccaagggacaatggtcaccgtctcttca

SEQ ID NO: 29456 - protein, 124 aa, synthetic construct
  REGION 1..124: note = Description of Artificial Sequence: Synthetic polypeptide
QVQLVESGGGVVQPGRSLRLSCAASGFTFSSYGMHWVRQTPGKGLEWVAVISYVGSTKYYADSVRGRFTISRDNSKNTLYLQMNSLRTEDTAVYYCARGRGRYSDYGHDAFDIWGQGTMVTVSS

SEQ ID NO: 29457 - DNA, 354 bp, synthetic construct
  misc_feature 1..354: note = Description of Artificial Sequence: Synthetic polynucleotide
  source 1..354: mol_type = other DNA
caggtacagctggtgcagtctggggctgaggtgaagaagcctggggcctcagtgaaggtctcctgcaaggcttctggatacaccttcaccaattatgatatcaactgggtgcgacaggccactggacaagggcttgagtggctgggatggatgcaccctaacagtggtaacacaggctatgcacagaagttccagggcagagtcaccatgaccaggaacacctccataagcacagcctacatggagctgagcagcctgagatctgaggacacggccgtgtattactgtgcatatagcagtggctggtacgtttttgactactggggccagggaaccctggtcaccgtctcctca

SEQ ID NO: 29458 - protein, 118 aa, synthetic construct
  REGION 1..118: note = Description of Artificial Sequence: Synthetic polypeptide
QVQLVQSGAEVKKPGASVKVSCKASGYTFTNYDINWVRQATGQGLEWLGWMHPNSGNTGYAQKFQGRVTMTRNTSISTAYMELSSLRSEDTAVYYCAYSSGWYVFDYWGQGTLVTVSS

SEQ ID NO: 29459 - DNA, 342 bp, synthetic construct
  misc_feature 1..342: note = Description of Artificial Sequence: Synthetic polynucleotide
  source 1..342: mol_type = other DNA
gaggtgcagctggtggagtctgggggaggcctggtcaagtttggggggtccctgagactctcctgtgcagcctctggattcaccttcagtagctatagcatgaactgggtccgccaggctccagggaaggggctggagtgggtctcatccattagtagtagtagtacttacatatactacggagactcagtgaagggccgattcaccatctcccgagacaacgccaagaactcactatatctgcagatgaacagcctgagagccgaggacacggctgtgtattactgtgcgagagatcggggcagcagctggggccagggaaccctggtcaccgtctcctca

SEQ ID NO: 29460 - protein, 114 aa, synthetic construct
  REGION 1..114: note = Description of Artificial Sequence: Synthetic polypeptide
EVQLVESGGGLVKFGGSLRLSCAASGFTFSSYSMNWVRQAPGKGLEWVSSISSSSTYIYYGDSVKGRFTISRDNAKNSLYLQMNSLRAEDTAVYYCARDRGSSWGQGTLVTVSS

SEQ ID NO: 29461 - DNA, 360 bp, synthetic construct; identical to SEQ ID NO: 29399
  misc_feature 1..360: note = Description of Artificial Sequence: Synthetic polynucleotide
  source 1..360: mol_type = other DNA

SEQ ID NO: 29462 - protein, 120 aa, synthetic construct; identical to SEQ ID NO: 29400
  REGION 1..120: note = Description of Artificial Sequence: Synthetic polypeptide

SEQ ID NO: 29463 - DNA, 345 bp, synthetic construct
  misc_feature 1..345: note = Description of Artificial Sequence: Synthetic polynucleotide
  source 1..345: mol_type = other DNA
gaggtgcagctggtggagtctgggggaggcctggtcaagcctggggggtccctgagactctcctgtgcagcctctggattcaccttcagtagctatagcatgaactgggtccgccaggctccagggaaggggctggagtgggtctcatccattagtggtagtagtagttacatatactacgcagactcagtgaagggccgattcaccatctccagagacaacgccaagaactcactatatctgcaaatgaacagcctgagagccgaggacacggctgtgtattactgtgcgagagtggctacttttgactactggggccagggaaccctggtcaccgtctcctca

SEQ ID NO: 29464 - protein, 115 aa, synthetic construct; identical to SEQ ID NO: 29342
  REGION 1..115: note = Description of Artificial Sequence: Synthetic polypeptide

SEQ ID NO: 29465 - DNA, 351 bp, synthetic construct
  misc_feature 1..351: note = Description of Artificial Sequence: Synthetic polynucleotide
  source 1..351: mol_type = other DNA
caggtgcagctggtgcagtctggggctgaggtgaagaagcctggggcctcagtgaaggtctcctgccaggcttctggatacaccttcaccggctaccatatgcactgggtgcgacaggcccctggacaagggcttgagtggatgggatggatcaaccctaacaataatgccacaaactatgcacagaagtttcagggcagggtcaccatgaccagggacacgtccatcagcacagcctacatggaactgaggaggctgagatctgacgacacggccgtgtatcactgtgcgagagatggcacctcgtcttttgactactggggccagggaaccctggtcaccgtctcctca

SEQ ID NO: 29466 - protein, 117 aa, synthetic construct
  REGION 1..117: note = Description of Artificial Sequence: Synthetic polypeptide
QVQLVQSGAEVKKPGASVKVSCQASGYTFTGYHMHWVRQAPGQGLEWMGWINPNNNATNYAQKFQGRVTMTRDTSISTAYMELRRLRSDDTAVYHCARDGTSSFDYWGQGTLVTVSS

SEQ ID NO: 29467 - DNA, 354 bp, synthetic construct
  misc_feature 1..354: note = Description of Artificial Sequence: Synthetic polynucleotide
  source 1..354: mol_type = other DNA
caggtgcaactggtggagtctgggggaggcgtggtccagcctgggaggtccctgagactctcctgtgcagcgtctggattcaccttcagtagctatggcatgcactgggtccgccaggctccaggcaaggggctggagtgggtggcagttatatggcatgatggaagtaataaatattatgtagactccgtgaagggccgattcaccatctccagagacaattccaagaatacgctgtatctgcaaatgaacagcctgagagccgaggacacggctgtgtattactgtgcgagagacgagcagctcgggacctttgactactggggccagggaaccctggtcaccgtctcctca

SEQ ID NO: 29468 - protein, 118 aa, synthetic construct
  REGION 1..118: note = Description of Artificial Sequence: Synthetic polypeptide
QVQLVESGGGVVQPGRSLRLSCAASGFTFSSYGMHWVRQAPGKGLEWVAVIWHDGSNKYYVDSVKGRFTISRDNSKNTLYLQMNSLRAEDTAVYYCARDEQLGTFDYWGQGTLVTVSS

SEQ ID NO: 29469 - DNA, 351 bp, synthetic construct
  misc_feature 1..351: note = Description of Artificial Sequence: Synthetic polynucleotide
  source 1..351: mol_type = other DNA
caggtgcagctggtgcagtctggggctgaggtgaagaagcctggggcctcagtgaaggtctcctgcaaggcttctggatacaccttcaccgactaccatatgcactgggtgcgacaggcccctggacaagggcttgagtggatgggatggatcaaccctaacagaggtggcacaaattatgtacagaagtttcagggtagggtcgccatgaccaatgacacgtccatcagcacagcctatatggagctgagtgggctgagatctgacgacacggccgtgtattactgtgcgagagatggcacctcgtcttttgactattggggccggggaaccctggtcaccgtctcctca

SEQ ID NO: 29470 - protein, 117 aa, synthetic construct
  REGION 1..117: note = Description of Artificial Sequence: Synthetic polypeptide
QVQLVQSGAEVKKPGASVKVSCKASGYTFTDYHMHWVRQAPGQGLEWMGWINPNRGGTNYVQKFQGRVAMTNDTSISTAYMELSGLRSDDTAVYYCARDGTSSFDYWGRGTLVTVSS

SEQ ID NO: 29471 - DNA, 360 bp, synthetic construct
  misc_feature 1..360: note = Description of Artificial Sequence: Synthetic polynucleotide
  source 1..360: mol_type = other DNA
caggtgcagctggtgcagtctggggctgaggtgaagaagcctggggcctcagtgaaggtctcctgcaaggcttctggattcaccttcaccgactactatatgcactgggtgcgacaggcccctggacaagggcttgagtggatgggatggatcaaccctaacagtggtggcacaaactatgcacagaggtttcagggcagggtcaccatgaccagggacacgtccatcagcacagcctacatggaactgagcagactgagatctgacgacacggccgtgtattactgtacgagagagggagcaactcgtccgacgggttttgactactggggccagggaaccctggtcaccgtctcctca

SEQ ID NO: 29472 - protein, 120 aa, synthetic construct
  REGION 1..120: note = Description of Artificial Sequence: Synthetic polypeptide
QVQLVQSGAEVKKPGASVKVSCKASGFTFTDYYMHWVRQAPGQGLEWMGWINPNSGGTNYAQRFQGRVTMTRDTSISTAYMELSRLRSDDTAVYYCTREGATRPTGFDYWGQGTLVTVSS

SEQ ID NO: 29473 - DNA, 375 bp, synthetic construct
  misc_feature 1..375: note = Description of Artificial Sequence: Synthetic polynucleotide
  source 1..375: mol_type = other DNA
caggtgcagctggtgcagtctggggctgaggtgaagaagcctggggcctcagtgaaggtctcctgcaaggcttctggatacaccttcaccggccactatataaactgggtgcgacaggcccctggacaagggcttgagtggatggcatgggtcaaccctaacagtggtggcacaaactctgcacagaagtttcagggcagggtcaccatgaccagggacacgtccatcagcacagtctacatggagctgagcaggctgagatctgacgacacggccgtgtattactgtgcgaggggagggcagctcggcgggtttaactactactactacggtatggacgtctggggccaagggaccacggtcaccgtctcctca

SEQ ID NO: 29474 - protein, 125 aa, synthetic construct
  REGION 1..125: note = Description of Artificial Sequence: Synthetic polypeptide
QVQLVQSGAEVKKPGASVKVSCKASGYTFTGHYINWVRQAPGQGLEWMAWVNPNSGGTNSAQKFQGRVTMTRDTSISTVYMELSRLRSDDTAVYYCARGGQLGGFNYYYYGMDVWGQGTTVTVSS

SEQ ID NO: 29475 - DNA, 351 bp, synthetic construct
  misc_feature 1..351: note = Description of Artificial Sequence: Synthetic polynucleotide
  source 1..351: mol_type = other DNA
caggtgcagctggtggagtctgggggaggcgtggtccagcctgggaggtccctgagactctcctgtgcagcgtctggattcaccttcagtaactatggcatgcactgggtccgccaggctccaggcaaggggctggagtgggtggcagttatatggtatgatgaaagtaataaacactatgcagactccgtgaagggccgattcaccatctccagagacaattccaagaccacgctgtatctgcaaatgagcagcctgagagccgaggacacggctgtgtattattgttcgagagaactggggatgaacggagactactggggccagggaaccctggtcaccgtctcctca

SEQ ID NO: 29476 - protein, 117 aa, synthetic construct
  REGION 1..117: note = Description of Artificial Sequence: Synthetic polypeptide
QVQLVESGGGVVQPGRSLRLSCAASGFTFSNYGMHWVRQAPGKGLEWVAVIWYDESNKHYADSVKGRFTISRDNSKTTLYLQMSSLRAEDTAVYYCSRELGMNGDYWGQGTLVTVSS

SEQ ID NO: 29477 - DNA, 363 bp, synthetic construct
  misc_feature 1..363: note = Description of Artificial Sequence: Synthetic polynucleotide
  source 1..363: mol_type = other DNA
caggtgcagctggtggagtctgggggaggcgtggtccagcctgggaggtccctgagactctcctgtgcagcgtctggattcaccttcagtagctatggcatgcactgggtccgccaggctccaggcaaggggctggagtgggtggcagttatatggtatgatggaagtaataaatactatgcagactccgtgaagggccgattcaccatctccagagacaattccaagaacacgctgtatctgcaaatgaacagcctgagagccgaggacacggctgtgtattactgtgcgaggcggtatagcagcagctgggacgggggtatggacgtctggggccaagggaccacggtcaccgtctcctca

SEQ ID NO: 29478 - protein, 121 aa, synthetic construct
  REGION 1..121: note = Description of Artificial Sequence: Synthetic polypeptide
QVQLVESGGGVVQPGRSLRLSCAASGFTFSSYGMHWVRQAPGKGLEWVAVIWYDGSNKYYADSVKGRFTISRDNSKNTLYLQMNSLRAEDTAVYYCARRYSSSWDGGMDVWGQGTTVTVSS

SEQ ID NO: 29479 - DNA, 351 bp, synthetic construct
  misc_feature 1..351: note = Description of Artificial Sequence: Synthetic polynucleotide
  source 1..351: mol_type = other DNA
caggtgcagctggtggagtctgggggaggcgtggtccagcctgggaggtccctgagactctcctgtgcagcgtctggattcaccttcaatgactatggcatgcactgggtccgccaggctccaggcaaggggctggagtgggtggcaattatatggtatgatgaaaataataaatactatgcagactccgtgaagggccgattcaccatctccagagacaattccaagaacacgctgtatctgcaaatgagcagcctgagagccgaggacacggctgtatattactgtgcgagagatgttctggacccttttgactactggggccagggaaccctggtcaccgtctcctca

SEQ ID NO: 29480 - protein, 117 aa, synthetic construct
  REGION 1..117: note = Description of Artificial Sequence: Synthetic polypeptide
QVQLVESGGGVVQPGRSLRLSCAASGFTFNDYGMHWVRQAPGKGLEWVAIIWYDENNKYYADSVKGRFTISRDNSKNTLYLQMSSLRAEDTAVYYCARDVLDPFDYWGQGTLVTVSS

SEQ ID NO: 29481 - DNA, 363 bp, synthetic construct
  misc_feature 1..363: note = Description of Artificial Sequence: Synthetic polynucleotide
  source 1..363: mol_type = other DNA
caggtgcagctggtggagtctgggggaggcgtggtccagcctgggaggtccctgagactctcctgtgcagcgtctggattcaccttcagtagttatggcatgcactgggtccgccaggctccaggcaaggggctggagtgggtggcagttatatggtatgatggaagtaataaatactatgcagactccgtgaagggccgattcaccatctccagagacaattccaagaacacgctgtatctgcaaatgaacagcctgagagccgaggacacggctgtgtattactgtgcgagaaggtatagcagaagctggacgggaggcatggacgtctggggccaagggaccacggtcaccgtctcctca

SEQ ID NO: 29482 - protein, 121 aa, synthetic construct
  REGION 1..121: note = Description of Artificial Sequence: Synthetic polypeptide
QVQLVESGGGVVQPGRSLRLSCAASGFTFSSYGMHWVRQAPGKGLEWVAVIWYDGSNKYYADSVKGRFTISRDNSKNTLYLQMNSLRAEDTAVYYCARRYSRSWTGGMDVWGQGTTVTVSS

SEQ ID NO: 29483 - DNA, 351 bp, synthetic construct
  misc_feature 1..351: note = Description of Artificial Sequence: Synthetic polynucleotide
  source 1..351: mol_type = other DNA
caggtgcaactggtggagtctgggggaggcgtggtccagcctgggaggtccctgagactctcctgtgcagcgtctggattcaccttcagtagctatggcatgcactgggtccgccaggctccaggcaaggggctggagtgggtggcagttatatggtatgaagaaagtaataaatactatgcagactccgtgaagggccgattcaccatctccagagacaattccaagaacacgctgtatctgcaaatgaacagcctgagagccgaggacacggctgtatattactgtgcgagagaactggggatgaccggagactactggggccagggaaccctggtcaccgtctcctca

SEQ ID NO: 29484 - protein, 117 aa, synthetic construct
  REGION 1..117: note = Description of Artificial Sequence: Synthetic polypeptide
QVQLVESGGGVVQPGRSLRLSCAASGFTFSSYGMHWVRQAPGKGLEWVAVIWYEESNKYYADSVKGRFTISRDNSKNTLYLQMNSLRAEDTAVYYCARELGMTGDYWGQGTLVTVSS

SEQ ID NO: 29485 - DNA, 375 bp, synthetic construct
  misc_feature 1..375: note = Description of Artificial Sequence: Synthetic polynucleotide
  source 1..375: mol_type = other DNA
caggtgcaactagtgcagtctggggctgaggtgaagaagcctggggcctcagtgaaggtctcctgcaaggcttctggatacagtttcaccggccactatatacactgggtgcgacaggcccctggacaagggcttgagtacatgggatggatcaaccctaacagcggtggcacaaactatgtacagaaatttcagggcagggtcaccatgaccagggacacgtccatcagcacagcctacatggagctgagcaggctgagatctgacgacacggccatatattactgttcgagagggggcctactgggagctaccaactactattattacggtatggacgtctggggccaagggaccacggtcaccgtctcctca

SEQ ID NO: 29486 - protein, 125 aa, synthetic construct
  REGION 1..125: note = Description of Artificial Sequence: Synthetic polypeptide
QVQLVQSGAEVKKPGASVKVSCKASGYSFTGHYIHWVRQAPGQGLEYMGWINPNSGGTNYVQKFQGRVTMTRDTSISTAYMELSRLRSDDTAIYYCSRGGLLGATNYYYYGMDVWGQGTTVTVSS

SEQ ID NO: 29487 - DNA, 354 bp, synthetic construct
  misc_feature 1..354: note = Description of Artificial Sequence: Synthetic polynucleotide
  source 1..354: mol_type = other DNA
caggtgctgctggtgcagtctggggctgaggtgaagaagcctggggcctcagtgaaggtctcctgcaaggcttctggatacaccttcaccaattatgatatcaactgggtgcgacaggccactggacaagggcttgagtggatgggatggatgcaccctaacagtggtaacacaggctatgcacagaagttccagggcagagtcaccatgaccaggaacacctccataagcacagcctacatggagctgagcagcctgagatctgaggacacggccgtgtattactgtgcgtatagcagtggctggtacttctttgactactggggccagggaaccctggtcaccgtctcctca

SEQ ID NO: 29488 - protein, 118 aa, synthetic construct
  REGION 1..118: note = Description of Artificial Sequence: Synthetic polypeptide
QVLLVQSGAEVKKPGASVKVSCKASGYTFTNYDINWVRQATGQGLEWMGWMHPNSGNTGYAQKFQGRVTMTRNTSISTAYMELSSLRSEDTAVYYCAYSSGWYFFDYWGQGTLVTVSS

SEQ ID NO: 29489 - DNA, 345 bp, synthetic construct
  misc_feature 1..345: note = Description of Artificial Sequence: Synthetic polynucleotide
  source 1..345: mol_type = other DNA
gaggtgcagctgttggagtctgggggaggcttggtacagcctggggggtccctgagactctcctgtgcagcctctggattcacctttagcagctatgtcatgagctgggtccgccaggctccagggaaggggctggagtgggtctcatctattagtggtagtggtggttggacaaactacgcagactccgtgaagggccgattcaccacctccagagacaattccaagaacacgctgtatctgcaaatgaacagcctgagagccgaggacacggccgtttattactgtgcgagactaactggatttgactattggggccagggaaccctggtcaccgtctcctca

SEQ ID NO: 29490 - protein, 115 aa, synthetic construct
  REGION 1..115: note = Description of Artificial Sequence: Synthetic polypeptide
EVQLLESGGGLVQPGGSLRLSCAASGFTFSSYVMSWVRQAPGKGLEWVSSISGSGGWTNYADSVKGRFTTSRDNSKNTLYLQMNSLRAEDTAVYYCARLTGFDYWGQGTLVTVSS

SEQ ID NO: 29491 - DNA, 339 bp, synthetic construct
  misc_feature 1..339: note = Description of Artificial Sequence: Synthetic polynucleotide
  source 1..339: mol_type = other DNA
gaggtgcagctgttggagtctgggggaggcttggtacagcctggggggtccctgagactctcctgtgcagcctctggattcacctttagcagctatgtcatgagctgggtccgccaggctccagggaaggggctggagtgggtctcaggtattagtggtagtggtaatagaacatactacgcagactccgtgaagggccggttcaccatctccagagacaattccaagaatacgctgtatctgcaaatgaacagcctgagagccgaggactcggccgtttattactgtgggagtttggggattgactggggccagggaaccctggtcaccgtctcctca

SEQ ID NO: 29492 - protein, 113 aa, synthetic construct
  REGION 1..113: note = Description of Artificial Sequence: Synthetic polypeptide
EVQLLESGGGLVQPGGSLRLSCAASGFTFSSYVMSWVRQAPGKGLEWVSGISGSGNRTYYADSVKGRFTISRDNSKNTLYLQMNSLRAEDSAVYYCGSLGIDWGQGTLVTVSS

SEQ ID NO: 29493 - DNA, 357 bp, synthetic construct
  misc_feature 1..357: note = Description of Artificial Sequence: Synthetic polynucleotide
  source 1..357: mol_type = other DNA
caggtgcagctgcaggagtcgggcccaggactggtgaggccttcggcgaccctgtccctcacctgcactgtctctggtggctccatcagcaggagtagttactactggggctggatccgccagcccccagggaagggactggagtggattgggagtatctattatagtgggagcgcctcctacaacccgtccctcaagagtcgagtcaccatatccgtagacacgtccgagaaccaattctccctgaggctgagctctgtgaccgccgcagacacggctgtgtattactgtgcgagactggacagtggctggtcgtttgactactggggccagggaaccctggtcaccgtctcctca

SEQ ID NO: 29494 - protein, 119 aa, synthetic construct
  REGION 1..119: note = Description of Artificial Sequence: Synthetic polypeptide
QVQLQESGPGLVRPSATLSLTCTVSGGSISRSSYYWGWIRQPPGKGLEWIGSIYYSGSASYNPSLKSRVTISVDTSENQFSLRLSSVTAADTAVYYCARLDSGWSFDYWGQGTLVTVSS

SEQ ID NO: 29495 - DNA, 363 bp, synthetic construct
  misc_feature 1..363: note = Description of Artificial Sequence: Synthetic polynucleotide
  source 1..363: mol_type = other DNA
gaggtgcagttgttggagtctgggggaggcttggtacagcctggggggtccctgagactctcctgtgcagcctctggattcacctttagcagctatgccatgagctgggtccgccaggctccagggaaggggctggagtgggtctcagctattagtggtagtggtggtaacacattctacgcagactccgtgaagggccggttcaccatctccagagacaattccaagaacacgctgtttcttcaaatgaacagcctgagagccgaggacacggccgtatattactgtgcgaaatttttcggtatagtgggagccgggtactttgactactggggccagggaaccctggtcaccgtctcctca

SEQ ID NO: 29496 - protein, 121 aa, synthetic construct
  REGION 1..121: note = Description of Artificial Sequence: Synthetic polypeptide
EVQLLESGGGLVQPGGSLRLSCAASGFTFSSYAMSWVRQAPGKGLEWVSAISGSGGNTFYADSVKGRFTISRDNSKNTLFLQMNSLRAEDTAVYYCAKFFGIVGAGYFDYWGQGTLVTVSS

SEQ ID NO: 29497 - DNA, 363 bp, synthetic construct
  misc_feature 1..363: note = Description of Artificial Sequence: Synthetic polynucleotide
  source 1..363: mol_type = other DNA
gaggtgcagctgttggagtctgggggaggcttggtacagccgggggggtccctgagactctcctgtgcagcctctggattcacctttagcaactatgccatgacctgggtccgccaggctccagggaaggggctggagtgggtctcagctattagtggtagtggtggtaacacattctacgcagactccgtgacgggccgggtcaccatctccagagacaattccaagaacacgctgtatctgcaaatgaacagtctgagagccgaggacacggccgtatattactgtgcgaaactggggaaggactaccactactacggtatggacgtctggggccaagggaccacggtcaccgtctcctca

SEQ ID NO: 29498 - protein, 121 aa, synthetic construct
  REGION 1..121: note = Description of Artificial Sequence: Synthetic polypeptide
EVQLLESGGGLVQPGGSLRLSCAASGFTFSNYAMTWVRQAPGKGLEWVSAISGSGGNTFYADSVTGRVTISRDNSKNTLYLQMNSLRAEDTAVYYCAKLGKDYHYYGMDVWGQGTTVTVSS

SEQ ID NO: 29499 - DNA, 363 bp, synthetic construct
  misc_feature 1..363: note = Description of Artificial Sequence: Synthetic polynucleotide
  source 1..363: mol_type = other DNA
caggtgcagctggtggagtctgggggaggcgtggtccagcctgggaggtccctgagactctcctgtgcagcgtctggattcaccttcagtagctatggcatgcactgggtccgccaggctccaggcaaggggctggagtgggtggcagttatatggtatgatggaagtaataaatactatgtagactccgtgaagggccgattcaccatctccagagacaattccaagaacacgctgtatctgcaaatgaacagcctgagagccgaggacacggctgtgtattactgtgcgagaaggtatagcagaagctggacgggaggtatggacgtctggggccaggggaccacggtcaccgtctcctca

SEQ ID NO: 29500 - protein, 121 aa, synthetic construct
  REGION 1..121: note = Description of Artificial Sequence: Synthetic polypeptide
QVQLVESGGGVVQPGRSLRLSCAASGFTFSSYGMHWVRQAPGKGLEWVAVIWYDGSNKYYVDSVKGRFTISRDNSKNTLYLQMNSLRAEDTAVYYCARRYSRSWTGGMDVWGQGTTVTVSS

SEQ ID NO: 29501 - DNA, 360 bp, synthetic construct
  misc_feature 1..360: note = Description of Artificial Sequence: Synthetic polynucleotide
  source 1..360: mol_type = other DNA
caggtgcagctgcaggagtcgggcccaggactggtgaagccttcggagaccctgtccctcacctgcactgtctctggtggctccatcagtagttacttctggagctggatccggcagcccgccgggaagggactggagtggattgggcgcatctataccagggggagcaccaactacaacccctccctcaagagtcgagtcaccatgtcagtagacacgtccaagaaccagttctccctgaagctgagctctgtgaccgccgcggacacggccgtgtattactgtgcgagagagggaaaaactgggggggtttcttactttgactactggggccagggaaccctggtcaccgtctcctca

SEQ ID NO: 29502 - protein, 120 aa, synthetic construct
  REGION 1..120: note = Description of Artificial Sequence: Synthetic polypeptide
QVQLQESGPGLVKPSETLSLTCTVSGGSISSYFWSWIRQPAGKGLEWIGRIYTRGSTNYNPSLKSRVTMSVDTSKNQFSLKLSSVTAADTAVYYCAREGKTGGVSYFDYWGQGTLVTVSS

SEQ ID NO: 29503 - DNA, 360 bp, synthetic construct
  misc_feature 1..360: note = Description of Artificial Sequence: Synthetic polynucleotide
  source 1..360: mol_type = other DNA
caggtgcagctgcaggagtcgggcccaggactggtgaagccttcggagaccctgtccctcacctgcactgtctctggtggctccatcagtagtcacttctggagctggatccggcagcccgccgggaagggactggagtggattgggcgcatctatatcagggggagcaccaactacaacccctccctcaagagtcgagtcaccatgtcagtagacacgtccaagaaccagttctccctgaagctgagctctgtgaccgccgcggacacggccgtgtattactgtgcgagagagggaaaaactgggggggtttcttactttgactactggggccagggaaccctggtcaccgtctcctca

SEQ ID NO: 29504 - protein, 120 aa, synthetic construct
  REGION 1..120: note = Description of Artificial Sequence: Synthetic polypeptide
QVQLQESGPGLVKPSETLSLTCTVSGGSISSHFWSWIRQPAGKGLEWIGRIYIRGSTNYNPSLKSRVTMSVDTSKNQFSLKLSSVTAADTAVYYCAREGKTGGVSYFDYWGQGTLVTVSS

SEQ ID NO: 29505 - DNA, 351 bp, synthetic construct
  misc_feature 1..351: note = Description of Artificial Sequence: Synthetic polynucleotide
  source 1..351: mol_type = other DNA
caggtgcagctggtggagtctgggggaggcgtggtccagcctgggaggtccctgagactctcctgtgcagcgtctggattcaccttcaatgactatggcatgcactgggtccgccaggctccaggcaaggggctggagtgggtggcaattatatggtatgatgaaagtaataaatactatgcagactccgtgaagggccgattcaccatctccagagacaattccaagaacacgctgtatctgcaaatgaacagcctgagagccgaggacacggctgtatattactgtgcgagagatgttctggacccttttgactactggggccagggaaccctggtcaccgtctcctca

SEQ ID NO: 29506 - protein, 117 aa, synthetic construct
  REGION 1..117: note = Description of Artificial Sequence: Synthetic polypeptide
QVQLVESGGGVVQPGRSLRLSCAASGFTFNDYGMHWVRQAPGKGLEWVAIIWYDESNKYYADSVKGRFTISRDNSKNTLYLQMNSLRAEDTAVYYCARDVLDPFDYWGQGTLVTVSS

SEQ ID NO: 29507 - DNA, 369 bp, synthetic construct
  misc_feature 1..369: note = Description of Artificial Sequence: Synthetic polynucleotide
  source 1..369: mol_type = other DNA
caggtgcagctggtggagtctgggggaggcgtggtccagcctgggaggtccctgagactctcctgtgcagcgtctggattcaccttcagtagctatggcatgcactgggtccgccaggctccaggcaaggggctggagtgggtggcagttatatggtatgatggaagtaataaatactatgcagactccgtgaagggccgattcaccatctccagagacaattccaagaacacgctgtatctgcaaatgaacagcctgagagccgaggacacggctgtgtattactgtgcgagagagaggtatagcagtggctggtacgactacggtatggacgtctggggccaagggaccacggtcaccgtctcctca

SEQ ID NO: 29508 - protein, 123 aa, synthetic construct
  REGION 1..123: note = Description of Artificial Sequence: Synthetic polypeptide
QVQLVESGGGVVQPGRSLRLSCAASGFTFSSYGMHWVRQAPGKGLEWVAVIWYDGSNKYYADSVKGRFTISRDNSKNTLYLQMNSLRAEDTAVYYCARERYSSGWYDYGMDVWGQGTTVTVSS

SEQ ID NO: 29509 - DNA, 363 bp, synthetic construct
  misc_feature 1..363: note = Description of Artificial Sequence: Synthetic polynucleotide
  source 1..363: mol_type = other DNA
caggtgcagctggtggagtctgggggaggcgtggtccagcctgggaggtccctgagactctcctgtgcagcgtctggattcaccttcagtagctatggcatgcactgggtccgccaggctccaggcaaggggctggagtgggtggcagttatatggtatgatggaagtaataaatactatgcagactccgtgaagggccgattcaccatctccagagacaattccaagaacacgctgtatctgcaaatgaacagcctgagagccgaggacacggctgtgtattactgtgcgagaaggtatagcagaagctgggcgggaggcatggacgtctggggccaagggaccacggtcaccgtctcctca

SEQ ID NO: 29510 - protein, 121 aa, synthetic construct
  REGION 1..121: note = Description of Artificial Sequence: Synthetic polypeptide
QVQLVESGGGVVQPGRSLRLSCAASGFTFSSYGMHWVRQAPGKGLEWVAVIWYDGSNKYYADSVKGRFTISRDNSKNTLYLQMNSLRAEDTAVYYCARRYSRSWAGGMDVWGQGTTVTVSS

SEQ ID NO: 29511 - DNA, 354 bp, synthetic construct
  misc_feature 1..354: note = Description of Artificial Sequence: Synthetic polynucleotide
  source 1..354: mol_type = other DNA
caggtgcagctggtgcagtctggggctgaggtgaagaagcctggggcctcagtgaaggtctcctgcaaggcttctggatacaccttcaccaattatgatatcaactgggtgcgacaggccactggacaagggcttgagtggatgggatggatgacccctaacagtggtaacacaggctatgcacagaagttccagggcagagtcaccatgaccaggaacacctccataagcacagcctacatggagctgagcagcctgaaatctgaggacacggccgtgtattactgtgcgtatagcagtggctggtaccgctttgactactggggccagggaaccctggtcaccgtctcctca

SEQ ID NO: 29512 - protein, 118 aa, synthetic construct
  REGION 1..118: note = Description of Artificial Sequence: Synthetic polypeptide
QVQLVQSGAEVKKPGASVKVSCKASGYTFTNYDINWVRQATGQGLEWMGWMTPNSGNTGYAQKFQGRVTMTRNTSISTAYMELSSLKSEDTAVYYCAYSSGWYRFDYWGQGTLVTVSS

SEQ ID NO: 29513 - DNA, 354 bp, synthetic construct
  misc_feature 1..354: note = Description of Artificial Sequence: Synthetic polynucleotide
  source 1..354: mol_type = other DNA
caggtgcagctggtgcagtctggggctgaggtgaagaagcctggggcctcagtgaaggtctcctgcaaggcttctggatacaccttcaccaattatgatatcaactgggtgcgacaggccactggacaagggcttgagtggatgggatggatgcaccctaacagtggtagcacaggctatgcacagaagttccagggcagagtcaccatgaccaggaacacctccataagcacagcctacatggagctgagcagcctgagatctgaggacacggccgtgtattactgtgcgtatagcagtggctggtactactttgactactggggccagggaaccctggtcaccgtctcctca

SEQ ID NO: 29514 - protein, 118 aa, synthetic construct
  REGION 1..118: note = Description of Artificial Sequence: Synthetic polypeptide
QVQLVQSGAEVKKPGASVKVSCKASGYTFTNYDINWVRQATGQGLEWMGWMHPNSGSTGYAQKFQGRVTMTRNTSISTAYMELSSLRSEDTAVYYCAYSSGWYYFDYWGQGTLVTVSS

SEQ ID NO: 29515 - DNA, 363 bp, synthetic construct
  misc_feature 1..363: note = Description of Artificial Sequence: Synthetic polynucleotide
  source 1..363: mol_type = other DNA
gaggtgcagctgttggagtctgggggaggcttggttcagcctggggggtccctgagactctcctgtgcagcctctggattcacctttagcagctatgccatgagttgggtccgccaggctccagggaaggggctggagtgggtctcagctattagtactggtggtggtaacacatactacgcagactccgtgaagggccggttcaccatttccagagacaattccaagaacacgctgtatctgcaaatgaacagcctgagagccgaggacacggccgtatattactgtgcgaaacggggggtctacggtgactttgatgcttttgatatctggggccaagggacaatggtcaccgtctcttca

SEQ ID NO: 29516 - protein, 121 aa, synthetic construct
  REGION 1..121: note = Description of Artificial Sequence: Synthetic polypeptide
EVQLLESGGGLVQPGGSLRLSCAASGFTFSSYAMSWVRQAPGKGLEWVSAISTGGGNTYYADSVKGRFTISRDNSKNTLYLQMNSLRAEDTAVYYCAKRGVYGDFDAFDIWGQGTMVTVSS

SEQ ID NO: 29517 - DNA, 351 bp, synthetic construct
  misc_feature 1..351: note = Description of Artificial Sequence: Synthetic polynucleotide
  source 1..351: mol_type = other DNA
gaggtgcagctgttggagtctgggggaggcttggtacagcctggggggtccctgagactctcctgtgcagcctctggattcacctttagaagctatgccatgagctgggtccgccaggctccagggaaggggctggagtgggtctcagctactagtggtagtggtgttaacacattctacgcagactccgtgaagggccggttcaccatctccagagacaattccaagaacacgctgtatctgcaaatgaacagcctgagagccgaggacacggccgtatattactgtgcgaaattggaactggggatctttgactactggggccagggaaccctggtcaccgtctcctca

SEQ ID NO: 29518 - protein, 117 aa, synthetic construct
  REGION 1..117: note = Description of Artificial Sequence: Synthetic polypeptide
EVQLLESGGGLVQPGGSLRLSCAASGFTFRSYAMSWVRQAPGKGLEWVSATSGSGVNTFYADSVKGRFTISRDNSKNTLYLQMNSLRAEDTAVYYCAKLELGIFDYWGQGTLVTVSS

SEQ ID NO: 29519 - DNA, 339 bp, synthetic construct
  misc_feature 1..339: note = Description of Artificial Sequence: Synthetic polynucleotide
  source 1..339: mol_type = other DNA
gaggtgcagctggtggagtctgggggaggcctggtcaagcctggggggtccctgagactctcctgtgcagcctctggattcaccttcagtagctatagcatgaactgggtccgccaggctccagggaagggactggagtgggtctcatccattagtagtagtagtagttacatatactacgcagactcagtgaagggccgattcaccatctccagagacaacgccaagaactcactgtatctgcaaatgaacagcctgagagccgaggacacggctgtgtattactgtgcgatttttggagtggactggggccagggaaccctggtcaccgtctcctca

SEQ ID NO: 29520 - protein, 113 aa, synthetic construct
  REGION 1..113: note = Description of Artificial Sequence: Synthetic polypeptide
EVQLVESGGGLVKPGGSLRLSCAASGFTFSSYSMNWVRQAPGKGLEWVSSISSSSSYIYYADSVKGRFTISRDNAKNSLYLQMNSLRAEDTAVYYCAIFGVDWGQGTLVTVSS

SEQ ID NO: 29521 - DNA, 357 bp, synthetic construct
  misc_feature 1..357: note = Description of Artificial Sequence: Synthetic polynucleotide
  source 1..357: mol_type = other DNA
caggtgcagctggtggagtctgggggaggcgtggtccagcctgggaggtccctgagactctcctgtgcagcgtctggattcaccttcagtagctatggcatgcactgggtccgccaggctccaggccaggggctggagtggatggcaattatatggtatgatggaagtaataaatactatgcagactccgtgaagggccgattcaccatctccagagacaattccaagaacacgctgtatctgcaaatcaacagcctgagagccgaggacacggctgtgtattactgtgcgagagaagacccgcgtaccagctgctctgactactggggccagggaaccctggtcaccgtctcctca

SEQ ID NO: 29522 - protein, 119 aa, synthetic construct
  REGION 1..119: note = Description of Artificial Sequence: Synthetic polypeptide
QVQLVESGGGVVQPGRSLRLSCAASGFTFSSYGMHWVRQAPGQGLEWMAIIWYDGSNKYYADSVKGRFTISRDNSKNTLYLQINSLRAEDTAVYYCAREDPRTSCSDYWGQGTLVTVSS

SEQ ID NO: 29523 - DNA, 357 bp, synthetic construct
  misc_feature 1..357: note = Description of Artificial Sequence: Synthetic polynucleotide
  source 1..357: mol_type = other DNA
caggtgtatctggtggagtctgggggaggcgtggtccagcctgggaggtccctgagactctcctgtgcagcgtctggattcaccttcagtagctatggcatgcactgggtccgccaggctccaggcaaggggctggagtgggtggcagttatatggtatgatggaagtaataaatactctgcagactccgtgaagggccgattcaccatctccagagacaattccaagaacacgctggatctgcaaatgaacagcctgagagccgaggacacggctgtgtattactgtgcgagagataatggtaactggaactaccttgactactggggccagggaaccctggtcaccgtctcctca

SEQ ID NO: 29524 - protein, 119 aa, synthetic construct
  REGION 1..119: note = Description of Artificial Sequence: Synthetic polypeptide
QVYLVESGGGVVQPGRSLRLSCAASGFTFSSYGMHWVRQAPGKGLEWVAVIWYDGSNKYSADSVKGRFTISRDNSKNTLDLQMNSLRAEDTAVYYCARDNGNWNYLDYWGQGTLVTVSS

SEQ ID NO: 29525 - DNA, 357 bp, synthetic construct
  misc_feature 1..357: note = Description of Artificial Sequence: Synthetic polynucleotide
  source 1..357: mol_type = other DNA
cagctgcagctgcaggagtcgggcccaggactggtgaagccttcggagaccctgtccctcacctgtattgtctctggtggctccatcagcagaagtagttactactggggctggatccgccagcccccagggaaggggctggagtggattgggagcatctattatagtgggatcgcctcctataatccgtccctcaagagtcgagtcaccatatccgtagacacgtccaagaaccagttctccctgaagctgaactctgtgaccgccacagacacggctgtatattactgtgcgagactgagcagtggctggtcctttgactactggggccagggaaccctggtcaccgtctcctca

SEQ ID NO: 29526 - protein, 119 aa, synthetic construct
  REGION 1..119: note = Description of Artificial Sequence: Synthetic polypeptide
QLQLQESGPGLVKPSETLSLTCIVSGGSISRSSYYWGWIRQPPGKGLEWIGSIYYSGIASYNPSLKSRVTISVDTSKNQFSLKLNSVTATDTAVYYCARLSSGWSFDYWGQGTLVTVSS

SEQ ID NO: 29527 - DNA, 345 bp, synthetic construct
  misc_feature 1..345: note = Description of Artificial Sequence: Synthetic polynucleotide
  source 1..345: mol_type = other DNA
gaggtgcagctggtggagtctgggggaggcctggtcaagcctggggggtccctgagactctcctgtgcagcctctggattcaccttcagtagctatagcatgaactgggtccgccaggctccagggaaggggctggagtgggtctcatccattagtagtagtagtagttacatatactacgcagactcagtgaagggccgattcaccatctccagagacaacgccaagaactcactgtatctgcaaatgaacagcctgagagccgaggacacggctgtatattactgtgcgagggttaactcttttgactcctggggccagggaaccctggtcaccgtctcctca

SEQ ID NO: 29528 - protein, 115 aa, synthetic construct
  REGION 1..115: note = Description of Artificial Sequence: Synthetic polypeptide
EVQLVESGGGLVKPGGSLRLSCAASGFTFSSYSMNWVRQAPGKGLEWVSSISSSSSYIYYADSVKGRFTISRDNAKNSLYLQMNSLRAEDTAVYYCARVNSFDSWGQGTLVTVSS

SEQ ID NO: 29529 - DNA, 351 bp, synthetic construct
  misc_feature 1..351: note = Description of Artificial Sequence: Synthetic polynucleotide
  source 1..351: mol_type = other DNA
caggtgcagctggtggagtctgggggaggcgtggtccagcctgggaggtccctgagactctcctgtgcagcgtctggattcaccttcagtgactatggcatgcactgggtccgccaggctccaggcaaggggctggagtgggtggcagttatatggtatgatagaagtaataaatactatgcagactccgtgaagggccgattcaccatctccagagacaattccaagaacacgctgtatctgcaaatgaacagcctgagagtcgaggacacggctgtgtatcactgtgcgagagagcttgggttcagcagtgactactggggccagggaaccctggtcaccgtctcctca

SEQ ID NO: 29530 - protein, 117 aa, synthetic construct
  REGION 1..117: note = Description of Artificial Sequence: Synthetic polypeptide
QVQLVESGGGVVQPGRSLRLSCAASGFTFSDYGMHWVRQAPGKGLEWVAVIWYDRSNKYYADSVKGRFTISRDNSKNTLYLQMNSLRVEDTAVYHCARELGFSSDYWGQGTLVTVSS

SEQ ID NO: 29531 - DNA, 363 bp, synthetic construct
  misc_feature 1..363: note = Description of Artificial Sequence: Synthetic polynucleotide
  source 1..363: mol_type = other DNA
caggtgcagctggtggagtctgggggaggcgtggtccagcctgggaggtccctgagactctcctgtgcagcgtctggattcaccttcagttcctatggcatgcactgggtccgccaggctccaggcaaggggctggagtgggtggcagctatatggtatgatggaagtaataaatactatggagactccgtgaagggccgagtcaccatctccagagacaattccaagaactcgctgcatctgcaaatgaacagcctgagagccgaggacacggctgtgtattattgtgcgagagatcagggcatagtgggagctacttggtttgactactggggccagggaaccctggtcaccgtctcctca

SEQ ID NO: 29532 - protein, 121 aa, synthetic construct
  REGION 1..121: note = Description of Artificial Sequence: Synthetic polypeptide
QVQLVESGGGVVQPGRSLRLSCAASGFTFSSYGMHWVRQAPGKGLEWVAAIWYDGSNKYYGDSVKGRVTISRDNSKNSLHLQMNSLRAEDTAVYYCARDQGIVGATWFDYWGQGTLVTVSS

SEQ ID NO: 29533 - DNA, 360 bp, synthetic construct
  misc_feature 1..360: note = Description of Artificial Sequence: Synthetic polynucleotide
  source 1..360: mol_type = other DNA
gaggtgcagctgttggagtctgggggaggcttggttcagcctggggggtccctgagactctcctgtgcagcctctggattcacctttagcagctatgttatgagctgggtccgccaggctccagggaaggggctggagtgggtctcaggtattagtggtagtggtgctaaaacatactatgcagactccgtgaagggccgattcaccatctccagagacaattccaagaacacgctgtatctgcaaatgaacagcctgagagccgaggacacggccgtatattactgtgcggaactggggatagactactactacggtatggacgtctggggccaagggaccacggtcaccgtctcctca

SEQ ID NO: 29534 - protein, 120 aa, synthetic construct
  REGION 1..120: note = Description of Artificial Sequence: Synthetic polypeptide
EVQLLESGGGLVQPGGSLRLSCAASGFTFSSYVMSWVRQAPGKGLEWVSGISGSGAKTYYADSVKGRFTISRDNSKNTLYLQMNSLRAEDTAVYYCAELGIDYYYGMDVWGQGTTVTVSS

SEQ ID NO: 29535 - DNA, 372 bp, synthetic construct
  misc_feature 1..372: note = Description of Artificial Sequence: Synthetic polynucleotide
  source 1..372: mol_type = other DNA
caggtgcagctggtgcagtctggggctgaggtgaagaagcctggggcctcagtgaaggtctcctgcaaggcttctggatacaccttcaccggctactatatgcactgggtgcgacaggcccctggacaaggacttgagtggatgggatggatcaaacctaaaagtggtggcacaaaccaagcacagaagtttcagggcagggtcaccatgaccagggacacgtccatcagcacagcctacatggagctgagcagtctgagatctgacgacacggccgtgtattactgtgcgagagctccgggtatagcagcagctggtacatggggatactttgactactggggccagggaaccctggtcaccgtctcctca

SEQ ID NO: 29536 - protein, 124 aa, synthetic construct
  REGION 1..124: note = Description of Artificial Sequence: Synthetic polypeptide
QVQLVQSGAEVKKPGASVKVSCKASGYTFTGYYMHWVRQAPGQGLEWMGWIKPKSGGTNQAQKFQGRVTMTRDTSISTAYMELSSLRSDDTAVYYCARAPGIAAAGTWGYFDYWGQGTLVTVSS

SEQ ID NO: 29537 - DNA, 345 bp, synthetic construct
  misc_feature 1..345: note = Description of Artificial Sequence: Synthetic polynucleotide
  source 1..345: mol_type = other DNA
gaggtgcagctgttggagtctgggggaggcttggtacagcctggggggtccctgagactctcctgtgcagcctctggattcacctttagcagctatgtcttaaactgggtccgccaggctccagggaaggggctggagtgggtctcagctatgagtggtagtggtggtagaacatactacgcagactccgtgaagggccggttcaccatctccagagacaattccaagaacacgctgtatctgcaaatgaacagcctgagagccgaggacacggccgtatatttctgtgcgatgactacgcactttgactactggggccagggaaccctggtcaccgtctcctca

SEQ ID NO: 29538 - protein, 115 aa, synthetic construct
  REGION 1..115: note = Description of Artificial Sequence: Synthetic polypeptide
EVQLLESGGGLVQPGGSLRLSCAASGFTFSSYVLNWVRQAPGKGLEWVSAMSGSGGRTYYADSVKGRFTISRDNSKNTLYLQMNSLRAEDTAVYFCAMTTHFDYWGQGTLVTVSS

SEQ ID NO: 29539 - DNA, 342 bp, synthetic construct
  misc_feature 1..342: note = Description of Artificial Sequence: Synthetic polynucleotide
  source 1..342: mol_type = other DNA
gaggtgcagctggtggagtctgggggaggcctggtcaagcctggggggtccctgagactctcctgtgcagcctctggattctccttcagtagctatagcatgaactgggtccgccaggctccagggaaggggctggagtgggtctcatccattagtagtagtagtacttacatatactacggagactcagtgaagggccgattcaccatctccagagacaacgccaagaactcactgtatctgcaaatgaacagcctgagagccgaggacacggctgtgtattactgtgcgagagatcggggcagcagctggggccagggaaccctggtcaccgtctcctca

SEQ ID NO: 29540 - protein, 114 aa, synthetic construct
  REGION 1..114: note = Description of Artificial Sequence: Synthetic polypeptide
EVQLVESGGGLVKPGGSLRLSCAASGFSFSSYSMNWVRQAPGKGLEWVSSISSSSTYIYYGDSVKGRFTISRDNAKNSLYLQMNSLRAEDTAVYYCARDRGSSWGQGTLVTVSS

SEQ ID NO: 29541 - DNA, 345 bp, synthetic construct
  misc_feature 1..345: note = Description of Artificial Sequence: Synthetic polynucleotide
  source 1..345: mol_type = other DNA
gaggtgcagctggtggagtctgggggaggcctggtcaagcctggggggtccctgagactctcctgtgcagcctctggattcaccttcagtagctatagcatgaactgggtccgccaggctccagggaaggggctggagtgggtctcatccattagtggtagtagtagttacataaactacacagactcagtgaagggccgattcaccatctccagagacaacgccaagaactcactgtatctgcaaatgaacagcctgagagccgaggacacggctgtgtattactgtgcgagagtggctggctttgactactggggccagggaaccctggtcaccgtctcctca

SEQ ID NO: 29542 - protein, 115 aa, synthetic construct
  REGION 1..115: note = Description of Artificial Sequence: Synthetic polypeptide
EVQLVESGGGLVKPGGSLRLSCAASGFTFSSYSMNWVRQAPGKGLEWVSSISGSSSYINYTDSVKGRFTISRDNAKNSLYLQMNSLRAEDTAVYYCARVAGFDYWGQGTLVTVSS

SEQ ID NO: 29543 - DNA, 360 bp, synthetic construct
  misc_feature 1..360: note = Description of Artificial Sequence: Synthetic polynucleotide
  source 1..360: mol_type = other DNA
caggtgcagctgcaggagtcgggcccaggactggtgaagccttcggagaccctgtccctcacctgcactgtctctggtggctccatcagtagttactactggagctggatccggcagcccgccgggaagggactggagtggattgggcgcatctataccagggggagcaccaactacaacccctccctcaagagtcgagtcaccatgtcaatagacacgtccaagaaccagttctccctgaagctgagctctgtgaccgccgcggacacggccgtgtattactgtgcgagagagggaaaaactgggggggtttcttactttgactactggggccagggaaccctggtcaccgtctcctca

SEQ ID NO: 29544 - protein, 120 aa, synthetic construct
  REGION 1..120: note = Description of Artificial Sequence: Synthetic polypeptide
QVQLQESGPGLVKPSETLSLTCTVSGGSISSYYWSWIRQPAGKGLEWIGRIYTRGSTNYNPSLKSRVTMSIDTSKNQFSLKLSSVTAADTAVYYCAREGKTGGVSYFDYWGQGTLVTVSS

SEQ ID NO: 29545 - DNA, 363 bp, synthetic construct
  misc_feature 1..363: note = Description of Artificial Sequence: Synthetic polynucleotide
  source 1..363: mol_type = other DNA
caggtgcagttggtggagtctgggggaggcgtggtccagcctgggaggtccctgagactctcctgtgcagcgtctggattcaccttcagtagctatggcatgcactgggtccgccaggctccaggcaaggggctggagtgggtggcagctatatggtatgatggaagtaataaatactatgcagactccgtgaagggccgattcaccatctccagagacaattccaagaacacgctgtatctgcaaatgaacagcctgagagccgaggacacggctgtgtattactgtgcgagagattatggtatagtgggagctacatattttgactactggggccagggaaccctggtcaccgtctcctca

SEQ ID NO: 29546 - protein, 121 aa, synthetic construct
  REGION 1..121: note = Description of Artificial Sequence: Synthetic polypeptide
QVQLVESGGGVVQPGRSLRLSCAASGFTFSSYGMHWVRQAPGKGLEWVAAIWYDGSNKYYADSVKGRFTISRDNSKNTLYLQMNSLRAEDTAVYYCARDYGIVGATYFDYWGQGTLVTVSS

SEQ ID NO: 29547 - DNA, 351 bp, synthetic construct
  misc_feature 1..351: note = Description of Artificial Sequence: Synthetic polynucleotide
  source 1..351: mol_type = other DNA
caggtgcagctggtggagtctgggggaggcgtggtccagcctgggaggtccctgagactctcctgtgtagcgtctggattcaccttcagtgactatggcatgcactgggtccgccaggctccaggcaaggggctggagtgggtggcagttatatggtatgctggaagtaataaatactatgtagactccgtgaagggccgattcaccatctccagagacaattccaagaacacgctgtatctgcaaatgaacagcctgagagccgaggacacggctgtgtattactgtgcgagggaactggggatgaggtctgactactggggccagggaaccctggtcaccgtctcctca

SEQ ID NO: 29548 - protein, 117 aa, synthetic construct
  REGION 1..117: note = Description of Artificial Sequence: Synthetic polypeptide
QVQLVESGGGVVQPGRSLRLSCVASGFTFSDYGMHWVRQAPGKGLEWVAVIWYAGSNKYYVDSVKGRFTISRDNSKNTLYLQMNSLRAEDTAVYYCARELGMRSDYWGQGTLVTVSS

SEQ ID NO: 29549 - DNA, 354 bp, synthetic construct
  misc_feature 1..354: note = Description of Artificial Sequence: Synthetic polynucleotide
  source 1..354: mol_type = other DNA
gaggtgcagctgttggagtctgggggaggcttggtacagccgggggggtccctgagactctcctgtgcagcctctggattcacctttagcagctatgccatgagctgggtccgccaggctccagggaaggggctggagtgggtctcagttattagtggtagtggtggtagtacattctacgcagactccgtgaagggccggttcaccatctccagagacaattccaagaccacgctgtatctgcaaatgaacagcctgagagccgaggacacggccgtatattactgtgcgaaaagggactggaacgacgtttttgactactggggccagggaaccctggtcaccgtctcctca

SEQ ID NO: 29550 - protein, 118 aa, synthetic construct
  REGION 1..118: note = Description of Artificial Sequence: Synthetic polypeptide
EVQLLESGGGLVQPGGSLRLSCAASGFTFSSYAMSWVRQAPGKGLEWVSVISGSGGSTFYADSVKGRFTISRDNSKTTLYLQMNSLRAEDTAVYYCAKRDWNDVFDYWGQGTLVTVSS

SEQ ID NO: 29551 - DNA, 339 bp, synthetic construct
  misc_feature 1..339: note = Description of Artificial Sequence: Synthetic polynucleotide
  source 1..339: mol_type = other DNA
caggtgcagctggtggagtctgggggaggcttggtcaagcctggagggtccctgagactgtcctgtgcagcctctggattcatcttcagtgactactacatgaactggatccgccaggctccagggaaggggctggagtgggtttcatacattagtagtagtggtagtaccatatactacgcagactctgtgaagggccgattcaccatctccagggacaacgccaagaactcactgtatctgcaaatgaacagcctgagagccgaggacacggccgtgtattactgtgcgagagatatgattacgtggggccagggaaccctggtcaccgtctcctca

SEQ ID NO: 29552 - protein, 113 aa, synthetic construct
  REGION 1..113: note = Description of Artificial Sequence: Synthetic polypeptide
QVQLVESGGGLVKPGGSLRLSCAASGFIFSDYYMNWIRQAPGKGLEWVSYISSSGSTIYYADSVKGRFTISRDNAKNSLYLQMNSLRAEDTAVYYCARDMITWGQGTLVTVSS

SEQ ID NO: 29553 - DNA, 351 bp, synthetic construct
  misc_feature 1..351: note = Description of Artificial Sequence: Synthetic polynucleotide
  source 1..351: mol_type = other DNA
caggtgcaactggtgcagtctggggctgaggtgaagaagcctggggcctcagtgaaggtctcctgcaaggcttctggatacaccttcaccggctaccatatacactgggtgcgacaggcccctggacaagatcttgagtggatgggatggatcaaccctaacaataatggcacaaactatgcacagaagtttcagggcagggtcaccatgaccagggacacgtccatcagcacagcctacatggagctgagcaggctgagatctgacgacacggccgtgtattactgtgcgagagatgggagaagtggttttgactactggggccagggaaccctggtcaccgtctcctca

SEQ ID NO: 29554 - protein, 117 aa, synthetic construct
  REGION 1..117: note = Description of Artificial Sequence: Synthetic polypeptide
QVQLVQSGAEVKKPGASVKVSCKASGYTFTGYHIHWVRQAPGQDLEWMGWINPNNNGTNYAQKFQGRVTMTRDTSISTAYMELSRLRSDDTAVYYCARDGRSGFDYWGQGTLVTVSS

SEQ ID NO: 29555 - DNA, 363 bp, synthetic construct
  misc_feature 1..363: note = Description of Artificial Sequence: Synthetic polynucleotide
  source 1..363: mol_type = other DNA
gaggtgcagctgttggagtctgggggaggcttggtacagcctggggggtccctgagactctcctgtgcagcctctggattcacctttagcagctatgccatgagctgggtccgccaggctccagggaaggggctggagtgggtctcagctattagtggtagtggtggtaacacattctacgcagactccgtgaagggccggttcaccatctccagagacaattccaagaacacgctgtatttgcaaatgaacagcctgagagccgaggacacggccgtatattactgtgcgaaatttttcggtgtagtgggagtcgggtgctttgactactggggccagggaaccctggtcaccgtctcctca

SEQ ID NO: 29556 - protein, 121 aa, synthetic construct
  REGION 1..121: note = Description of Artificial Sequence: Synthetic polypeptide
EVQLLESGGGLVQPGGSLRLSCAASGFTFSSYAMSWVRQAPGKGLEWVSAISGSGGNTFYADSVKGRFTISRDNSKNTLYLQMNSLRAEDTAVYYCAKFFGVVGVGCFDYWGQGTLVTVSS

SEQ ID NO: 29557 - DNA, 351 bp, synthetic construct
  misc_feature 1..351: note = Description of Artificial Sequence: Synthetic polynucleotide
  source 1..351: mol_type = other DNA
gaggtgcagctgttggagtctgggggaggcttggtacagcctggggggtccctgagactctcctgtgcagcctctggattcacctttagaagctatgccatgagctgggtccgccaggctccagggaaggggctggagtgggtctcagctattagtggtagtggtggtaacacattctacgcagactccgtgaagggccggttcaccatctccagagacaattccaagaacacgctgtatctgcaaatgaacagcctgagagccgaggacacggccgtatattactgtgcgaaattggaactggggatctttgactactggggccagggaaccctggtcaccgtctcctca

SEQ ID NO: 29558 - protein, 117 aa, synthetic construct
  REGION 1..117: note = Description of Artificial Sequence: Synthetic polypeptide
EVQLLESGGGLVQPGGSLRLSCAASGFTFRSYAMSWVRQAPGKGLEWVSAISGSGGNTFYADSVKGRFTISRDNSKNTLYLQMNSLRAEDTAVYYCAKLELGIFDYWGQGTLVTVSS

SEQ ID NO: 29559 - DNA, 363 bp, synthetic construct
  misc_feature 1..363: note = Description of Artificial Sequence: Synthetic polynucleotide
  source 1..363: mol_type = other DNA
gaggtgcagctgttggagtctgggggaggcttggtacagccgggggggtccctgagactctcctgtgtagtctctggattcacctttagcaactatgccatgagctgggtccgccaggctccagggaaggggctggagtgggtctcagctagcagtggtagtggtggtaacacattctacgcagactccgtgacgggccgggtcaccatctccagagacaattccaagaacacgctgtatctgcaaatgaacagtctgagagccgaggacacggccgtatattactgtgcgaaactggggaaggactaccactactacggtatggacgtctggggccaagggaccacggtcaccgtctcctca

SEQ ID NO: 29560 - protein, 121 aa, synthetic construct
  REGION 1..121: note = Description of Artificial Sequence: Synthetic polypeptide
EVQLLESGGGLVQPGGSLRLSCVVSGFTFSNYAMSWVRQAPGKGLEWVSASSGSGGNTFYADSVTGRVTISRDNSKNTLYLQMNSLRAEDTAVYYCAKLGKDYHYYGMDVWGQGTTVTVSS

SEQ ID NO: 29561 - DNA, 354 bp, synthetic construct
  misc_feature 1..354: note = Description of Artificial Sequence: Synthetic polynucleotide
  source 1..354: mol_type = other DNA
caggtgcagctggtgcagtctggggctgaggtgaagaagcctggggcctcagtgaaggtctcctgcaaggcttctggatacaccttcaccaattatgatatcaactgggtgcgacaggccactggacaagggcttgagtggatgggatggatgaaccctaacagtgttaacacaggctatgcacagaagttccagggcagagtcaccatgaccagggacacctccataagcacagcctacatggagctgagcagcctgagatctgaggacacggccgtgtattactgtgcgatcagcagtggctggaactggttcgacccctggggccagggaaccctggtcaccgtctcctca

SEQ ID NO: 29562 - protein, 118 aa, synthetic construct
  REGION 1..118: note = Description of Artificial Sequence: Synthetic polypeptide
QVQLVQSGAEVKKPGASVKVSCKASGYTFTNYDINWVRQATGQGLEWMGWMNPNSVNTGYAQKFQGRVTMTRDTSISTAYMELSSLRSEDTAVYYCAISSGWNWFDPWGQGTLVTVSS

SEQ ID NO: 29563 - DNA, 354 bp, synthetic construct
  misc_feature 1..354: note = Description of Artificial Sequence: Synthetic polynucleotide
  source 1..354: mol_type = other DNA
caggtgcagctggtgcagtctggggctgaggtgaagaagcctggggcctcagtgaaggtctcctgcaaggcttctggatacaccttcaccaattatgatatcaactgggtgcgacaggccactggacaagggcttgagtggatgggatggatgaaccctaacagtggtaacacaggctatgcacagaagttccagggcagagtcaccatgaccaggaacacctccataagcacagcctacatggagctgagcagcctgagatctgaggacacggccgtgtattactgtgcgataagcagtggctggtaccggttcgacccctggggccagggaaccctggtcaccgtctcctca

SEQ ID NO: 29564 - protein, 118 aa, synthetic construct
  REGION 1..118: note = Description of Artificial Sequence: Synthetic polypeptide
QVQLVQSGAEVKKPGASVKVSCKASGYTFTNYDINWVRQATGQGLEWMGWMNPNSGNTGYAQKFQGRVTMTRNTSISTAYMELSSLRSEDTAVYYCAISSGWYRFDPWGQGTLVTVSS

SEQ ID NO: 29565 - DNA, 363 bp, synthetic construct
  misc_feature 1..363: note = Description of Artificial Sequence: Synthetic polynucleotide
  source 1..363: mol_type = other DNA
gaggtgcagctgttggagtctgggggaggcttggtacagccgggggggtccctgagactctcctgtgcagcctctggattaacgtttagtagctacgccatgagctgggtccgccaggatccagggaaggggctggagtgggtctcagctattagtggtagtggtggtaacacattctacggagactccgtgaagggccggttcaccatctccagagacaattccaagaaaacgctgtatctgcaaatgaacagcctgagagccgaggacacggccgtatattactgtgcgaaatttttcggtatagtgggtgccgggtactttgactactggggccagggaaccctggtcaccgtctcctca

SEQ ID NO: 29566 - protein, 121 aa, synthetic construct
  REGION 1..121: note = Description of Artificial Sequence: Synthetic polypeptide
EVQLLESGGGLVQPGGSLRLSCAASGLTFSSYAMSWVRQDPGKGLEWVSAISGSGGNTFYGDSVKGRFTISRDNSKKTLYLQMNSLRAEDTAVYYCAKFFGIVGAGYFDYWGQGTLVTVSS

SEQ ID NO: 29567 - DNA, 363 bp, synthetic construct
  misc_feature 1..363: note = Description of Artificial Sequence: Synthetic polynucleotide
  source 1..363: mol_type = other DNA
gaggtgcagctgttggagtctgggggaggcttggtacagcctggggggtccctgagactctcctgtgcagcctctggattaacgtttagtagctacgccatgagctgggtccgccaggatccagggaaggggctggagtgggtctcagctattagtggtagtggtggtaacacattctacggagactccgtgaagggccggttcaccatctccagagacaattccaagaaaacgctgtatctgcaaatgaacagcctgagagccgaggacacggccgtatattactgtgcgaaatttttcggtatagtgggagccgggttctttgactcctggggccagggaaccctggtcaccgtctcctca

SEQ ID NO: 29568 - protein, 121 aa, synthetic construct
  REGION 1..121: note = Description of Artificial Sequence: Synthetic polypeptide
EVQLLESGGGLVQPGGSLRLSCAASGLTFSSYAMSWVRQDPGKGLEWVSAISGSGGNTFYGDSVKGRFTISRDNSKKTLYLQMNSLRAEDTAVYYCAKFFGIVGAGFFDSWGQGTLVTVSS

SEQ ID NO: 29569 - DNA, 351 bp, synthetic construct
  misc_feature 1..351: note = Description of Artificial Sequence: Synthetic polynucleotide
  source 1..351: mol_type = other DNA
caggtgcagctggtggagtctgggggaggcgtggtccagcctgggaggtccctgagactctcctgtgtagcgtctggattcaccttcagtgactatggcatgcactgggtccgccaggctccaggcaaggggctggagtgggtggcagttatatggtatgctggaagtaataaataccatgtagactccgtgaagggccgattcaccatctccagagacaattccaagaacacgctgtatctgcaaatgaacagcctgagagccgaggacacggctgtgtattactgtgcgagggaactggggatgaggtctgactactggggccagggaaccctggtcaccgtctcctca

SEQ ID NO: 29570 - protein, 117 aa, synthetic construct
  REGION 1..117: note = Description of Artificial Sequence: Synthetic polypeptide
QVQLVESGGGVVQPGRSLRLSCVASGFTFSDYGMHWVRQAPGKGLEWVAVIWYAGSNKYHVDSVKGRFTISRDNSKNTLYLQMNSLRAEDTAVYYCARELGMRSDYWGQGTLVTVSS

SEQ ID NO: 29571 - DNA, 354 bp, synthetic construct
  misc_feature 1..354: note = Description of Artificial Sequence: Synthetic polynucleotide
  source 1..354: mol_type = other DNA
caggtgcagctggtgcagtctggggctgaggtgaagaagcctggggcctcagtgaaggtctcctgcaaggcttctggatacaccttcaccaattatgatatcaactgggtgcgacaggccactggacaagggcttgagtggatgggatggatgaaccctaacagtggtagcacaggctatgcacagaagttccagggcagagtcaccatgaccaggaacacctccataagcacagcctacatggagctgagcagcctgagatctgaggacacggccgtgtattactgtgcgtatagcagtggctggtactactttgactactggggccagggaaccctggtcaccgtctcctca

SEQ ID NO: 29572 - protein, 118 aa, synthetic construct
  REGION 1..118: note = Description of Artificial Sequence: Synthetic polypeptide
QVQLVQSGAEVKKPGASVKVSCKASGYTFTNYDINWVRQATGQGLEWMGWMNPNSGSTGYAQKFQGRVTMTRNTSISTAYMELSSLRSEDTAVYYCAYSSGWYYFDYWGQGTLVTVSS

SEQ ID NO: 29573 - DNA, 363 bp, synthetic construct
  misc_feature 1..363: note = Description of Artificial Sequence: Synthetic polynucleotide
  source 1..363: mol_type = other DNA
gaggtgcagctgttggagtctgggggaggcttggtacagcctggggggtccctgagactctcctgtgcagcctctggattcacctttagaagctatgccatgagctgggtccgccaggctccagggaaggggctggagtgggtctcagctattagtggtagtggtggtaacacattctacgcagactccgtgaagggccggttcaccatctccagagacaattccaagaacacgctgtttcttcaaatgaacagcctgagagccgaggacacggccgtatattactgtgcgaaatttttcggtatagtgggagccgggtactttgactactggggccagggaaccctggtcaccgtctcctca

SEQ ID NO: 29574 - protein, 121 aa, synthetic construct
  REGION 1..121: note = Description of Artificial Sequence: Synthetic polypeptide
EVQLLESGGGLVQPGGSLRLSCAASGFTFRSYAMSWVRQAPGKGLEWVSAISGSGGNTFYADSVKGRFTISRDNSKNTLFLQMNSLRAEDTAVYYCAKFFGIVGAGYFDYWGQGTLVTVSS

SEQ ID NO: 29575 - DNA, 348 bp, synthetic construct
  misc_feature 1..348: note = Description of Artificial Sequence: Synthetic polynucleotide
  source 1..348: mol_type = other DNA
caggtgcagctggtggagtctgggggaggcgtggtccagcctgggaggtccctgagactctcctgtgcagcgtctggattcaccttcagtgactatgacatacactgggtccgccagtctccaggcaaggggctggagtgggtggcagttatatggtatgatggaagtaaaaaatattatgcagactccgtgaagggccgattcaccatctccagagacaattccaagaacacgttgtatctgcaaatgaacagcctgagagccgaggacacggctctgtattactgtgcgagagatcgggtcacttttgactactggggccagggaaccctggtcaccgtctcctca

SEQ ID NO: 29576 - protein, 116 aa, synthetic construct
  REGION 1..116: note = Description of Artificial Sequence: Synthetic polypeptide
QVQLVESGGGVVQPGRSLRLSCAASGFTFSDYDIHWVRQSPGKGLEWVAVIWYDGSKKYYADSVKGRFTISRDNSKNTLYLQMNSLRAEDTALYYCARDRVTFDYWGQGTLVTVSS

SEQ ID NO: 29577 - DNA, 363 bp, synthetic construct
  misc_feature 1..363: note = Description of Artificial Sequence: Synthetic polynucleotide
  source 1..363: mol_type = other DNA
gaggtgcagttgttggagtctgggggaggcttggtacagcctggggggtccctgagactctcctgtgcagcctctggattcacctttagcagctatgccatgagctgggtccgccaggctccagggaaggggctggagtgggtctcagctattagtggtagtggtggtaacacattctacgcagactccgtgaagggccggttcaccatctccagatacaattccaagaacacgctgtatctgcaaatgaacagcctgagagccgaggacacggccgtatattactgtgcgaaatttttcggtatggtgggagccggattctttgactactggggccagggaaccctggtcaccgtctcctca

SEQ ID NO: 29578 - protein, 121 aa, synthetic construct
  REGION 1..121: note = Description of Artificial Sequence: Synthetic polypeptide
EVQLLESGGGLVQPGGSLRLSCAASGFTFSSYAMSWVRQAPGKGLEWVSAISGSGGNTFYADSVKGRFTISRYNSKNTLYLQMNSLRAEDTAVYYCAKFFGMVGAGFFDYWGQGTLVTVSS

SEQ ID NO: 29579 - DNA, 363 bp, synthetic construct
  misc_feature 1..363: note = Description of Artificial Sequence: Synthetic polynucleotide
  source 1..363: mol_type = other DNA
caggtgcagctggtggagtctgggggaggcgtggtccagcctgggaggtccctgagactctcctgtgcagcgtctggattcaccttcagtagctatggcatgcactgggtccgccaggctccaggcaaggggctggagtgggtggcagttatatggtatgatggaagtaataaataccatgcagactccgtgaagggccgattcaccatctccagagacaattccaagaacacgctgtatctgcaaatgaacagcctgagagccgaggacacggctgtgtattactgtgcgaggcggtatagcagcagctgggacgggggtatggacgtctggggccaagggaccacggtcaccgtctcctca

SEQ ID NO: 29580 - protein, 121 aa, synthetic construct
  REGION 1..121: note = Description of Artificial Sequence: Synthetic polypeptide
QVQLVESGGGVVQPGRSLRLSCAASGFTFSSYGMHWVRQAPGKGLEWVAVIWYDGSNKYHADSVKGRFTISRDNSKNTLYLQMNSLRAEDTAVYYCARRYSSSWDGGMDVWGQGTTVTVSS

SEQ ID NO: 29581 - DNA, 354 bp, synthetic construct
  misc_feature 1..354: note = Description of Artificial Sequence: Synthetic polynucleotide
  source 1..354: mol_type = other DNA
caggtgcagctggtgcagtctggggctgaggtgaagaagcctggggcctcagtgaaggtctcctgcaaggcttctggatacaccttcaccaattatgatatcaactgggtgcgacaggccactggacaagggcttgagtggatgggatggatgactcctaacagtggtaacacaggctatgcacagaagttccagggcagagtcaccatgaccaggaccacctccataagcacagcctacatggagctgagcagcctgagatctgaggacacggccgtgtattactgtgcgtttagcagtggctggtacttctttgactactggggccagggaaccctggtcaccgtctcctca

SEQ ID NO: 29582 - protein, 118 aa, synthetic construct
  REGION 1..118: note = Description of Artificial Sequence: Synthetic polypeptide
QVQLVQSGAEVKKPGASVKVSCKASGYTFTNYDINWVRQATGQGLEWMGWMTPNSGNTGYAQKFQGRVTMTRTTSISTAYMELSSLRSEDTAVYYCAFSSGWYFFDYWGQGTLVTVSS

SEQ ID NO: 29583 - DNA, 348 bp, synthetic construct
  misc_feature 1..348: note = Description of Artificial Sequence: Synthetic polynucleotide
  source 1..348: mol_type = other DNA
caggtgcagttggtgcagtctggggctgaggtgaagaagcctggggcctcagtgaaggtctcctgcaaggcttctggatacaccttcgccggctactatatacactgggtgcgacaggcccctggacaaggacttgagtggttgggttggatcaaccctaacagtggtggcacaaactatgcacagaagtttcagggcagggtcaccatgaccagggacacgtccatcagcacagcctacatggagctgagcaggctgagatttgacgacacggccgtgtattactgtgcgagagatccggggccctttgactactggggccagggaaccctggtcaccgtctcctca

SEQ ID NO: 29584 - protein, 116 aa, synthetic construct
  REGION 1..116: note = Description of Artificial Sequence: Synthetic polypeptide
QVQLVQSGAEVKKPGASVKVSCKASGYTFAGYYIHWVRQAPGQGLEWLGWINPNSGGTNYAQKFQGRVTMTRDTSISTAYMELSRLRFDDTAVYYCARDPGPFDYWGQGTLVTVSS

SEQ ID NO: 29585 - DNA, 363 bp, synthetic construct
  misc_feature 1..363: note = Description of Artificial Sequence: Synthetic polynucleotide
  source 1..363: mol_type = other DNA
gaggtgcagctgttggagtctgggggaggcttggtacagcctggggggtccctgagactctcctgtgcagcctctggattcacctttagcagctatgccatgaactgggtccgccaggctccagggaaggggctggagtgggtctcagctattagtggtagtggtggtaacacattctacgcagactccgtgaagggccggttcaccatttccagagacaattccaagaacacgctgtatctgcaaatgaacagcctgagagccgaggacacggccgtatattactgtgcgaaaaggggggtctacggtgactacgaggcttttgatatctggggccaagggacaatggtcaccgtctcttca

SEQ ID NO: 29586 - protein, 121 aa, synthetic construct
  REGION 1..121: note = Description of Artificial Sequence: Synthetic polypeptide
EVQLLESGGGLVQPGGSLRLSCAASGFTFSSYAMNWVRQAPGKGLEWVSAISGSGGNTFYADSVKGRFTISRDNSKNTLYLQMNSLRAEDTAVYYCAKRGVYGDYEAFDIWGQGTMVTVSS

SEQ ID NO: 29587 - DNA, 366 bp, synthetic construct
  misc_feature 1..366: note = Description of Artificial Sequence: Synthetic polynucleotide
  source 1..366: mol_type = other DNA
caggtacaactggtggagtctgggggaggcgtggtccagcctgggaggtccctgagactctcctgtgcagcgtctggattcaccttcagtagctatggcatgcactgggtccgccaggctccaggcaaggggctggagtgggtggcagttatatggtatgatggaagtaataaatactatgcagactccgtgaagggccgattcaccatctccagagacaattccaagaacacgctgtatctgcaaatgaacagcctgagagccgaggacacggctgtgtattactgtgcgagagagaggggtatagcagtggggtactacggtatggacgtctggggccaagggaccacggtcaccgtctcctca

SEQ ID NO: 29588 - protein, 122 aa, synthetic construct
  REGION 1..122: note = Description of Artificial Sequence: Synthetic polypeptide
QVQLVESGGGVVQPGRSLRLSCAASGFTFSSYGMHWVRQAPGKGLEWVAVIWYDGSNKYYADSVKGRFTISRDNSKNTLYLQMNSLRAEDTAVYYCARERGIAVGYYGMDVWGQGTTVTVSS

SEQ ID NO: 29589 - DNA, 357 bp, synthetic construct
  misc_feature 1..357: note = Description of Artificial Sequence: Synthetic polynucleotide
  source 1..357: mol_type = other DNA
cagctgcagctgcaggagtcgggcccaggactggtgaagccttcggagaccctgtccctcacctgcactgtctctggtggctccatcagtagaagtagttactactggggctggatccgccagcccccagggaaggggctggagtggattgggaatatctattatagtgggagcacctactacaacccgtccctcaagagtcgagtcaccatatccgtagacacgtccaagaaccagttctccctgaagctgagctctgtgaccgccgcagacacggctctgtattactgtgcgagacatagcagcagctggtcccttgactactggggccagggaaccctggtcaccgtctcctca

SEQ ID NO: 29590 - protein, 119 aa, synthetic construct
  REGION 1..119: note = Description of Artificial Sequence: Synthetic polypeptide
QLQLQESGPGLVKPSETLSLTCTVSGGSISRSSYYWGWIRQPPGKGLEWIGNIYYSGSTYYNPSLKSRVTISVDTSKNQFSLKLSSVTAADTALYYCARHSSSWSLDYWGQGTLVTVSS

SEQ ID NO: 29591 - DNA, 375 bp, synthetic construct
  misc_feature 1..375: note = Description of Artificial Sequence: Synthetic polynucleotide
  source 1..375: mol_type = other DNA
caggtgcaactagtgcagtctggggctgaggtgaagaagcctggggcctcagtgaaggtctcctgcaaggcttctggatacagtttcaccggccactatatacactgggtgcgacaggcccctggacaagggcttgagtacatgggatggatcaacccgaacagtggtggcacaaactatgtacagaaatttcagggcagggtcaccatgaccagggacacgtccatcagcacagcctacatggagctgagcaggctgagatctgacgacacggccatatattactgttcgagagggggcctactgggagctaccaactactactactacggtatggacgtctggggccaagggaccacggtcaccgtcacctca

SEQ ID NO: 29592 - protein, 125 aa, synthetic construct
  REGION 1..125: note = Description of Artificial Sequence: Synthetic polypeptide
QVQLVQSGAEVKKPGASVKVSCKASGYSFTGHYIHWVRQAPGQGLEYMGWINPNSGGTNYVQKFQGRVTMTRDTSISTAYMELSRLRSDDTAIYYCSRGGLLGATNYYYYGMDVWGQGTTVTVTS

SEQ ID NO: 29593 - DNA, 363 bp, synthetic construct
  misc_feature 1..363: note = Description of Artificial Sequence: Synthetic polynucleotide
  source 1..363: mol_type = other DNA
gaggtgcagctggtggagtctgggggaggcttggtacagcctggggggtccctgagactctcctgtgcagcctctggattcactttcagtagctatagcatgaattgggtccgccaggctccagggaaggggctggggtgggtgtcatacattagtagtagtagtgggaccatatactacgcagactctgtgaagggccgattcaccatctccagagacaatgccaagaactcactgtatctgcaaatgaacagcctgagagacgaggacacggctgtgtattactgtgcgagagaatggggaatggcagtggctggcccgtttgactactggggccagggaaccctggtcaccgtctcctca

SEQ ID NO: 29594 - protein, 121 aa, synthetic construct
  REGION 1..121: note = Description of Artificial Sequence: Synthetic polypeptide
EVQLVESGGGLVQPGGSLRLSCAASGFTFSSYSMNWVRQAPGKGLGWVSYISSSSGTIYYADSVKGRFTISRDNAKNSLYLQMNSLRDEDTAVYYCAREWGMAVAGPFDYWGQGTLVTVSS

SEQ ID NO: 29595 - DNA, 375 bp, synthetic construct
  misc_feature 1..375: note = Description of Artificial Sequence: Synthetic polynucleotide
  source 1..375: mol_type = other DNA
caggtgcagctggtgcagtctgggcctgaggtgaagaagcctggggcctcagtgaaggtctcctgcaaggcttctggatacatcttcaccggcaattatatacactgggtgcgacaggcccctggacaagggcttgagtacatgggatggatcaaccctaacagtggtggcacaaactatgtacagaagtttcagggcagggtcaccatgaccagggacacgtccatcagcacagccaacatggaactgaccagtctgagatctgacgacacggccgtgtattactgttcgagagggggcctactgggagctacctactactactactacggtatggacgtctggggccaagggaccacggtcaccgtctcctca

SEQ ID NO: 29596 - protein, 125 aa, synthetic construct
  REGION 1..125: note = Description of Artificial Sequence: Synthetic polypeptide
QVQLVQSGPEVKKPGASVKVSCKASGYIFTGNYIHWVRQAPGQGLEYMGWINPNSGGTNYVQKFQGRVTMTRDTSISTANMELTSLRSDDTAVYYCSRGGLLGATYYYYYGMDVWGQGTTVTVSS

SEQ ID NO: 29597 - DNA, 354 bp, synthetic construct
  misc_feature 1..354: note = Description of Artificial Sequence: Synthetic polynucleotide
  source 1..354: mol_type = other DNA
caggtgcagctggtgcagtctggggctgaggtgaagaagcctggggcctcagtgaaggtctcctgcaaggcttctggatacaccttcacaaattatgatatcaactgggtgcgacaggccactggacaagggcttgagtggatgggatggatgaaccctaacagtggtaacacaggctatgcacagaagttccagggcagagtcaccatgaccaggaacacctccataagcacagcctacatggagctgagcagcctgagatctgaggacacggccgtgtataactgtgcggttagcagtggctggtactactttgactactggggccagggaaccctggtcaccgtctcctca

SEQ ID NO: 29598 - protein, 118 aa, synthetic construct
  REGION 1..118: note = Description of Artificial Sequence: Synthetic polypeptide
QVQLVQSGAEVKKPGASVKVSCKASGYTFTNYDINWVRQATGQGLEWMGWMNPNSGNTGYAQKFQGRVTMTRNTSISTAYMELSSLRSEDTAVYNCAVSSGWYYFDYWGQGTLVTVSS

SEQ ID NO: 29599 - DNA, 357 bp, synthetic construct
  misc_feature 1..357: note = Description of Artificial Sequence: Synthetic polynucleotide
  source 1..357: mol_type = other DNA
caggtgcagctggtggaatctgggggaggcgtggtccagcctgggaggtccctgagactctcctgtgcagcgtctggattcaccttcagcacctatggcatgcactgggtccgccaggctccaggcaaggggctggagtgggtggcagttatatggcatgatggaagtgataaatattatgtagactccgtgaagggccgattcaccatctccagagacaattccaagaacacgctgtatctgcaaatgaacagcctgagagccgaggacacggctgtgtattactgtgcgagagaagacccgcgtaccagctgctctgactactggggccagggaaccctggtcaccgtctcctca

SEQ ID NO: 29600 - protein, 119 aa, synthetic construct
  REGION 1..119: note = Description of Artificial Sequence: Synthetic polypeptide
QVQLVESGGGVVQPGRSLRLSCAASGFTFSTYGMHWVRQAPGKGLEWVAVIWHDGSDKYYVDSVKGRFTISRDNSKNTLYLQMNSLRAEDTAVYYCAREDPRTSCSDYWGQGTLVTVSS

SEQ ID NO: 29601 - DNA, 363 bp, synthetic construct
  misc_feature 1..363: note = Description of Artificial Sequence: Synthetic polynucleotide
  source 1..363: mol_type = other DNA
caggtgcagctggtggagtctgggggaggcgtggtccagcctgggaggtccctgagactctcctgtgcagcgtctggattcaccttcagtagctatggcatgcactgggtccgccaggctccaggcaaggggctagaatgggtgacagttatatggtatgatggaagtaataaatactatgcagactccgtgaagggccgattcaccatctccagagacaattccaagaacacgctgtatctgcaaatgaacagcctgagagccgaggacacggctgtgtattactgtgcgagagatagcctctcgggtatagcagcagcttttgactactggggccagggaaccctggtcaccgtctcctca

SEQ ID NO: 29602 - protein, 121 aa, synthetic construct
  REGION 1..121: note = Description of Artificial Sequence: Synthetic polypeptide
QVQLVESGGGVVQPGRSLRLSCAASGFTFSSYGMHWVRQAPGKGLEWVTVIWYDGSNKYYADSVKGRFTISRDNSKNTLYLQMNSLRAEDTAVYYCARDSLSGIAAAFDYWGQGTLVTVSS

SEQ ID NO: 29603 - DNA, 345 bp, synthetic construct
  misc_feature 1..345: note = Description of Artificial Sequence: Synthetic polynucleotide
  source 1..345: mol_type = other DNA
gaggtgcagctggtggagtctgggggaggcctggtcaagcctggggggtccctgagactctcctgtgcagcctctggattcaccttcagtagctataacatgaactgggtccgccaggctccagggaaggggctggagtgggtctcatccattagtggtagtagcacttacatgaactacacagactcagtgaagggccgattcaccatctccagagacaacgccaagaactcactgtatctgcaaatgaacagcctgagagccgaggacacggctgtgtattactgtgcgagactacgtaattttgactactggggccagggaaccctggtcaccgtctcctca

SEQ ID NO: 29604 - protein, 115 aa, synthetic construct
  REGION 1..115: note = Description of Artificial Sequence: Synthetic polypeptide
EVQLVESGGGLVKPGGSLRLSCAASGFTFSSYNMNWVRQAPGKGLEWVSSISGSSTYMNYTDSVKGRFTISRDNAKNSLYLQMNSLRAEDTAVYYCARLRNFDYWGQGTLVTVSS

SEQ ID NO: 29605 - DNA, 372 bp, synthetic construct
  misc_feature 1..372: note = Description of Artificial Sequence: Synthetic polynucleotide
  source 1..372: mol_type = other DNA
caggtgcagctggtgcagtctggggctgaggtgaagaagcctggggcctcagtgaaggtctcctgcaaggcttctggatacaccttcaccggctactatatgcactgggtgcgacaggcccctggacaagggcttgagtggatgggatggatcaaccctaacagtggtggcacaaactttgcacagaagtttcagggcagggtcaccatgaccagggacgcgtccatcaacacagcctacatggagctgcgcagcctgatatctgacgacacggccgtatattactgtgcgagagctccgggtgtagcagcagctggttcatggggatactttgactactggggccagggaaccctggtcaccgtctcctca

SEQ ID NO: 29606 - protein, 124 aa, synthetic construct
  REGION 1..124: note = Description of Artificial Sequence: Synthetic polypeptide
QVQLVQSGAEVKKPGASVKVSCKASGYTFTGYYMHWVRQAPGQGLEWMGWINPNSGGTNFAQKFQGRVTMTRDASINTAYMELRSLISDDTAVYYCARAPGVAAAGSWGYFDYWGQGTLVTVSS

SEQ ID NO: 29607 - DNA, 357 bp, synthetic construct
  misc_feature 1..357: note = Description of Artificial Sequence: Synthetic polynucleotide
  source 1..357: mol_type = other DNA
caggtgcagctggtggagtctgggggaggcgtggtccagcctgggaggtccctgagactctcctgtgcagcgtctggattcaccttcagtagctatggcatgcactgggtccgccaggctccaggcaaggggctggactgggtggcagtcatatggtatgatggaagtaataaatactatgcagactccgtgaagggccgattcaccatctccagagacaattccaagaacacgctgtatctgcaaatgaacagcctgagagccgaggacacggctgtgtattactgtgcgagagatgatcccagatcctcggccggggactactggggccagggaaccctggtcaccgtctcctca

SEQ ID NO: 29608 - protein, 119 aa, synthetic construct
  REGION 1..119: note = Description of Artificial Sequence: Synthetic polypeptide
QVQLVESGGGVVQPGRSLRLSCAASGFTFSSYGMHWVRQAPGKGLDWVAVIWYDGSNKYYADSVKGRFTISRDNSKNTLYLQMNSLRAEDTAVYYCARDDPRSSAGDYWGQGTLVTVSS

SEQ ID NO: 29609 - DNA, 351 bp, synthetic construct
  misc_feature 1..351: note = Description of Artificial Sequence: Synthetic polynucleotide
  source 1..351: mol_type = other DNA
caggtgcagctggtggagtctgggggaggcgtggtccagcctgggaggtccctgagactctcctgtgtagcgtctggattcaccttcagtagctatggcatgcactgggtccgccaggctccaggcaaggggctggagtgggtggcagttatatggtttgatgaaactaataaatactatggagactccgtgaagggccgattcaccatctccagagacaattccaagaacacgctgtatctgcaaatgaacagcctgagagccgaggacacggctgtgtattactgtgcgagagagcttgggttcagcagtgactattggggccagggaaccctggtcaccgtctcctca

SEQ ID NO: 29610 - protein, 117 aa, synthetic construct
  REGION 1..117: note = Description of Artificial Sequence: Synthetic polypeptide
QVQLVESGGGVVQPGRSLRLSCVASGFTFSSYGMHWVRQAPGKGLEWVAVIWFDETNKYYGDSVKGRFTISRDNSKNTLYLQMNSLRAEDTAVYYCARELGFSSDYWGQGTLVTVSS

SEQ ID NO: 29611 - DNA, 369 bp, synthetic construct
  misc_feature 1..369: note = Description of Artificial Sequence: Synthetic polynucleotide
  source 1..369: mol_type = other DNA
caggtgcagctggtggagtctgggggaggcgtggtccagcctgggaggtccctgagactctcctgtgcagcgtctggattcaccttcagcgattatgtcatgcactgggtccgccaggctccaggcaaggggctggagtgggtggcagtcatatggtatgatggaagtaataaatactatgcagactccgtgaagggccgattcaccatctccagagacaattcccagaacacgctgtatctgcaaatgaatagcctgagagccgaggacacggctgtgtattactgtgcgagagaaaggtatagcagcagctggtacgactacggtatggacgtctggggccaagggaccacggtcaccgtctcctca

SEQ ID NO: 29612 - protein, 123 aa, synthetic construct
  REGION 1..123: note = Description of Artificial Sequence: Synthetic polypeptide
QVQLVESGGGVVQPGRSLRLSCAASGFTFSDYVMHWVRQAPGKGLEWVAVIWYDGSNKYYADSVKGRFTISRDNSQNTLYLQMNSLRAEDTAVYYCARERYSSSWYDYGMDVWGQGTTVTVSS

SEQ ID NO: 29613 - DNA, 348 bp, synthetic construct
  misc_feature 1..348: note = Description of Artificial Sequence: Synthetic polynucleotide
  source 1..348: mol_type = other DNA
caggtgcagctgcaggagtcgggcccaggactggtgaagccttcggagaccctgtccctcacctgcactgtctctggtggctccatcagtagttacttctggagctggatccggcagcccgccgggaagggactggagtggattgggcgtatctataccagtgggatctccaactacaatccctccctcaagagtcgagtcaccatgtcagttgacacgtccaagaaccagttctccctgaagctgagctctgtgaccgccgcggacacggccgtgtattactgtgcgaggtttagcagtggcttttttgactactggggccagggtaccctggtcaccgtctcctca

SEQ ID NO: 29614 - protein, 116 aa, synthetic construct
  REGION 1..116: note = Description of Artificial Sequence: Synthetic polypeptide
QVQLQESGPGLVKPSETLSLTCTVSGGSISSYFWSWIRQPAGKGLEWIGRIYTSGISNYNPSLKSRVTMSVDTSKNQFSLKLSSVTAADTAVYYCARFSSGFFDYWGQGTLVTVSS

SEQ ID NO: 29615 - DNA, 369 bp, synthetic construct
  misc_feature 1..369: note = Description of Artificial Sequence: Synthetic polynucleotide
  source 1..369: mol_type = other DNA
caggtgcagctggtggagtctgggggaggcgtggtccagcctgggaggtccctgagactctcctgtgcagcgtctggattcaccttcagtgactatgtcatgcactgggtccgccaggctccaggcaaggggctggagtgggtggcagttatatggtatgatggaagtaataaatactatgcagactccatgaagggccgattcaccatctccagagacaattccaagaacacgctgtatctgcaaatgaacagcctgagagccgaggacacggctgtgtattactgtgcgagagaacggtatagcagtggctggtacgactacggtatggacgtctggggccaagggaccacggtcaccgtctcctca

SEQ ID NO: 29616 - protein, 123 aa, synthetic construct
  REGION 1..123: note = Description of Artificial Sequence: Synthetic polypeptide
QVQLVESGGGVVQPGRSLRLSCAASGFTFSDYVMHWVRQAPGKGLEWVAVIWYDGSNKYYADSMKGRFTISRDNSKNTLYLQMNSLRAEDTAVYYCARERYSSGWYDYGMDVWGQGTTVTVSS

SEQ ID NO: 29617 - DNA, 363 bp, synthetic construct
  misc_feature 1..363: note = Description of Artificial Sequence: Synthetic polynucleotide
  source 1..363: mol_type = other DNA
caggtgcagctggtggagtctgggggaggcgtggtccagcctgggaggtccctgagactctcctgtgcagcgtctggattcaccttcagtacctatggcatgcactgggtccgccaggctccaggcaaggggctggagtgggtggcaattatatggtatgatggaagtaataaatactatgcagactccgtgaagggccgattcaccatctccagagacaattccaagaacacgctatatctacaaatgaacagcctgagagccgaggacacggctgtgtattactgtgcgagagatacatacgatttttggagtggttatttgggctactggggccagggaaccctggtcaccgtctcctca

SEQ ID NO: 29618 - protein, 121 aa, synthetic construct
  REGION 1..121: note = Description of Artificial Sequence: Synthetic polypeptide
QVQLVESGGGVVQPGRSLRLSCAASGFTFSTYGMHWVRQAPGKGLEWVAIIWYDGSNKYYADSVKGRFTISRDNSKNTLYLQMNSLRAEDTAVYYCARDTYDFWSGYLGYWGQGTLVTVSS

SEQ ID NO: 29619 - DNA, 372 bp, synthetic construct
  misc_feature 1..372: note = Description of Artificial Sequence: Synthetic polynucleotide
  source 1..372: mol_type = other DNA
caggtgcagctggtgcagtctggggctgaggtgaagaagcctggggcctcagtgaaggtctcctgcaaggcttctggatacaccttcaccggctactatatgcactgggtgcgacaggcccctggacaagggcttgagtggatgggatggatcaaaccaaacagtggtggcacaaaccaagcacagaagtttcagggcagggtcaccatgaccagggacacgtccatcagcacagcctacatggagctgagcgggctgagatctgacgacacggccgtgtattactgtgcgagagctccgggtactgcagcaactggtacatggggatactttgactactggggccagggaaccctggtcaccgtctcctca

SEQ ID NO: 29620 - protein, 124 aa, synthetic construct
  REGION 1..124: note = Description of Artificial Sequence: Synthetic polypeptide
QVQLVQSGAEVKKPGASVKVSCKASGYTFTGYYMHWVRQAPGQGLEWMGWIKPNSGGTNQAQKFQGRVTMTRDTSISTAYMELSGLRSDDTAVYYCARAPGTAATGTWGYFDYWGQGTLVTVSS

SEQ ID NO: 29621 - DNA, 351 bp, synthetic construct
  misc_feature 1..351: note = Description of Artificial Sequence: Synthetic polynucleotide
  source 1..351: mol_type = other DNA
caggtgcagctggtggagtctgggggaggcgtggtccagcctgggaggtccctgagactctcctgtgcagcgtctggattcaccttcagtagctatggcatgcactgggtccgccaggctccaggcaaggggctggagtgggtggcagttatatggtatgatgaaagtaataaatactatgtagactccgtgaagggccgattcaccatctccagagacaattccaagaacacgctgtatctgcaaatgaacagcctgagagccgaggacacggctgtgtattactgtgcgagggaactcgggttcctctctgaccactggggccagggaaccctggtcaccgtctcctca

SEQ ID NO: 29622 - protein, 117 aa, synthetic construct
  REGION 1..117: note = Description of Artificial Sequence: Synthetic polypeptide
QVQLVESGGGVVQPGRSLRLSCAASGFTFSSYGMHWVRQAPGKGLEWVAVIWYDESNKYYVDSVKGRFTISRDNSKNTLYLQMNSLRAEDTAVYYCARELGFLSDHWGQGTLVTVSS

SEQ ID NO: 29623 - DNA, 357 bp, synthetic construct
  misc_feature 1..357: note = Description of Artificial Sequence: Synthetic polynucleotide
  source 1..357: mol_type = other DNA
cagctgcagctgcaggagtcgggcccaggactggtgaagccttcggagaccctgtccctcacctgcactgtctctggtgtctccatcagcagaagtagttactactggggctggatccgccagcccccagggaaggggctggagtggattgggagtatctattacagtgggagcacctcctacaacccgtccctcaagagtcgagtcaccatatccgtagacacgtccaagaaccagttctccctgaagctgagctctgtgaccgccgcagacacggctgtgtattattgtgcgagactggacagtggctggtcctttgactactggggccagggaaccctggtcaccgtctcctca

SEQ ID NO: 29624 - protein, 119 aa, synthetic construct
  REGION 1..119: note = Description of Artificial Sequence: Synthetic polypeptide
QLQLQESGPGLVKPSETLSLTCTVSGVSISRSSYYWGWIRQPPGKGLEWIGSIYYSGSTSYNPSLKSRVTISVDTSKNQFSLKLSSVTAADTAVYYCARLDSGWSFDYWGQGTLVTVSS

SEQ ID NO: 29625 - DNA, 354 bp, synthetic construct
  misc_feature 1..354: note = Description of Artificial Sequence: Synthetic polynucleotide
  source 1..354: mol_type = other DNA
gaggtgcagctgttggagtctgggggaggcttggtacagcctggggggtccctgagactctcctgtgcagcctctggattcacctttagcagtaatgccatgagctgggtccgccaggctccagggaaggggctggagtgggtctcagttattagtggtagtggtggtagcacatactacgcagactccgtgaagggccggttcaccatctccagagacaattccaagaacacgctgtatctgcaaatgaacagcctgagagccgaggacacggccttatattactgtgcgaaaaggaactacgacgatgcttttgatatctggggccaagggacaatggtcaccgtctcttca

SEQ ID NO: 29626 - protein, 118 aa, synthetic construct
  REGION 1..118: note = Description of Artificial Sequence: Synthetic polypeptide
EVQLLESGGGLVQPGGSLRLSCAASGFTFSSNAMSWVRQAPGKGLEWVSVISGSGGSTYYADSVKGRFTISRDNSKNTLYLQMNSLRAEDTALYYCAKRNYDDAFDIWGQGTMVTVSS

SEQ ID NO: 29627 - DNA, 351 bp, synthetic construct
  misc_feature 1..351: note = Description of Artificial Sequence: Synthetic polynucleotide
  source 1..351: mol_type = other DNA
caggtgcagctggtggagtctgggggaggcgtggtccagcctgggaggtccctgagactctcctgtgcagcgtctggattcaccttcagtgactatggcatgcactgggtccgccaggctccaggcaaggggctggagtgggtggcagtgatatggtttgagggaagtaataaacactatacagactccgtgaagggccgattcaccatctccagagacaattccaagaacacgctgtatctgcaaatgaacagcctgagagccgaggacacggctgtgtattactgtgcgagagaacttgggttcagcagtgactactggggccagggaaccctggtcaccgtctcctca

SEQ ID NO: 29628 - protein, 117 aa, synthetic construct
  REGION 1..117: note = Description of Artificial Sequence: Synthetic polypeptide
QVQLVESGGGVVQPGRSLRLSCAASGFTFSDYGMHWVRQAPGKGLEWVAVIWFEGSNKHYTDSVKGRFTISRDNSKNTLYLQMNSLRAEDTAVYYCARELGFSSDYWGQGTLVTVSS

SEQ ID NO: 29629 - DNA, 372 bp, synthetic construct
  misc_feature 1..372: note = Description of Artificial Sequence: Synthetic polynucleotide
  source 1..372: mol_type = other DNA
caggtgcaactggtgcagtctggggctgaggtgaagaagcctggggcctcagtgaaggtctcctgcaaggcttctggatacaccttcaccggctactatatacactgggtgcgacaggcccctggacaagggcttgagtggatgggatggatcaaccctaacagtggtggcacaaactctgcacagaagtttcagggcagggtcaccatgaccagggacacgtccatcagcacagcctacatggagctgagcaggctgagatctgacgacacggccgtatattactgtgcgagagctccgggtaaagcagcagctggtacatggggatactttgactactggggccagggaaccctggtcaccgtctcctca

SEQ ID NO: 29630 - protein, 124 aa, synthetic construct
  REGION 1..124: note = Description of Artificial Sequence: Synthetic polypeptide
QVQLVQSGAEVKKPGASVKVSCKASGYTFTGYYIHWVRQAPGQGLEWMGWINPNSGGTNSAQKFQGRVTMTRDTSISTAYMELSRLRSDDTAVYYCARAPGKAAAGTWGYFDYWGQGTLVTVSS

SEQ ID NO: 29631 - DNA, 354 bp, synthetic construct
  misc_feature 1..354: note = Description of Artificial Sequence: Synthetic polynucleotide
  source 1..354: mol_type = other DNA
caggttcagctggtgcagtctggagctgaggtgaagaagcctggggcctcagtgaaggtctcctgcaaggcttctggttacacctttcccagctatggtatcagttgggtgcgacaggcccctggacaaggacttgagtggatgggatggatcagcgcttacagtggtaacacaaactatgcacagaagctccagggcagagtcaccatgaccacagacacatccacgagcacagcctacatggagctgaggagcctgagatctgacgacacggccgtgtatttctgtgcgagaggggaagcagtggctgtcttcgacccctggggccagggaaccctggtcaccgtctcctca

SEQ ID NO: 29632 - protein, 118 aa, synthetic construct
  REGION 1..118: note = Description of Artificial Sequence: Synthetic polypeptide
QVQLVQSGAEVKKPGASVKVSCKASGYTFPSYGISWVRQAPGQGLEWMGWISAYSGNTNYAQKLQGRVTMTTDTSTSTAYMELRSLRSDDTAVYFCARGEAVAVFDPWGQGTLVTVSS

SEQ ID NO: 29633 - DNA, 363 bp, synthetic construct
  misc_feature 1..363: note = Description of Artificial Sequence: Synthetic polynucleotide
  source 1..363: mol_type = other DNA
caggtgcagctggtggagtctgggggaggcgtggtccagcctgggaggtccctgagactctcctgtgcagcgtctggattcaccttcagtaactatggcatgcactgggtccgccaggctccaggcaaggggctggagtgggtggcagttatatggtatgatggaagtaataaatactatggagactccgtgaagggccgattcaccatctccagagacaattccaagaacacgctgtatctgcaaatgaacagcctgagagccgaggacacggctgtgtattactgtgcgagagatcagggcatagtgggagctacttggtttgactactggggccagggaaccctggtcaccgtctcctca

SEQ ID NO: 29634 - protein, 121 aa, synthetic construct
  REGION 1..121: note = Description of Artificial Sequence: Synthetic polypeptide
QVQLVESGGGVVQPGRSLRLSCAASGFTFSNYGMHWVRQAPGKGLEWVAVIWYDGSNKYYGDSVKGRFTISRDNSKNTLYLQMNSLRAEDTAVYYCARDQGIVGATWFDYWGQGTLVTVSS

SEQ ID NO: 29635 - DNA, 339 bp, synthetic construct
  misc_feature 1..339: note = Description of Artificial Sequence: Synthetic polynucleotide
  source 1..339: mol_type = other DNA
gaggtgcagctggtggagtctgggggaggcctggtcaagccgggggggtccctgagactctcctgtgcagcctctggattcaccttcagtagctataggatgaactgggtccgccaggctccagggaaggggctggagtgggtctcatccattagtagtagtaatagttccatatactacgcagactcagtgaagggccgattcaccacctccagagacaacgccaagaactcactgtatctgcaaatgaacagcctgagagccgaggacacggctgtgtattactgtacgagtacaagtgggagctggggccagggaaccctggtcaccgtctcctca

SEQ ID NO: 29636 - protein, 113 aa, synthetic construct
  REGION 1..113: note = Description of Artificial Sequence: Synthetic polypeptide
EVQLVESGGGLVKPGGSLRLSCAASGFTFSSYRMNWVRQAPGKGLEWVSSISSSNSSIYYADSVKGRFTTSRDNAKNSLYLQMNSLRAEDTAVYYCTSTSGSWGQGTLVTVSS

SEQ ID NO: 29637 - DNA, 372 bp, synthetic construct
  misc_feature 1..372: note = Description of Artificial Sequence: Synthetic polynucleotide
  source 1..372: mol_type = other DNA
caggtgcagctggtgcagtctggggctgaggtgaagaagcctggggcctcagtgaaggtctcctgcaaggcttctggatacaccttcaccggctactatatgcactgggtgcgacaggcccctggacaagggcttgagtggatgggatggatcaaccctaacagtggtggcacaaacaatgcacagaagtttcagggcagggtcaccatgaccagggccacgtccatcagcacagcctacatggaactgagcaggctgagatctgacgacacggccgtgtattattgtgcgagagctccgggtacagcagcagctggtacatggggatactttgactactggggccagggaaccctggtcaccgtctcctca

SEQ ID NO: 29638 - protein, 124 aa, synthetic construct
  REGION 1..124: note = Description of Artificial Sequence: Synthetic polypeptide
QVQLVQSGAEVKKPGASVKVSCKASGYTFTGYYMHWVRQAPGQGLEWMGWINPNSGGTNNAQKFQGRVTMTRATSISTAYMELSRLRSDDTAVYYCARAPGTAAAGTWGYFDYWGQGTLVTVSS

SEQ ID NO: 29639 - DNA, 372 bp, synthetic construct
  misc_feature 1..372: note = Description of Artificial Sequence: Synthetic polynucleotide
  source 1..372: mol_type = other DNA
caggtgcagctggtgcagtctggggctgaggtgaagaagcctggggcctcagtgaaggtctcctgcaaggcttctggatacaccttcaccggctactatatgcactgggtgcgacaggcccctggacaagggcttgagtggatgggatggatcaaaccaaacagtggtggcacaaaccaagcacagaagttccagggcagggtcaccatgaccagggacacgtccatcagcacaggttacatggagctgagcaggctgagatctgacgacacggccgtgtattactgtgcgagagctccgggcacagtagcagctggtacatggggatactttgactattggggccagggaaccctggtcaccgtctcctca

SEQ ID NO: 29640 - protein, 124 aa, synthetic construct
  REGION 1..124: note = Description of Artificial Sequence: Synthetic polypeptide
QVQLVQSGAEVKKPGASVKVSCKASGYTFTGYYMHWVRQAPGQGLEWMGWIKPNSGGTNQAQKFQGRVTMTRDTSISTGYMELSRLRSDDTAVYYCARAPGTVAAGTWGYFDYWGQGTLVTVSS

SEQ ID NO: 29641 - DNA, 351 bp, synthetic construct
  misc_feature 1..351: note = Description of Artificial Sequence: Synthetic polynucleotide
  source 1..351: mol_type = other DNA
caggtgcagctggtggagtctgggggaggcgtggtccagcctgggaggtccctgagactctcctgtgtagcgtctggattcaccttcagtgactatggcatgcactgggtccgccaggctccaggcaaggggctggagtgggtggcagttatatggtttgagggaagtcataaatactatacagactccgtgaagggccgattcaccatctccagagacaattccaagaacacgctgtatctgcaaatgaacagcctgagagccgaggacacggctgtgtattactgtgcgagagaacttgggttcagcagtgactactggggccagggaaccctggtcaccgtctcctca

SEQ ID NO: 29642 - protein, 117 aa, synthetic construct
  REGION 1..117: note = Description of Artificial Sequence: Synthetic polypeptide
QVQLVESGGGVVQPGRSLRLSCVASGFTFSDYGMHWVRQAPGKGLEWVAVIWFEGSHKYYTDSVKGRFTISRDNSKNTLYLQMNSLRAEDTAVYYCARELGFSSDYWGQGTLVTVSS

SEQ ID NO: 29643 - DNA, 357 bp, synthetic construct
  misc_feature 1..357: note = Description of Artificial Sequence: Synthetic polynucleotide
  source 1..357: mol_type = other DNA
caggtgcagctggtggagtctgggggaggcgtggtccagcctgggaggtccctgagactctcctgtgcagcgtctggattcaccttcagtagctatggcatgcactgggtccgccaggctccaggcaaggggctggagtgggtggcagttatatggcatgatggaagtgataaatactatgcagactccgtgaagggccgattcaccatctccagagacaattccaagaacacgctgtatctgcaaatgaacagcctgagagccgaggacacggctgtgtattactgtgcgagagaagacccgcgtaccagttgttctgactactggggccagggaaccctggtcaccgtctcctca

SEQ ID NO: 29644 - protein, 119 aa, synthetic construct
  REGION 1..119: note = Description of Artificial Sequence: Synthetic polypeptide
QVQLVESGGGVVQPGRSLRLSCAASGFTFSSYGMHWVRQAPGKGLEWVAVIWHDGSDKYYADSVKGRFTISRDNSKNTLYLQMNSLRAEDTAVYYCAREDPRTSCSDYWGQGTLVTVSS

SEQ ID NO: 29645 - DNA, 345 bp, synthetic construct
  misc_feature 1..345: note = Description of Artificial Sequence: Synthetic polynucleotide
  source 1..345: mol_type = other DNA
gaggtgcagctggtggagtctgggggaggcctggtcaagcctggggggtccctgagactctcctgtgcagcctctggattcaccttcagtagctatagcatgaactgggtccgccaggctccagggaagggactggagtgggtctcatccattagtggtactagtagttacatatactacgcagactcagtgaagggccgattcaccatctccagagacaacgccaagaactcactgtatctgcaaatgaacggcctgagagccgaggacacggctgtgtatttctgtgcgagaaccaatgcttttgatatctggggccaggggacaatggtcaccgtctcttca

SEQ ID NO: 29646 - protein, 115 aa, synthetic construct
  REGION 1..115: note = Description of Artificial Sequence: Synthetic polypeptide
EVQLVESGGGLVKPGGSLRLSCAASGFTFSSYSMNWVRQAPGKGLEWVSSISGTSSYIYYADSVKGRFTISRDNAKNSLYLQMNGLRAEDTAVYFCARTNAFDIWGQGTMVTVSS

SEQ ID NO: 29647 - DNA, 360 bp, synthetic construct
  misc_feature 1..360: note = Description of Artificial Sequence: Synthetic polynucleotide
  source 1..360: mol_type = other DNA
gaggtgcagctgttggagtctgggggaggcttggtacagcctggggggtccctgagactctcctgtgcagcctctggattcacctttagcagctatgttatgagctgggtccgccaggctccagggaaggggctggagtgggtctcaggtattagtggtagtggtgctagaacatactacgcagactccgtgaagggccgattcaccatctccagagacaattccaagaacacgctgtatctgcaaatgaacagcctgagagccgaggacacggccgtatattactgtgcggaactggggatagactactactacggtatggacgtctggggccaagggaccacggtcaccgtctcctca

SEQ ID NO: 29648 - protein, 120 aa, synthetic construct
  REGION 1..120: note = Description of Artificial Sequence: Synthetic polypeptide
EVQLLESGGGLVQPGGSLRLSCAASGFTFSSYVMSWVRQAPGKGLEWVSGISGSGARTYYADSVKGRFTISRDNSKNTLYLQMNSLRAEDTAVYYCAELGIDYYYGMDVWGQGTTVTVSS

SEQ ID NO: 29649 - DNA, 369 bp, synthetic construct
  misc_feature 1..369: note = Description of Artificial Sequence: Synthetic polynucleotide
  source 1..369: mol_type = other DNA
caggtgcagctggtggagtctgggggaggcgtggtccagcctgggaggtccctgagactctcctgtggagcgtctggattcaccttcagtagttatggcatgcactgggtccgccaggctccaggcaaggggctggagtgggtggcagttatatggtatgatggaagtaataaatactatgcagactccgtgaagggccgattcaccatctccagagacaattccaagaacacgctgtctctgcaaatgaacagcctgagagccgaggacacggctctgtattactgtgcgagagagatgtatagcagcaactggtacgactacggtttggacgtctggggccaagggaccacggtcaccgtctcctca

SEQ ID NO: 29650 - protein, 123 aa, synthetic construct
  REGION 1..123: note = Description of Artificial Sequence: Synthetic polypeptide
QVQLVESGGGVVQPGRSLRLSCGASGFTFSSYGMHWVRQAPGKGLEWVAVIWYDGSNKYYADSVKGRFTISRDNSKNTLSLQMNSLRAEDTALYYCAREMYSSNWYDYGLDVWGQGTTVTVSS

SEQ ID NO: 29651 - DNA, 351 bp, synthetic construct
  misc_feature 1..351: note = Description of Artificial Sequence: Synthetic polynucleotide
  source 1..351: mol_type = other DNA
caggtgcagctggtgcagtctggggctgaggtgaagaagcctggggcctcagtgaaggtctcctgcaaggcttctggatacaccttcaccggctaccatatgcactgggtccgacaggcccctggacaagggcttgagtggatgggatggatcaaccctaacaatggtggcacacactatgcacagaagtttcaggactgggtcaccatgaccagggacacgtccatcagcacagcctatatggaactgagcaggctgagatctgacgacacggccgtgtattactgtgcgagagatagtagaagttcgtgggactactggggccagggaaccctggtctccgtctcctca

SEQ ID NO: 29652 - protein, 117 aa, synthetic construct
  REGION 1..117: note = Description of Artificial Sequence: Synthetic polypeptide
QVQLVQSGAEVKKPGASVKVSCKASGYTFTGYHMHWVRQAPGQGLEWMGWINPNNGGTHYAQKFQDWVTMTRDTSISTAYMELSRLRSDDTAVYYCARDSRSSWDYWGQGTLVSVSS

SEQ ID NO: 29653 - DNA, 363 bp, synthetic construct
  misc_feature 1..363: note = Description of Artificial Sequence: Synthetic polynucleotide
  source 1..363: mol_type = other DNA
caggtgcagctggtggagtcggggggaggcgtggtccagcctgggaggtccctgagactctcctgtgcagcgtctggattcaccttcagtagttatggcatgcactgggtccgccaggctccaggcaaggggctggagtgggtggcagctatatggtatgatggaagtaataaatattatggagactccgtgaagggccgagtcaccatctccagagacaattccaagaactcgctgcatctgcaaatgaacagcctgagagccgaggacacggctgtgtattactgtgcgagagatcagggcatagtgggagctacttggtttgactactggggccagggaaccctggtcaccgtctcctca

SEQ ID NO: 29654 - protein, 121 aa, synthetic construct; identical to SEQ ID NO: 29532
  REGION 1..121: note = Description of Artificial Sequence: Synthetic polypeptide

SEQ ID NO: 29655 - DNA, 372 bp, synthetic construct; identical to SEQ ID NO: 29619
  misc_feature 1..372: note = Description of Artificial Sequence: Synthetic polynucleotide
  source 1..372: mol_type = other DNA

SEQ ID NO: 29656 - protein, 124 aa, synthetic construct; identical to SEQ ID NO: 29620
  REGION 1..124: note = Description of Artificial Sequence: Synthetic polypeptide

SEQ ID NO: 29657 - DNA, 348 bp, synthetic construct
  misc_feature 1..348: note = Description of Artificial Sequence: Synthetic polynucleotide
  source 1..348: mol_type = other DNA
caggtgcagctggtggagtctgggggaggcgtggtccagcctgggaggtccctgagactctcctgtgcagcctctggattcaccttcagtaactatggcatgcactgggtccgccaggctccaggcaaggggctggaatgggtggcagttatattatatgatggaagtaagaaatactatgcagactccgtgaagggccgattcaccatctccagagacaattccaagaacacgctttatctgcaaatgaacagcctgagagctgaggacacggctgtgtattactgtgcgaggagtatcccggaatttgactattggggccagggaaccctggtcaccgtctcctca

SEQ ID NO: 29658 - protein, 116 aa, synthetic construct
  REGION 1..116: note = Description of Artificial Sequence: Synthetic polypeptide
QVQLVESGGGVVQPGRSLRLSCAASGFTFSNYGMHWVRQAPGKGLEWVAVILYDGSKKYYADSVKGRFTISRDNSKNTLYLQMNSLRAEDTAVYYCARSIPEFDYWGQGTLVTVSS

SEQ ID NO: 29659 - DNA, 351 bp, synthetic construct
  misc_feature 1..351: note = Description of Artificial Sequence: Synthetic polynucleotide
  source 1..351: mol_type = other DNA
gaggtgcagctggtggagtctgggggaggcctggtcaagccgggggggtccctgagactctcctgtgcagcctctggattcaccttaagtagctttggcatgaactgggtccgccaggctccagggaaggggctggagtgggtctcatacattagtagaagtagtagtcacatatactacgcagactcagtgaagggccgattcaccatctccagagacaacgccaagaactcactgtatctgcaaatgaacagcctgagagccgaggacacggctgtgtattactgtgcggtctctagtgggagcccctttgactactggggccagggaaccctggtcaccgtctcctca

SEQ ID NO: 29660 - protein, 117 aa, synthetic construct
  REGION 1..117: note = Description of Artificial Sequence: Synthetic polypeptide
EVQLVESGGGLVKPGGSLRLSCAASGFTLSSFGMNWVRQAPGKGLEWVSYISRSSSHIYYADSVKGRFTISRDNAKNSLYLQMNSLRAEDTAVYYCAVSSGSPFDYWGQGTLVTVSS

SEQ ID NO: 29661 - DNA, 345 bp, synthetic construct
  misc_feature 1..345: note = Description of Artificial Sequence: Synthetic polynucleotide
  source 1..345: mol_type = other DNA
gaggtgcagttggtggagtctgggggaggcctggtcaagcctggggggtccctgagactctcctgtgcagcctctggattcaccttcagtagctatagcatgaactgggtccgccaggctccagggaaggggctggagtgggtctcatccattagtggtagtagtagttacatatattacgcagactcagtgatgggccgattcaccatctccagagacaacgccaagaactctctgtatctgcaaatgaacagcctgagagccgaggacacggctgtgtattactgtgcgagagtcaacagctttgactcctggggccagggaaccctggtcaccgtctcctca

SEQ ID NO: 29662 - protein, 115 aa, synthetic construct
  REGION 1..115: note = Description of Artificial Sequence: Synthetic polypeptide
EVQLVESGGGLVKPGGSLRLSCAASGFTFSSYSMNWVRQAPGKGLEWVSSISGSSSYIYYADSVMGRFTISRDNAKNSLYLQMNSLRAEDTAVYYCARVNSFDSWGQGTLVTVSS

SEQ ID NO: 29663 - DNA, 351 bp, synthetic construct
  misc_feature 1..351: note = Description of Artificial Sequence: Synthetic polynucleotide
  source 1..351: mol_type = other DNA
caggtgcagctggtggagtctgggggaggcgtggtccagcctgggaggtccctgagactctcctgtgcagcgtctggattcaccttcagtgactatggcatgcactgggtccgccaggctccaggcaaggggctggagtgggtggctgttatatggtatgatgtaagtaataaatactatgcagactccgtgaagggccgattcaccatctccagagacaattccaagaacacgctgtatcttcaaatgaacagcctgagagccgaggacacggctgtgtattactgtgtgagagaactggggatgacctctgactgctggggccagggaaccctggtcaccgtctcctca

SEQ ID NO: 29664 - protein, 117 aa, synthetic construct
  REGION 1..117: note = Description of Artificial Sequence: Synthetic polypeptide
QVQLVESGGGVVQPGRSLRLSCAASGFTFSDYGMHWVRQAPGKGLEWVAVIWYDVSNKYYADSVKGRFTISRDNSKNTLYLQMNSLRAEDTAVYYCVRELGMTSDCWGQGTLVTVSS

SEQ ID NO: 29665 - DNA, 357 bp, synthetic construct
  misc_feature 1..357: note = Description of Artificial Sequence: Synthetic polynucleotide
  source 1..357: mol_type = other DNA
cagctgcagctgcaggagtcgggcccaggactggtgaagccttcggagaccctgtccctcacctgcactgtctctggtggctccatcagcagaagtagttactactggggctggatccgccagcccccagggaaggggctggagtggattgggaatatctattatagtgggagcacctattacatcccgtccctcaagagtcgagtcaccatatccgtagacacgtccaagaaccagttctccctgaagctgacctctgtgaccgccgcagacacggctgtgtattactgtgcgagacatagcaccagctggtccattgactactggggccagggaaccctggtcaccgtctcctca

SEQ ID NO: 29666 - protein, 119 aa, synthetic construct
  REGION 1..119: note = Description of Artificial Sequence: Synthetic polypeptide
QLQLQESGPGLVKPSETLSLTCTVSGGSISRSSYYWGWIRQPPGKGLEWIGNIYYSGSTYYIPSLKSRVTISVDTSKNQFSLKLTSVTAADTAVYYCARHSTSWSIDYWGQGTLVTVSS

SEQ ID NO: 29667 - DNA, 357 bp, synthetic construct
  misc_feature 1..357: note = Description of Artificial Sequence: Synthetic polynucleotide
  source 1..357: mol_type = other DNA
caggtgcagctggtggagtctgggggaggcgtggtccagcctgggaggtccctgagactctcctgtgcagcgtctggattcaccttcagtaactatgccatgcactgggtccgccaggctccaggcaaggggctggagtgggtggcagttatatggtatgatggaagtgataaatactatgcagactccgtgaagggccgattcaccatctccagagacaattccaagaacacgctgtatctgcaaatgatcagcctgagagccgaggacacggctgtttattactgtgcgagagatatccctagcaactcggcgggggactactggggccagggaaccctggtcaccgtctcctca

SEQ ID NO: 29668 - protein, 119 aa, synthetic construct
  REGION 1..119: note = Description of Artificial Sequence: Synthetic polypeptide
QVQLVESGGGVVQPGRSLRLSCAASGFTFSNYAMHWVRQAPGKGLEWVAVIWYDGSDKYYADSVKGRFTISRDNSKNTLYLQMISLRAEDTAVYYCARDIPSNSAGDYWGQGTLVTVSS

SEQ ID NO: 29669 - DNA, 351 bp, synthetic construct
  misc_feature 1..351: note = Description of Artificial Sequence: Synthetic polynucleotide
  source 1..351: mol_type = other DNA
caggtgcagctggtgcagtctggggctgaggtgaagaagcctggggcctcagtgaaggtctcctgtaaggcttctggatacaccttcaccggctaccatatgcactgggtgcgacaggcccctggacaagggcttgagtggatgggatggatcaaccctaacagtaatgccacaaactatgcacagaagtttcagggcagggtcaccatgaccagggacacgtccatcagcacagcctacatggaactgagcaggctgagatctgacgacacggccgtgtattactgtgcgagagatagcatatcgtcgtgggactactggggccagggaaccctggtcaccgtctcctca

SEQ ID NO: 29670 - protein, 117 aa, synthetic construct
  REGION 1..117: note = Description of Artificial Sequence: Synthetic polypeptide
QVQLVQSGAEVKKPGASVKVSCKASGYTFTGYHMHWVRQAPGQGLEWMGWINPNSNATNYAQKFQGRVTMTRDTSISTAYMELSRLRSDDTAVYYCARDSISSWDYWGQGTLVTVSS

SEQ ID NO: 29671 - DNA, 363 bp, synthetic construct
  misc_feature 1..363: note = Description of Artificial Sequence: Synthetic polynucleotide
  source 1..363: mol_type = other DNA
caggttcagctggtggagtctgggggaggcgtggtccagcctgggaggtccctgagactctcctgtgcagcgtctggattcaccttcagtagctatggcatgcactgggtccgccaggctccaggcaaggggctggagtgggtggcagttatatggtatgatggaagtaataaatactatgcagactccgtgaagggccgattcaccatctccagagacaattccaagaactcgctgtatctgcaaatgaacagcctgagcgccgaggacacggctgtttattactgtgcgagagatcagggcatagtgggagctacttggtttgactactggggccagggaaccctggtcaccgtctcctca

SEQ ID NO: 29672 - protein, 121 aa, synthetic construct
  REGION 1..121: note = Description of Artificial Sequence: Synthetic polypeptide
QVQLVESGGGVVQPGRSLRLSCAASGFTFSSYGMHWVRQAPGKGLEWVAVIWYDGSNKYYADSVKGRFTISRDNSKNSLYLQMNSLSAEDTAVYYCARDQGIVGATWFDYWGQGTLVTVSS

SEQ ID NO: 29673 - DNA, 372 bp, synthetic construct
  misc_feature 1..372: note = Description of Artificial Sequence: Synthetic polynucleotide
  source 1..372: mol_type = other DNA
caggtgcagctggtgcagtctggggctgaggtgaagaagcctggggcctcagtgaaggtctcctgcaaggcctctggatacatcttcaccggctactatatgcactgggtgcgacaggcccctggacaagggcttgagtggatgggatggatcaaccctaagagtggtggcacaaactctgcacagaagtttcagggcagggtctccatgaccagggacacgtccatcggcacagcctacatggagctgcgcgggctaagatctgacgacacggccgagtattactgtgcgagagctccgggtaaagcagcagctggtacatggggattctttgactactggggccagggaaccctggtcaccgtctcctca

SEQ ID NO: 29674 - protein, 124 aa, synthetic construct
  REGION 1..124: note = Description of Artificial Sequence: Synthetic polypeptide
QVQLVQSGAEVKKPGASVKVSCKASGYIFTGYYMHWVRQAPGQGLEWMGWINPKSGGTNSAQKFQGRVSMTRDTSIGTAYMELRGLRSDDTAEYYCARAPGKAAAGTWGFFDYWGQGTLVTVSS

SEQ ID NO: 29675 - DNA, 357 bp, synthetic construct
  misc_feature 1..357: note = Description of Artificial Sequence: Synthetic polynucleotide
  source 1..357: mol_type = other DNA
caggtgcagctggtggagtctgggggaggcgtggtccagcctgggaggtccctgagactctcctgtgcagcgtctggattcaccttcagtagttatggcatgcactgggtccgccagactccaggcaaggggctggactgggtggcagttatatggcatgatggaagtaataaatactatgcagactccgtgaagggccgattcaccatctccagagacaattccaagaacacgctgtatctgcaaatgaacagcctgagagccgaggacacggctgtgtattactgtgcgagagatgatcccagatcctcggccggggactactggggccagggaaccctggtcaccgtctcctca

SEQ ID NO: 29676 - protein, 119 aa, synthetic construct
  REGION 1..119: note = Description of Artificial Sequence: Synthetic polypeptide
QVQLVESGGGVVQPGRSLRLSCAASGFTFSSYGMHWVRQTPGKGLDWVAVIWHDGSNKYYADSVKGRFTISRDNSKNTLYLQMNSLRAEDTAVYYCARDDPRSSAGDYWGQGTLVTVSS

SEQ ID NO: 29677 - DNA, 354 bp, synthetic construct
  misc_feature 1..354: note = Description of Artificial Sequence: Synthetic polynucleotide
  source 1..354: mol_type = other DNA
caggtgcagctggtgcagtctggggctgaggtgaagaagcctggggcctcagtgaaggtctcctgcaaggcttctggatacaccttcaccaattatgatatcaactgggtgcgacaggccactggacaagggcttgagtggatggggtggatgcaccctaacagtggtaacacaggctatgcacagaagttccagggcagagtcaccatgaccaggaacacctccataagcacagcctacatggagctgagcagcctgagatctgaggacacggccgtgtattactgtgcgtatagcagtggctggtacgtctttgactactggggccagggaaccctggtcaccgtctcctca

SEQ ID NO: 29678 - protein, 118 aa, synthetic construct
  REGION 1..118: note = Description of Artificial Sequence: Synthetic polypeptide
QVQLVQSGAEVKKPGASVKVSCKASGYTFTNYDINWVRQATGQGLEWMGWMHPNSGNTGYAQKFQGRVTMTRNTSISTAYMELSSLRSEDTAVYYCAYSSGWYVFDYWGQGTLVTVSS

SEQ ID NO: 29679 - DNA, 351 bp, synthetic construct
  misc_feature 1..351: note = Description of Artificial Sequence: Synthetic polynucleotide
  source 1..351: mol_type = other DNA
caggtgcagctggtggagtctgggggaggcgtggtccagcctgggaggtccctgagactctcctgtgcagcgtctggattcaccttcagtagctatggcatgctctgggtccgccaggctccaggcaagggtctggagtgggtggcaattatatggtatgatgaaagtaataaatactatgcagactccgtgaagggccgattcaccatctccagagacaattccaagaacacgctgtatctgcaaatgaacagcctgagagccgaggacacggctgtgtattactgtgcgagagacctactggacccacgggactactggggccagggaaccctggtcaccgtctcctca

SEQ ID NO: 29680 - protein, 117 aa, synthetic construct
  REGION 1..117: note = Description of Artificial Sequence: Synthetic polypeptide
QVQLVESGGGVVQPGRSLRLSCAASGFTFSSYGMLWVRQAPGKGLEWVAIIWYDESNKYYADSVKGRFTISRDNSKNTLYLQMNSLRAEDTAVYYCARDLLDPRDYWGQGTLVTVSS

SEQ ID NO: 29681 - DNA, 372 bp, synthetic construct
  misc_feature 1..372: note = Description of Artificial Sequence: Synthetic polynucleotide
  source 1..372: mol_type = other DNA
caggtgcagctggtgcagtctggggctgaggtgaagaagcctggggcctcagtgaaggtctcctgcaaggcttctggatacaccttcaccggctactatatgcactgggtgcgacaggcccctggacaaggacttgagtggatgggatggatcaaacctaacagtggtggcacaaaccaagcacagaagtttcagggcagggtcaccatgaccagggacacgtccatcagcacagcctacatggagctgagcagtctgagatctgacgacacggccgtgtattactgtgcgagagctccgggtatagcagcagctggtacatggggatactttgactactggggccagggaaccctggtcaccgtctcctca

SEQ ID NO: 29682 - protein, 124 aa, synthetic construct
  REGION 1..124: note = Description of Artificial Sequence: Synthetic polypeptide
QVQLVQSGAEVKKPGASVKVSCKASGYTFTGYYMHWVRQAPGQGLEWMGWIKPNSGGTNQAQKFQGRVTMTRDTSISTAYMELSSLRSDDTAVYYCARAPGIAAAGTWGYFDYWGQGTLVTVSS

SEQ ID NO: 29683 - DNA, 372 bp, synthetic construct; identical to SEQ ID NO: 29619
  misc_feature 1..372: note = Description of Artificial Sequence: Synthetic polynucleotide
  source 1..372: mol_type = other DNA

SEQ ID NO: 29684 - protein, 124 aa, synthetic construct; identical to SEQ ID NO: 29620
  REGION 1..124: note = Description of Artificial Sequence: Synthetic polypeptide

SEQ ID NO: 29685 - DNA, 345 bp, synthetic construct
  misc_feature 1..345: note = Description of Artificial Sequence: Synthetic polynucleotide
  source 1..345: mol_type = other DNA
gaggtgcagctggtggagtctgggggaggcctggtcaagcctggggggtccctgagactctcctgtgcagcctctggattcaccttcagtagctatagcatgaactgggtccgccaggctccagggaaggggctggagtgggtctcttccattagtggtaatagtacttacatatactacacagactcagtgaagggccgattcaccatctccagagacaacgccaagaactcactgtatctgcaaatggacagcctgacagccgaggacacggctgtgtattactgtgcgagagtggccgcctttgactgctggggccagggaaccctggtcaccgtctcctca

SEQ ID NO: 29686 - protein, 115 aa, synthetic construct
  REGION 1..115: note = Description of Artificial Sequence: Synthetic polypeptide
EVQLVESGGGLVKPGGSLRLSCAASGFTFSSYSMNWVRQAPGKGLEWVSSISGNSTYIYYTDSVKGRFTISRDNAKNSLYLQMDSLTAEDTAVYYCARVAAFDCWGQGTLVTVSS

SEQ ID NO: 29687 - DNA, 351 bp, synthetic construct
  misc_feature 1..351: note = Description of Artificial Sequence: Synthetic polynucleotide
  source 1..351: mol_type = other DNA
caggtgcagctggtggagtctgggggaggcgtggtccagcctgggaggtccctgagactctcctgtgcaacgtctggattcaccttcagtgactatggcatgcactgggtccgccaggctccaggcaaggggctggagtgggtggcagtgatatggtatgatgaaagtaataaatactatgcagactccgtgaagggccgattcaccatctccagagacaattccaagaacacgctgtatctgcaaatgaacagcctgagagccgaggacacggctgtgtattactgtgcgagagaattggggtggcaggatgattactggggccagggaaccctggtcaccgtctcctca

SEQ ID NO: 29688 - protein, 117 aa, synthetic construct
  REGION 1..117: note = Description of Artificial Sequence: Synthetic polypeptide
QVQLVESGGGVVQPGRSLRLSCATSGFTFSDYGMHWVRQAPGKGLEWVAVIWYDESNKYYADSVKGRFTISRDNSKNTLYLQMNSLRAEDTAVYYCARELGWQDDYWGQGTLVTVSS

SEQ ID NO: 29689 - DNA, 354 bp, synthetic construct
  misc_feature 1..354: note = Description of Artificial Sequence: Synthetic polynucleotide
  source 1..354: mol_type = other DNA
caggtgcaactggtgcagtctggggctgaggtgaagaagcctggggcctcagtgaaggtctcctgcaaggcttctggatacaccttcaccaattatgatatcaactgggtgcgacaggccactggacaagggcttgagtggatgggatggatgcaccctaacagtggtagcacaggctatgcacagaagttccagggcagagtcaccatgaccagggacacctccgtcagcacagcctacatggagctgagcagcctgagatctgaggacacggccgtctattactgtgcatatagcagtggctggtactactttgactactggggccagggaaccctggtcaccgtctcctca

SEQ ID NO: 29690 - protein, 118 aa, synthetic construct
  REGION 1..118: note = Description of Artificial Sequence: Synthetic polypeptide
QVQLVQSGAEVKKPGASVKVSCKASGYTFTNYDINWVRQATGQGLEWMGWMHPNSGSTGYAQKFQGRVTMTRDTSVSTAYMELSSLRSEDTAVYYCAYSSGWYYFDYWGQGTLVTVSS

SEQ ID NO: 29691 - DNA, 351 bp, synthetic construct
  misc_feature 1..351: note = Description of Artificial Sequence: Synthetic polynucleotide
  source 1..351: mol_type = other DNA
caggtgcaactggtggagtctgggggaggcgtggtccagcctgggaggtccctgagactctcctgtgcagcgtctggattcaccttcagtaactatggcatgcactgggtccgccaggccccaggcaaggggctggagtgggtggcagttatttggtatgatagaacaaataaatactatgcagactccgtgaagggccgattcaccatctccagagacaattccaagaacacgctgcatctgcaaatgaacagcctgagagccgaggacacggctgtgtattactgtgcgagagaactggggatgttgtctgactactggggccagggaaccctggtcaccgtctcctca

SEQ ID NO: 29692 - protein, 117 aa, synthetic construct
  REGION 1..117: note = Description of Artificial Sequence: Synthetic polypeptide
QVQLVESGGGVVQPGRSLRLSCAASGFTFSNYGMHWVRQAPGKGLEWVAVIWYDRTNKYYADSVKGRFTISRDNSKNTLHLQMNSLRAEDTAVYYCARELGMLSDYWGQGTLVTVSS

SEQ ID NO: 29693 - DNA, 345 bp, synthetic construct
  misc_feature 1..345: note = Description of Artificial Sequence: Synthetic polynucleotide
  source 1..345: mol_type = other DNA
gaggtgcagctggtggagtctgggggaggcctggtcaagcctggggggtccctgagactgtcctgtgcagcctctggattcaccttcagtagctatagcatgaactgggtccgccaggctccagggaagggactggagtgggtctcatccattagtggtactagtagttacatatactacgcagactcagtgaagggccgattcaccatctccagagacaacgccaagaactcactgtatctgcaaatgaacggcctgagagccgaggacacggctgtgtatttctgtgcgaaaaccaatgcttttgatatctggggccaggggacaatggtcaccgtctcttca

SEQ ID NO: 29694 - protein, 115 aa, synthetic construct
  REGION 1..115: note = Description of Artificial Sequence: Synthetic polypeptide
EVQLVESGGGLVKPGGSLRLSCAASGFTFSSYSMNWVRQAPGKGLEWVSSISGTSSYIYYADSVKGRFTISRDNAKNSLYLQMNGLRAEDTAVYFCAKTNAFDIWGQGTMVTVSS

SEQ ID NO: 29695 - DNA, 372 bp, synthetic construct
  misc_feature 1..372: note = Description of Artificial Sequence: Synthetic polynucleotide
  source 1..372: mol_type = other DNA
caggtgcagctggtgcagtctggggctgaggtgaagaagcctggggcctcagtgaaggtctcctgcaaggcttctggatacatcttcaccggctactatatgcactgggtgcgacaggcccctggacaagggcttgagtggatgggatggatcaaccctaacagtggtggcacaaactctgcacagaagtttcagggcagggtcaccatgaccagggacacgtccatcggcacagcctacatggagctgagcgggctgagatctgacgacacggccgtgtattactgtgcgagagctccgggtaaagcagcagctggtacatggggattctttgactactggggccagggaaccctggtcaccgtctcctca

SEQ ID NO: 29696 - protein, 124 aa, synthetic construct
  REGION 1..124: note = Description of Artificial Sequence: Synthetic polypeptide
QVQLVQSGAEVKKPGASVKVSCKASGYIFTGYYMHWVRQAPGQGLEWMGWINPNSGGTNSAQKFQGRVTMTRDTSIGTAYMELSGLRSDDTAVYYCARAPGKAAAGTWGFFDYWGQGTLVTVSS

SEQ ID NO: 29697 - DNA, 351 bp, synthetic construct
  misc_feature 1..351: note = Description of Artificial Sequence: Synthetic polynucleotide
  source 1..351: mol_type = other DNA
caggtgcagctggtggagtctgggggaggcgtggtccagcctgggaggtccctgagactctcctgtgcagcgtctggattcaccttcagtgactatggcatgcactgggtccgccaggctccaggcaaggggctggagtgggtggcagttatatggtatgatagaaataataaatactatggagactccgtgaagggccgattcaccatctccagagacaattccaagaacacgctgtatctgcaaatgaacagcctgagagccgaggacacggctgtgtattactgtgcgagagaactggggatgttgtctgactactggggccagggaaccctggtcaccgtctcctca

SEQ ID NO: 29698 - protein, 117 aa, synthetic construct
  REGION 1..117: note = Description of Artificial Sequence: Synthetic polypeptide
QVQLVESGGGVVQPGRSLRLSCAASGFTFSDYGMHWVRQAPGKGLEWVAVIWYDRNNKYYGDSVKGRFTISRDNSKNTLYLQMNSLRAEDTAVYYCARELGMLSDYWGQGTLVTVSS

SEQ ID NO: 29699 - DNA, 363 bp, synthetic construct
  misc_feature 1..363: note = Description of Artificial Sequence: Synthetic polynucleotide
  source 1..363: mol_type = other DNA
gaggtgcagctgttggagtctgggggaggcttggtacagcctggggggtccctgagactctcctgtgcagcctctggattcacctttagcagctatgccatgatctgggtccgccaggctccagggaaggggctggagtgggtctcaactattagtggtagtggtggttacacatactccgcagactccgtgaagggccggttcaccatctccagagacaattccaagaacacgctgtatcttcaaatgaacagcctgagagccgaggacacggccgtatattactgtgcgagacgtatagcagtgactgggacggaatggtacgacccctggggccagggaaccctggtcaccgtctcctca

SEQ ID NO: 29700 - protein, 121 aa, synthetic construct
  REGION 1..121: note = Description of Artificial Sequence: Synthetic polypeptide
EVQLLESGGGLVQPGGSLRLSCAASGFTFSSYAMIWVRQAPGKGLEWVSTISGSGGYTYSADSVKGRFTISRDNSKNTLYLQMNSLRAEDTAVYYCARRIAVTGTEWYDPWGQGTLVTVSS

SEQ ID NO: 29701 - DNA, 351 bp, synthetic construct
  misc_feature 1..351: note = Description of Artificial Sequence: Synthetic polynucleotide
  source 1..351: mol_type = other DNA
caggtgcagctggtggagtctgggggaggcgtggtccagcctgggaggtccctgagactctcctgtgcagcgtctggattcaccttcagtagctatggcatgcactgggtccgccaggctccagacacggggctggagtgggtggcagttatatggtttgatgaaagtaataaatactatgcagactccgtgaagggccgattcaccatctccagagacaattccaagaacacgctgtatctgcaaatgaacagcctgagagccgaggacacggctgtgtattactgtgcgagagagcttggtttcagcagtgactactggggccagggaaccctggtcaccgtctcctca

SEQ ID NO: 29702 - protein, 117 aa, synthetic construct
  REGION 1..117: note = Description of Artificial Sequence: Synthetic polypeptide
QVQLVESGGGVVQPGRSLRLSCAASGFTFSSYGMHWVRQAPDTGLEWVAVIWFDESNKYYADSVKGRFTISRDNSKNTLYLQMNSLRAEDTAVYYCARELGFSSDYWGQGTLVTVSS

SEQ ID NO: 29703 - DNA, 372 bp, synthetic construct
  misc_feature 1..372: note = Description of Artificial Sequence: Synthetic polynucleotide
  source 1..372: mol_type = other DNA
caggtgcagctggtgcagtctggggctgaggtgaagaagcctggggcctcagtgaaggtctcctgcaaggcttctggatacaccttcaccggctactatatgcactgggtgcgacaggcccctggacaagggcttgagtggatgggatggatcaaccctaaaagtggtggcacaaattatgtacagaagtttcagggcagggtcaccatgaccagggacacgtccatcagcacagcctacatggagctgagcagtctgagatctgacgacacggccgtgtattactgtgcgagagctccgggtacagcaccagctgggtcatggggatactttgactactggggccagggaaccctggtcaccgtctcctca

SEQ ID NO: 29704 - protein, 124 aa, synthetic construct
  REGION 1..124: note = Description of Artificial Sequence: Synthetic polypeptide
QVQLVQSGAEVKKPGASVKVSCKASGYTFTGYYMHWVRQAPGQGLEWMGWINPKSGGTNYVQKFQGRVTMTRDTSISTAYMELSSLRSDDTAVYYCARAPGTAPAGSWGYFDYWGQGTLVTVSS

SEQ ID NO: 29705 - DNA, 372 bp, synthetic construct
  misc_feature 1..372: note = Description of Artificial Sequence: Synthetic polynucleotide
  source 1..372: mol_type = other DNA
caggtgcaactggtgcagtctggggctgaggtgaagaagcctggggcctcagtgaaggtctcctgcaaggcttctggatacaccttcaccggctactatatgcactgggtacgacaggcccctggacaaggacttgactggatgggatggatcaaccctaaaagtggtggcacgaatcatgtccagaagtttcagggcagggtcgccatgaccagggacacgtccatcagcacagcctacatggagctgagcagtctgagatctgacgacacggccgtgtattactgtgcgagagctccgggtacagcagcagctgggtcatggggatgctttgactactggggccagggaaccctggtcaccgtctcctca

SEQ ID NO: 29706 - protein, 124 aa, synthetic construct
  REGION 1..124: note = Description of Artificial Sequence: Synthetic polypeptide
QVQLVQSGAEVKKPGASVKVSCKASGYTFTGYYMHWVRQAPGQGLDWMGWINPKSGGTNHVQKFQGRVAMTRDTSISTAYMELSSLRSDDTAVYYCARAPGTAAAGSWGCFDYWGQGTLVTVSS

SEQ ID NO: 29707 - DNA, 348 bp, synthetic construct
  misc_feature 1..348: note = Description of Artificial Sequence: Synthetic polynucleotide
  source 1..348: mol_type = other DNA
caggtgcagctggtggagtctgggggaggcgtggtccagcctgggaggtccctgagactctcctgtgcagcctctggattcaccttcagttactatggcatgcactgggtccgccaggctccaggcaaggggctggagtgggtggcagttatattatatgatggaagtaagaaatactatgcagcctccgtgaagggccgattcaccatctccagagacaattccaagaacacgctgtatctgcaaatgaacagcctgagagctgaggacacggctgtgtattactgtgcgaggagtatcccggactttgactactggggccagggaaccctggtcaccgtctcctca

SEQ ID NO: 29708 - protein, 116 aa, synthetic construct
  REGION 1..116: note = Description of Artificial Sequence: Synthetic polypeptide
QVQLVESGGGVVQPGRSLRLSCAASGFTFSYYGMHWVRQAPGKGLEWVAVILYDGSKKYYAASVKGRFTISRDNSKNTLYLQMNSLRAEDTAVYYCARSIPDFDYWGQGTLVTVSS

SEQ ID NO: 29709 - DNA, 369 bp, synthetic construct
  misc_feature 1..369: note = Description of Artificial Sequence: Synthetic polynucleotide
  source 1..369: mol_type = other DNA
gaggtgcagttactggagtctgggggaggctgggtacagtctggggggtccctgagactctcctgtgcagcctctggattcacctttagcagcaatgccatgagctgggtccgccaggctccagggaaggggctggagtgggtctcagacattagtcgtagtggtggtaccacattctacgcagactccgtgaagggccggttcaccatctccagagacaattccaagaacacgctgtatctgcaaatgaacagcctgagagccgaggacacggccgtatattactgtgcgaaatgggatagcagcagctggtacgacgtgactccctttgactactggggccagggaaccctggtcaccgtctcctca

SEQ ID NO: 29710 - protein, 123 aa, synthetic construct
  REGION 1..123: note = Description of Artificial Sequence: Synthetic polypeptide
EVQLLESGGGWVQSGGSLRLSCAASGFTFSSNAMSWVRQAPGKGLEWVSDISRSGGTTFYADSVKGRFTISRDNSKNTLYLQMNSLRAEDTAVYYCAKWDSSSWYDVTPFDYWGQGTLVTVSS

SEQ ID NO: 29711 - DNA, 369 bp, synthetic construct
  misc_feature 1..369: note = Description of Artificial Sequence: Synthetic polynucleotide
  source 1..369: mol_type = other DNA
caggtgcagctggtggagtctgggggaggcgtggtccagcctgggaggtccctgagactctcctgtgcagcgtctggattcaccttcagcaattatgtcatgcactgggtccgccaggctccaggcaaggggctggagtgggtggcagttatatggtatgatggaagtaataaatactatgcagactccgtgaagggccgattcaccatctccagagacaattccaagaacacgctgtatctgcaaatgaacagcctgagagccgaggacacggctgtatattactgtgcgagagaaaggtatagcagcagctggttcgactacggtatggacgtctggggccaagggaccacggtcaccgtctcctca

SEQ ID NO: 29712 - protein, 123 aa, synthetic construct
  REGION 1..123: note = Description of Artificial Sequence: Synthetic polypeptide
QVQLVESGGGVVQPGRSLRLSCAASGFTFSNYVMHWVRQAPGKGLEWVAVIWYDGSNKYYADSVKGRFTISRDNSKNTLYLQMNSLRAEDTAVYYCARERYSSSWFDYGMDVWGQGTTVTVSS

SEQ ID NO: 29713 - DNA, 345 bp, synthetic construct
  misc_feature 1..345: note = Description of Artificial Sequence: Synthetic polynucleotide
  source 1..345: mol_type = other DNA
caggtgcagctacagcagtggggcgcaggactgttgaagccttcggagaccctgtccctcacctgcgctgtctatggtgggtccctcagtggttcctactggagctggatccgccagcccccagggaaggggctggagtggattggggaaatcaatcttagtggaagtaccaactacaacccgtccctcaagagtcgagtcaccatatcagtagacacgtccaagagccagttctccctgacgctgcgctctgtgaccgccgcggacacggctgtgtattactgtgcgagagactacggtggccttgactactggggccagggaaccctggtcaccgtctcctca

SEQ ID NO: 29714 - protein, 115 aa, synthetic construct
  REGION 1..115: note = Description of Artificial Sequence: Synthetic polypeptide
QVQLQQWGAGLLKPSETLSLTCAVYGGSLSGSYWSWIRQPPGKGLEWIGEINLSGSTNYNPSLKSRVTISVDTSKSQFSLTLRSVTAADTAVYYCARDYGGLDYWGQGTLVTVSS

SEQ ID NO: 29715 - DNA, 345 bp, synthetic construct
  misc_feature 1..345: note = Description of Artificial Sequence: Synthetic polynucleotide
  source 1..345: mol_type = other DNA
caggtacaactacagcagtggggcgcaggactgttgaagccttcggagaccctgtccctcacctgcgctgtctatagtgggtccttcagtggttgctactggagctggatccgccagcccccagggaaggggctggagtggattggggaaatcaatcatagtggaagaaccaactacaacccgtccctcaagagtcgagtcaccatatcagtagacacgtccaagaaccagttctccctgaagctgagctctgtgaccgccgcggacacggctgtgtattactgtgcgagggactacggcggtatggacgtctggggccaggggaccacggtcaccgtctcctca

SEQ ID NO: 29716 - protein, 115 aa, synthetic construct
  REGION 1..115: note = Description of Artificial Sequence: Synthetic polypeptide
QVQLQQWGAGLLKPSETLSLTCAVYSGSFSGCYWSWIRQPPGKGLEWIGEINHSGRTNYNPSLKSRVTISVDTSKNQFSLKLSSVTAADTAVYYCARDYGGMDVWGQGTTVTVSS

SEQ ID NO: 29717 - DNA, 354 bp, synthetic construct
  misc_feature 1..354: note = Description of Artificial Sequence: Synthetic polynucleotide
  source 1..354: mol_type = other DNA
caggtgcagctggtgcagtctggggctgaggtgaagaagcctggggcctcagtgaaggtctcctgcaaggcttctggatacaccttcaccaattatgatatcaactgggtgcgacaggccactggacaagggcttgagtggatgggatggatgaaccctaacagtggtaacacaggctgtgcacagaagttccagggcagagtcaccatgaccaggaacacctccataagcacagcctacatggagctgagcagcctgagatctgaggacacggccgtgtattactgtgcgagtagcagtggctggaacttctttgactactggggccagggaaccctggtcaccgtctcctca

SEQ ID NO: 29718 - protein, 118 aa, synthetic construct
  REGION 1..118: note = Description of Artificial Sequence: Synthetic polypeptide
QVQLVQSGAEVKKPGASVKVSCKASGYTFTNYDINWVRQATGQGLEWMGWMNPNSGNTGCAQKFQGRVTMTRNTSISTAYMELSSLRSEDTAVYYCASSSGWNFFDYWGQGTLVTVSS

SEQ ID NO: 29719 - DNA, 354 bp, synthetic construct
  misc_feature 1..354: note = Description of Artificial Sequence: Synthetic polynucleotide
  source 1..354: mol_type = other DNA
caggtgcagctggtgcagtctggggctgaggtgaagaagcctggggcctcagtgaaggtctcctgcaaggcttctggatacaccttcaccaattatgatatcaactgggtgcgacaggccactggacaagggcttgagtggatgggatggatgcaccctaacagtggtaacacaggctatgcacagaagttccggggcagagtcaccatgacctggaacacctccataagcacagcctacatggagctgagcagcctgagatctgaggacacggccgtgtattactgtgcgagtagcagtggctggtactactttgactactggggccagggaaccctggtcaccgtctcctca

SEQ ID NO: 29720 - protein, 118 aa, synthetic construct
  REGION 1..118: note = Description of Artificial Sequence: Synthetic polypeptide
QVQLVQSGAEVKKPGASVKVSCKASGYTFTNYDINWVRQATGQGLEWMGWMHPNSGNTGYAQKFRGRVTMTWNTSISTAYMELSSLRSEDTAVYYCASSSGWYYFDYWGQGTLVTVSS

SEQ ID NO: 29721 - DNA, 354 bp, synthetic construct
  misc_feature 1..354: note = Description of Artificial Sequence: Synthetic polynucleotide
  source 1..354: mol_type = other DNA
caggtgcagctggtgcagtctggggctgaggtgaagaagcctggggcctcagtgaaggtctcctgcaaggcttctggatacaccttcaccaattatgatatcaactgggtgcgacaggtccctggacaagggcttgagtggatgggatggatgcaccctaacagtggtaacacaggctatgcacagaagttccagggcagagtcaccatgaccaggaacacctccatcagcacagcctacatggagctgagcagcctgagatctgaggacacggccgtgtattactgtgcgattagtagtggctggtactggttcgacccctggggccagggaaccctggtcaccgtctcctca

SEQ ID NO: 29722 - protein, 118 aa, synthetic construct
  REGION 1..118: note = Description of Artificial Sequence: Synthetic polypeptide
QVQLVQSGAEVKKPGASVKVSCKASGYTFTNYDINWVRQVPGQGLEWMGWMHPNSGNTGYAQKFQGRVTMTRNTSISTAYMELSSLRSEDTAVYYCAISSGWYWFDPWGQGTLVTVSS

SEQ ID NO: 29723 - DNA, 354 bp, synthetic construct
  misc_feature 1..354: note = Description of Artificial Sequence: Synthetic polynucleotide
  source 1..354: mol_type = other DNA
caggtgcagctggtgcagtctggggctgaggtgaagaagcctggggcctcagtgaaggtctcctgcaaggcttctggattcaccttcaccaattatgatatcaactgggtgcgacaggccactggacaagggcttgagtggatgggatggatgcaccctaacagtggtaacacaggctttgcacagaagttccagggcagagtcaccatgaccaggaacacctccataagcacagcctacatggaactgagcagcctgagatctgaggacacggccgtgtattactgtgcggtttccagtggctggtactggttcgacccctggggccagggaaccctggtcaccgtctcctca

SEQ ID NO: 29724 - protein, 118 aa, synthetic construct
  REGION 1..118: note = Description of Artificial Sequence: Synthetic polypeptide
QVQLVQSGAEVKKPGASVKVSCKASGFTFTNYDINWVRQATGQGLEWMGWMHPNSGNTGFAQKFQGRVTMTRNTSISTAYMELSSLRSEDTAVYYCAVSSGWYWFDPWGQGTLVTVSS

SEQ ID NO: 29725 - DNA, 354 bp, synthetic construct
  misc_feature 1..354: note = Description of Artificial Sequence: Synthetic polynucleotide
  source 1..354: mol_type = other DNA
caggtgcagctggtgcagtctggggctgaggtgaagaagcctggggcctcagtgaaggtctcctgcaaggcttctggatacaccttcaccaattatgatatcaactgggtgcgacaggccactggacaagggcttgagtggatgggatggatgaaccctaacagtggtaacacaggctatgcacagaagttccagggcagagtcaccatgaccaggaacacctccataagcacagcctacatggagctgagcagcctgagatctgaggacacggccgtgtattactgtgcgattagcagtggctggtactggttcgacccctggggccagggaaccctggtcaccgtctcctca

SEQ ID NO: 29726 - protein, 118 aa, synthetic construct
  REGION 1..118: note = Description of Artificial Sequence: Synthetic polypeptide
QVQLVQSGAEVKKPGASVKVSCKASGYTFTNYDINWVRQATGQGLEWMGWMNPNSGNTGYAQKFQGRVTMTRNTSISTAYMELSSLRSEDTAVYYCAISSGWYWFDPWGQGTLVTVSS

SEQ ID NO: 29727 - DNA, 363 bp, synthetic construct
  misc_feature 1..363: note = Description of Artificial Sequence: Synthetic polynucleotide
  source 1..363: mol_type = other DNA
caggtgcagctggtggagtctgggggaggcgtggtccagcctgggaggtccctgagactctcctgtgcagcgtctggattcaccttcagtagctatggcatgcactgggtccgccaggctccaggcaaggggctggagtgggtggcagttatttggtatgatggaagtaataaatactatgcagactccgtgaagggccgattcaccatctccagagacaattccaagaacacgctgtttctgcaaatgaacagcctgagagccgaggacacggctgtgtattactgtgcgagcgatcgcaatatagtgggagctacttactttgagtcctggggccagggaaccctggtcaccgtctcctca

SEQ ID NO: 29728 - protein, 121 aa, synthetic construct
  REGION 1..121: note = Description of Artificial Sequence: Synthetic polypeptide
QVQLVESGGGVVQPGRSLRLSCAASGFTFSSYGMHWVRQAPGKGLEWVAVIWYDGSNKYYADSVKGRFTISRDNSKNTLFLQMNSLRAEDTAVYYCASDRNIVGATYFESWGQGTLVTVSS

SEQ ID NO: 29729 - DNA, 354 bp, synthetic construct
  misc_feature 1..354: note = Description of Artificial Sequence: Synthetic polynucleotide
  source 1..354: mol_type = other DNA
caggtgcagctggtgcagtctggggctgaggtgaagaagcctggggcctcagtgaaggtctcctgcaaggcttctggatacaccttcaccaattatgatatcaactgggtgcgacaggccactggacaaggacttgagtggatgggatggatgaaccctaacagtggtaacacaggctatgcacagaagttccagggcagagtcaccatgaccaggaacacctccataagcacagcctatatggagctgagcagcctgagatctgaagacacggccgtgtattactgtgcgggtagcagtggctggtacatgtttgactactggggccagggaactctggtcaccgtctcctca

SEQ ID NO: 29730 - protein, 118 aa, synthetic construct
  REGION 1..118: note = Description of Artificial Sequence: Synthetic polypeptide
QVQLVQSGAEVKKPGASVKVSCKASGYTFTNYDINWVRQATGQGLEWMGWMNPNSGNTGYAQKFQGRVTMTRNTSISTAYMELSSLRSEDTAVYYCAGSSGWYMFDYWGQGTLVTVSS

SEQ ID NO: 29731 - DNA, 357 bp, synthetic construct
  misc_feature 1..357: note = Description of Artificial Sequence: Synthetic polynucleotide
  source 1..357: mol_type = other DNA
cagctgcagctgcaggagtcgggcccaggactggtgaagccttcggagaccctgtccctcatctgtactgtctctggtggctccatcagcagtagtaattactactggggctggatccgccagcccccagggaaggggctggagtggattgggagtatctattatagtggatacacctcctacaacccgtccctcaagagtcgagtcaccatatccgtagactcgtccaagaaccacttctccctgaggctgagctctgtgaccgccgcagacacggctgtgtattactgtgcgagacttgactctaactggggtcttgactactggggccagggaaccctggtcaccgtctcctca

SEQ ID NO: 29732 - protein, 119 aa, synthetic construct
  REGION 1..119: note = Description of Artificial Sequence: Synthetic polypeptide
QLQLQESGPGLVKPSETLSLICTVSGGSISSSNYYWGWIRQPPGKGLEWIGSIYYSGYTSYNPSLKSRVTISVDSSKNHFSLRLSSVTAADTAVYYCARLDSNWGLDYWGQGTLVTVSS

SEQ ID NO: 29733 - DNA, 354 bp, synthetic construct; identical to SEQ ID NO: 28125
  misc_feature 1..354: note = Description of Artificial Sequence: Synthetic polynucleotide
  source 1..354: mol_type = other DNA

SEQ ID NO: 29734 - protein, 118 aa, synthetic construct; identical to SEQ ID NO: 28126
  REGION 1..118: note = Description of Artificial Sequence: Synthetic polypeptide

SEQ ID NO: 29735 - DNA, 345 bp, synthetic construct
  misc_feature 1..345: note = Description of Artificial Sequence: Synthetic polynucleotide
  source 1..345: mol_type = other DNA
caagtgcagctacagcagtggggcgcaggactgttgaagccttcggagcccctgtccctcacctgcgctgtctatggtgggtccttcagtggtccctactggagctggatccgccagccccccgggaaggggctggagtggattggggaaatcaatcatagtggaagcaccaactacaacccgtccctcacgagtcgagtcaccatatcagtagacacgtccaagaaccagttctccctgaaactgacctctgtgaccgccgcggactcggctgtgtattactgtgcgagagactacgggggtttggacgtctggggccaagggaccacggtcaccgtctcctca

SEQ ID NO: 29736 - protein, 115 aa, synthetic construct
  REGION 1..115: note = Description of Artificial Sequence: Synthetic polypeptide
QVQLQQWGAGLLKPSEPLSLTCAVYGGSFSGPYWSWIRQPPGKGLEWIGEINHSGSTNYNPSLTSRVTISVDTSKNQFSLKLTSVTAADSAVYYCARDYGGLDVWGQGTTVTVSS

SEQ ID NO: 29737 - DNA, 345 bp, synthetic construct
  misc_feature 1..345: note = Description of Artificial Sequence: Synthetic polynucleotide
  source 1..345: mol_type = other DNA
caggtgcagctacagcagtggggcgcaggactgttgaagccttcggagaccctgtccctcacctgcgctgtccatggtgggtccttcagtggttgctactggagctggatccgccagcccccagggaaggggctggagtggattggggaaatcaatcatagtggaagcaccaactacaacccgtccctcaagagtcgagtcaccatttcagtagacacgtccaagaaccagttctccctgaagctgagctctgtgaccgccgcggacacggctgtgtattactgtgcgagggactacggcggtatggacgtctggggccaagggaccacggtcaccgtctcctca

SEQ ID NO: 29738 - protein, 115 aa, synthetic construct
  REGION 1..115: note = Description of Artificial Sequence: Synthetic polypeptide
QVQLQQWGAGLLKPSETLSLTCAVHGGSFSGCYWSWIRQPPGKGLEWIGEINHSGSTNYNPSLKSRVTISVDTSKNQFSLKLSSVTAADTAVYYCARDYGGMDVWGQGTTVTVSS

SEQ ID NO: 29739 - DNA, 345 bp, synthetic construct; identical to SEQ ID NO: 29737
  misc_feature 1..345: note = Description of Artificial Sequence: Synthetic polynucleotide
  source 1..345: mol_type = other DNA

SEQ ID NO: 29740 - protein, 115 aa, synthetic construct; identical to SEQ ID NO: 29738
  REGION 1..115: note = Description of Artificial Sequence: Synthetic polypeptide

SEQ ID NO: 29741 - DNA, 357 bp, synthetic construct
  misc_feature 1..357: note = Description of Artificial Sequence: Synthetic polynucleotide
  source 1..357: mol_type = other DNA
caactgcagctgcaggagtcgggcccaggactggtgaagccttcggagaccctgtccctcacctgcagtgtctctggtggctccatcttcagaagtagttactactggggctggatccgccagcccccagggaaggggctggagtggattgggggtatctattatagtgggagcacctcctacaacccgtccctcaagagtcgagtcaccatatccgtagacacgtccgagaaccagttctccctgaagctgagctctgtgaccgccgcagacacggctgtgtattactgtgcgagactgcgacctaactgggactttgactactggggccagggaaccctggtcaccgtctcctca

SEQ ID NO: 29742 - protein, 119 aa, synthetic construct
  REGION 1..119: note = Description of Artificial Sequence: Synthetic polypeptide
QLQLQESGPGLVKPSETLSLTCSVSGGSIFRSSYYWGWIRQPPGKGLEWIGGIYYSGSTSYNPSLKSRVTISVDTSENQFSLKLSSVTAADTAVYYCARLRPNWDFDYWGQGTLVTVSS

SEQ ID NO: 29743 - DNA, 345 bp, synthetic construct
  misc_feature 1..345: note = Description of Artificial Sequence: Synthetic polynucleotide
  source 1..345: mol_type = other DNA
caggtgcagctacaacagtggggcgcaggactgttgaagccttcggagaccctgtccctcacttgcgctgtctatggtgggtccttcagtggttgctactggagctggatccgccagcccccagggaaggggctggagtggattggggaaatcaatcatagtggatgcaccaacttcaacccgtccctcaagagtcgagtcaccatatcagttgacacgtccaagaaccagttctccctgaagctgagctctgtgaccgccgcggacacggctgtgtattactgtgcgagagactacggcggtatggacgtctggggccaagggaccacggtcaccgtctcctca

SEQ ID NO: 29744 - protein, 115 aa, synthetic construct
  REGION 1..115: note = Description of Artificial Sequence: Synthetic polypeptide
QVQLQQWGAGLLKPSETLSLTCAVYGGSFSGCYWSWIRQPPGKGLEWIGEINHSGCTNFNPSLKSRVTISVDTSKNQFSLKLSSVTAADTAVYYCARDYGGMDVWGQGTTVTVSS

SEQ ID NO: 29745 - DNA, 354 bp, synthetic construct
  misc_feature 1..354: note = Description of Artificial Sequence: Synthetic polynucleotide
  source 1..354: mol_type = other DNA
caggtgcagctggtgcagtctggggctgaggtgaagaagcctggggcctcagtgaaggtctcctgcaaggcttctggatacaccttcaccaattatgatatcaactgggtgcgacaggccactggacaagggcttgagtggatgggatggatgaaccctaacagtggtaacacaggctatgcacagaagttccagggcagagtcaccatgaccaggaacacctccataagcacagcctatatggagctgagcagcctgagatctgaggacacggccgtgtattactgtgcgagtagcagtggctggtactggttcgacccctggggccagggaaccctggtcaccgtctcctca

SEQ ID NO: 29746 - protein, 118 aa, synthetic construct
  REGION 1..118: note = Description of Artificial Sequence: Synthetic polypeptide
QVQLVQSGAEVKKPGASVKVSCKASGYTFTNYDINWVRQATGQGLEWMGWMNPNSGNTGYAQKFQGRVTMTRNTSISTAYMELSSLRSEDTAVYYCASSSGWYWFDPWGQGTLVTVSS

SEQ ID NO: 29747 - DNA, 354 bp, synthetic construct
  misc_feature 1..354: note = Description of Artificial Sequence: Synthetic polynucleotide
  source 1..354: mol_type = other DNA
caggtgcagctggtgcagtctggggctgaggtgaagaagcctggggcctcagtgagggtctcctgcaaggcttctggatacaccttcaccaattatgatatcaactgggtgcgacaggccactggacaagggcttgagtggatgggatggatgcaccctaacagtggtaacacaggctatgcacagaagttccagggcagagtcaccatgaccaggaacacctccataagcacagcctacatggagctgagcagcctgagatctgaggacacggccgtgtattactgtgcgtatagcagtggctggtactactttgactactggggccagggaaccctggtcaccgtctcctca

SEQ ID NO: 29748 - protein, 118 aa, synthetic construct
  REGION 1..118: note = Description of Artificial Sequence: Synthetic polypeptide
QVQLVQSGAEVKKPGASVRVSCKASGYTFTNYDINWVRQATGQGLEWMGWMHPNSGNTGYAQKFQGRVTMTRNTSISTAYMELSSLRSEDTAVYYCAYSSGWYYFDYWGQGTLVTVSS

SEQ ID NO: 29749 - DNA, 354 bp, synthetic construct
  misc_feature 1..354: note = Description of Artificial Sequence: Synthetic polynucleotide
  source 1..354: mol_type = other DNA
caggtgcagctggtgcagtctggggctgaggtgaagaagcctggggcctcagtgaaggtctcctgcaaggcttctggatacaccttcaccaattatgatatcaactgggtgcgacaggccactggacaagggcttgagtggatgggatggatgcaccctaacaatggtaacacaggctatgcacagaagttccagggcagagtcaccatgaccaggaacacctccataagcacagcctacatggagctgaacagcctgagatctgaggacacggccgtgtattactgtgcgattagcagtggctggtactggttcgacccctggggccagggaaccctggtcaccgtctcctta

SEQ ID NO: 29750 - protein, 118 aa, synthetic construct
  REGION 1..118: note = Description of Artificial Sequence: Synthetic polypeptide
QVQLVQSGAEVKKPGASVKVSCKASGYTFTNYDINWVRQATGQGLEWMGWMHPNNGNTGYAQKFQGRVTMTRNTSISTAYMELNSLRSEDTAVYYCAISSGWYWFDPWGQGTLVTVSL

SEQ ID NO: 29751 - DNA, 354 bp, synthetic construct; identical to SEQ ID NO: 29721
  misc_feature 1..354: note = Description of Artificial Sequence: Synthetic polynucleotide
  source 1..354: mol_type = other DNA

SEQ ID NO: 29752 - protein, 118 aa, synthetic construct; identical to SEQ ID NO: 29722
  REGION 1..118: note = Description of Artificial Sequence: Synthetic polypeptide

SEQ ID NO: 29753 - DNA, 345 bp, synthetic construct
  misc_feature 1..345: note = Description of Artificial Sequence: Synthetic polynucleotide
  source 1..345: mol_type = other DNA
caggtgcagctacagcagtggggcgcaggactgttgaagccttcggagaccctgtccctcacctgcgctgtctatggtgggtccttcagtggttgctactggagctggatccgccagcccccagggaaggggctggagtggattggggaaatcaatcatagtggaaggaccaactacaacccgtccctcaagagtcgagtcaccatatcagtagacacgtccgagaaccagttctccctgaagctgagctctgtgaccgccgcggacacggctgtgtattactgtgcgagagactacggtgggcttgactactggggccagggagccctggtcaccgtctcctca

SEQ ID NO: 29754 - protein, 115 aa, synthetic construct
  REGION 1..115: note = Description of Artificial Sequence: Synthetic polypeptide
QVQLQQWGAGLLKPSETLSLTCAVYGGSFSGCYWSWIRQPPGKGLEWIGEINHSGRTNYNPSLKSRVTISVDTSENQFSLKLSSVTAADTAVYYCARDYGGLDYWGQGALVTVSS

SEQ ID NO: 29755 - DNA, 345 bp, synthetic construct
  misc_feature 1..345: note = Description of Artificial Sequence: Synthetic polynucleotide
  source 1..345: mol_type = other DNA
caggtgcagttacagcagtggggcgcaggactgttgaagccttcggagaccctgtccctcacctgcgctgtctatggtgggtccctcagtggttcctactggagctggatccgccagcccccagggaaggggctggagtggattggggaaatcaatcttagtggaagcaccaactacaacccgtccctcaagagtcgagtcaccatatcagtagacacgtccaagagccagttctccctgacgctgcgctctgtgaccgccgcggacacggctgtgtattactgtgcgagagactacggtggccttgactactggggccagggaaccctggtcaccgtctcctca

SEQ ID NO: 29756 - protein, 115 aa, synthetic construct; identical to SEQ ID NO: 29714
  REGION 1..115: note = Description of Artificial Sequence: Synthetic polypeptide

SEQ ID NO: 29757 - DNA, 345 bp, synthetic construct
  misc_feature 1..345: note = Description of Artificial Sequence: Synthetic polynucleotide
  source 1..345: mol_type = other DNA
caggtgcagctacagcaggggggcgcaggaccgttgaagccttcggagaccctgtccctcacctgcgctgtctatggtgggtccttcagtggttgctactggagctggatccgccagcccccagggaaggggctggagtggattggggaaatcaattatagtggaagaaccaactacaacccgtccctcaagagtcgagtcaccatatcagtagacacgtccaagaaccagttctccctgaagctgagctctgtgaccgccgcggacacggctgtgtattactgtgcgagagactacggcggtatggacgtctggggccaagggaccacggtcaccgtctcctca

SEQ ID NO: 29758 - protein, 115 aa, synthetic construct
  REGION 1..115: note = Description of Artificial Sequence: Synthetic polypeptide
QVQLQQGGAGPLKPSETLSLTCAVYGGSFSGCYWSWIRQPPGKGLEWIGEINYSGRTNYNPSLKSRVTISVDTSKNQFSLKLSSVTAADTAVYYCARDYGGMDVWGQGTTVTVSS

SEQ ID NO: 29759 - DNA, 354 bp, synthetic construct
  misc_feature 1..354: note = Description of Artificial Sequence: Synthetic polynucleotide
  source 1..354: mol_type = other DNA
caggtgcagctggtgcagtctggggctgaggtgaagaagcctggggcctcagtgaaggtctcctgcaaggcttctggatacaccttccccaattatgatatcaactgggtgcgacaggccactggacaagggcttgagtggatgggatggatgaaccctaacagtggtaacacaggctatgcacagaagttccagggcagagtcaccatgaccaggaacacctccataagcacagcctacatggagctgagcagcctgagatctgaggacacggccgtgtattattgtgcggtttccagtggctggcactggttcgacccctggggccagggaaccctggtcaccgtcgcctca

SEQ ID NO: 29760 - protein, 118 aa, synthetic construct
  REGION 1..118: note = Description of Artificial Sequence: Synthetic polypeptide
QVQLVQSGAEVKKPGASVKVSCKASGYTFPNYDINWVRQATGQGLEWMGWMNPNSGNTGYAQKFQGRVTMTRNTSISTAYMELSSLRSEDTAVYYCAVSSGWHWFDPWGQGTLVTVAS

SEQ ID NO: 29761 - DNA, 354 bp, synthetic construct; identical to SEQ ID NO: 29721
  misc_feature 1..354: note = Description of Artificial Sequence: Synthetic polynucleotide
  source 1..354: mol_type = other DNA

SEQ ID NO: 29762 - protein, 118 aa, synthetic construct; identical to SEQ ID NO: 29722
  REGION 1..118: note = Description of Artificial Sequence: Synthetic polypeptide

SEQ ID NO: 29763 - DNA, 354 bp, synthetic construct
  misc_feature 1..354: note = Description of Artificial Sequence: Synthetic polynucleotide
  source 1..354: mol_type = other DNA
gaggtgcagctggtggagtctgggggaggcttggtaaagcctggggggtcccttagactctcctgtgcagcctctggattcagtttcagtaacgcctggatgaactgggtccgccaggctccagggaaggggctggagtgggttggccgtattaaaaacaaagctgatggtgggacaacagacttcgctgcacccgtgaaaggcagattcaccatctcaagagatgattcaaaacacacgctgtatctgcaaatgaacagcctgaaaaccgaggacacagccgtgtattactgtaccacagtgggacctactacggactactggggccagggaaccctggtcaccgtctcctca

SEQ ID NO: 29764 - protein, 118 aa, synthetic construct
  REGION 1..118: note = Description of Artificial Sequence: Synthetic polypeptide
EVQLVESGGGLVKPGGSLRLSCAASGFSFSNAWMNWVRQAPGKGLEWVGRIKNKADGGTTDFAAPVKGRFTISRDDSKHTLYLQMNSLKTEDTAVYYCTTVGPTTDYWGQGTLVTVSS

SEQ ID NO: 29765 - DNA, 345 bp, synthetic construct
  misc_feature 1..345: note = Description of Artificial Sequence: Synthetic polynucleotide
  source 1..345: mol_type = other DNA
caagtgcagctacagcagtggggcgcaggactgttgaagccttcggagcccctgtccctcacctgcgctgtctatggtgggtccttcagtggtccctactggagctggatccgccagccccccgggaaggggctggagtggattggggaaatcaatcatagtggaagcaccaactacaacccgtccctcaagagtcgagtcaccatatcagtagacacgtccaagaaccagttctccctgaaactgacctctgtgaccgccgcggacacggctgtgtattactgtgcgagagactacgggggtttggacgtctggggccaagggaccacggtcaccgtctcctca

SEQ ID NO: 29766 - protein, 115 aa, synthetic construct
  REGION 1..115: note = Description of Artificial Sequence: Synthetic polypeptide
QVQLQQWGAGLLKPSEPLSLTCAVYGGSFSGPYWSWIRQPPGKGLEWIGEINHSGSTNYNPSLKSRVTISVDTSKNQFSLKLTSVTAADTAVYYCARDYGGLDVWGQGTTVTVSS

SEQ ID NO: 29767 - DNA, 360 bp, synthetic construct
  misc_feature 1..360: note = Description of Artificial Sequence: Synthetic polynucleotide
  source 1..360: mol_type = other DNA
caggtgcagctggtggagtctgggggaggcgtggtccagcctgggaggtccctgagactctcctgtgcagcgtctggattcaccttcagtagctatggcatgcactgggtccgccaggctccaggcaaggggctggagtgggtggcagttatatggtatgatggaagtaataaaaactatgcagactccgtgaagggccgattcaccatctccagagacaattccaagaacacgctgtatctgcaaatgaacagcctgagagccgaggacacggctgtgtattactgtgcgagagatggcagctatggttatgacggccttgactactggggccagggaaccctggtcaccgtctcctca

SEQ ID NO: 29768 - protein, 120 aa, synthetic construct
  REGION 1..120: note = Description of Artificial Sequence: Synthetic polypeptide
QVQLVESGGGVVQPGRSLRLSCAASGFTFSSYGMHWVRQAPGKGLEWVAVIWYDGSNKNYADSVKGRFTISRDNSKNTLYLQMNSLRAEDTAVYYCARDGSYGYDGLDYWGQGTLVTVSS

SEQ ID NO: 29769 - DNA, 363 bp, synthetic construct; identical to SEQ ID NO: 29727
  misc_feature 1..363: note = Description of Artificial Sequence: Synthetic polynucleotide
  source 1..363: mol_type = other DNA

SEQ ID NO: 29770 - protein, 121 aa, synthetic construct; identical to SEQ ID NO: 29728
  REGION 1..121: note = Description of Artificial Sequence: Synthetic polypeptide

SEQ ID NO: 29771 - DNA, 372 bp, synthetic construct
  misc_feature 1..372: note = Description of Artificial Sequence: Synthetic polynucleotide
  source 1..372: mol_type = other DNA
caggtgcaggtacagcagtggggcgcaggactgttgaagccttcggagaccctgtccctcacctgcgctgtctatggtgggtccttcactgattactactggagctggatccgccagcccccagggaaggggctggagtggattggggaaatcaatcatagtggagacaccaactacaacccgtccctcaagagtcgagtcaccatatcagtagacacgtccaagaaccagttctccctgaagctgagttctgtgaccgccgcggacacggctgtgtattactgtgcgagagagtttccatatagtggaagctacctctactactacggtatggacgtctggggccaagggaccacggtcaccgtctcctca

SEQ ID NO: 29772 - protein, 124 aa, synthetic construct
  REGION 1..124: note = Description of Artificial Sequence: Synthetic polypeptide
QVQVQQWGAGLLKPSETLSLTCAVYGGSFTDYYWSWIRQPPGKGLEWIGEINHSGDTNYNPSLKSRVTISVDTSKNQFSLKLSSVTAADTAVYYCAREFPYSGSYLYYYGMDVWGQGTTVTVSS

SEQ ID NO: 29773 - DNA, 345 bp, synthetic construct
  misc_feature 1..345: note = Description of Artificial Sequence: Synthetic polynucleotide
  source 1..345: mol_type = other DNA
caggtgcagctacaacagtggggcgcaggactgttgaagccttcggagaccctgtccctcacttgcgctgtcaatggtgggcccttcagtggttgctactggagctggatccgccagcccccagggaaggggctggagtggattggggaaatcaatcatagtggaaggaccaacttcaacccgtccctcaagagtcgagtcaccatatcagttgacacgtccaagaaccagttctccctgaagctgagctctgtgaccgccgcggacacggctgtgtattactgtgcgagagactacggcggtatggacgtctggggccaagggaccacggtcaccgtctcctca

SEQ ID NO: 29774 - protein, 115 aa, synthetic construct
  REGION 1..115: note = Description of Artificial Sequence: Synthetic polypeptide
QVQLQQWGAGLLKPSETLSLTCAVNGGPFSGCYWSWIRQPPGKGLEWIGEINHSGRTNFNPSLKSRVTISVDTSKNQFSLKLSSVTAADTAVYYCARDYGGMDVWGQGTTVTVSS

SEQ ID NO: 29775 - DNA, 354 bp, synthetic construct
  misc_feature 1..354: note = Description of Artificial Sequence: Synthetic polynucleotide
  source 1..354: mol_type = other DNA
caggtgcagctggtgcagtctggggctgaggtgaagaagcctggggcctcagtgaaggtctcctgcaaggcttctggatacaccttcaccaattatgatatcaactgggtgcgacaggccactggacaagggcttgagtggatgggatggatgaaccctaacagtggtaacacaggctatgcacagaagttccagggcagactcaccatgaccaggaacacctccataagcacagcctacatggagctgagcagcctgagatctgaggacacggccgtgttttactgtgcatatagcagtggctggtactactttgactactggggccagggaaccctggtcaccgtctcctca

SEQ ID NO: 29776 - protein, 118 aa, synthetic construct
  REGION 1..118: note = Description of Artificial Sequence: Synthetic polypeptide
QVQLVQSGAEVKKPGASVKVSCKASGYTFTNYDINWVRQATGQGLEWMGWMNPNSGNTGYAQKFQGRLTMTRNTSISTAYMELSSLRSEDTAVFYCAYSSGWYYFDYWGQGTLVTVSS

SEQ ID NO: 29777 - DNA, 354 bp, synthetic construct
  misc_feature 1..354: note = Description of Artificial Sequence: Synthetic polynucleotide
  source 1..354: mol_type = other DNA
caggtgcagctggtgcagtctggggctgaggtgaagaagcctggggcctcagtgaaggtctcctgcaaggcttctggatacaccttcaccaattatgatatcaactgggtgcgacaggccactggacaagggcttgagtggatgggatggatgcatcctaacagtggtaacacaggctatgcacagaagttccagggcagagtcaccatgaccaggaacacctccataagcacagcctacatggaactgagcagcctgagatctgaggacacggccgtgtattactgtgcgagtagcagtggctggtactactttgactactggggccagggaaccctggtcaccgtctcctca

SEQ ID NO: 29778 - protein, 118 aa, synthetic construct
  REGION 1..118: note = Description of Artificial Sequence: Synthetic polypeptide
QVQLVQSGAEVKKPGASVKVSCKASGYTFTNYDINWVRQATGQGLEWMGWMHPNSGNTGYAQKFQGRVTMTRNTSISTAYMELSSLRSEDTAVYYCASSSGWYYFDYWGQGTLVTVSS

SEQ ID NO: 29779 - DNA, 345 bp, synthetic construct; identical to SEQ ID NO: 29737
  misc_feature 1..345: note = Description of Artificial Sequence: Synthetic polynucleotide
  source 1..345: mol_type = other DNA

SEQ ID NO: 29780 - protein, 115 aa, synthetic construct; identical to SEQ ID NO: 29738
  REGION 1..115: note = Description of Artificial Sequence: Synthetic polypeptide

SEQ ID NO: 29781 - DNA, 345 bp, synthetic construct; identical to SEQ ID NO: 29737
  misc_feature 1..345: note = Description of Artificial Sequence: Synthetic polynucleotide
  source 1..345: mol_type = other DNA

SEQ ID NO: 29782 - protein, 115 aa, synthetic construct; identical to SEQ ID NO: 29738
  REGION 1..115: note = Description of Artificial Sequence: Synthetic polypeptide

SEQ ID NO: 29783 - DNA, 375 bp, synthetic construct
  misc_feature 1..375: note = Description of Artificial Sequence: Synthetic polynucleotide
  source 1..375: mol_type = other DNA
gaggtgcagctggtggagtctgggggaggcttggtacagccgggggggtccctgagactctcctgtgcagcctctggattcaccttcagtaactacgacatgcactgggtccgccaagctacaggaaaaggtctggagtgggtctcagctattggtactgctggtgacacatactatccaggctccgtgaagggccgattcaccatctccagagaaaatgccaagaactccttgtatcttcaaatgaacagcctgagagccggggacacggctgtgtattactgtgcaagagttcttgactacggtgactccttgggctactactactacggtatggacgtctggggccaagggaccacggtcaccgtctcctca

SEQ ID NO: 29784 - protein, 125 aa, synthetic construct
  REGION 1..125: note = Description of Artificial Sequence: Synthetic polypeptide
EVQLVESGGGLVQPGGSLRLSCAASGFTFSNYDMHWVRQATGKGLEWVSAIGTAGDTYYPGSVKGRFTISRENAKNSLYLQMNSLRAGDTAVYYCARVLDYGDSLGYYYYGMDVWGQGTTVTVSS

SEQ ID NO: 29785 - DNA, 345 bp, synthetic construct
  misc_feature 1..345: note = Description of Artificial Sequence: Synthetic polynucleotide
  source 1..345: mol_type = other DNA
caggtgcagctacagcagtggggcgcaggactgttgaagccttcggagaccctgtccctcaaatgcgatgtctatggtgggtccttcagtggttactactggagctggatccgccagcccccagggaaggggctggagtggattggggaaatcaatcacagtggaagcaccaactacaacccgtccctcaagagtcgagtcaccatatcagtagacacgtccaagaaccagttctccctgaagctgagctctgtgaccgccgcggacacggctgtgtattactgtgcgagagactacggtggtttggacgtctggggccaagggaccacggtcaccgtctcctca

SEQ ID NO: 29786 - protein, 115 aa, synthetic construct
  REGION 1..115: note = Description of Artificial Sequence: Synthetic polypeptide
QVQLQQWGAGLLKPSETLSLKCDVYGGSFSGYYWSWIRQPPGKGLEWIGEINHSGSTNYNPSLKSRVTISVDTSKNQFSLKLSSVTAADTAVYYCARDYGGLDVWGQGTTVTVSS

SEQ ID NO: 29787 - DNA, 363 bp, synthetic construct
  misc_feature 1..363: note = Description of Artificial Sequence: Synthetic polynucleotide
  source 1..363: mol_type = other DNA
caggtgcagctggtggagtctgggggaggcgtggtccagcctgggaggtccctgagactctcctgtgcagcgtctggattcaccttcagtaattatggcatgcactgggtccgccaggctccaggcaaggggctggagtgggtggcagttatatggtatgatggaagaaataaatactatgcagactccgtgaagggccgattcaccatctccagagacaattccaagaacacgctgtatctgcaaatgaacagcctgagagccgaggacacggctctatattactgtgcgagagatcggagtatattgggagctactttctttgactactggggccagggaaccctggtcaccgtctcctca

SEQ ID NO: 29788 - protein, 121 aa, synthetic construct
  REGION 1..121: note = Description of Artificial Sequence: Synthetic polypeptide
QVQLVESGGGVVQPGRSLRLSCAASGFTFSNYGMHWVRQAPGKGLEWVAVIWYDGRNKYYADSVKGRFTISRDNSKNTLYLQMNSLRAEDTALYYCARDRSILGATFFDYWGQGTLVTVSS

SEQ ID NO: 29789 - DNA, 345 bp, synthetic construct
  misc_feature 1..345: note = Description of Artificial Sequence: Synthetic polynucleotide
  source 1..345: mol_type = other DNA
caggtgcagctacagcagtggggcgcaggactgttgaagccttcggagaccctgtccctcacctgcgctgtctatggtgggtccttcagtggttgctactggagctggatccgccagcccccagggaaggggctggagtggattggggaaatcaatcatagtggaaggaccaactacaacccgtccctcaagagtcgagtcaccatctcagtagacacgtccgagaaccagttctccctgaagttgagctctgtgaccgccgcggacacggctgtgtattactgtgcgagagactacggtgggcttgactactggggccagggaaccctggtcaccgtctcctca

SEQ ID NO: 29790 - protein, 115 aa, synthetic construct
  REGION 1..115: note = Description of Artificial Sequence: Synthetic polypeptide
QVQLQQWGAGLLKPSETLSLTCAVYGGSFSGCYWSWIRQPPGKGLEWIGEINHSGRTNYNPSLKSRVTISVDTSENQFSLKLSSVTAADTAVYYCARDYGGLDYWGQGTLVTVSS

SEQ ID NO: 29791 - DNA, 360 bp, synthetic construct
  misc_feature 1..360: note = Description of Artificial Sequence: Synthetic polynucleotide
  source 1..360: mol_type = other DNA
caggtgcagctggtggagtctgggggaggcgtggtccagtctgggaggtccctgagactctcctgtgcagcgtctggattcaccttcagtagctatggcatgcactgggtccgccaggctccaggcaaggggctggagtgggtggcagttatatggtatgatggaagtaatcaaaactatgcagactccgtgaagggccgattcaccatctccagagacaattccaagaacacgctgtttctgcaaatgaacagcctgagagccgaggacacggctgtgtattactgtgcgagagatggcagctatggttacgacggccttgactactggggccagggaaccctggtcaccgtctcctca

SEQ ID NO: 29792 - protein, 120 aa, synthetic construct
  REGION 1..120: note = Description of Artificial Sequence: Synthetic polypeptide
QVQLVESGGGVVQSGRSLRLSCAASGFTFSSYGMHWVRQAPGKGLEWVAVIWYDGSNQNYADSVKGRFTISRDNSKNTLFLQMNSLRAEDTAVYYCARDGSYGYDGLDYWGQGTLVTVSS

SEQ ID NO: 29793 - DNA, 354 bp, synthetic construct; identical to SEQ ID NO: 29759
  misc_feature 1..354: note = Description of Artificial Sequence: Synthetic polynucleotide
  source 1..354: mol_type = other DNA

SEQ ID NO: 29794 - protein, 118 aa, synthetic construct; identical to SEQ ID NO: 29760
  REGION 1..118: note = Description of Artificial Sequence: Synthetic polypeptide

SEQ ID NO: 29795 - DNA, 345 bp, synthetic construct; identical to SEQ ID NO: 29737
  misc_feature 1..345: note = Description of Artificial Sequence: Synthetic polynucleotide
  source 1..345: mol_type = other DNA

SEQ ID NO: 29796 - protein, 115 aa, synthetic construct; identical to SEQ ID NO: 29738
  REGION 1..115: note = Description of Artificial Sequence: Synthetic polypeptide

SEQ ID NO: 29797 - DNA, 345 bp, synthetic construct; identical to SEQ ID NO: 29737
  misc_feature 1..345: note = Description of Artificial Sequence: Synthetic polynucleotide
  source 1..345: mol_type = other DNA

SEQ ID NO: 29798 - protein, 115 aa, synthetic construct; identical to SEQ ID NO: 29738
  REGION 1..115: note = Description of Artificial Sequence: Synthetic polypeptide

SEQ ID NO: 29799 - DNA, 354 bp, synthetic construct; identical to SEQ ID NO: 29749
  misc_feature 1..354: note = Description of Artificial Sequence: Synthetic polynucleotide
  source 1..354: mol_type = other DNA

SEQ ID NO: 29800 - protein, 118 aa, synthetic construct; identical to SEQ ID NO: 29750
  REGION 1..118: note = Description of Artificial Sequence: Synthetic polypeptide

SEQ ID NO: 29801 - DNA, 345 bp, synthetic construct; identical to SEQ ID NO: 29757
  misc_feature 1..345: note = Description of Artificial Sequence: Synthetic polynucleotide
  source 1..345: mol_type = other DNA

SEQ ID NO: 29802 - protein, 115 aa, synthetic construct; identical to SEQ ID NO: 29758
  REGION 1..115: note = Description of Artificial Sequence: Synthetic polypeptide

SEQ ID NO: 29803 - DNA, 354 bp, synthetic construct; identical to SEQ ID NO: 29721
  misc_feature 1..354: note = Description of Artificial Sequence: Synthetic polynucleotide
  source 1..354: mol_type = other DNA

SEQ ID NO: 29804 - protein, 118 aa, synthetic construct; identical to SEQ ID NO: 29722
  REGION 1..118: note = Description of Artificial Sequence: Synthetic polypeptide

SEQ ID NO: 29805 - DNA, 345 bp, synthetic construct
  misc_feature 1..345: note = Description of Artificial Sequence: Synthetic polynucleotide
  source 1..345: mol_type = other DNA
caggtgcagctacaacaggggggcgcaggaccgttgaagccttcggagaccctgtccctcacctgcgctgtctatggtgggtccttcagtggttgctactggagctggatccgccagcccccagggaaggggctggagtggattggggaaatcaattatagtggaagaaccaactacaacccgtccctcaagagtcgagtcaccatatcagtagacacgtccaagaaccagttctccctgaagctgagctctgtgaccgccgcggacacggctgtgtattactgtgcgagagactacggcggtatggacgtctggggccaagggaccacggtcaccgtctcctca

SEQ ID NO: 29806 - protein, 115 aa, synthetic construct; identical to SEQ ID NO: 29758
  REGION 1..115: note = Description of Artificial Sequence: Synthetic polypeptide

SEQ ID NO: 29807 - DNA, 354 bp, synthetic construct
  misc_feature 1..354: note = Description of Artificial Sequence: Synthetic polynucleotide
  source 1..354: mol_type = other DNA
caggtgcagctggtgcagtctggggctgaggtgaagaagcctggggcctcagtgaaggtctcctgcaaggcttctggatacaccttcaccaattatgatatcaactgggtgcgacaggccactggacaagggcttgagtggatgggatggatgcaccctaacagtggtaacacaggctatgcacagaagttccagggcagagtcaccatgaccaggaacacctccataagcacagcctacatggagctgagcagcctgagatctgaggacacggccgtgtattactgtgcgattagcagtggctggtactggttcgacccctggggccagggaaccctggtcaccgtctcctca

SEQ ID NO: 29808 - protein, 118 aa, synthetic construct
  REGION 1..118: note = Description of Artificial Sequence: Synthetic polypeptide
QVQLVQSGAEVKKPGASVKVSCKASGYTFTNYDINWVRQATGQGLEWMGWMHPNSGNTGYAQKFQGRVTMTRNTSISTAYMELSSLRSEDTAVYYCAISSGWYWFDPWGQGTLVTVSS

SEQ ID NO: 29809 - DNA, 354 bp, synthetic construct; identical to SEQ ID NO: 29721
  misc_feature 1..354: note = Description of Artificial Sequence: Synthetic polynucleotide
  source 1..354: mol_type = other DNA

SEQ ID NO: 29810 - protein, 118 aa, synthetic construct; identical to SEQ ID NO: 29722
  REGION 1..118: note = Description of Artificial Sequence: Synthetic polypeptide

SEQ ID NO: 29811 - DNA, 345 bp, synthetic construct
  misc_feature 1..345: note = Description of Artificial Sequence: Synthetic polynucleotide
  source 1..345: mol_type = other DNA
caggtgcagctacagcagtggggcgcaggactgttgaagccttcggagaccctgtccctcacctgcgctgtctatggtggggccttcagtggttcctactggagctggatccgccagtccccagggaaggggctggagtggattggggaaatcaattataggggaagcaccaactacaacccgtccctcaagagtcgagtcaccatatcagtagacacgtccaagaaccagttctccctgaacctgagctctgtgaccgccgcggacacggctgtgtattactgtgcgagggactacggcggtatggacgtctggggccaagggaccacggtcaccgtctcctca

SEQ ID NO: 29812 - protein, 115 aa, synthetic construct
  REGION 1..115: note = Description of Artificial Sequence: Synthetic polypeptide
QVQLQQWGAGLLKPSETLSLTCAVYGGAFSGSYWSWIRQSPGKGLEWIGEINYRGSTNYNPSLKSRVTISVDTSKNQFSLNLSSVTAADTAVYYCARDYGGMDVWGQGTTVTVSS

SEQ ID NO: 29813 - DNA, 354 bp, synthetic construct
  misc_feature 1..354: note = Description of Artificial Sequence: Synthetic polynucleotide
  source 1..354: mol_type = other DNA
caggtgcagctggtgcagtctggggctgaggtgaagaagcctggggcctcagtgaaggtctcctgcaaggcttctggatacaccttcaccaattatgatatcaactgggtgcgacaggccactggacaagggcttgagtggatgggatggatgaaccctaacagtggtaacacaggctatgcacagaagttccagggcagagtcaccatgaccaggaacacctccataaacacagcctacatggagctgagcagcctgagatctgaggacacggccgtgtattactgtgcgattagcagtggctggtactggttcgacccctggggccagggaaccctggtcaccgtctcctca

SEQ ID NO: 29814 - protein, 118 aa, synthetic construct
  REGION 1..118: note = Description of Artificial Sequence: Synthetic polypeptide
QVQLVQSGAEVKKPGASVKVSCKASGYTFTNYDINWVRQATGQGLEWMGWMNPNSGNTGYAQKFQGRVTMTRNTSINTAYMELSSLRSEDTAVYYCAISSGWYWFDPWGQGTLVTVSS

SEQ ID NO: 29815 - DNA, 360 bp, synthetic construct
  misc_feature 1..360: note = Description of Artificial Sequence: Synthetic polynucleotide
  source 1..360: mol_type = other DNA
caggtgcagctggtggagtctgggggaggcgtggtccagcctgggaggtccctgagactctcctgtgcagcgtctggattcaccttcagtagctatggcatgcactgggtccgccaggctccaggcaaggggctggagtgggtggcagttatatggtatgatggaagtaataaaaactatgcagactccgtgaagggccgattcaccatctccagagacaattccaagaacacgctgtatctgcaaatgaacagcctgagagccgaggacacggctgtgtattactgtgcgagagatggcagctatggttacgacggccttgactactggggccagggaaccctggtcaccgtctcctca

SEQ ID NO: 29816 - protein, 120 aa, synthetic construct; identical to SEQ ID NO: 29768
  REGION 1..120: note = Description of Artificial Sequence: Synthetic polypeptide

SEQ ID NO: 29817 - DNA, 354 bp, synthetic construct
  misc_feature 1..354: note = Description of Artificial Sequence: Synthetic polynucleotide
  source 1..354: mol_type = other DNA
caggtgcagctggtgcagtctggggctgaggtgaagaagcctggggcctcagtgaaggtctcctgcaaggcttctggatacaccttcaccaattatgatatcaactgggtgcgacaggccactggacaagggcttgagtggatgggatggatgcaccctaatagtggtaacacaggctatgcacagaagttccagggcagagtcaccctgaccaggaacacctccataagcacagcctacatggagctgagcagcctgagatctgaggacacggccgtgtattactgtgcggtttccagtggctggtactggttcgacccctggggccagggaaccctggtcaccgtctcctca

SEQ ID NO: 29818 - protein, 118 aa, synthetic construct
  REGION 1..118: note = Description of Artificial Sequence: Synthetic polypeptide
QVQLVQSGAEVKKPGASVKVSCKASGYTFTNYDINWVRQATGQGLEWMGWMHPNSGNTGYAQKFQGRVTLTRNTSISTAYMELSSLRSEDTAVYYCAVSSGWYWFDPWGQGTLVTVSS

SEQ ID NO: 29819 - DNA, 354 bp, synthetic construct; identical to SEQ ID NO: 29807
  misc_feature 1..354: note = Description of Artificial Sequence: Synthetic polynucleotide
  source 1..354: mol_type = other DNA

SEQ ID NO: 29820 - protein, 118 aa, synthetic construct; identical to SEQ ID NO: 29808
  REGION 1..118: note = Description of Artificial Sequence: Synthetic polypeptide

SEQ ID NO: 29821 - DNA, 375 bp, synthetic construct
  misc_feature 1..375: note = Description of Artificial Sequence: Synthetic polynucleotide
  source 1..375: mol_type = other DNA
caggtgcagctggtggagtctgggggaggcgtggtccagcctgggaggtccctgagactctcctgtgcagcgtctggattcaccttcagtagctatggcatgcactgggtccgccaggctccaggcaaggggctggagtgggtggcagttatatggtatgatggaagtaataaataccatgcagactccgtgaagggccgattcaccatctccagagacaattccaagaacacgctgtatctgcaaatgaacagcctgagagccgaggacacggctatgtattactgtgcgagagatgaggggttcggggagttcgactactacaactacggtatggacgtctggggccaagggaccacggtcaccgtctcctca

SEQ ID NO: 29822 - protein, 125 aa, synthetic construct
  REGION 1..125: note = Description of Artificial Sequence: Synthetic polypeptide
QVQLVESGGGVVQPGRSLRLSCAASGFTFSSYGMHWVRQAPGKGLEWVAVIWYDGSNKYHADSVKGRFTISRDNSKNTLYLQMNSLRAEDTAMYYCARDEGFGEFDYYNYGMDVWGQGTTVTVSS

SEQ ID NO: 29823 - DNA, 363 bp, synthetic construct
  misc_feature 1..363: note = Description of Artificial Sequence: Synthetic polynucleotide
  source 1..363: mol_type = other DNA
caggtgcagctggtggagtctgggggaggcgtggtccagcctgggaggtccctgagactctcctgtgcagcgtctggattcaccttcagtagctttggcatgcactgggcccgccaggctccaggcaaggggctggaatgggtggcagctatttggtatgatggaagtaataaatactgtgcagactccgtgaagggccgattcaccatctccagagacaattccaagaacacactgtctctgcaaatgaacagcctgagagccgaggactcggctgtgtattactgtgcgagagatcggagtatactgggagctgctttctttgactactggggccagggaaccctggtcaccgtctcctca

SEQ ID NO: 29824 - protein, 121 aa, synthetic construct
  REGION 1..121: note = Description of Artificial Sequence: Synthetic polypeptide
QVQLVESGGGVVQPGRSLRLSCAASGFTFSSFGMHWARQAPGKGLEWVAAIWYDGSNKYCADSVKGRFTISRDNSKNTLSLQMNSLRAEDSAVYYCARDRSILGAAFFDYWGQGTLVTVSS

SEQ ID NO: 29825 - DNA, 354 bp, synthetic construct
  misc_feature 1..354: note = Description of Artificial Sequence: Synthetic polynucleotide
  source 1..354: mol_type = other DNA
gaggtgcagctggtggagtctgggggaggcttggtaaagcctggggggtcccttagactctcctgtgcagcctctggattcactttcagtaacgcctggatgaactgggtccgccaggctccagggaaggggctggagtgggttggccgtattaaaaacaaagctgatggtgggacaacagactacgctgcacccgtgaaaggcagattcaccatctcaagagatgattcaaaaaacacgctgtatctgcaaatgaacagcctgaaaaccgaggacacagccgtgtattactgtaccacagtgggagctactacggactactggggccagggaaccctggtcaccgtctcctca

SEQ ID NO: 29826 - protein, 118 aa, synthetic construct
  REGION 1..118: note = Description of Artificial Sequence: Synthetic polypeptide
EVQLVESGGGLVKPGGSLRLSCAASGFTFSNAWMNWVRQAPGKGLEWVGRIKNKADGGTTDYAAPVKGRFTISRDDSKNTLYLQMNSLKTEDTAVYYCTTVGATTDYWGQGTLVTVSS

SEQ ID NO: 29827 - DNA, 354 bp, synthetic construct; identical to SEQ ID NO: 28201
  misc_feature 1..354: note = Description of Artificial Sequence: Synthetic polynucleotide
  source 1..354: mol_type = other DNA

SEQ ID NO: 29828 - protein, 118 aa, synthetic construct; identical to SEQ ID NO: 28202
  REGION 1..118: note = Description of Artificial Sequence: Synthetic polypeptide

SEQ ID NO: 29829 - DNA, 345 bp, synthetic construct
  misc_feature 1..345: note = Description of Artificial Sequence: Synthetic polynucleotide
  source 1..345: mol_type = other DNA
caggtgcagctacagcagtggggcgcaggactgttgaagccttcggagaccctgtccctcacctgcgctgtctatggtgggtccctcagtggttcctactggagctggatccgccagcccccagggaaggggctggagtggattggggaaatcaatcttagtggaagcaccaactacaacccgtccctcaagagtcgagtcaccatatcagtagacacgtccaagagccagttctccctgacgctgcgctctgtgaccgccgcggacacggctgtgtattactgtgcgagagactacggtggccttgactactggggccagggaaccctggtcaccgtctcctca

SEQ ID NO: 29830 - protein, 115 aa, synthetic construct; identical to SEQ ID NO: 29714
  REGION 1..115: note = Description of Artificial Sequence: Synthetic polypeptide

SEQ ID NO: 29831 - DNA, 354 bp, synthetic construct; identical to SEQ ID NO: 29759
  misc_feature 1..354: note = Description of Artificial Sequence: Synthetic polynucleotide
  source 1..354: mol_type = other DNA

SEQ ID NO: 29832 - protein, 118 aa, synthetic construct; identical to SEQ ID NO: 29760
  REGION 1..118: note = Description of Artificial Sequence: Synthetic polypeptide

SEQ ID NO: 29833 - DNA, 354 bp, synthetic construct; identical to SEQ ID NO: 29717
  misc_feature 1..354: note = Description of Artificial Sequence: Synthetic polynucleotide
  source 1..354: mol_type = other DNA

SEQ ID NO: 29834 - protein, 118 aa, synthetic construct; identical to SEQ ID NO: 29718
  REGION 1..118: note = Description of Artificial Sequence: Synthetic polypeptide

SEQ ID NO: 29835 - DNA, 354 bp, synthetic construct; identical to SEQ ID NO: 28125
  misc_feature 1..354: note = Description of Artificial Sequence: Synthetic polynucleotide
  source 1..354: mol_type = other DNA

SEQ ID NO: 29836 - protein, 118 aa, synthetic construct; identical to SEQ ID NO: 28126
  REGION 1..118: note = Description of Artificial Sequence: Synthetic polypeptide

SEQ ID NO: 29837 - DNA, 354 bp, synthetic construct; identical to SEQ ID NO: 29759
  misc_feature 1..354: note = Description of Artificial Sequence: Synthetic polynucleotide
  source 1..354: mol_type = other DNA

SEQ ID NO: 29838 - protein, 118 aa, synthetic construct; identical to SEQ ID NO: 29760
  REGION 1..118: note = Description of Artificial Sequence: Synthetic polypeptide

SEQ ID NO: 29839 - DNA, 345 bp, synthetic construct; identical to SEQ ID NO: 29737
  misc_feature 1..345: note = Description of Artificial Sequence: Synthetic polynucleotide
  source 1..345: mol_type = other DNA

SEQ ID NO: 29840 - protein, 115 aa, synthetic construct; identical to SEQ ID NO: 29738
  REGION 1..115: note = Description of Artificial Sequence: Synthetic polypeptide

SEQ ID NO: 29841 - DNA, 345 bp, synthetic construct; identical to SEQ ID NO: 29737
  misc_feature 1..345: note = Description of Artificial Sequence: Synthetic polynucleotide
  source 1..345: mol_type = other DNA

SEQ ID NO: 29842 - protein, 115 aa, synthetic construct; identical to SEQ ID NO: 29738
  REGION 1..115: note = Description of Artificial Sequence: Synthetic polypeptide

SEQ ID NO: 29843 - DNA, 354 bp, synthetic construct
  misc_feature 1..354: note = Description of Artificial Sequence: Synthetic polynucleotide
  source 1..354: mol_type = other DNA
caggtgcagctggtgcagtctggggctgaggtgaagaagcctggggcctcagtgaaggtctcctgcaaggcttctggatacaccttcaccaattatgatgtcaactgggtgcgacaggccactggacaagggcttgaatggatgggatggatgcaccctaacagtggtaacacaggctatgcacagaagttccagggcagagtcaccatgaccaggaacacctccatacgcacagcctacatggagctgagcagcctgagatctgaggacacggccgtgtattactgtgcgagtagcagtggctggtaccattttgactactggggccagggaaccctggtcaccgtctcctca

SEQ ID NO: 29844 - protein, 118 aa, synthetic construct
  REGION 1..118: note = Description of Artificial Sequence: Synthetic polypeptide
QVQLVQSGAEVKKPGASVKVSCKASGYTFTNYDVNWVRQATGQGLEWMGWMHPNSGNTGYAQKFQGRVTMTRNTSIRTAYMELSSLRSEDTAVYYCASSSGWYHFDYWGQGTLVTVSS

SEQ ID NO: 29845 - DNA, 360 bp, synthetic construct
  misc_feature 1..360: note = Description of Artificial Sequence: Synthetic polynucleotide
  source 1..360: mol_type = other DNA
caggtgcagttggtggagtctgggggaggcgtggtccagtctgggaggtccctgagactctcctgtgcagcgtctggattcaccttcagtaactatggcatgcactgggtccgccaggctccaggcaaggggctggagtgggtggcagttatatggtatgatggaagtaatcaaaactatgcagactccgtgaagggccgattcaccatctccagagacaattccaagaacacgctgtttctgcaaatgaacagcctgagagccgaggacacggctgtgtactactgtgcgagagatggcagctatggttatgacggccttgactactggggccagggaaccctggtcaccgtctcctca

SEQ ID NO: 29846 - protein, 120 aa, synthetic construct
  REGION 1..120: note = Description of Artificial Sequence: Synthetic polypeptide
QVQLVESGGGVVQSGRSLRLSCAASGFTFSNYGMHWVRQAPGKGLEWVAVIWYDGSNQNYADSVKGRFTISRDNSKNTLFLQMNSLRAEDTAVYYCARDGSYGYDGLDYWGQGTLVTVSS

SEQ ID NO: 29847 - DNA, 354 bp, synthetic construct
  misc_feature 1..354: note = Description of Artificial Sequence: Synthetic polynucleotide
  source 1..354: mol_type = other DNA
gaggtgcagctggtggagtctgggggaggcttggtaaagcctggggggtcccttagactctcctgtgcagcctctggattcactttcagtaacgcctggatgaactgggtccgccaggctccagggaaggggctggagtgggttggccgaattaaaaacaaaattgatggtgggacaacagactacgctgcacccgtgaaaggcagattcaccatctcaagagatgattcaaaaaacacgctgtatctgcaaatgaacagcctgaaaaccgaggacacagccgtgtattactgtaccacagtgggagctactacggactactggggccagggaaccctggtcaccgtctcctca

SEQ ID NO: 29848 - protein, 118 aa, synthetic construct
  REGION 1..118: note = Description of Artificial Sequence: Synthetic polypeptide
EVQLVESGGGLVKPGGSLRLSCAASGFTFSNAWMNWVRQAPGKGLEWVGRIKNKIDGGTTDYAAPVKGRFTISRDDSKNTLYLQMNSLKTEDTAVYYCTTVGATTDYWGQGTLVTVSS

SEQ ID NO: 29849 - DNA, 363 bp, synthetic construct
  misc_feature 1..363: note = Description of Artificial Sequence: Synthetic polynucleotide
  source 1..363: mol_type = other DNA
caggtgcagctggtggagtctgggggaggcgtggtccagcctgggaggtccctgagactctcctgtacagcgtctggattcaccttcagtagctatggcatgcactgggtccgccaggctccaggcaaggggctggagtgggtggcagttatttggtatgatggaagtaataaatactatgcagactccgtgaagggccgattcaccatctccagagacaattccaagaacacgctgtttctgcaaatgaacagcctgagagccgaggacacggctgtgtattactgtgcgagcgatcgcaatatagtgggagctacttactttgagtcctggggccagggaaccctggtcaccgtctcctca

SEQ ID NO: 29850 - protein, 121 aa, synthetic construct
  REGION 1..121: note = Description of Artificial Sequence: Synthetic polypeptide
QVQLVESGGGVVQPGRSLRLSCTASGFTFSSYGMHWVRQAPGKGLEWVAVIWYDGSNKYYADSVKGRFTISRDNSKNTLFLQMNSLRAEDTAVYYCASDRNIVGATYFESWGQGTLVTVSS

SEQ ID NO: 29851 - DNA, 354 bp, synthetic construct; identical to SEQ ID NO: 29723
  misc_feature 1..354: note = Description of Artificial Sequence: Synthetic polynucleotide
  source 1..354: mol_type = other DNA

SEQ ID NO: 29852 - protein, 118 aa, synthetic construct; identical to SEQ ID NO: 29724
  REGION 1..118: note = Description of Artificial Sequence: Synthetic polypeptide

SEQ ID NO: 29853 - DNA, 354 bp, synthetic construct; identical to SEQ ID NO: 28201
  misc_feature 1..354: note = Description of Artificial Sequence: Synthetic polynucleotide
  source 1..354: mol_type = other DNA

SEQ ID NO: 29854 - protein, 118 aa, synthetic construct; identical to SEQ ID NO: 28202
  REGION 1..118: note = Description of Artificial Sequence: Synthetic polypeptide

SEQ ID NO: 29855 - DNA, 354 bp, synthetic construct; identical to SEQ ID NO: 29777
  misc_feature 1..354: note = Description of Artificial Sequence: Synthetic polynucleotide
  source 1..354: mol_type = other DNA

SEQ ID NO: 29856 - protein, 118 aa, synthetic construct; identical to SEQ ID NO: 29778
  REGION 1..118: note = Description of Artificial Sequence: Synthetic polypeptide

SEQ ID NO: 29857 - DNA, 345 bp, synthetic construct; identical to SEQ ID NO: 29737
  misc_feature 1..345: note = Description of Artificial Sequence: Synthetic polynucleotide
  source 1..345: mol_type = other DNA

SEQ ID NO: 29858 - protein, 115 aa, synthetic construct; identical to SEQ ID NO: 29738
  REGION 1..115: note = Description of Artificial Sequence: Synthetic polypeptide

SEQ ID NO: 29859 - DNA, 354 bp, synthetic construct; identical to SEQ ID NO: 28125
  misc_feature 1..354: note = Description of Artificial Sequence: Synthetic polynucleotide
  source 1..354: mol_type = other DNA

SEQ ID NO: 29860 - protein, 118 aa, synthetic construct; identical to SEQ ID NO: 28126
  REGION 1..118: note = Description of Artificial Sequence: Synthetic polypeptide

SEQ ID NO: 29861 - DNA, 345 bp, synthetic construct
  misc_feature 1..345: note = Description of Artificial Sequence: Synthetic polynucleotide
  source 1..345: mol_type = other DNA
caggtgcagctacagcagtggggcgcaggactgttgaagccttcggagaccctgtccctcacctgcactgtctatggtggggccttcagtggttcctactggagctggatccgccagtccccagggaaggggctggagtggattggggaaatcaattataggggaagcaccaactacaacccgtccctcaagagtcgagtcaccatatcagtagacacgtccaagaaccagttctccctgaacctgagctctgtgaccgccgcggacacggctgtgtattactgtgcgagggactacggcggtatggacgtctggggccaagggaccacggtcaccgtctcctca

SEQ ID NO: 29862 - protein, 115 aa, synthetic construct
  REGION 1..115: note = Description of Artificial Sequence: Synthetic polypeptide
QVQLQQWGAGLLKPSETLSLTCTVYGGAFSGSYWSWIRQSPGKGLEWIGEINYRGSTNYNPSLKSRVTISVDTSKNQFSLNLSSVTAADTAVYYCARDYGGMDVWGQGTTVTVSS

SEQ ID NO: 29863 - DNA, 345 bp, synthetic construct; identical to SEQ ID NO: 29737
  misc_feature 1..345: note = Description of Artificial Sequence: Synthetic polynucleotide
  source 1..345: mol_type = other DNA

SEQ ID NO: 29864 - protein, 115 aa, synthetic construct; identical to SEQ ID NO: 29738
  REGION 1..115: note = Description of Artificial Sequence: Synthetic polypeptide

SEQ ID NO: 29865 - DNA, 354 bp, synthetic construct
  misc_feature 1..354: note = Description of Artificial Sequence: Synthetic polynucleotide
  source 1..354: mol_type = other DNA
caggtgcagctggtgcagtctggggctgaggtgaagaagcctggggcctctgtgaaggtctcctgcaaggcttctggatacaccttcaccaattatgatatcaactgggtgcgacaggccactggacaagggcttgagtggatgggatggatgaaccctaacagtggtaacacaggctatgcacagaagttccagggcagagtcaccatgaccagaaacacctccataagcacagcctacatggagctgagcagcctgagatctgaggacacggccgtatattactgtgcgagtagcagtggctggtacttctttgactactggggccagggaaccctggtcaccctctcctca

SEQ ID NO: 29866 - protein, 118 aa, synthetic construct
  REGION 1..118: note = Description of Artificial Sequence: Synthetic polypeptide
QVQLVQSGAEVKKPGASVKVSCKASGYTFTNYDINWVRQATGQGLEWMGWMNPNSGNTGYAQKFQGRVTMTRNTSISTAYMELSSLRSEDTAVYYCASSSGWYFFDYWGQGTLVTLSS

SEQ ID NO: 29867 - DNA, 345 bp, synthetic construct; identical to SEQ ID NO: 29737
  misc_feature 1..345: note = Description of Artificial Sequence: Synthetic polynucleotide
  source 1..345: mol_type = other DNA

SEQ ID NO: 29868 - protein, 115 aa, synthetic construct; identical to SEQ ID NO: 29738
  REGION 1..115: note = Description of Artificial Sequence: Synthetic polypeptide

SEQ ID NO: 29869 - DNA, 345 bp, synthetic construct; identical to SEQ ID NO: 29737
  misc_feature 1..345: note = Description of Artificial Sequence: Synthetic polynucleotide
  source 1..345: mol_type = other DNA

SEQ ID NO: 29870 - protein, 115 aa, synthetic construct; identical to SEQ ID NO: 29738
  REGION 1..115: note = Description of Artificial Sequence: Synthetic polypeptide

SEQ ID NO: 29871 - DNA, 345 bp, synthetic construct; identical to SEQ ID NO: 29737
  misc_feature 1..345: note = Description of Artificial Sequence: Synthetic polynucleotide
  source 1..345: mol_type = other DNA

SEQ ID NO: 29872 - protein, 115 aa, synthetic construct; identical to SEQ ID NO: 29738
  REGION 1..115: note = Description of Artificial Sequence: Synthetic polypeptide

SEQ ID NO: 29873 - DNA, 354 bp, synthetic construct; identical to SEQ ID NO: 29721
  misc_feature 1..354: note = Description of Artificial Sequence: Synthetic polynucleotide
  source 1..354: mol_type = other DNA

SEQ ID NO: 29874 - protein, 118 aa, synthetic construct; identical to SEQ ID NO: 29722
  REGION 1..118: note = Description of Artificial Sequence: Synthetic polypeptide

SEQ ID NO: 29875 - DNA, 354 bp, synthetic construct; identical to SEQ ID NO: 29807
  misc_feature 1..354: note = Description of Artificial Sequence: Synthetic polynucleotide
  source 1..354: mol_type = other DNA

SEQ ID NO: 29876 - protein, 118 aa, synthetic construct; identical to SEQ ID NO: 29808
  REGION 1..118: note = Description of Artificial Sequence: Synthetic polypeptide

SEQ ID NO: 29877 - DNA, 345 bp, synthetic construct; identical to SEQ ID NO: 29737
  misc_feature 1..345: note = Description of Artificial Sequence: Synthetic polynucleotide
  source 1..345: mol_type = other DNA

SEQ ID NO: 29878 - protein, 115 aa, synthetic construct; identical to SEQ ID NO: 29738
  REGION 1..115: note = Description of Artificial Sequence: Synthetic polypeptide

SEQ ID NO: 29879 - DNA, 354 bp, synthetic construct
  misc_feature 1..354: note = Description of Artificial Sequence: Synthetic polynucleotide
  source 1..354: mol_type = other DNA
caggtgcagctggtgcagtctggggctgaggtgaagaagcctggggcctcagtgaaggtctcctgcaaggcttctggatacaccttgaccaattatgatatcaactgggtgcgacaggccactggacaagggcttgagtggatgggatggatgaaccctaacagtggtaacacaggctatgcacagaagttccagggcagagtcaccatgaccaggaacacctccataagcacagcctacatggaactgagcagcctgagatctgaggacacggccgtgtattactgtgggagtaccagtggctggaacttctttgactactggggccagggaaccctggtcaccgtctcctca

SEQ ID NO: 29880 - protein, 118 aa, synthetic construct
  REGION 1..118: note = Description of Artificial Sequence: Synthetic polypeptide
QVQLVQSGAEVKKPGASVKVSCKASGYTLTNYDINWVRQATGQGLEWMGWMNPNSGNTGYAQKFQGRVTMTRNTSISTAYMELSSLRSEDTAVYYCGSTSGWNFFDYWGQGTLVTVSS

SEQ ID NO: 29881 - DNA, 345 bp, synthetic construct
  misc_feature 1..345: note = Description of Artificial Sequence: Synthetic polynucleotide
  source 1..345: mol_type = other DNA
caagtgcagctacagcagtggggcgcaggactgttgaagccttcggagcccctgtccctcacctgcgctgtctatggtgggtccttcagtggtccctactggagctggatccgccagccccccgggaaggggctggagtggattggggaaatcaatcatagtggaagcaccaactacaacccgtccctcaagagtcgagtcaccatatcagtagacacgtccaagaaccagttctccctgaaactgacctctgtgaccgccgcggacatggctgtgtattactgtgcgagagactacgggggtttggacgtctggggccaagggaccacggtcaccgtctcctca

SEQ ID NO: 29882 - protein, 115 aa, synthetic construct
  REGION 1..115: note = Description of Artificial Sequence: Synthetic polypeptide
QVQLQQWGAGLLKPSEPLSLTCAVYGGSFSGPYWSWIRQPPGKGLEWIGEINHSGSTNYNPSLKSRVTISVDTSKNQFSLKLTSVTAADMAVYYCARDYGGLDVWGQGTTVTVSS

SEQ ID NO: 29883 - DNA, 345 bp, synthetic construct
  misc_feature 1..345: note = Description of Artificial Sequence: Synthetic polynucleotide
  source 1..345: mol_type = other DNA
caggtgcagctacagcagtggggcgcaggactgttgaagccttcggagaccctgtccctcacctgcgctgtctatggtgggtccttcagtggttgctactggagctggatccgccagcccccaggaaaggggctggagtggattggggaaatcaatcatagtggaaggaccaactacaacccgtccctcaagagtcgagtcaccatatcagtagacacgtccgagaagcagttctccctgaagctgagctctgtgaccgccgcggacacggctgtgtattactgtgcgagagactacggtgggcttgactactggggccagggaaccctggtcaccgtctcctca

SEQ ID NO: 29884 - protein, 115 aa, synthetic construct
  REGION 1..115: note = Description of Artificial Sequence: Synthetic polypeptide
QVQLQQWGAGLLKPSETLSLTCAVYGGSFSGCYWSWIRQPPGKGLEWIGEINHSGRTNYNPSLKSRVTISVDTSEKQFSLKLSSVTAADTAVYYCARDYGGLDYWGQGTLVTVSS

SEQ ID NO: 29885 - DNA, 345 bp, synthetic construct
  misc_feature 1..345: note = Description of Artificial Sequence: Synthetic polynucleotide
  source 1..345: mol_type = other DNA
caggtgcagctacagcagtggggcgcaggactgttgaagccttcggagaccctgtccctcacctgcgctgtctatgttgggtccttcagtggttcctactggagctggatccgccagcccccagggaaggggctagagtggattggggaaatcaatcaaagtggacgcaccaactacaacccgtccctcaagagtcgagtcaccatatcagtagacacgtccaagaaccagttctccctgaagctgagctctgtgaccgccgcggacacggctgtgtattactgtgcgagagactacgggggtatagacgtctggggccaagggaccacggtcaccgtctcctca

SEQ ID NO: 29886 - protein, 115 aa, synthetic construct
  REGION 1..115: note = Description of Artificial Sequence: Synthetic polypeptide
QVQLQQWGAGLLKPSETLSLTCAVYVGSFSGSYWSWIRQPPGKGLEWIGEINQSGRTNYNPSLKSRVTISVDTSKNQFSLKLSSVTAADTAVYYCARDYGGIDVWGQGTTVTVSS

SEQ ID NO: 29887 - DNA, 354 bp, synthetic construct
  misc_feature 1..354: note = Description of Artificial Sequence: Synthetic polynucleotide
  source 1..354: mol_type = other DNA
caggtgcagctggtgcagtctggggctgaggtgaagaagcctggggcctcagtgaaggtctcctgcaagacttctggatacaccttcaccaattatgatatcaactgggtgcgacaggccactggacaagggcttgagtggatgggatggatgaaccctaacagtggtaacacaggctatgcacagaagttccaggtcagagtcaccatgaccaggaacacctccataagcacagcctacatggagctgagcagcctgagatctgaggacacggccgtctattactgtgcgtatagcagtggctggtacatctttgactactggggccagggaaccctggtcaccgtctcctca

SEQ ID NO: 29888 - protein, 118 aa, synthetic construct
  REGION 1..118: note = Description of Artificial Sequence: Synthetic polypeptide
QVQLVQSGAEVKKPGASVKVSCKTSGYTFTNYDINWVRQATGQGLEWMGWMNPNSGNTGYAQKFQVRVTMTRNTSISTAYMELSSLRSEDTAVYYCAYSSGWYIFDYWGQGTLVTVSS

SEQ ID NO: 29889 - DNA, 354 bp, synthetic construct; identical to SEQ ID NO: 29807
  misc_feature 1..354: note = Description of Artificial Sequence: Synthetic polynucleotide
  source 1..354: mol_type = other DNA

SEQ ID NO: 29890 - protein, 118 aa, synthetic construct; identical to SEQ ID NO: 29808
  REGION 1..118: note = Description of Artificial Sequence: Synthetic polypeptide

SEQ ID NO: 29891 - DNA, 345 bp, synthetic construct
  misc_feature 1..345: note = Description of Artificial Sequence: Synthetic polynucleotide
  source 1..345: mol_type = other DNA
caggtgcagctacagcagtggggcgcaggactgttgaagccttcggagaccctgtccctcacctgcgctgtctatggtgggtccttcagtggttgctactggagctggatccgccagcccccagggaaggggctggagtggattggggaaatcaatcatagtggaagcaccaactacaacccgtccctcaagagtcgagtcaccatatcagtagacacgtccaagaaccagttctccctgaagctgagctctgtgaccgccgcggacacggctgtgtattactgtgcgagagactacggtgggcttgactactggggccagggaaccctggtcaccgtctcctca

SEQ ID NO: 29892 - protein, 115 aa, synthetic construct
  REGION 1..115: note = Description of Artificial Sequence: Synthetic polypeptide
QVQLQQWGAGLLKPSETLSLTCAVYGGSFSGCYWSWIRQPPGKGLEWIGEINHSGSTNYNPSLKSRVTISVDTSKNQFSLKLSSVTAADTAVYYCARDYGGLDYWGQGTLVTVSS

SEQ ID NO: 29893 - DNA, 360 bp, synthetic construct; identical to SEQ ID NO: 29767
  misc_feature 1..360: note = Description of Artificial Sequence: Synthetic polynucleotide
  source 1..360: mol_type = other DNA

SEQ ID NO: 29894 - protein, 120 aa, synthetic construct; identical to SEQ ID NO: 29768
  REGION 1..120: note = Description of Artificial Sequence: Synthetic polypeptide

SEQ ID NO: 29895 - DNA, 360 bp, synthetic construct
  misc_feature 1..360: note = Description of Artificial Sequence: Synthetic polynucleotide
  source 1..360: mol_type = other DNA
caggtgcagctggtggagtctgggggaggcgtggtccagcctgggaggtccctgagactctcctgtgcagcgtctggattcaccttcagcagctatggcatgcactgggtccgccaggctccaggcaaggggctggagtgggtggcagttatatggtatgatggaagtaataaaaactatgcagactccgtgaagggccgattcaccatctccagagacaattccaagaacacgctgtctctgcaaatgaacagcctgagagccgaggacacggctgtgtattactgtgcgagagatggcagctatgggtatgacggccttgactactggggccagggaaccctggtcaccgtctcctca

SEQ ID NO: 29896 - protein, 120 aa, synthetic construct
  REGION 1..120: note = Description of Artificial Sequence: Synthetic polypeptide
QVQLVESGGGVVQPGRSLRLSCAASGFTFSSYGMHWVRQAPGKGLEWVAVIWYDGSNKNYADSVKGRFTISRDNSKNTLSLQMNSLRAEDTAVYYCARDGSYGYDGLDYWGQGTLVTVSS

SEQ ID NO: 29897 - DNA, 345 bp, synthetic construct; identical to SEQ ID NO: 29737
  misc_feature 1..345: note = Description of Artificial Sequence: Synthetic polynucleotide
  source 1..345: mol_type = other DNA

SEQ ID NO: 29898 - protein, 115 aa, synthetic construct; identical to SEQ ID NO: 29738
  REGION 1..115: note = Description of Artificial Sequence: Synthetic polypeptide

SEQ ID NO: 29899 - DNA, 354 bp, synthetic construct; identical to SEQ ID NO: 29749
  misc_feature 1..354: note = Description of Artificial Sequence: Synthetic polynucleotide
  source 1..354: mol_type = other DNA

SEQ ID NO: 29900 - protein, 118 aa, synthetic construct; identical to SEQ ID NO: 29750
  REGION 1..118: note = Description of Artificial Sequence: Synthetic polypeptide

SEQ ID NO: 29901 - DNA, 345 bp, synthetic construct; identical to SEQ ID NO: 29737
  misc_feature 1..345: note = Description of Artificial Sequence: Synthetic polynucleotide
  source 1..345: mol_type = other DNA

SEQ ID NO: 29902 - protein, 115 aa, synthetic construct; identical to SEQ ID NO: 29738
  REGION 1..115: note = Description of Artificial Sequence: Synthetic polypeptide

SEQ ID NO: 29903 - DNA, 345 bp, synthetic construct; identical to SEQ ID NO: 29737
  misc_feature 1..345: note = Description of Artificial Sequence: Synthetic polynucleotide
  source 1..345: mol_type = other DNA

SEQ ID NO: 29904 - protein, 115 aa, synthetic construct; identical to SEQ ID NO: 29738
  REGION 1..115: note = Description of Artificial Sequence: Synthetic polypeptide

SEQ ID NO: 29905 - DNA, 354 bp, synthetic construct; identical to SEQ ID NO: 28125
  misc_feature 1..354: note = Description of Artificial Sequence: Synthetic polynucleotide
  source 1..354: mol_type = other DNA

SEQ ID NO: 29906 - protein, 118 aa, synthetic construct; identical to SEQ ID NO: 28126
  REGION 1..118: note = Description of Artificial Sequence: Synthetic polypeptide

SEQ ID NO: 29907 - DNA, 354 bp, synthetic construct; identical to SEQ ID NO: 29807
  misc_feature 1..354: note = Description of Artificial Sequence: Synthetic polynucleotide
  source 1..354: mol_type = other DNA

SEQ ID NO: 29908 - protein, 118 aa, synthetic construct; identical to SEQ ID NO: 29808
  REGION 1..118: note = Description of Artificial Sequence: Synthetic polypeptide

SEQ ID NO: 29909 - DNA, 345 bp, synthetic construct
  misc_feature 1..345: note = Description of Artificial Sequence: Synthetic polynucleotide
  source 1..345: mol_type = other DNA
caggtgcagctacagcagtggggcgcaggactgttgaagccttcggagaccctgtccctcacctgcgctgtctatggtgggtccttcagtggtccctactggagctggatccgccagcccccagggaaggggctggagtggattggggaaatcaattataggggaagcaccaactacaacccgtccctcaagagtcgagtcaccatttcagtagacacgtccaagaaccagttctccctgaacctgagctctgtgaccgccgcggacacggctgtgtattactgtgcgagggactacggcggtatggacgtctggggccaagggaccacggtcaccgtctcctca

SEQ ID NO: 29910 - protein, 115 aa, synthetic construct
  REGION 1..115: note = Description of Artificial Sequence: Synthetic polypeptide
QVQLQQWGAGLLKPSETLSLTCAVYGGSFSGPYWSWIRQPPGKGLEWIGEINYRGSTNYNPSLKSRVTISVDTSKNQFSLNLSSVTAADTAVYYCARDYGGMDVWGQGTTVTVSS

SEQ ID NO: 29911 - DNA, 345 bp, synthetic construct; identical to SEQ ID NO: 29737
  misc_feature 1..345: note = Description of Artificial Sequence: Synthetic polynucleotide
  source 1..345: mol_type = other DNA

SEQ ID NO: 29912 - protein, 115 aa, synthetic construct; identical to SEQ ID NO: 29738
  REGION 1..115: note = Description of Artificial Sequence: Synthetic polypeptide

SEQ ID NO: 29913 - DNA, 354 bp, synthetic construct; identical to SEQ ID NO: 29749
  misc_feature 1..354: note = Description of Artificial Sequence: Synthetic polynucleotide
  source 1..354: mol_type = other DNA

SEQ ID NO: 29914 - protein, 118 aa, synthetic construct; identical to SEQ ID NO: 29750
  REGION 1..118: note = Description of Artificial Sequence: Synthetic polypeptide

SEQ ID NO: 29915 - DNA, 354 bp, synthetic construct; identical to SEQ ID NO: 29721
  misc_feature 1..354: note = Description of Artificial Sequence: Synthetic polynucleotide
  source 1..354: mol_type = other DNA

SEQ ID NO: 29916 - protein, 118 aa, synthetic construct; identical to SEQ ID NO: 29722
  REGION 1..118: note = Description of Artificial Sequence: Synthetic polypeptide

SEQ ID NO: 29917 - DNA, 354 bp, synthetic construct; identical to SEQ ID NO: 29721
  misc_feature 1..354: note = Description of Artificial Sequence: Synthetic polynucleotide
  source 1..354: mol_type = other DNA

SEQ ID NO: 29918 - protein, 118 aa, synthetic construct; identical to SEQ ID NO: 29722
  REGION 1..118: note = Description of Artificial Sequence: Synthetic polypeptide

SEQ ID NO: 29919 - DNA, 345 bp, synthetic construct; identical to SEQ ID NO: 29737
  misc_feature 1..345: note = Description of Artificial Sequence: Synthetic polynucleotide
  source 1..345: mol_type = other DNA

SEQ ID NO: 29920 - protein, 115 aa, synthetic construct; identical to SEQ ID NO: 29738
  REGION 1..115: note = Description of Artificial Sequence: Synthetic polypeptide

SEQ ID NO: 29921 - DNA, 354 bp, synthetic construct; identical to SEQ ID NO: 29749
  misc_feature 1..354: note = Description of Artificial Sequence: Synthetic polynucleotide
  source 1..354: mol_type = other DNA

SEQ ID NO: 29922 - protein, 118 aa, synthetic construct; identical to SEQ ID NO: 29750
  REGION 1..118: note = Description of Artificial Sequence: Synthetic polypeptide

SEQ ID NO: 29923 - DNA, 378 bp, synthetic construct
  misc_feature 1..378: note = Description of Artificial Sequence: Synthetic polynucleotide
  source 1..378: mol_type = other DNA
caggtgcagctggtgcagtctggggctgaggtgaagaagcctggggcctcagtgaaggtctcctgtaaggcttctggatacaccttcaccagttatgatatcaactgggtgcgacaggccactggacaagggcttgagtggatgggatggatgaaccctaacagtggtaacacaggctatgcacagaagttccagggcagagtcaccatgacctggaacacctccaaaagcacagcctacatggagctgagcagcctgagatctgaggacacggccgtgtattactgtgcgagaggcttttacgatactttgactggttccggctactactacgttatggacgtctggggccaagggaccacggtcaccgtctcctca

SEQ ID NO: 29924 - protein, 126 aa, synthetic construct
  REGION 1..126: note = Description of Artificial Sequence: Synthetic polypeptide
QVQLVQSGAEVKKPGASVKVSCKASGYTFTSYDINWVRQATGQGLEWMGWMNPNSGNTGYAQKFQGRVTMTWNTSKSTAYMELSSLRSEDTAVYYCARGFYDTLTGSGYYYVMDVWGQGTTVTVSS

SEQ ID NO: 29925 - DNA, 345 bp, synthetic construct; identical to SEQ ID NO: 29737
  misc_feature 1..345: note = Description of Artificial Sequence: Synthetic polynucleotide
  source 1..345: mol_type = other DNA

SEQ ID NO: 29926 - protein, 115 aa, synthetic construct; identical to SEQ ID NO: 29738
  REGION 1..115: note = Description of Artificial Sequence: Synthetic polypeptide

SEQ ID NO: 29927 - DNA, 354 bp, synthetic construct; identical to SEQ ID NO: 29721
  misc_feature 1..354: note = Description of Artificial Sequence: Synthetic polynucleotide
  source 1..354: mol_type = other DNA

SEQ ID NO: 29928 - protein, 118 aa, synthetic construct; identical to SEQ ID NO: 29722
  REGION 1..118: note = Description of Artificial Sequence: Synthetic polypeptide

SEQ ID NO: 29929 - DNA, 354 bp, synthetic construct; identical to SEQ ID NO: 29807
  misc_feature 1..354: note = Description of Artificial Sequence: Synthetic polynucleotide
  source 1..354: mol_type = other DNA

SEQ ID NO: 29930 - protein, 118 aa, synthetic construct; identical to SEQ ID NO: 29808
  REGION 1..118: note = Description of Artificial Sequence: Synthetic polypeptide

SEQ ID NO: 29931 - DNA, 354 bp, synthetic construct; identical to SEQ ID NO: 29807
  misc_feature 1..354: note = Description of Artificial Sequence: Synthetic polynucleotide
  source 1..354: mol_type = other DNA

SEQ ID NO: 29932 - protein, 118 aa, synthetic construct; identical to SEQ ID NO: 29808
  REGION 1..118: note = Description of Artificial Sequence: Synthetic polypeptide

SEQ ID NO: 29933 - DNA, 354 bp, synthetic construct; identical to SEQ ID NO: 29721
  misc_feature 1..354: note = Description of Artificial Sequence: Synthetic polynucleotide
  source 1..354: mol_type = other DNA

SEQ ID NO: 29934 - protein, 118 aa, synthetic construct; identical to SEQ ID NO: 29722
  REGION 1..118: note = Description of Artificial Sequence: Synthetic polypeptide

SEQ ID NO: 29935 - DNA, 345 bp, synthetic construct
  misc_feature 1..345: note = Description of Artificial Sequence: Synthetic polynucleotide
  source 1..345: mol_type = other DNA
caggtgcagctacagcagtggggcgcaggactgttgaagccttcggagaccctgtccctcacctgcgctgtctatggtgggtccttcagtggttgttactggagctggatccgccagcccccagggaaggggctggagtggattggggaaatcaatcatagtggaaggaccaactacaacccctccctcaagagtcgagtcaccatatcagtagacacgtccgagaaccagttctccctgaagctgagctctgtgaccgccgcggacacggctgtgtattactgtgcgagagactacggtgggcttgactactggggccagggaaccctggtcaccgtctcctca

SEQ ID NO: 29936 - protein, 115 aa, synthetic construct; identical to SEQ ID NO: 29790
  REGION 1..115: note = Description of Artificial Sequence: Synthetic polypeptide

SEQ ID NO: 29937 - DNA, 345 bp, synthetic construct; identical to SEQ ID NO: 29737
  misc_feature 1..345: note = Description of Artificial Sequence: Synthetic polynucleotide
  source 1..345: mol_type = other DNA

SEQ ID NO: 29938 - protein, 115 aa, synthetic construct; identical to SEQ ID NO: 29738
  REGION 1..115: note = Description of Artificial Sequence: Synthetic polypeptide

SEQ ID NO: 29939 - DNA, 354 bp, synthetic construct; identical to SEQ ID NO: 29759
  misc_feature 1..354: note = Description of Artificial Sequence: Synthetic polynucleotide
  source 1..354: mol_type = other DNA

SEQ ID NO: 29940 - protein, 118 aa, synthetic construct; identical to SEQ ID NO: 29760
  REGION 1..118: note = Description of Artificial Sequence: Synthetic polypeptide

SEQ ID NO: 29941 - DNA, 345 bp, synthetic construct
  misc_feature 1..345: note = Description of Artificial Sequence: Synthetic polynucleotide
  source 1..345: mol_type = other DNA
caggtgcagctacagcagtggggcgcaggactgttgaagccttcggagaccctgtccctcacctgcactgtctatggtgggtccttcagtggttactactggagctggatccgccagcccccagggaaggggctggaatggattggggaaatcaatcatagtggaagcaccaacttcaacccgtccctcaagagtcgagtcaccatatcagtagacacgtccaagaaccagttctccctgaagctgagctctgtgaccgccgcggacacggctgtgttttactgtgcgagagactacggtgggcttgactactggggccagggaaccctggtcaccgtctcctca

SEQ ID NO: 29942 - protein, 115 aa, synthetic construct
  REGION 1..115: note = Description of Artificial Sequence: Synthetic polypeptide
QVQLQQWGAGLLKPSETLSLTCTVYGGSFSGYYWSWIRQPPGKGLEWIGEINHSGSTNFNPSLKSRVTISVDTSKNQFSLKLSSVTAADTAVFYCARDYGGLDYWGQGTLVTVSS

SEQ ID NO: 29943 - DNA, 354 bp, synthetic construct
  misc_feature 1..354: note = Description of Artificial Sequence: Synthetic polynucleotide
  source 1..354: mol_type = other DNA
caggtgcagctggtgcagtctggggctgaggtgaagaagcctggggcctcagtgaaggtctcctgcaaggcttctggatacaccttcaccaattatgatatcaactgggtgcgacaggccactggacaagggcttgagtggatgggatggatgaaccctaacagtggtaacacaggctatgcacagaagttccagggcagagtcaccatgaccaggaacacctccataagcacagcctacatggagctgagcagcctgagatctgaggacacggccgtgtattactgtgcgtatagcagtggctggtacatctttgactactggggccagggaaccctggtcaccgtctcctca

SEQ ID NO: 29944 - protein, 118 aa, synthetic construct
  REGION 1..118: note = Description of Artificial Sequence: Synthetic polypeptide
QVQLVQSGAEVKKPGASVKVSCKASGYTFTNYDINWVRQATGQGLEWMGWMNPNSGNTGYAQKFQGRVTMTRNTSISTAYMELSSLRSEDTAVYYCAYSSGWYIFDYWGQGTLVTVSS

SEQ ID NO: 29945 - DNA, 354 bp, synthetic construct
  misc_feature 1..354: note = Description of Artificial Sequence: Synthetic polynucleotide
  source 1..354: mol_type = other DNA
caggtgcagctggtgcagtctggggctgaggtgaagaagcctggggcctcagtgaaggtctcctgcaaggcttctggatacaccttccccaattatgatatcaactgggtgcgacaggccactggacaagggcttgagtggatgggatggatgaaccctaacagtggtaacacaggctatgcacagaagttccaggacagagtcaccatgaccaggaacacctccataagcacagcctacatggagctgagcagcctgagatctgaggacacggccgtgtattattgtgcggtttccagtggctggcactggttcgacccctggggccagggaaccctggtcaccgtcgcctca

SEQ ID NO: 29946 - protein, 118 aa, synthetic construct
  REGION 1..118: note = Description of Artificial Sequence: Synthetic polypeptide
QVQLVQSGAEVKKPGASVKVSCKASGYTFPNYDINWVRQATGQGLEWMGWMNPNSGNTGYAQKFQDRVTMTRNTSISTAYMELSSLRSEDTAVYYCAVSSGWHWFDPWGQGTLVTVAS

SEQ ID NO: 29947 - DNA, 360 bp, synthetic construct
  misc_feature 1..360: note = Description of Artificial Sequence: Synthetic polynucleotide
  source 1..360: mol_type = other DNA
caggtgcagctggtggagtctgggggaggcgtggtccagcctgggaggtccctgagactctcctgtgcagcgtctggattcaccttcagtagctatggcatgcactgggtccgccaggctccaggcaaggggctggagtgggtggcagttatatggtatgatggaagtaataaaaactatgcagactccgtgaagggccgattcaccatctccagagacaattccaagaacacgctgtatctgcaaatgaacagcctgagagccgaggacacggctgtgtattactgtgcgagagatggcagctatggttacgacggccttgactactggggccagggaaccctggtcgccgtctcctca

SEQ ID NO: 29948 - protein, 120 aa, synthetic construct
  REGION 1..120: note = Description of Artificial Sequence: Synthetic polypeptide
QVQLVESGGGVVQPGRSLRLSCAASGFTFSSYGMHWVRQAPGKGLEWVAVIWYDGSNKNYADSVKGRFTISRDNSKNTLYLQMNSLRAEDTAVYYCARDGSYGYDGLDYWGQGTLVAVSS

SEQ ID NO: 29949 - DNA, 345 bp, synthetic construct
  misc_feature 1..345: note = Description of Artificial Sequence: Synthetic polynucleotide
  source 1..345: mol_type = other DNA
caggtgcagctacagcagtggggcgcaggactgttgaagccttcggagaccctgtccctcacctgcgctgtctatggtgggtccttcagtggttcctactggagctggatccgccagcccccagggaaggggctagagtggattggggaaatcaatcaaagtggacgcaccaactacaacccgtccctcaagagtcgagtcaccatatcagtagacacgtccaagaaccagttctccctgaagctgagctctgtgaccgccgcggacacggctgtgtattactgtgcgagagactacgggggtatagacgtctggggccaagggaccacggtcaccgtctcctca

SEQ ID NO: 29950 - protein, 115 aa, synthetic construct
  REGION 1..115: note = Description of Artificial Sequence: Synthetic polypeptide
QVQLQQWGAGLLKPSETLSLTCAVYGGSFSGSYWSWIRQPPGKGLEWIGEINQSGRTNYNPSLKSRVTISVDTSKNQFSLKLSSVTAADTAVYYCARDYGGIDVWGQGTTVTVSS

SEQ ID NO: 29951 - DNA, 363 bp, synthetic construct
  misc_feature 1..363: note = Description of Artificial Sequence: Synthetic polynucleotide
  source 1..363: mol_type = other DNA
caggtgcagctggtggagtctgggggaggcgtggtccagcctgggaggtccctgagactctcctgtgcagcgtctggattcaccttcagtagctatggcatacactgggtccgccaggctccaggcaaggggctggagtgggtggcagttatatggtatgatggaagtaataaatactatgcagactccgtgaagggccgattcaccatctccagagacaattccaagaacacgctgtatctgcaaatgaacagcctgagagccgaggacacggctgtgtattactgtgcgagagatccctttatagtgggagctacttactttgactactggggccagggaaccctggtcaccgtctcctca

SEQ ID NO: 29952 - protein, 121 aa, synthetic construct
  REGION 1..121: note = Description of Artificial Sequence: Synthetic polypeptide
QVQLVESGGGVVQPGRSLRLSCAASGFTFSSYGIHWVRQAPGKGLEWVAVIWYDGSNKYYADSVKGRFTISRDNSKNTLYLQMNSLRAEDTAVYYCARDPFIVGATYFDYWGQGTLVTVSS

SEQ ID NO: 29953 - DNA, 354 bp, synthetic construct; identical to SEQ ID NO: 29817
  misc_feature 1..354: note = Description of Artificial Sequence: Synthetic polynucleotide
  source 1..354: mol_type = other DNA

SEQ ID NO: 29954 - protein, 118 aa, synthetic construct; identical to SEQ ID NO: 29818
  REGION 1..118: note = Description of Artificial Sequence: Synthetic polypeptide

SEQ ID NO: 29955 - DNA, 345 bp, synthetic construct; identical to SEQ ID NO: 29737
  misc_feature 1..345: note = Description of Artificial Sequence: Synthetic polynucleotide
  source 1..345: mol_type = other DNA

SEQ ID NO: 29956 - protein, 115 aa, synthetic construct; identical to SEQ ID NO: 29738
  REGION 1..115: note = Description of Artificial Sequence: Synthetic polypeptide

SEQ ID NO: 29957 - DNA, 345 bp, synthetic construct; identical to SEQ ID NO: 29737
  misc_feature 1..345: note = Description of Artificial Sequence: Synthetic polynucleotide
  source 1..345: mol_type = other DNA

SEQ ID NO: 29958 - protein, 115 aa, synthetic construct; identical to SEQ ID NO: 29738
  REGION 1..115: note = Description of Artificial Sequence: Synthetic polypeptide

SEQ ID NO: 29959 - DNA, 354 bp, synthetic construct; identical to SEQ ID NO: 29721
  misc_feature 1..354: note = Description of Artificial Sequence: Synthetic polynucleotide
  source 1..354: mol_type = other DNA

SEQ ID NO: 29960 - protein, 118 aa, synthetic construct; identical to SEQ ID NO: 29722
  REGION 1..118: note = Description of Artificial Sequence: Synthetic polypeptide

SEQ ID NO: 29961 - DNA, 345 bp, synthetic construct; identical to SEQ ID NO: 29757
  misc_feature 1..345: note = Description of Artificial Sequence: Synthetic polynucleotide
  source 1..345: mol_type = other DNA

SEQ ID NO: 29962 - protein, 115 aa, synthetic construct; identical to SEQ ID NO: 29758
  REGION 1..115: note = Description of Artificial Sequence: Synthetic polypeptide

SEQ ID NO: 29963 - DNA, 345 bp, synthetic construct
  misc_feature 1..345: note = Description of Artificial Sequence: Synthetic polynucleotide
  source 1..345: mol_type = other DNA
caggtgcagctacagcagtggggcgcaggactgttgaagccttcggagaccctgtccctcacctgcgctgtctatggtgggtccttcagtgattgctactggagctggatccgccagcccccagggaaggggctggagtggattggggaaatcaatcatagtggaaggaccaactacaacccgtccctcaagagtcgagtcaccatatcagtagacacgtccgagaaccagttctccctgaagctgagctctgtgaccgccgcggacacggctgtgtattactgtgcgagagactacggtgggcttgactactggggccagggaaccctggtcaccgtctcctca

SEQ ID NO: 29964 - protein, 115 aa, synthetic construct
  REGION 1..115: note = Description of Artificial Sequence: Synthetic polypeptide
QVQLQQWGAGLLKPSETLSLTCAVYGGSFSDCYWSWIRQPPGKGLEWIGEINHSGRTNYNPSLKSRVTISVDTSENQFSLKLSSVTAADTAVYYCARDYGGLDYWGQGTLVTVSS

SEQ ID NO: 29965 - DNA, 345 bp, synthetic construct; identical to SEQ ID NO: 29765
  misc_feature 1..345: note = Description of Artificial Sequence: Synthetic polynucleotide
  source 1..345: mol_type = other DNA

SEQ ID NO: 29966 - protein, 115 aa, synthetic construct; identical to SEQ ID NO: 29766
  REGION 1..115: note = Description of Artificial Sequence: Synthetic polypeptide

SEQ ID NO: 29967 - DNA, 345 bp, synthetic construct; identical to SEQ ID NO: 29773
  misc_feature 1..345: note = Description of Artificial Sequence: Synthetic polynucleotide
  source 1..345: mol_type = other DNA

SEQ ID NO: 29968 - protein, 115 aa, synthetic construct; identical to SEQ ID NO: 29774
  REGION 1..115: note = Description of Artificial Sequence: Synthetic polypeptide

SEQ ID NO: 29969 - DNA, 354 bp, synthetic construct
  misc_feature 1..354: note = Description of Artificial Sequence: Synthetic polynucleotide
  source 1..354: mol_type = other DNA
caggtgcagctggtgcagtctggggctgaggtgaagaagcctggggcctcagtgaaggtctcctgcaaggcttctggatacaccttgaccaattatgatatcaactgggtgcgacaggccactggacaagggcttgagtggatgggatggatgaaccctaacagtggtaacacaggctatgcacagaagttccagggcagagtcaccatgaccaggaacacctccataagcacagcctacatggaactgagcagcctgagatctgaggacacggccgtgtattaccgtgggagtaccagtggctggaacttctttgactactggggccagggaaccctggtcaccgtctcctca

SEQ ID NO: 29970 - protein, 118 aa, synthetic construct
  REGION 1..118: note = Description of Artificial Sequence: Synthetic polypeptide
QVQLVQSGAEVKKPGASVKVSCKASGYTLTNYDINWVRQATGQGLEWMGWMNPNSGNTGYAQKFQGRVTMTRNTSISTAYMELSSLRSEDTAVYYRGSTSGWNFFDYWGQGTLVTVSS

SEQ ID NO: 29971 - DNA, 345 bp, synthetic construct
  misc_feature 1..345: note = Description of Artificial Sequence: Synthetic polynucleotide
  source 1..345: mol_type = other DNA
caggtacagctacagcagcggggcgcaggactgttgaagccttcggagaccctgtccctcacctgcgctgtctatggtgggtccttcagtggttgttactggagctggatccgccagccccccgggaaggggctggagtggattggggaaatcaatcatagtggaatcaccaactacaacccgtccctcaagagtcgagtcaccatatcagtagacacgtccaagaaccagttctccctgaagctgacctctgtgaccgccgcggacacggctgtgtattactgtgcgagagactacggtggtttggacgtctggggccaagggaccacggtcaccgtctcctca

SEQ ID NO: 29972 - protein, 115 aa, synthetic construct
  REGION 1..115: note = Description of Artificial Sequence: Synthetic polypeptide
QVQLQQRGAGLLKPSETLSLTCAVYGGSFSGCYWSWIRQPPGKGLEWIGEINHSGITNYNPSLKSRVTISVDTSKNQFSLKLTSVTAADTAVYYCARDYGGLDVWGQGTTVTVSS

SEQ ID NO: 29973 - DNA, 354 bp, synthetic construct; identical to SEQ ID NO: 28201
  misc_feature 1..354: note = Description of Artificial Sequence: Synthetic polynucleotide
  source 1..354: mol_type = other DNA

SEQ ID NO: 29974 - protein, 118 aa, synthetic construct; identical to SEQ ID NO: 28202
  REGION 1..118: note = Description of Artificial Sequence: Synthetic polypeptide

SEQ ID NO: 29975 - DNA, 354 bp, synthetic construct; identical to SEQ ID NO: 29721
  misc_feature 1..354: note = Description of Artificial Sequence: Synthetic polynucleotide
  source 1..354: mol_type = other DNA

SEQ ID NO: 29976 - protein, 118 aa, synthetic construct; identical to SEQ ID NO: 29722
  REGION 1..118: note = Description of Artificial Sequence: Synthetic polypeptide

SEQ ID NO: 29977 - DNA, 345 bp, synthetic construct; identical to SEQ ID NO: 29737
  misc_feature 1..345: note = Description of Artificial Sequence: Synthetic polynucleotide
  source 1..345: mol_type = other DNA

SEQ ID NO: 29978 - protein, 115 aa, synthetic construct; identical to SEQ ID NO: 29738
  REGION 1..115: note = Description of Artificial Sequence: Synthetic polypeptide

SEQ ID NO: 29979 - DNA, 345 bp, synthetic construct; identical to SEQ ID NO: 29737
  misc_feature 1..345: note = Description of Artificial Sequence: Synthetic polynucleotide
  source 1..345: mol_type = other DNA

SEQ ID NO: 29980 - protein, 115 aa, synthetic construct; identical to SEQ ID NO: 29738
  REGION 1..115: note = Description of Artificial Sequence: Synthetic polypeptide

SEQ ID NO: 29981 - DNA, 354 bp, synthetic construct
  misc_feature 1..354: note = Description of Artificial Sequence: Synthetic polynucleotide
  source 1..354: mol_type = other DNA
caggtgcagctggtgcagtctggggctgaggtgaagaagcctggggcctcagtgaaggtctcctgcaaggcttctggatacaccttcaccaattatgatatcaactgggtgcgacaggccactggacaagggcttgagtggatgggatggatgaaccctaacagtggtaacacaggctatgcacagaagttccagggcagagtcaccatgaccaggagcacctccacaagcacagcccacatggagctgagcagcctgagatctgaggacacggccgtgtattactgtgcggtttccagtggctggtcctggttcgacccctggggccagggaaccctggtcaccgtctcctca

SEQ ID NO: 29982 - protein, 118 aa, synthetic construct
  REGION 1..118: note = Description of Artificial Sequence: Synthetic polypeptide
QVQLVQSGAEVKKPGASVKVSCKASGYTFTNYDINWVRQATGQGLEWMGWMNPNSGNTGYAQKFQGRVTMTRSTSTSTAHMELSSLRSEDTAVYYCAVSSGWSWFDPWGQGTLVTVSS

SEQ ID NO: 29983 - DNA, 345 bp, synthetic construct; identical to SEQ ID NO: 29737
  misc_feature 1..345: note = Description of Artificial Sequence: Synthetic polynucleotide
  source 1..345: mol_type = other DNA

SEQ ID NO: 29984 - protein, 115 aa, synthetic construct; identical to SEQ ID NO: 29738
  REGION 1..115: note = Description of Artificial Sequence: Synthetic polypeptide

SEQ ID NO: 29985 - DNA, 345 bp, synthetic construct
  misc_feature 1..345: note = Description of Artificial Sequence: Synthetic polynucleotide
  source 1..345: mol_type = other DNA
caggtgcagctgcagccgtggggcgcaggactgttgaagccttcggagaccctgtccctcacctgcgctgtctatggtgggtccttcagtggttactactggagctggatccgccagcccccagggaaggggctggagtggattggggaaatcaatcatagtggacgcaccaactacaacccgtccctcaagagtcgagtcaccatatcagtagacacgtccaaggaccagttctccctgaagctgagctctgtgaccgccgcggacacggctgtgtattactgtgcgagagactacggtggtttggacgtctggggccaagggaccacggtcaccgtctcctca

SEQ ID NO: 29986 - protein, 115 aa, synthetic construct
  REGION 1..115: note = Description of Artificial Sequence: Synthetic polypeptide
QVQLQPWGAGLLKPSETLSLTCAVYGGSFSGYYWSWIRQPPGKGLEWIGEINHSGRTNYNPSLKSRVTISVDTSKDQFSLKLSSVTAADTAVYYCARDYGGLDVWGQGTTVTVSS

SEQ ID NO: 29987 - DNA, 345 bp, synthetic construct; identical to SEQ ID NO: 29737
  misc_feature 1..345: note = Description of Artificial Sequence: Synthetic polynucleotide
  source 1..345: mol_type = other DNA

SEQ ID NO: 29988 - protein, 115 aa, synthetic construct; identical to SEQ ID NO: 29738
  REGION 1..115: note = Description of Artificial Sequence: Synthetic polypeptide

SEQ ID NO: 29989 - DNA, 360 bp, synthetic construct
  misc_feature 1..360: note = Description of Artificial Sequence: Synthetic polynucleotide
  source 1..360: mol_type = other DNA
caggtgcagctggtggagtctgggggaggcgtggtccagcctgggaggtccctgagactctcctgtgcagcgtctggattcaccttcagtagctatggcatgcactgggtccgccaggctccaggcaaggggctggagtgggtggcagttatatggtatgatggaagtaataaaaactatgcagactccgtgaagggccgattcaccatctccagagacaattccaagaacacgctgtatctgcaaatgaacagcctgagagccgaggacacggctgtgtattactgtgcgagagattttggagtgggctactacggtatggacgtctggggccaagggaccacggtcaccgtctcctca

SEQ ID NO: 29990 - protein, 120 aa, synthetic construct
  REGION 1..120: note = Description of Artificial Sequence: Synthetic polypeptide
QVQLVESGGGVVQPGRSLRLSCAASGFTFSSYGMHWVRQAPGKGLEWVAVIWYDGSNKNYADSVKGRFTISRDNSKNTLYLQMNSLRAEDTAVYYCARDFGVGYYGMDVWGQGTTVTVSS

SEQ ID NO: 29991 - DNA, 345 bp, synthetic construct; identical to SEQ ID NO: 29737
  misc_feature 1..345: note = Description of Artificial Sequence: Synthetic polynucleotide
  source 1..345: mol_type = other DNA

SEQ ID NO: 29992 - protein, 115 aa, synthetic construct; identical to SEQ ID NO: 29738
  REGION 1..115: note = Description of Artificial Sequence: Synthetic polypeptide

SEQ ID NO: 29993 - DNA, 354 bp, synthetic construct; identical to SEQ ID NO: 29749
  misc_feature 1..354: note = Description of Artificial Sequence: Synthetic polynucleotide
  source 1..354: mol_type = other DNA

SEQ ID NO: 29994 - protein, 118 aa, synthetic construct; identical to SEQ ID NO: 29750
  REGION 1..118: note = Description of Artificial Sequence: Synthetic polypeptide

SEQ ID NO: 29995 - DNA, 354 bp, synthetic construct
  misc_feature 1..354: note = Description of Artificial Sequence: Synthetic polynucleotide
  source 1..354: mol_type = other DNA
caggtgcagctggtgcagtctggggctgaggtgaagaagcctggggcctcagtgaaggtctcctgcaaggcttctggatacaccttcaccaattatgatatcaactgggtgcgacaggccactggacaagggcttgagtggatgggatggatgaaccctaacagtggtaacacaggctatgcacagaagttccagggcagagtcaccatgaccaggaacacctccataagcacagcctacatggagctgagcagcctgagatctgaggacacggccgtgtattactgtgcctatagcagtggctggtacttctttgactactggggccagggaaccctggtcaccgtctcctca

SEQ ID NO: 29996 - protein, 118 aa, synthetic construct
  REGION 1..118: note = Description of Artificial Sequence: Synthetic polypeptide
QVQLVQSGAEVKKPGASVKVSCKASGYTFTNYDINWVRQATGQGLEWMGWMNPNSGNTGYAQKFQGRVTMTRNTSISTAYMELSSLRSEDTAVYYCAYSSGWYFFDYWGQGTLVTVSS

SEQ ID NO: 29997 - DNA, 345 bp, synthetic construct; identical to SEQ ID NO: 29737
  misc_feature 1..345: note = Description of Artificial Sequence: Synthetic polynucleotide
  source 1..345: mol_type = other DNA

SEQ ID NO: 29998 - protein, 115 aa, synthetic construct; identical to SEQ ID NO: 29738
  REGION 1..115: note = Description of Artificial Sequence: Synthetic polypeptide

SEQ ID NO: 29999 - DNA, 354 bp, synthetic construct
  misc_feature 1..354: note = Description of Artificial Sequence: Synthetic polynucleotide
  source 1..354: mol_type = other DNA
caggtgcagctggtgcagtctggggctgaggtgaagaagcctggggcctcagtgaaggtctcctgcaaggcttctggatacaccttcaccaattatgatatcaactgggtgcgacaggccactggacaagggcttgagtggatgggatggatgaaccctaacagtggtaacacaggctatgcacagaagttccagggcagagtcaccatgaccaggaacacctccataagcacagcctacatggagctgagcagcctgagatctgaggacacggccgtgtattactgtgcgtatagcagtggctggtactactttgactactggggccagggaaccctggtcaccgtctcctca

SEQ ID NO: 30000 - protein, 118 aa, synthetic construct
  REGION 1..118: note = Description of Artificial Sequence: Synthetic polypeptide
QVQLVQSGAEVKKPGASVKVSCKASGYTFTNYDINWVRQATGQGLEWMGWMNPNSGNTGYAQKFQGRVTMTRNTSISTAYMELSSLRSEDTAVYYCAYSSGWYYFDYWGQGTLVTVSS

SEQ ID NO: 30001 - DNA, 345 bp, synthetic construct; identical to SEQ ID NO: 29737
  misc_feature 1..345: note = Description of Artificial Sequence: Synthetic polynucleotide
  source 1..345: mol_type = other DNA

SEQ ID NO: 30002 - protein, 115 aa, synthetic construct; identical to SEQ ID NO: 29738
  REGION 1..115: note = Description of Artificial Sequence: Synthetic polypeptide

SEQ ID NO: 30003 - DNA, 354 bp, synthetic construct; identical to SEQ ID NO: 29807
  misc_feature 1..354: note = Description of Artificial Sequence: Synthetic polynucleotide
  source 1..354: mol_type = other DNA

SEQ ID NO: 30004 - protein, 118 aa, synthetic construct; identical to SEQ ID NO: 29808
  REGION 1..118: note = Description of Artificial Sequence: Synthetic polypeptide

SEQ ID NO: 30005 - DNA, 354 bp, synthetic construct
  misc_feature 1..354: note = Description of Artificial Sequence: Synthetic polynucleotide
  source 1..354: mol_type = other DNA
caggtgcagctggtgcagtctggggctgaggtgaagaagcctggggcctcagtgaaggtctcctgcaaggcttctggatacaccttcaccaattatgatatcaactgggtgcgacaggccactggacaagggcttgagtggatgggatggatgaaccctaacagtggtgacacaggctatgcacagaagttccagggcagtgtcaccatgaccaggaacacctccataaccacagcctacatggagctgagcagcctgagatctgaggacacggccgtgtattactgttcgtatagcagtggctggtactactttgactactggggccagggaaccctggtcaccgtctcctca

SEQ ID NO: 30006 - protein, 118 aa, synthetic construct
  REGION 1..118: note = Description of Artificial Sequence: Synthetic polypeptide
QVQLVQSGAEVKKPGASVKVSCKASGYTFTNYDINWVRQATGQGLEWMGWMNPNSGDTGYAQKFQGSVTMTRNTSITTAYMELSSLRSEDTAVYYCSYSSGWYYFDYWGQGTLVTVSS

SEQ ID NO: 30007 - DNA, 387 bp, synthetic construct
  misc_feature 1..387: note = Description of Artificial Sequence: Synthetic polynucleotide
  source 1..387: mol_type = other DNA
caggtgcagctggtgcagtctggggctgaggtgaagaagcctggggcctcagtgaaggtctcctgcaaggcttctggatacaccttcaccagttatgatatcaactgggtgcgacaggccactggacaagggcttgagtggatgggatggatgaaccctaacagtggtaacacaggctatgcacagaagttccagggcagagtcaccatgacctggaacacctccatacgcactgcctacatggagctgagcagcctgagatctgaggacacggccgtgtattactgtgcgcgagggttttacgattttttgactggttattcccccacctactactactacgatatggacgtctggggccaagggaccacggtcaccgtctcctca

SEQ ID NO: 30008 - protein, 129 aa, synthetic construct
  REGION 1..129: note = Description of Artificial Sequence: Synthetic polypeptide
QVQLVQSGAEVKKPGASVKVSCKASGYTFTSYDINWVRQATGQGLEWMGWMNPNSGNTGYAQKFQGRVTMTWNTSIRTAYMELSSLRSEDTAVYYCARGFYDFLTGYSPTYYYYDMDVWGQGTTVTVSS

SEQ ID NO: 30009 - DNA, 345 bp, synthetic construct; identical to SEQ ID NO: 29737
  misc_feature 1..345: note = Description of Artificial Sequence: Synthetic polynucleotide
  source 1..345: mol_type = other DNA

SEQ ID NO: 30010 - protein, 115 aa, synthetic construct; identical to SEQ ID NO: 29738
  REGION 1..115: note = Description of Artificial Sequence: Synthetic polypeptide

SEQ ID NO: 30011 - DNA, 345 bp, synthetic construct; identical to SEQ ID NO: 29737
  misc_feature 1..345: note = Description of Artificial Sequence: Synthetic polynucleotide
  source 1..345: mol_type = other DNA

SEQ ID NO: 30012 - protein, 115 aa, synthetic construct; identical to SEQ ID NO: 29738
  REGION 1..115: note = Description of Artificial Sequence: Synthetic polypeptide

SEQ ID NO: 30013 - DNA, 345 bp, synthetic construct; identical to SEQ ID NO: 29737
  misc_feature 1..345: note = Description of Artificial Sequence: Synthetic polynucleotide
  source 1..345: mol_type = other DNA

SEQ ID NO: 30014 - protein, 115 aa, synthetic construct; identical to SEQ ID NO: 29738
  REGION 1..115: note = Description of Artificial Sequence: Synthetic polypeptide

SEQ ID NO: 30015 - DNA, 354 bp, synthetic construct
  misc_feature 1..354: note = Description of Artificial Sequence: Synthetic polynucleotide
  source 1..354: mol_type = other DNA
caggtgcagctggtgcagtctggggctgaggtgaagaagcctggggcctcagtgagggtctcctgcaaggcttctggatacaccttcagcaattatgatatcaactgggtgcgacaggccactggacaagggcttgagtggatgggatggatgacccctaacagtggtaacacaggctatgcacagaagttccagggcagagtcaccatgaccaggaacacctccataagcacagcctacatggagctgagcagcctgagatctgaggacacggccgtgtattactgtgcgagtagcagtggctggtactactttgactcctggggccagggaaccctggtcaccgtctcctta

SEQ ID NO: 30016 - protein, 118 aa, synthetic construct
  REGION 1..118: note = Description of Artificial Sequence: Synthetic polypeptide
QVQLVQSGAEVKKPGASVRVSCKASGYTFSNYDINWVRQATGQGLEWMGWMTPNSGNTGYAQKFQGRVTMTRNTSISTAYMELSSLRSEDTAVYYCASSSGWYYFDSWGQGTLVTVSL

SEQ ID NO: 30017 - DNA, 345 bp, synthetic construct; identical to SEQ ID NO: 29737
  misc_feature 1..345: note = Description of Artificial Sequence: Synthetic polynucleotide
  source 1..345: mol_type = other DNA

SEQ ID NO: 30018 - protein, 115 aa, synthetic construct; identical to SEQ ID NO: 29738
  REGION 1..115: note = Description of Artificial Sequence: Synthetic polypeptide

SEQ ID NO: 30019 - DNA, 375 bp, synthetic construct
  misc_feature 1..375: note = Description of Artificial Sequence: Synthetic polynucleotide
  source 1..375: mol_type = other DNA
gaggtgcagctggtggagtctgggggaggcttggtacagccgggggggtccctgagactctcctgtgcagcctctggattcaccttcagtagctacgacatgcactgggtccgccaagctacaggaaaaggtctggagtgggtctcagctattggtactgctggtgacacatactatccaggctccgtgaagggccgattcaccatctccagagaaaatgccaagaactccttgtatcttcaaatgaacagcctgagagccggggacacggctgtgtatttctgtgcaagagctcttgactacggtgactccttgggctactactactacggtatggacgtctggggccaagggaccacggtcaccgtctcctca

SEQ ID NO: 30020 - protein, 125 aa, synthetic construct
  REGION 1..125: note = Description of Artificial Sequence: Synthetic polypeptide
EVQLVESGGGLVQPGGSLRLSCAASGFTFSSYDMHWVRQATGKGLEWVSAIGTAGDTYYPGSVKGRFTISRENAKNSLYLQMNSLRAGDTAVYFCARALDYGDSLGYYYYGMDVWGQGTTVTVSS

SEQ ID NO: 30021 - DNA, 345 bp, synthetic construct; identical to SEQ ID NO: 29737
  misc_feature 1..345: note = Description of Artificial Sequence: Synthetic polynucleotide
  source 1..345: mol_type = other DNA

SEQ ID NO: 30022 - protein, 115 aa, synthetic construct; identical to SEQ ID NO: 29738
  REGION 1..115: note = Description of Artificial Sequence: Synthetic polypeptide

SEQ ID NO: 30023 - DNA, 345 bp, synthetic construct
  misc_feature 1..345: note = Description of Artificial Sequence: Synthetic polynucleotide
  source 1..345: mol_type = other DNA
caggtgcagctacaacagtggggcgcaggactgttgaagccttcggagaccctgtccctcacttgcgctgtctatggtgggtccttcagtggttgctactggagctggatccgccagcccccagggaaggggctggagtggattggggaaatcaattatagtggaagcaccaacttcaacccgtccctcaagagtcgagtcaccatatcagctgacacgtccaagaaccagttctccctgaagctgagctctgtgaccgccgcggacacggctgtgtattactgtgcgagagactacggcggtatggacgtctggggccaagggaccacggtcaccgtctcctca

SEQ ID NO: 30024 - protein, 115 aa, synthetic construct
  REGION 1..115: note = Description of Artificial Sequence: Synthetic polypeptide
QVQLQQWGAGLLKPSETLSLTCAVYGGSFSGCYWSWIRQPPGKGLEWIGEINYSGSTNFNPSLKSRVTISADTSKNQFSLKLSSVTAADTAVYYCARDYGGMDVWGQGTTVTVSS

SEQ ID NO: 30025 - DNA, 345 bp, synthetic construct; identical to SEQ ID NO: 29737
  misc_feature 1..345: note = Description of Artificial Sequence: Synthetic polynucleotide
  source 1..345: mol_type = other DNA

SEQ ID NO: 30026 - protein, 115 aa, synthetic construct; identical to SEQ ID NO: 29738
  REGION 1..115: note = Description of Artificial Sequence: Synthetic polypeptide

SEQ ID NO: 30027 - DNA, 345 bp, synthetic construct
  misc_feature 1..345: note = Description of Artificial Sequence: Synthetic polynucleotide
  source 1..345: mol_type = other DNA
caggtgcagctgcagccgtggggcgcaggactgttgaagccttcggagaccctgtccctcacctgcgctgtctatggtgggtccttcagtggttactactggagctggatccgccagcccccagggaaggggctggagtggattggggaaatcaatcatagtggacgcaccagctacaacccgtccctcaagagtcgagtcaccatatcagtagacacgtccaagaaccagttctccctgaagctgagctctgtgaccgccgcggacacggctgtgtattactgtgcgagagactacggtggtttggacgtctggggccaagggaccacggtcaccgtctcctca

SEQ ID NO: 30028 - protein, 115 aa, synthetic construct
  REGION 1..115: note = Description of Artificial Sequence: Synthetic polypeptide
QVQLQPWGAGLLKPSETLSLTCAVYGGSFSGYYWSWIRQPPGKGLEWIGEINHSGRTSYNPSLKSRVTISVDTSKNQFSLKLSSVTAADTAVYYCARDYGGLDVWGQGTTVTVSS

SEQ ID NO: 30029 - DNA, 345 bp, synthetic construct; identical to SEQ ID NO: 29737
  misc_feature 1..345: note = Description of Artificial Sequence: Synthetic polynucleotide
  source 1..345: mol_type = other DNA

SEQ ID NO: 30030 - protein, 115 aa, synthetic construct; identical to SEQ ID NO: 29738
  REGION 1..115: note = Description of Artificial Sequence: Synthetic polypeptide

SEQ ID NO: 30031 - DNA, 345 bp, synthetic construct; identical to SEQ ID NO: 29737
  misc_feature 1..345: note = Description of Artificial Sequence: Synthetic polynucleotide
  source 1..345: mol_type = other DNA

SEQ ID NO: 30032 - protein, 115 aa, synthetic construct; identical to SEQ ID NO: 29738
  REGION 1..115: note = Description of Artificial Sequence: Synthetic polypeptide

SEQ ID NO: 30033 - DNA, 345 bp, synthetic construct; identical to SEQ ID NO: 29737
  misc_feature 1..345: note = Description of Artificial Sequence: Synthetic polynucleotide
  source 1..345: mol_type = other DNA

SEQ ID NO: 30034 - protein, 115 aa, synthetic construct; identical to SEQ ID NO: 29738
  REGION 1..115: note = Description of Artificial Sequence: Synthetic polypeptide

SEQ ID NO: 30035 - DNA, 351 bp, synthetic construct
  misc_feature 1..351: note = Description of Artificial Sequence: Synthetic polynucleotide
  source 1..351: mol_type = other DNA
caggtgcagctggtggagtctgggggaggcgtggtccagcctgggaggtccctgagactctcctgtgcagcgtctggattcaccttcagtgactatggcatgcactgggtccgccagtctccaggcaaggggctggagtgggtggcagttatatggtatgaaggaagtaatacatactatgcagactccgtgaagggccgattcaccatctccagagacaattccaagaacacgctgtatctgcaaatgaacagcctgagagccgaggacacggctgtatattactgtgtgagagagatggggtggttagatgactactggggccagggaaccctggtcaccgtctcctca

SEQ ID NO: 30036 - protein, 117 aa, synthetic construct
  REGION 1..117: note = Description of Artificial Sequence: Synthetic polypeptide
QVQLVESGGGVVQPGRSLRLSCAASGFTFSDYGMHWVRQSPGKGLEWVAVIWYEGSNTYYADSVKGRFTISRDNSKNTLYLQMNSLRAEDTAVYYCVREMGWLDDYWGQGTLVTVSS

SEQ ID NO: 30037 - DNA, 354 bp, synthetic construct; identical to SEQ ID NO: 29759
  misc_feature 1..354: note = Description of Artificial Sequence: Synthetic polynucleotide
  source 1..354: mol_type = other DNA

SEQ ID NO: 30038 - protein, 118 aa, synthetic construct; identical to SEQ ID NO: 29760
  REGION 1..118: note = Description of Artificial Sequence: Synthetic polypeptide

SEQ ID NO: 30039 - DNA, 354 bp, synthetic construct
  misc_feature 1..354: note = Description of Artificial Sequence: Synthetic polynucleotide
  source 1..354: mol_type = other DNA
caggtgcagctggtgcagtctggggctgaggtgaagaagcctggggcctcagtgaaggtctcctgcaaggcttctggatacaccttcaccaattatgatatcaactgggtgcgacaggccactggacaagggcttgagtggatgggatggatgcaccctaacagtggtaacacaggctatgcacagaagttccagggcagagtcaccatgaccaggaacacctccataagcacagcctacatggagctgagcagcctgagatctgaggacacggccgtgtattactgtgcctatagcagtggctggtacatctttgactactggggccagggaaccctggtcaccgtctcctca

SEQ ID NO: 30040 - protein, 118 aa, synthetic construct
  REGION 1..118: note = Description of Artificial Sequence: Synthetic polypeptide
QVQLVQSGAEVKKPGASVKVSCKASGYTFTNYDINWVRQATGQGLEWMGWMHPNSGNTGYAQKFQGRVTMTRNTSISTAYMELSSLRSEDTAVYYCAYSSGWYIFDYWGQGTLVTVSS

SEQ ID NO: 30041 - DNA, 345 bp, synthetic construct; identical to SEQ ID NO: 29737
  misc_feature 1..345: note = Description of Artificial Sequence: Synthetic polynucleotide
  source 1..345: mol_type = other DNA

SEQ ID NO: 30042 - protein, 115 aa, synthetic construct; identical to SEQ ID NO: 29738
  REGION 1..115: note = Description of Artificial Sequence: Synthetic polypeptide

SEQ ID NO: 30043 - DNA, 375 bp, synthetic construct; identical to SEQ ID NO: 29783
  misc_feature 1..375: note = Description of Artificial Sequence: Synthetic polynucleotide
  source 1..375: mol_type = other DNA

SEQ ID NO: 30044 - protein, 125 aa, synthetic construct; identical to SEQ ID NO: 29784
  REGION 1..125: note = Description of Artificial Sequence: Synthetic polypeptide

SEQ ID NO: 30045 - DNA, 354 bp, synthetic construct; identical to SEQ ID NO: 29807
  misc_feature 1..354: note = Description of Artificial Sequence: Synthetic polynucleotide
  source 1..354: mol_type = other DNA

SEQ ID NO: 30046 - protein, 118 aa, synthetic construct; identical to SEQ ID NO: 29808
  REGION 1..118: note = Description of Artificial Sequence: Synthetic polypeptide

SEQ ID NO: 30047 - DNA, 345 bp, synthetic construct; identical to SEQ ID NO: 29737
  misc_feature 1..345: note = Description of Artificial Sequence: Synthetic polynucleotide
  source 1..345: mol_type = other DNA

SEQ ID NO: 30048 - protein, 115 aa, synthetic construct; identical to SEQ ID NO: 29738
  REGION 1..115: note = Description of Artificial Sequence: Synthetic polypeptide

SEQ ID NO: 30049 - DNA, 345 bp, synthetic construct; identical to SEQ ID NO: 29737
  misc_feature 1..345: note = Description of Artificial Sequence: Synthetic polynucleotide
  source 1..345: mol_type = other DNA

SEQ ID NO: 30050 - protein, 115 aa, synthetic construct; identical to SEQ ID NO: 29738
  REGION 1..115: note = Description of Artificial Sequence: Synthetic polypeptide

SEQ ID NO: 30051 - DNA, 345 bp, synthetic construct; identical to SEQ ID NO: 29737
  misc_feature 1..345: note = Description of Artificial Sequence: Synthetic polynucleotide
  source 1..345: mol_type = other DNA

SEQ ID NO: 30052 - protein, 115 aa, synthetic construct; identical to SEQ ID NO: 29738
  REGION 1..115: note = Description of Artificial Sequence: Synthetic polypeptide

SEQ ID NO: 30053 - DNA, 345 bp, synthetic construct; identical to SEQ ID NO: 29737
  misc_feature 1..345: note = Description of Artificial Sequence: Synthetic polynucleotide
  source 1..345: mol_type = other DNA

SEQ ID NO: 30054 - protein, 115 aa, synthetic construct; identical to SEQ ID NO: 29738
  REGION 1..115: note = Description of Artificial Sequence: Synthetic polypeptide

SEQ ID NO: 30055 - DNA, 354 bp, synthetic construct; identical to SEQ ID NO: 29807
  misc_feature 1..354: note = Description of Artificial Sequence: Synthetic polynucleotide
  source 1..354: mol_type = other DNA

SEQ ID NO: 30056 - protein, 118 aa, synthetic construct; identical to SEQ ID NO: 29808
  REGION 1..118: note = Description of Artificial Sequence: Synthetic polypeptide

SEQ ID NO: 30057 - DNA, 345 bp, synthetic construct; identical to SEQ ID NO: 29737
  misc_feature 1..345: note = Description of Artificial Sequence: Synthetic polynucleotide
  source 1..345: mol_type = other DNA

SEQ ID NO: 30058 - protein, 115 aa, synthetic construct; identical to SEQ ID NO: 29738
  REGION 1..115: note = Description of Artificial Sequence: Synthetic polypeptide

SEQ ID NO: 30059 - DNA, 345 bp, synthetic construct
  misc_feature 1..345: note = Description of Artificial Sequence: Synthetic polynucleotide
  source 1..345: mol_type = other DNA
caggtgcagctacagcagtggggcgcaggactgttgaagccttcggagaccctgtccctcacctgcgctgtctatggtgggtccttcagtggttcctactggagctggatccgccagcccccagggaaggggctggagtggattggggaaatcaattataggggaagcaccaactacaacccgtccctcaagagtcgagtcgccatatcagtagacacgtccaagaaccagttctccctgaacctgacctctgtgaccgccgcggacacggctgtgtattactgtgcgagggactacggcggtttggacgtctggggccaagggaccacggtcaccgtctcctca

SEQ ID NO: 30060 - protein, 115 aa, synthetic construct
  REGION 1..115: note = Description of Artificial Sequence: Synthetic polypeptide
QVQLQQWGAGLLKPSETLSLTCAVYGGSFSGSYWSWIRQPPGKGLEWIGEINYRGSTNYNPSLKSRVAISVDTSKNQFSLNLTSVTAADTAVYYCARDYGGLDVWGQGTTVTVSS

SEQ ID NO: 30061 - DNA, 375 bp, synthetic construct
  misc_feature 1..375: note = Description of Artificial Sequence: Synthetic polynucleotide
  source 1..375: mol_type = other DNA
gaggtgcagctggtggagtctgggggaggcttggtacagccgggggggtccctgagactctcctgtgcagcctctggattcaccttcagtaactacgacatgcactgggtccgccaagctacaggaaaaggtctggagtgggtctcagctattggtactgctggtgacacatactatccaggctccgtgaagggccgattcaccatctccagagaaaatgccaagaactccttgtatcttcaaatgaacagcctgagagccggggacacggctgtgtatttctgtgcaagagctcttgactacggtgactccttgggctactactactacggtatggacgtctggggccaagggaccacggtcaccgtctcctca

SEQ ID NO: 30062 - protein, 125 aa, synthetic construct
  REGION 1..125: note = Description of Artificial Sequence: Synthetic polypeptide
EVQLVESGGGLVQPGGSLRLSCAASGFTFSNYDMHWVRQATGKGLEWVSAIGTAGDTYYPGSVKGRFTISRENAKNSLYLQMNSLRAGDTAVYFCARALDYGDSLGYYYYGMDVWGQGTTVTVSS

SEQ ID NO: 30063 - DNA, 363 bp, synthetic construct
  misc_feature 1..363: note = Description of Artificial Sequence: Synthetic polynucleotide
  source 1..363: mol_type = other DNA
caggtgcagctggtggagtctgggggaggcgtggtccagcctgggaggtccctgagactctcctgtgcagcgtctggattcaccttcagtagctatggcatgcactgggtccgccaggctccaggcaaggggctggagtgggtggcagttatatggtatgatggaagtaataaatactatgcagactccgtgaagggccgattcaccatctccagagacaattccaagaacacgctgtatctgcaaatgaacagcctgagagccgaggacacggctgtgtattactgtgcgagagatccctttatagtgggagctacttactttgactactggggccagggaaccctggtcaccgtctcctca

SEQ ID NO: 30064 - protein, 121 aa, synthetic construct
  REGION 1..121: note = Description of Artificial Sequence: Synthetic polypeptide
QVQLVESGGGVVQPGRSLRLSCAASGFTFSSYGMHWVRQAPGKGLEWVAVIWYDGSNKYYADSVKGRFTISRDNSKNTLYLQMNSLRAEDTAVYYCARDPFIVGATYFDYWGQGTLVTVSS

SEQ ID NO: 30065 - DNA, 345 bp, synthetic construct; identical to SEQ ID NO: 29737
  misc_feature 1..345: note = Description of Artificial Sequence: Synthetic polynucleotide
  source 1..345: mol_type = other DNA

SEQ ID NO: 30066 - protein, 115 aa, synthetic construct; identical to SEQ ID NO: 29738
  REGION 1..115: note = Description of Artificial Sequence: Synthetic polypeptide

SEQ ID NO: 30067 - DNA, 354 bp, synthetic construct
  misc_feature 1..354: note = Description of Artificial Sequence: Synthetic polynucleotide
  source 1..354: mol_type = other DNA
caggtgcagctggtgcagtctggggctgaggtgaagaaacctggggcctcagtgagggtctcctgcaaggcttctggatacaccttcaccaattatgatatcaactgggtgcgacaggccactggacaagggcttgagtggatgggatggatgcaccctaacagtggtaacacaggctatgcacagaagttccagggcagagtcaccatgaccaggaacacctccatgagcacagcctacatggagctgagcagcctgagatctgaggacacggccgtgtattactgtgcccatagcagtggctggtacttttttgactactggggccagggaaccctggtcaccgtctcctca

SEQ ID NO: 30068 - protein, 118 aa, synthetic construct
  REGION 1..118: note = Description of Artificial Sequence: Synthetic polypeptide
QVQLVQSGAEVKKPGASVRVSCKASGYTFTNYDINWVRQATGQGLEWMGWMHPNSGNTGYAQKFQGRVTMTRNTSMSTAYMELSSLRSEDTAVYYCAHSSGWYFFDYWGQGTLVTVSS

SEQ ID NO: 30069 - DNA, 345 bp, synthetic construct; identical to SEQ ID NO: 29737
  misc_feature 1..345: note = Description of Artificial Sequence: Synthetic polynucleotide
  source 1..345: mol_type = other DNA

SEQ ID NO: 30070 - protein, 115 aa, synthetic construct; identical to SEQ ID NO: 29738
  REGION 1..115: note = Description of Artificial Sequence: Synthetic polypeptide

SEQ ID NO: 30071 - DNA, 354 bp, synthetic construct
  misc_feature 1..354: note = Description of Artificial Sequence: Synthetic polynucleotide
  source 1..354: mol_type = other DNA
caggtgcagctggtgcagtctggggctgaggtgaagaagcctggggcctcagtgaaggtctcctgcaaggcttctggatacaccttgaccaattatgatatcaactgggtgcgacaggccactggacaagggcttgagtggatgggatggatgaaccctaacagtggtaacacaggctatgcacagaagttccagggcagagtcaccatgaccaggaacacctccataagcacagcctacatggaactgagcagcctgagatctgaggacacggccgtgtattaccgtgggagtaccagtggcgggaagttcttcgactactggggccagggaaccctggtcaccgtctcctca

SEQ ID NO: 30072 - protein, 118 aa, synthetic construct
  REGION 1..118: note = Description of Artificial Sequence: Synthetic polypeptide
QVQLVQSGAEVKKPGASVKVSCKASGYTLTNYDINWVRQATGQGLEWMGWMNPNSGNTGYAQKFQGRVTMTRNTSISTAYMELSSLRSEDTAVYYRGSTSGGKFFDYWGQGTLVTVSS

SEQ ID NO: 30073 - DNA, 345 bp, synthetic construct; identical to SEQ ID NO: 29737
  misc_feature 1..345: note = Description of Artificial Sequence: Synthetic polynucleotide
  source 1..345: mol_type = other DNA

SEQ ID NO: 30074 - protein, 115 aa, synthetic construct; identical to SEQ ID NO: 29738
  REGION 1..115: note = Description of Artificial Sequence: Synthetic polypeptide

SEQ ID NO: 30075 - DNA, 345 bp, synthetic construct; identical to SEQ ID NO: 29737
  misc_feature 1..345: note = Description of Artificial Sequence: Synthetic polynucleotide
  source 1..345: mol_type = other DNA

SEQ ID NO: 30076 - protein, 115 aa, synthetic construct; identical to SEQ ID NO: 29738
  REGION 1..115: note = Description of Artificial Sequence: Synthetic polypeptide

SEQ ID NO: 30077 - DNA, 345 bp, synthetic construct
  misc_feature 1..345: note = Description of Artificial Sequence: Synthetic polynucleotide
  source 1..345: mol_type = other DNA
caggtgcagctacagcagtggggcgcaggactgttgaagccttcggagaccctgtccctcacctgcgctgtctatggtgggtccttcagtggttgctactggagctggatccgccagcccccagggaaggggctggagtggattggggaaatcaatcatagtggaaggaccaactacaacccgtccctcaagagtcgagtcaccatatcagtagacacgtccgagaacaagttctccctgaagctgagctctgtgaccgccgcggacacggctgtgtattactgtgcgagagactacggtgggcttgactactggggccagggaaccctggtcaccgtctcctca

SEQ ID NO: 30078 - protein, 115 aa, synthetic construct
  REGION 1..115: note = Description of Artificial Sequence: Synthetic polypeptide
QVQLQQWGAGLLKPSETLSLTCAVYGGSFSGCYWSWIRQPPGKGLEWIGEINHSGRTNYNPSLKSRVTISVDTSENKFSLKLSSVTAADTAVYYCARDYGGLDYWGQGTLVTVSS

SEQ ID NO: 30079 - DNA, 345 bp, synthetic construct; identical to SEQ ID NO: 29757
  misc_feature 1..345: note = Description of Artificial Sequence: Synthetic polynucleotide
  source 1..345: mol_type = other DNA

SEQ ID NO: 30080 - protein, 115 aa, synthetic construct; identical to SEQ ID NO: 29758
  REGION 1..115: note = Description of Artificial Sequence: Synthetic polypeptide

SEQ ID NO: 30081 - DNA, 369 bp, synthetic construct
  misc_feature 1..369: note = Description of Artificial Sequence: Synthetic polynucleotide
  source 1..369: mol_type = other DNA
caggtgcagctggtggagtctgggggaggcgtggtccagcctgggaggtccctgagactctcctgtgcagcgtctggattcaccttcagtaacgatatcatgcactgggtccgccaggctccaggcaaggggctggagtgggtggcagttatatggtatgatggaagtaataaatactatgcagactccgtgaagggccgattcaccatctccagagacaattccaagaacacgctgtatctgcaaattaacagcctgagagccgaggacacggctgtgtatttctgtgcgagagaaaaatatagcagtggctggtacgactacggtatggacgtctggggccaagggaccacggtcaccgtctcctca

SEQ ID NO: 30082 - protein, 123 aa, synthetic construct
  REGION 1..123: note = Description of Artificial Sequence: Synthetic polypeptide
QVQLVESGGGVVQPGRSLRLSCAASGFTFSNDIMHWVRQAPGKGLEWVAVIWYDGSNKYYADSVKGRFTISRDNSKNTLYLQINSLRAEDTAVYFCAREKYSSGWYDYGMDVWGQGTTVTVSS

SEQ ID NO: 30083 - DNA, 354 bp, synthetic construct; identical to SEQ ID NO: 29945
  misc_feature 1..354: note = Description of Artificial Sequence: Synthetic polynucleotide
  source 1..354: mol_type = other DNA

SEQ ID NO: 30084 - protein, 118 aa, synthetic construct; identical to SEQ ID NO: 29946
  REGION 1..118: note = Description of Artificial Sequence: Synthetic polypeptide

SEQ ID NO: 30085 - DNA, 354 bp, synthetic construct; identical to SEQ ID NO: 29999
  misc_feature 1..354: note = Description of Artificial Sequence: Synthetic polynucleotide
  source 1..354: mol_type = other DNA

SEQ ID NO: 30086 - protein, 118 aa, synthetic construct; identical to SEQ ID NO: 30000
  REGION 1..118: note = Description of Artificial Sequence: Synthetic polypeptide

SEQ ID NO: 30087 - DNA, 354 bp, synthetic construct
  misc_feature 1..354: note = Description of Artificial Sequence: Synthetic polynucleotide
  source 1..354: mol_type = other DNA
caggtgcagttggtgcagtctggggctgaggtgaagaagcctggggcctcagtgaaggtctcctgcaaggcttctggatacaccttcaccaattatgatatcaactgggtgcgacaggccactggacaagggcttgagtggatgggatggatgaaccctaacagtggtaacacaggctatgcacagaagttccagggcagagtcaccatgaccaggaacacctccacaagcacagcccacatggagctgagcagcctgagatctgaggacacggccgtgtattactgtgcggtctccagtggctggaagtggttcgacccctggggccagggaaccctggtcaccgtctcctca

SEQ ID NO: 30088 - protein, 118 aa, synthetic construct
  REGION 1..118: note = Description of Artificial Sequence: Synthetic polypeptide
QVQLVQSGAEVKKPGASVKVSCKASGYTFTNYDINWVRQATGQGLEWMGWMNPNSGNTGYAQKFQGRVTMTRNTSTSTAHMELSSLRSEDTAVYYCAVSSGWKWFDPWGQGTLVTVSS

SEQ ID NO: 30089 - DNA, 354 bp, synthetic construct
  misc_feature 1..354: note = Description of Artificial Sequence: Synthetic polynucleotide
  source 1..354: mol_type = other DNA
caggtgcagctggtgcagtctggggctgaggtgaagaagcctggggcctcagtgaaggtctcctgcaaggcttctggatacaccttgaccaattatgatatcaactgggtgcgacaggccactggacaagggcttgagtggatgggatggatgaaccctaacagtggtaacacaggctatgcacagaagttccagggcagagtcaccatgaccaggaacacctccataagcacagcctacatggaactgagcagcctgagatctgaggacacggccgtgtattaccgtgggagtaccagtggctggaagttctttgactactggggccagggaaccctggtcaccgtctcctca

SEQ ID NO: 30090 - protein, 118 aa, synthetic construct
  REGION 1..118: note = Description of Artificial Sequence: Synthetic polypeptide
QVQLVQSGAEVKKPGASVKVSCKASGYTLTNYDINWVRQATGQGLEWMGWMNPNSGNTGYAQKFQGRVTMTRNTSISTAYMELSSLRSEDTAVYYRGSTSGWKFFDYWGQGTLVTVSS

SEQ ID NO: 30091 - DNA, 345 bp, synthetic construct; identical to SEQ ID NO: 29737
  misc_feature 1..345: note = Description of Artificial Sequence: Synthetic polynucleotide
  source 1..345: mol_type = other DNA

SEQ ID NO: 30092 - protein, 115 aa, synthetic construct; identical to SEQ ID NO: 29738
  REGION 1..115: note = Description of Artificial Sequence: Synthetic polypeptide

SEQ ID NO: 30093 - DNA, 345 bp, synthetic construct; identical to SEQ ID NO: 29737
  misc_feature 1..345: note = Description of Artificial Sequence: Synthetic polynucleotide
  source 1..345: mol_type = other DNA

SEQ ID NO: 30094 - protein, 115 aa, synthetic construct; identical to SEQ ID NO: 29738
  REGION 1..115: note = Description of Artificial Sequence: Synthetic polypeptide

SEQ ID NO: 30095 - DNA, 363 bp, synthetic construct; identical to SEQ ID NO: 29849
  misc_feature 1..363: note = Description of Artificial Sequence: Synthetic polynucleotide
  source 1..363: mol_type = other DNA

SEQ ID NO: 30096 - protein, 121 aa, synthetic construct; identical to SEQ ID NO: 29850
  REGION 1..121: note = Description of Artificial Sequence: Synthetic polypeptide

SEQ ID NO: 30097 - DNA, 354 bp, synthetic construct; identical to SEQ ID NO: 28125
  misc_feature 1..354: note = Description of Artificial Sequence: Synthetic polynucleotide
  source 1..354: mol_type = other DNA

SEQ ID NO: 30098 - protein, 118 aa, synthetic construct; identical to SEQ ID NO: 28126
  REGION 1..118: note = Description of Artificial Sequence: Synthetic polypeptide

SEQ ID NO: 30099 - DNA, 345 bp, synthetic construct; identical to SEQ ID NO: 29737
  misc_feature 1..345: note = Description of Artificial Sequence: Synthetic polynucleotide
  source 1..345: mol_type = other DNA

SEQ ID NO: 30100 - protein, 115 aa, synthetic construct; identical to SEQ ID NO: 29738
  REGION 1..115: note = Description of Artificial Sequence: Synthetic polypeptide

SEQ ID NO: 30101 - DNA, 345 bp, synthetic construct; identical to SEQ ID NO: 29737
  misc_feature 1..345: note = Description of Artificial Sequence: Synthetic polynucleotide
  source 1..345: mol_type = other DNA

SEQ ID NO: 30102 - protein, 115 aa, synthetic construct; identical to SEQ ID NO: 29738
  REGION 1..115: note = Description of Artificial Sequence: Synthetic polypeptide

SEQ ID NO: 30103 - DNA, 345 bp, synthetic construct; identical to SEQ ID NO: 29737
  misc_feature 1..345: note = Description of Artificial Sequence: Synthetic polynucleotide
  source 1..345: mol_type = other DNA

SEQ ID NO: 30104 - protein, 115 aa, synthetic construct; identical to SEQ ID NO: 29738
  REGION 1..115: note = Description of Artificial Sequence: Synthetic polypeptide

SEQ ID NO: 30105 - DNA, 354 bp, synthetic construct; identical to SEQ ID NO: 29725
  misc_feature 1..354: note = Description of Artificial Sequence: Synthetic polynucleotide
  source 1..354: mol_type = other DNA

SEQ ID NO: 30106 - protein, 118 aa, synthetic construct; identical to SEQ ID NO: 29726
  REGION 1..118: note = Description of Artificial Sequence: Synthetic polypeptide

SEQ ID NO: 30107 - DNA, 354 bp, synthetic construct; identical to SEQ ID NO: 29749
  misc_feature 1..354: note = Description of Artificial Sequence: Synthetic polynucleotide
  source 1..354: mol_type = other DNA

SEQ ID NO: 30108 - protein, 118 aa, synthetic construct; identical to SEQ ID NO: 29750
  REGION 1..118: note = Description of Artificial Sequence: Synthetic polypeptide

SEQ ID NO: 30109 - DNA, 354 bp, synthetic construct; identical to SEQ ID NO: 29817
  misc_feature 1..354: note = Description of Artificial Sequence: Synthetic polynucleotide
  source 1..354: mol_type = other DNA

SEQ ID NO: 30110 - protein, 118 aa, synthetic construct; identical to SEQ ID NO: 29818
  REGION 1..118: note = Description of Artificial Sequence: Synthetic polypeptide

SEQ ID NO: 30111 - DNA, 357 bp, synthetic construct; identical to SEQ ID NO: 29731
  misc_feature 1..357: note = Description of Artificial Sequence: Synthetic polynucleotide
  source 1..357: mol_type = other DNA

SEQ ID NO: 30112 - protein, 119 aa, synthetic construct; identical to SEQ ID NO: 29732
  REGION 1..119: note = Description of Artificial Sequence: Synthetic polypeptide

SEQ ID NO: 30113 - DNA, 378 bp, synthetic construct
  misc_feature 1..378: note = Description of Artificial Sequence: Synthetic polynucleotide
  source 1..378: mol_type = other DNA
caggtgcagctggtgcagtctggggctgaggtgaagaagcctggggcctcagtgaaggtctcctgcaaggcttctggatacaccttcaccagttatgatatcaactgggtgcgacaggccactggacacgggcttgagtggatgggatggatgaaccctaacagtggtaacacaggctatgcacagaagttccagggcagagtcaccatgacctggaacacctccaaaagcacagcctacatggagctgagtagcctgagatctgaggacacggccgtgtattactgtgcgagaggcttttacgatactttgactggttccggctactactacgttatggacgtctggggccaagggaccacggtcaccgtctcctca

SEQ ID NO: 30114 - protein, 126 aa, synthetic construct
  REGION 1..126: note = Description of Artificial Sequence: Synthetic polypeptide
QVQLVQSGAEVKKPGASVKVSCKASGYTFTSYDINWVRQATGHGLEWMGWMNPNSGNTGYAQKFQGRVTMTWNTSKSTAYMELSSLRSEDTAVYYCARGFYDTLTGSGYYYVMDVWGQGTTVTVSS

SEQ ID NO: 30115 - DNA, 354 bp, synthetic construct; identical to SEQ ID NO: 29981
  misc_feature 1..354: note = Description of Artificial Sequence: Synthetic polynucleotide
  source 1..354: mol_type = other DNA

SEQ ID NO: 30116 - protein, 118 aa, synthetic construct; identical to SEQ ID NO: 29982
  REGION 1..118: note = Description of Artificial Sequence: Synthetic polypeptide

SEQ ID NO: 30117 - DNA, 354 bp, synthetic construct; identical to SEQ ID NO: 28201
  misc_feature 1..354: note = Description of Artificial Sequence: Synthetic polynucleotide
  source 1..354: mol_type = other DNA

SEQ ID NO: 30118 - protein, 118 aa, synthetic construct; identical to SEQ ID NO: 28202
  REGION 1..118: note = Description of Artificial Sequence: Synthetic polypeptide

SEQ ID NO: 30119 - DNA, 378 bp, synthetic construct
  misc_feature 1..378: note = Description of Artificial Sequence: Synthetic polynucleotide
  source 1..378: mol_type = other DNA
caggtgcagctggtgcagtctggggctgaggtgaagaagcctggggcctcagtgaaggtctcctgcaaggcttctggatacaccttcaccagttatgatatcaactgggtgcgtcaggccactggacaagggcttgagtggatgggatggatgaaccctaacagtcgtaacacaggctatgcacagaagttccagggcagagtcaccatgacctggaacacctccataagcacagcctacatggagctgagcagcctgagatctgaggacacggccgtgtattactgtgcgagaggcggctacgatgttttgcctgggaataactactactacgatatggacgtctggggccaagggaccacggtcaccgtctcctca

SEQ ID NO: 30120 - protein, 126 aa, synthetic construct
  REGION 1..126: note = Description of Artificial Sequence: Synthetic polypeptide
QVQLVQSGAEVKKPGASVKVSCKASGYTFTSYDINWVRQATGQGLEWMGWMNPNSRNTGYAQKFQGRVTMTWNTSISTAYMELSSLRSEDTAVYYCARGGYDVLPGNNYYYDMDVWGQGTTVTVSS

SEQ ID NO: 30121 - DNA, 354 bp, synthetic construct; identical to SEQ ID NO: 30067
  misc_feature 1..354: note = Description of Artificial Sequence: Synthetic polynucleotide
  source 1..354: mol_type = other DNA

SEQ ID NO: 30122 - protein, 118 aa, synthetic construct; identical to SEQ ID NO: 30068
  REGION 1..118: note = Description of Artificial Sequence: Synthetic polypeptide

SEQ ID NO: 30123 - DNA, 345 bp, synthetic construct; identical to SEQ ID NO: 29737
  misc_feature 1..345: note = Description of Artificial Sequence: Synthetic polynucleotide
  source 1..345: mol_type = other DNA

SEQ ID NO: 30124 - protein, 115 aa, synthetic construct; identical to SEQ ID NO: 29738
  REGION 1..115: note = Description of Artificial Sequence: Synthetic polypeptide

SEQ ID NO: 30125 - DNA, 354 bp, synthetic construct; identical to SEQ ID NO: 29807
  misc_feature 1..354: note = Description of Artificial Sequence: Synthetic polynucleotide
  source 1..354: mol_type = other DNA

SEQ ID NO: 30126 - protein, 118 aa, synthetic construct; identical to SEQ ID NO: 29808
  REGION 1..118: note = Description of Artificial Sequence: Synthetic polypeptide

SEQ ID NO: 30127 - DNA, 345 bp, synthetic construct; identical to SEQ ID NO: 29737
  misc_feature 1..345: note = Description of Artificial Sequence: Synthetic polynucleotide
  source 1..345: mol_type = other DNA

SEQ ID NO: 30128 - protein, 115 aa, synthetic construct; identical to SEQ ID NO: 29738
  REGION 1..115: note = Description of Artificial Sequence: Synthetic polypeptide

SEQ ID NO: 30129 - DNA, 366 bp, synthetic construct
  misc_feature 1..366: note = Description of Artificial Sequence: Synthetic polynucleotide
  source 1..366: mol_type = other DNA
caggtgcagctggtggagtctgggggaggcgtggtccagcctgggaggtccctgagactctcctgtgaagcgtctggaatcaccttcagtagctatggcatgcactgggtccgccaggctccaggcaaggggctggagtgggtggcaattatatggtatgatggaagtaataaatactatgcagactccgtgaagggccgattcaccatctccagagacaattccaagaacacgctgtttctgcaaatgaacagcctgagagccgaggacacggctgtgtattactgtgcgagagatcgtttagtgggagctaccgctgatgcttttgatatctggggccaagggacaatggtcaccgtctcttca

SEQ ID NO: 30130 - protein, 122 aa, synthetic construct
  REGION 1..122: note = Description of Artificial Sequence: Synthetic polypeptide
QVQLVESGGGVVQPGRSLRLSCEASGITFSSYGMHWVRQAPGKGLEWVAIIWYDGSNKYYADSVKGRFTISRDNSKNTLFLQMNSLRAEDTAVYYCARDRLVGATADAFDIWGQGTMVTVSS

SEQ ID NO: 30131 - DNA, 357 bp, synthetic construct
  misc_feature 1..357: note = Description of Artificial Sequence: Synthetic polynucleotide
  source 1..357: mol_type = other DNA
cagctgcagctgcaggagtcgggcccaggactggtgaagccttcggagaccctgtccctcacctgcactgtctctggtggctccatcagcagaagtagttactactggggctggatccgccagcccccagggaaggggctggagtggattgggagtatatattatagtgggagtacctcctacaacccgtccctcaagagtcgagtcaccatatccgtcgacacgtccaagaaccagttctccctgaagctgagctctgtgaccgccgcagacacggctgtttattactgtgcgagacttgatctcctgtggagttttgactactggggccagggaaccctggtcaccgtctcctca

SEQ ID NO: 30132 - protein, 119 aa, synthetic construct
  REGION 1..119: note = Description of Artificial Sequence: Synthetic polypeptide
QLQLQESGPGLVKPSETLSLTCTVSGGSISRSSYYWGWIRQPPGKGLEWIGSIYYSGSTSYNPSLKSRVTISVDTSKNQFSLKLSSVTAADTAVYYCARLDLLWSFDYWGQGTLVTVSS

SEQ ID NO: 30133 - DNA, 366 bp, synthetic construct
  misc_feature 1..366: note = Description of Artificial Sequence: Synthetic polynucleotide
  source 1..366: mol_type = other DNA
gaggtgcagctgttggagtctgggggaggcttggtacagcctggggggtccctgagactctcctgtgcagcctctggattcacctttagcagctatgccatgagctgggtccgccaggctccagggaaggggctggagtgggtctcagctattagtggtcgtggtggtaacacattctacgcagactccgtgaagggccggttcaccatctccagagacaattccaagaacacactatatctgcaaatgaacagcctgagagccgaggacacggccgtatattactgtgcgaaacgggtgacggactacggtggtaacgactggttcgacccctggggccagggaaccctggtcaccgtctcctca

SEQ ID NO: 30134 - protein, 122 aa, synthetic construct
  REGION 1..122: note = Description of Artificial Sequence: Synthetic polypeptide
EVQLLESGGGLVQPGGSLRLSCAASGFTFSSYAMSWVRQAPGKGLEWVSAISGRGGNTFYADSVKGRFTISRDNSKNTLYLQMNSLRAEDTAVYYCAKRVTDYGGNDWFDPWGQGTLVTVSS

SEQ ID NO: 30135 - DNA, 372 bp, synthetic construct
  misc_feature 1..372: note = Description of Artificial Sequence: Synthetic polynucleotide
  source 1..372: mol_type = other DNA
caggtgcagctggtggagtctgggggaggcgtggtccagcctgggaggtccctgagactctcctgtgcagcgtctggattcaccttcagtagctatggcatgcactgggtccgccaggctccaggcaaggggctggagtgggtggcagttatatggtatgatggaagttataaatactatgcagactccgtgaagggccgattcaccatctccagagacaattccaagaacacgctggatctgcaaatgaacagcctgagagccgaggacacggctgtgtattactgtgtgaaaatgggtatagaagtggctgtggactactactacggtatggacgtctggggccaagggaccacggtcaccgtctcctca

SEQ ID NO: 30136 - protein, 124 aa, synthetic construct
  REGION 1..124: note = Description of Artificial Sequence: Synthetic polypeptide
QVQLVESGGGVVQPGRSLRLSCAASGFTFSSYGMHWVRQAPGKGLEWVAVIWYDGSYKYYADSVKGRFTISRDNSKNTLDLQMNSLRAEDTAVYYCVKMGIEVAVDYYYGMDVWGQGTTVTVSS

SEQ ID NO: 30137 - DNA, 354 bp, synthetic construct
  misc_feature 1..354: note = Description of Artificial Sequence: Synthetic polynucleotide
  source 1..354: mol_type = other DNA
caggtgcagctggtgcagtctggggctgaggtgaagaagcctggggcctcagtgaaggtctcctgcaaggcttctggatacaccttcaccaattatgatatcaactgggtgcgacaggccactggacaagggcttgagtggatgggatgggtgcaccctaacagtggtaacacaggctatgcacagaagttccagggcagagtcaccatgaccaggaacacctccataagcacagcctacatggagctgagcagcctgagatctgaggacacggccgtgtattactgtgcggggagcagtggctggtactactttgactactggggccagggaaccctggtcaccgtctcctca

SEQ ID NO: 30138 - protein, 118 aa, synthetic construct
  REGION 1..118: note = Description of Artificial Sequence: Synthetic polypeptide
QVQLVQSGAEVKKPGASVKVSCKASGYTFTNYDINWVRQATGQGLEWMGWVHPNSGNTGYAQKFQGRVTMTRNTSISTAYMELSSLRSEDTAVYYCAGSSGWYYFDYWGQGTLVTVSS

SEQ ID NO: 30139 - DNA, 363 bp, synthetic construct
  misc_feature 1..363: note = Description of Artificial Sequence: Synthetic polynucleotide
  source 1..363: mol_type = other DNA
caggtgcagctgcaggagtcgggcccaggactggtgaagccttcacagaccctgtccctcaattgcactgtctctggtggctccatcagcaacagtggttactactggagctggatccgccagcacccagggaagggcctggaatggattgggtacagctattacagtgggagcacctactacaacccgtccctcaagagtcgaattaccatatcagtagacacgtctaacaaccagttctccctgaagctgacctctgtgactgccgcggacacggccgtgtattactgtgcgagagggaaatataactggaaccatgcttttgatatctggggccaagggacaatggtcaccgtctcttca

SEQ ID NO: 30140 - protein, 121 aa, synthetic construct
  REGION 1..121: note = Description of Artificial Sequence: Synthetic polypeptide
QVQLQESGPGLVKPSQTLSLNCTVSGGSISNSGYYWSWIRQHPGKGLEWIGYSYYSGSTYYNPSLKSRITISVDTSNNQFSLKLTSVTAADTAVYYCARGKYNWNHAFDIWGQGTMVTVSS

SEQ ID NO: 30141 - DNA, 369 bp, synthetic construct
  misc_feature 1..369: note = Description of Artificial Sequence: Synthetic polynucleotide
  source 1..369: mol_type = other DNA
gaggtgcagctgttggagtctgggggaggcttggtacagcctggggggtccctgagactctcctgtgcagcctctggattcacctttaacagctatgccatgaactgggtccgccaggctccagggaaggggctggagtgggtctcagctattagtggtagtggtggtaacacattctacgcagactccgtgaagggccgcttcaccatctccagagacaattccaagaacacactgtatctgcaaatgaacagcctgagagccgaggacacggccgtatattactgtgcgaaaaaggataatgattacgtttgggggagtccttactttgactactggggccagggaaccctggtcaccgtctcctca

SEQ ID NO: 30142 - protein, 123 aa, synthetic construct
  REGION 1..123: note = Description of Artificial Sequence: Synthetic polypeptide
EVQLLESGGGLVQPGGSLRLSCAASGFTFNSYAMNWVRQAPGKGLEWVSAISGSGGNTFYADSVKGRFTISRDNSKNTLYLQMNSLRAEDTAVYYCAKKDNDYVWGSPYFDYWGQGTLVTVSS

SEQ ID NO: 30143 - DNA, 354 bp, synthetic construct
  misc_feature 1..354: note = Description of Artificial Sequence: Synthetic polynucleotide
  source 1..354: mol_type = other DNA
caggtgcagctggtgcagtctggggctgaggtgaagaagcctggggcctcagtgaaggtctcctgcaaggcttctggatacaccttcaccaattatgatatcaactgggtgcgacaggccactggacaagggcttgagtggatgggatggatgcaccctaacagtggtaacacaggctatgcacagaagttccagggcagagtcaccatgacctggaacacctccataagcacagcctacatggccctgagcagcctgagatctgaggacacggccgtgtattactgtgcgtatagcagtggctggtactcctttgactactggggccagggaaccctggtcaccgtctcctca

SEQ ID NO: 30144 - protein, 118 aa, synthetic construct
  REGION 1..118: note = Description of Artificial Sequence: Synthetic polypeptide
QVQLVQSGAEVKKPGASVKVSCKASGYTFTNYDINWVRQATGQGLEWMGWMHPNSGNTGYAQKFQGRVTMTWNTSISTAYMALSSLRSEDTAVYYCAYSSGWYSFDYWGQGTLVTVSS

SEQ ID NO: 30145 - DNA, 366 bp, synthetic construct
  misc_feature 1..366: note = Description of Artificial Sequence: Synthetic polynucleotide
  source 1..366: mol_type = other DNA
gaggtgcagctgttggagtctgggggaggcttggtacagcctggggggtccctgagactctcctgtgcagcctctggattcacctttagcagctatgccatgagctgggtccgccaggctccagggaaggggctggagtgggtctcagctattagtggtcgtggtggtaacacattctacgcagactccgtgaagggccggttcaccatctccagagacaattccaagaaaacactatatctgcaaatgaacagcctgagagccgaggacacggccgtatattactgtgcgaaacgggtgacggactacggtggtaacgactggttcgacccctggggccagggaaccctggtcaccgtctcctca

SEQ ID NO: 30146 - protein, 122 aa, synthetic construct
  REGION 1..122: note = Description of Artificial Sequence: Synthetic polypeptide
EVQLLESGGGLVQPGGSLRLSCAASGFTFSSYAMSWVRQAPGKGLEWVSAISGRGGNTFYADSVKGRFTISRDNSKKTLYLQMNSLRAEDTAVYYCAKRVTDYGGNDWFDPWGQGTLVTVSS

SEQ ID NO: 30147 - DNA, 354 bp, synthetic construct
  misc_feature 1..354: note = Description of Artificial Sequence: Synthetic polynucleotide
  source 1..354: mol_type = other DNA
caggtgcagctggtgcagtctggggctgaggtgaagaagcctggggcctcagtgaaggtctcctgcaaggcttctggatacaccttcaccaattatgatatcaactgggtgcgacaggccactggacaagggcttgagtggatgggatggatgcaccctaacagtggtaacacaggctatgcacagaagttccagggcagagtcaccatgaccaggaacacctccataagcacagcctacatggagctgagcagcctgagatctgaggacacggccgtgtattactgtgcgagtagcagtggctggtacttttttgactactggggccagggaaccctggtcaccgtctcctca

SEQ ID NO: 30148 - protein, 118 aa, synthetic construct
  REGION 1..118: note = Description of Artificial Sequence: Synthetic polypeptide
QVQLVQSGAEVKKPGASVKVSCKASGYTFTNYDINWVRQATGQGLEWMGWMHPNSGNTGYAQKFQGRVTMTRNTSISTAYMELSSLRSEDTAVYYCASSSGWYFFDYWGQGTLVTVSS

SEQ ID NO: 30149 - DNA, 351 bp, synthetic construct
  misc_feature 1..351: note = Description of Artificial Sequence: Synthetic polynucleotide
  source 1..351: mol_type = other DNA
caggtgcagctggtggagtctgggggaggcgtggtccagcctgggaggtccctgagactctcctgtgcagcgtctggattcagcttcagtagctatggcatgcactgggtccgccaggctccaggcaaggggctggagtgggtggcagtgatatggtttgatgaaagtaataaacactatggagactccgtgaagggccgattcaccatctccagggacaattccaagaacacgctgtatctgcaaatgaacagcctgagagccgaggacacggctgtgtattactgtgcgagagaattgggatttctctctgactattggggccagggaaccctggtcaccgtctcctca

SEQ ID NO: 30150 - protein, 117 aa, synthetic construct
  REGION 1..117: note = Description of Artificial Sequence: Synthetic polypeptide
QVQLVESGGGVVQPGRSLRLSCAASGFSFSSYGMHWVRQAPGKGLEWVAVIWFDESNKHYGDSVKGRFTISRDNSKNTLYLQMNSLRAEDTAVYYCARELGFLSDYWGQGTLVTVSS

SEQ ID NO: 30151 - DNA, 354 bp, synthetic construct
  misc_feature 1..354: note = Description of Artificial Sequence: Synthetic polynucleotide
  source 1..354: mol_type = other DNA
gaggtgcagctggtggagtctgggggaggcctggtcaagcctggggggtccctgagactctcctgtgcagcctctggattcaccttcagtagctatagcatgaactgggtccgccaggctccagggaaggggctggagtgggtctcatccattagtggtagtggtagctacacatactacgcagactcagtgaagggccgattcaccatctccagagacaacgccaagaactcactgtatctgcaaatgaacagcctgagagccgaggacacggctgtgtattactgtgcgagaggtagcagctcgtccgggtttgactactggggccagggaaccctggtcaccgtctcctca

SEQ ID NO: 30152 - protein, 118 aa, synthetic construct
  REGION 1..118: note = Description of Artificial Sequence: Synthetic polypeptide
EVQLVESGGGLVKPGGSLRLSCAASGFTFSSYSMNWVRQAPGKGLEWVSSISGSGSYTYYADSVKGRFTISRDNAKNSLYLQMNSLRAEDTAVYYCARGSSSSGFDYWGQGTLVTVSS

SEQ ID NO: 30153 - DNA, 363 bp, synthetic construct
  misc_feature 1..363: note = Description of Artificial Sequence: Synthetic polynucleotide
  source 1..363: mol_type = other DNA
caggtgcagctggtggagtctgggggaggcgtggtccagcctgggaggtccctgagactctcctgtgcagcgtctggattcaccttcagtagctatggcatgcactgggtccgccaggctccaggcaaggggctggagtgggtggcagttatatggtatgatggaagtaataaatactatgcagactccgtgaagggccgattcaccatctccagagacaattccaagaacacgctgtatctgcaaatgaacagcctgagagccgaggacacggctgtgtattactgtgcgaggaggtatagcagcagctggtcggggggtatggacgtctggggccaagggaccacggtcaccgtctcctca

SEQ ID NO: 30154 - protein, 121 aa, synthetic construct; identical to SEQ ID NO: 28488
  REGION 1..121: note = Description of Artificial Sequence: Synthetic polypeptide

SEQ ID NO: 30155 - DNA, 366 bp, synthetic construct
  misc_feature 1..366: note = Description of Artificial Sequence: Synthetic polynucleotide
  source 1..366: mol_type = other DNA
caggtgctactgcaggagtcgggcccaggactggtgaagccttcacagaccctgtccctcacctgcgctgtctctggtggccccatcagcagtggtgattactactggaactggatccgccagcgcccagggaagggcctggagtggattgggttcatctattacactgggagcacctactacaacccgtccctcaagagtcgagtttccatatcggaagacacgtctgagaaccagttctccctgaacctgagttctgtgactgccgcggacacggccgtgtattactgtgcgagagggggagcttactactcctactacggtatggacgtctggggccaagggaccacggtcaccgtctcctca

SEQ ID NO: 30156 - protein, 122 aa, synthetic construct
  REGION 1..122: note = Description of Artificial Sequence: Synthetic polypeptide
QVLLQESGPGLVKPSQTLSLTCAVSGGPISSGDYYWNWIRQRPGKGLEWIGFIYYTGSTYYNPSLKSRVSISEDTSENQFSLNLSSVTAADTAVYYCARGGAYYSYYGMDVWGQGTTVTVSS

SEQ ID NO: 30157 - DNA, 363 bp, synthetic construct
  misc_feature 1..363: note = Description of Artificial Sequence: Synthetic polynucleotide
  source 1..363: mol_type = other DNA
caggtgcagctgcaggagtcgggcccaggactggtgaagccttcacagaccctgtccctcacctgcactgtctctggtggctccatcaccaatagtggttactactatagctggatccgccagcacccagggaagggcctggaatggattgggtacatctattacagtgggggcacctactacaacccgtccctcaagagtcgaattaccatatcagtggacacgtctaacaaccagttctccctgaagctgagctctgtgactgccgcggacacggccgtgtattactgtgcgagagggggatataactggaaccatgcttttgatttctggggccaagggacaatggtcaccgtctcttca

SEQ ID NO: 30158 - protein, 121 aa, synthetic construct
  REGION 1..121: note = Description of Artificial Sequence: Synthetic polypeptide
QVQLQESGPGLVKPSQTLSLTCTVSGGSITNSGYYYSWIRQHPGKGLEWIGYIYYSGGTYYNPSLKSRITISVDTSNNQFSLKLSSVTAADTAVYYCARGGYNWNHAFDFWGQGTMVTVSS

SEQ ID NO: 30159 - DNA, 354 bp, synthetic construct
  misc_feature 1..354: note = Description of Artificial Sequence: Synthetic polynucleotide
  source 1..354: mol_type = other DNA
caggtgcagctggtgcagtctggggctgaggtgaagaagcctggggcctcagtgaaggtctcctgcaaggcttctggatacaccttcaccaattatgatatcaactgggtgcgacaggccactggacaagggcttgagtggatgggatggatgaaccctaacagtggtaacacaggctatgcacagaagttccagggcagagtcaccatgaccaggaacacctccataagcacagcctacatggagctgagcagcctgagatctgaggacacggccgtgtattactgtgcgagtagcagtggctggtacttttttgactactggggccagggaaccctggtcaccgtctcctca

SEQ ID NO: 30160 - protein, 118 aa, synthetic construct; identical to SEQ ID NO: 29120
  REGION 1..118: note = Description of Artificial Sequence: Synthetic polypeptide

SEQ ID NO: 30161 - DNA, 354 bp, synthetic construct
  misc_feature 1..354: note = Description of Artificial Sequence: Synthetic polynucleotide
  source 1..354: mol_type = other DNA
caggtgcagctggtgcagtctggggctgaggtgaagaagcctggggcctcagtgaaggtctcctgcaaggcttctggatacaccttcaccaattatgatatcaactgggtgcgacaggccactggacaagggcttgagtggatgggatgggtgcaccctaacagtggtaacacaggctatgcacagaagttccagggcagagtcaccatgaccaggaacacctccataagcacagcctacatggagctgagcagcctgagatctggggacacggccgtgtattactgtgcggggagcagtggctggtactactttgactactggggccagggcaccctggtcaccgtctcctca

SEQ ID NO: 30162 - protein, 118 aa, synthetic construct
  REGION 1..118: note = Description of Artificial Sequence: Synthetic polypeptide
QVQLVQSGAEVKKPGASVKVSCKASGYTFTNYDINWVRQATGQGLEWMGWVHPNSGNTGYAQKFQGRVTMTRNTSISTAYMELSSLRSGDTAVYYCAGSSGWYYFDYWGQGTLVTVSS

SEQ ID NO: 30163 - DNA, 369 bp, synthetic construct
  misc_feature 1..369: note = Description of Artificial Sequence: Synthetic polynucleotide
  source 1..369: mol_type = other DNA
caggtgcagctggtggagtctgggggaggcgtggcccagcctgggaggtccctgagactctcctgtgcagcgtctggattcaccttcagtgactatggcatgcactgggtccgccaggctccaggcaaggggctggagtgggtggcagttatatggtatgatggaagtaataagtactatgcagactccgtgaagggccgactcaccatctccagagacaattccaagaacacgttgtatctgcaaatgaacagcctgagcgccgaggacacggctgtgtattactgtgcgagagagaggtatagcagtggctggtacgactacggtttggacgtctggggccaagggaccacggtcaccgtctcctca

SEQ ID NO: 30164 - protein, 123 aa, synthetic construct
  REGION 1..123: note = Description of Artificial Sequence: Synthetic polypeptide
QVQLVESGGGVAQPGRSLRLSCAASGFTFSDYGMHWVRQAPGKGLEWVAVIWYDGSNKYYADSVKGRLTISRDNSKNTLYLQMNSLSAEDTAVYYCARERYSSGWYDYGLDVWGQGTTVTVSS

SEQ ID NO: 30165 - DNA, 354 bp, synthetic construct
  misc_feature 1..354: note = Description of Artificial Sequence: Synthetic polynucleotide
  source 1..354: mol_type = other DNA
caggtgcagctggtgcagtctggggctgaggtgaagaagcctggggcctcagtgaaggtctcctgcaaggcttctggatacaccttcaccaattatgatatcaactgggtgcgacaggccactggacaagggcttgagtggatgggttggatgcaccccaacagtggtaacacaggctatgcacagaagttccagggcagagtcaccatgaccaggaacacctccataagcacagcctacatggagctgagcagcctgagatctgaggacacggccgtgtattactgtgcgtatagcagtggctggtactggttcgacccctggggccagggaaccctggtcaccgtctcctca

SEQ ID NO: 30166 - protein, 118 aa, synthetic construct
  REGION 1..118: note = Description of Artificial Sequence: Synthetic polypeptide
QVQLVQSGAEVKKPGASVKVSCKASGYTFTNYDINWVRQATGQGLEWMGWMHPNSGNTGYAQKFQGRVTMTRNTSISTAYMELSSLRSEDTAVYYCAYSSGWYWFDPWGQGTLVTVSS

SEQ ID NO: 30167 - DNA, 363 bp, synthetic construct
  misc_feature 1..363: note = Description of Artificial Sequence: Synthetic polynucleotide
  source 1..363: mol_type = other DNA
caggtgcagctggtggagtctgggggaggcgtggtccagcctgggaggtccctgagactctcctgtgcagcgtctggattcaccttcagtagctatggcatgcactgggtccgccaggctccaggcaaggggctggagtgggtggcagttatatggtatgatggaagtaataaatactatgcagactccgtgaagggccgattcaccatctccagagacaattccaagaacacgctgtatctgcaaatgaacagcctgagagccgaggacacggctgtgtattactgtgcgagaaggtatagcagcagctggacggggggtatggacgtctggggccaagggaccacggtcaccgtctcctca

SEQ ID NO: 30168 - protein, 121 aa, synthetic construct
  REGION 1..121: note = Description of Artificial Sequence: Synthetic polypeptide
QVQLVESGGGVVQPGRSLRLSCAASGFTFSSYGMHWVRQAPGKGLEWVAVIWYDGSNKYYADSVKGRFTISRDNSKNTLYLQMNSLRAEDTAVYYCARRYSSSWTGGMDVWGQGTTVTVSS

SEQ ID NO: 30169 - DNA, 345 bp, synthetic construct
  misc_feature 1..345: note = Description of Artificial Sequence: Synthetic polynucleotide
  source 1..345: mol_type = other DNA
caggtgcagctacagcagtggggcgcaggactgttgaagccttcggagaccctgtccctcacctgcggtgtctatggtgggtccttcagtgcttactactggagctggatccgccagcccccagggaaggggctggagtggattggggaaatcaatcatagtggaagtaccaactacaaaccgtccctcaagagtcgagtcaccatatcagtagacacgtccaagaaccagttctccctgaagctgagctctgtgaccgccgcggacacggctgtgtattactgtgcgagagactacggtgtttttgactactggggccagggaaccctggtcaccgtctcctca

SEQ ID NO: 30170 - protein, 115 aa, synthetic construct
  REGION 1..115: note = Description of Artificial Sequence: Synthetic polypeptide
QVQLQQWGAGLLKPSETLSLTCGVYGGSFSAYYWSWIRQPPGKGLEWIGEINHSGSTNYKPSLKSRVTISVDTSKNQFSLKLSSVTAADTAVYYCARDYGVFDYWGQGTLVTVSS

SEQ ID NO: 30171 - DNA, 342 bp, synthetic construct
  misc_feature 1..342: note = Description of Artificial Sequence: Synthetic polynucleotide
  source 1..342: mol_type = other DNA
gaggtgcagctggtggagtctgggggaggcttggtacagcctggggggtccctgagactctcctgtgcagcctctggattcaccttcagtagctatagcatgaactgggtccgccaggctccagggaaggggctggagtgggtttcatccattagtggtagaaacactaccatatactatgcagactctgtgaagggccgattcaccatctccagagacaatgccaagaactcactgtatctgcaaatgaacagcctgagagacgaggacacggctgtttattactgttcgagagatcggggcagttgctggggccagggaaccctggtcaccgtctcctca

SEQ ID NO: 30172 - protein, 114 aa, synthetic construct
  REGION 1..114: note = Description of Artificial Sequence: Synthetic polypeptide
EVQLVESGGGLVQPGGSLRLSCAASGFTFSSYSMNWVRQAPGKGLEWVSSISGRNTTIYYADSVKGRFTISRDNAKNSLYLQMNSLRDEDTAVYYCSRDRGSCWGQGTLVTVSS

SEQ ID NO: 30173 - DNA, 369 bp, synthetic construct
  misc_feature 1..369: note = Description of Artificial Sequence: Synthetic polynucleotide
  source 1..369: mol_type = other DNA
gaggtgcagctgttggagtctgggggaggcttggtacagcctggggggtccctgagactctcctgtgcagcctctggattcacctttagcagctatgccatgagctgggtccgccaggctccagggaaggggctggagtgggtctcagctattagtggtcgtggtggtaacacattctacgcagactccgtgaagggccgcttcaccatctccagagacaattccaagaacacgctctatctgcaaatgaacagcctgagagccgaggacacggccgtatattactgtgcgaaaaaggattatgattacgtttgggggagtccttactttgactactggggccagggaaccctggtcaccgtctcctca

SEQ ID NO: 30174 - protein, 123 aa, synthetic construct
  REGION 1..123: note = Description of Artificial Sequence: Synthetic polypeptide
EVQLLESGGGLVQPGGSLRLSCAASGFTFSSYAMSWVRQAPGKGLEWVSAISGRGGNTFYADSVKGRFTISRDNSKNTLYLQMNSLRAEDTAVYYCAKKDYDYVWGSPYFDYWGQGTLVTVSS

SEQ ID NO: 30175 - DNA, 369 bp, synthetic construct
  misc_feature 1..369: note = Description of Artificial Sequence: Synthetic polynucleotide
  source 1..369: mol_type = other DNA
gaggtgcagctgttggagtctgggggaggcttggtacagtctggggggtccctgagactctcctgtgcagcctctggattcacctttagcagctatgccatgagctgggtccgccaggctccagggaaggggctggagtgggtctcagctattagtggtcgtggtggtaacacattctacgcagactccgtgaagggccgcttcaccatctccagagacaattccaagaacacgctctatctgcaaatgaacagcctgagagccgaggacacggccgtatattactgtgcgaaaaaggattatgattacgtttgggggagtccttactttgactactggggccagggaaccctggtcaccgtctcctca

SEQ ID NO: 30176 - protein, 123 aa, synthetic construct
  REGION 1..123: note = Description of Artificial Sequence: Synthetic polypeptide
EVQLLESGGGLVQSGGSLRLSCAASGFTFSSYAMSWVRQAPGKGLEWVSAISGRGGNTFYADSVKGRFTISRDNSKNTLYLQMNSLRAEDTAVYYCAKKDYDYVWGSPYFDYWGQGTLVTVSS

SEQ ID NO: 30177 - DNA, 363 bp, synthetic construct
  misc_feature 1..363: note = Description of Artificial Sequence: Synthetic polynucleotide
  source 1..363: mol_type = other DNA
caggtgcagctggtggagtctgggggaggcgtggtccagcctgggaggtccctgagactctcctgtgcagcgtctggattcaccttcagtagctatggcatgcactgggtccgccaggctccaggcaaggggctggagtgggtggcaattatctggtatgatggaagttataaatactatgcagactccgtgaagggccgattcaccatctccagagacaattccaagaacacgctgtatctgcaaatgaacagcctgagtgccgaggacacggctgtgtattactgtgcgagagatcatttcgatttttggagtggtcactttgactactggggccagggaaccctggtcaccgtctcctca

SEQ ID NO: 30178 - protein, 121 aa, synthetic construct
  REGION 1..121: note = Description of Artificial Sequence: Synthetic polypeptide
QVQLVESGGGVVQPGRSLRLSCAASGFTFSSYGMHWVRQAPGKGLEWVAIIWYDGSYKYYADSVKGRFTISRDNSKNTLYLQMNSLSAEDTAVYYCARDHFDFWSGHFDYWGQGTLVTVSS

SEQ ID NO: 30179 - DNA, 369 bp, synthetic construct; identical to SEQ ID NO: 30173
  misc_feature 1..369: note = Description of Artificial Sequence: Synthetic polynucleotide
  source 1..369: mol_type = other DNA

SEQ ID NO: 30180 - protein, 123 aa, synthetic construct; identical to SEQ ID NO: 30174
  REGION 1..123: note = Description of Artificial Sequence: Synthetic polypeptide

SEQ ID NO: 30181 - DNA, 354 bp, synthetic construct
  misc_feature 1..354: note = Description of Artificial Sequence: Synthetic polynucleotide
  source 1..354: mol_type = other DNA
caggtgcagctggtgcagtctggggctgaggtgaagaagcctggggcctcagtgaaggtctcctgcaaggcttctggatacaccttcaccaattatgatatcaactgggtgcgacaggcctctggacaagggcttgagtggatgggatggatgcaccctaacagtggtaacacaggctatgcacagaacttccagggcagagtcaccatgaccaggaacacctccataagcacagcctacatggagctgagcagcctgagatctgaggacacggccgtgtattactgtgcgagtagcagtggctggtacttttttgactactggggccagggaaccctggtcaccgtctcctca

SEQ ID NO: 30182 - protein, 118 aa, synthetic construct
  REGION 1..118: note = Description of Artificial Sequence: Synthetic polypeptide
QVQLVQSGAEVKKPGASVKVSCKASGYTFTNYDINWVRQASGQGLEWMGWMHPNSGNTGYAQNFQGRVTMTRNTSISTAYMELSSLRSEDTAVYYCASSSGWYFFDYWGQGTLVTVSS

SEQ ID NO: 30183 - DNA, 366 bp, synthetic construct
  misc_feature 1..366: note = Description of Artificial Sequence: Synthetic polynucleotide
  source 1..366: mol_type = other DNA
gaggtgcagctcttggagtctgggggaggcttggtacagcctggggggtccctgagactctcctgtgcagcctctggattcacctttagcagctatgccatgaactgggtccgccaggctccagggaaggggctggagtgggtctcagctattagtggtagtggtggtaacacattctacgcagactccgtgaagggccggttcaccatctccagagacaattccaagaacacgctgtatctgcaaatgaacagcctgagagccgaggacacggccgtatattactgtgcgaaacgggtgacggactacggtggtaacgactggttcgacccctggggccagggaaccctggtcaccgtctcctca

SEQ ID NO: 30184 - protein, 122 aa, synthetic construct
  REGION 1..122: note = Description of Artificial Sequence: Synthetic polypeptide
EVQLLESGGGLVQPGGSLRLSCAASGFTFSSYAMNWVRQAPGKGLEWVSAISGSGGNTFYADSVKGRFTISRDNSKNTLYLQMNSLRAEDTAVYYCAKRVTDYGGNDWFDPWGQGTLVTVSS

SEQ ID NO: 30185 - DNA, 363 bp, synthetic construct; identical to SEQ ID NO: 30153
  misc_feature 1..363: note = Description of Artificial Sequence: Synthetic polynucleotide
  source 1..363: mol_type = other DNA

SEQ ID NO: 30186 - protein, 121 aa, synthetic construct; identical to SEQ ID NO: 28488
  REGION 1..121: note = Description of Artificial Sequence: Synthetic polypeptide

SEQ ID NO: 30187 - DNA, 363 bp, synthetic construct
  misc_feature 1..363: note = Description of Artificial Sequence: Synthetic polynucleotide
  source 1..363: mol_type = other DNA
caggtgcagctggtgcagtctggggctgaggtgaagaagcctggggcctcagtgaaggtctcctgcaaggcttctggatacaccttcaccggctactatatgcactgggtgcgacaggcccctggacaaggtcttgagtggatgggttggatccaccctaacaatggtggcacaaactatgcacagacgtttcagggcagggtcaccatgaccagggacacgtccatcagcacagtctacatggagctgagcaggctgagatctgacgacacggccgtgtattactgtgcgagagatcctgtagtagtaccagctgccccctttgactactggggccagggaaccctggtcaccgtctcctca

SEQ ID NO: 30188 - protein, 121 aa, synthetic construct
  REGION 1..121: note = Description of Artificial Sequence: Synthetic polypeptide
QVQLVQSGAEVKKPGASVKVSCKASGYTFTGYYMHWVRQAPGQGLEWMGWIHPNNGGTNYAQTFQGRVTMTRDTSISTVYMELSRLRSDDTAVYYCARDPVVVPAAPFDYWGQGTLVTVSS

SEQ ID NO: 30189 - DNA, 354 bp, synthetic construct
  misc_feature 1..354: note = Description of Artificial Sequence: Synthetic polynucleotide
  source 1..354: mol_type = other DNA
caggtgcagctggtgcagtctggggctgaggtgaagaagcctggggcctcagtgaaggtctcctgcaaggcttctggatacaccttcaccaattatgatatcaactgggtgcgccaggccactggacaagggcttgagtggatgggatggatgaaccctaacagtggtaacacaggctatgcacagaagttccagggcagagtcaccatgaccaggaacacctccataagcacagcctacatggagctgagcagcctgagatctgaggacacggccgtgtattactgtgcgagtagcagtggctggtactactttgactactggggccagggaaccctggtcaccgtctcctca

SEQ ID NO: 30190 - protein, 118 aa, synthetic construct
  REGION 1..118: note = Description of Artificial Sequence: Synthetic polypeptide
QVQLVQSGAEVKKPGASVKVSCKASGYTFTNYDINWVRQATGQGLEWMGWMNPNSGNTGYAQKFQGRVTMTRNTSISTAYMELSSLRSEDTAVYYCASSSGWYYFDYWGQGTLVTVSS

SEQ ID NO: 30191 - DNA, 366 bp, synthetic construct
  misc_feature 1..366: note = Description of Artificial Sequence: Synthetic polynucleotide
  source 1..366: mol_type = other DNA
gaggtgcagctgttggagtctgggggaggcttggtacagccgggggggtccctgagactctcctgtgcagcctctggattcacctttagcagctatgccatgagctgggtccgccaggctccagggaaggggctggagtgggtctcagctattagtggtcgtggtggtaacacattctacgcagactccgtgaagggccggttcaccatctccagagacaattccaagaacacactatatttgcaaatgaacagcctgagagccgaggacacggccgtatattactgtgcgaaacgggtgacggactacggtggtaacgactggttcgacccctggggccagggaaccctggtcaccgtctcctca

SEQ ID NO: 30192 - protein, 122 aa, synthetic construct; identical to SEQ ID NO: 30134
  REGION 1..122: note = Description of Artificial Sequence: Synthetic polypeptide

SEQ ID NO: 30193 - DNA, 363 bp, synthetic construct
  misc_feature 1..363: note = Description of Artificial Sequence: Synthetic polynucleotide
  source 1..363: mol_type = other DNA
caggtgcagctggtggagtctgggggaggcgtggtccagcctgggaggtccctgagactctcctgtgcagcgtctggattcaccttcagtagctatggcatgcactgggtccgccaggctccaggcaaggggctggagtgggtggcaattatatggtatgatggaagtaataaatactatgcagactccgtgaagggccgattcaccatctccagagacaattccaagaacacgctgtatctgcaaatgaacagcctgagagccgaagacacggctgtgtattactgtgcgagagatcgttacgatttttggagtggtcactttgactactggggccagggaaccctggtcaccgtctcctca

SEQ ID NO: 30194 - protein, 121 aa, synthetic construct
  REGION 1..121: note = Description of Artificial Sequence: Synthetic polypeptide
QVQLVESGGGVVQPGRSLRLSCAASGFTFSSYGMHWVRQAPGKGLEWVAIIWYDGSNKYYADSVKGRFTISRDNSKNTLYLQMNSLRAEDTAVYYCARDRYDFWSGHFDYWGQGTLVTVSS

SEQ ID NO: 30195 - DNA, 363 bp, synthetic construct
  misc_feature 1..363: note = Description of Artificial Sequence: Synthetic polynucleotide
  source 1..363: mol_type = other DNA
caggtgcagctggtggagtctgggggaggcgtggtccagcctgggaggtccctgagactctcctgtgcagcgtctggattcaccttcagtagctatggcatgcactgggtccgccaggctccaggcaaggggctggagtgggtggcagttatatggtatgatggaagtaataaatactatggagactccgtgaagggccgattcaccatctccagagacaattccaagaacacgctgtatctgcaaatgaacagcctgagagccgaggacacggctgtgtattattgtgcgaggaggtatagcagcagctggtcggggggtatggacgtctggggccaagggaccacggtcaccgtctcctca

SEQ ID NO: 30196 - protein, 121 aa, synthetic construct
  REGION 1..121: note = Description of Artificial Sequence: Synthetic polypeptide
QVQLVESGGGVVQPGRSLRLSCAASGFTFSSYGMHWVRQAPGKGLEWVAVIWYDGSNKYYGDSVKGRFTISRDNSKNTLYLQMNSLRAEDTAVYYCARRYSSSWSGGMDVWGQGTTVTVSS

SEQ ID NO: 30197 - DNA, 357 bp, synthetic construct
  misc_feature 1..357: note = Description of Artificial Sequence: Synthetic polynucleotide
  source 1..357: mol_type = other DNA
cagctgcagctgcaggagtcgggcccaggactggtgaagccttcggagaccctgtccctcacctgcactgtctctggtgtctccatcagcagaagtagttactactggggctggatccgccagcccccagggaaggggctggagtggattgggagtatctattatagtgggagcacctcctacaacccgtccctcaagagtcgagtcaccatatccgtagacacgtccaagaaccagttctccctgaagctgagctctgtgaccgccgcagacacggctgtgttttactgtgcgagacttgatccccagtggagttttgactactggggccagggaatcctggtcaccgtctcctca

SEQ ID NO: 30198 - protein, 119 aa, synthetic construct
  REGION 1..119: note = Description of Artificial Sequence: Synthetic polypeptide
QLQLQESGPGLVKPSETLSLTCTVSGVSISRSSYYWGWIRQPPGKGLEWIGSIYYSGSTSYNPSLKSRVTISVDTSKNQFSLKLSSVTAADTAVFYCARLDPQWSFDYWGQGILVTVSS

SEQ ID NO: 30199 - DNA, 366 bp, synthetic construct
  misc_feature 1..366: note = Description of Artificial Sequence: Synthetic polynucleotide
  source 1..366: mol_type = other DNA
caggtgcagctgcaggagtcgggcccaggactggtgaagccttcacagaccctgtccctcacctgcactgtctctggtggctccatcagcaatggtggttactactggaactggatccgccagcacccagggaagggcctggagtggattgggtacatctattacagtgggagcacctactacaacccgtccctcaagagtcaaattaccatatcagtggacacgtctaaggaccagttctccctgaggctgagctctgtgactgccgcggacacggccgtgtattactgtgcgaggtacagtacctacgactactactacggtatggacgtctggggccaagggaccacggtcaccgtctcctca

SEQ ID NO: 30200 - protein, 122 aa, synthetic construct
  REGION 1..122: note = Description of Artificial Sequence: Synthetic polypeptide
QVQLQESGPGLVKPSQTLSLTCTVSGGSISNGGYYWNWIRQHPGKGLEWIGYIYYSGSTYYNPSLKSQITISVDTSKDQFSLRLSSVTAADTAVYYCARYSTYDYYYGMDVWGQGTTVTVSS

SEQ ID NO: 30201 - DNA, 363 bp, synthetic construct; identical to SEQ ID NO: 30177
  misc_feature 1..363: note = Description of Artificial Sequence: Synthetic polynucleotide
  source 1..363: mol_type = other DNA

SEQ ID NO: 30202 - protein, 121 aa, synthetic construct; identical to SEQ ID NO: 30178
  REGION 1..121: note = Description of Artificial Sequence: Synthetic polypeptide

SEQ ID NO: 30203 - DNA, 351 bp, synthetic construct
  misc_feature 1..351: note = Description of Artificial Sequence: Synthetic polynucleotide
  source 1..351: mol_type = other DNA
caggtgcagttggtggagtctgggggaggcgtggtccagcctgggaggtccctgagactctcctgtgcagcgtctggattcaccttcagtgactatggcatgcactgggtccgccaggctccaggcaaggggctggagtgggtggcagttatatggtatgaaggaagtaataaatactatgcagactccgtgaagggccgattcaccatctccagagacaattccaagaacatgttgtatctgcaaatgaacagcctgagagccgaggacacggctgtgtattactgtgcgagagaaataggattcagtgaggactactggggccagggaaccctggtcaccgtctcctca

SEQ ID NO: 30204 - protein, 117 aa, synthetic construct
  REGION 1..117: note = Description of Artificial Sequence: Synthetic polypeptide
QVQLVESGGGVVQPGRSLRLSCAASGFTFSDYGMHWVRQAPGKGLEWVAVIWYEGSNKYYADSVKGRFTISRDNSKNMLYLQMNSLRAEDTAVYYCAREIGFSEDYWGQGTLVTVSS

SEQ ID NO: 30205 - DNA, 354 bp, synthetic construct; identical to SEQ ID NO: 30137
  misc_feature 1..354: note = Description of Artificial Sequence: Synthetic polynucleotide
  source 1..354: mol_type = other DNA

SEQ ID NO: 30206 - protein, 118 aa, synthetic construct; identical to SEQ ID NO: 30138
  REGION 1..118: note = Description of Artificial Sequence: Synthetic polypeptide

SEQ ID NO: 30207 - DNA, 366 bp, synthetic construct
  misc_feature 1..366: note = Description of Artificial Sequence: Synthetic polynucleotide
  source 1..366: mol_type = other DNA
gaggtgcagctgttggagtctgggggaggcttggtacagcctggggggtccctgagactctcctgtgcagcctctggattcacctttagcaactatgccatgacctgggtccgccaggctccagggaaggggctggagtgggtctcagctattagtggtcgtggtggtaacacattctacgcagactccgtgaagggccggttcaccatctccagagacaattccaagaacacgctgtatctgcaaatgaacagcctgagagccgaggacacggccgtatattactgtacgaaacgggtgacggactacggtggtaacgactggttcgacccctggggccagggaaccctggtcaccgtctcctca

SEQ ID NO: 30208 - protein, 122 aa, synthetic construct
  REGION 1..122: note = Description of Artificial Sequence: Synthetic polypeptide
EVQLLESGGGLVQPGGSLRLSCAASGFTFSNYAMTWVRQAPGKGLEWVSAISGRGGNTFYADSVKGRFTISRDNSKNTLYLQMNSLRAEDTAVYYCTKRVTDYGGNDWFDPWGQGTLVTVSS

SEQ ID NO: 30209 - DNA, 354 bp, synthetic construct
  misc_feature 1..354: note = Description of Artificial Sequence: Synthetic polynucleotide
  source 1..354: mol_type = other DNA
caggtgcagctggtgcagtctggggctgaggtgaagaagcctggggcctcagtgaaggtctcctgcaaggcttctggatacaccttcaccaattatgatatcaactgggtgcgacaggccactggacaagggcttgagtggatgggatggatgcaccctaacagtggtaacacaggctatgcacagaagttccagggcagagtcaccatgaccaggaacacctccataagcacagcctacatggagctgagcagcctgacatctgaggacacggccgtgtattactgtgcatatagcagtggctggtactggtttgactactggggccagggaaccctggtcaccgtctcctca

SEQ ID NO: 30210 - protein, 118 aa, synthetic construct
  REGION 1..118: note = Description of Artificial Sequence: Synthetic polypeptide
QVQLVQSGAEVKKPGASVKVSCKASGYTFTNYDINWVRQATGQGLEWMGWMHPNSGNTGYAQKFQGRVTMTRNTSISTAYMELSSLTSEDTAVYYCAYSSGWYWFDYWGQGTLVTVSS

SEQ ID NO: 30211 - DNA, 354 bp, synthetic construct
  misc_feature 1..354: note = Description of Artificial Sequence: Synthetic polynucleotide
  source 1..354: mol_type = other DNA
caggtgcagctggtgcagtctggggctgaggtgaagaagcctggggcctcagtgaaggtctcctgcaaggcttctggatacaccttcaccaattatgatatcaactgggtgcgacaggccactggacaagggcttgagtggatgggatggatgcaccctaacagtggtaacacagactatgcacagaagttccagggcagagtcaccatgaccaggaacacctccataaccacagtttacatggagctgagcagcctgagatctgaggacacggccgtgtattattgtacgtttagcagtggctggtactactttgactactggggccagggaaccctggtcaccgtctcctca

SEQ ID NO: 30212 - protein, 118 aa, synthetic construct
  REGION 1..118: note = Description of Artificial Sequence: Synthetic polypeptide
QVQLVQSGAEVKKPGASVKVSCKASGYTFTNYDINWVRQATGQGLEWMGWMHPNSGNTDYAQKFQGRVTMTRNTSITTVYMELSSLRSEDTAVYYCTFSSGWYYFDYWGQGTLVTVSS

SEQ ID NO: 30213 - DNA, 366 bp, synthetic construct
  misc_feature 1..366: note = Description of Artificial Sequence: Synthetic polynucleotide
  source 1..366: mol_type = other DNA
caggtgcagctgcaggagtcgggcccaggactggtgaagccttcacagaccctgtccctcacctgcactgtctctggtggctccatcagcaatggtggttactactggaactggatccgccagcacccagggaagggcctggagtggattgggtacatctattacagtgggagcacctactacaacccgtccctcaagagtcgagttaccatatcagtagacacgtctaaggaccagttctccctgaggctgagctctgtgactgccgcggacacggccgtgtattactgtgcgaggtacagtacctacgactactactacggtatggacgtctggggccaagggaccacggtcaccgtctcctca

SEQ ID NO: 30214 - protein, 122 aa, synthetic construct
  REGION 1..122: note = Description of Artificial Sequence: Synthetic polypeptide
QVQLQESGPGLVKPSQTLSLTCTVSGGSISNGGYYWNWIRQHPGKGLEWIGYIYYSGSTYYNPSLKSRVTISVDTSKDQFSLRLSSVTAADTAVYYCARYSTYDYYYGMDVWGQGTTVTVSS

SEQ ID NO: 30215 - DNA, 354 bp, synthetic construct
  misc_feature 1..354: note = Description of Artificial Sequence: Synthetic polynucleotide
  source 1..354: mol_type = other DNA
gaggtgcagctgttggagtctgggggaggcttggtacagcctggggggtccctgagactctcctgtgcagcctctggattcacctttagcagctatgccatgagctgggtccgccaggctccagggaaggggctggagtgggtctcagttattagtggtagtggtggtagcacattctacgcagactccgtgaagggccggttcaccatctccagagacaattccaagaacacgctgtttctgcaaatgaacagcctgagagccgaggacacggccgtatattactgtgcgaaacgaactccggaagatgtttttgatatctggggccaagggacaatggtcaccgtctcttca

SEQ ID NO: 30216 - protein, 118 aa, synthetic construct
  REGION 1..118: note = Description of Artificial Sequence: Synthetic polypeptide
EVQLLESGGGLVQPGGSLRLSCAASGFTFSSYAMSWVRQAPGKGLEWVSVISGSGGSTFYADSVKGRFTISRDNSKNTLFLQMNSLRAEDTAVYYCAKRTPEDVFDIWGQGTMVTVSS

SEQ ID NO: 30217 - DNA, 369 bp, synthetic construct
  misc_feature 1..369: note = Description of Artificial Sequence: Synthetic polynucleotide
  source 1..369: mol_type = other DNA
gaggtgcagctgttggagtctgggggaggcttagtacagcctggggggtccctgagactctcctgtgcagcctctggattcacctttagcagctatgccatgagctgggtccgccaggctccagggaaggggctggagtgggtctcagctattagtggtagtggtggtaacacattctacgcagactccgtgaagggccgcttcaccatctccagagacaattccaagaacacgctgtatctgcacatgaacagcctgagagccgaggacacggccgtttattactgtgcgaaaaaggattatgattacgtttgggggagtccttactttgactactggggccagggaaccctggtcaccgtctcatca

SEQ ID NO: 30218 - protein, 123 aa, synthetic construct
  REGION 1..123: note = Description of Artificial Sequence: Synthetic polypeptide
EVQLLESGGGLVQPGGSLRLSCAASGFTFSSYAMSWVRQAPGKGLEWVSAISGSGGNTFYADSVKGRFTISRDNSKNTLYLHMNSLRAEDTAVYYCAKKDYDYVWGSPYFDYWGQGTLVTVSS

SEQ ID NO: 30219 - DNA, 363 bp, synthetic construct
  misc_feature 1..363: note = Description of Artificial Sequence: Synthetic polynucleotide
  source 1..363: mol_type = other DNA
caggtgcagctgcaggagtcgggcccaggactggtgaagccttcacagaccctgtccctcaattgcactgtctctggtggctccatcagcaacagtggttactactggagctggatccgccagcacccagggaagggcctggaatggattgggtacagctattacagtgggagcacctactacaacccgtccctcaagagtcgaattaccatatcagtagacacgtctaacaaccagttctccctgaagctgagctctgtgactgccgcggacacggccgtgtattactgtgcgagagggggatataactggaaccatgcttttgatatctggggccaagggacaatggtcatcgtctcttca

SEQ ID NO: 30220 - protein, 121 aa, synthetic construct
  REGION 1..121: note = Description of Artificial Sequence: Synthetic polypeptide
QVQLQESGPGLVKPSQTLSLNCTVSGGSISNSGYYWSWIRQHPGKGLEWIGYSYYSGSTYYNPSLKSRITISVDTSNNQFSLKLSSVTAADTAVYYCARGGYNWNHAFDIWGQGTMVIVSS

SEQ ID NO: 30221 - DNA, 369 bp, synthetic construct; identical to SEQ ID NO: 30173
  misc_feature 1..369: note = Description of Artificial Sequence: Synthetic polynucleotide
  source 1..369: mol_type = other DNA

SEQ ID NO: 30222 - protein, 123 aa, synthetic construct; identical to SEQ ID NO: 30174
  REGION 1..123: note = Description of Artificial Sequence: Synthetic polypeptide

SEQ ID NO: 30223 - DNA, 369 bp, synthetic construct
  misc_feature 1..369: note = Description of Artificial Sequence: Synthetic polynucleotide
  source 1..369: mol_type = other DNA
caggtgcagctggtggagtctgggggaggcgtggcccagcctgggaggtccctgagactctcctgtgcagcgtctggattcaccttcagtgactatggcatgcactgggtccgccaggctccaggcaaggggctggagtgggtggcagttatatggtatgatggaagtaataagtactatgcagactccgtgaagggccgactcaccatctccagagacaattccaagaacacgctgtatctgcaaatgaacagcctgagagccgaggacacggctgtgtattactgtgcgagagagaggtatagcagtggctggtacgactacggtatggacgtctggggccaagggaccacggtcaccgtctcctca

SEQ ID NO: 30224 - protein, 123 aa, synthetic construct
  REGION 1..123: note = Description of Artificial Sequence: Synthetic polypeptide
QVQLVESGGGVAQPGRSLRLSCAASGFTFSDYGMHWVRQAPGKGLEWVAVIWYDGSNKYYADSVKGRLTISRDNSKNTLYLQMNSLRAEDTAVYYCARERYSSGWYDYGMDVWGQGTTVTVSS

SEQ ID NO: 30225 - DNA, 369 bp, synthetic construct
  misc_feature 1..369: note = Description of Artificial Sequence: Synthetic polynucleotide
  source 1..369: mol_type = other DNA
gaggtgcagctgttggagtctgggggaggcttggtacagcctggggggtccctgagactctcctgtgcagcctctggattcacctttagcagctatgccatgagctgggtccgccaggctccagggaaggggctggagtgggtctcagctattagtggtcgtggtggtaacacattctacgcagactccgtgaagggccgcttcaccatctccagagacaattccaagaacacgctctatcggcaaatgaacagcctgagagccgaggacacggccgtatattactgtgcgaaaaaggattatgattacgtttgggggagtccttactttgactactggggccagggaaccctggtcaccgtctcctca

SEQ ID NO: 30226 - protein, 123 aa, synthetic construct
  REGION 1..123: note = Description of Artificial Sequence: Synthetic polypeptide
EVQLLESGGGLVQPGGSLRLSCAASGFTFSSYAMSWVRQAPGKGLEWVSAISGRGGNTFYADSVKGRFTISRDNSKNTLYRQMNSLRAEDTAVYYCAKKDYDYVWGSPYFDYWGQGTLVTVSS

SEQ ID NO: 30227 - DNA, 351 bp, synthetic construct
  misc_feature 1..351: note = Description of Artificial Sequence: Synthetic polynucleotide
  source 1..351: mol_type = other DNA
caggtgcagctggtggagtctgggggaggcgtggtccagcctgggaggtccctgagactctcctgtgcagcgtctggattcaccttcagtgactatggcatgcactgggtccgccaggctccaggcaaggggctggagtgggtggcagttatatggtatgaagaaaataataaatactatgcagactccgtgaagggccgattcaccatctccagagacaattccaagaacacgctgtttctgcaaatgaacagcctgagagccgaggacacggctgtgtattactgtgcgagagaaatagggttcagtgaggactactggggccagggaaccctggtcaccgtctcctca

SEQ ID NO: 30228 - protein, 117 aa, synthetic construct
  REGION 1..117: note = Description of Artificial Sequence: Synthetic polypeptide
QVQLVESGGGVVQPGRSLRLSCAASGFTFSDYGMHWVRQAPGKGLEWVAVIWYEENNKYYADSVKGRFTISRDNSKNTLFLQMNSLRAEDTAVYYCAREIGFSEDYWGQGTLVTVSS

SEQ ID NO: 30229 - DNA, 354 bp, synthetic construct
  misc_feature 1..354: note = Description of Artificial Sequence: Synthetic polynucleotide
  source 1..354: mol_type = other DNA
caggtgcagctggtgcaatctggggctgaggtgaagaagcctggggcctcagtgaaggtctcctgcaaggcttctggatacaccttcaccaattatgatatcaactgggtgcgacaggccactggacaagggcttgagtggatgggatggatgcaccctaacagtggtaacacaggctatgcacagaagttccagggcagagtcaccatgaccaggaacacctccataagcacagcctacatggagctgagcagcctgagatctgaggacacggccgtgtattactgtgcttatagcagtggctggtactactttgactactggggccagggaaccctggtcaccgtctcctca

SEQ ID NO: 30230 - protein, 118 aa, synthetic construct
  REGION 1..118: note = Description of Artificial Sequence: Synthetic polypeptide
QVQLVQSGAEVKKPGASVKVSCKASGYTFTNYDINWVRQATGQGLEWMGWMHPNSGNTGYAQKFQGRVTMTRNTSISTAYMELSSLRSEDTAVYYCAYSSGWYYFDYWGQGTLVTVSS

SEQ ID NO: 30231 - DNA, 369 bp, synthetic construct
  misc_feature 1..369: note = Description of Artificial Sequence: Synthetic polynucleotide
  source 1..369: mol_type = other DNA
caggtgcagctggtggagtctgggggaggcgtggtccagcctgggaggtccctgagactctcctgtgcagcgtctggattcaccttcagtagctatgtcatgcactgggtccgccaggctccaggcaaggggctggagtgggtggcagttatatggtatgatggaagtaataaatactatgcagactccgtgaagggccgattcaccatctccagagacaattccaagaacacgctgtatctgcaaatgaacagcctgagagccgaggacacggctgtgtattactgtgcgagagaggagtatagcagcagctggtacgggtacggtatggacgtctggggccaagggaccacggtcaccgtctcctca

SEQ ID NO: 30232 - protein, 123 aa, synthetic construct
  REGION 1..123: note = Description of Artificial Sequence: Synthetic polypeptide
QVQLVESGGGVVQPGRSLRLSCAASGFTFSSYVMHWVRQAPGKGLEWVAVIWYDGSNKYYADSVKGRFTISRDNSKNTLYLQMNSLRAEDTAVYYCAREEYSSSWYGYGMDVWGQGTTVTVSS

SEQ ID NO: 30233 - DNA, 369 bp, synthetic construct
  misc_feature 1..369: note = Description of Artificial Sequence: Synthetic polynucleotide
  source 1..369: mol_type = other DNA
gaggtgcagctgttggagtctgggggaggcttggtacagcctggggggtccctgagactctcctgtgcagcctctggattcacctttagcagctatgccatgagctgggtccgccaggctccagggaaggggctggagtgggtctcagctattagtggtagtggtggtaacacattctacgcagactccgtgaagggccgcttcaccatctccagagacaattccaagaacacgctgtatctgcaaatgaacagcctgagagccgaggacacggccgtatattactgtgcgaaaaaggattatgattacgtttgggggagtccttactttgactactggggccagggaaccctggtcaccgtctcctca

SEQ ID NO: 30234 - protein, 123 aa, synthetic construct
  REGION 1..123: note = Description of Artificial Sequence: Synthetic polypeptide
EVQLLESGGGLVQPGGSLRLSCAASGFTFSSYAMSWVRQAPGKGLEWVSAISGSGGNTFYADSVKGRFTISRDNSKNTLYLQMNSLRAEDTAVYYCAKKDYDYVWGSPYFDYWGQGTLVTVSS

SEQ ID NO: 30235 - DNA, 354 bp, synthetic construct
  misc_feature 1..354: note = Description of Artificial Sequence: Synthetic polynucleotide
  source 1..354: mol_type = other DNA
caggtgcagctggtgcagtctggggctgaggtaaagaagcctggggcctcagtgacggtctcctgcaaggcttctggattccccttcaccaattatgatatcaactgggtgcgacaggccactggacaagggcttgagtggatgggatggatgcaccctaacagtggtaacacaggctatgcacagaagttccagggcagagtcaccatgaccaggaacacctccataagcacagcctacttggagctgagcagcctgagatctgaggacacggccgtgtattactgtgcgagtagcagtggctggtacttttttgactactggggccagggaaccctggtcaccgtctcctca

SEQ ID NO: 30236 - protein, 118 aa, synthetic construct
  REGION 1..118: note = Description of Artificial Sequence: Synthetic polypeptide
QVQLVQSGAEVKKPGASVTVSCKASGFPFTNYDINWVRQATGQGLEWMGWMHPNSGNTGYAQKFQGRVTMTRNTSISTAYLELSSLRSEDTAVYYCASSSGWYFFDYWGQGTLVTVSS

SEQ ID NO: 30237 - DNA, 351 bp, synthetic construct; identical to SEQ ID NO: 30227
  misc_feature 1..351: note = Description of Artificial Sequence: Synthetic polynucleotide
  source 1..351: mol_type = other DNA

SEQ ID NO: 30238 - protein, 117 aa, synthetic construct; identical to SEQ ID NO: 30228
  REGION 1..117: note = Description of Artificial Sequence: Synthetic polypeptide

SEQ ID NO: 30239 - DNA, 351 bp, synthetic construct
  misc_feature 1..351: note = Description of Artificial Sequence: Synthetic polynucleotide
  source 1..351: mol_type = other DNA
gaggtgcagctggtggagtctgggggaggcttggtgcagcctggggggtccctgagactctcctgtgcagcctcgggatttactttcagtacctatagcatgacttgggtccgccaggctccagggaaggggctggactgggtttcatacattagtaggagtagtagtaccatatactacgcagactctgtgaagggccgattctccatctccagagacaatgccaagaactcactgtatctgcaaatgaacagcctgagagacgaggacacggctctgtattactgtgcgagatcggcatttagcccttttgattactggggccagggaaccctggtcaccgtctcctca

SEQ ID NO: 30240 - protein, 117 aa, synthetic construct
  REGION 1..117: note = Description of Artificial Sequence: Synthetic polypeptide
EVQLVESGGGLVQPGGSLRLSCAASGFTFSTYSMTWVRQAPGKGLDWVSYISRSSSTIYYADSVKGRFSISRDNAKNSLYLQMNSLRDEDTALYYCARSAFSPFDYWGQGTLVTVSS

SEQ ID NO: 30241 - DNA, 363 bp, synthetic construct; identical to SEQ ID NO: 30193
  misc_feature 1..363: note = Description of Artificial Sequence: Synthetic polynucleotide
  source 1..363: mol_type = other DNA

SEQ ID NO: 30242 - protein, 121 aa, synthetic construct; identical to SEQ ID NO: 30194
  REGION 1..121: note = Description of Artificial Sequence: Synthetic polypeptide

SEQ ID NO: 30243 - DNA, 366 bp, synthetic construct
  misc_feature 1..366: note = Description of Artificial Sequence: Synthetic polynucleotide
  source 1..366: mol_type = other DNA
gaggtgcagctgttggagtctgggggaggcttggtacagcctggggggtccctgagactctcctgtgcagcctctggattcacctttagcagctatgccatgaactgggtccgccaggctccagggaaggggctggagtgggtctcagctattagtggtagtggtggtaacacattctacgcagactccgtgaagggccggttcaccatctccagagacaattccaagaacacgctgaatctgcaaatgagcagcctgagagccgaggacacggccgtatattactgcgcgaaacgggtgacggactacggtggtaacgactggttcgacccctggggccagggaaccctggtcaccgtctcctca

SEQ ID NO: 30244 - protein, 122 aa, synthetic construct
  REGION 1..122: note = Description of Artificial Sequence: Synthetic polypeptide
EVQLLESGGGLVQPGGSLRLSCAASGFTFSSYAMNWVRQAPGKGLEWVSAISGSGGNTFYADSVKGRFTISRDNSKNTLNLQMSSLRAEDTAVYYCAKRVTDYGGNDWFDPWGQGTLVTVSS

SEQ ID NO: 30245 - DNA, 363 bp, synthetic construct
  misc_feature 1..363: note = Description of Artificial Sequence: Synthetic polynucleotide
  source 1..363: mol_type = other DNA
caggtgcagctggtggagtctgggggaggcgtggtccagcctgggaggtccctgagactctcctgtgcagcgtctggattcaccttcagtagctatggcatgcactgggtccgccaggctccaggcaaggggctggagtgggtggcagttatattctatgatggaagtaataaacactatgcagactccgtgaagggccgattcaccatctccagagacaattccaagaacacgctgtatctgcaaatgaacagcctgagagccgaggactcggctgtgtattactgtacgaggaggtttagcagcagctggtcggggggtatggacgtctggggccaagggaccacggtcaccgtctcctca

SEQ ID NO: 30246 - protein, 121 aa, synthetic construct
  REGION 1..121: note = Description of Artificial Sequence: Synthetic polypeptide
QVQLVESGGGVVQPGRSLRLSCAASGFTFSSYGMHWVRQAPGKGLEWVAVIFYDGSNKHYADSVKGRFTISRDNSKNTLYLQMNSLRAEDSAVYYCTRRFSSSWSGGMDVWGQGTTVTVSS

SEQ ID NO: 30247 - DNA, 366 bp, synthetic construct; identical to SEQ ID NO: 30133
  misc_feature 1..366: note = Description of Artificial Sequence: Synthetic polynucleotide
  source 1..366: mol_type = other DNA

SEQ ID NO: 30248 - protein, 122 aa, synthetic construct; identical to SEQ ID NO: 30134
  REGION 1..122: note = Description of Artificial Sequence: Synthetic polypeptide

SEQ ID NO: 30249 - DNA, 345 bp, synthetic construct
  misc_feature 1..345: note = Description of Artificial Sequence: Synthetic polynucleotide
  source 1..345: mol_type = other DNA
gaggtgcagctggtggagtctgggggaggcctggtcaagcctggggggtccctgagactctcctgtgcagcctctggatacaccttcaggagctttagcatgaactgggtccgccaggctccagggaaggggctggagtgggtctcatccattagtagtagtagttattacatatactacgcagactcagtgaagggccgattcaccatctccagagacaacgccaagaactcactgtatctgcaaatgaacagcctgagagccgaagacacggctgtgtattactgtgcgagagatacaccactggtttactggggccagggaaccctggtcaccgtctcctca

SEQ ID NO: 30250 - protein, 115 aa, synthetic construct
  REGION 1..115: note = Description of Artificial Sequence: Synthetic polypeptide
EVQLVESGGGLVKPGGSLRLSCAASGYTFRSFSMNWVRQAPGKGLEWVSSISSSSYYIYYADSVKGRFTISRDNAKNSLYLQMNSLRAEDTAVYYCARDTPLVYWGQGTLVTVSS

SEQ ID NO: 30251 - DNA, 363 bp, synthetic construct
  misc_feature 1..363: note = Description of Artificial Sequence: Synthetic polynucleotide
  source 1..363: mol_type = other DNA
caggtgcagctgatggagtctgggggaggcgtggtccagcctgggaggtccctgagactctcctgtgcagcgtctggattcatcttcagtagctatggcatgcactgggtccgccaggctccaggcaaggggctggagtgggtggcaattatatggtatgatggaagtaataaatactatgcagactccgtgaagggccgattcaccatctccagagacaattccaagaacacgctgtatctgcaaatgaacagcctgagagccgaggacacggctgtgtattactgtgcgagagatcgatacgatttttggagtggtcactttgactactggggccagggaaccctggtcaccgtctcctca

SEQ ID NO: 30252 - protein, 121 aa, synthetic construct
  REGION 1..121: note = Description of Artificial Sequence: Synthetic polypeptide
QVQLMESGGGVVQPGRSLRLSCAASGFIFSSYGMHWVRQAPGKGLEWVAIIWYDGSNKYYADSVKGRFTISRDNSKNTLYLQMNSLRAEDTAVYYCARDRYDFWSGHFDYWGQGTLVTVSS

SEQ ID NO: 30253 - DNA, 366 bp, synthetic construct
  misc_feature 1..366: note = Description of Artificial Sequence: Synthetic polynucleotide
  source 1..366: mol_type = other DNA
gaggtgcagctgttggagtctgggggaggcttggtacagcctggggggtccctgagactctcctgtgcagcctctggattcacctttagcagctatgccatgaactgggtccgccacgctccagggaaggggctggagtgggtctcagctattagtggtagtggtaaaaacacattctacgcagactccgtgaagggccggttcaccatctccagagacaattccaagaacacgctgtatctgcaaatgaacagcctgagagccgaggacacggccgtatattactgtgcgaaacgggtgacggactacggtggtaacgactggttcgacccctggggccagggaaccctggtcaccgtctcctca

SEQ ID NO: 30254 - protein, 122 aa, synthetic construct
  REGION 1..122: note = Description of Artificial Sequence: Synthetic polypeptide
EVQLLESGGGLVQPGGSLRLSCAASGFTFSSYAMNWVRHAPGKGLEWVSAISGSGKNTFYADSVKGRFTISRDNSKNTLYLQMNSLRAEDTAVYYCAKRVTDYGGNDWFDPWGQGTLVTVSS

SEQ ID NO: 30255 - DNA, 375 bp, synthetic construct
  misc_feature 1..375: note = Description of Artificial Sequence: Synthetic polynucleotide
  source 1..375: mol_type = other DNA
caggtgcagctggtggagtctgggggaggcgtggtccagcctgggaggtccctgagactctcctgtgcagcctctggattcaccttcagtagctatggcatgcactgggtccgccaggctccaggcaaggggctggagtgggtggcagttatatcatatgatggaagtaataaatactatgcagactccgtgaagggccgattcaccatctccagagacaattccaagaacacgctgtatctgcaaatgaacagcctgagagccgaggacacggctgtgtattactgtgcgagaggggtattactatggttcggggagctagaagatgactggttcgacccctggggccagggaaccctggtcaccgtctcctca

SEQ ID NO: 30256 - protein, 125 aa, synthetic construct
  REGION 1..125: note = Description of Artificial Sequence: Synthetic polypeptide
QVQLVESGGGVVQPGRSLRLSCAASGFTFSSYGMHWVRQAPGKGLEWVAVISYDGSNKYYADSVKGRFTISRDNSKNTLYLQMNSLRAEDTAVYYCARGVLLWFGELEDDWFDPWGQGTLVTVSS

SEQ ID NO: 30257 - DNA, 363 bp, synthetic construct
  misc_feature 1..363: note = Description of Artificial Sequence: Synthetic polynucleotide
  source 1..363: mol_type = other DNA
caggtgcagctggtggagtctgggggaggcgtggtccagcctgggaggtccctgagactctcctgtgcagcgtctggattcaccttcagtaactatggcatgcactgggtccgccaggctccaggcaaggggctggagtggttggcaattatatggtatgatggaagtaataaatactatgcagactccgtgaagggccgattcaccatctccagagacaattccaagaacacgctgtatctacaaatgaacagcctgagagccgaggacacggctgtgtattactgtgcgagagatcattacgatttttggagtggtcactttgactactggggccagggaaccctggtcaccgtctcctca

SEQ ID NO: 30258 - protein, 121 aa, synthetic construct
  REGION 1..121: note = Description of Artificial Sequence: Synthetic polypeptide
QVQLVESGGGVVQPGRSLRLSCAASGFTFSNYGMHWVRQAPGKGLEWLAIIWYDGSNKYYADSVKGRFTISRDNSKNTLYLQMNSLRAEDTAVYYCARDHYDFWSGHFDYWGQGTLVTVSS

SEQ ID NO: 30259 - DNA, 366 bp, synthetic construct; identical to SEQ ID NO: 30145
  misc_feature 1..366: note = Description of Artificial Sequence: Synthetic polynucleotide
  source 1..366: mol_type = other DNA

SEQ ID NO: 30260 - protein, 122 aa, synthetic construct; identical to SEQ ID NO: 30146
  REGION 1..122: note = Description of Artificial Sequence: Synthetic polypeptide

SEQ ID NO: 30261 - DNA, 354 bp, synthetic construct; identical to SEQ ID NO: 30147
  misc_feature 1..354: note = Description of Artificial Sequence: Synthetic polynucleotide
  source 1..354: mol_type = other DNA

SEQ ID NO: 30262 - protein, 118 aa, synthetic construct; identical to SEQ ID NO: 30148
  REGION 1..118: note = Description of Artificial Sequence: Synthetic polypeptide

SEQ ID NO: 30263 - DNA, 354 bp, synthetic construct
  misc_feature 1..354: note = Description of Artificial Sequence: Synthetic polynucleotide
  source 1..354: mol_type = other DNA
caggtgcagctggtgcagtctggggctgaggtgaagaagcctggggcctcagtgaaggtctcctgcaaggcttctggatacaccttccccaattatgatatcaactgggtgcgacaggccactggacaaggccttgagtggatgggatggatgcaccctaacagtggtaacacaggctatgcacagaagttccagggcagagtcaccatgaccaggaacacctccataagcacagcctacatggagctgagcagcctgagatctgaggacacggccgtgtattactgtgcatatagcagtggctggtactggtttgactactggggccagggaaccctggtcaccgtctcctca

SEQ ID NO: 30264 - protein, 118 aa, synthetic construct
  REGION 1..118: note = Description of Artificial Sequence: Synthetic polypeptide
QVQLVQSGAEVKKPGASVKVSCKASGYTFPNYDINWVRQATGQGLEWMGWMHPNSGNTGYAQKFQGRVTMTRNTSISTAYMELSSLRSEDTAVYYCAYSSGWYWFDYWGQGTLVTVSS

SEQ ID NO: 30265 - DNA, 354 bp, synthetic construct
  misc_feature 1..354: note = Description of Artificial Sequence: Synthetic polynucleotide
  source 1..354: mol_type = other DNA
caggtgcagctggtgcagtctggggctgaggtgaagaagcctggggcctcagtgaaggtctcctgcaaggcttctggatacaccttcaccaattatgatatcaactgggtgcgacaggccactggacaagggcttgagtggatgggatggatgcaccctaacagtggtaacacaggctatgcacagaagttccagggcagagtcaccatgaccaggaacacctccataagcacagcctacatggagctgagcagcctgagatctgacgacacggccgtgtattactgtgcgtatagcagtggctggtactggttcgacccctggggccagggaaccctggtcaccgtctcctca

SEQ ID NO: 30266 - protein, 118 aa, synthetic construct
  REGION 1..118: note = Description of Artificial Sequence: Synthetic polypeptide
QVQLVQSGAEVKKPGASVKVSCKASGYTFTNYDINWVRQATGQGLEWMGWMHPNSGNTGYAQKFQGRVTMTRNTSISTAYMELSSLRSDDTAVYYCAYSSGWYWFDPWGQGTLVTVSS

SEQ ID NO: 30267 - DNA, 366 bp, synthetic construct; identical to SEQ ID NO: 30133
  misc_feature 1..366: note = Description of Artificial Sequence: Synthetic polynucleotide
  source 1..366: mol_type = other DNA

SEQ ID NO: 30268 - protein, 122 aa, synthetic construct; identical to SEQ ID NO: 30134
  REGION 1..122: note = Description of Artificial Sequence: Synthetic polypeptide

SEQ ID NO: 30269 - DNA, 363 bp, synthetic construct
  misc_feature 1..363: note = Description of Artificial Sequence: Synthetic polynucleotide
  source 1..363: mol_type = other DNA
caggtgcagctggtggagtctgggggaggcgtggtccagcctgggaggtccctgagactctcctgtgcagcgtctggattcaccttcagtagctatggcatgcactgggtccgccaggctccaggcaaggggctggagtgggtggcaattatatggtatgatggaagttataaatactatgcagactccgtgaagggccgattcaccatctccagagacaattccaagaatacgctgtatctgcaaatgaacagcctgagagccgaggacacggctgtgtattactgtgcgagagaggggtacgatttttggagtggttaccttggctactggggccagggaaccctggtcaccgtctcctca

SEQ ID NO: 30270 - protein, 121 aa, synthetic construct
  REGION 1..121: note = Description of Artificial Sequence: Synthetic polypeptide
QVQLVESGGGVVQPGRSLRLSCAASGFTFSSYGMHWVRQAPGKGLEWVAIIWYDGSYKYYADSVKGRFTISRDNSKNTLYLQMNSLRAEDTAVYYCAREGYDFWSGYLGYWGQGTLVTVSS

SEQ ID NO: 30271 - DNA, 363 bp, synthetic construct
  misc_feature 1..363: note = Description of Artificial Sequence: Synthetic polynucleotide
  source 1..363: mol_type = other DNA
caggtgcagctgcaggagtcgggcccaggactggtgaagccttcacagaccctgtccctcaattgcactgtctctggtggctccatcagcaacagtggttactactggagctggatccgccagcacccaggcaagggcctggaatggattgggtacagttattacagtgggagcacctactacaacccgtccctcaagagtcgaattaccatatcagtagacacgtctaacaaccagttctccctgaacctgagctctgtgactgccgcggacacggccgtgtattactgtgcgagagggggatataactggaaccatgcttttgatatctggggccaagggacaatggtcaccgtctcttca

SEQ ID NO: 30272 - protein, 121 aa, synthetic construct
  REGION 1..121: note = Description of Artificial Sequence: Synthetic polypeptide
QVQLQESGPGLVKPSQTLSLNCTVSGGSISNSGYYWSWIRQHPGKGLEWIGYSYYSGSTYYNPSLKSRITISVDTSNNQFSLNLSSVTAADTAVYYCARGGYNWNHAFDIWGQGTMVTVSS

SEQ ID NO: 30273 - DNA, 369 bp, synthetic construct
  misc_feature 1..369: note = Description of Artificial Sequence: Synthetic polynucleotide
  source 1..369: mol_type = other DNA
caggtgcagctggtggagtctgggggaggcgtggtccagcctgggaggtccctgagactctcctgtgcagcgtctggattcaccttcagtagctatatcatgcactgggtccgccaggctccaggcaaggggctggagtgggtggcagttatatggtatgatggaagtaataaatactatgcagactccgtgaagggccgattcaccatctccagagacaattccaagaacacgctgtatctgcaaatgaacagcctgagagccgaggacacggctgtgtattactgtgcgagagaggagtatagcagcagctggtacgggtacggtatggacgtctggggccaagggaccacggtcaccgtctcctca

SEQ ID NO: 30274 - protein, 123 aa, synthetic construct
  REGION 1..123: note = Description of Artificial Sequence: Synthetic polypeptide
QVQLVESGGGVVQPGRSLRLSCAASGFTFSSYIMHWVRQAPGKGLEWVAVIWYDGSNKYYADSVKGRFTISRDNSKNTLYLQMNSLRAEDTAVYYCAREEYSSSWYGYGMDVWGQGTTVTVSS

SEQ ID NO: 30275 - DNA, 369 bp, synthetic construct; identical to SEQ ID NO: 30141
  misc_feature 1..369: note = Description of Artificial Sequence: Synthetic polynucleotide
  source 1..369: mol_type = other DNA

SEQ ID NO: 30276 - protein, 123 aa, synthetic construct; identical to SEQ ID NO: 30142
  REGION 1..123: note = Description of Artificial Sequence: Synthetic polypeptide

SEQ ID NO: 30277 - DNA, 357 bp, synthetic construct
  misc_feature 1..357: note = Description of Artificial Sequence: Synthetic polynucleotide
  source 1..357: mol_type = other DNA
cagctgcagctgcaggagtcgggcccaggactggtgaagccttcggagaccctgtccctcacctgcactgtctctggtggctccatcagcagaagtagttactactggggctggatccgccagcccccagggaaggggctggagtggattgggagtatctattatagtgggagcgcctcctacaacccgtccctcaagagtcgagtcaccatatccgtagacacgtccaagaaccagttctccctgaagctgagctctgtgaccgccgcagacacggctgtgttttactgtgcgagacttgatctccagtggagttttgacttctggggccagggaaccctggtcaccgtctcctca

SEQ ID NO: 30278 - protein, 119 aa, synthetic construct
  REGION 1..119: note = Description of Artificial Sequence: Synthetic polypeptide
QLQLQESGPGLVKPSETLSLTCTVSGGSISRSSYYWGWIRQPPGKGLEWIGSIYYSGSASYNPSLKSRVTISVDTSKNQFSLKLSSVTAADTAVFYCARLDLQWSFDFWGQGTLVTVSS

SEQ ID NO: 30279 - DNA, 357 bp, synthetic construct
  misc_feature 1..357: note = Description of Artificial Sequence: Synthetic polynucleotide
  source 1..357: mol_type = other DNA
caggtgcagctgcaggagtcgggcccaggactggtgaagccttcggagaccctgtccctcacctgcactgtctctggtggctccatcagtaattactactggagctggatccggcagcccgccgggaagggactggagtggattgggcgtatcgataccagtgggatcaccaactacaacccctccctcaagagtcgagtcaccatgtcagtcgacacgtccaagaaccagttctccctgaagctgacctctgtgaccgccgcggacacggccgtgtattactgtgcgagagaggggggattgggagctaccttctttgactactggggccagggaaccctggtcaccgtctcctca

SEQ ID NO: 30280 - protein, 119 aa, synthetic construct
  REGION 1..119: note = Description of Artificial Sequence: Synthetic polypeptide
QVQLQESGPGLVKPSETLSLTCTVSGGSISNYYWSWIRQPAGKGLEWIGRIDTSGITNYNPSLKSRVTMSVDTSKNQFSLKLTSVTAADTAVYYCAREGGLGATFFDYWGQGTLVTVSS

SEQ ID NO: 30281 - DNA, 369 bp, synthetic construct; identical to SEQ ID NO: 30173
  misc_feature 1..369: note = Description of Artificial Sequence: Synthetic polynucleotide
  source 1..369: mol_type = other DNA

SEQ ID NO: 30282 - protein, 123 aa, synthetic construct; identical to SEQ ID NO: 30174
  REGION 1..123: note = Description of Artificial Sequence: Synthetic polypeptide

SEQ ID NO: 30283 - DNA, 366 bp, synthetic construct
  misc_feature 1..366: note = Description of Artificial Sequence: Synthetic polynucleotide
  source 1..366: mol_type = other DNA
gaggtgcagctgttggagtctgggggaggcttggtacagcctggggggtccctgagactctcctgtgcagcctctggattcacctttagcagctatgccatgaactgggtccgccaggctccagggaaggggctggagtgggtctcagctattagtggtcgtggtggtaacacattctacgcagactccgtgaagggccggttcaccatctccagagacaattccaagaacacactatatctgcaaatgaacagcctgagagccgaggacacggccgtatattactgtgcgaaacgggtgacggactacggtggtaacgactggttcgacccctggggccagggaaccctggtcaccgtctcctca

SEQ ID NO: 30284 - protein, 122 aa, synthetic construct
  REGION 1..122: note = Description of Artificial Sequence: Synthetic polypeptide
EVQLLESGGGLVQPGGSLRLSCAASGFTFSSYAMNWVRQAPGKGLEWVSAISGRGGNTFYADSVKGRFTISRDNSKNTLYLQMNSLRAEDTAVYYCAKRVTDYGGNDWFDPWGQGTLVTVSS

SEQ ID NO: 30285 - DNA, 363 bp, synthetic construct
  misc_feature 1..363: note = Description of Artificial Sequence: Synthetic polynucleotide
  source 1..363: mol_type = other DNA
caggtacaactggtggagtctgggggaggcgtggtccagcctgggaggtccctgagactctcctgtgcagcgtctggattcaccttccgtaactatggcatgcactgggtccgccaggctccaggcaaggggctggagtgggtggcaattatatggtatgatggaagtaataaatactatgcagactccgtgaagggccgattcaccatctccagagacaattccaagaacacgctgtatctgcaaatgaacagcctgagagccgaggacacggctgtgtattactgtgcgagagaggcttacgatttttggagtggttattttgactactggggccagggaattctggtcaccgtctcctca

SEQ ID NO: 30286 - protein, 121 aa, synthetic construct
  REGION 1..121: note = Description of Artificial Sequence: Synthetic polypeptide
QVQLVESGGGVVQPGRSLRLSCAASGFTFRNYGMHWVRQAPGKGLEWVAIIWYDGSNKYYADSVKGRFTISRDNSKNTLYLQMNSLRAEDTAVYYCAREAYDFWSGYFDYWGQGILVTVSS

SEQ ID NO: 30287 - DNA, 354 bp, synthetic construct
  misc_feature 1..354: note = Description of Artificial Sequence: Synthetic polynucleotide
  source 1..354: mol_type = other DNA
caggtgcagctggtgcagtctggggctgaggtgaagaagcctggggcctcagtgaaggtctcctgcaaggcttctggatacaccttcaccaattatgatatcaactgggtgcgacaggccactggacaagggcttgagtggatgggatggatgaaccctaacagtggtaacacaggctatgcacagaagttccagggcagagtcaccatgaccaggaacacctccataagcacagcctacatggagctgagcagcctgagatctgaggacacggccgtgtattactgtgcttatagcagtggctggtactactttgactactggggccagggaaccctggtcaccgtctcctca

SEQ ID NO: 30288 - protein, 118 aa, synthetic construct; identical to SEQ ID NO: 30000
  REGION 1..118: note = Description of Artificial Sequence: Synthetic polypeptide

SEQ ID NO: 30289 - DNA, 345 bp, synthetic construct
  misc_feature 1..345: note = Description of Artificial Sequence: Synthetic polynucleotide
  source 1..345: mol_type = other DNA
gaggtgcagctgttggagtctgggggaggcctggtacagcctggggggtccctgagactctcctgtgcagcctctggattcagctttagcagctatgtcatgagttgggtccgccagggtccagggaaggggctggagtgggtctcagctattagtggaagtggtgatagaacatactacgcagactccgtgaagggccggttcaccatctccagagacaattccaagaacacgctgtacctgcaaatgaacagcctgagagccgaggacacggccgtatattactgtgcgcgtacggcgactaaggactactggggccagggaaccctggtcaccgtctcctca

SEQ ID NO: 30290 - protein, 115 aa, synthetic construct
  REGION 1..115: note = Description of Artificial Sequence: Synthetic polypeptide
EVQLLESGGGLVQPGGSLRLSCAASGFSFSSYVMSWVRQGPGKGLEWVSAISGSGDRTYYADSVKGRFTISRDNSKNTLYLQMNSLRAEDTAVYYCARTATKDYWGQGTLVTVSS

SEQ ID NO: 30291 - DNA, 363 bp, synthetic construct
  misc_feature 1..363: note = Description of Artificial Sequence: Synthetic polynucleotide
  source 1..363: mol_type = other DNA
caggtgcagctggtggagtctgggggaggcgtggtccagcctgggaggtccctgagactctcctgtgcagcgtctggattcaccttcagtagctatggcatgcactgggtccgccaggctccaggcaaggggctggagtgggtggcaattatatggtatgatggaagttataaatactatgcagactccgtgaagggccgattcaccatctccagagacaattccaagaacacggtgtatctgcaaatgaacagcctgagagccgaggacacggctgtatattactgtgcgagagaggggtacgatttttggagtggttaccttggctactggggccagggaaccctggtcaccgtctcctca

SEQ ID NO: 30292 - protein, 121 aa, synthetic construct
  REGION 1..121: note = Description of Artificial Sequence: Synthetic polypeptide
QVQLVESGGGVVQPGRSLRLSCAASGFTFSSYGMHWVRQAPGKGLEWVAIIWYDGSYKYYADSVKGRFTISRDNSKNTVYLQMNSLRAEDTAVYYCAREGYDFWSGYLGYWGQGTLVTVSS

SEQ ID NO: 30293 - DNA, 363 bp, synthetic construct
  misc_feature 1..363: note = Description of Artificial Sequence: Synthetic polynucleotide
  source 1..363: mol_type = other DNA
caggtgcagctgcaggagtcgggcccaggactggtgaagccttcacagaccctgtccctcaattgcactgtctctggtggctccatcagcaacagtggttactactggagctggatccgccagcacccaggcaagggcctggaatggattgggtacagctattacagtgggagcacctactacaacccgtccctcaagagtcgaattaccatatcagtagacacgtctaacaaccagttctccctgaacctgagctctgtgactgccgcggacacggccgtgtattactgtgcgagagggggatataactggaaccatgcttttgatatctggggccaagggacaatggtcaccgtctcttca
